United States Patent Application Publication US 2007/0048756 A1 - sequence listing, part 24

SEQ ID NO: 836062 - DNA, 33 bp, Homo sapien
atggggatacataatatatgaaggttaatatgt

SEQ ID NO: 836063 - DNA, 33 bp, Homo sapien
tggcaatttaccaatcaatggtcttaagcaatt

SEQ ID NO: 836064 - DNA, 33 bp, Homo sapien
tggcaatttaccaatcgatggtcttaagcaatt

SEQ ID NO: 836065 - DNA, 33 bp, Homo sapien
gagccgaacttcaatagctgatttggacaggag

SEQ ID NO: 836066 - DNA, 33 bp, Homo sapien
gagccgaacttcaatatctgatttggacaggag

SEQ ID NO: 836067 - DNA, 33 bp, Homo sapien
tcatatgaaattcctaacttgctccgggtctca

SEQ ID NO: 836068 - DNA, 33 bp, Homo sapien
tcatatgaaattcctagcttgctccgggtctca

SEQ ID NO: 836069 - DNA, 33 bp, Homo sapien
agcaacaaaatgatacccacacaaagcaaactg

SEQ ID NO: 836070 - DNA, 33 bp, Homo sapien
agcaacaaaatgatacgcacacaaagcaaactg

SEQ ID NO: 836071 - DNA, 33 bp, Homo sapien
cccttacgtgcttcagcatttgataccagccct

SEQ ID NO: 836072 - DNA, 33 bp, Homo sapien
cccttacgtgcttcagtatttgataccagccct

SEQ ID NO: 836073 - DNA, 33 bp, Homo sapien
tgttcaggacagaagcaatttctgtggtccaag

SEQ ID NO: 836074 - DNA, 33 bp, Homo sapien
tgttcaggacagaagcgatttctgtggtccaag

SEQ ID NO: 836075 - DNA, 33 bp, Homo sapien
cagtttctctaacaagccccgatccctctggcc

SEQ ID NO: 836076 - DNA, 33 bp, Homo sapien
cagtttctctaacaagtcccgatccctctggcc

SEQ ID NO: 836077 - DNA, 33 bp, Homo sapien
agctggtgatgttaaaacagcaaattttattga

SEQ ID NO: 836078 - DNA, 33 bp, Homo sapien
agctggtgatgttaaaccagcaaattttattga

SEQ ID NO: 836079 - DNA, 33 bp, Homo sapien
tttttagggccacaaaaggaacattttgagagt

SEQ ID NO: 836080 - DNA, 33 bp, Homo sapien
tttttagggccacaaagggaacattttgagagt

SEQ ID NO: 836081 - DNA, 33 bp, Homo sapien
tccacagctcatgagacgtggaagcaggattca

SEQ ID NO: 836082 - DNA, 33 bp, Homo sapien
tccacagctcatgagatgtggaagcaggattca

SEQ ID NO: 836083 - DNA, 33 bp, Homo sapien
agtcgttcaccattaaataggatggtagctgtg

SEQ ID NO: 836084 - DNA, 33 bp, Homo sapien
agtcgttcaccattaagtaggatggtagctgtg

SEQ ID NO: 836085 - DNA, 33 bp, Homo sapien
gggattaaaggcctgacatttagatatgattct

SEQ ID NO: 836086 - DNA, 33 bp, Homo sapien
gggattaaaggcctgatatttagatatgattct

SEQ ID NO: 836087 - DNA, 33 bp, Homo sapien
atacatgacagaggcaagattttaattcagagg

SEQ ID NO: 836088 - DNA, 33 bp, Homo sapien
atacatgacagaggcaggattttaattcagagg

SEQ ID NO: 836089 - DNA, 33 bp, Homo sapien
ctggtgatacatgagacgccgaaagctgactta

SEQ ID NO: 836090 - DNA, 33 bp, Homo sapien
ctggtgatacatgagatgccgaaagctgactta

SEQ ID NO: 836091 - DNA, 33 bp, Homo sapien
ctttgggaagcttgaacagattttgggtgccca

SEQ ID NO: 836092 - DNA, 33 bp, Homo sapien
ctttgggaagcttgaagagattttgggtgccca

SEQ ID NO: 836093 - DNA, 33 bp, Homo sapien
agtcaattataaatggacaaggatatgaataga

SEQ ID NO: 836094 - DNA, 33 bp, Homo sapien
agtcaattataaatgggcaaggatatgaataga

SEQ ID NO: 836095 - DNA, 33 bp, Homo sapien
ttgctgggtcatgtgaaatctctatgtttcact

SEQ ID NO: 836096 - DNA, 33 bp, Homo sapien
ttgctgggtcatgtgacatctctatgtttcact

SEQ ID NO: 836097 - DNA, 33 bp, Homo sapien
cagtgggagagagacacaaactacaattcaaca

SEQ ID NO: 836098 - DNA, 33 bp, Homo sapien
cagtgggagagagacataaactacaattcaaca

SEQ ID NO: 836099 - DNA, 33 bp, Homo sapien
tcctaagacacttgacactaagacatcatcaat

SEQ ID NO: 836100 - DNA, 33 bp, Homo sapien
tcctaagacacttgacgctaagacatcatcaat

SEQ ID NO: 836101 - DNA, 33 bp, Homo sapien
catgggagttcatacacatattcctcattcttt

SEQ ID NO: 836102 - DNA, 33 bp, Homo sapien
catgggagttcatacagatattcctcattcttt

SEQ ID NO: 836103 - DNA, 33 bp, Homo sapien
tgtgtaggaggtgggaagtgaaaatgaagtagg

SEQ ID NO: 836104 - DNA, 33 bp, Homo sapien
tgtgtaggaggtgggaggtgaaaatgaagtagg

SEQ ID NO: 836105 - DNA, 33 bp, Homo sapien
aaagaaaaaacagagaagctgcctaaaatatgt

SEQ ID NO: 836106 - DNA, 33 bp, Homo sapien
aaagaaaaaacagagatgctgcctaaaatatgt

SEQ ID NO: 836107 - DNA, 33 bp, Homo sapien
acatttaagtgtaaacaatgccacagctaacac

SEQ ID NO: 836108 - DNA, 33 bp, Homo sapien
acatttaagtgtaaaccatgccacagctaacac

SEQ ID NO: 836109 - DNA, 33 bp, Homo sapien
agttgcactaacttcacgttttagttattctta

SEQ ID NO: 836110 - DNA, 33 bp, Homo sapien
agttgcactaacttcaggttttagttattctta

SEQ ID NO: 836111 - DNA, 33 bp, Homo sapien
gatggagagttgaaataaaaaatgtaagaggga

SEQ ID NO: 836112 - DNA, 33 bp, Homo sapien
gatggagagttgaaatcaaaaatgtaagaggga

SEQ ID NO: 836113 - DNA, 33 bp, Homo sapien
cggtgtgtcatgttcccgaaatctttattaagg

SEQ ID NO: 836114 - DNA, 33 bp, Homo sapien
cggtgtgtcatgttcctgaaatctttattaagg

SEQ ID NO: 836115 - DNA, 33 bp, Homo sapien
gtcagtttcatctcagccaattcatgaagagag

SEQ ID NO: 836116 - DNA, 33 bp, Homo sapien
gtcagtttcatctcagtcaattcatgaagagag

SEQ ID NO: 836117 - DNA, 33 bp, Homo sapien
cctcttctgccaccaaatctacaggcatctgca

SEQ ID NO: 836118 - DNA, 33 bp, Homo sapien
cctcttctgccaccaagtctacaggcatctgca

SEQ ID NO: 836119 - DNA, 33 bp, Homo sapien
cttggctgtgaaagaaatggtgaatggcagtag

SEQ ID NO: 836120 - DNA, 33 bp, Homo sapien
cttggctgtgaaagaagtggtgaatggcagtag

SEQ ID NO: 836121 - DNA, 33 bp, Homo sapien
ccatctcttatttctacaccttccatgtgtctc

SEQ ID NO: 836122 - DNA, 33 bp, Homo sapien
ccatctcttatttctataccttccatgtgtctc

SEQ ID NO: 836123 - DNA, 33 bp, Homo sapien
atttgtctgttgtctcaaagcccattttcccta

SEQ ID NO: 836124 - DNA, 33 bp, Homo sapien
atttgtctgttgtctcgaagcccattttcccta

SEQ ID NO: 836125 - DNA, 33 bp, Homo sapien
ttatttctgttgtgtacggtatgaaagtatgtg

SEQ ID NO: 836126 - DNA, 33 bp, Homo sapien
ttatttctgttgtgtatggtatgaaagtatgtg

SEQ ID NO: 836127 - DNA, 33 bp, Homo sapien
agcatgcctggcgctaaggctcattcctgtaat

SEQ ID NO: 836128 - DNA, 33 bp, Homo sapien
agcatgcctggcgctatggctcattcctgtaat

SEQ ID NO: 836129 - DNA, 33 bp, Homo sapien
agtaacatggtcagaggctagtgagaaacgtct

SEQ ID NO: 836130 - DNA, 33 bp, Homo sapien
agtaacatggtcagagtctagtgagaaacgtct

SEQ ID NO: 836131 - DNA, 33 bp, Homo sapien
tctgcagttggttgcacgaacctgaagatacag

SEQ ID NO: 836132 - DNA, 33 bp, Homo sapien
tctgcagttggttgcaggaacctgaagatacag

SEQ ID NO: 836133 - DNA, 33 bp, Homo sapien
tgagccgagacctcgccgatgcactccagcctg

SEQ ID NO: 836134 - DNA, 33 bp, Homo sapien
tgagccgagacctcgctgatgcactccagcctg

SEQ ID NO: 836135 - DNA, 33 bp, Homo sapien
ctctacctctagtaacaaaaacattctgaacct

SEQ ID NO: 836136 - DNA, 33 bp, Homo sapien
ctctacctctagtaacgaaaacattctgaacct

SEQ ID NO: 836137 - DNA, 33 bp, Homo sapien
cacctaagtgtctgtgcaatttaacatcaaatt

SEQ ID NO: 836138 - DNA, 33 bp, Homo sapien
cacctaagtgtctgtggaatttaacatcaaatt

SEQ ID NO: 836139 - DNA, 33 bp, Homo sapien
cttgaaggcctagttaaattacgagttccctat

SEQ ID NO: 836140 - DNA, 33 bp, Homo sapien
cttgaaggcctagttacattacgagttccctat

SEQ ID NO: 836141 - DNA, 33 bp, Homo sapien
aatggccagtgggtgtcaagatcacagtgtggg

SEQ ID NO: 836142 - DNA, 33 bp, Homo sapien
aatggccagtgggtgtgaagatcacagtgtggg

SEQ ID NO: 836143 - DNA, 33 bp, Homo sapien
aaaatgtcttagcaaacactttatggagcccca

SEQ ID NO: 836144 - DNA, 33 bp, Homo sapien
aaaatgtcttagcaaatactttatggagcccca

SEQ ID NO: 836145 - DNA, 33 bp, Homo sapien
gtgtccatcacagagcaatcaactggggccctg

SEQ ID NO: 836146 - DNA, 33 bp, Homo sapien
gtgtccatcacagagcgatcaactggggccctg

SEQ ID NO: 836147 - DNA, 33 bp, Homo sapien
gcatggctcttagaaacaaaatcacacagaaac

SEQ ID NO: 836148 - DNA, 33 bp, Homo sapien
gcatggctcttagaaataaaatcacacagaaac

SEQ ID NO: 836149 - DNA, 33 bp, Homo sapien
aaagatataatacaggcagcatagcgtagtagt

SEQ ID NO: 836150 - DNA, 33 bp, Homo sapien
aaagatataatacaggtagcatagcgtagtagt

SEQ ID NO: 836151 - DNA, 33 bp, Homo sapien
tcctcctctgaaacaacccttttcatgatatta

SEQ ID NO: 836152 - DNA, 33 bp, Homo sapien
tcctcctctgaaacaatccttttcatgatatta

SEQ ID NO: 836153 - DNA, 33 bp, Homo sapien
ggcctccagcctccatcagttcccggttcttct

SEQ ID NO: 836154 - DNA, 33 bp, Homo sapien
ggcctccagcctccattagttcccggttcttct

SEQ ID NO: 836155 - DNA, 33 bp, Homo sapien
gagttttgcttgaaggaagtttattggggagtg

SEQ ID NO: 836156 - DNA, 33 bp, Homo sapien
gagttttgcttgaagggagtttattggggagtg

SEQ ID NO: 836157 - DNA, 33 bp, Homo sapien
gtaggtttcccagaaaacacattctgacataga

SEQ ID NO: 836158 - DNA, 33 bp, Homo sapien
gtaggtttcccagaaatcacattctgacataga

SEQ ID NO: 836159 - DNA, 33 bp, Homo sapien
tgaatattagttatgaggataattgctgtacaa

SEQ ID NO: 836160 - DNA, 33 bp, Homo sapien
tgaatattagttatgatgataattgctgtacaa

SEQ ID NO: 836161 - DNA, 33 bp, Homo sapien
tttccaatgttgttaacatcagccagctggcaa

SEQ ID NO: 836162 - DNA, 33 bp, Homo sapien
tttccaatgttgttaatatcagccagctggcaa

SEQ ID NO: 836163 - DNA, 33 bp, Homo sapien
tttttgtcattttggaaccacagaaataaagga

SEQ ID NO: 836164 - DNA, 33 bp, Homo sapien
tttttgtcattttggagccacagaaataaagga

SEQ ID NO: 836165 - DNA, 33 bp, Homo sapien
acctgaacagaagaaacccctgtggttgcagca

SEQ ID NO: 836166 - DNA, 33 bp, Homo sapien
acctgaacagaagaaatccctgtggttgcagca

SEQ ID NO: 836167 - DNA, 33 bp, Homo sapien
ctttctatacaaaaacaggcagctggtgcatgg

SEQ ID NO: 836168 - DNA, 33 bp, Homo sapien
ctttctatacaaaaacgggcagctggtgcatgg

SEQ ID NO: 836169 - DNA, 33 bp, Homo sapien
gtgaagcttcaagagacactaaaggcacagcct

SEQ ID NO: 836170 - DNA, 33 bp, Homo sapien
gtgaagcttcaagagagactaaaggcacagcct

SEQ ID NO: 836171 - DNA, 33 bp, Homo sapien
atcttatacatccagaaaagttgcaaatatagt

SEQ ID NO: 836172 - DNA, 33 bp, Homo sapien
atcttatacatccagagaagttgcaaatatagt

SEQ ID NO: 836173 - DNA, 33 bp, Homo sapien
aatatttgtgggacagaaatagactcaaatatt

SEQ ID NO: 836174 - DNA, 33 bp, Homo sapien
aatatttgtgggacaggaatagactcaaatatt

SEQ ID NO: 836175 - DNA, 33 bp, Homo sapien
aggtgtagcttggctaagaactcccagaaagga

SEQ ID NO: 836176 - DNA, 33 bp, Homo sapien
aggtgtagcttggctaggaactcccagaaagga

SEQ ID NO: 836177 - DNA, 33 bp, Homo sapien
gtgacaagtgctaagacaaagtgaagctggaaa

SEQ ID NO: 836178 - DNA, 33 bp, Homo sapien
gtgacaagtgctaagagaaagtgaagctggaaa

SEQ ID NO: 836179 - DNA, 33 bp, Homo sapien
cacacacactgtttaccgcttccaaatcctaca

SEQ ID NO: 836180 - DNA, 33 bp, Homo sapien
cacacacactgtttactgcttccaaatcctaca

SEQ ID NO: 836181 - DNA, 33 bp, Homo sapien
gtccttgcttaatgagcctaaaattataccatt

SEQ ID NO: 836182 - DNA, 33 bp, Homo sapien
gtccttgcttaatgagtctaaaattataccatt

SEQ ID NO: 836183 - DNA, 33 bp, Homo sapien
cgtcacattttgtctaccctcttatctgtcagt

SEQ ID NO: 836184 - DNA, 33 bp, Homo sapien
cgtcacattttgtctatcctcttatctgtcagt

SEQ ID NO: 836185 - DNA, 33 bp, Homo sapien
gttcatagatattaaaaacctgttcggaagtag

SEQ ID NO: 836186 - DNA, 33 bp, Homo sapien
gttcatagatattaaagacctgttcggaagtag

SEQ ID NO: 836187 - DNA, 33 bp, Homo sapien
gatcaatgcagaaaaaacaaattacctgtaatt

SEQ ID NO: 836188 - DNA, 33 bp, Homo sapien
gatcaatgcagaaaaagcaaattacctgtaatt

SEQ ID NO: 836189 - DNA, 33 bp, Homo sapien
atgacctcacaatttacgggaagtgggaagaga

SEQ ID NO: 836190 - DNA, 33 bp, Homo sapien
atgacctcacaatttatgggaagtgggaagaga

SEQ ID NO: 836191 - DNA, 33 bp, Homo sapien
gacagacatacaaacgaagaccatggccgtctc

SEQ ID NO: 836192 - DNA, 33 bp, Homo sapien
gacagacatacaaacgcagaccatggccgtctc

SEQ ID NO: 836193 - DNA, 33 bp, Homo sapien
ggatagggctgacagcacaattggagtaggcca

SEQ ID NO: 836194 - DNA, 33 bp, Homo sapien
ggatagggctgacagcgcaattggagtaggcca

SEQ ID NO: 836195 - DNA, 33 bp, Homo sapien
agggttgttatgaagacgaatttgctaaacaca

SEQ ID NO: 836196 - DNA, 33 bp, Homo sapien
agggttgttatgaagatgaatttgctaaacaca

SEQ ID NO: 836197 - DNA, 33 bp, Homo sapien
tgctcattatatttgcaccgttcatggagatgc

SEQ ID NO: 836198 - DNA, 33 bp, Homo sapien
tgctcattatatttgcgccgttcatggagatgc

SEQ ID NO: 836199 - DNA, 33 bp, Homo sapien
ttgctgaaggatttaacatggggtatgagagaa

SEQ ID NO: 836200 - DNA, 33 bp, Homo sapien
ttgctgaaggatttaatatggggtatgagagaa

SEQ ID NO: 836201 - DNA, 33 bp, Homo sapien
gccccagtctgtgaagcagttacaatcaaagaa

SEQ ID NO: 836202 - DNA, 33 bp, Homo sapien
gccccagtctgtgaagtagttacaatcaaagaa

SEQ ID NO: 836203 - DNA, 33 bp, Homo sapien
aggcttgtgaactgtaaaattactctgctcatt

SEQ ID NO: 836204 - DNA, 33 bp, Homo sapien
aggcttgtgaactgtagaattactctgctcatt

SEQ ID NO: 836205 - DNA, 33 bp, Homo sapien
agtggtagagatgggactcaacatgacatctca

SEQ ID NO: 836206 - DNA, 33 bp, Homo sapien
agtggtagagatgggagtcaacatgacatctca

SEQ ID NO: 836207 - DNA, 33 bp, Homo sapien
gagtcaggatacgaacacaagcagttatttggg

SEQ ID NO: 836208 - DNA, 33 bp, Homo sapien
gagtcaggatacgaacccaagcagttatttggg

SEQ ID NO: 836209 - DNA, 33 bp, Homo sapien
gaagttcagacaagaaagcacggggacaagagt

SEQ ID NO: 836210 - DNA, 33 bp, Homo sapien
gaagttcagacaagaaggcacggggacaagagt

SEQ ID NO: 836211 - DNA, 33 bp, Homo sapien
ggccaagacttgtacacggcagaactcccactg

SEQ ID NO: 836212 - DNA, 33 bp, Homo sapien
ggccaagacttgtacatggcagaactcccactg

SEQ ID NO: 836213 - DNA, 33 bp, Homo sapien
ttcgtttaaatccgcacagctagaggcgccacg

SEQ ID NO: 836214 - DNA, 33 bp, Homo sapien
ttcgtttaaatccgcatagctagaggcgccacg

SEQ ID NO: 836215 - DNA, 33 bp, Homo sapien
caccactaggttgggtaaagggtgaagactgca

SEQ ID NO: 836216 - DNA, 33 bp, Homo sapien
caccactaggttgggtgaagggtgaagactgca

SEQ ID NO: 836217 - DNA, 33 bp, Homo sapien
tacaggactgcattgacgctcacacgacacaac

SEQ ID NO: 836218 - DNA, 33 bp, Homo sapien
tacaggactgcattgaggctcacacgacacaac

SEQ ID NO: 836219 - DNA, 33 bp, Homo sapien
agggcctgaggtcctaaatttctctggaggctc

SEQ ID NO: 836220 - DNA, 33 bp, Homo sapien
agggcctgaggtcctagatttctctggaggctc

SEQ ID NO: 836221 - DNA, 33 bp, Homo sapien
caacctgcatacttccaagtctcagagaacctt

SEQ ID NO: 836222 - DNA, 33 bp, Homo sapien
caacctgcatacttccgagtctcagagaacctt

SEQ ID NO: 836223 - DNA, 33 bp, Homo sapien
ccggctcaggatagtacgtctttaccacctcct

SEQ ID NO: 836224 - DNA, 33 bp, Homo sapien
ccggctcaggatagtatgtctttaccacctcct

SEQ ID NO: 836225 - DNA, 33 bp, Homo sapien
gctttggaaattctaacgctctagacaatgctg

SEQ ID NO: 836226 - DNA, 33 bp, Homo sapien
gctttggaaattctaatgctctagacaatgctg

SEQ ID NO: 836227 - DNA, 33 bp, Homo sapien
agggaacacagagaaacgatgaaggcagctgcg

SEQ ID NO: 836228 - DNA, 33 bp, Homo sapien
agggaacacagagaaatgatgaaggcagctgcg

SEQ ID NO: 836229 - DNA, 33 bp, Homo sapien
gactctgcactattaacgacttcactttactgc

SEQ ID NO: 836230 - DNA, 33 bp, Homo sapien
gactctgcactattaatgacttcactttactgc

SEQ ID NO: 836231 - DNA, 33 bp, Homo sapien
agtgtgggatcacttacgtacagagcacgtttt

SEQ ID NO: 836232 - DNA, 33 bp, Homo sapien
agtgtgggatcacttatgtacagagcacgtttt

SEQ ID NO: 836233 - DNA, 33 bp, Homo sapien
ctctcaatctctctgaaccttatcttaatttac

SEQ ID NO: 836234 - DNA, 33 bp, Homo sapien
ctctcaatctctctgagccttatcttaatttac

SEQ ID NO: 836235 - DNA, 33 bp, Homo sapien
cacacagctagcaggcaataggaacgggattca

SEQ ID NO: 836236 - DNA, 33 bp, Homo sapien
cacacagctagcaggcgataggaacgggattca

SEQ ID NO: 836237 - DNA, 33 bp, Homo sapien
ataagcctcttactgaatagtgactatatcaac

SEQ ID NO: 836238 - DNA, 33 bp, Homo sapien
ataagcctcttactgattagtgactatatcaac

SEQ ID NO: 836239 - DNA, 33 bp, Homo sapien
ggtctgacagttttcagccctgtagtttctcta

SEQ ID NO: 836240 - DNA, 33 bp, Homo sapien
ggtctgacagttttcatccctgtagtttctcta

SEQ ID NO: 836241 - DNA, 33 bp, Homo sapien
ggtctgggtggacccacagatcaggtcataatg

SEQ ID NO: 836242 - DNA, 33 bp, Homo sapien
ggtctgggtggacccatagatcaggtcataatg

SEQ ID NO: 836243 - DNA, 33 bp, Homo sapien
aagggaagtatggatgaaagaaaatgggagttc

SEQ ID NO: 836244 - DNA, 33 bp, Homo sapien
aagggaagtatggatggaagaaaatgggagttc

SEQ ID NO: 836245 - DNA, 33 bp, Homo sapien
gaagggtcaaatctccacaattatctttctcag

SEQ ID NO: 836246 - DNA, 33 bp, Homo sapien
gaagggtcaaatctccgcaattatctttctcag

SEQ ID NO: 836247 - DNA, 33 bp, Homo sapien
ttcctcatcagtacaacgagacggtagtatcag

SEQ ID NO: 836248 - DNA, 33 bp, Homo sapien
ttcctcatcagtacaatgagacggtagtatcag

SEQ ID NO: 836249 - DNA, 33 bp, Homo sapien
agcctggatatgaccacatccgagttctagagc

SEQ ID NO: 836250 - DNA, 33 bp, Homo sapien
agcctggatatgaccagatccgagttctagagc

SEQ ID NO: 836251 - DNA, 33 bp, Homo sapien
aagaaacagaatctagccacctggctccttgcc

SEQ ID NO: 836252 - DNA, 33 bp, Homo sapien
aagaaacagaatctagtcacctggctccttgcc

SEQ ID NO: 836253 - DNA, 33 bp, Homo sapien
aggaagtagctgtccaacagtgtccaggaaagg

SEQ ID NO: 836254 - DNA, 33 bp, Homo sapien
aggaagtagctgtccatcagtgtccaggaaagg

SEQ ID NO: 836255 - DNA, 33 bp, Homo sapien
atgtaatggggtcctacgagtcagagggctgca

SEQ ID NO: 836256 - DNA, 33 bp, Homo sapien
atgtaatggggtcctatgagtcagagggctgca

SEQ ID NO: 836257 - DNA, 33 bp, Homo sapien
actacatgccacagctaagaggaagtgcaaggg

SEQ ID NO: 836258 - DNA, 33 bp, Homo sapien
actacatgccacagctgagaggaagtgcaaggg

SEQ ID NO: 836259 - DNA, 33 bp, Homo sapien
tcaagcttcatctctgaatccaacacccaactc

SEQ ID NO: 836260 - DNA, 33 bp, Homo sapien
tcaagcttcatctctggatccaacacccaactc

SEQ ID NO: 836261 - DNA, 33 bp, Homo sapien
gtgaactctgaactctaaagctcaagctcattt

SEQ ID NO: 836262 - DNA, 33 bp, Homo sapien
gtgaactctgaactctgaagctcaagctcattt

SEQ ID NO: 836263 - DNA, 33 bp, Homo sapien
tgcttgcactaccaaaaccaaggactcccaaag

SEQ ID NO: 836264 - DNA, 33 bp, Homo sapien
tgcttgcactaccaaagccaaggactcccaaag

SEQ ID NO: 836265 - DNA, 33 bp, Homo sapien
cctaatctgctatgacagagtcttatgtaaagt

SEQ ID NO: 836266 - DNA, 33 bp, Homo sapien
cctaatctgctatgacggagtcttatgtaaagt

SEQ ID NO: 836267 - DNA, 33 bp, Homo sapien
ttcaagagaaagtcacactgagtccttccctcc

SEQ ID NO: 836268 - DNA, 33 bp, Homo sapien
ttcaagagaaagtcaccctgagtccttccctcc

SEQ ID NO: 836269 - DNA, 33 bp, Homo sapien
cagtaattagagcaaagagctcataggcacgct

SEQ ID NO: 836270 - DNA, 33 bp, Homo sapien
cagtaattagagcaaatagctcataggcacgct

SEQ ID NO: 836271 - DNA, 33 bp, Homo sapien
acatctctgcttatcaatcgacagaaagtcaag

SEQ ID NO: 836272 - DNA, 33 bp, Homo sapien
acatctctgcttatcagtcgacagaaagtcaag

SEQ ID NO: 836273 - DNA, 33 bp, Homo sapien
agtgtcctcaaagaaacaggaaaccttgctggg

SEQ ID NO: 836274 - DNA, 33 bp, Homo sapien
agtgtcctcaaagaaataggaaaccttgctggg

SEQ ID NO: 836275 - DNA, 33 bp, Homo sapien
gaagttcatcttcaaactgtttgccatagatag

SEQ ID NO: 836276 - DNA, 33 bp, Homo sapien
gaagttcatcttcaaattgtttgccatagatag

SEQ ID NO: 836277 - DNA, 33 bp, Homo sapien
taatcagtaatagcccaagagttgaaacctatt

SEQ ID NO: 836278 - DNA, 33 bp, Homo sapien
taatcagtaatagccccagagttgaaacctatt

SEQ ID NO: 836279 - DNA, 33 bp, Homo sapien
agtggactctgccgaccgtaatgtccctttctg

SEQ ID NO: 836280 - DNA, 33 bp, Homo sapien
agtggactctgccgactgtaatgtccctttctg

SEQ ID NO: 836281 - DNA, 33 bp, Homo sapien
ttttttaagctctaggaagatacctataaacaa

SEQ ID NO: 836282 - DNA, 33 bp, Homo sapien
ttttttaagctctagggagatacctataaacaa

SEQ ID NO: 836283 - DNA, 33 bp, Homo sapien
aacgcctgccttcctcaaacacacatgtgtgga

SEQ ID NO: 836284 - DNA, 33 bp, Homo sapien
aacgcctgccttcctcgaacacacatgtgtgga

SEQ ID NO: 836285 - DNA, 33 bp, Homo sapien
cgggtgtcagccatcaagcccggccagaattgt

SEQ ID NO: 836286 - DNA, 33 bp, Homo sapien
cgggtgtcagccatcacgcccggccagaattgt

SEQ ID NO: 836287 - DNA, 33 bp, Homo sapien
ggcgaaaagagccagaacggaagaaggacgcca

SEQ ID NO: 836288 - DNA, 33 bp, Homo sapien
ggcgaaaagagccagagcggaagaaggacgcca

SEQ ID NO: 836289 - DNA, 33 bp, Homo sapien
agtgtccataacttgaccgttgctaatgaagtc

SEQ ID NO: 836290 - DNA, 33 bp, Homo sapien
agtgtccataacttgagcgttgctaatgaagtc

SEQ ID NO: 836291 - DNA, 33 bp, Homo sapien
aattgtgtatgcaaaaccaaaaagatgtgaaat

SEQ ID NO: 836292 - DNA, 33 bp, Homo sapien
aattgtgtatgcaaaagcaaaaagatgtgaaat

SEQ ID NO: 836293 - DNA, 33 bp, Homo sapien
ttcagcttgcttctaaaggtcctctaacagtcc

SEQ ID NO: 836294 - DNA, 33 bp, Homo sapien
ttcagcttgcttctaagggtcctctaacagtcc

SEQ ID NO: 836295 - DNA, 33 bp, Homo sapien
ttcttccaaatgctacacaaaatgctgttagtt

SEQ ID NO: 836296 - DNA, 33 bp, Homo sapien
ttcttccaaatgctacgcaaaatgctgttagtt

SEQ ID NO: 836297 - DNA, 33 bp, Homo sapien
aaatgaccaaagtaaaaaaaataattggctgaa

SEQ ID NO: 836298 - DNA, 33 bp, Homo sapien
aaatgaccaaagtaaacaaaataattggctgaa

SEQ ID NO: 836299 - DNA, 33 bp, Homo sapien
gtttggagtggttcaaatgcattgcttcctgga

SEQ ID NO: 836300 - DNA, 33 bp, Homo sapien
gtttggagtggttcaagtgcattgcttcctgga

SEQ ID NO: 836301 - DNA, 33 bp, Homo sapien
atttatcatatttgacactgaataagaagcatt

SEQ ID NO: 836302 - DNA, 33 bp, Homo sapien
atttatcatatttgaccctgaataagaagcatt

SEQ ID NO: 836303 - DNA, 33 bp, Homo sapien
ctcagccagtctcaacccgcaggaagattatta

SEQ ID NO: 836304 - DNA, 33 bp, Homo sapien
ctcagccagtctcaactcgcaggaagattatta

SEQ ID NO: 836305 - DNA, 33 bp, Homo sapien
ttttcagcggtctccagtgcttatcattgtttg

SEQ ID NO: 836306 - DNA, 33 bp, Homo sapien
ttttcagcggtctccattgcttatcattgtttg

SEQ ID NO: 836307 - DNA, 33 bp, Homo sapien
acatccagtagctccaacaatgaaacaagaaag

SEQ ID NO: 836308 - DNA, 33 bp, Homo sapien
acatccagtagctccagcaatgaaacaagaaag

SEQ ID NO: 836309 - DNA, 33 bp, Homo sapien
agcccctgttggaggaagagattcagcattttt

SEQ ID NO: 836310 - DNA, 33 bp, Homo sapien
agcccctgttggaggaggagattcagcattttt

SEQ ID NO: 836311 - DNA, 33 bp, Homo sapien
aagggatggatgaagaagtgtgtcagaaggagg

SEQ ID NO: 836312 - DNA, 33 bp, Homo sapien
aagggatggatgaagaggtgtgtcagaaggagg

SEQ ID NO: 836313 - DNA, 33 bp, Homo sapien
atttgcttcttccaagaaaactcggctgtcaaa

SEQ ID NO: 836314 - DNA, 33 bp, Homo sapien
atttgcttcttccaagtaaactcggctgtcaaa

SEQ ID NO: 836315 - DNA, 33 bp, Homo sapien
aggtgatttctctgctcactggcctgtttccac

SEQ ID NO: 836316 - DNA, 33 bp, Homo sapien
aggtgatttctctgcttactggcctgtttccac

SEQ ID NO: 836317 - DNA, 33 bp, Homo sapien
tgcccattgtcctgcacctacggagctgttttc

SEQ ID NO: 836318 - DNA, 33 bp, Homo sapien
tgcccattgtcctgcatctacggagctgttttc

SEQ ID NO: 836319 - DNA, 33 bp, Homo sapien
ccaggcactggcactacaggttgccctggtgtg

SEQ ID NO: 836320 - DNA, 33 bp, Homo sapien
ccaggcactggcactataggttgccctggtgtg

SEQ ID NO: 836321 - DNA, 33 bp, Homo sapien
ggtggggaaactgaagcccaacaatgagtcaca

SEQ ID NO: 836322 - DNA, 33 bp, Homo sapien
ggtggggaaactgaagtccaacaatgagtcaca

SEQ ID NO: 836323 - DNA, 33 bp, Homo sapien
tgggcacatgtaaataccgctcagaacagtctg

SEQ ID NO: 836324 - DNA, 33 bp, Homo sapien
tgggcacatgtaaatagcgctcagaacagtctg

SEQ ID NO: 836325 - DNA, 33 bp, Homo sapien
cagggctgggaaccgacctgtaaccaaggagga

SEQ ID NO: 836326 - DNA, 33 bp, Homo sapien
cagggctgggaaccgatctgtaaccaaggagga

SEQ ID NO: 836327 - DNA, 33 bp, Homo sapien
aaatcctttctgaaatcatgtaagatgaaaact

SEQ ID NO: 836328 - DNA, 33 bp, Homo sapien
aaatcctttctgaaattatgtaagatgaaaact

SEQ ID NO: 836329 - DNA, 33 bp, Homo sapien
aacttacccccatcacaaacttggtatagctcc

SEQ ID NO: 836330 - DNA, 33 bp, Homo sapien
aacttacccccatcacgaacttggtatagctcc

SEQ ID NO: 836331 - DNA, 33 bp, Homo sapien
tcttcactggcctttcaatgtaagcaaattaaa

SEQ ID NO: 836332 - DNA, 33 bp, Homo sapien
tcttcactggcctttcgatgtaagcaaattaaa

SEQ ID NO: 836333 - DNA, 33 bp, Homo sapien
agttcagaaagaataaagtgcagacagaagcca

SEQ ID NO: 836334 - DNA, 33 bp, Homo sapien
agttcagaaagaataaggtgcagacagaagcca

SEQ ID NO: 836335 - DNA, 33 bp, Homo sapien
tgaagaaggcaagacacagatacagggtcatgc

SEQ ID NO: 836336 - DNA, 33 bp, Homo sapien
tgaagaaggcaagacagagatacagggtcatgc

SEQ ID NO: 836337 - DNA, 33 bp, Homo sapien
gagtttacacagttcacggagactggggaagcc

SEQ ID NO: 836338 - DNA, 33 bp, Homo sapien
gagtttacacagttcatggagactggggaagcc

SEQ ID NO: 836339 - DNA, 33 bp, Homo sapien
tcctctcctgctctctaaataggccacgttgtt

SEQ ID NO: 836340 - DNA, 33 bp, Homo sapien
tcctctcctgctctctgaataggccacgttgtt

SEQ ID NO: 836341 - DNA, 33 bp, Homo sapien
cacagctggagttccactgcaggcaaatcccct

SEQ ID NO: 836342 - DNA, 33 bp, Homo sapien
cacagctggagttccattgcaggcaaatcccct

SEQ ID NO: 836343 - DNA, 33 bp, Homo sapien
aaagtttctgtttgaacggatcctagagtgtgc

SEQ ID NO: 836344 - DNA, 33 bp, Homo sapien
aaagtttctgtttgaatggatcctagagtgtgc

SEQ ID NO: 836345 - DNA, 33 bp, Homo sapien
gactgggaaacccggactaacagtggcaggtgt

SEQ ID NO: 836346 - DNA, 33 bp, Homo sapien
gactgggaaacccggattaacagtggcaggtgt

SEQ ID NO: 836347 - DNA, 33 bp, Homo sapien
agcccattcttgagataactaatccactcctga

SEQ ID NO: 836348 - DNA, 33 bp, Homo sapien
agcccattcttgagatcactaatccactcctga

SEQ ID NO: 836349 - DNA, 33 bp, Homo sapien
gtatgatgacatgaataaggaagaccagagtga

SEQ ID NO: 836350 - DNA, 33 bp, Homo sapien
gtatgatgacatgaatgaggaagaccagagtga

SEQ ID NO: 836351 - DNA, 33 bp, Homo sapien
gcccagccaaatctggccatcttattgtgcaaa

SEQ ID NO: 836352 - DNA, 33 bp, Homo sapien
gcccagccaaatctgggcatcttattgtgcaaa

SEQ ID NO: 836353 - DNA, 33 bp, Homo sapien
tgttccagacagaaaaaaatggcgtgctcagag

SEQ ID NO: 836354 - DNA, 33 bp, Homo sapien
tgttccagacagaaaacaatggcgtgctcagag

SEQ ID NO: 836355 - DNA, 33 bp, Homo sapien
taacagctccctggaaaaaggtacaagaggagc

SEQ ID NO: 836356 - DNA, 33 bp, Homo sapien
taacagctccctggaagaaggtacaagaggagc

SEQ ID NO: 836357 - DNA, 33 bp, Homo sapien
cctctgggcgcctccaatctacacacaaagccg

SEQ ID NO: 836358 - DNA, 33 bp, Homo sapien
cctctgggcgcctccagtctacacacaaagccg

SEQ ID NO: 836359 - DNA, 33 bp, Homo sapien
ggaggtgtgtgtgaatcaggagaccagaaggcc

SEQ ID NO: 836360 - DNA, 33 bp, Homo sapien
ggaggtgtgtgtgaatgaggagaccagaaggcc

SEQ ID NO: 836361 - DNA, 33 bp, Homo sapien
gaaaggaccaggggaacgtgtggatgaaaagtg

SEQ ID NO: 836362 - DNA, 33 bp, Homo sapien
gaaaggaccaggggaatgtgtggatgaaaagtg

SEQ ID NO: 836363 - DNA, 33 bp, Homo sapien
cactcatggcaggcaacgtttcctgtaggcttc

SEQ ID NO: 836364 - DNA, 33 bp, Homo sapien
cactcatggcaggcaatgtttcctgtaggcttc

SEQ ID NO: 836365 - DNA, 33 bp, Homo sapien
tctgggtgccaaagcaaaaaaagacagagaagc

SEQ ID NO: 836366 - DNA, 33 bp, Homo sapien
tctgggtgccaaagcagaaaaagacagagaagc

SEQ ID NO: 836367 - DNA, 33 bp, Homo sapien
agagcattctggttcaactcctgcctgcagctc

SEQ ID NO: 836368 - DNA, 33 bp, Homo sapien
agagcattctggttcagctcctgcctgcagctc

SEQ ID NO: 836369 - DNA, 33 bp, Homo sapien
aggtcagaggggctgacatgccaattttcatgt

SEQ ID NO: 836370 - DNA, 33 bp, Homo sapien
aggtcagaggggctgatatgccaattttcatgt

SEQ ID NO: 836371 - DNA, 33 bp, Homo sapien
gagagaagagggtgagaagaacagttcagaggt

SEQ ID NO: 836372 - DNA, 33 bp, Homo sapien
gagagaagagggtgaggagaacagttcagaggt

SEQ ID NO: 836373 - DNA, 33 bp, Homo sapien
ctccattgtacagaataagaacagagaggcaca

SEQ ID NO: 836374 - DNA, 33 bp, Homo sapien
ctccattgtacagaatgagaacagagaggcaca

SEQ ID NO: 836375 - DNA, 33 bp, Homo sapien
tcagtctagatgatccaagacctctctggaaag

SEQ ID NO: 836376 - DNA, 33 bp, Homo sapien
tcagtctagatgatccgagacctctctggaaag

SEQ ID NO: 836377 - DNA, 33 bp, Homo sapien
cggctctaatttctcacgtctttcaaggagact

SEQ ID NO: 836378 - DNA, 33 bp, Homo sapien
cggctctaatttctcatgtctttcaaggagact

SEQ ID NO: 836379 - DNA, 33 bp, Homo sapien
taacatcaaaggacaacgcttatgctacgatgt

SEQ ID NO: 836380 - DNA, 33 bp, Homo sapien
taacatcaaaggacaatgcttatgctacgatgt

SEQ ID NO: 836381 - DNA, 33 bp, Homo sapien
aaacgtgaatttaaggacagcacaacaatccag

SEQ ID NO: 836382 - DNA, 33 bp, Homo sapien
aaacgtgaatttaaggtcagcacaacaatccag

SEQ ID NO: 836383 - DNA, 33 bp, Homo sapien
aatggacacatgaagacaggaaggaactcacag

SEQ ID NO: 836384 - DNA, 33 bp, Homo sapien
aatggacacatgaagagaggaaggaactcacag

SEQ ID NO: 836385 - DNA, 33 bp, Homo sapien
atgtgaagaggaggaacactgttcaggacacaa

SEQ ID NO: 836386 - DNA, 33 bp, Homo sapien
atgtgaagaggaggaagactgttcaggacacaa

SEQ ID NO: 836387 - DNA, 33 bp, Homo sapien
tcagggaaattcacaaagacacagggaacaccc

SEQ ID NO: 836388 - DNA, 33 bp, Homo sapien
tcagggaaattcacaaggacacagggaacaccc

SEQ ID NO: 836389 - DNA, 33 bp, Homo sapien
atcctaatccatactcagagggtgggatttgga

SEQ ID NO: 836390 - DNA, 33 bp, Homo sapien
atcctaatccatactcggagggtgggatttgga

SEQ ID NO: 836391 - DNA, 33 bp, Homo sapien
gcaggtctggcagagacacaggtactcaggact

SEQ ID NO: 836392 - DNA, 33 bp, Homo sapien
gcaggtctggcagagagacaggtactcaggact

SEQ ID NO: 836393 - DNA, 33 bp, Homo sapien
tggacagctgagttgggatgagttggagaacag

SEQ ID NO: 836394 - DNA, 33 bp, Homo sapien
tggacagctgagttggtatgagttggagaacag

SEQ ID NO: 836395 - DNA, 33 bp, Homo sapien
cagggcccatgctctaaatcgctgcactacact

SEQ ID NO: 836396 - DNA, 33 bp, Homo sapien
cagggcccatgctctacatcgctgcactacact

SEQ ID NO: 836397 - DNA, 33 bp, Homo sapien
aagtaaaggccagaaactgaccttcccagatgt

SEQ ID NO: 836398 - DNA, 33 bp, Homo sapien
aagtaaaggccagaaattgaccttcccagatgt

SEQ ID NO: 836399 - DNA, 33 bp, Homo sapien
ggactgacaatcttaacaaagagcagcttgggt

SEQ ID NO: 836400 - DNA, 33 bp, Homo sapien
ggactgacaatcttaataaagagcagcttgggt

SEQ ID NO: 836401 - DNA, 33 bp, Homo sapien
cttattccagctgtagaatttaggcaagttatt

SEQ ID NO: 836402 - DNA, 33 bp, Homo sapien
cttattccagctgtaggatttaggcaagttatt

SEQ ID NO: 836403 - DNA, 33 bp, Homo sapien
tgggaggcagctgcaactggcacagaaggtcat

SEQ ID NO: 836404 - DNA, 33 bp, Homo sapien
tgggaggcagctgcaagtggcacagaaggtcat

SEQ ID NO: 836405 - DNA, 33 bp, Homo sapien
tttatctccagatctcaaaatacagaaccgtaa

SEQ ID NO: 836406 - DNA, 33 bp, Homo sapien
tttatctccagatctccaaatacagaaccgtaa

SEQ ID NO: 836407 - DNA, 33 bp, Homo sapien
atgaaggaacgaagctcagagagaaaagctaac

SEQ ID NO: 836408 - DNA, 33 bp, Homo sapien
atgaaggaacgaagctgagagagaaaagctaac

SEQ ID NO: 836409 - DNA, 33 bp, Homo sapien
acagcaggctacggtgaactaggctgactacag

SEQ ID NO: 836410 - DNA, 33 bp, Homo sapien
acagcaggctacggtggactaggctgactacag

SEQ ID NO: 836411 - DNA, 33 bp, Homo sapien
tccaaaatgcagcataagggaagcagaagcaga

SEQ ID NO: 836412 - DNA, 33 bp, Homo sapien
tccaaaatgcagcatacgggaagcagaagcaga

SEQ ID NO: 836413 - DNA, 33 bp, Homo sapien
tttctctaggagattaacctactttcttggctc

SEQ ID NO: 836414 - DNA, 33 bp, Homo sapien
tttctctaggagattagcctactttcttggctc

SEQ ID NO: 836415 - DNA, 33 bp, Homo sapien
ttggttgtgtacataaggaatttcactatcttt

SEQ ID NO: 836416 - DNA, 33 bp, Homo sapien
ttggttgtgtacataatgaatttcactatcttt

SEQ ID NO: 836417 - DNA, 33 bp, Homo sapien
ccctagtacctcagaaaatataactgtatttgg

SEQ ID NO: 836418 - DNA, 33 bp, Homo sapien
ccctagtacctcagaatatataactgtatttgg

SEQ ID NO: 836419 - DNA, 33 bp, Homo sapien
cctgttggatgcaagagattaagagttttaggg

SEQ ID NO: 836420 - DNA, 33 bp, Homo sapien
cctgttggatgcaagatattaagagttttaggg

SEQ ID NO: 836421 - DNA, 33 bp, Homo sapien
gtgagaagatatcccactatagttttgatttgc

SEQ ID NO: 836422 - DNA, 33 bp, Homo sapien
gtgagaagatatcccattatagttttgatttgc

SEQ ID NO: 836423 - DNA, 33 bp, Homo sapien
cgcctggccagcaatgcagtgtgtaaggaaaga

SEQ ID NO: 836424 - DNA, 33 bp, Homo sapien
cgcctggccagcaatgtagtgtgtaaggaaaga

SEQ ID NO: 836425 - DNA, 33 bp, Homo sapien
gagtagcttatggtagcagagataaagtgctca

SEQ ID NO: 836426 - DNA, 33 bp, Homo sapien
gagtagcttatggtagtagagataaagtgctca

SEQ ID NO: 836427 - DNA, 33 bp, Homo sapien
ggtatttgcagcagaaagggatttaatacaggg

SEQ ID NO: 836428 - DNA, 33 bp, Homo sapien
ggtatttgcagcagaaggggatttaatacaggg

SEQ ID NO: 836429 - DNA, 33 bp, Homo sapien
gcaaagctttagtccacgtgtacagaccaacag

SEQ ID NO: 836430 - DNA, 33 bp, Homo sapien
gcaaagctttagtccatgtgtacagaccaacag

SEQ ID NO: 836431 - DNA, 33 bp, Homo sapien
tccccccattggttcaagatgtatcaatgtttc

SEQ ID NO: 836432 - DNA, 33 bp, Homo sapien
tccccccattggttcaggatgtatcaatgtttc

SEQ ID NO: 836433 - DNA, 33 bp, Homo sapien
tacctcccaccgtagcaacctcaaccgggatgg

SEQ ID NO: 836434 - DNA, 33 bp, Homo sapien
tacctcccaccgtagcgacctcaaccgggatgg

SEQ ID NO: 836435 - DNA, 33 bp, Homo sapien
cataaaacaggagcatcaggatgaagactgcac

SEQ ID NO: 836436 - DNA, 33 bp, Homo sapien
cataaaacaggagcattaggatgaagactgcac

SEQ ID NO: 836437 - DNA, 33 bp, Homo sapien
acaacagaggtagctcaccagtgtagtgaatga

SEQ ID NO: 836438 - DNA, 33 bp, Homo sapien
acaacagaggtagctcgccagtgtagtgaatga

SEQ ID NO: 836439 - DNA, 33 bp, Homo sapien
aatatagacagaaatacgaaaactgggaaacta

SEQ ID NO: 836440 - DNA, 33 bp, Homo sapien
aatatagacagaaatatgaaaactgggaaacta

SEQ ID NO: 836441 - DNA, 33 bp, Homo sapien
agaaaagaaaatgtaacaatgagctaagtattc

SEQ ID NO: 836442 - DNA, 33 bp, Homo sapien
agaaaagaaaatgtaataatgagctaagtattc

SEQ ID NO: 836443 - DNA, 33 bp, Homo sapien
ggtcttcatcctctaaaaatcttcatcagtaat

SEQ ID NO: 836444 - DNA, 33 bp, Homo sapien
ggtcttcatcctctaagaatcttcatcagtaat

SEQ ID NO: 836445 - DNA, 33 bp, Homo sapien
taagtcgctaactaacgaagttactaactaact

SEQ ID NO: 836446 - DNA, 33 bp, Homo sapien
taagtcgctaactaactaagttactaactaact

SEQ ID NO: 836447 - DNA, 33 bp, Homo sapien
tgtgctctgtctgaaggcctcacccacagaatc

SEQ ID NO: 836448 - DNA, 33 bp, Homo sapien
tgtgctctgtctgaagtcctcacccacagaatc

SEQ ID NO: 836449 - DNA, 33 bp, Homo sapien
ttgtcagatatttacagtgggctaccagagaga

SEQ ID NO: 836450 - DNA, 33 bp, Homo sapien
ttgtcagatatttacattgggctaccagagaga

SEQ ID NO: 836451 - DNA, 33 bp, Homo sapien
agcagaaacctgctggaagatctaggaagactt

SEQ ID NO: 836452 - DNA, 33 bp, Homo sapien
agcagaaacctgctgggagatctaggaagactt

SEQ ID NO: 836453 - DNA, 33 bp, Homo sapien
ttggcctggatattgccagactagaaaaaaatt

SEQ ID NO: 836454 - DNA, 33 bp, Homo sapien
ttggcctggatattgctagactagaaaaaaatt

SEQ ID NO: 836455 - DNA, 33 bp, Homo sapien
atttataactaaacgccctgtttcagagtggaa

SEQ ID NO: 836456 - DNA, 33 bp, Homo sapien
atttataactaaacgctctgtttcagagtggaa

SEQ ID NO: 836457 - DNA, 33 bp, Homo sapien
tgctatttttatatgaactaggagataaaaatg

SEQ ID NO: 836458 - DNA, 33 bp, Homo sapien
tgctatttttatatgacctaggagataaaaatg

SEQ ID NO: 836459 - DNA, 33 bp, Homo sapien
aacagatccaaccttacgactaggtcttacatt

SEQ ID NO: 836460 - DNA, 33 bp, Homo sapien
aacagatccaaccttatgactaggtcttacatt

SEQ ID NO: 836461 - DNA, 33 bp, Homo sapien
tgggctgaagtggaacgataatcatgtagcaga

SEQ ID NO: 836462 - DNA, 33 bp, Homo sapien
tgggctgaagtggaactataatcatgtagcaga

SEQ ID NO: 836463 - DNA, 33 bp, Homo sapien
tgactttaatttgccaaatgattactattagtg

SEQ ID NO: 836464 - DNA, 33 bp, Homo sapien
tgactttaatttgccagatgattactattagtg

SEQ ID NO: 836465 - DNA, 33 bp, Homo sapien
atggagtatataaaccaaaggcatccccagctg

SEQ ID NO: 836466 - DNA, 33 bp, Homo sapien
atggagtatataaaccgaaggcatccccagctg

SEQ ID NO: 836467 - DNA, 33 bp, Homo sapien
ttcaactgggcggtaaataaactcaagcctgag

SEQ ID NO: 836468 - DNA, 33 bp, Homo sapien
ttcaactgggcggtaagtaaactcaagcctgag

SEQ ID NO: 836469 - DNA, 33 bp, Homo sapien
tagaaaaattccgtcaacttctctccagccaga

SEQ ID NO: 836470 - DNA, 33 bp, Homo sapien
tagaaaaattccgtcagcttctctccagccaga

SEQ ID NO: 836471 - DNA, 33 bp, Homo sapien
cactcctgtttcagccagaataaccaaaagttg

SEQ ID NO: 836472 - DNA, 33 bp, Homo sapien
cactcctgtttcagccggaataaccaaaagttg

SEQ ID NO: 836473 - DNA, 33 bp, Homo sapien
attatgactctcgaaacgaggaacatcaccagg

SEQ ID NO: 836474 - DNA, 33 bp, Homo sapien
attatgactctcgaaatgaggaacatcaccagg

SEQ ID NO: 836475 - DNA, 33 bp, Homo sapien
tgtcctaaaatagggaaccagagatgaacttgc

SEQ ID NO: 836476 - DNA, 33 bp, Homo sapien
tgtcctaaaatagggagccagagatgaacttgc

SEQ ID NO: 836477 - DNA, 33 bp, Homo sapien
tgtttccatgacaacaatagcttattaaacagt

SEQ ID NO: 836478 - DNA, 33 bp, Homo sapien
tgtttccatgacaacagtagcttattaaacagt

SEQ ID NO: 836479 - DNA, 33 bp, Homo sapien
aacaaagatcaaatgaaaatgtatgaaaccatg

SEQ ID NO: 836480 - DNA, 33 bp, Homo sapien
aacaaagatcaaatgagaatgtatgaaaccatg

SEQ ID NO: 836481 - DNA, 33 bp, Homo sapien
atttgagctgcctggaatagtcaaattcttaga

SEQ ID NO: 836482 - DNA, 33 bp, Homo sapien
atttgagctgcctggagtagtcaaattcttaga

SEQ ID NO: 836483 - DNA, 33 bp, Homo sapien
atatttagaagtgggagtagtagttatattttg

SEQ ID NO: 836484 - DNA, 33 bp, Homo sapien
atatttagaagtgggattagtagttatattttg

SEQ ID NO: 836485 - DNA, 33 bp, Homo sapien
ccgctgtaggcacaacgatctatgacagagagg

SEQ ID NO: 836486 - DNA, 33 bp, Homo sapien
ccgctgtaggcacaactatctatgacagagagg

SEQ ID NO: 836487 - DNA, 33 bp, Homo sapien
ttataaaaatgcagtaactacaaagctcaataa

SEQ ID NO: 836488 - DNA, 33 bp, Homo sapien
ttataaaaatgcagtatctacaaagctcaataa

SEQ ID NO: 836489 - DNA, 33 bp, Homo sapien
atatcagtggaggaaacggagactcagaagaca

SEQ ID NO: 836490 - DNA, 33 bp, Homo sapien
atatcagtggaggaaatggagactcagaagaca

SEQ ID NO: 836491 - DNA, 33 bp, Homo sapien
ctccacacactgctggcaagagcctcaatattt

SEQ ID NO: 836492 - DNA, 33 bp, Homo sapien
ctccacacactgctgggaagagcctcaatattt

SEQ ID NO: 836493 - DNA, 33 bp, Homo sapien
aaagagccagatataaagggagccagtaagggg

SEQ ID NO: 836494 - DNA, 33 bp, Homo sapien
aaagagccagatataaggggagccagtaagggg

SEQ ID NO: 836495 - DNA, 33 bp, Homo sapien
gacaatgtaagagcgcccgaacctacctaccaa

SEQ ID NO: 836496 - DNA, 33 bp, Homo sapien
gacaatgtaagagcgctcgaacctacctaccaa

SEQ ID NO: 836497 - DNA, 33 bp, Homo sapien
ctggtcactctattctaaaaagtcatctcggga

SEQ ID NO: 836498 - DNA, 33 bp, Homo sapien
ctggtcactctattctgaaaagtcatctcggga

SEQ ID NO: 836499 - DNA, 33 bp, Homo sapien
ttggcagtgtgacaccaatatggcatcaagcct

SEQ ID NO: 836500 - DNA, 33 bp, Homo sapien
ttggcagtgtgacaccgatatggcatcaagcct

SEQ ID NO: 836501 - DNA, 33 bp, Homo sapien
ccaagtgacacatccacagacatggagtggtgg

SEQ ID NO: 836502 - DNA, 33 bp, Homo sapien
ccaagtgacacatccagagacatggagtggtgg

SEQ ID NO: 836503 - DNA, 33 bp, Homo sapien
ggttttaaaaagctacccctcactggctcagac

SEQ ID NO: 836504 - DNA, 33 bp, Homo sapien
ggttttaaaaagctactcctcactggctcagac

SEQ ID NO: 836505 - DNA, 33 bp, Homo sapien
taaccccctcattcgcagaggaaaatccaagcc

SEQ ID NO: 836506 - DNA, 33 bp, Homo sapien
taaccccctcattcgcggaggaaaatccaagcc

SEQ ID NO: 836507 - DNA, 33 bp, Homo sapien
agtgacttagattttgaacacgcattccctttc

SEQ ID NO: 836508 - DNA, 33 bp, Homo sapien
agtgacttagattttggacacgcattccctttc

SEQ ID NO: 836509 - DNA, 33 bp, Homo sapien
aatgaagactagttcaggttagttatttttagt

SEQ ID NO: 836510 - DNA, 33 bp, Homo sapien
aatgaagactagttcatgttagttatttttagt

SEQ ID NO: 836511 - DNA, 33 bp, Homo sapien
agaaagcaaaacaaggaaagagagaatggggaa

SEQ ID NO: 836512 - DNA, 33 bp, Homo sapien
agaaagcaaaacaagggaagagagaatggggaa

SEQ ID NO: 836513 - DNA, 33 bp, Homo sapien
agacacttagttttgacgtggtttgttatgcag

SEQ ID NO: 836514 - DNA, 33 bp, Homo sapien
agacacttagttttgatgtggtttgttatgcag

SEQ ID NO: 836515 - DNA, 33 bp, Homo sapien
cctatcctgcttcctagatataccactgtttat

SEQ ID NO: 836516 - DNA, 33 bp, Homo sapien
cctatcctgcttcctatatataccactgtttat

SEQ ID NO: 836517 - DNA, 33 bp, Homo sapien
atggttgttgcaacctaaggacatgattacttc

SEQ ID NO: 836518 - DNA, 33 bp, Homo sapien
atggttgttgcaacctgaggacatgattacttc

SEQ ID NO: 836519 - DNA, 33 bp, Homo sapien
tgctttagataatttacgtagctcagtggttct

SEQ ID NO: 836520 - DNA, 33 bp, Homo sapien
tgctttagataatttatgtagctcagtggttct

SEQ ID NO: 836521 - DNA, 33 bp, Homo sapien
gaaaaaagtgggataactcacatccacttagac

SEQ ID NO: 836522 - DNA, 33 bp, Homo sapien
gaaaaaagtgggataattcacatccacttagac

SEQ ID NO: 836523 - DNA, 33 bp, Homo sapien
cttttagaagctggaaagtaaactcaaaattct

SEQ ID NO: 836524 - DNA, 33 bp, Homo sapien
cttttagaagctggaaggtaaactcaaaattct

SEQ ID NO: 836525 - DNA, 33 bp, Homo sapien
atttgggggctcagaacttctcagtttacatcc

SEQ ID NO: 836526 - DNA, 33 bp, Homo sapien
atttgggggctcagaagttctcagtttacatcc

SEQ ID NO: 836527 - DNA, 33 bp, Homo sapien
agccaaccagaaacaactggggaatgttccagt

SEQ ID NO: 836528 - DNA, 33 bp, Homo sapien
agccaaccagaaacaattggggaatgttccagt

SEQ ID NO: 836529 - DNA, 33 bp, Homo sapien
aatcagcagaattagacagtcatttttattgaa

SEQ ID NO: 836530 - DNA, 33 bp, Homo sapien
aatcagcagaattagatagtcatttttattgaa

SEQ ID NO: 836531 - DNA, 33 bp, Homo sapien
tgaactggtcacaaacagcagaatttgtcaaat

SEQ ID NO: 836532 - DNA, 33 bp, Homo sapien
tgaactggtcacaaacggcagaatttgtcaaat

SEQ ID NO: 836533 - DNA, 33 bp, Homo sapien
aaggtgacagcctacaataggaatgtggacaca

SEQ ID NO: 836534 - DNA, 33 bp, Homo sapien
aaggtgacagcctacagtaggaatgtggacaca

SEQ ID NO: 836535 - DNA, 33 bp, Homo sapien
gaagctttttcccatacctgcacctccccaggc

SEQ ID NO: 836536 - DNA, 33 bp, Homo sapien
gaagctttttcccatatctgcacctccccaggc

SEQ ID NO: 836537 - DNA, 33 bp, Homo sapien
gtagcaacccaggaagacctagaaccttgaatt

SEQ ID NO: 836538 - DNA, 33 bp, Homo sapien
gtagcaacccaggaagtcctagaaccttgaatt

SEQ ID NO: 836539 - DNA, 33 bp, Homo sapien
caccaaaagctactaccgccctgcaggcacccg

SEQ ID NO: 836540 - DNA, 33 bp, Homo sapien
caccaaaagctactactgccctgcaggcacccg

SEQ ID NO: 836541 - DNA, 33 bp, Homo sapien
gccctgcaccatgttgcactgaaagtgaaaatc

SEQ ID NO: 836542 - DNA, 33 bp, Homo sapien
gccctgcaccatgttgtactgaaagtgaaaatc

SEQ ID NO: 836543 - DNA, 33 bp, Homo sapien
cgacatggtgctgggaacaagaataaaggcagt

SEQ ID NO: 836544 - DNA, 33 bp, Homo sapien
cgacatggtgctgggagcaagaataaaggcagt

SEQ ID NO: 836545 - DNA, 33 bp, Homo sapien
tttttctccatagcatgaattacatctaactta

SEQ ID NO: 836546 - DNA, 33 bp, Homo sapien
tttttctccatagcattaattacatctaactta

SEQ ID NO: 836547 - DNA, 33 bp, Homo sapien
gcatttttccatatgcacgttggccatttctct

SEQ ID NO: 836548 - DNA, 33 bp, Homo sapien
gcatttttccatatgcgcgttggccatttctct

SEQ ID NO: 836549 - DNA, 33 bp, Homo sapien
catataaacttggaaacaaaaagcagactcaat

SEQ ID NO: 836550 - DNA, 33 bp, Homo sapien
catataaacttggaaagaaaaagcagactcaat

SEQ ID NO: 836551 - DNA, 33 bp, Homo sapien
gaagtggtaaagcaaaatgagtttctactctgc

SEQ ID NO: 836552 - DNA, 33 bp, Homo sapien
gaagtggtaaagcaaagtgagtttctactctgc

SEQ ID NO: 836553 - DNA, 33 bp, Homo sapien
ttgttctttgtgcgtaagcctaaggttgaacag

SEQ ID NO: 836554 - DNA, 33 bp, Homo sapien
ttgttctttgtgcgtaggcctaaggttgaacag

SEQ ID NO: 836555 - DNA, 33 bp, Homo sapien
ctatactagccaggcacctacctgccacccttg

SEQ ID NO: 836556 - DNA, 33 bp, Homo sapien
ctatactagccaggcatctacctgccacccttg

SEQ ID NO: 836557 - DNA, 33 bp, Homo sapien
ttctttagggtgaagcaaaatgattccaaatag

SEQ ID NO: 836558 - DNA, 33 bp, Homo sapien
ttctttagggtgaagcgaaatgattccaaatag

SEQ ID NO: 836559 - DNA, 33 bp, Homo sapien
actggcggccatcccacgtgtagatctgggatt

SEQ ID NO: 836560 - DNA, 33 bp, Homo sapien
actggcggccatcccatgtgtagatctgggatt

SEQ ID NO: 836561 - DNA, 33 bp, Homo sapien
tccttagcagcctcaaatactcctgcaggatgc

SEQ ID NO: 836562 - DNA, 33 bp, Homo sapien
tccttagcagcctcaagtactcctgcaggatgc

SEQ ID NO: 836563 - DNA, 33 bp, Homo sapien
cgtttaagcctcattaaaaagtggcaaatgaaa

SEQ ID NO: 836564 - DNA, 33 bp, Homo sapien
cgtttaagcctcattacaaagtggcaaatgaaa

SEQ ID NO: 836565 - DNA, 33 bp, Homo sapien
ttacctgttggctccacgtcatcctcacaaaac

SEQ ID NO: 836566 - DNA, 33 bp, Homo sapien
ttacctgttggctccatgtcatcctcacaaaac

SEQ ID NO: 836567 - DNA, 33 bp, Homo sapien
ttcgttcactcatctacaacatgaaggacttga

SEQ ID NO: 836568 - DNA, 33 bp, Homo sapien
ttcgttcactcatctataacatgaaggacttga

SEQ ID NO: 836569 - DNA, 33 bp, Homo sapien
ggcacatgaggccaccacaagtgataatttcaa

SEQ ID NO: 836570 - DNA, 33 bp, Homo sapien
ggcacatgaggccaccgcaagtgataatttcaa

SEQ ID NO: 836571 - DNA, 33 bp, Homo sapien
gatacaaacactgctgcagaaagaacaaagtgc

SEQ ID NO: 836572 - DNA, 33 bp, Homo sapien
gatacaaacactgctgtagaaagaacaaagtgc

SEQ ID NO: 836573 - DNA, 33 bp, Homo sapien
cttttatacagagggaaggggtgagtatcctct

SEQ ID NO: 836574 - DNA, 33 bp, Homo sapien
cttttatacagagggagggggtgagtatcctct

SEQ ID NO: 836575 - DNA, 33 bp, Homo sapien
ggccctgggaagtaataataataatgtgtctat

SEQ ID NO: 836576 - DNA, 33 bp, Homo sapien
ggccctgggaagtaatcataataatgtgtctat

SEQ ID NO: 836577 - DNA, 33 bp, Homo sapien
gtcaagacctttgagaacattctaacgttcctc

SEQ ID NO: 836578 - DNA, 33 bp, Homo sapien
gtcaagacctttgagagcattctaacgttcctc

SEQ ID NO: 836579 - DNA, 33 bp, Homo sapien
cccaaacaccccaggacgcttggagaattctgg

SEQ ID NO: 836580 - DNA, 33 bp, Homo sapien
cccaaacaccccaggatgcttggagaattctgg

SEQ ID NO: 836581 - DNA, 33 bp, Homo sapien
gttcacccgggagtcccagttcagctcagcaga

SEQ ID NO: 836582 - DNA, 33 bp, Homo sapien
gttcacccgggagtcctagttcagctcagcaga

SEQ ID NO: 836583 - DNA, 33 bp, Homo sapien
tgatgtgagggttataaacgagacaatgtaaga

SEQ ID NO: 836584 - DNA, 33 bp, Homo sapien
tgatgtgagggttatagacgagacaatgtaaga

SEQ ID NO: 836585 - DNA, 33 bp, Homo sapien
taccctcacgaccctccgagctaagtgcagtac

SEQ ID NO: 836586 - DNA, 33 bp, Homo sapien
taccctcacgaccctctgagctaagtgcagtac

SEQ ID NO: 836587 - DNA, 33 bp, Homo sapien
ggacttggaactataccgggtgcttcatatttt

SEQ ID NO: 836588 - DNA, 33 bp, Homo sapien
ggacttggaactatactgggtgcttcatatttt

SEQ ID NO: 836589 - DNA, 33 bp, Homo sapien
ggtctgaatttagtgaaagggctatgtctagct

SEQ ID NO: 836590 - DNA, 33 bp, Homo sapien
ggtctgaatttagtgagagggctatgtctagct

SEQ ID NO: 836591 - DNA, 33 bp, Homo sapien
aagacccacaactgacgcacacattcactctgt

SEQ ID NO: 836592 - DNA, 33 bp, Homo sapien
aagacccacaactgactcacacattcactctgt

SEQ ID NO: 836593 - DNA, 33 bp, Homo sapien
acctggtgtcggcacaaatggtacatggggcca

SEQ ID NO: 836594 - DNA, 33 bp, Homo sapien
acctggtgtcggcacagatggtacatggggcca

SEQ ID NO: 836595 - DNA, 33 bp, Homo sapien
ttttcttaactgctgcgatgttctgagccagag

SEQ ID NO: 836596 - DNA, 33 bp, Homo sapien
ttttcttaactgctgctatgttctgagccagag

SEQ ID NO: 836597 - DNA, 33 bp, Homo sapien
agttgtacaaaacagaccagacataaagagcat

SEQ ID NO: 836598 - DNA, 33 bp, Homo sapien
agttgtacaaaacagatcagacataaagagcat

SEQ ID NO: 836599 - DNA, 33 bp, Homo sapien
gttgctataaaggtacaagctgttatcatcaca

SEQ ID NO: 836600 - DNA, 33 bp, Homo sapien
gttgctataaaggtacgagctgttatcatcaca

SEQ ID NO: 836601 - DNA, 33 bp, Homo sapien
actcaaatttccattcactgagaactagttaaa

SEQ ID NO: 836602 - DNA, 33 bp, Homo sapien
actcaaatttccattcgctgagaactagttaaa

SEQ ID NO: 836603 - DNA, 33 bp, Homo sapien
ctcatgtgtaattataagctctagaatttcttg

SEQ ID NO: 836604 - DNA, 33 bp, Homo sapien
ctcatgtgtaattataggctctagaatttcttg

SEQ ID NO: 836605 - DNA, 33 bp, Homo sapien
tacatggaaggttttacggccaacaggacagtc

SEQ ID NO: 836606 - DNA, 33 bp, Homo sapien
tacatggaaggttttatggccaacaggacagtc

SEQ ID NO: 836607 - DNA, 33 bp, Homo sapien
cagcgctctgttcccacgtgggccaggagactc

SEQ ID NO: 836608 - DNA, 33 bp, Homo sapien
cagcgctctgttcccatgtgggccaggagactc

SEQ ID NO: 836609 - DNA, 33 bp, Homo sapien
acctggcaggaatggaaactgaagcccagagag

SEQ ID NO: 836610 - DNA, 33 bp, Homo sapien
acctggcaggaatggacactgaagcccagagag

SEQ ID NO: 836611 - DNA, 33 bp, Homo sapien
gaaggcgctcagctccactacagaggagtaaga

SEQ ID NO: 836612 - DNA, 33 bp, Homo sapien
gaaggcgctcagctccgctacagaggagtaaga

SEQ ID NO: 836613 - DNA, 33 bp, Homo sapien
aaattgttatggcccaatgaagagcttgccctt

SEQ ID NO: 836614 - DNA, 33 bp, Homo sapien
aaattgttatggcccagtgaagagcttgccctt

SEQ ID NO: 836615 - DNA, 33 bp, Homo sapien
gagaagtagaagtagcactgaataaatacgcag

SEQ ID NO: 836616 - DNA, 33 bp, Homo sapien
gagaagtagaagtagcgctgaataaatacgcag

SEQ ID NO: 836617 - DNA, 33 bp, Homo sapien
cttcccggcagaagaacgtaattgccaatgcaa

SEQ ID NO: 836618 - DNA, 33 bp, Homo sapien
cttcccggcagaagaatgtaattgccaatgcaa

SEQ ID NO: 836619 - DNA, 33 bp, Homo sapien
tcctgtttgaggtagaaacacaaagggccagat

SEQ ID NO: 836620 - DNA, 33 bp, Homo sapien
tcctgtttgaggtagacacacaaagggccagat

SEQ ID NO: 836621 - DNA, 33 bp, Homo sapien
gtggctgggcttataacaaaggctggacacaaa

SEQ ID NO: 836622 - DNA, 33 bp, Homo sapien
gtggctgggcttataagaaaggctggacacaaa

SEQ ID NO: 836623 - DNA, 33 bp, Homo sapien
tttctatgaaattgccacagggattaaatgaga

SEQ ID NO: 836624 - DNA, 33 bp, Homo sapien
tttctatgaaattgccgcagggattaaatgaga

SEQ ID NO: 836625 - DNA, 33 bp, Homo sapien
gcagccctgccgagcaaaggagggacatgacat

SEQ ID NO: 836626 - DNA, 33 bp, Homo sapien
gcagccctgccgagcagaggagggacatgacat

SEQ ID NO: 836627 - DNA, 33 bp, Homo sapien
agcactggatgggaaactgtgggcctccctagg

SEQ ID NO: 836628 - DNA, 33 bp, Homo sapien
agcactggatgggaaattgtgggcctccctagg

SEQ ID NO: 836629 - DNA, 33 bp, Homo sapien
gtgaataacatgaaaacgaaaacatccttaaac

SEQ ID NO: 836630 - DNA, 33 bp, Homo sapien
gtgaataacatgaaaatgaaaacatccttaaac

SEQ ID NO: 836631 - DNA, 33 bp, Homo sapien
cgatagctgggtttaccagggtagctaattcct

SEQ ID NO: 836632 - DNA, 33 bp, Homo sapien
cgatagctgggtttacgagggtagctaattcct

SEQ ID NO: 836633 - DNA, 33 bp, Homo sapien
tgatgaattagcaatgcaaatcccagcagttgc

SEQ ID NO: 836634 - DNA, 33 bp, Homo sapien
tgatgaattagcaatgtaaatcccagcagttgc

SEQ ID NO: 836635 - DNA, 33 bp, Homo sapien
gtctgcctatccttgtcaaatgtgttgtgttgg

SEQ ID NO: 836636 - DNA, 33 bp, Homo sapien
gtctgcctatccttgttaaatgtgttgtgttgg

SEQ ID NO: 836637 - DNA, 33 bp, Homo sapien
tcactgcctacgtcaccggttcccatgggtcct

SEQ ID NO: 836638 - DNA, 33 bp, Homo sapien
tcactgcctacgtcactggttcccatgggtcct

SEQ ID NO: 836639 - DNA, 33 bp, Homo sapien
cagcttgttgagtacaaaacattgtctctgtca

SEQ ID NO: 836640 - DNA, 33 bp, Homo sapien
cagcttgttgagtacataacattgtctctgtca

SEQ ID NO: 836641 - DNA, 33 bp, Homo sapien
cccacaacccggcacaaagcaggggttcactac

SEQ ID NO: 836642 - DNA, 33 bp, Homo sapien
cccacaacccggcacatagcaggggttcactac

SEQ ID NO: 836643 - DNA, 33 bp, Homo sapien
cgctggctttgaccaagagaatacacccgcaat

SEQ ID NO: 836644 - DNA, 33 bp, Homo sapien
cgctggctttgaccaatagaatacacccgcaat

SEQ ID NO: 836645 - DNA, 33 bp, Homo sapien
gggtgggaaactgacaacctttctttggcaggc

SEQ ID NO: 836646 - DNA, 33 bp, Homo sapien
gggtgggaaactgacagcctttctttggcaggc

SEQ ID NO: 836647 - DNA, 33 bp, Homo sapien
gtttgttggattcgaacatctagactttcctta

SEQ ID NO: 836648 - DNA, 33 bp, Homo sapien
gtttgttggattcgaatatctagactttcctta

SEQ ID NO: 836649 - DNA, 33 bp, Homo sapien
catgaggaacctgaaggctgggatcctggcatc

SEQ ID NO: 836650 - DNA, 33 bp, Homo sapien
catgaggaacctgaagtctgggatcctggcatc

SEQ ID NO: 836651 - DNA, 33 bp, Homo sapien
ctggttcttttgtaaaaatatgatgcggaagtt

SEQ ID NO: 836652 - DNA, 33 bp, Homo sapien
ctggttcttttgtaaagatatgatgcggaagtt

SEQ ID NO: 836653 - DNA, 33 bp, Homo sapien
tctcttgtccatatggcccaggatgttttacca

SEQ ID NO: 836654 - DNA, 33 bp, Homo sapien
tctcttgtccatatggtccaggatgttttacca

SEQ ID NO: 836655 - DNA, 33 bp, Homo sapien
atgtagttctctcttacgtaacagtctggctgt

SEQ ID NO: 836656 - DNA, 33 bp, Homo sapien
atgtagttctctcttatgtaacagtctggctgt

SEQ ID NO: 836657 - DNA, 33 bp, Homo sapien
tgggtttagtaactagcagtccagtatattgat

SEQ ID NO: 836658 - DNA, 33 bp, Homo sapien
tgggtttagtaactagtagtccagtatattgat

SEQ ID NO: 836659 - DNA, 33 bp, Homo sapien
tgaccctgggcatctcaattagccacttgcttc

SEQ ID NO: 836660 - DNA, 33 bp, Homo sapien
tgaccctgggcatctcgattagccacttgcttc

SEQ ID NO: 836661 - DNA, 33 bp, Homo sapien
gcaggaaaagatttcaagttcaaagccctttcc

SEQ ID NO: 836662 - DNA, 33 bp, Homo sapien
gcaggaaaagatttcaggttcaaagccctttcc

SEQ ID NO: 836663 - DNA, 33 bp, Homo sapien
ttctgaaaaggtgttacagtagctttcaataaa

SEQ ID NO: 836664 - DNA, 33 bp, Homo sapien
ttctgaaaaggtgttatagtagctttcaataaa

SEQ ID NO: 836665 - DNA, 33 bp, Homo sapien
ctccctgagcacaggaagagaaatccgctcaag

SEQ ID NO: 836666 - DNA, 33 bp, Homo sapien
ctccctgagcacaggaggagaaatccgctcaag

SEQ ID NO: 836667 - DNA, 33 bp, Homo sapien
tgccagtgggcactgtaaatgtctaggcatgtg

SEQ ID NO: 836668 - DNA, 33 bp, Homo sapien
tgccagtgggcactgtgaatgtctaggcatgtg

SEQ ID NO: 836669 - DNA, 33 bp, Homo sapien
gggtgaggctgatgtggatgtctgtgtgtgcca

SEQ ID NO: 836670 - DNA, 33 bp, Homo sapien
gggtgaggctgatgtgtatgtctgtgtgtgcca

SEQ ID NO: 836671 - DNA, 33 bp, Homo sapien
acctgggattgacaaaatgtgtctgctgaaatg

SEQ ID NO: 836672 - DNA, 33 bp, Homo sapien
acctgggattgacaaagtgtgtctgctgaaatg

SEQ ID NO: 836673 - DNA, 33 bp, Homo sapien
atcccctatggatgacagagagcttacagatga

SEQ ID NO: 836674 - DNA, 33 bp, Homo sapien
atcccctatggatgacggagagcttacagatga

SEQ ID NO: 836675 - DNA, 33 bp, Homo sapien
tgttaagcagagggaacaggctgagcaaaagcc

SEQ ID NO: 836676 - DNA, 33 bp, Homo sapien
tgttaagcagagggaataggctgagcaaaagcc

SEQ ID NO: 836677 - DNA, 33 bp, Homo sapien
ggtgggagagagccacaaaatgttacctgcctg

SEQ ID NO: 836678 - DNA, 33 bp, Homo sapien
ggtgggagagagccaccaaatgttacctgcctg

SEQ ID NO: 836679 - DNA, 33 bp, Homo sapien
ttggtcaagatagcgaaaggggagattttggag

SEQ ID NO: 836680 - DNA, 33 bp, Homo sapien
ttggtcaagatagcgagaggggagattttggag

SEQ ID NO: 836681 - DNA, 33 bp, Homo sapien
cacatgaggatggtgaaaggggtccctggccat

SEQ ID NO: 836682 - DNA, 33 bp, Homo sapien
cacatgaggatggtgataggggtccctggccat

SEQ ID NO: 836683 - DNA, 33 bp, Homo sapien
ggggcgtcttctctcccctaaactacacctcag

SEQ ID NO: 836684 - DNA, 33 bp, Homo sapien
ggggcgtcttctctcctctaaactacacctcag

SEQ ID NO: 836685 - DNA, 33 bp, Homo sapien
tttaaggcttataatgaacctacctattagcta

SEQ ID NO: 836686 - DNA, 33 bp, Homo sapien
tttaaggcttataatgtacctacctattagcta

SEQ ID NO: 836687 - DNA, 33 bp, Homo sapien
gcgtctcgttgaacaccgatgtctcctggaact

SEQ ID NO: 836688 - DNA, 33 bp, Homo sapien
gcgtctcgttgaacactgatgtctcctggaact

SEQ ID NO: 836689 - DNA, 33 bp, Homo sapien
caggagatgtgaaaaagaagttgagagacatgg

SEQ ID NO: 836690 - DNA, 33 bp, Homo sapien
caggagatgtgaaaaataagttgagagacatgg

SEQ ID NO: 836691 - DNA, 33 bp, Homo sapien
atcatccccaagtacacatctgttcgttcctgc

SEQ ID NO: 836692 - DNA, 33 bp, Homo sapien
atcatccccaagtacatatctgttcgttcctgc

SEQ ID NO: 836693 - DNA, 33 bp, Homo sapien
tgagcagaacctgtgaagttagggtcttttcct

SEQ ID NO: 836694 - DNA, 33 bp, Homo sapien
tgagcagaacctgtgaggttagggtcttttcct

SEQ ID NO: 836695 - DNA, 33 bp, Homo sapien
agagtgaaggtagaagacctgatactgggcacg

SEQ ID NO: 836696 - DNA, 33 bp, Homo sapien
agagtgaaggtagaaggcctgatactgggcacg

SEQ ID NO: 836697 - DNA, 33 bp, Homo sapien
ggaacacaaggaggtaaaaatgacatccctgct

SEQ ID NO: 836698 - DNA, 33 bp, Homo sapien
ggaacacaaggaggtataaatgacatccctgct

SEQ ID NO: 836699 - DNA, 33 bp, Homo sapien
tcggcaattgtttcagcattgcttatctccagg

SEQ ID NO: 836700 - DNA, 33 bp, Homo sapien
tcggcaattgtttcagtattgcttatctccagg

SEQ ID NO: 836701 - DNA, 33 bp, Homo sapien
tgaaaaatgcttagtaaagtcgtaatgtgtttt

SEQ ID NO: 836702 - DNA, 33 bp, Homo sapien
tgaaaaatgcttagtagagtcgtaatgtgtttt

SEQ ID NO: 836703 - DNA, 33 bp, Homo sapien
gagaaaagcttaatacaaaactgacagctgagg

SEQ ID NO: 836704 - DNA, 33 bp, Homo sapien
gagaaaagcttaatacgaaactgacagctgagg

SEQ ID NO: 836705 - DNA, 33 bp, Homo sapien
ctgcactagggaagcaatagctagaaaagctga

SEQ ID NO: 836706 - DNA, 33 bp, Homo sapien
ctgcactagggaagcagtagctagaaaagctga

SEQ ID NO: 836707 - DNA, 33 bp, Homo sapien
attttacatgagtaacaatgagtaaccctgtgt

SEQ ID NO: 836708 - DNA, 33 bp, Homo sapien
attttacatgagtaaccatgagtaaccctgtgt

SEQ ID NO: 836709 - DNA, 33 bp, Homo sapien
agatccaggcctccaaaccagaaggcagagcct

SEQ ID NO: 836710 - DNA, 33 bp, Homo sapien
agatccaggcctccaacccagaaggcagagcct

SEQ ID NO: 836711 - DNA, 33 bp, Homo sapien
tgttaataactctaaaatggaacttgtaggcag

SEQ ID NO: 836712 - DNA, 33 bp, Homo sapien
tgttaataactctaaagtggaacttgtaggcag

SEQ ID NO: 836713 - DNA, 33 bp, Homo sapien
gcaatgaggtctgagaataagaaatgaggttca

SEQ ID NO: 836714 - DNA, 33 bp, Homo sapien
gcaatgaggtctgagagtaagaaatgaggttca

SEQ ID NO: 836715 - DNA, 33 bp, Homo sapien
aaaaccatgaccaaacaaatggtgggttatcaa

SEQ ID NO: 836716 - DNA, 33 bp, Homo sapien
aaaaccatgaccaaacgaatggtgggttatcaa

SEQ ID NO: 836717 - DNA, 33 bp, Homo sapien
ggttcctagtcttgcaatctagccccattaata

SEQ ID NO: 836718 - DNA, 33 bp, Homo sapien
ggttcctagtcttgcagtctagccccattaata

SEQ ID NO: 836719 - DNA, 33 bp, Homo sapien
cctaggaaggcttaataaaggagacgtatttga

SEQ ID NO: 836720 - DNA, 33 bp, Homo sapien
cctaggaaggcttaatgaaggagacgtatttga

SEQ ID NO: 836721 - DNA, 33 bp, Homo sapien
aggacagggatcatgaccttgcattaactacag

SEQ ID NO: 836722 - DNA, 33 bp, Homo sapien
aggacagggatcatgatcttgcattaactacag

SEQ ID NO: 836723 - DNA, 33 bp, Homo sapien
aatctatttcatttggcaattaagacatccatt

SEQ ID NO: 836724 - DNA, 33 bp, Homo sapien
aatctatttcatttggtaattaagacatccatt

SEQ ID NO: 836725 - DNA, 33 bp, Homo sapien
atgtacctggctaaaaatctgatctgggattgt

SEQ ID NO: 836726 - DNA, 33 bp, Homo sapien
atgtacctggctaaaactctgatctgggattgt

SEQ ID NO: 836727 - DNA, 33 bp, Homo sapien
tttgcagggagtacagacaaataagcttgagag

SEQ ID NO: 836728 - DNA, 33 bp, Homo sapien
tttgcagggagtacaggcaaataagcttgagag

SEQ ID NO: 836729 - DNA, 33 bp, Homo sapien
ccatctttgcttagcccggcgattgctacatcc

SEQ ID NO: 836730 - DNA, 33 bp, Homo sapien
ccatctttgcttagccgggcgattgctacatcc

SEQ ID NO: 836731 - DNA, 33 bp, Homo sapien
cagtccgttttcaacacagccaccagagtgacc

SEQ ID NO: 836732 - DNA, 33 bp, Homo sapien
cagtccgttttcaacagagccaccagagtgacc

SEQ ID NO: 836733 - DNA, 33 bp, Homo sapien
cggtcatctagctcagcacagtgacttctctcc

SEQ ID NO: 836734 - DNA, 33 bp, Homo sapien
cggtcatctagctcaggacagtgacttctctcc

SEQ ID NO: 836735 - DNA, 33 bp, Homo sapien
atgcaaagttcaaaaacgggagaagctagtcta

SEQ ID NO: 836736 - DNA, 33 bp, Homo sapien
atgcaaagttcaaaaatgggagaagctagtcta

SEQ ID NO: 836737 - DNA, 33 bp, Homo sapien
tattcaactccatgcaaccattgattccctcaa

SEQ ID NO: 836738 - DNA, 33 bp, Homo sapien
tattcaactccatgcatccattgattccctcaa

SEQ ID NO: 836739 - DNA, 33 bp, Homo sapien
aaccctggaggtttgaacgagataaagagccag

SEQ ID NO: 836740 - DNA, 33 bp, Homo sapien
aaccctggaggtttgatcgagataaagagccag

SEQ ID NO: 836741 - DNA, 33 bp, Homo sapien
cagtaatgaatgatccactgacaggctctcacc

SEQ ID NO: 836742 - DNA, 33 bp, Homo sapien
cagtaatgaatgatccgctgacaggctctcacc

SEQ ID NO: 836743 - DNA, 33 bp, Homo sapien
tacagggtatattaggaataggttctgttgcaa

SEQ ID NO: 836744 - DNA, 33 bp, Homo sapien
tacagggtatattaggtataggttctgttgcaa

SEQ ID NO: 836745 - DNA, 33 bp, Homo sapien
atataacagagaatacaattacacacacactta

SEQ ID NO: 836746 - DNA, 33 bp, Homo sapien
atataacagagaatacgattacacacacactta

SEQ ID NO: 836747 - DNA, 33 bp, Homo sapien
ccaaagtctgttcctgccagaatttctgatttt

SEQ ID NO: 836748 - DNA, 33 bp, Homo sapien
ccaaagtctgttcctggcagaatttctgatttt

SEQ ID NO: 836749 - DNA, 33 bp, Homo sapien
catgtttataatcacaggacaaagcctgagcct

SEQ ID NO: 836750 - DNA, 33 bp, Homo sapien
catgtttataatcacatgacaaagcctgagcct

SEQ ID NO: 836751 - DNA, 33 bp, Homo sapien
cactccagtcccgcaacgtacccagctcagcct

SEQ ID NO: 836752 - DNA, 33 bp, Homo sapien
cactccagtcccgcaatgtacccagctcagcct

SEQ ID NO: 836753 - DNA, 33 bp, Homo sapien
acttatgttagaacaacgttgatagattttaga

SEQ ID NO: 836754 - DNA, 33 bp, Homo sapien
acttatgttagaacaatgttgatagattttaga

SEQ ID NO: 836755 - DNA, 33 bp, Homo sapien
ggattgctgctctttccagtgacttaggctgca

SEQ ID NO: 836756 - DNA, 33 bp, Homo sapien
ggattgctgctctttcgagtgacttaggctgca

SEQ ID NO: 836757 - DNA, 33 bp, Homo sapien
atattaaccagttgataataaagttgcaagttg

SEQ ID NO: 836758 - DNA, 33 bp, Homo sapien
atattaaccagttgatgataaagttgcaagttg

SEQ ID NO: 836759 - DNA, 33 bp, Homo sapien
taagtccatgtctccaagaaaaatttgttttaa

SEQ ID NO: 836760 - DNA, 33 bp, Homo sapien
taagtccatgtctccaggaaaaatttgttttaa

SEQ ID NO: 836761 - DNA, 33 bp, Homo sapien
atagcagcagctttcaacaaaattggtgttcca

SEQ ID NO: 836762 - DNA, 33 bp, Homo sapien
atagcagcagctttcagcaaaattggtgttcca

SEQ ID NO: 836763 - DNA, 33 bp, Homo sapien
tatcatctgttatccacgcttaaaatctttaaa

SEQ ID NO: 836764 - DNA, 33 bp, Homo sapien
tatcatctgttatccatgcttaaaatctttaaa

SEQ ID NO: 836765 - DNA, 33 bp, Homo sapien
tagaatatctgaaaaaaactacttgaccttaat

SEQ ID NO: 836766 - DNA, 33 bp, Homo sapien
tagaatatctgaaaaatactacttgaccttaat

SEQ ID NO: 836767 - DNA, 33 bp, Homo sapien
gaaaaggggctaggaaatctgacatttttctac

SEQ ID NO: 836768 - DNA, 33 bp, Homo sapien
gaaaaggggctaggaagtctgacatttttctac

SEQ ID NO: 836769 - DNA, 33 bp, Homo sapien
tcaagtaagaaagccaaggcaagaatccagtct

SEQ ID NO: 836770 - DNA, 33 bp, Homo sapien
tcaagtaagaaagccagggcaagaatccagtct

SEQ ID NO: 836771 - DNA, 33 bp, Homo sapien
agccctaattcatacacaatcacttgtttgctt

SEQ ID NO: 836772 - DNA, 33 bp, Homo sapien
agccctaattcatacataatcacttgtttgctt

SEQ ID NO: 836773 - DNA, 33 bp, Homo sapien
ccttccttcactgcctaaagaggaacaaaccct

SEQ ID NO: 836774 - DNA, 33 bp, Homo sapien
ccttccttcactgcctgaagaggaacaaaccct

SEQ ID NO: 836775 - DNA, 33 bp, Homo sapien
aggtactcaaagtgtcggaagtatggccagact

SEQ ID NO: 836776 - DNA, 33 bp, Homo sapien
aggtactcaaagtgtctgaagtatggccagact

SEQ ID NO: 836777 - DNA, 33 bp, Homo sapien
tctccagtatagacaacgtagtaggccataaca

SEQ ID NO: 836778 - DNA, 33 bp, Homo sapien
tctccagtatagacaatgtagtaggccataaca

SEQ ID NO: 836779 - DNA, 33 bp, Homo sapien
tatacagcaccagagaaccaagtaaggaattaa

SEQ ID NO: 836780 - DNA, 33 bp, Homo sapien
tatacagcaccagagatccaagtaaggaattaa

SEQ ID NO: 836781 - DNA, 33 bp, Homo sapien
atatttccaaataagccccctagagaagaatac

SEQ ID NO: 836782 - DNA, 33 bp, Homo sapien
atatttccaaataagctccctagagaagaatac

SEQ ID NO: 836783 - DNA, 33 bp, Homo sapien
ggagaggaatattctacgatctgaaaaaaaatc

SEQ ID NO: 836784 - DNA, 33 bp, Homo sapien
ggagaggaatattctatgatctgaaaaaaaatc

SEQ ID NO: 836785 - DNA, 33 bp, Homo sapien
caacagattctcaatgccaatgaaacagtctta

SEQ ID NO: 836786 - DNA, 33 bp, Homo sapien
caacagattctcaatgtcaatgaaacagtctta

SEQ ID NO: 836787 - DNA, 33 bp, Homo sapien
cagtgcttataacatccacagtaacataatgtc

SEQ ID NO: 836788 - DNA, 33 bp, Homo sapien
cagtgcttataacatctacagtaacataatgtc

SEQ ID NO: 836789 - DNA, 33 bp, Homo sapien
taggatttgaggtaaaatggacttaaattgctc

SEQ ID NO: 836790 - DNA, 33 bp, Homo sapien
taggatttgaggtaaagtggacttaaattgctc

SEQ ID NO: 836791 - DNA, 33 bp, Homo sapien
gcctcctctactacagacatcatttttctagaa

SEQ ID NO: 836792 - DNA, 33 bp, Homo sapien
gcctcctctactacagccatcatttttctagaa

SEQ ID NO: 836793 - DNA, 33 bp, Homo sapien
gttactgtgtttgaaacgattcagtcttttagt

SEQ ID NO: 836794 - DNA, 33 bp, Homo sapien
gttactgtgtttgaaatgattcagtcttttagt

SEQ ID NO: 836795 - DNA, 33 bp, Homo sapien
atacctgccagtctaacgggcaatatctactca

SEQ ID NO: 836796 - DNA, 33 bp, Homo sapien
atacctgccagtctaatgggcaatatctactca

SEQ ID NO: 836797 - DNA, 33 bp, Homo sapien
tccattcaaatactcaactaggtaacagctggt

SEQ ID NO: 836798 - DNA, 33 bp, Homo sapien
tccattcaaatactcacctaggtaacagctggt

SEQ ID NO: 836799 - DNA, 33 bp, Homo sapien
cagatcaaaattgtcacgtgataatgattggct

SEQ ID NO: 836800 - DNA, 33 bp, Homo sapien
cagatcaaaattgtcatgtgataatgattggct

SEQ ID NO: 836801 - DNA, 33 bp, Homo sapien
cattatttcttcaccacgttgttggaaaattta

SEQ ID NO: 836802 - DNA, 33 bp, Homo sapien
cattatttcttcaccatgttgttggaaaattta

SEQ ID NO: 836803 - DNA, 33 bp, Homo sapien
tctagtttagtgtacactgataacaacactcaa

SEQ ID NO: 836804 - DNA, 33 bp, Homo sapien
tctagtttagtgtacattgataacaacactcaa

SEQ ID NO: 836805 - DNA, 33 bp, Homo sapien
gggtaacaaggccctaaatcattcttcaagatt

SEQ ID NO: 836806 - DNA, 33 bp, Homo sapien
gggtaacaaggccctagatcattcttcaagatt

SEQ ID NO: 836807 - DNA, 33 bp, Homo sapien
gatgttgaaggaaacaatgttatttgaggagcc

SEQ ID NO: 836808 - DNA, 33 bp, Homo sapien
gatgttgaaggaaacagtgttatttgaggagcc

SEQ ID NO: 836809 - DNA, 33 bp, Homo sapien
gatttataattttcccaaggatttgcctcagaa

SEQ ID NO: 836810 - DNA, 33 bp, Homo sapien
gatttataattttccccaggatttgcctcagaa

SEQ ID NO: 836811 - DNA, 33 bp, Homo sapien
acaaggagacattccaaagtcatgatattggtt

SEQ ID NO: 836812 - DNA, 33 bp, Homo sapien
acaaggagacattccagagtcatgatattggtt

SEQ ID NO: 836813 - DNA, 33 bp, Homo sapien
tctcacaagaaacatacgcaagaaaggaaggta

SEQ ID NO: 836814 - DNA, 33 bp, Homo sapien
tctcacaagaaacatatgcaagaaaggaaggta

SEQ ID NO: 836815 - DNA, 33 bp, Homo sapien
tgagaacactgttcgcaactcttctcgctaacc

SEQ ID NO: 836816 - DNA, 33 bp, Homo sapien
tgagaacactgttcgctactcttctcgctaacc

SEQ ID NO: 836817 - DNA, 33 bp, Homo sapien
tagagaatagtcagaacccaggaattatcttga

SEQ ID NO: 836818 - DNA, 33 bp, Homo sapien
tagagaatagtcagaagccaggaattatcttga

SEQ ID NO: 836819 - DNA, 33 bp, Homo sapien
tactgttaagagtgaacagcagcccaaatcttg

SEQ ID NO: 836820 - DNA, 33 bp, Homo sapien
tactgttaagagtgaatagcagcccaaatcttg

SEQ ID NO: 836821 - DNA, 33 bp, Homo sapien
caccttcttactatcaacatgaacttgaactat

SEQ ID NO: 836822 - DNA, 33 bp, Homo sapien
caccttcttactatcagcatgaacttgaactat

SEQ ID NO: 836823 - DNA, 33 bp, Homo sapien
ccagagtcccgtattacagatgcaaaaggccca

SEQ ID NO: 836824 - DNA, 33 bp, Homo sapien
ccagagtcccgtattatagatgcaaaaggccca

SEQ ID NO: 836825 - DNA, 33 bp, Homo sapien
agtcagcacctggaaacgaagctttagtcatta

SEQ ID NO: 836826 - DNA, 33 bp, Homo sapien
agtcagcacctggaaatgaagctttagtcatta

SEQ ID NO: 836827 - DNA, 33 bp, Homo sapien
cagtgaagtgagtatgcagatttgacccatgtc

SEQ ID NO: 836828 - DNA, 33 bp, Homo sapien
cagtgaagtgagtatgtagatttgacccatgtc

SEQ ID NO: 836829 - DNA, 33 bp, Homo sapien
atgaaggtgttctccaaagagcttgttaaacta

SEQ ID NO: 836830 - DNA, 33 bp, Homo sapien
atgaaggtgttctccagagagcttgttaaacta

SEQ ID NO: 836831 - DNA, 33 bp, Homo sapien
attaagtgactactgcaaactatttaatcagaa

SEQ ID NO: 836832 - DNA, 33 bp, Homo sapien
attaagtgactactgcgaactatttaatcagaa

SEQ ID NO: 836833 - DNA, 33 bp, Homo sapien
gacataaaggctacaaagaacattccagcaaaa

SEQ ID NO: 836834 - DNA, 33 bp, Homo sapien
gacataaaggctacaaggaacattccagcaaaa

SEQ ID NO: 836835 - DNA, 33 bp, Homo sapien
gtcccattgccacctacgtttgtgttacagcac

SEQ ID NO: 836836 - DNA, 33 bp, Homo sapien
gtcccattgccacctatgtttgtgttacagcac

SEQ ID NO: 836837 - DNA, 33 bp, Homo sapien
gtttatttcaaaaagtaaagaacaggaagatag

SEQ ID NO: 836838 - DNA, 33 bp, Homo sapien
gtttatttcaaaaagtgaagaacaggaagatag

SEQ ID NO: 836839 - DNA, 33 bp, Homo sapien
ctataaaatgccttgccattgggttaatgtaaa

SEQ ID NO: 836840 - DNA, 33 bp, Homo sapien
ctataaaatgccttgctattgggttaatgtaaa

SEQ ID NO: 836841 - DNA, 33 bp, Homo sapien
catcatcttcatttgacatggagacgaatctag

SEQ ID NO: 836842 - DNA, 33 bp, Homo sapien
catcatcttcatttgatatggagacgaatctag

SEQ ID NO: 836843 - DNA, 33 bp, Homo sapien
aaaaactgattgagtacctcaagagctgtcata

SEQ ID NO: 836844 - DNA, 33 bp, Homo sapien
aaaaactgattgagtatctcaagagctgtcata

SEQ ID NO: 836845 - DNA, 33 bp, Homo sapien
gtaaaaggaccccgcccgcagagagcagtgtgg

SEQ ID NO: 836846 - DNA, 33 bp, Homo sapien
gtaaaaggaccccgccggcagagagcagtgtgg

SEQ ID NO: 836847 - DNA, 33 bp, Homo sapien
acctactgtgtgtaaccgcactagtctctgatt

SEQ ID NO: 836848 - DNA, 33 bp, Homo sapien
acctactgtgtgtaactgcactagtctctgatt

SEQ ID NO: 836849 - DNA, 33 bp, Homo sapien
tttcaccacgataactcaaaaaggtcattccga

SEQ ID NO: 836850 - DNA, 33 bp, Homo sapien
tttcaccacgataactgaaaaaggtcattccga

SEQ ID NO: 836851 - DNA, 33 bp, Homo sapien
cgagacagctttaaaacagaagcaatcatctgc

SEQ ID NO: 836852 - DNA, 33 bp, Homo sapien
cgagacagctttaaaagagaagcaatcatctgc

SEQ ID NO: 836853 - DNA, 33 bp, Homo sapien
acatcacccaacagaacaggaagtgtgaaggaa

SEQ ID NO: 836854 - DNA, 33 bp, Homo sapien
acatcacccaacagaagaggaagtgtgaaggaa

SEQ ID NO: 836855 - DNA, 33 bp, Homo sapien
ggacacagccaagcaaagtaggaacaaaatgtg

SEQ ID NO: 836856 - DNA, 33 bp, Homo sapien
ggacacagccaagcaatgtaggaacaaaatgtg

SEQ ID NO: 836857 - DNA, 33 bp, Homo sapien
ctgcctttagaatcacccgcggagtttttaaag

SEQ ID NO: 836858 - DNA, 33 bp, Homo sapien
ctgcctttagaatcactcgcggagtttttaaag

SEQ ID NO: 836859 - DNA, 33 bp, Homo sapien
tgtctgaatccgcccaagaccaaaaccaagtca

SEQ ID NO: 836860 - DNA, 33 bp, Homo sapien
tgtctgaatccgcccaggaccaaaaccaagtca

SEQ ID NO: 836861 - DNA, 33 bp, Homo sapien
gtctgtcgtcagtccccaccaaaatgaaagacc

SEQ ID NO: 836862 - DNA, 33 bp, Homo sapien
gtctgtcgtcagtccctaccaaaatgaaagacc

SEQ ID NO: 836863 - DNA, 33 bp, Homo sapien
tcactcgttctggagcccaaataataaaatctt

SEQ ID NO: 836864 - DNA, 33 bp, Homo sapien
tcactcgttctggagctcaaataataaaatctt

SEQ ID NO: 836865 - DNA, 33 bp, Homo sapien
tgcttcttctacctgacgagcccgtgagtattt

SEQ ID NO: 836866 - DNA, 33 bp, Homo sapien
tgcttcttctacctgatgagcccgtgagtattt

SEQ ID NO: 836867 - DNA, 33 bp, Homo sapien
gagtgatttgtccatagggaaatagtagggtag

SEQ ID NO: 836868 - DNA, 33 bp, Homo sapien
gagtgatttgtccatatggaaatagtagggtag

SEQ ID NO: 836869 - DNA, 33 bp, Homo sapien
aaggaaatagttactacgcccgctgctaattca

SEQ ID NO: 836870 - DNA, 33 bp, Homo sapien
aaggaaatagttactatgcccgctgctaattca

SEQ ID NO: 836871 - DNA, 33 bp, Homo sapien
gtgtggctgagttactaacctgtcattcctgac

SEQ ID NO: 836872 - DNA, 33 bp, Homo sapien
gtgtggctgagttactcacctgtcattcctgac

SEQ ID NO: 836873 - DNA, 33 bp, Homo sapien
cacatacatacacacgcccttctaccgtagaat

SEQ ID NO: 836874 - DNA, 33 bp, Homo sapien
cacatacatacacacggccttctaccgtagaat

SEQ ID NO: 836875 - DNA, 33 bp, Homo sapien
gagttacctgtattaaatcacaaactgtgtggc

SEQ ID NO: 836876 - DNA, 33 bp, Homo sapien
gagttacctgtattaagtcacaaactgtgtggc

SEQ ID NO: 836877 - DNA, 33 bp, Homo sapien
gcccatcaacatgtaccaggctggggttacttc

SEQ ID NO: 836878 - DNA, 33 bp, Homo sapien
gcccatcaacatgtacgaggctggggttacttc

SEQ ID NO: 836879 - DNA, 33 bp, Homo sapien
cctatcttagagaacaatggaaatatgtgtaag

SEQ ID NO: 836880 - DNA, 33 bp, Homo sapien
cctatcttagagaacagtggaaatatgtgtaag

SEQ ID NO: 836881 - DNA, 33 bp, Homo sapien
agaaagagaaaaagaaataggatgagtgacagt

SEQ ID NO: 836882 - DNA, 33 bp, Homo sapien
agaaagagaaaaagaagtaggatgagtgacagt

SEQ ID NO: 836883 - DNA, 33 bp, Homo sapien
ttcagccttttagctcaatgcctgtcaaatatc

SEQ ID NO: 836884 - DNA, 33 bp, Homo sapien
ttcagccttttagctcgatgcctgtcaaatatc

SEQ ID NO: 836885 - DNA, 33 bp, Homo sapien
agctacagatactgaacgaccttccctctctct

SEQ ID NO: 836886 - DNA, 33 bp, Homo sapien
agctacagatactgaatgaccttccctctctct

SEQ ID NO: 836887 - DNA, 33 bp, Homo sapien
agagcttatgttctaaagggaaggagacagaaa

SEQ ID NO: 836888 - DNA, 33 bp, Homo sapien
agagcttatgttctaatgggaaggagacagaaa

SEQ ID NO: 836889 - DNA, 33 bp, Homo sapien
cacctttgaacattcccacaagcagtatatagg

SEQ ID NO: 836890 - DNA, 33 bp, Homo sapien
cacctttgaacattcctacaagcagtatatagg

SEQ ID NO: 836891 - DNA, 33 bp, Homo sapien
gacttttagattttgaagcaaacatattcatct

SEQ ID NO: 836892 - DNA, 33 bp, Homo sapien
gacttttagattttgaggcaaacatattcatct

SEQ ID NO: 836893 - DNA, 33 bp, Homo sapien
tgcaaacacatcataaattaaagtagtataagg

SEQ ID NO: 836894 - DNA, 33 bp, Homo sapien
tgcaaacacatcataagttaaagtagtataagg

SEQ ID NO: 836895 - DNA, 33 bp, Homo sapien
atttaaaaatctaaaactgtagactgaaatgtt

SEQ ID NO: 836896 - DNA, 33 bp, Homo sapien
atttaaaaatctaaaagtgtagactgaaatgtt

SEQ ID NO: 836897 - DNA, 33 bp, Homo sapien
actcaagattggcttacgttagagcagtagatg

SEQ ID NO: 836898 - DNA, 33 bp, Homo sapien
actcaagattggcttatgttagagcagtagatg

SEQ ID NO: 836899 - DNA, 33 bp, Homo sapien
caattagatgttatcgacagtaatagaggggca

SEQ ID NO: 836900 - DNA, 33 bp, Homo sapien
caattagatgttatcggcagtaatagaggggca

SEQ ID NO: 836901 - DNA, 33 bp, Homo sapien
gaacactgtttagaggaaggtcataaattttct

SEQ ID NO: 836902 - DNA, 33 bp, Homo sapien
gaacactgtttagaggcaggtcataaattttct

SEQ ID NO: 836903 - DNA, 33 bp, Homo sapien
tcatctgatacacacaaaaaatagtaactggca

SEQ ID NO: 836904 - DNA, 33 bp, Homo sapien
tcatctgatacacacagaaaatagtaactggca

SEQ ID NO: 836905 - DNA, 33 bp, Homo sapien
cttctgtcatttggtagcagggctattgcttcc

SEQ ID NO: 836906 - DNA, 33 bp, Homo sapien
cttctgtcatttggtatcagggctattgcttcc

SEQ ID NO: 836907 - DNA, 33 bp, Homo sapien
ccactatgtactagaacttaactggtggagggc

SEQ ID NO: 836908 - DNA, 33 bp, Homo sapien
ccactatgtactagaagttaactggtggagggc

SEQ ID NO: 836909 - DNA, 33 bp, Homo sapien
aaaagcaagtgagttgcacctttacagagttca

SEQ ID NO: 836910 - DNA, 33 bp, Homo sapien
aaaagcaagtgagttgtacctttacagagttca

SEQ ID NO: 836911 - DNA, 33 bp, Homo sapien
acttctaccagttacaatattgtttgattctag

SEQ ID NO: 836912 - DNA, 33 bp, Homo sapien
acttctaccagttacagtattgtttgattctag

SEQ ID NO: 836913 - DNA, 33 bp, Homo sapien
atcaaggaagaactcacagagcatttggctggg

SEQ ID NO: 836914 - DNA, 33 bp, Homo sapien
atcaaggaagaactcatagagcatttggctggg

SEQ ID NO: 836915 - DNA, 33 bp, Homo sapien
acagtgatttgatcaacatgggtggtcagggca

SEQ ID NO: 836916 - DNA, 33 bp, Homo sapien
acagtgatttgatcaagatgggtggtcagggca

SEQ ID NO: 836917 - DNA, 33 bp, Homo sapien
agtgtggcctaacgtacagatgacttctatagg

SEQ ID NO: 836918 - DNA, 33 bp, Homo sapien
agtgtggcctaacgtatagatgacttctatagg

SEQ ID NO: 836919 - DNA, 33 bp, Homo sapien
atgctgtgtagaaaaacggaattaagtatgaaa

SEQ ID NO: 836920 - DNA, 33 bp, Homo sapien
atgctgtgtagaaaaatggaattaagtatgaaa

SEQ ID NO: 836921 - DNA, 33 bp, Homo sapien
caattacacaaccagaactcattaattggttca

SEQ ID NO: 836922 - DNA, 33 bp, Homo sapien
caattacacaaccagagctcattaattggttca

SEQ ID NO: 836923 - DNA, 33 bp, Homo sapien
gcttctcggatatgaacacaatcatgctgaaga

SEQ ID NO: 836924 - DNA, 33 bp, Homo sapien
gcttctcggatatgaatacaatcatgctgaaga

SEQ ID NO: 836925 - DNA, 33 bp, Homo sapien
tgccagcagtaaatcaacaaaattaagtgctat

SEQ ID NO: 836926 - DNA, 33 bp, Homo sapien
tgccagcagtaaatcagcaaaattaagtgctat

SEQ ID NO: 836927 - DNA, 33 bp, Homo sapien
agcacacgaaaggtaaagaaaatgacttggggt

SEQ ID NO: 836928 - DNA, 33 bp, Homo sapien
agcacacgaaaggtaaggaaaatgacttggggt

SEQ ID NO: 836929 - DNA, 33 bp, Homo sapien
tcttgccactataccacattgcctcttaggact

SEQ ID NO: 836930 - DNA, 33 bp, Homo sapien
tcttgccactataccatattgcctcttaggact

SEQ ID NO: 836931 - DNA, 33 bp, Homo sapien
acagtttatttctcagccatgggacagtcagtg

SEQ ID NO: 836932 - DNA, 33 bp, Homo sapien
acagtttatttctcagtcatgggacagtcagtg

SEQ ID NO: 836933 - DNA, 33 bp, Homo sapien
tccagcagggatgaacaaccggcaaaactcttc

SEQ ID NO: 836934 - DNA, 33 bp, Homo sapien
tccagcagggatgaacgaccggcaaaactcttc

SEQ ID NO: 836935 - DNA, 33 bp, Homo sapien
tgacacttacttcttgaaaaaaacttcaagttt

SEQ ID NO: 836936 - DNA, 33 bp, Homo sapien
tgacacttacttcttggaaaaaacttcaagttt

SEQ ID NO: 836937 - DNA, 33 bp, Homo sapien
gctgcatttctgtgaccccgtgtggcctatcct

SEQ ID NO: 836938 - DNA, 33 bp, Homo sapien
gctgcatttctgtgacgccgtgtggcctatcct

SEQ ID NO: 836939 - DNA, 33 bp, Homo sapien
aagacatttttacagacgatttcggccccatct

SEQ ID NO: 836940 - DNA, 33 bp, Homo sapien
aagacatttttacagaggatttcggccccatct

SEQ ID NO: 836941 - DNA, 33 bp, Homo sapien
tacttgccaagttctcaaatcactcaacagagg

SEQ ID NO: 836942 - DNA, 33 bp, Homo sapien
tacttgccaagttctccaatcactcaacagagg

SEQ ID NO: 836943 - DNA, 33 bp, Homo sapien
atccccagtgcctacaatagtgcctagcacata

SEQ ID NO: 836944 - DNA, 33 bp, Homo sapien
atccccagtgcctacagtagtgcctagcacata

SEQ ID NO: 836945 - DNA, 33 bp, Homo sapien
gatatcaccagtctcacgtttaaaaattatata

SEQ ID NO: 836946 - DNA, 33 bp, Homo sapien
gatatcaccagtctcatgtttaaaaattatata

SEQ ID NO: 836947 - DNA, 33 bp, Homo sapien
tcactaagattattcaaaaccagatctcgaatt

SEQ ID NO: 836948 - DNA, 33 bp, Homo sapien
tcactaagattattcagaaccagatctcgaatt

SEQ ID NO: 836949 - DNA, 33 bp, Homo sapien
aaatcaccaagatgagacaatcattctagcact

SEQ ID NO: 836950 - DNA, 33 bp, Homo sapien
aaatcaccaagatgaggcaatcattctagcact

SEQ ID NO: 836951 - DNA, 33 bp, Homo sapien
ttaagcaaggttaagcaccacaaccttacatag

SEQ ID NO: 836952 - DNA, 33 bp, Homo sapien
ttaagcaaggttaagcgccacaaccttacatag

SEQ ID NO: 836953 - DNA, 33 bp, Homo sapien
tccaatttttacattaccaaggttgcccaaatc

SEQ ID NO: 836954 - DNA, 33 bp, Homo sapien
tccaatttttacattagcaaggttgcccaaatc

SEQ ID NO: 836955 - DNA, 33 bp, Homo sapien
ttagtaagaatgaaaaatcaggtgagtggtcac

SEQ ID NO: 836956 - DNA, 33 bp, Homo sapien
ttagtaagaatgaaaagtcaggtgagtggtcac

SEQ ID NO: 836957 - DNA, 33 bp, Homo sapien
tttgtctcatatactaatacacagcattcgcaa

SEQ ID NO: 836958 - DNA, 33 bp, Homo sapien
tttgtctcatatactagtacacagcattcgcaa

SEQ ID NO: 836959 - DNA, 33 bp, Homo sapien
attatccgttttttgaactaagtgttacacaaa

SEQ ID NO: 836960 - DNA, 33 bp, Homo sapien
attatccgttttttgatctaagtgttacacaaa

SEQ ID NO: 836961 - DNA, 33 bp, Homo sapien
catccacgtcttggcaacatatgagactgccta

SEQ ID NO: 836962 - DNA, 33 bp, Homo sapien
catccacgtcttggcagcatatgagactgccta

SEQ ID NO: 836963 - DNA, 33 bp, Homo sapien
cactggaactgtgctagctgaacagaaacaccg

SEQ ID NO: 836964 - DNA, 33 bp, Homo sapien
cactggaactgtgctatctgaacagaaacaccg

SEQ ID NO: 836965 - DNA, 33 bp, Homo sapien
ctcttccatggtgctcacaagtttgactgcaaa

SEQ ID NO: 836966 - DNA, 33 bp, Homo sapien
ctcttccatggtgctcgcaagtttgactgcaaa

SEQ ID NO: 836967 - DNA, 33 bp, Homo sapien
cacagataaggggggactaactactgtactctc

SEQ ID NO: 836968 - DNA, 33 bp, Homo sapien
cacagataaggggggattaactactgtactctc

SEQ ID NO: 836969 - DNA, 33 bp, Homo sapien
caaggtcaggcaaggaatattgcagttttttaa

SEQ ID NO: 836970 - DNA, 33 bp, Homo sapien
caaggtcaggcaaggagtattgcagttttttaa

SEQ ID NO: 836971 - DNA, 33 bp, Homo sapien
caactagattgacgaacaagacaaggccctgta

SEQ ID NO: 836972 - DNA, 33 bp, Homo sapien
caactagattgacgaataagacaaggccctgta

SEQ ID NO: 836973 - DNA, 33 bp, Homo sapien
attcattattaaaagacgttaagcctaatcgca

SEQ ID NO: 836974 - DNA, 33 bp, Homo sapien
attcattattaaaagatgttaagcctaatcgca

SEQ ID NO: 836975 - DNA, 33 bp, Homo sapien
acactgtttgccaggggaagaatcacatgacca

SEQ ID NO: 836976 - DNA, 33 bp, Homo sapien
acactgtttgccagggtaagaatcacatgacca

SEQ ID NO: 836977 - DNA, 33 bp, Homo sapien
tggatcttggactttacgccataggtgaagagg

SEQ ID NO: 836978 - DNA, 33 bp, Homo sapien
tggatcttggactttatgccataggtgaagagg

SEQ ID NO: 836979 - DNA, 33 bp, Homo sapien
atgtcactcctctactaaaacttctcagggctc

SEQ ID NO: 836980 - DNA, 33 bp, Homo sapien
atgtcactcctctactgaaacttctcagggctc

SEQ ID NO: 836981 - DNA, 33 bp, Homo sapien
gataaacaattcagcacctagaataattctcca

SEQ ID NO: 836982 - DNA, 33 bp, Homo sapien
gataaacaattcagcatctagaataattctcca

SEQ ID NO: 836983 - DNA, 33 bp, Homo sapien
ctcccattctccttacaaaagacagccaggtag

SEQ ID NO: 836984 - DNA, 33 bp, Homo sapien
ctcccattctccttacgaaagacagccaggtag

SEQ ID NO: 836985 - DNA, 33 bp, Homo sapien
caacatcagatccacaacccccgctgcctcact

SEQ ID NO: 836986 - DNA, 33 bp, Homo sapien
caacatcagatccacagcccccgctgcctcact

SEQ ID NO: 836987 - DNA, 33 bp, Homo sapien
ttagacctctagtttgcaaggcctgttttacat

SEQ ID NO: 836988 - DNA, 33 bp, Homo sapien
ttagacctctagtttgtaaggcctgttttacat

SEQ ID NO: 836989 - DNA, 33 bp, Homo sapien
attttgaaagtgatgaataactggctggtctag

SEQ ID NO: 836990 - DNA, 33 bp, Homo sapien
attttgaaagtgatgagtaactggctggtctag

SEQ ID NO: 836991 - DNA, 33 bp, Homo sapien
gctatatgctcatttaacatagtccagagtacc

SEQ ID NO: 836992 - DNA, 33 bp, Homo sapien
gctatatgctcatttaccatagtccagagtacc

SEQ ID NO: 836993 - DNA, 33 bp, Homo sapien
cagctttattgagataccgtttatataccatac

SEQ ID NO: 836994 - DNA, 33 bp, Homo sapien
cagctttattgagatatcgtttatataccatac

SEQ ID NO: 836995 - DNA, 33 bp, Homo sapien
tgaatacatatctccaataattcacacaaaaag

SEQ ID NO: 836996 - DNA, 33 bp, Homo sapien
tgaatacatatctccagtaattcacacaaaaag

SEQ ID NO: 836997 - DNA, 33 bp, Homo sapien
gcgtagagtcaacaacaaaatgagaaggagctg

SEQ ID NO: 836998 - DNA, 33 bp, Homo sapien
gcgtagagtcaacaacgaaatgagaaggagctg

SEQ ID NO: 836999 - DNA, 33 bp, Homo sapien
tgtgtttgattgtgcaacattaggaggataagg

SEQ ID NO: 837000 - DNA, 33 bp, Homo sapien
tgtgtttgattgtgcatcattaggaggataagg

SEQ ID NO: 837001 - DNA, 33 bp, Homo sapien
actcaataaatgccaactatcagtgtgactagg

SEQ ID NO: 837002 - DNA, 33 bp, Homo sapien
actcaataaatgccaagtatcagtgtgactagg

SEQ ID NO: 837003 - DNA, 33 bp, Homo sapien
tatgtcccttgacacaccctgattactgtaaca

SEQ ID NO: 837004 - DNA, 33 bp, Homo sapien
tatgtcccttgacacatcctgattactgtaaca

SEQ ID NO: 837005 - DNA, 33 bp, Homo sapien
gcttccttcctctaaaatcctagagcatttgta

SEQ ID NO: 837006 - DNA, 33 bp, Homo sapien
gcttccttcctctaaactcctagagcatttgta

SEQ ID NO: 837007 - DNA, 33 bp, Homo sapien
tcgttttctaaaaatacgctaggcctgcaatgt

SEQ ID NO: 837008 - DNA, 33 bp, Homo sapien
tcgttttctaaaaatatgctaggcctgcaatgt

SEQ ID NO: 837009 - DNA, 33 bp, Homo sapien
gagctaacgagcagtacctatatttgctgattt

SEQ ID NO: 837010 - DNA, 33 bp, Homo sapien
gagctaacgagcagtatctatatttgctgattt

SEQ ID NO: 837011 - DNA, 33 bp, Homo sapien
attctttcctattccccgatagcattaagttat

SEQ ID NO: 837012 - DNA, 33 bp, Homo sapien
attctttcctattccctgatagcattaagttat

SEQ ID NO: 837013 - DNA, 33 bp, Homo sapien
aaattataatgtggcacaaatagcatatcaatt

SEQ ID NO: 837014 - DNA, 33 bp, Homo sapien
aaattataatgtggcataaatagcatatcaatt

SEQ ID NO: 837015 - DNA, 33 bp, Homo sapien
ttgcagtttgactgtagcctagcttgcttaatt

SEQ ID NO: 837016 - DNA, 33 bp, Homo sapien
ttgcagtttgactgtatcctagcttgcttaatt

SEQ ID NO: 837017 - DNA, 33 bp, Homo sapien
tatgaactgtcagagcactgaataagttttcct

SEQ ID NO: 837018 - DNA, 33 bp, Homo sapien
tatgaactgtcagagcgctgaataagttttcct

SEQ ID NO: 837019 - DNA, 33 bp, Homo sapien
aatggatgctgtaagtcaaaaagttaacttaca

SEQ ID NO: 837020 - DNA, 33 bp, Homo sapien
aatggatgctgtaagttaaaaagttaacttaca

SEQ ID NO: 837021 - DNA, 33 bp, Homo sapien
ttgagtgtcccttatcggaaatgcttgggacca

SEQ ID NO: 837022 - DNA, 33 bp, Homo sapien
ttgagtgtcccttatctgaaatgcttgggacca

SEQ ID NO: 837023 - DNA, 33 bp, Homo sapien
gtgcccaagtggaaagcactgaagatacaggtt

SEQ ID NO: 837024 - DNA, 33 bp, Homo sapien
gtgcccaagtggaaagtactgaagatacaggtt

SEQ ID NO: 837025 - DNA, 33 bp, Homo sapien
cgacccaactggtctcaagtttcctatctcttc

SEQ ID NO: 837026 - DNA, 33 bp, Homo sapien
cgacccaactggtctctagtttcctatctcttc

SEQ ID NO: 837027 - DNA, 33 bp, Homo sapien
ctcttgagagtgaagaacagttcttttcaaatc

SEQ ID NO: 837028 - DNA, 33 bp, Homo sapien
ctcttgagagtgaagaccagttcttttcaaatc

SEQ ID NO: 837029 - DNA, 33 bp, Homo sapien
aagtgatagaactatacatatctgcagcagaaa

SEQ ID NO: 837030 - DNA, 33 bp, Homo sapien
aagtgatagaactatagatatctgcagcagaaa

SEQ ID NO: 837031 - DNA, 33 bp, Homo sapien
ccacaggcttaataccacttagaagccgccagt

SEQ ID NO: 837032 - DNA, 33 bp, Homo sapien
ccacaggcttaataccgcttagaagccgccagt

SEQ ID NO: 837033 - DNA, 33 bp, Homo sapien
ttgctgtccagggataccagtgttttcttgaga

SEQ ID NO: 837034 - DNA, 33 bp, Homo sapien
ttgctgtccagggatatcagtgttttcttgaga

SEQ ID NO: 837035 - DNA, 33 bp, Homo sapien
tgggaggaaagctgaacaggagtaggttcaaaa

SEQ ID NO: 837036 - DNA, 33 bp, Homo sapien
tgggaggaaagctgaataggagtaggttcaaaa

SEQ ID NO: 837037 - DNA, 33 bp, Homo sapien
gttagactgagataagaacagtgaagaatgtga

SEQ ID NO: 837038 - DNA, 33 bp, Homo sapien
gttagactgagataaggacagtgaagaatgtga

SEQ ID NO: 837039 - DNA, 33 bp, Homo sapien
caatgtaaatgctatgcatatagttggtgcact

SEQ ID NO: 837040 - DNA, 33 bp, Homo sapien
caatgtaaatgctatgtatatagttggtgcact

SEQ ID NO: 837041 - DNA, 33 bp, Homo sapien
cctctttcttgaagccacacattcttgactgtc

SEQ ID NO: 837042 - DNA, 33 bp, Homo sapien
cctctttcttgaagccgcacattcttgactgtc

SEQ ID NO: 837043 - DNA, 33 bp, Homo sapien
ttagtgctgattctcaagtagaaaagaaaatca

SEQ ID NO: 837044 - DNA, 33 bp, Homo sapien
ttagtgctgattctcaggtagaaaagaaaatca

SEQ ID NO: 837045 - DNA, 33 bp, Homo sapien
ctcaacaaaccatgcacatcatctgttcagaac

SEQ ID NO: 837046 - DNA, 33 bp, Homo sapien
ctcaacaaaccatgcatatcatctgttcagaac

SEQ ID NO: 837047 - DNA, 33 bp, Homo sapien
ctttagaacatgagcgaaaatggatagaagtag

SEQ ID NO: 837048 - DNA, 33 bp, Homo sapien
ctttagaacatgagcgtaaatggatagaagtag

SEQ ID NO: 837049 - DNA, 33 bp, Homo sapien
acagacatccagttccacctctttgaaacagct

SEQ ID NO: 837050 - DNA, 33 bp, Homo sapien
acagacatccagttccccctctttgaaacagct

SEQ ID NO: 837051 - DNA, 33 bp, Homo sapien
aatatgagacacaaaaatattctggcagtctgt

SEQ ID NO: 837052 - DNA, 33 bp, Homo sapien
aatatgagacacaaaattattctggcagtctgt

SEQ ID NO: 837053 - DNA, 33 bp, Homo sapien
tgtcctgtattaggcacattgagtcttaaaagg

SEQ ID NO: 837054 - DNA, 33 bp, Homo sapien
tgtcctgtattaggcatattgagtcttaaaagg

SEQ ID NO: 837055 - DNA, 33 bp, Homo sapien
tacataccactcaaaagaattttcacataacag

SEQ ID NO: 837056 - DNA, 33 bp, Homo sapien
tacataccactcaaaataattttcacataacag

SEQ ID NO: 837057 - DNA, 33 bp, Homo sapien
gttagggaactctttgaaagaggcaagatttga

SEQ ID NO: 837058 - DNA, 33 bp, Homo sapien
gttagggaactctttggaagaggcaagatttga

SEQ ID NO: 837059 - DNA, 33 bp, Homo sapien
tttcactggttctacaaattgccttaatcaaca

SEQ ID NO: 837060 - DNA, 33 bp, Homo sapien
tttcactggttctacacattgccttaatcaaca

SEQ ID NO: 837061 - DNA, 33 bp, Homo sapien
tacttgggagcgaggaatattggagacagggaa

SEQ ID NO: 837062 - DNA, 33 bp, Homo sapien
tacttgggagcgaggagtattggagacagggaa

SEQ ID NO: 837063 - DNA, 33 bp, Homo sapien
tatgcttgtcaaccatcacttcacctatccatc

SEQ ID NO: 837064 - DNA, 33 bp, Homo sapien
tatgcttgtcaaccattacttcacctatccatc

SEQ ID NO: 837065 - DNA, 33 bp, Homo sapien
ttgtgtcttagttttacgcactttgcttccata

SEQ ID NO: 837066 - DNA, 33 bp, Homo sapien
ttgtgtcttagttttatgcactttgcttccata

SEQ ID NO: 837067 - DNA, 33 bp, Homo sapien
gtgacacaatgaggacagagtgaagcaaattcc

SEQ ID NO: 837068 - DNA, 33 bp, Homo sapien
gtgacacaatgaggacggagtgaagcaaattcc

SEQ ID NO: 837069 - DNA, 33 bp, Homo sapien
attttaacgagactaaagagacagtaaatacag

SEQ ID NO: 837070 - DNA, 33 bp, Homo sapien
attttaacgagactaaggagacagtaaatacag

SEQ ID NO: 837071 - DNA, 33 bp, Homo sapien
atttaaagcatgataaaggaaagacaaaattaa

SEQ ID NO: 837072 - DNA, 33 bp, Homo sapien
atttaaagcatgataagggaaagacaaaattaa

SEQ ID NO: 837073 - DNA, 33 bp, Homo sapien
tgatgtattcttcagcaacagtggaattaaact

SEQ ID NO: 837074 - DNA, 33 bp, Homo sapien
tgatgtattcttcagccacagtggaattaaact

SEQ ID NO: 837075 - DNA, 33 bp, Homo sapien
caaaattaattactccaaatcatcaagagaaat

SEQ ID NO: 837076 - DNA, 33 bp, Homo sapien
caaaattaattactccgaatcatcaagagaaat

SEQ ID NO: 837077 - DNA, 33 bp, Homo sapien
aattgtgtaccccccacaaaatatgtccaagtc

SEQ ID NO: 837078 - DNA, 33 bp, Homo sapien
aattgtgtaccccccataaaatatgtccaagtc

SEQ ID NO: 837079 - DNA, 33 bp, Homo sapien
caatgaaaaagaaaagccatgtatacgtccctt

SEQ ID NO: 837080 - DNA, 33 bp, Homo sapien
caatgaaaaagaaaagtcatgtatacgtccctt

SEQ ID NO: 837081 - DNA, 33 bp, Homo sapien
aagatgatgttcattaaggaaaataaatgtaat

SEQ ID NO: 837082 - DNA, 33 bp, Homo sapien
aagatgatgttcattagggaaaataaatgtaat

SEQ ID NO: 837083 - DNA, 33 bp, Homo sapien
tgccagtgcagaaacccgaaaaacctgacaata

SEQ ID NO: 837084 - DNA, 33 bp, Homo sapien
tgccagtgcagaaacctgaaaaacctgacaata

SEQ ID NO: 837085 - DNA, 33 bp, Homo sapien
tggtttttgagtgtcaaatattgcttggcaggt

SEQ ID NO: 837086 - DNA, 33 bp, Homo sapien
tggtttttgagtgtcagatattgcttggcaggt

SEQ ID NO: 837087 - DNA, 33 bp, Homo sapien
tataattagggtgaccacatcaatttatcatcc

SEQ ID NO: 837088 - DNA, 33 bp, Homo sapien
tataattagggtgaccgcatcaatttatcatcc

SEQ ID NO: 837089 - DNA, 33 bp, Homo sapien
gacacctcttgttttacgtacacatctccatgc

SEQ ID NO: 837090 - DNA, 33 bp, Homo sapien
gacacctcttgttttatgtacacatctccatgc

SEQ ID NO: 837091 - DNA, 33 bp, Homo sapien
ggaatgggaaatgtagacattaaggaagaatca

SEQ ID NO: 837092 - DNA, 33 bp, Homo sapien
ggaatgggaaatgtaggcattaaggaagaatca

SEQ ID NO: 837093 - DNA, 33 bp, Homo sapien
gaaatcaatataggctcactgaggtaaacaact

SEQ ID NO: 837094 - DNA, 33 bp, Homo sapien
gaaatcaatataggcttactgaggtaaacaact

SEQ ID NO: 837095 - DNA, 33 bp, Homo sapien
tagagtcaaaagtaaaatacatctcatccccat

SEQ ID NO: 837096 - DNA, 33 bp, Homo sapien
tagagtcaaaagtaaagtacatctcatccccat

SEQ ID NO: 837097 - DNA, 33 bp, Homo sapien
agaaagaaaagaaaagaatctagaatcaagcca

SEQ ID NO: 837098 - DNA, 33 bp, Homo sapien
agaaagaaaagaaaaggatctagaatcaagcca

SEQ ID NO: 837099 - DNA, 33 bp, Homo sapien
atcatatattctgcaaccaacttttactcaaca

SEQ ID NO: 837100 - DNA, 33 bp, Homo sapien
atcatatattctgcaatcaacttttactcaaca

SEQ ID NO: 837101 - DNA, 33 bp, Homo sapien
tctaaaaaataaaagcaaatggtagtgctaaca

SEQ ID NO: 837102 - DNA, 33 bp, Homo sapien
tctaaaaaataaaagcgaatggtagtgctaaca

SEQ ID NO: 837103 - DNA, 33 bp, Homo sapien
caatttggtcccatcacggatcatcatagaaat

SEQ ID NO: 837104 - DNA, 33 bp, Homo sapien
caatttggtcccatcatggatcatcatagaaat

SEQ ID NO: 837105 - DNA, 33 bp, Homo sapien
acaacccataatgctacagatagctagattcca

SEQ ID NO: 837106 - DNA, 33 bp, Homo sapien
acaacccataatgctagagatagctagattcca

SEQ ID NO: 837107 - DNA, 33 bp, Homo sapien
agccatcgggcccaacactttcaaattaattta

SEQ ID NO: 837108 - DNA, 33 bp, Homo sapien
agccatcgggcccaacgctttcaaattaattta

SEQ ID NO: 837109 - DNA, 33 bp, Homo sapien
tagttaaccttctaggccagaattcatattata

SEQ ID NO: 837110 - DNA, 33 bp, Homo sapien
tagttaaccttctaggtcagaattcatattata

SEQ ID NO: 837111 - DNA, 33 bp, Homo sapien
gtagtgatttgcatcacggttagaagcagggtc

SEQ ID NO: 837112 - DNA, 33 bp, Homo sapien
gtagtgatttgcatcatggttagaagcagggtc

SEQ ID NO: 837113 - DNA, 33 bp, Homo sapien
agtaaaacaagtagaaaaaggtagagcaaagca

SEQ ID NO: 837114 - DNA, 33 bp, Homo sapien
agtaaaacaagtagaacaaggtagagcaaagca

SEQ ID NO: 837115 - DNA, 33 bp, Homo sapien
aactattaaccttaaaatggctctcacctctaa

SEQ ID NO: 837116 - DNA, 33 bp, Homo sapien
aactattaaccttaaagtggctctcacctctaa

SEQ ID NO: 837117 - DNA, 33 bp, Homo sapien
ttatttgtaaattattcaagcataacgaaatat

SEQ ID NO: 837118 - DNA, 33 bp, Homo sapien
ttatttgtaaattattgaagcataacgaaatat

SEQ ID NO: 837119 - DNA, 33 bp, Homo sapien
aaggaaacaagaatcagattagcaccaagcttc

SEQ ID NO: 837120 - DNA, 33 bp, Homo sapien
aaggaaacaagaatcatattagcaccaagcttc

SEQ ID NO: 837121 - DNA, 33 bp, Homo sapien
ctcagcaagtgtagaacaagataaatgtaaaaa

SEQ ID NO: 837122 - DNA, 33 bp, Homo sapien
ctcagcaagtgtagaagaagataaatgtaaaaa

SEQ ID NO: 837123 - DNA, 33 bp, Homo sapien
gaccaagttgagtttacccagaaacgttaggac

SEQ ID NO: 837124 - DNA, 33 bp, Homo sapien
gaccaagttgagtttatccagaaacgttaggac

SEQ ID NO: 837125 - DNA, 33 bp, Homo sapien
ctcttgttatttttggcaataggagtcagaaat

SEQ ID NO: 837126 - DNA, 33 bp, Homo sapien
ctcttgttatttttgggaataggagtcagaaat

SEQ ID NO: 837127 - DNA, 33 bp, Homo sapien
tccaactcatccaaaaattattcctaaaaagta

SEQ ID NO: 837128 - DNA, 33 bp, Homo sapien
tccaactcatccaaaagttattcctaaaaagta

SEQ ID NO: 837129 - DNA, 33 bp, Homo sapien
ctggcctatatcccccaaaaaaatgtcactcct

SEQ ID NO: 837130 - DNA, 33 bp, Homo sapien
ctggcctatatccccccaaaaaatgtcactcct

SEQ ID NO: 837131 - DNA, 33 bp, Homo sapien
cagaaagtatgtcagacgagactgtaagatgtt

SEQ ID NO: 837132 - DNA, 33 bp, Homo sapien
cagaaagtatgtcagatgagactgtaagatgtt

SEQ ID NO: 837133 - DNA, 33 bp, Homo sapien
tggtttatttctaatcccagacagggaatgttc

SEQ ID NO: 837134 - DNA, 33 bp, Homo sapien
tggtttatttctaatctcagacagggaatgttc

SEQ ID NO: 837135 - DNA, 33 bp, Homo sapien
caaggaggtattcaaacggagcacatagctaca

SEQ ID NO: 837136 - DNA, 33 bp, Homo sapien
caaggaggtattcaaatggagcacatagctaca

SEQ ID NO: 837137 - DNA, 33 bp, Homo sapien
agaaaagcaaagaagaggagttaatgcagcttg

SEQ ID NO: 837138 - DNA, 33 bp, Homo sapien
agaaaagcaaagaagatgagttaatgcagcttg

SEQ ID NO: 837139 - DNA, 33 bp, Homo sapien
gacttgggatcctctgcagttgtgttcttgaag

SEQ ID NO: 837140 - DNA, 33 bp, Homo sapien
gacttgggatcctctgtagttgtgttcttgaag

SEQ ID NO: 837141 - DNA, 33 bp, Homo sapien
tgttttggggatgctcgaggttttttggaggag

SEQ ID NO: 837142 - DNA, 33 bp, Homo sapien
tgttttggggatgctctaggttttttggaggag

SEQ ID NO: 837143 - DNA, 33 bp, Homo sapien
atgtagttggagtatacgtagtctgtttatcca

SEQ ID NO: 837144 - DNA, 33 bp, Homo sapien
atgtagttggagtatatgtagtctgtttatcca

SEQ ID NO: 837145 - DNA, 33 bp, Homo sapien
aataaatgcaaacaaactgaactcactaagaca

SEQ ID NO: 837146 - DNA, 33 bp, Homo sapien
aataaatgcaaacaaattgaactcactaagaca

SEQ ID NO: 837147 - DNA, 33 bp, Homo sapien
tcaattctttcacgaggccttcaatacatcatg

SEQ ID NO: 837148 - DNA, 33 bp, Homo sapien
tcaattctttcacgagtccttcaatacatcatg

SEQ ID NO: 837149 - DNA, 33 bp, Homo sapien
atgtcaactagtcaagaaagacttactccaata

SEQ ID NO: 837150 - DNA, 33 bp, Homo sapien
atgtcaactagtcaaggaagacttactccaata

SEQ ID NO: 837151 - DNA, 33 bp, Homo sapien
tcaaactctcaagaaaagactctgattggtcca

SEQ ID NO: 837152 - DNA, 33 bp, Homo sapien
tcaaactctcaagaaaggactctgattggtcca

SEQ ID NO: 837153 - DNA, 33 bp, Homo sapien
aagtcatggcttgacacacaaaacaatagattt

SEQ ID NO: 837154 - DNA, 33 bp, Homo sapien
aagtcatggcttgacagacaaaacaatagattt

SEQ ID NO: 837155 - DNA, 33 bp, Homo sapien
atggtggttaagcaacaatgtgaatatactaaa

SEQ ID NO: 837156 - DNA, 33 bp, Homo sapien
atggtggttaagcaacgatgtgaatatactaaa

SEQ ID NO: 837157 - DNA, 33 bp, Homo sapien
gcacatggacaatatgcatgaactttgaaaaat

SEQ ID NO: 837158 - DNA, 33 bp, Homo sapien
gcacatggacaatatggatgaactttgaaaaat

SEQ ID NO: 837159 - DNA, 33 bp, Homo sapien
acctacaggagactcaaatcattctagcctgac

SEQ ID NO: 837160 - DNA, 33 bp, Homo sapien
acctacaggagactcagatcattctagcctgac

SEQ ID NO: 837161 - DNA, 33 bp, Homo sapien
tctacttgagtctgtgaaagtttttcgtgagga

SEQ ID NO: 837162 - DNA, 33 bp, Homo sapien
tctacttgagtctgtggaagtttttcgtgagga

SEQ ID NO: 837163 - DNA, 33 bp, Homo sapien
tgcagaagcatatgaactggtaatttaagtatt

SEQ ID NO: 837164 - DNA, 33 bp, Homo sapien
tgcagaagcatatgaattggtaatttaagtatt

SEQ ID NO: 837165 - DNA, 33 bp, Homo sapien
gtttaacttcaaggtcaacattatcagtcagaa

SEQ ID NO: 837166 - DNA, 33 bp, Homo sapien
gtttaacttcaaggtcgacattatcagtcagaa

SEQ ID NO: 837167 - DNA, 33 bp, Homo sapien
ctgataccaagctatcagagaaaaagttaaaca

SEQ ID NO: 837168 - DNA, 33 bp, Homo sapien
ctgataccaagctatcggagaaaaagttaaaca

SEQ ID NO: 837169 - DNA, 33 bp, Homo sapien
tgtggctgagcaactacatgtatctggggtaga

SEQ ID NO: 837170 - DNA, 33 bp, Homo sapien
tgtggctgagcaactagatgtatctggggtaga

SEQ ID NO: 837171 - DNA, 33 bp, Homo sapien
ccagagtcaagcttgaagtctgatgttcactta

SEQ ID NO: 837172 - DNA, 33 bp, Homo sapien
ccagagtcaagcttgaggtctgatgttcactta

SEQ ID NO: 837173 - DNA, 33 bp, Homo sapien
tcttttcctagattcaatagttccacagaccag

SEQ ID NO: 837174 - DNA, 33 bp, Homo sapien
tcttttcctagattcagtagttccacagaccag

SEQ ID NO: 837175 - DNA, 33 bp, Homo sapien
aatgactgaaatctctaactatcaagttaattt

SEQ ID NO: 837176 - DNA, 33 bp, Homo sapien
aatgactgaaatctcttactatcaagttaattt

SEQ ID NO: 837177 - DNA, 33 bp, Homo sapien
cttttggtaaaacttcaaaacaggcagtctgtg

SEQ ID NO: 837178 - DNA, 33 bp, Homo sapien
cttttggtaaaacttcgaaacaggcagtctgtg

SEQ ID NO: 837179 - DNA, 33 bp, Homo sapien
ggagatctgaacattgcatagtagccacgagtc

SEQ ID NO: 837180 - DNA, 33 bp, Homo sapien
ggagatctgaacattgtatagtagccacgagtc

SEQ ID NO: 837181 - DNA, 33 bp, Homo sapien
atagtattgaaccatacgaaactgttgatatcc

SEQ ID NO: 837182 - DNA, 33 bp, Homo sapien
atagtattgaaccatatgaaactgttgatatcc

SEQ ID NO: 837183 - DNA, 33 bp, Homo sapien
cattttcgtaatctaacacacattccatgcata

SEQ ID NO: 837184 - DNA, 33 bp, Homo sapien
cattttcgtaatctaatacacattccatgcata

SEQ ID NO: 837185 - DNA, 33 bp, Homo sapien
actatccaggagttataagctgttctctcttac

SEQ ID NO: 837186 - DNA, 33 bp, Homo sapien
actatccaggagttatgagctgttctctcttac

SEQ ID NO: 837187 - DNA, 33 bp, Homo sapien
ttaacaaggtcctatacgaaagaattgtaacaa

SEQ ID NO: 837188 - DNA, 33 bp, Homo sapien
ttaacaaggtcctatatgaaagaattgtaacaa

SEQ ID NO: 837189 - DNA, 33 bp, Homo sapien
cgagcctttgtggccacgaaatgaactaagata

SEQ ID NO: 837190 - DNA, 33 bp, Homo sapien
cgagcctttgtggccatgaaatgaactaagata

SEQ ID NO: 837191 - DNA, 33 bp, Homo sapien
aattttttgatagacaacattgcaaaacaacat

SEQ ID NO: 837192 - DNA, 33 bp, Homo sapien
aattttttgatagacaccattgcaaaacaacat

SEQ ID NO: 837193 - DNA, 33 bp, Homo sapien
aagtagatggtgtcaacgaagcagtgtaggtcg

SEQ ID NO: 837194 - DNA, 33 bp, Homo sapien
aagtagatggtgtcaatgaagcagtgtaggtcg

SEQ ID NO: 837195 - DNA, 33 bp, Homo sapien
agcgctcctgaattccaaactcacgtatccaac

SEQ ID NO: 837196 - DNA, 33 bp, Homo sapien
agcgctcctgaattccgaactcacgtatccaac

SEQ ID NO: 837197 - DNA, 33 bp, Homo sapien
tctacacattttgaccgcctctccctcttcccg

SEQ ID NO: 837198 - DNA, 33 bp, Homo sapien
tctacacattttgacctcctctccctcttcccg

SEQ ID NO: 837199 - DNA, 33 bp, Homo sapien
tatttaaagacatttaagagttctgtttggaca

SEQ ID NO: 837200 - DNA, 33 bp, Homo sapien
tatttaaagacatttaggagttctgtttggaca

SEQ ID NO: 837201 - DNA, 33 bp, Homo sapien
aataggatttgtgagacagttgtaaaagtaatt

SEQ ID NO: 837202 - DNA, 33 bp, Homo sapien
aataggatttgtgagagagttgtaaaagtaatt

SEQ ID NO: 837203 - DNA, 33 bp, Homo sapien
ttgtatctgaaaactaactgagagtattacatt

SEQ ID NO: 837204 - DNA, 33 bp, Homo sapien
ttgtatctgaaaactatctgagagtattacatt

SEQ ID NO: 837205 - DNA, 33 bp, Homo sapien
aggactctggtgcagacagaaagatctagtcag

SEQ ID NO: 837206 - DNA, 33 bp, Homo sapien
aggactctggtgcagagagaaagatctagtcag

SEQ ID NO: 837207 - DNA, 33 bp, Homo sapien
ctattggagcacaggaaaacacaattagttctt

SEQ ID NO: 837208 - DNA, 33 bp, Homo sapien
ctattggagcacaggagaacacaattagttctt

SEQ ID NO: 837209 - DNA, 33 bp, Homo sapien
tttcatccatctcatcccgtgcaaacaagttgg

SEQ ID NO: 837210 - DNA, 33 bp, Homo sapien
tttcatccatctcatctcgtgcaaacaagttgg

SEQ ID NO: 837211 - DNA, 33 bp, Homo sapien
tcaatgaatagaaagagtcttctgctggatgtt

SEQ ID NO: 837212 - DNA, 33 bp, Homo sapien
tcaatgaatagaaagattcttctgctggatgtt

SEQ ID NO: 837213 - DNA, 33 bp, Homo sapien
taatagttcaggtatacgctggtataagttaaa

SEQ ID NO: 837214 - DNA, 33 bp, Homo sapien
taatagttcaggtatatgctggtataagttaaa

SEQ ID NO: 837215 - DNA, 33 bp, Homo sapien
tctgaaaatggcaaagaaaatacaattacccta

SEQ ID NO: 837216 - DNA, 33 bp, Homo sapien
tctgaaaatggcaaagcaaatacaattacccta

SEQ ID NO: 837217 - DNA, 33 bp, Homo sapien
aagagatcaccgaaccaaaggagtcttagaaca

SEQ ID NO: 837218 - DNA, 33 bp, Homo sapien
aagagatcaccgaaccgaaggagtcttagaaca

SEQ ID NO: 837219 - DNA, 33 bp, Homo sapien
tcagtgcttctcatccaagtggatatagcccag

SEQ ID NO: 837220 - DNA, 33 bp, Homo sapien
tcagtgcttctcatccgagtggatatagcccag

SEQ ID NO: 837221 - DNA, 33 bp, Homo sapien
tggctcatgcagagatcaaccactacagtgtgt

SEQ ID NO: 837222 - DNA, 33 bp, Homo sapien
tggctcatgcagagatgaaccactacagtgtgt

SEQ ID NO: 837223 - DNA, 33 bp, Homo sapien
tccttcccaatttattcaagcgtcacagcactg

SEQ ID NO: 837224 - DNA, 33 bp, Homo sapien
tccttcccaatttattgaagcgtcacagcactg

SEQ ID NO: 837225 - DNA, 33 bp, Homo sapien
gattttatacagaatcacatgctgcacttagaa

SEQ ID NO: 837226 - DNA, 33 bp, Homo sapien
gattttatacagaatcgcatgctgcacttagaa

SEQ ID NO: 837227 - DNA, 33 bp, Homo sapien
gtcataacccgttgcaataactgcatttcaatg

SEQ ID NO: 837228 - DNA, 33 bp, Homo sapien
gtcataacccgttgcagtaactgcatttcaatg

SEQ ID NO: 837229 - DNA, 33 bp, Homo sapien
gctttggggatgtaagaataaaccagatattgc

SEQ ID NO: 837230 - DNA, 33 bp, Homo sapien
gctttggggatgtaaggataaaccagatattgc

SEQ ID NO: 837231 - DNA, 33 bp, Homo sapien
tcattcatgttacctccccaacgtgctgttata

SEQ ID NO: 837232 - DNA, 33 bp, Homo sapien
tcattcatgttacctctccaacgtgctgttata

SEQ ID NO: 837233 - DNA, 33 bp, Homo sapien
ccgcctttcaaacacacggggaactgcatttcc

SEQ ID NO: 837234 - DNA, 33 bp, Homo sapien
ccgcctttcaaacacatggggaactgcatttcc

SEQ ID NO: 837235 - DNA, 33 bp, Homo sapien
atgcactcctttctggaccaatcaatgaactgt

SEQ ID NO: 837236 - DNA, 33 bp, Homo sapien
atgcactcctttctgggccaatcaatgaactgt

SEQ ID NO: 837237 - DNA, 33 bp, Homo sapien
agaaaccttatgtacacagctggaatgggggac

SEQ ID NO: 837238 - DNA, 33 bp, Homo sapien
agaaaccttatgtacagagctggaatgggggac

SEQ ID NO: 837239 - DNA, 33 bp, Homo sapien
agcaaagcagtatgataacactaaaggatataa

SEQ ID NO: 837240 - DNA, 33 bp, Homo sapien
agcaaagcagtatgatgacactaaaggatataa

SEQ ID NO: 837241 - DNA, 33 bp, Homo sapien
tccttcagtgttaaagccaaatctatgttgttc

SEQ ID NO: 837242 - DNA, 33 bp, Homo sapien
tccttcagtgttaaaggcaaatctatgttgttc

SEQ ID NO: 837243 - DNA, 33 bp, Homo sapien
gctgattcctgtataaaggtattaaaatgtcta

SEQ ID NO: 837244 - DNA, 33 bp, Homo sapien
gctgattcctgtataagggtattaaaatgtcta

SEQ ID NO: 837245 - DNA, 33 bp, Homo sapien
ttaagtggtcttctcaaccaattatctacaatt

SEQ ID NO: 837246 - DNA, 33 bp, Homo sapien
ttaagtggtcttctcagccaattatctacaatt

SEQ ID NO: 837247 - DNA, 33 bp, Homo sapien
tctggggcttagactaagaaaacttgtaaactc

SEQ ID NO: 837248 - DNA, 33 bp, Homo sapien
tctggggcttagactaggaaaacttgtaaactc

SEQ ID NO: 837249 - DNA, 33 bp, Homo sapien
ttgtgggatctttctacggaatctcctcattga

SEQ ID NO: 837250 - DNA, 33 bp, Homo sapien
ttgtgggatctttctatggaatctcctcattga

SEQ ID NO: 837251 - DNA, 33 bp, Homo sapien
ttgttggatctcgatgaagcgtatgaatgttta

SEQ ID NO: 837252 - DNA, 33 bp, Homo sapien
ttgttggatctcgatggagcgtatgaatgttta

SEQ ID NO: 837253 - DNA, 33 bp, Homo sapien
gaatttgacaatattcactaaatcttgatctag

SEQ ID NO: 837254 - DNA, 33 bp, Homo sapien
gaatttgacaatattcgctaaatcttgatctag

SEQ ID NO: 837255 - DNA, 33 bp, Homo sapien
tcagaccaaggtctacagagctagtgttatgtc

SEQ ID NO: 837256 - DNA, 33 bp, Homo sapien
tcagaccaaggtctacggagctagtgttatgtc

SEQ ID NO: 837257 - DNA, 33 bp, Homo sapien
cctctggctctggtgaagtgttcatctgtgtca

SEQ ID NO: 837258 - DNA, 33 bp, Homo sapien
cctctggctctggtgaggtgttcatctgtgtca

SEQ ID NO: 837259 - DNA, 33 bp, Homo sapien
ttaaaagccccaaactcaatctcctccatctac

SEQ ID NO: 837260 - DNA, 33 bp, Homo sapien
ttaaaagccccaaactgaatctcctccatctac

SEQ ID NO: 837261 - DNA, 33 bp, Homo sapien
agaacatgggatataaatgaatggggtgagaaa

SEQ ID NO: 837262 - DNA, 33 bp, Homo sapien
agaacatgggatataactgaatggggtgagaaa

SEQ ID NO: 837263 - DNA, 33 bp, Homo sapien
gctataattgggccatcatggagaactcgatgc

SEQ ID NO: 837264 - DNA, 33 bp, Homo sapien
gctataattgggccatgatggagaactcgatgc

SEQ ID NO: 837265 - DNA, 33 bp, Homo sapien
tgagatgatctgaacacgggcctcaaaacatag

SEQ ID NO: 837266 - DNA, 33 bp, Homo sapien
tgagatgatctgaacatgggcctcaaaacatag

SEQ ID NO: 837267 - DNA, 33 bp, Homo sapien
gaggggggtgcttaaacagcggagtggccgatg

SEQ ID NO: 837268 - DNA, 33 bp, Homo sapien
gaggggggtgcttaaagagcggagtggccgatg

SEQ ID NO: 837269 - DNA, 33 bp, Homo sapien
gctgacatcttacagaaagccacgaaacaccag

SEQ ID NO: 837270 - DNA, 33 bp, Homo sapien
gctgacatcttacagagagccacgaaacaccag

SEQ ID NO: 837271 - DNA, 33 bp, Homo sapien
atagcagcaataaataatataggttttaagttt

SEQ ID NO: 837272 - DNA, 33 bp, Homo sapien
atagcagcaataaatagtataggttttaagttt

SEQ ID NO: 837273 - DNA, 33 bp, Homo sapien
ccgaagtgcttcatacacattatgacactcagt

SEQ ID NO: 837274 - DNA, 33 bp, Homo sapien
ccgaagtgcttcatacccattatgacactcagt

SEQ ID NO: 837275 - DNA, 33 bp, Homo sapien
agagcaagaatttgaacacaaagtgatctgact

SEQ ID NO: 837276 - DNA, 33 bp, Homo sapien
agagcaagaatttgaatacaaagtgatctgact

SEQ ID NO: 837277 - DNA, 33 bp, Homo sapien
ccctaacgcagtccgacgtagcaaccttcagct

SEQ ID NO: 837278 - DNA, 33 bp, Homo sapien
ccctaacgcagtccgatgtagcaaccttcagct

SEQ ID NO: 837279 - DNA, 33 bp, Homo sapien
aaatctctcttcattgaaagtacctagcagagg

SEQ ID NO: 837280 - DNA, 33 bp, Homo sapien
aaatctctcttcattggaagtacctagcagagg

SEQ ID NO: 837281 - DNA, 33 bp, Homo sapien
atttaagtaaaacacaatgcagtttgtataaag

SEQ ID NO: 837282 - DNA, 33 bp, Homo sapien
atttaagtaaaacacagtgcagtttgtataaag

SEQ ID NO: 837283 - DNA, 33 bp, Homo sapien
acctggaccataaggaagactatagaacacctg

SEQ ID NO: 837284 - DNA, 33 bp, Homo sapien
acctggaccataaggacgactatagaacacctg

SEQ ID NO: 837285 - DNA, 33 bp, Homo sapien
tgtggatttgtctcccagcagattactcaggcc

SEQ ID NO: 837286 - DNA, 33 bp, Homo sapien
tgtggatttgtctcccggcagattactcaggcc

SEQ ID NO: 837287 - DNA, 33 bp, Homo sapien
cccgttattttccgaacgtttagctcaatctgg

SEQ ID NO: 837288 - DNA, 33 bp, Homo sapien
cccgttattttccgaatgtttagctcaatctgg

SEQ ID NO: 837289 - DNA, 33 bp, Homo sapien
gatttttcagttagagacaatcctgctggatca

SEQ ID NO: 837290 - DNA, 33 bp, Homo sapien
gatttttcagttagaggcaatcctgctggatca

SEQ ID NO: 837291 - DNA, 33 bp, Homo sapien
ggcatgagagttttcaaagtcagcattctagct

SEQ ID NO: 837292 - DNA, 33 bp, Homo sapien
ggcatgagagttttcagagtcagcattctagct

SEQ ID NO: 837293 - DNA, 33 bp, Homo sapien
tcaaggggccctggaaagagtcagcttgtacta

SEQ ID NO: 837294 - DNA, 33 bp, Homo sapien
tcaaggggccctggaaggagtcagcttgtacta

SEQ ID NO: 837295 - DNA, 33 bp, Homo sapien
taaaccaaatttcaataatcagtggtgcaaaaa

SEQ ID NO: 837296 - DNA, 33 bp, Homo sapien
taaaccaaatttcaatcatcagtggtgcaaaaa

SEQ ID NO: 837297 - DNA, 33 bp, Homo sapien
gcaatgccaggaggtgaactctagaacacactt

SEQ ID NO: 837298 - DNA, 33 bp, Homo sapien
gcaatgccaggaggtggactctagaacacactt

SEQ ID NO: 837299 - DNA, 33 bp, Homo sapien
agagaactgaacttctcaaagtcctgaggaagg

SEQ ID NO: 837300 - DNA, 33 bp, Homo sapien
agagaactgaacttcttaaagtcctgaggaagg

SEQ ID NO: 837301 - DNA, 33 bp, Homo sapien
agtaggcccgctccctcaccagggtattggaga

SEQ ID NO: 837302 - DNA, 33 bp, Homo sapien
agtaggcccgctccctgaccagggtattggaga

SEQ ID NO: 837303 - DNA, 33 bp, Homo sapien
ggagtaggctatatgaacccccagttcccaggt

SEQ ID NO: 837304 - DNA, 33 bp, Homo sapien
ggagtaggctatatgagcccccagttcccaggt

SEQ ID NO: 837305 - DNA, 33 bp, Homo sapien
taccttcctttctgccaaccaaaatcttccttt

SEQ ID NO: 837306 - DNA, 33 bp, Homo sapien
taccttcctttctgccgaccaaaatcttccttt

SEQ ID NO: 837307 - DNA, 33 bp, Homo sapien
tggactgagggctccaaaaacatatttatagga

SEQ ID NO: 837308 - DNA, 33 bp, Homo sapien
tggactgagggctccacaaacatatttatagga

SEQ ID NO: 837309 - DNA, 33 bp, Homo sapien
cacgtgacctaaagaaagttatcttaagtgaga

SEQ ID NO: 837310 - DNA, 33 bp, Homo sapien
cacgtgacctaaagaaggttatcttaagtgaga

SEQ ID NO: 837311 - DNA, 33 bp, Homo sapien
gctcatgaatccattaactcctgcaccctggca

SEQ ID NO: 837312 - DNA, 33 bp, Homo sapien
gctcatgaatccattagctcctgcaccctggca

SEQ ID NO: 837313 - DNA, 33 bp, Homo sapien
gggggtatctacaggaaaacactgattttgcct

SEQ ID NO: 837314 - DNA, 33 bp, Homo sapien
gggggtatctacaggagaacactgattttgcct

SEQ ID NO: 837315 - DNA, 33 bp, Homo sapien
tttctatagctactcacaaatgtggtaaaagta

SEQ ID NO: 837316 - DNA, 33 bp, Homo sapien
tttctatagctactcataaatgtggtaaaagta

SEQ ID NO: 837317 - DNA, 33 bp, Homo sapien
tgaacttatgaaatcactgaagttatgtgcttc

SEQ ID NO: 837318 - DNA, 33 bp, Homo sapien
tgaacttatgaaatcattgaagttatgtgcttc

SEQ ID NO: 837319 - DNA, 33 bp, Homo sapien
cagcctgaccgatgtaagagaccattaaataaa

SEQ ID NO: 837320 - DNA, 33 bp, Homo sapien
cagcctgaccgatgtacgagaccattaaataaa

SEQ ID NO: 837321 - DNA, 33 bp, Homo sapien
tctgccattgaatccacgagttttcctgttcca

SEQ ID NO: 837322 - DNA, 33 bp, Homo sapien
tctgccattgaatccatgagttttcctgttcca

SEQ ID NO: 837323 - DNA, 33 bp, Homo sapien
ttgttataaaagacacggtggcttgttttgcat

SEQ ID NO: 837324 - DNA, 33 bp, Homo sapien
ttgttataaaagacactgtggcttgttttgcat

SEQ ID NO: 837325 - DNA, 33 bp, Homo sapien
tgacaaagcagtataagatggccaccatcagcc

SEQ ID NO: 837326 - DNA, 33 bp, Homo sapien
tgacaaagcagtataatatggccaccatcagcc

SEQ ID NO: 837327 - DNA, 33 bp, Homo sapien
tgctaggatgggagaaaggggttctcgctggcc

SEQ ID NO: 837328 - DNA, 33 bp, Homo sapien
tgctaggatgggagaagggggttctcgctggcc

SEQ ID NO: 837329 - DNA, 33 bp, Homo sapien
acccatagaaaaagacaagcctattaatgtgct

SEQ ID NO: 837330 - DNA, 33 bp, Homo sapien
acccatagaaaaagaccagcctattaatgtgct

SEQ ID NO: 837331 - DNA, 33 bp, Homo sapien
atcagttttaaagaaactcattttgaggatatg

SEQ ID NO: 837332 - DNA, 33 bp, Homo sapien
atcagttttaaagaaattcattttgaggatatg

SEQ ID NO: 837333 - DNA, 33 bp, Homo sapien
gaccaggcctggctacagaccccagctagcatc

SEQ ID NO: 837334 - DNA, 33 bp, Homo sapien
gaccaggcctggctaccgaccccagctagcatc

SEQ ID NO: 837335 - DNA, 33 bp, Homo sapien
ctaaatatggctccaaaaggtctgggaactatt

SEQ ID NO: 837336 - DNA, 33 bp, Homo sapien
ctaaatatggctccaacaggtctgggaactatt

SEQ ID NO: 837337 - DNA, 33 bp, Homo sapien
aagtggcatgcgacaacgaactaggttaggaac

SEQ ID NO: 837338 - DNA, 33 bp, Homo sapien
aagtggcatgcgacaaggaactaggttaggaac

SEQ ID NO: 837339 - DNA, 33 bp, Homo sapien
acaccaaagcgagagaagaagaaacatagcttt

SEQ ID NO: 837340 - DNA, 33 bp, Homo sapien
acaccaaagcgagagacgaagaaacatagcttt

SEQ ID NO: 837341 - DNA, 33 bp, Homo sapien
ctgccactatacctcacgggtcccttcacatca

SEQ ID NO: 837342 - DNA, 33 bp, Homo sapien
ctgccactatacctcatgggtcccttcacatca

SEQ ID NO: 837343 - DNA, 33 bp, Homo sapien
gaaaattcttctgatacgtgttgcccttcctca

SEQ ID NO: 837344 - DNA, 33 bp, Homo sapien
gaaaattcttctgatatgtgttgcccttcctca

SEQ ID NO: 837345 - DNA, 33 bp, Homo sapien
ggaagcaggctcttataaaacacacaattccta

SEQ ID NO: 837346 - DNA, 33 bp, Homo sapien
ggaagcaggctcttatgaaacacacaattccta

SEQ ID NO: 837347 - DNA, 33 bp, Homo sapien
gtgtgggggatgaactcaatctccacaggaaga

SEQ ID NO: 837348 - DNA, 33 bp, Homo sapien
gtgtgggggatgaacttaatctccacaggaaga

SEQ ID NO: 837349 - DNA, 33 bp, Homo sapien
gctcctcctatcagcaaataatagcactgggta

SEQ ID NO: 837350 - DNA, 33 bp, Homo sapien
gctcctcctatcagcacataatagcactgggta

SEQ ID NO: 837351 - DNA, 33 bp, Homo sapien
cagccagtgttactgccgagtccataatggagc

SEQ ID NO: 837352 - DNA, 33 bp, Homo sapien
cagccagtgttactgctgagtccataatggagc

SEQ ID NO: 837353 - DNA, 33 bp, Homo sapien
aggtttaccaatctaaatgaacctaactagggg

SEQ ID NO: 837354 - DNA, 33 bp, Homo sapien
aggtttaccaatctaagtgaacctaactagggg

SEQ ID NO: 837355 - DNA, 33 bp, Homo sapien
gggtcagttaatttaaactctctggccattgtt

SEQ ID NO: 837356 - DNA, 33 bp, Homo sapien
gggtcagttaatttaatctctctggccattgtt

SEQ ID NO: 837357 - DNA, 33 bp, Homo sapien
cttgtttccacctcatgatacatcagaattgcc

SEQ ID NO: 837358 - DNA, 33 bp, Homo sapien
cttgtttccacctcattatacatcagaattgcc

SEQ ID NO: 837359 - DNA, 33 bp, Homo sapien
gggaccacataagacaatcatctcatcgcttta

SEQ ID NO: 837360 - DNA, 33 bp, Homo sapien
gggaccacataagacagtcatctcatcgcttta

SEQ ID NO: 837361 - DNA, 33 bp, Homo sapien
cttcctggagttatagccactggtgtttgaagc

SEQ ID NO: 837362 - DNA, 33 bp, Homo sapien
cttcctggagttatagtcactggtgtttgaagc

SEQ ID NO: 837363 - DNA, 33 bp, Homo sapien
cgtgggagttaagtgaaacaaggcacaaagcaa

SEQ ID NO: 837364 - DNA, 33 bp, Homo sapien
cgtgggagttaagtgagacaaggcacaaagcaa

SEQ ID NO: 837365 - DNA, 33 bp, Homo sapien
aagacatgtcaaagtgaacttaaaatgaaccag

SEQ ID NO: 837366 - DNA, 33 bp, Homo sapien
aagacatgtcaaagtgcacttaaaatgaaccag

SEQ ID NO: 837367 - DNA, 33 bp, Homo sapien
tgttttaataccttgactatggctttattccct

SEQ ID NO: 837368 - DNA, 33 bp, Homo sapien
tgttttaataccttgattatggctttattccct

SEQ ID NO: 837369 - DNA, 33 bp, Homo sapien
ctttgaaattgtgaaaatgtatgaacatatgca

SEQ ID NO: 837370 - DNA, 33 bp, Homo sapien
ctttgaaattgtgaaagtgtatgaacatatgca

SEQ ID NO: 837371 - DNA, 33 bp, Homo sapien
tgacataacttagaagcattagtgggggccctg

SEQ ID NO: 837372 - DNA, 33 bp, Homo sapien
tgacataacttagaagtattagtgggggccctg

SEQ ID NO: 837373 - DNA, 33 bp, Homo sapien
gttggggcatctttagcaaaatgctcaataagc

SEQ ID NO: 837374 - DNA, 33 bp, Homo sapien
gttggggcatctttagtaaaatgctcaataagc

SEQ ID NO: 837375 - DNA, 33 bp, Homo sapien
ccatcagaaaccaaagccacgtggtgcggtgtg

SEQ ID NO: 837376 - DNA, 33 bp, Homo sapien
ccatcagaaaccaaagtcacgtggtgcggtgtg

SEQ ID NO: 837377 - DNA, 33 bp, Homo sapien
tttcggagcttctctacgtccctagatcactca

SEQ ID NO: 837378 - DNA, 33 bp, Homo sapien
tttcggagcttctctatgtccctagatcactca

SEQ ID NO: 837379 - DNA, 33 bp, Homo sapien
tgtgataatagtggtacgatgatgtagcagaat

SEQ ID NO: 837380 - DNA, 33 bp, Homo sapien
tgtgataatagtggtatgatgatgtagcagaat

SEQ ID NO: 837381 - DNA, 33 bp, Homo sapien
agcctcagcttccaaactgggtaataacactgt

SEQ ID NO: 837382 - DNA, 33 bp, Homo sapien
agcctcagcttccaaattgggtaataacactgt

SEQ ID NO: 837383 - DNA, 33 bp, Homo sapien
gcagagctgagaccaaatgtcactgggtcttct

SEQ ID NO: 837384 - DNA, 33 bp, Homo sapien
gcagagctgagaccaactgtcactgggtcttct

SEQ ID NO: 837385 - DNA, 33 bp, Homo sapien
tgctggcccctactaccccgagtttctgattta

SEQ ID NO: 837386 - DNA, 33 bp, Homo sapien
tgctggcccctactactccgagtttctgattta

SEQ ID NO: 837387 - DNA, 33 bp, Homo sapien
tggtgctgcagcctcacctgtgatcagtgattc

SEQ ID NO: 837388 - DNA, 33 bp, Homo sapien
tggtgctgcagcctcatctgtgatcagtgattc

SEQ ID NO: 837389 - DNA, 33 bp, Homo sapien
acatgaatttctttaagcccatctgttagctgc

SEQ ID NO: 837390 - DNA, 33 bp, Homo sapien
acatgaatttctttaatcccatctgttagctgc

SEQ ID NO: 837391 - DNA, 33 bp, Homo sapien
agggttcaagatgggacagtaatcagcagtgga

SEQ ID NO: 837392 - DNA, 33 bp, Homo sapien
agggttcaagatgggagagtaatcagcagtgga

SEQ ID NO: 837393 - DNA, 33 bp, Homo sapien
ctccacgagggcagtaaatgtaccgagagcagg

SEQ ID NO: 837394 - DNA, 33 bp, Homo sapien
ctccacgagggcagtagatgtaccgagagcagg

SEQ ID NO: 837395 - DNA, 33 bp, Homo sapien
tttttttgtaatcgacacgccaacacagtgaag

SEQ ID NO: 837396 - DNA, 33 bp, Homo sapien
tttttttgtaatcgacgcgccaacacagtgaag

SEQ ID NO: 837397 - DNA, 33 bp, Homo sapien
ccccaaggaggaatcacgtaagggagatagaat

SEQ ID NO: 837398 - DNA, 33 bp, Homo sapien
ccccaaggaggaatcaggtaagggagatagaat

SEQ ID NO: 837399 - DNA, 33 bp, Homo sapien
actgctgcaagagaatcagccctggtccctgcc

SEQ ID NO: 837400 - DNA, 33 bp, Homo sapien
actgctgcaagagaatgagccctggtccctgcc

SEQ ID NO: 837401 - DNA, 33 bp, Homo sapien
tgtgtgacttcattgaactagtcatctcatctg

SEQ ID NO: 837402 - DNA, 33 bp, Homo sapien
tgtgtgacttcattgagctagtcatctcatctg

SEQ ID NO: 837403 - DNA, 33 bp, Homo sapien
gaatttttacttctgcacttagaagaaggcagg

SEQ ID NO: 837404 - DNA, 33 bp, Homo sapien
gaatttttacttctgcgcttagaagaaggcagg

SEQ ID NO: 837405 - DNA, 33 bp, Homo sapien
tgggaaggtcaccaaacgggagacggaatgtct

SEQ ID NO: 837406 - DNA, 33 bp, Homo sapien
tgggaaggtcaccaaaggggagacggaatgtct

SEQ ID NO: 837407 - DNA, 33 bp, Homo sapien
tcctaagggttctagtaaaacgctcaaagcaat

SEQ ID NO: 837408 - DNA, 33 bp, Homo sapien
tcctaagggttctagtcaaacgctcaaagcaat

SEQ ID NO: 837409 - DNA, 33 bp, Homo sapien
aatgaaaggaggtacacatggaaaaccttagaa

SEQ ID NO: 837410 - DNA, 33 bp, Homo sapien
aatgaaaggaggtacatatggaaaaccttagaa

SEQ ID NO: 837411 - DNA, 33 bp, Homo sapien
ggcagcccgtttatccaaagtgaggtcaatgcc

SEQ ID NO: 837412 - DNA, 33 bp, Homo sapien
ggcagcccgtttatcctaagtgaggtcaatgcc

SEQ ID NO: 837413 - DNA, 33 bp, Homo sapien
tgtggccttgggaagacaatttagctttctgag

SEQ ID NO: 837414 - DNA, 33 bp, Homo sapien
tgtggccttgggaagataatttagctttctgag

SEQ ID NO: 837415 - DNA, 33 bp, Homo sapien
actttatttttagttcacagacctgagccagaa

SEQ ID NO: 837416 - DNA, 33 bp, Homo sapien
actttatttttagttctcagacctgagccagaa

SEQ ID NO: 837417 - DNA, 33 bp, Homo sapien
ttcatactttactttgaatcctcttatttccaa

SEQ ID NO: 837418 - DNA, 33 bp, Homo sapien
ttcatactttactttggatcctcttatttccaa

SEQ ID NO: 837419 - DNA, 33 bp, Homo sapien
gctcccagtagcactaccatttttcagtttgtt

SEQ ID NO: 837420 - DNA, 33 bp, Homo sapien
gctcccagtagcactatcatttttcagtttgtt

SEQ ID NO: 837421 - DNA, 33 bp, Homo sapien
aacagacagcaggggaacactcaactgtgacag

SEQ ID NO: 837422 - DNA, 33 bp, Homo sapien
aacagacagcaggggagcactcaactgtgacag

SEQ ID NO: 837423 - DNA, 33 bp, Homo sapien
actcaactgtgacagacgataagacataatgtg

SEQ ID NO: 837424 - DNA, 33 bp, Homo sapien
actcaactgtgacagatgataagacataatgtg

SEQ ID NO: 837425 - DNA, 33 bp, Homo sapien
attgaagaagatgggtaacacatgacaactaaa

SEQ ID NO: 837426 - DNA, 33 bp, Homo sapien
attgaagaagatgggtgacacatgacaactaaa

SEQ ID NO: 837427 - DNA, 33 bp, Homo sapien
tcatgaggaaacaccaaaggaactcaagttgaa

SEQ ID NO: 837428 - DNA, 33 bp, Homo sapien
tcatgaggaaacaccagaggaactcaagttgaa

SEQ ID NO: 837429 - DNA, 33 bp, Homo sapien
agccagccataataccaacaaatattactctca

SEQ ID NO: 837430 - DNA, 33 bp, Homo sapien
agccagccataataccgacaaatattactctca

SEQ ID NO: 837431 - DNA, 33 bp, Homo sapien
ccataatattgctcaaaatgctcctaacagtgc

SEQ ID NO: 837432 - DNA, 33 bp, Homo sapien
ccataatattgctcaagatgctcctaacagtgc

SEQ ID NO: 837433 - DNA, 33 bp, Homo sapien
cactttcttgcacaaactttatgttccagagaa

SEQ ID NO: 837434 - DNA, 33 bp, Homo sapien
cactttcttgcacaaattttatgttccagagaa

SEQ ID NO: 837435 - DNA, 33 bp, Homo sapien
catatgaagactttacacaggccatctggtctc

SEQ ID NO: 837436 - DNA, 33 bp, Homo sapien
catatgaagactttacgcaggccatctggtctc

SEQ ID NO: 837437 - DNA, 33 bp, Homo sapien
ccacacaggcatcttaaattctacttcatcata

SEQ ID NO: 837438 - DNA, 33 bp, Homo sapien
ccacacaggcatcttacattctacttcatcata

SEQ ID NO: 837439 - DNA, 33 bp, Homo sapien
agggttttaagcaaaagaatgtgataagatttg

SEQ ID NO: 837440 - DNA, 33 bp, Homo sapien
agggttttaagcaaaataatgtgataagatttg

SEQ ID NO: 837441 - DNA, 33 bp, Homo sapien
caaaaagacgcgataaaaactgccacccagtcc

SEQ ID NO: 837442 - DNA, 33 bp, Homo sapien
caaaaagacgcgataacaactgccacccagtcc

SEQ ID NO: 837443 - DNA, 33 bp, Homo sapien
aaagaggccataacccccttcgtaggtcctcac

SEQ ID NO: 837444 - DNA, 33 bp, Homo sapien
aaagaggccataacccgcttcgtaggtcctcac

SEQ ID NO: 837445 - DNA, 33 bp, Homo sapien
actaccattttctccaactcacaagagccccct

SEQ ID NO: 837446 - DNA, 33 bp, Homo sapien
actaccattttctccatctcacaagagccccct

SEQ ID NO: 837447 - DNA, 33 bp, Homo sapien
ctcagacatcaataaacatgagtcatcatctca

SEQ ID NO: 837448 - DNA, 33 bp, Homo sapien
ctcagacatcaataaatatgagtcatcatctca

SEQ ID NO: 837449 - DNA, 33 bp, Homo sapien
ccacattatgttcggcgctcagctgctccgctc

SEQ ID NO: 837450 - DNA, 33 bp, Homo sapien
ccacattatgttcggctctcagctgctccgctc

SEQ ID NO: 837451 - DNA, 33 bp, Homo sapien
gggctggtggcaagaacggattgaacgctggac

SEQ ID NO: 837452 - DNA, 33 bp, Homo sapien
gggctggtggcaagaatggattgaacgctggac

SEQ ID NO: 837453 - DNA, 33 bp, Homo sapien
ttgtcttattaaaatgcaaaactgattagatca

SEQ ID NO: 837454 - DNA, 33 bp, Homo sapien
ttgtcttattaaaatggaaaactgattagatca

SEQ ID NO: 837455 - DNA, 33 bp, Homo sapien
gcctctgcacctttgaccacaatgcttcctcta

SEQ ID NO: 837456 - DNA, 33 bp, Homo sapien
gcctctgcacctttgatcacaatgcttcctcta

SEQ ID NO: 837457 - DNA, 33 bp, Homo sapien
aaaaaccagtaccagacgatggaacttggcagg

SEQ ID NO: 837458 - DNA, 33 bp, Homo sapien
aaaaaccagtaccagatgatggaacttggcagg

SEQ ID NO: 837459 - DNA, 33 bp, Homo sapien
gagataggattaaagacatgtgtggatggggag

SEQ ID NO: 837460 - DNA, 33 bp, Homo sapien
gagataggattaaagatatgtgtggatggggag

SEQ ID NO: 837461 - DNA, 33 bp, Homo sapien
attatatctcagtgtaccggagcctggcagcca

SEQ ID NO: 837462 - DNA, 33 bp, Homo sapien
attatatctcagtgtatcggagcctggcagcca

SEQ ID NO: 837463 - DNA, 33 bp, Homo sapien
agggcccaacattcccaaacatgctcgttctct

SEQ ID NO: 837464 - DNA, 33 bp, Homo sapien
agggcccaacattcccgaacatgctcgttctct

SEQ ID NO: 837465 - DNA, 33 bp, Homo sapien
gctctgctaaccaagacgaaaggaggccatccg

SEQ ID NO: 837466 - DNA, 33 bp, Homo sapien
gctctgctaaccaagatgaaaggaggccatccg

SEQ ID NO: 837467 - DNA, 33 bp, Homo sapien
actttgtagatgggaactgaggtagaatatgtt

SEQ ID NO: 837468 - DNA, 33 bp, Homo sapien
actttgtagatgggaagtgaggtagaatatgtt

SEQ ID NO: 837469 - DNA, 33 bp, Homo sapien
cgatttagcccagaaacatctatccaacttgga

SEQ ID NO: 837470 - DNA, 33 bp, Homo sapien
cgatttagcccagaaatatctatccaacttgga

SEQ ID NO: 837471 - DNA, 33 bp, Homo sapien
gctcagcaggtccagaaagaaagaggcagaaat

SEQ ID NO: 837472 - DNA, 33 bp, Homo sapien
gctcagcaggtccagacagaaagaggcagaaat

SEQ ID NO: 837473 - DNA, 33 bp, Homo sapien
tcagtgtgggtgaaaccggctcagccctgctgg

SEQ ID NO: 837474 - DNA, 33 bp, Homo sapien
tcagtgtgggtgaaactggctcagccctgctgg

SEQ ID NO: 837475 - DNA, 33 bp, Homo sapien
tgaagaattaaaatgacgtattcagtataccac

SEQ ID NO: 837476 - DNA, 33 bp, Homo sapien
tgaagaattaaaatgatgtattcagtataccac

SEQ ID NO: 837477 - DNA, 33 bp, Homo sapien
aaagcagatagagaaactgtggtatactgaata

SEQ ID NO: 837478 - DNA, 33 bp, Homo sapien
aaagcagatagagaaattgtggtatactgaata

SEQ ID NO: 837479 - DNA, 33 bp, Homo sapien
tggcctagagtgaactcagatacttcttgtcat

SEQ ID NO: 837480 - DNA, 33 bp, Homo sapien
tggcctagagtgaactgagatacttcttgtcat

SEQ ID NO: 837481 - DNA, 33 bp, Homo sapien
ctgggtagagtctactaacttttattttctttt

SEQ ID NO: 837482 - DNA, 33 bp, Homo sapien
ctgggtagagtctactgacttttattttctttt

SEQ ID NO: 837483 - DNA, 33 bp, Homo sapien
tcccaagcacagagtcactgttcagtaaacggt

SEQ ID NO: 837484 - DNA, 33 bp, Homo sapien
tcccaagcacagagtcgctgttcagtaaacggt

SEQ ID NO: 837485 - DNA, 33 bp, Homo sapien
tgagaatgtgaaatagcaccatcaaaatataat

SEQ ID NO: 837486 - DNA, 33 bp, Homo sapien
tgagaatgtgaaatagtaccatcaaaatataat

SEQ ID NO: 837487 - DNA, 33 bp, Homo sapien
caagccaaccaagctaacactcgtcacccagta

SEQ ID NO: 837488 - DNA, 33 bp, Homo sapien
caagccaaccaagctaccactcgtcacccagta

SEQ ID NO: 837489 - DNA, 33 bp, Homo sapien
ggccacactgtcttgaaaagctgcaactaccaa

SEQ ID NO: 837490 - DNA, 33 bp, Homo sapien
ggccacactgtcttgagaagctgcaactaccaa

SEQ ID NO: 837491 - DNA, 33 bp, Homo sapien
cttttattaaaatatgcatggcaaactaccatt

SEQ ID NO: 837492 - DNA, 33 bp, Homo sapien
cttttattaaaatatgtatggcaaactaccatt

SEQ ID NO: 837493 - DNA, 33 bp, Homo sapien
agtggcagaatcgggaactactcaggattcttt

SEQ ID NO: 837494 - DNA, 33 bp, Homo sapien
agtggcagaatcgggagctactcaggattcttt

SEQ ID NO: 837495 - DNA, 33 bp, Homo sapien
gtggagctaagtgtgacgcccagacccatgggg

SEQ ID NO: 837496 - DNA, 33 bp, Homo sapien
gtggagctaagtgtgatgcccagacccatgggg

SEQ ID NO: 837497 - DNA, 33 bp, Homo sapien
catgggatctccatgcactatctttccaacttt

SEQ ID NO: 837498 - DNA, 33 bp, Homo sapien
catgggatctccatgcgctatctttccaacttt

SEQ ID NO: 837499 - DNA, 33 bp, Homo sapien
tgactcccagcatgaacggtcccaactcctctc

SEQ ID NO: 837500 - DNA, 33 bp, Homo sapien
tgactcccagcatgaatggtcccaactcctctc

SEQ ID NO: 837501 - DNA, 33 bp, Homo sapien
aaaataaatgtttgacaagaattcctttaaaaa

SEQ ID NO: 837502 - DNA, 33 bp, Homo sapien
aaaataaatgtttgacgagaattcctttaaaaa

SEQ ID NO: 837503 - DNA, 33 bp, Homo sapien
caatcttaataattccaatttcatcaagagata

SEQ ID NO: 837504 - DNA, 33 bp, Homo sapien
caatcttaataattccgatttcatcaagagata

SEQ ID NO: 837505 - DNA, 33 bp, Homo sapien
atgatcctgacataaacggtagtaaggagaatt

SEQ ID NO: 837506 - DNA, 33 bp, Homo sapien
atgatcctgacataaatggtagtaaggagaatt

SEQ ID NO: 837507 - DNA, 33 bp, Homo sapien
aaagttcagagaatgagataaataacacccatg

SEQ ID NO: 837508 - DNA, 33 bp, Homo sapien
aaagttcagagaatgatataaataacacccatg

SEQ ID NO: 837509 - DNA, 33 bp, Homo sapien
ggcctgcaggattggactagaactacagctaga

SEQ ID NO: 837510 - DNA, 33 bp, Homo sapien
ggcctgcaggattggagtagaactacagctaga

SEQ ID NO: 837511 - DNA, 33 bp, Homo sapien
atatcttctttcttccaatatcatggctctgtt

SEQ ID NO: 837512 - DNA, 33 bp, Homo sapien
atatcttctttcttccgatatcatggctctgtt

SEQ ID NO: 837513 - DNA, 33 bp, Homo sapien
agttaaggttctataaacaatctgtcttgagag

SEQ ID NO: 837514 - DNA, 33 bp, Homo sapien
agttaaggttctataagcaatctgtcttgagag

SEQ ID NO: 837515 - DNA, 33 bp, Homo sapien
tttccctactcagtgcaatttgacccttattgt

SEQ ID NO: 837516 - DNA, 33 bp, Homo sapien
tttccctactcagtgcgatttgacccttattgt

SEQ ID NO: 837517 - DNA, 33 bp, Homo sapien
gtgctgtggaatatacacactcgtagaaggctc

SEQ ID NO: 837518 - DNA, 33 bp, Homo sapien
gtgctgtggaatatacgcactcgtagaaggctc

SEQ ID NO: 837519 - DNA, 33 bp, Homo sapien
gcaacgtgcatatgcaacatctaacaatgactt

SEQ ID NO: 837520 - DNA, 33 bp, Homo sapien
gcaacgtgcatatgcagcatctaacaatgactt

SEQ ID NO: 837521 - DNA, 33 bp, Homo sapien
aaattgagggcttctacgatgaggactttgggc

SEQ ID NO: 837522 - DNA, 33 bp, Homo sapien
aaattgagggcttctatgatgaggactttgggc

SEQ ID NO: 837523 - DNA, 33 bp, Homo sapien
gtatctaagcacagaccgtaggccagcaagagt

SEQ ID NO: 837524 - DNA, 33 bp, Homo sapien
gtatctaagcacagactgtaggccagcaagagt

SEQ ID NO: 837525 - DNA, 33 bp, Homo sapien
gtcatgtctccaaaaacgccactgagcccaaac

SEQ ID NO: 837526 - DNA, 33 bp, Homo sapien
gtcatgtctccaaaaatgccactgagcccaaac

SEQ ID NO: 837527 - DNA, 33 bp, Homo sapien
acttcactttatgcaaataccacagtgagaccc

SEQ ID NO: 837528 - DNA, 33 bp, Homo sapien
acttcactttatgcaagtaccacagtgagaccc

SEQ ID NO: 837529 - DNA, 33 bp, Homo sapien
aggcatcactgaattaactatgttcttggcagc

SEQ ID NO: 837530 - DNA, 33 bp, Homo sapien
aggcatcactgaattagctatgttcttggcagc

SEQ ID NO: 837531 - DNA, 33 bp, Homo sapien
caacataagcagaagaaggactttccaccgcag

SEQ ID NO: 837532 - DNA, 33 bp, Homo sapien
caacataagcagaagagggactttccaccgcag

SEQ ID NO: 837533 - DNA, 33 bp, Homo sapien
agttaacgtcagattcaccctcaattcctccat

SEQ ID NO: 837534 - DNA, 33 bp, Homo sapien
agttaacgtcagattctccctcaattcctccat

SEQ ID NO: 837535 - DNA, 33 bp, Homo sapien
aaaagacttccaaagaaccttcagccatgtcta

SEQ ID NO: 837536 - DNA, 33 bp, Homo sapien
aaaagacttccaaagagccttcagccatgtcta

SEQ ID NO: 837537 - DNA, 33 bp, Homo sapien
catatgattctcaaacccagatctcattttaat

SEQ ID NO: 837538 - DNA, 33 bp, Homo sapien
catatgattctcaaactcagatctcattttaat

SEQ ID NO: 837539 - DNA, 33 bp, Homo sapien
aggcatacatctgcgcggaccctcactccggga

SEQ ID NO: 837540 - DNA, 33 bp, Homo sapien
aggcatacatctgcgctgaccctcactccggga

SEQ ID NO: 837541 - DNA, 33 bp, Homo sapien
agttccactgggaagaatacaaaaataggagtt

SEQ ID NO: 837542 - DNA, 33 bp, Homo sapien
agttccactgggaagattacaaaaataggagtt

SEQ ID NO: 837543 - DNA, 33 bp, Homo sapien
gttggaaccatcgtataaggcttgccacttatc

SEQ ID NO: 837544 - DNA, 33 bp, Homo sapien
gttggaaccatcgtatgaggcttgccacttatc

SEQ ID NO: 837545 - DNA, 33 bp, Homo sapien
aatccttttgacaccactccacaagatacagaa

SEQ ID NO: 837546 - DNA, 33 bp, Homo sapien
aatccttttgacaccattccacaagatacagaa

SEQ ID NO: 837547 - DNA, 33 bp, Homo sapien; identical to SEQ ID NO: 837545

SEQ ID NO: 837548 - DNA, 33 bp, Homo sapien; identical to SEQ ID NO: 837546

SEQ ID NO: 837549 - DNA, 33 bp, Homo sapien
ttcatttactagttccgcatgcagtattgggct

SEQ ID NO: 837550 - DNA, 33 bp, Homo sapien
ttcatttactagttcctcatgcagtattgggct

SEQ ID NO: 837551 - DNA, 33 bp, Homo sapien
taaataatccagaatcaatggtgcctgtaaact

SEQ ID NO: 837552 - DNA, 33 bp, Homo sapien
taaataatccagaatcgatggtgcctgtaaact

SEQ ID NO: 837553 - DNA, 33 bp, Homo sapien
gtgagttatcacattaacacatctttattggtg

SEQ ID NO: 837554 - DNA, 33 bp, Homo sapien
gtgagttatcacattatcacatctttattggtg

SEQ ID NO: 837555 - DNA, 33 bp, Homo sapien
aaatgtccatgttactaaagtgatctatagatt

SEQ ID NO: 837556 - DNA, 33 bp, Homo sapien
aaatgtccatgttactgaagtgatctatagatt

SEQ ID NO: 837557 - DNA, 33 bp, Homo sapien
gtacaaatgaaatccaaggctgttctatgatag

SEQ ID NO: 837558 - DNA, 33 bp, Homo sapien
gtacaaatgaaatccacggctgttctatgatag

SEQ ID NO: 837559 - DNA, 33 bp, Homo sapien
cacctaccatcagcgaagtcatgtgttcagaca

SEQ ID NO: 837560 - DNA, 33 bp, Homo sapien
cacctaccatcagcgaggtcatgtgttcagaca

SEQ ID NO: 837561 - DNA, 33 bp, Homo sapien
actttttttgccgttacaagtcatgggggtccg

SEQ ID NO: 837562 - DNA, 33 bp, Homo sapien
actttttttgccgttagaagtcatgggggtccg

SEQ ID NO: 837563 - DNA, 33 bp, Homo sapien
aagaaatcagatctctaaaatcattcatgaaat

SEQ ID NO: 837564 - DNA, 33 bp, Homo sapien
aagaaatcagatctctgaaatcattcatgaaat

SEQ ID NO: 837565 - DNA, 33 bp, Homo sapien
gtgaaagagtttgtataaatgcttttcagggct

SEQ ID NO: 837566 - DNA, 33 bp, Homo sapien
gtgaaagagtttgtattaatgcttttcagggct

SEQ ID NO: 837567 - DNA, 33 bp, Homo sapien
gcagggaacttttatacgaatagactgagagtt

SEQ ID NO: 837568 - DNA, 33 bp, Homo sapien
gcagggaacttttatatgaatagactgagagtt

SEQ ID NO: 837569 - DNA, 33 bp, Homo sapien
atcccagacaagctgcccaagctgagatacctg

SEQ ID NO: 837570 - DNA, 33 bp, Homo sapien
atcccagacaagctgctcaagctgagatacctg

SEQ ID NO: 837571 - DNA, 33 bp, Homo sapien
taagatgccttgacaaacctctctttttgacct

SEQ ID NO: 837572 - DNA, 33 bp, Homo sapien
taagatgccttgacaagcctctctttttgacct

SEQ ID NO: 837573 - DNA, 33 bp, Homo sapien
taataactaaatgcacagtgaagcccaaaactt

SEQ ID NO: 837574 - DNA, 33 bp, Homo sapien
taataactaaatgcacggtgaagcccaaaactt

SEQ ID NO: 837575 - DNA, 33 bp, Homo sapien
gatagtggttgaggtcccagattctcatgcaag

SEQ ID NO: 837576 - DNA, 33 bp, Homo sapien
gatagtggttgaggtctcagattctcatgcaag

SEQ ID NO: 837577 - DNA, 33 bp, Homo sapien
tttctccttctctatcactttttcctttactct

SEQ ID NO: 837578 - DNA, 33 bp, Homo sapien
tttctccttctctatcgctttttcctttactct

SEQ ID NO: 837579 - DNA, 33 bp, Homo sapien
ttgtcatcatacgcccaaattcttactcaacct

SEQ ID NO: 837580 - DNA, 33 bp, Homo sapien
ttgtcatcatacgcccgaattcttactcaacct

SEQ ID NO: 837581 - DNA, 33 bp, Homo sapien
gtgtggcttagtatacccaccaactgcatggtc

SEQ ID NO: 837582 - DNA, 33 bp, Homo sapien
gtgtggcttagtatactcaccaactgcatggtc

SEQ ID NO: 837583 - DNA, 33 bp, Homo sapien
atgggaacaaaaagcaccgggcacatgaatgtg

SEQ ID NO: 837584 - DNA, 33 bp, Homo sapien
atgggaacaaaaagcagcgggcacatgaatgtg

SEQ ID NO: 837585 - DNA, 33 bp, Homo sapien
gttctatgcaattatcccagttttgcttgtatt

SEQ ID NO: 837586 - DNA, 33 bp, Homo sapien
gttctatgcaattatctcagttttgcttgtatt

SEQ ID NO: 837587 - DNA, 33 bp, Homo sapien
aatatctttaaatacaatatgttcagcccctca

SEQ ID NO: 837588 - DNA, 33 bp, Homo sapien
aatatctttaaatacagtatgttcagcccctca

SEQ ID NO: 837589 - DNA, 33 bp, Homo sapien
gtgactcattacggggaatttgtttgaacataa

SEQ ID NO: 837590 - DNA, 33 bp, Homo sapien
gtgactcattacggggcatttgtttgaacataa

SEQ ID NO: 837591 - DNA, 33 bp, Homo sapien
tgaactatatttacagactgccaagagaatcca

SEQ ID NO: 837592 - DNA, 33 bp, Homo sapien
tgaactatatttacagcctgccaagagaatcca

SEQ ID NO: 837593 - DNA, 33 bp, Homo sapien
caatgaagctttccttaaacagcagaaatcctc

SEQ ID NO: 837594 - DNA, 33 bp, Homo sapien
caatgaagctttccttcaacagcagaaatcctc

SEQ ID NO: 837595 - DNA, 33 bp, Homo sapien
ggcatcaattcagataagtgagaaggtccttac

SEQ ID NO: 837596 - DNA, 33 bp, Homo sapien
ggcatcaattcagataggtgagaaggtccttac

SEQ ID NO: 837597 - DNA, 33 bp, Homo sapien
gtcatctgtccagtagaattttagatcctttgg

SEQ ID NO: 837598 - DNA, 33 bp, Homo sapien
gtcatctgtccagtaggattttagatcctttgg

SEQ ID NO: 837599 - DNA, 33 bp, Homo sapien
ctgaccatactaaagacaagcactgtgttttat

SEQ ID NO: 837600 - DNA, 33 bp, Homo sapien
ctgaccatactaaagataagcactgtgttttat

SEQ ID NO: 837601 - DNA, 33 bp, Homo sapien
ttggctttgttatagcagaatttgtcacagggc

SEQ ID NO: 837602 - DNA, 33 bp, Homo sapien
ttggctttgttatagcggaatttgtcacagggc

SEQ ID NO: 837603 - DNA, 33 bp, Homo sapien
gtgttaagggctcatgaaggagaggaggaatag

SEQ ID NO: 837604 - DNA, 33 bp, Homo sapien
gtgttaagggctcatggaggagaggaggaatag

SEQ ID NO: 837605 - DNA, 33 bp, Homo sapien
gtttccactgtgttcaatctaggggtatggtag

SEQ ID NO: 837606 - DNA, 33 bp, Homo sapien
gtttccactgtgttcagtctaggggtatggtag

SEQ ID NO: 837607 - DNA, 33 bp, Homo sapien
cagtgcactgaactacacagaggacactcttct

SEQ ID NO: 837608 - DNA, 33 bp, Homo sapien
cagtgcactgaactacgcagaggacactcttct

SEQ ID NO: 837609 - DNA, 33 bp, Homo sapien
agcatcaaatggaacaatgaaaatctgtcagtt

SEQ ID NO: 837610 - DNA, 33 bp, Homo sapien
agcatcaaatggaacagtgaaaatctgtcagtt

SEQ ID NO: 837611 - DNA, 33 bp, Homo sapien
tttcccagttcacaccaccaagagtgatagtct

SEQ ID NO: 837612 - DNA, 33 bp, Homo sapien
tttcccagttcacaccgccaagagtgatagtct

SEQ ID NO: 837613 - DNA, 33 bp, Homo sapien
ttacaagttaagagaaatctgaaactatttaga

SEQ ID NO: 837614 - DNA, 33 bp, Homo sapien
ttacaagttaagagaagtctgaaactatttaga

SEQ ID NO: 837615 - DNA, 33 bp, Homo sapien
ttaatacattctatacgggttacatcaactgct

SEQ ID NO: 837616 - DNA, 33 bp, Homo sapien
ttaatacattctatactggttacatcaactgct

SEQ ID NO: 837617 - DNA, 33 bp, Homo sapien
gaaaagcaaattaccacgctggaagtctgtgct

SEQ ID NO: 837618 - DNA, 33 bp, Homo sapien
gaaaagcaaattaccatgctggaagtctgtgct

SEQ ID NO: 837619 - DNA, 33 bp, Homo sapien
atgtcctgcagcctaaatatataattgatacac

SEQ ID NO: 837620 - DNA, 33 bp, Homo sapien
atgtcctgcagcctaagtatataattgatacac

SEQ ID NO: 837621 - DNA, 33 bp, Homo sapien
taatggggagaacgcccggcatgtttgagaaaa

SEQ ID NO: 837622 - DNA, 33 bp, Homo sapien
taatggggagaacgcctggcatgtttgagaaaa

SEQ ID NO: 837623 - DNA, 33 bp, Homo sapien
tatttaagaagcataaaaagtgctgggcgcggt

SEQ ID NO: 837624 - DNA, 33 bp, Homo sapien
tatttaagaagcataagaagtgctgggcgcggt

SEQ ID NO: 837625 - DNA, 33 bp, Homo sapien
tcatctgaggaaaacacccattctcttctctct

SEQ ID NO: 837626 - DNA, 33 bp, Homo sapien
tcatctgaggaaaacatccattctcttctctct

SEQ ID NO: 837627 - DNA, 33 bp, Homo sapien
tgggctgagttaaaaacagctctagaacgcctc

SEQ ID NO: 837628 - DNA, 33 bp, Homo sapien
tgggctgagttaaaaatagctctagaacgcctc

SEQ ID NO: 837629 - DNA, 33 bp, Homo sapien
taaatgagagattaggaagtagagacctggata

SEQ ID NO: 837630 - DNA, 33 bp, Homo sapien
taaatgagagattaggtagtagagacctggata

SEQ ID NO: 837631 - DNA, 33 bp, Homo sapien
tcatctcccaaataaactcctgacacccaaatc

SEQ ID NO: 837632 - DNA, 33 bp, Homo sapien
tcatctcccaaataaattcctgacacccaaatc

SEQ ID NO: 837633 - DNA, 33 bp, Homo sapien
tgtccactaaagttgcaatgatctgcggggtgg

SEQ ID NO: 837634 - DNA, 33 bp, Homo sapien
tgtccactaaagttgcgatgatctgcggggtgg

SEQ ID NO: 837635 - DNA, 33 bp, Homo sapien
gtatgttagaaaattaccaagcatacttgtgta

SEQ ID NO: 837636 - DNA, 33 bp, Homo sapien
gtatgttagaaaattagcaagcatacttgtgta

SEQ ID NO: 837637 - DNA, 33 bp, Homo sapien
acttcactctcttcccaaaagccatccactgcc

SEQ ID NO: 837638 - DNA, 33 bp, Homo sapien
acttcactctcttccccaaagccatccactgcc

SEQ ID NO: 837639 - DNA, 33 bp, Homo sapien
tgctcaactgcaggaaatatggtgcctatagaa

SEQ ID NO: 837640 - DNA, 33 bp, Homo sapien
tgctcaactgcaggaagtatggtgcctatagaa

SEQ ID NO: 837641 - DNA, 33 bp, Homo sapien
gacccttcagccacacactcagtgcagcaatgt

SEQ ID NO: 837642 - DNA, 33 bp, Homo sapien
gacccttcagccacacgctcagtgcagcaatgt

SEQ ID NO: 837643 - DNA, 33 bp, Homo sapien
tgaggagagttaatagcctataaggttaggaaa

SEQ ID NO: 837644 - DNA, 33 bp, Homo sapien
tgaggagagttaataggctataaggttaggaaa

SEQ ID NO: 837645 - DNA, 33 bp, Homo sapien
tgatagaccttcagaccgcaccagagtgatata

SEQ ID NO: 837646 - DNA, 33 bp, Homo sapien
tgatagaccttcagactgcaccagagtgatata

SEQ ID NO: 837647 - DNA, 33 bp, Homo sapien
agagaagttaaaaaccagctgaaagttgcatag

SEQ ID NO: 837648 - DNA, 33 bp, Homo sapien
agagaagttaaaaaccggctgaaagttgcatag

SEQ ID NO: 837649 - DNA, 33 bp, Homo sapien
cttaaatgtgtttatccctttgcctttgttagt

SEQ ID NO: 837650 - DNA, 33 bp, Homo sapien
cttaaatgtgtttatctctttgcctttgttagt

SEQ ID NO: 837651 - DNA, 33 bp, Homo sapien
ggtccttgaaaaccaactgcaggccctttgtat

SEQ ID NO: 837652 - DNA, 33 bp, Homo sapien
ggtccttgaaaaccaagtgcaggccctttgtat

SEQ ID NO: 837653 - DNA, 33 bp, Homo sapien
ctccacaaggaattcacggtctagtggaggaac

SEQ ID NO: 837654 - DNA, 33 bp, Homo sapien
ctccacaaggaattcatggtctagtggaggaac

SEQ ID NO: 837655 - DNA, 33 bp, Homo sapien
atctcccctggctcaaacataaccacagcaaat

SEQ ID NO: 837656 - DNA, 33 bp, Homo sapien
atctcccctggctcaagcataaccacagcaaat

SEQ ID NO: 837657 - DNA, 33 bp, Homo sapien
agggcttgccaacctcaaaaacagctcctcagc

SEQ ID NO: 837658 - DNA, 33 bp, Homo sapien
agggcttgccaacctcgaaaacagctcctcagc

SEQ ID NO: 837659 - DNA, 33 bp, Homo sapien
gagcttttcctccagcacctcggatgctgaggg

SEQ ID NO: 837660 - DNA, 33 bp, Homo sapien
gagcttttcctccagcgcctcggatgctgaggg

SEQ ID NO: 837661 - DNA, 33 bp, Homo sapien
taaacatagaagactacccagggacagaaggga

SEQ ID NO: 837662 - DNA, 33 bp, Homo sapien
taaacatagaagactatccagggacagaaggga

SEQ ID NO: 837663 - DNA, 33 bp, Homo sapien
ctattacggtgctaacaaaagagccaaatccca

SEQ ID NO: 837664 - DNA, 33 bp, Homo sapien
ctattacggtgctaacgaaagagccaaatccca

SEQ ID NO: 837665 - DNA, 33 bp, Homo sapien
ggttagcctttttggaacagccccggctaaaga

SEQ ID NO: 837666 - DNA, 33 bp, Homo sapien
ggttagcctttttggagcagccccggctaaaga

SEQ ID NO: 837667 - DNA, 33 bp, Homo sapien
atcccctgccaagagcgctagtaacctgggcaa

SEQ ID NO: 837668 - DNA, 33 bp, Homo sapien
atcccctgccaagagctctagtaacctgggcaa

SEQ ID NO: 837669 - DNA, 33 bp, Homo sapien
accctgttttaaatgacagaagatgaagagcat

SEQ ID NO: 837670 - DNA, 33 bp, Homo sapien
accctgttttaaatgatagaagatgaagagcat

SEQ ID NO: 837671 - DNA, 33 bp, Homo sapien
acctgtggctgtgatcaaatccctagttatgag

SEQ ID NO: 837672 - DNA, 33 bp, Homo sapien
acctgtggctgtgatcgaatccctagttatgag

SEQ ID NO: 837673 - DNA, 33 bp, Homo sapien
ttaacaggactagagacggtactggaaacagac

SEQ ID NO: 837674 - DNA, 33 bp, Homo sapien
ttaacaggactagagatggtactggaaacagac

SEQ ID NO: 837675 - DNA, 33 bp, Homo sapien
ctgtttctgacaagcccctcctgagtgtgggcc

SEQ ID NO: 837676 - DNA, 33 bp, Homo sapien
ctgtttctgacaagcctctcctgagtgtgggcc

SEQ ID NO: 837677 - DNA, 33 bp, Homo sapien
gggaatctggaaaatcacaaacccagtttcaga

SEQ ID NO: 837678 - DNA, 33 bp, Homo sapien
gggaatctggaaaatcgcaaacccagtttcaga

SEQ ID NO: 837679 - DNA, 33 bp, Homo sapien
caacaaaagtatacaaagaagagatgccaattg

SEQ ID NO: 837680 - DNA, 33 bp, Homo sapien
caacaaaagtatacaaggaagagatgccaattg

SEQ ID NO: 837681 - DNA, 33 bp, Homo sapien
gttaatgtctgtgggacaacaaaaaagcaacat

SEQ ID NO: 837682 - DNA, 33 bp, Homo sapien
gttaatgtctgtgggataacaaaaaagcaacat

SEQ ID NO: 837683 - DNA, 33 bp, Homo sapien
catctacagtttatccacatttctgctatggcc

SEQ ID NO: 837684 - DNA, 33 bp, Homo sapien
catctacagtttatccgcatttctgctatggcc

SEQ ID NO: 837685 - DNA, 33 bp, Homo sapien
attaaaagtttcaagacggcaatagcagagctt

SEQ ID NO: 837686 - DNA, 33 bp, Homo sapien
attaaaagtttcaagatggcaatagcagagctt

SEQ ID NO: 837687 - DNA, 33 bp, Homo sapien
ggtgagacatctcaaagaacatcagaacatttg

SEQ ID NO: 837688 - DNA, 33 bp, Homo sapien
ggtgagacatctcaaataacatcagaacatttg

SEQ ID NO: 837689 - DNA, 33 bp, Homo sapien
ggtattctttgattcccactcactctttgatcc

SEQ ID NO: 837690 - DNA, 33 bp, Homo sapien
ggtattctttgattcctactcactctttgatcc

SEQ ID NO: 837691 - DNA, 33 bp, Homo sapien
tgattttaaaaaaagcacactatggtctccatg

SEQ ID NO: 837692 - DNA, 33 bp, Homo sapien
tgattttaaaaaaagcgcactatggtctccatg

SEQ ID NO: 837693 - DNA, 33 bp, Homo sapien
gactaataaggaagacaagtccatttcccagcc

SEQ ID NO: 837694 - DNA, 33 bp, Homo sapien
gactaataaggaagacgagtccatttcccagcc

SEQ ID NO: 837695 - DNA, 33 bp, Homo sapien
gcccagagaagtatcaatgagatgaacagtaaa

SEQ ID NO: 837696 - DNA, 33 bp, Homo sapien
gcccagagaagtatcagtgagatgaacagtaaa

SEQ ID NO: 837697 - DNA, 33 bp, Homo sapien
gtgtccataccataaaggagctaggcagggaat

SEQ ID NO: 837698 - DNA, 33 bp, Homo sapien
gtgtccataccataaatgagctaggcagggaat

SEQ ID NO: 837699 - DNA, 33 bp, Homo sapien
tagaggattttgaaaaaatgttttcagcctacc

SEQ ID NO: 837700 - DNA, 33 bp, Homo sapien
tagaggattttgaaaagatgttttcagcctacc

SEQ ID NO: 837701 - DNA, 33 bp, Homo sapien
attctttatgaggtgacgattttattcttgctg

SEQ ID NO: 837702 - DNA, 33 bp, Homo sapien
attctttatgaggtgatgattttattcttgctg

SEQ ID NO: 837703 - DNA, 33 bp, Homo sapien
gcacctctacttcatacctacatcctcagcaag

SEQ ID NO: 837704 - DNA, 33 bp, Homo sapien
gcacctctacttcatatctacatcctcagcaag

SEQ ID NO: 837705 - DNA, 33 bp, Homo sapien
ttaaagttagctattagccaccctcctctctct

SEQ ID NO: 837706 - DNA, 33 bp, Homo sapien
ttaaagttagctattatccaccctcctctctct

SEQ ID NO: 837707 - DNA, 33 bp, Homo sapien
gttcttaactgtaatgaagtccaattgatgatg

SEQ ID NO: 837708 - DNA, 33 bp, Homo sapien
gttcttaactgtaatgtagtccaattgatgatg

SEQ ID NO: 837709 - DNA, 33 bp, Homo sapien
ttaaactaacgtgcccagaagtcttctatgagc

SEQ ID NO: 837710 - DNA, 33 bp, Homo sapien
ttaaactaacgtgcccggaagtcttctatgagc

SEQ ID NO: 837711 - DNA, 33 bp, Homo sapien
catcacagcaatcgcacgggtgggtgctattat

SEQ ID NO: 837712 - DNA, 33 bp, Homo sapien
catcacagcaatcgcatgggtgggtgctattat

SEQ ID NO: 837713 - DNA, 33 bp, Homo sapien
gaaataagtaactgttaaaaagaagctatacca

SEQ ID NO: 837714 - DNA, 33 bp, Homo sapien
gaaataagtaactgtttaaaagaagctatacca

SEQ ID NO: 837715 - DNA, 33 bp, Homo sapien
aacatcttccagaagccgccaaagtcaagtgag

SEQ ID NO: 837716 - DNA, 33 bp, Homo sapien
aacatcttccagaagctgccaaagtcaagtgag

SEQ ID NO: 837717 - DNA, 33 bp, Homo sapien
aactcttccaactgtacgcacactctttttgag

SEQ ID NO: 837718 - DNA, 33 bp, Homo sapien
aactcttccaactgtatgcacactctttttgag

SEQ ID NO: 837719 - DNA, 33 bp, Homo sapien
gcgaactgtcaagggacagaacaggattggtgg

SEQ ID NO: 837720 - DNA, 33 bp, Homo sapien
gcgaactgtcaagggagagaacaggattggtgg

SEQ ID NO: 837721 - DNA, 33 bp, Homo sapien
gtccctgcaaaaagaaacgcattattgtatccc

SEQ ID NO: 837722 - DNA, 33 bp, Homo sapien
gtccctgcaaaaagaatcgcattattgtatccc

SEQ ID NO: 837723 - DNA, 33 bp, Homo sapien
gcacagtggagactcaaataggaatatgccgta

SEQ ID NO: 837724 - DNA, 33 bp, Homo sapien
gcacagtggagactcagataggaatatgccgta

SEQ ID NO: 837725 - DNA, 33 bp, Homo sapien
gagctttcacgccagcaaatgcaggagacagac

SEQ ID NO: 837726 - DNA, 33 bp, Homo sapien
gagctttcacgccagcgaatgcaggagacagac

SEQ ID NO: 837727 - DNA, 33 bp, Homo sapien
gaggtctggcatttgcaagcttcctgaccttgg

SEQ ID NO: 837728 - DNA, 33 bp, Homo sapien
gaggtctggcatttgcgagcttcctgaccttgg

SEQ ID NO: 837729 - DNA, 33 bp, Homo sapien
aatcaagtatagcataagattgcagcaggaaag

SEQ ID NO: 837730 - DNA, 33 bp, Homo sapien
aatcaagtatagcataggattgcagcaggaaag

SEQ ID NO: 837731 - DNA, 33 bp, Homo sapien
tgtccatttttataacccacaggcgtgaaattg

SEQ ID NO: 837732 - DNA, 33 bp, Homo sapien
tgtccatttttataactcacaggcgtgaaattg

SEQ ID NO: 837733 - DNA, 33 bp, Homo sapien
ctgctctttgactcctcagagatggagaacagt

SEQ ID NO: 837734 - DNA, 33 bp, Homo sapien
ctgctctttgactccttagagatggagaacagt

SEQ ID NO: 837735 - DNA, 33 bp, Homo sapien
tgtgaaccaggactcaatagttcccatggacca

SEQ ID NO: 837736 - DNA, 33 bp, Homo sapien
tgtgaaccaggactcagtagttcccatggacca

SEQ ID NO: 837737 - DNA, 33 bp, Homo sapien
tttcaaagatgataataatgccagtaaatacaa

SEQ ID NO: 837738 - DNA, 33 bp, Homo sapien
tttcaaagatgataatgatgccagtaaatacaa

SEQ ID NO: 837739 - DNA, 33 bp, Homo sapien
ttactgctattctaccccaaacttaaatagctc

SEQ ID NO: 837740 - DNA, 33 bp, Homo sapien
ttactgctattctaccgcaaacttaaatagctc

SEQ ID NO: 837741 - DNA, 33 bp, Homo sapien
tcctgaaccacagaaaagtgctctgccttaagc

SEQ ID NO: 837742 - DNA, 33 bp, Homo sapien
tcctgaaccacagaaacgtgctctgccttaagc

SEQ ID NO: 837743 - DNA, 33 bp, Homo sapien
acttgaatatgttagcacagttttgtttaatct

SEQ ID NO: 837744 - DNA, 33 bp, Homo sapien
acttgaatatgttagcgcagttttgtttaatct

SEQ ID NO: 837745 - DNA, 33 bp, Homo sapien
atgagtggagaaatcacggatattgggattaaa

SEQ ID NO: 837746 - DNA, 33 bp, Homo sapien
atgagtggagaaatcagggatattgggattaaa

SEQ ID NO: 837747 - DNA, 33 bp, Homo sapien
ttcagaggcagataaaattactcataaacatct

SEQ ID NO: 837748 - DNA, 33 bp, Homo sapien
ttcagaggcagataaagttactcataaacatct

SEQ ID NO: 837749 - DNA, 33 bp, Homo sapien
aatgtttggtaaataaagggcaggccagtgtgg

SEQ ID NO: 837750 - DNA, 33 bp, Homo sapien
aatgtttggtaaataatgggcaggccagtgtgg

SEQ ID NO: 837751 - DNA, 33 bp, Homo sapien
cacaacaatagaggaacagagtctatgtagaca

SEQ ID NO: 837752 - DNA, 33 bp, Homo sapien
cacaacaatagaggaagagagtctatgtagaca

SEQ ID NO: 837753 - DNA, 33 bp, Homo sapien
tttttgggcaacatcaagcaaggttttctatct

SEQ ID NO: 837754 - DNA, 33 bp, Homo sapien
tttttgggcaacatcaggcaaggttttctatct

SEQ ID NO: 837755 - DNA, 33 bp, Homo sapien
ctggaaactgagaaaaagagctaaaaatatatt

SEQ ID NO: 837756 - DNA, 33 bp, Homo sapien
ctggaaactgagaaaatgagctaaaaatatatt

SEQ ID NO: 837757 - DNA, 33 bp, Homo sapien
aatacttcacctctggccactacaatgtgtggg

SEQ ID NO: 837758 - DNA, 33 bp, Homo sapien
aatacttcacctctggtcactacaatgtgtggg

SEQ ID NO: 837759 - DNA, 33 bp, Homo sapien
tcagctccacatgctgcaaaatctcatcttact

SEQ ID NO: 837760 - DNA, 33 bp, Homo sapien
tcagctccacatgctgtaaaatctcatcttact

SEQ ID NO: 837761 - DNA, 33 bp, Homo sapien
taatggctttttgctaccacaactcctcctccc

SEQ ID NO: 837762 - DNA, 33 bp, Homo sapien
taatggctttttgctatcacaactcctcctccc

SEQ ID NO: 837763 - DNA, 33 bp, Homo sapien
agtgctccaagtgattaaaatgtgtagcaaaat

SEQ ID NO: 837764 - DNA, 33 bp, Homo sapien
agtgctccaagtgattcaaatgtgtagcaaaat

SEQ ID NO: 837765 - DNA, 33 bp, Homo sapien
gcttcacatttttctcacctcaaacacttaaaa

SEQ ID NO: 837766 - DNA, 33 bp, Homo sapien
gcttcacatttttctcgcctcaaacacttaaaa

SEQ ID NO: 837767 - DNA, 33 bp, Homo sapien
tcttagccaaaggaaaagtggtcaatatttata

SEQ ID NO: 837768 - DNA, 33 bp, Homo sapien
tcttagccaaaggaaatgtggtcaatatttata

SEQ ID NO: 837769 - DNA, 33 bp, Homo sapien
gggttgtcctttgcccacactccaggtatttta

SEQ ID NO: 837770 - DNA, 33 bp, Homo sapien
gggttgtcctttgcccgcactccaggtatttta

SEQ ID NO: 837771 - DNA, 33 bp, Homo sapien
actgtcagaacctcttaaaatatatgagctaat

SEQ ID NO: 837772 - DNA, 33 bp, Homo sapien
actgtcagaacctcttgaaatatatgagctaat

SEQ ID NO: 837773 - DNA, 33 bp, Homo sapien
agataaaggaaatagcaatgaccagggaatttg

SEQ ID NO: 837774 - DNA, 33 bp, Homo sapien
agataaaggaaatagccatgaccagggaatttg

SEQ ID NO: 837775 - DNA, 33 bp, Homo sapien; identical to SEQ ID NO: 837773

SEQ ID NO: 837776 - DNA, 33 bp, Homo sapien; identical to SEQ ID NO: 837774

SEQ ID NO: 837777 - DNA, 33 bp, Homo sapien
tgggaggaaaattgtcaaaacccactccattgg

SEQ ID NO: 837778 - DNA, 33 bp, Homo sapien
tgggaggaaaattgtcgaaacccactccattgg

SEQ ID NO: 837779 - DNA, 33 bp, Homo sapien
tttagttttctgaaaaaggcatcttgttatata

SEQ ID NO: 837780 - DNA, 33 bp, Homo sapien
tttagttttctgaaaagggcatcttgttatata

SEQ ID NO: 837781 - DNA, 33 bp, Homo sapien
gactcactattctatcacattggtcaatttgtc

SEQ ID NO: 837782 - DNA, 33 bp, Homo sapien
gactcactattctatcgcattggtcaatttgtc

SEQ ID NO: 837783 - DNA, 33 bp, Homo sapien
cttatacaattctggaactgagaagtctaaagc

SEQ ID NO: 837784 - DNA, 33 bp, Homo sapien
cttatacaattctggagctgagaagtctaaagc

SEQ ID NO: 837785 - DNA, 33 bp, Homo sapien
gatttccatctaatcactccattccgatgactc

SEQ ID NO: 837786 - DNA, 33 bp, Homo sapien
gatttccatctaatcattccattccgatgactc

SEQ ID NO: 837787 - DNA, 33 bp, Homo sapien
atttaaaggatgcaacccttccatatgttaagt

SEQ ID NO: 837788 - DNA, 33 bp, Homo sapien
atttaaaggatgcaactcttccatatgttaagt

SEQ ID NO: 837789 - DNA, 33 bp, Homo sapien
agaataaggttaaggaaaaataatcaactgtta

SEQ ID NO: 837790 - DNA, 33 bp, Homo sapien
agaataaggttaaggacaaataatcaactgtta

SEQ ID NO: 837791 - DNA, 33 bp, Homo sapien
gtctattaggaacacaacaagagtgagggagca

SEQ ID NO: 837792 - DNA, 33 bp, Homo sapien
gtctattaggaacacagcaagagtgagggagca

SEQ ID NO: 837793 - DNA, 33 bp, Homo sapien
tctcaaggaactgagtaaaaggaaactgggggg

SEQ ID NO: 837794 - DNA, 33 bp, Homo sapien
tctcaaggaactgagttaaaggaaactgggggg

SEQ ID NO: 837795 - DNA, 33 bp, Homo sapien
actcagttacaggatacgggcagcctcaggaac

SEQ ID NO: 837796 - DNA, 33 bp, Homo sapien
actcagttacaggatatgggcagcctcaggaac

SEQ ID NO: 837797 - DNA, 33 bp, Homo sapien
tactatcttggccctagagcagttttatagtct

SEQ ID NO: 837798 - DNA, 33 bp, Homo sapien
tactatcttggccctatagcagttttatagtct

SEQ ID NO: 837799 - DNA, 33 bp, Homo sapien
gttgttggattcctaacgtttcacttctggtct

SEQ ID NO: 837800 - DNA, 33 bp, Homo sapien
gttgttggattcctaatgtttcacttctggtct

SEQ ID NO: 837801 - DNA, 33 bp, Homo sapien
actcttctctacaatacggtagtcaaccatgtt

SEQ ID NO: 837802 - DNA, 33 bp, Homo sapien
actcttctctacaatatggtagtcaaccatgtt

SEQ ID NO: 837803 - DNA, 33 bp, Homo sapien
tggaaaaggagaaataaagaatcagaaatgagg

SEQ ID NO: 837804 - DNA, 33 bp, Homo sapien
tggaaaaggagaaatagagaatcagaaatgagg

SEQ ID NO: 837805 - DNA, 33 bp, Homo sapien
tactacatattgctaacggccttcctcgcaaaa

SEQ ID NO: 837806 - DNA, 33 bp, Homo sapien
tactacatattgctaatggccttcctcgcaaaa

SEQ ID NO: 837807 - DNA, 33 bp, Homo sapien
aatatatctgataggaacatagacattccttca

SEQ ID NO: 837808 - DNA, 33 bp, Homo sapien
aatatatctgataggagcatagacattccttca

SEQ ID NO: 837809 - DNA, 33 bp, Homo sapien
ctaaagctagcttatcaacaatgcttttggaga

SEQ ID NO: 837810 - DNA, 33 bp, Homo sapien
ctaaagctagcttatccacaatgcttttggaga

SEQ ID NO: 837811 - DNA, 33 bp, Homo sapien
ttttatcagacgcagaaagagagagaactggga

SEQ ID NO: 837812 - DNA, 33 bp, Homo sapien
ttttatcagacgcagagagagagagaactggga

SEQ ID NO: 837813 - DNA, 33 bp, Homo sapien
agcacattggttagcacagcaagcaagggagaa

SEQ ID NO: 837814 - DNA, 33 bp, Homo sapien
agcacattggttagcatagcaagcaagggagaa

SEQ ID NO: 837815 - DNA, 33 bp, Homo sapien
gtcttataatgggaacagaccacttgacagtac

SEQ ID NO: 837816 - DNA, 33 bp, Homo sapien
gtcttataatgggaacggaccacttgacagtac

SEQ ID NO: 837817 - DNA, 33 bp, Homo sapien
ctagatttaatagctagcagggatttcgagttg

SEQ ID NO: 837818 - DNA, 33 bp, Homo sapien
ctagatttaatagctatcagggatttcgagttg

SEQ ID NO: 837819 - DNA, 33 bp, Homo sapien
agtgacaagtagacccagagataaacaactcga

SEQ ID NO: 837820 - DNA, 33 bp, Homo sapien
agtgacaagtagacccggagataaacaactcga

SEQ ID NO: 837821 - DNA, 33 bp, Homo sapien
atatctaagacatctgcatagaaatgttgtgta

SEQ ID NO: 837822 - DNA, 33 bp, Homo sapien
atatctaagacatctgtatagaaatgttgtgta

SEQ ID NO: 837823 - DNA, 33 bp, Homo sapien
taaagcttagagaaaagagagccaatgtaagtg

SEQ ID NO: 837824 - DNA, 33 bp, Homo sapien
taaagcttagagaaaatagagccaatgtaagtg

SEQ ID NO: 837825 - DNA, 33 bp, Homo sapien
tttcagcttcttgggacgtaatcacttttctcc

SEQ ID NO: 837826 - DNA, 33 bp, Homo sapien
tttcagcttcttgggatgtaatcacttttctcc

SEQ ID NO: 837827 - DNA, 33 bp, Homo sapien
tgcctgcctgatagaggaggaatgacacacatc

SEQ ID NO: 837828 - DNA, 33 bp, Homo sapien
tgcctgcctgatagagtaggaatgacacacatc

SEQ ID NO: 837829 - DNA, 33 bp, Homo sapien
ccatgacagacaggtacgacataggtagtatag

SEQ ID NO: 837830 - DNA, 33 bp, Homo sapien
ccatgacagacaggtatgacataggtagtatag

SEQ ID NO: 837831 - DNA, 33 bp, Homo sapien
agtaacaccatgttcacagagggtgaggaagat

SEQ ID NO: 837832 - DNA, 33 bp, Homo sapien
agtaacaccatgttcatagagggtgaggaagat

SEQ ID NO: 837833 - DNA, 33 bp, Homo sapien
catagtgaaagcaggaaaattaagactcgcaag

SEQ ID NO: 837834 - DNA, 33 bp, Homo sapien
catagtgaaagcaggagaattaagactcgcaag

SEQ ID NO: 837835 - DNA, 33 bp, Homo sapien
tacaagtctaccaaaccgggagtgaagaaagga

SEQ ID NO: 837836 - DNA, 33 bp, Homo sapien
tacaagtctaccaaactgggagtgaagaaagga

SEQ ID NO: 837837 - DNA, 33 bp, Homo sapien
tgtaacagataaaagcaagaaaagttattttgg

SEQ ID NO: 837838 - DNA, 33 bp, Homo sapien
tgtaacagataaaagcgagaaaagttattttgg

SEQ ID NO: 837839 - DNA, 33 bp, Homo sapien
gaactttcttttctctaacagtccaaacatgag

SEQ ID NO: 837840 - DNA, 33 bp, Homo sapien
gaactttcttttctctgacagtccaaacatgag

SEQ ID NO: 837841 - DNA, 33 bp, Homo sapien
ctgtttagcatacaccaattccatctgagaata

SEQ ID NO: 837842 - DNA, 33 bp, Homo sapien
ctgtttagcatacaccgattccatctgagaata

SEQ ID NO: 837843 - DNA, 33 bp, Homo sapien
gaacaaaacagtctacaatcaagatgggatgat

SEQ ID NO: 837844 - DNA, 33 bp, Homo sapien
gaacaaaacagtctactatcaagatgggatgat

SEQ ID NO: 837845 - DNA, 33 bp, Homo sapien
atggtccccctgttcagtacattgttccaagac

SEQ ID NO: 837846 - DNA, 33 bp, Homo sapien
atggtccccctgttcattacattgttccaagac

SEQ ID NO: 837847 - DNA, 33 bp, Homo sapien
tgttttgaagagttcacgccttattccacagtt

SEQ ID NO: 837848 - DNA, 33 bp, Homo sapien
tgttttgaagagttcatgccttattccacagtt

SEQ ID NO: 837849 - DNA, 33 bp, Homo sapien
aaggcatgggtagggaaaatactatggtgaact

SEQ ID NO: 837850 - DNA, 33 bp, Homo sapien
aaggcatgggtagggagaatactatggtgaact

SEQ ID NO: 837851 - DNA, 33 bp, Homo sapien
aaagaaggttgatcatgagtacctttgtgtggc

SEQ ID NO: 837852 - DNA, 33 bp, Homo sapien
aaagaaggttgatcattagtacctttgtgtggc

SEQ ID NO: 837853 - DNA, 33 bp, Homo sapien
gcctgcccatctatctcacccctaggcacacca

SEQ ID NO: 837854 - DNA, 33 bp, Homo sapien
gcctgcccatctatcttacccctaggcacacca

SEQ ID NO: 837855 - DNA, 33 bp, Homo sapien
agtcagtataatcagaccaagaacaggtgagaa

SEQ ID NO: 837856 - DNA, 33 bp, Homo sapien
agtcagtataatcagatcaagaacaggtgagaa

SEQ ID NO: 837857 - DNA, 33 bp, Homo sapien
ctgaccgtgtagtagccgatcactttctcacct

SEQ ID NO: 837858 - DNA, 33 bp, Homo sapien
ctgaccgtgtagtagctgatcactttctcacct

SEQ ID NO: 837859 - DNA, 33 bp, Homo sapien
ttgccttattctcttaagagccatcctagtgaa

SEQ ID NO: 837860 - DNA, 33 bp, Homo sapien
ttgccttattctcttaggagccatcctagtgaa

SEQ ID NO: 837861 - DNA, 33 bp, Homo sapien
acaccacctctggcacagcaggtatgactttga

SEQ ID NO: 837862 - DNA, 33 bp, Homo sapien
acaccacctctggcacggcaggtatgactttga

SEQ ID NO: 837863 - DNA, 33 bp, Homo sapien
acccatttatatctgacgtagttacctttgtat

SEQ ID NO: 837864 - DNA, 33 bp, Homo sapien
acccatttatatctgatgtagttacctttgtat

SEQ ID NO: 837865 - DNA, 33 bp, Homo sapien
tcctcaagtcaaaggacagacaaaataacattg

SEQ ID NO: 837866 - DNA, 33 bp, Homo sapien
tcctcaagtcaaaggagagacaaaataacattg

SEQ ID NO: 837867 - DNA, 33 bp, Homo sapien
tctttggtttcttcctcacttggttaactgacc

SEQ ID NO: 837868 - DNA, 33 bp, Homo sapien
tctttggtttcttccttacttggttaactgacc

SEQ ID NO: 837869 - DNA, 33 bp, Homo sapien
aaactaaggctctgcaaagaattccataaagag

SEQ ID NO: 837870 - DNA, 33 bp, Homo sapien
aaactaaggctctgcacagaattccataaagag

SEQ ID NO: 837871 - DNA, 33 bp, Homo sapien
tcagacccattagtcaacagaagagaaagaatc

SEQ ID NO: 837872 - DNA, 33 bp, Homo sapien
tcagacccattagtcagcagaagagaaagaatc

SEQ ID NO: 837873 - DNA, 33 bp, Homo sapien
ctgtgcttttagtttacaaccacctcttttcaa

SEQ ID NO: 837874 - DNA, 33 bp, Homo sapien
ctgtgcttttagtttataaccacctcttttcaa

SEQ ID NO: 837875 - DNA, 33 bp, Homo sapien
ggaggtggtggggtgacggtgtactgcgaaaat

SEQ ID NO: 837876 - DNA, 33 bp, Homo sapien
ggaggtggtggggtgatggtgtactgcgaaaat

SEQ ID NO: 837877 - DNA, 33 bp, Homo sapien
tggggtgtggaacgagaaagtttcagagcctca

SEQ ID NO: 837878 - DNA, 33 bp, Homo sapien
tggggtgtggaacgagcaagtttcagagcctca

SEQ ID NO: 837879 - DNA, 33 bp, Homo sapien
agcattcatctattcaagaaggtaaagccctta

SEQ ID NO: 837880 - DNA, 33 bp, Homo sapien
agcattcatctattcatgaaggtaaagccctta

SEQ ID NO: 837881 - DNA, 33 bp, Homo sapien
catttctacatggaagccattcttcatctaaac

SEQ ID NO: 837882 - DNA, 33 bp, Homo sapien
catttctacatggaagtcattcttcatctaaac

SEQ ID NO: 837883 - DNA, 33 bp, Homo sapien
tctcctgcactcctaacctctcagcaaacacgg

SEQ ID NO: 837884 - DNA, 33 bp, Homo sapien
tctcctgcactcctaagctctcagcaaacacgg

SEQ ID NO: 837885 - DNA, 33 bp, Homo sapien
ttcctgagttctgctacaagaatgagccacctc

SEQ ID NO: 837886 - DNA, 33 bp, Homo sapien
ttcctgagttctgctataagaatgagccacctc

SEQ ID NO: 837887 - DNA, 33 bp, Homo sapien
agacccaggcccgaaacgtgttctttctttcat

SEQ ID NO: 837888 - DNA, 33 bp, Homo sapien
agacccaggcccgaaatgtgttctttctttcat

SEQ ID NO: 837889 - DNA, 33 bp, Homo sapien
ataggcattttatataagtttggtcctttaatt

SEQ ID NO: 837890 - DNA, 33 bp, Homo sapien
ataggcattttatatatgtttggtcctttaatt

SEQ ID NO: 837891 - DNA, 33 bp, Homo sapien
agggagctaccagaggaaatgagtgttctcggg

SEQ ID NO: 837892 - DNA, 33 bp, Homo sapien
agggagctaccagagggaatgagtgttctcggg

SEQ ID NO: 837893 - DNA, 33 bp, Homo sapien
catttgataaagttcaacattctttcttgataa

SEQ ID NO: 837894 - DNA, 33 bp, Homo sapien
catttgataaagttcaccattctttcttgataa

SEQ ID NO: 837895 - DNA, 33 bp, Homo sapien
acagctagctggataaagaaaggtatccactct

SEQ ID NO: 837896 - DNA, 33 bp, Homo sapien
acagctagctggataaggaaaggtatccactct

SEQ ID NO: 837897 - DNA, 33 bp, Homo sapien
acttttctgtggtatcaaacattagaacgtatt

SEQ ID NO: 837898 - DNA, 33 bp, Homo sapien
acttttctgtggtatcgaacattagaacgtatt

SEQ ID NO: 837899 - DNA, 33 bp, Homo sapien
tcaccctggtaaatggccatcagtttaaggaag

SEQ ID NO: 837900 - DNA, 33 bp, Homo sapien
tcaccctggtaaatggtcatcagtttaaggaag

SEQ ID NO: 837901 - DNA, 33 bp, Homo sapien
gggggtaggcggagtacagctgaaattcaagca

SEQ ID NO: 837902 - DNA, 33 bp, Homo sapien
gggggtaggcggagtatagctgaaattcaagca

SEQ ID NO: 837903 - DNA, 33 bp, Homo sapien
aagtgagtccttgatccacttcctcctcattgg

SEQ ID NO: 837904 - DNA, 33 bp, Homo sapien
aagtgagtccttgatctacttcctcctcattgg

SEQ ID NO: 837905 - DNA, 33 bp, Homo sapien
gtccctagttgcttcaaattttttagtacctgg

SEQ ID NO: 837906 - DNA, 33 bp, Homo sapien
gtccctagttgcttcagattttttagtacctgg

SEQ ID NO: 837907 - DNA, 33 bp, Homo sapien
gaataaaccaatctgaagaaagagtatcagaac

SEQ ID NO: 837908 - DNA, 33 bp, Homo sapien
gaataaaccaatctgaggaaagagtatcagaac

SEQ ID NO: 837909 - DNA, 33 bp, Homo sapien
aaaatataatgcaaataaaaaaatgtagcataa

SEQ ID NO: 837910 - DNA, 33 bp, Homo sapien
aaaatataatgcaaattaaaaaatgtagcataa

SEQ ID NO: 837911 - DNA, 33 bp, Homo sapien
aggacctcagggaataaaagatatctgtcatgg

SEQ ID NO: 837912 - DNA, 33 bp, Homo sapien
aggacctcagggaatagaagatatctgtcatgg

SEQ ID NO: 837913 - DNA, 33 bp, Homo sapien
gtgtgatcttaaactcaacagcttagaggtgcc

SEQ ID NO: 837914 - DNA, 33 bp, Homo sapien
gtgtgatcttaaactctacagcttagaggtgcc

SEQ ID NO: 837915 - DNA, 33 bp, Homo sapien
acttcttctacacttacactcctctcttcccag

SEQ ID NO: 837916 - DNA, 33 bp, Homo sapien
acttcttctacacttagactcctctcttcccag

SEQ ID NO: 837917 - DNA, 33 bp, Homo sapien
aactccccttcttaccaatgaagacaatgaggc

SEQ ID NO: 837918 - DNA, 33 bp, Homo sapien
aactccccttcttaccgatgaagacaatgaggc

SEQ ID NO: 837919 - DNA, 33 bp, Homo sapien
taatgcaaaaacttcaagctaaacagaacattt

SEQ ID NO: 837920 - DNA, 33 bp, Homo sapien
taatgcaaaaacttcatgctaaacagaacattt

SEQ ID NO: 837921 - DNA, 33 bp, Homo sapien
ggtgccttggaaaaagaagcagagtttgcattt

SEQ ID NO: 837922 - DNA, 33 bp, Homo sapien
ggtgccttggaaaaaggagcagagtttgcattt

SEQ ID NO: 837923 - DNA, 33 bp, Homo sapien
agttaagtgagaggaaaacaaaattcaatctag

SEQ ID NO: 837924 - DNA, 33 bp, Homo sapien
agttaagtgagaggaacacaaaattcaatctag

SEQ ID NO: 837925 - DNA, 33 bp, Homo sapien
tggatgctgcagtacacacctctggcctgagag

SEQ ID NO: 837926 - DNA, 33 bp, Homo sapien
tggatgctgcagtacatacctctggcctgagag

SEQ ID NO: 837927 - DNA, 33 bp, Homo sapien
agcaggacctgtcaaacgcttctgcttggcaat

SEQ ID NO: 837928 - DNA, 33 bp, Homo sapien
agcaggacctgtcaaatgcttctgcttggcaat

SEQ ID NO: 837929 - DNA, 33 bp, Homo sapien
cgcaattattaattacagggtatggagagcaga

SEQ ID NO: 837930 - DNA, 33 bp, Homo sapien
cgcaattattaattactgggtatggagagcaga

SEQ ID NO: 837931 - DNA, 33 bp, Homo sapien
gacaggtcttcactgacgtttgttgtaggttgt

SEQ ID NO: 837932 - DNA, 33 bp, Homo sapien
gacaggtcttcactgaggtttgttgtaggttgt

SEQ ID NO: 837933 - DNA, 33 bp, Homo sapien
tgtcattgcattttaccctgttactaacttttg

SEQ ID NO: 837934 - DNA, 33 bp, Homo sapien
tgtcattgcattttacgctgttactaacttttg

SEQ ID NO: 837935 - DNA, 33 bp, Homo sapien
ctgcctgaggtcaagcccataatgtgaagtgga

SEQ ID NO: 837936 - DNA, 33 bp, Homo sapien
ctgcctgaggtcaagctcataatgtgaagtgga

SEQ ID NO: 837937 - DNA, 33 bp, Homo sapien
caaacccattcactcccccacgtctaacctccc

SEQ ID NO: 837938 - DNA, 33 bp, Homo sapien
caaacccattcactcctccacgtctaacctccc

SEQ ID NO: 837939 - DNA, 33 bp, Homo sapien
ttttgtagtccagagaaagtgtggtgggtgtga

SEQ ID NO: 837940 - DNA, 33 bp, Homo sapien
ttttgtagtccagagagagtgtggtgggtgtga

SEQ ID NO: 837941 - DNA, 33 bp, Homo sapien
gtagatgcttcataaaagtctgttgaaccgaac

SEQ ID NO: 837942 - DNA, 33 bp, Homo sapien
gtagatgcttcataaatgtctgttgaaccgaac

SEQ ID NO: 837943 - DNA, 33 bp, Homo sapien
catagaacctagcagaacagaaaggagaaggaa

SEQ ID NO: 837944 - DNA, 33 bp, Homo sapien
catagaacctagcagagcagaaaggagaaggaa

SEQ ID NO: 837945 - DNA, 33 bp, Homo sapien
aacacttcataagcagcaattgttgtatcatgc

SEQ ID NO: 837946 - DNA, 33 bp, Homo sapien
aacacttcataagcaggaattgttgtatcatgc

SEQ ID NO: 837947 - DNA, 33 bp, Homo sapien
ctttccttgtcctctaaatccttcattgcctgt

SEQ ID NO: 837948 - DNA, 33 bp, Homo sapien
ctttccttgtcctctacatccttcattgcctgt

SEQ ID NO: 837949 - DNA, 33 bp, Homo sapien
gtccaaggtcacccagaaacctaagctgtccta

SEQ ID NO: 837950 - DNA, 33 bp, Homo sapien
gtccaaggtcacccagcaacctaagctgtccta

SEQ ID NO: 837951 - DNA, 33 bp, Homo sapien
caatggccacaatgaaaggttcggctgagaggc

SEQ ID NO: 837952 - DNA, 33 bp, Homo sapien
caatggccacaatgaatggttcggctgagaggc

SEQ ID NO: 837953 - DNA, 33 bp, Homo sapien
tgcataatgagaatgaagtattttgatgtgttt

SEQ ID NO: 837954 - DNA, 33 bp, Homo sapien
tgcataatgagaatgatgtattttgatgtgttt

SEQ ID NO: 837955 - DNA, 33 bp, Homo sapien
gcgagtggagctccaaaagtgattaccacagac

SEQ ID NO: 837956 - DNA, 33 bp, Homo sapien
gcgagtggagctccaacagtgattaccacagac

SEQ ID NO: 837957 - DNA, 33 bp, Homo sapien
aggctctctatctgtacggtccagtgcactagc

SEQ ID NO: 837958 - DNA, 33 bp, Homo sapien
aggctctctatctgtatggtccagtgcactagc

SEQ ID NO: 837959 - DNA, 33 bp, Homo sapien
accactgctcacctccaccattgcagtgtgaaa

SEQ ID NO: 837960 - DNA, 33 bp, Homo sapien
accactgctcacctccgccattgcagtgtgaaa

SEQ ID NO: 837961 - DNA, 33 bp, Homo sapien
atttaattttcatgtgccacaaagtatttttct

SEQ ID NO: 837962 - DNA, 33 bp, Homo sapien
atttaattttcatgtgtcacaaagtatttttct

SEQ ID NO: 837963 - DNA, 33 bp, Homo sapien
ccgtcttaggccaaagcctccctcatcagtaca

SEQ ID NO: 837964 - DNA, 33 bp, Homo sapien
ccgtcttaggccaaagtctccctcatcagtaca

SEQ ID NO: 837965 - DNA, 33 bp, Homo sapien
ccaaggtggaggctccagcaaaggacagtgaaa

SEQ ID NO: 837966 - DNA, 33 bp, Homo sapien
ccaaggtggaggctccggcaaaggacagtgaaa

SEQ ID NO: 837967 - DNA, 33 bp, Homo sapien
tgctttatttaattgccatcatttgaaccatca

SEQ ID NO: 837968 - DNA, 33 bp, Homo sapien
tgctttatttaattgctatcatttgaaccatca

SEQ ID NO: 837969 - DNA, 33 bp, Homo sapien
aaccatcacaccgaaaatagtatgaaagtagta

SEQ ID NO: 837970 - DNA, 33 bp, Homo sapien
aaccatcacaccgaaagtagtatgaaagtagta

SEQ ID NO: 837971 - DNA, 33 bp, Homo sapien
tgacctactgtgtaaacgttcatggtttaaagc

SEQ ID NO: 837972 - DNA, 33 bp, Homo sapien
tgacctactgtgtaaatgttcatggtttaaagc

SEQ ID NO: 837973 - DNA, 33 bp, Homo sapien
gaaaaattctgttctcacttggagggctcaact

SEQ ID NO: 837974 - DNA, 33 bp, Homo sapien
gaaaaattctgttctctcttggagggctcaact

SEQ ID NO: 837975 - DNA, 33 bp, Homo sapien
tggtctccttcctacccagcctttgtgatctcc

SEQ ID NO: 837976 - DNA, 33 bp, Homo sapien
tggtctccttcctacctagcctttgtgatctcc

SEQ ID NO: 837977 - DNA, 33 bp, Homo sapien
gtgaaggcaagtgccacgaaattcagccagtag

SEQ ID NO: 837978 - DNA, 33 bp, Homo sapien
gtgaaggcaagtgccatgaaattcagccagtag

SEQ ID NO: 837979 - DNA, 33 bp, Homo sapien
atgtgttggcaagctccacttagaaatgccacc

SEQ ID NO: 837980 - DNA, 33 bp, Homo sapien
atgtgttggcaagctctacttagaaatgccacc

SEQ ID NO: 837981 - DNA, 33 bp, Homo sapien
cttttgtggtgatgccaaggccaagaagtaata

SEQ ID NO: 837982 - DNA, 33 bp, Homo sapien
cttttgtggtgatgccgaggccaagaagtaata

SEQ ID NO: 837983 - DNA, 33 bp, Homo sapien
gtgttactatccccaccggaagaacaggaaagg

SEQ ID NO: 837984 - DNA, 33 bp, Homo sapien
gtgttactatccccactggaagaacaggaaagg

SEQ ID NO: 837985 - DNA, 33 bp, Homo sapien
atccccttgcagtagacggttgacattttaaag

SEQ ID NO: 837986 - DNA, 33 bp, Homo sapien
atccccttgcagtagatggttgacattttaaag

SEQ ID NO: 837987 - DNA, 33 bp, Homo sapien
cttatgaccatattataacatgaaaaacaagca

SEQ ID NO: 837988 - DNA, 33 bp, Homo sapien
cttatgaccatattatgacatgaaaaacaagca

SEQ ID NO: 837989 - DNA, 33 bp, Homo sapien
ggctccaattgcagggaatggaattaaaaccag

SEQ ID NO: 837990 - DNA, 33 bp, Homo sapien
ggctccaattgcaggggatggaattaaaaccag

SEQ ID NO: 837991 - DNA, 33 bp, Homo sapien
cattgactgtgagtcaatcttgggggcagaagt

SEQ ID NO: 837992 - DNA, 33 bp, Homo sapien
cattgactgtgagtcagtcttgggggcagaagt

SEQ ID NO: 837993 - DNA, 33 bp, Homo sapien
tgctgcaggaaggaatcaggaacttgcccactc

SEQ ID NO: 837994 - DNA, 33 bp, Homo sapien
tgctgcaggaaggaattaggaacttgcccactc

SEQ ID NO: 837995 - DNA, 33 bp, Homo sapien
ctggcaagggaagcaacacaagcaagcaggaaa

SEQ ID NO: 837996 - DNA, 33 bp, Homo sapien
ctggcaagggaagcaagacaagcaagcaggaaa

SEQ ID NO: 837997 - DNA, 33 bp, Homo sapien
gtttgataaattagtgaaagagacgataccatg

SEQ ID NO: 837998 - DNA, 33 bp, Homo sapien
gtttgataaattagtggaagagacgataccatg

SEQ ID NO: 837999 - DNA, 33 bp, Homo sapien
ttcagcttaatccacaacagtgtcagtgtgaag

SEQ ID NO: 838000 - DNA, 33 bp, Homo sapien
ttcagcttaatccacatcagtgtcagtgtgaag

SEQ ID NO: 838001 - DNA, 33 bp, Homo sapien
aagactgcatgaataaaaggctcagaacggtgc

SEQ ID NO: 838002 - DNA, 33 bp, Homo sapien
aagactgcatgaataacaggctcagaacggtgc

SEQ ID NO: 838003 - DNA, 33 bp, Homo sapien
tttctgcctgtctgaaagatgaggactgcaccc

SEQ ID NO: 838004 - DNA, 33 bp, Homo sapien
tttctgcctgtctgaaggatgaggactgcaccc

SEQ ID NO: 838005 - DNA, 33 bp, Homo sapien
aaatatgatatctttacagagcagaagcatgtg

SEQ ID NO: 838006 - DNA, 33 bp, Homo sapien
aaatatgatatctttatagagcagaagcatgtg

SEQ ID NO: 838007 - DNA, 33 bp, Homo sapien
tctaccagcccagagaccttgtctgtaaaatgg

SEQ ID NO: 838008 - DNA, 33 bp, Homo sapien
tctaccagcccagagatcttgtctgtaaaatgg

SEQ ID NO: 838009 - DNA, 33 bp, Homo sapien
tagttcttacagccagaagaattcacgggtgct

SEQ ID NO: 838010 - DNA, 33 bp, Homo sapien
tagttcttacagccaggagaattcacgggtgct

SEQ ID NO: 838011 - DNA, 33 bp, Homo sapien
aacatgtatgaaggaaggggatgtagtagaaca

SEQ ID NO: 838012 - DNA, 33 bp, Homo sapien
aacatgtatgaaggaatgggatgtagtagaaca

SEQ ID NO: 838013 - DNA, 33 bp, Homo sapien
gaaaacaggttgtaagccaatgtacttaaacct

SEQ ID NO: 838014 - DNA, 33 bp, Homo sapien
gaaaacaggttgtaagtcaatgtacttaaacct

SEQ ID NO: 838015 - DNA, 33 bp, Homo sapien
acagacctggtcggaaatgattggatcctgggg

SEQ ID NO: 838016 - DNA, 33 bp, Homo sapien
acagacctggtcggaagtgattggatcctgggg

SEQ ID NO: 838017 - DNA, 33 bp, Homo sapien
tgtagtttgtcttttcactttatcaatgacttc

SEQ ID NO: 838018 - DNA, 33 bp, Homo sapien
tgtagtttgtcttttccctttatcaatgacttc

SEQ ID NO: 838019 - DNA, 33 bp, Homo sapien
agagctaggaaagacaatgtccatgcaagtggg

SEQ ID NO: 838020 - DNA, 33 bp, Homo sapien
agagctaggaaagacagtgtccatgcaagtggg

SEQ ID NO: 838021 - DNA, 33 bp, Homo sapien
aggttacagtaaatgaaagtttgtgccagaagt

SEQ ID NO: 838022 - DNA, 33 bp, Homo sapien
aggttacagtaaatgagagtttgtgccagaagt

SEQ ID NO: 838023 - DNA, 33 bp, Homo sapien
ggaagcacctggaaaactgtagacttcactgct

SEQ ID NO: 838024 - DNA, 33 bp, Homo sapien
ggaagcacctggaaaattgtagacttcactgct

SEQ ID NO: 838025 - DNA, 33 bp, Homo sapien
caggattcaggccttcaacatgaaacccagaca

SEQ ID NO: 838026 - DNA, 33 bp, Homo sapien
caggattcaggccttcgacatgaaacccagaca

SEQ ID NO: 838027 - DNA, 33 bp, Homo sapien
tccttgcaaagtatataaatgttagtgctgctg

SEQ ID NO: 838028 - DNA, 33 bp, Homo sapien
tccttgcaaagtatatgaatgttagtgctgctg

SEQ ID NO: 838029 - DNA, 33 bp, Homo sapien
tgtaggtactcaataagtgtcagtttccttcct

SEQ ID NO: 838030 - DNA, 33 bp, Homo sapien
tgtaggtactcaataattgtcagtttccttcct

SEQ ID NO: 838031 - DNA, 33 bp, Homo sapien
cagagtttccagagaaatgaacagcagacattc

SEQ ID NO: 838032 - DNA, 33 bp, Homo sapien
cagagtttccagagaactgaacagcagacattc

SEQ ID NO: 838033 - DNA, 33 bp, Homo sapien
agtccggcatttgagcaagtccacattccctga

SEQ ID NO: 838034 - DNA, 33 bp, Homo sapien
agtccggcatttgagcgagtccacattccctga

SEQ ID NO: 838035 - DNA, 33 bp, Homo sapien
tgtagtgtggctcacaaatggatgccggcccat

SEQ ID NO: 838036 - DNA, 33 bp, Homo sapien
tgtagtgtggctcacagatggatgccggcccat

SEQ ID NO: 838037 - DNA, 33 bp, Homo sapien
acagaagtcaagagtaagaattaaggctttata

SEQ ID NO: 838038 - DNA, 33 bp, Homo sapien
acagaagtcaagagtaggaattaaggctttata

SEQ ID NO: 838039 - DNA, 33 bp, Homo sapien
gaaagagaattcagtacagggtttggatttcag

SEQ ID NO: 838040 - DNA, 33 bp, Homo sapien
gaaagagaattcagtagagggtttggatttcag

SEQ ID NO: 838041 - DNA, 33 bp, Homo sapien
aataattgccataatggaaagcctcaagcagaa

SEQ ID NO: 838042 - DNA, 33 bp, Homo sapien
aataattgccataatgtaaagcctcaagcagaa

SEQ ID NO: 838043 - DNA, 33 bp, Homo sapien
tcaccctgtctctcacacacatacctactaaat

SEQ ID NO: 838044 - DNA, 33 bp, Homo sapien
tcaccctgtctctcactcacatacctactaaat

SEQ ID NO: 838045 - DNA, 33 bp, Homo sapien
cgccattgtggtaccaaatgacccaggaaggga

SEQ ID NO: 838046 - DNA, 33 bp, Homo sapien
cgccattgtggtaccagatgacccaggaaggga

SEQ ID NO: 838047 - DNA, 33 bp, Homo sapien
ctgcacaacaatatgacgtatttagtgccagtg

SEQ ID NO: 838048 - DNA, 33 bp, Homo sapien
ctgcacaacaatatgatgtatttagtgccagtg

SEQ ID NO: 838049 - DNA, 33 bp, Homo sapien
acaaggatttgaatacaagtagtttatttggga

SEQ ID NO: 838050 - DNA, 33 bp, Homo sapien
acaaggatttgaatacgagtagtttatttggga

SEQ ID NO: 838051 - DNA, 33 bp, Homo sapien
gccttctggcttcttccctcactagcagtttgg

SEQ ID NO: 838052 - DNA, 33 bp, Homo sapien
gccttctggcttcttctctcactagcagtttgg

SEQ ID NO: 838053 - DNA, 33 bp, Homo sapien
tccttggtcagagcccagatcaaaatgaacctg

SEQ ID NO: 838054 - DNA, 33 bp, Homo sapien
tccttggtcagagcccggatcaaaatgaacctg

SEQ ID NO: 838055 - DNA, 33 bp, Homo sapien
aagaggaaaagacatacacgcacacatatagac

SEQ ID NO: 838056 - DNA, 33 bp, Homo sapien
aagaggaaaagacatatacgcacacatatagac

SEQ ID NO: 838057 - DNA, 33 bp, Homo sapien
agtttaccttggagatgagaggacttagaaaag

SEQ ID NO: 838058 - DNA, 33 bp, Homo sapien
agtttaccttggagattagaggacttagaaaag

SEQ ID NO: 838059 - DNA, 33 bp, Homo sapien
gtggcatagaatggcaagtgctcaagcaagacc

SEQ ID NO: 838060 - DNA, 33 bp, Homo sapien
gtggcatagaatggcatgtgctcaagcaagacc

SEQ ID NO: 838061 - DNA, 33 bp, Homo sapien
tggttctgagcttaataacttacttatgataac

SEQ ID NO: 838062 - DNA, 33 bp, Homo sapien
tggttctgagcttaatgacttacttatgataac

SEQ ID NO: 838063 - DNA, 33 bp, Homo sapien
tggatttgctaccatccactcagagctgagcaa

SEQ ID NO: 838064 - DNA, 33 bp, Homo sapien
tggatttgctaccatcgactcagagctgagcaa

SEQ ID NO: 838065 - DNA, 33 bp, Homo sapien
tccagggcatgctccccattctttcttggttaa

SEQ ID NO: 838066 - DNA, 33 bp, Homo sapien
tccagggcatgctcccgattctttcttggttaa

SEQ ID NO: 838067 - DNA, 33 bp, Homo sapien
cttcccactatgaagaggagaagcagagccaag

SEQ ID NO: 838068 - DNA, 33 bp, Homo sapien
cttcccactatgaagatgagaagcagagccaag

SEQ ID NO: 838069 - DNA, 33 bp, Homo sapien
aatgaaagctgtgggcactctttacagaaaaat

SEQ ID NO: 838070 - DNA, 33 bp, Homo sapien
aatgaaagctgtgggcgctctttacagaaaaat

SEQ ID NO: 838071 - DNA, 33 bp, Homo sapien
gaagataatggtgataactacagtgacctgagg

SEQ ID NO: 838072 - DNA, 33 bp, Homo sapien
gaagataatggtgatatctacagtgacctgagg

SEQ ID NO: 838073 - DNA, 33 bp, Homo sapien
gatgctctgaagtaataatccagcagtgctcag

SEQ ID NO: 838074 - DNA, 33 bp, Homo sapien
gatgctctgaagtaatgatccagcagtgctcag

SEQ ID NO: 838075 - DNA, 33 bp, Homo sapien
actgagggatttgacccacttaattgtttcacc

SEQ ID NO: 838076 - DNA, 33 bp, Homo sapien
actgagggatttgacctacttaattgtttcacc

SEQ ID NO: 838077 - DNA, 33 bp, Homo sapien
gaatttctctttctaaagttccttgtgtatatt

SEQ ID NO: 838078 - DNA, 33 bp, Homo sapien
gaatttctctttctaaggttccttgtgtatatt

SEQ ID NO: 838079 - DNA, 33 bp, Homo sapien
ggatatcaaagtcaacgcaaagagaggtatgtg

SEQ ID NO: 838080 - DNA, 33 bp, Homo sapien
ggatatcaaagtcaactcaaagagaggtatgtg

SEQ ID NO: 838081 - DNA, 33 bp, Homo sapien
tcagattcaaaacaccagctagcctctccctgt

SEQ ID NO: 838082 - DNA, 33 bp, Homo sapien
tcagattcaaaacacctgctagcctctccctgt

SEQ ID NO: 838083 - DNA, 33 bp, Homo sapien
tcttctatatgctgtcaatgtataagccagaaa

SEQ ID NO: 838084 - DNA, 33 bp, Homo sapien
tcttctatatgctgtcgatgtataagccagaaa

SEQ ID NO: 838085 - DNA, 33 bp, Homo sapien
ggtgtgttcctggttacagaaaagcatgtgtgg

SEQ ID NO: 838086 - DNA, 33 bp, Homo sapien
ggtgtgttcctggttagagaaaagcatgtgtgg

SEQ ID NO: 838087 - DNA, 33 bp, Homo sapien
tccggcaaattgcccactacttgatctaacctg

SEQ ID NO: 838088 - DNA, 33 bp, Homo sapien
tccggcaaattgcccattacttgatctaacctg

SEQ ID NO: 838089 - DNA, 33 bp, Homo sapien
agcctctcctagaatgacaatgtgaccttgtgt

SEQ ID NO: 838090 - DNA, 33 bp, Homo sapien
agcctctcctagaatggcaatgtgaccttgtgt

SEQ ID NO: 838091 - DNA, 33 bp, Homo sapien
gtttacaaaccagaaagactttttgttatgttg

SEQ ID NO: 838092 - DNA, 33 bp, Homo sapien
gtttacaaaccagaaatactttttgttatgttg

SEQ ID NO: 838093 - DNA, 33 bp, Homo sapien
gtagagatctttagccaagtttacaaaccagaa

SEQ ID NO: 838094 - DNA, 33 bp, Homo sapien
gtagagatctttagcccagtttacaaaccagaa

SEQ ID NO: 838095 - DNA, 33 bp, Homo sapien
aagaattaggcgaaataatgtatgaggccccta

SEQ ID NO: 838096 - DNA, 33 bp, Homo sapien
aagaattaggcgaaatcatgtatgaggccccta

SEQ ID NO: 838097 - DNA, 33 bp, Homo sapien
atttataaccactgtaaaacgctgccctcattc

SEQ ID NO: 838098 - DNA, 33 bp, Homo sapien
atttataaccactgtacaacgctgccctcattc

SEQ ID NO: 838099 - DNA, 33 bp, Homo sapien
cagctctgtttgtagacaaaatactattatata

SEQ ID NO: 838100 - DNA, 33 bp, Homo sapien
cagctctgtttgtagataaaatactattatata

SEQ ID NO: 838101 - DNA, 33 bp, Homo sapien
ggcagagaagggtagaaattccgctaaagagct

SEQ ID NO: 838102 - DNA, 33 bp, Homo sapien
ggcagagaagggtagagattccgctaaagagct

SEQ ID NO: 838103 - DNA, 33 bp, Homo sapien
actttactctgcaggaagtcctttctgttctgt

SEQ ID NO: 838104 - DNA, 33 bp, Homo sapien
actttactctgcaggatgtcctttctgttctgt

SEQ ID NO: 838105 - DNA, 33 bp, Homo sapien
cttaaaagaagtaaaaatatggacatggacaca

SEQ ID NO: 838106 - DNA, 33 bp, Homo sapien
cttaaaagaagtaaaagtatggacatggacaca

SEQ ID NO: 838107 - DNA, 33 bp, Homo sapien
ttactcaacggagagaaacagcctctaatttca

SEQ ID NO: 838108 - DNA, 33 bp, Homo sapien
ttactcaacggagagacacagcctctaatttca

SEQ ID NO: 838109 - DNA, 33 bp, Homo sapien
gagactgcctatgacaaggactaggtctcttcc

SEQ ID NO: 838110 - DNA, 33 bp, Homo sapien
gagactgcctatgacagggactaggtctcttcc

SEQ ID NO: 838111 - DNA, 33 bp, Homo sapien
tgctcaggtaatagaaaccacagagaaatggag

SEQ ID NO: 838112 - DNA, 33 bp, Homo sapien
tgctcaggtaatagaacccacagagaaatggag

SEQ ID NO: 838113 - DNA, 33 bp, Homo sapien
aaatacacaaggctctcgacttacctgagaagg

SEQ ID NO: 838114 - DNA, 33 bp, Homo sapien
aaatacacaaggctcttgacttacctgagaagg

SEQ ID NO: 838115 - DNA, 33 bp, Homo sapien
aagccctagtctccgaaaaccataagagtgagt

SEQ ID NO: 838116 - DNA, 33 bp, Homo sapien
aagccctagtctccgacaaccataagagtgagt

SEQ ID NO: 838117 - DNA, 33 bp, Homo sapien
cagggccatgccagaaactggattataaagtat

SEQ ID NO: 838118 - DNA, 33 bp, Homo sapien
cagggccatgccagaacctggattataaagtat

SEQ ID NO: 838119 - DNA, 33 bp, Homo sapien
ccagtggatggccacaatgagttataaatcagg

SEQ ID NO: 838120 - DNA, 33 bp, Homo sapien
ccagtggatggccacagtgagttataaatcagg

SEQ ID NO: 838121 - DNA, 33 bp, Homo sapien
cctatctcggggatcaaaatcagtttgctttga

SEQ ID NO: 838122 - DNA, 33 bp, Homo sapien
cctatctcggggatcagaatcagtttgctttga

SEQ ID NO: 838123 - DNA, 33 bp, Homo sapien
tctctccacgatgcccaggagaagggggaagtt

SEQ ID NO: 838124 - DNA, 33 bp, Homo sapien
tctctccacgatgcccgggagaagggggaagtt

SEQ ID NO: 838125 - DNA, 33 bp, Homo sapien
agctttcactgcgtaaatcccttttccagatga

SEQ ID NO: 838126 - DNA, 33 bp, Homo sapien
agctttcactgcgtaactcccttttccagatga

SEQ ID NO: 838127 - DNA, 33 bp, Homo sapien
ttttgctgaaagaccaacaaaagagactgagac

SEQ ID NO: 838128 - DNA, 33 bp, Homo sapien
ttttgctgaaagaccagcaaaagagactgagac

SEQ ID NO: 838129 - DNA, 33 bp, Homo sapien
cttctgcaggatagccacaggtgagctctgggg

SEQ ID NO: 838130 - DNA, 33 bp, Homo sapien
cttctgcaggatagccgcaggtgagctctgggg

SEQ ID NO: 838131 - DNA, 33 bp, Homo sapien
ggaaaagattttcaaggcactctcaagactctc

SEQ ID NO: 838132 - DNA, 33 bp, Homo sapien
ggaaaagattttcaagtcactctcaagactctc

SEQ ID NO: 838133 - DNA, 33 bp, Homo sapien
actacccagcatcctacatatgttttcttgtta

SEQ ID NO: 838134 - DNA, 33 bp, Homo sapien
actacccagcatcctatatatgttttcttgtta

SEQ ID NO: 838135 - DNA, 33 bp, Homo sapien
agagctgggaatggaaaccgatgtcctgtctcc

SEQ ID NO: 838136 - DNA, 33 bp, Homo sapien
agagctgggaatggaagccgatgtcctgtctcc

SEQ ID NO: 838137 - DNA, 33 bp, Homo sapien
aacctgtgagaacaccaggctgatggggtttct

SEQ ID NO: 838138 - DNA, 33 bp, Homo sapien
aacctgtgagaacaccgggctgatggggtttct

SEQ ID NO: 838139 - DNA, 33 bp, Homo sapien
gtaaagacacagaggccaccagtgacactagga

SEQ ID NO: 838140 - DNA, 33 bp, Homo sapien
gtaaagacacagaggctaccagtgacactagga

SEQ ID NO: 838141 - DNA, 33 bp, Homo sapien
tactttgttgtgaccgaaggattggttagaatt

SEQ ID NO: 838142 - DNA, 33 bp, Homo sapien
tactttgttgtgaccggaggattggttagaatt

SEQ ID NO: 838143 - DNA, 33 bp, Homo sapien
atgcccagcattgaaaaataatgaaagagtaga

SEQ ID NO: 838144 - DNA, 33 bp, Homo sapien
atgcccagcattgaaacataatgaaagagtaga

SEQ ID NO: 838145 - DNA, 33 bp, Homo sapien
gtaagtacctccctaaatgcaggcaaagggaga

SEQ ID NO: 838146 - DNA, 33 bp, Homo sapien
gtaagtacctccctaagtgcaggcaaagggaga

SEQ ID NO: 838147 - DNA, 33 bp, Homo sapien
cagtgaggctgagtacacatctgccaaggaggg

SEQ ID NO: 838148 - DNA, 33 bp, Homo sapien
cagtgaggctgagtacgcatctgccaaggaggg

SEQ ID NO: 838149 - DNA, 33 bp, Homo sapien
agaccttcctgactacccttaaaatctctaccc

SEQ ID NO: 838150 - DNA, 33 bp, Homo sapien
agaccttcctgactactcttaaaatctctaccc

SEQ ID NO: 838151 - DNA, 33 bp, Homo sapien
ggtgttaagtgtttaaactctggcggaagaaac

SEQ ID NO: 838152 - DNA, 33 bp, Homo sapien
ggtgttaagtgtttaacctctggcggaagaaac

SEQ ID NO: 838153 - DNA, 33 bp, Homo sapien
ctcaacagagtcgctcaatgagaggcacacctt

SEQ ID NO: 838154 - DNA, 33 bp, Homo sapien
ctcaacagagtcgctcgatgagaggcacacctt

SEQ ID NO: 838155 - DNA, 33 bp, Homo sapien
atatgtttacatttccgctgtgtttaggagggt

SEQ ID NO: 838156 - DNA, 33 bp, Homo sapien
atatgtttacatttcctctgtgtttaggagggt

SEQ ID NO: 838157 - DNA, 33 bp, Homo sapien
gaatgacagcaaatgaaggtctgaaatttcctt

SEQ ID NO: 838158 - DNA, 33 bp, Homo sapien
gaatgacagcaaatgagggtctgaaatttcctt

SEQ ID NO: 838159 - DNA, 33 bp, Homo sapien
caggcttctgagctgaacatttagaacctggct

SEQ ID NO: 838160 - DNA, 33 bp, Homo sapien
caggcttctgagctgagcatttagaacctggct

SEQ ID NO: 838161 - DNA, 33 bp, Homo sapien
cacctttgcccctaataaacctgaatcaggtgg

SEQ ID NO: 838162 - DNA, 33 bp, Homo sapien
cacctttgcccctaatgaacctgaatcaggtgg

SEQ ID NO: 838163 - DNA, 33 bp, Homo sapien
ttcccagtcaatatcaagtgccaataactgcag

SEQ ID NO: 838164 - DNA, 33 bp, Homo sapien
ttcccagtcaatatcatgtgccaataactgcag

SEQ ID NO: 838165 - DNA, 33 bp, Homo sapien
ccaaatgggagtggtacagttttgtttgctttt

SEQ ID NO: 838166 - DNA, 33 bp, Homo sapien
ccaaatgggagtggtatagttttgtttgctttt

SEQ ID NO: 838167 - DNA, 33 bp, Homo sapien
actctttatggcctagacactgacttgttaaat

SEQ ID NO: 838168 - DNA, 33 bp, Homo sapien
actctttatggcctaggcactgacttgttaaat

SEQ ID NO: 838169 - DNA, 33 bp, Homo sapien
cttgcgttggtttacccagactcacaggaggcc

SEQ ID NO: 838170 - DNA, 33 bp, Homo sapien
cttgcgttggtttacctagactcacaggaggcc

SEQ ID NO: 838171 - DNA, 33 bp, Homo sapien
aatttcccctgagtctaacctcttttccctggg

SEQ ID NO: 838172 - DNA, 33 bp, Homo sapien
aatttcccctgagtctgacctcttttccctggg

SEQ ID NO: 838173 - DNA, 33 bp, Homo sapien
ctgcatcctgctggcgcagtctcacttgtggag

SEQ ID NO: 838174 - DNA, 33 bp, Homo sapien
ctgcatcctgctggcgtagtctcacttgtggag

SEQ ID NO: 838175 - DNA, 33 bp, Homo sapien
ttctctcctgtcctccaaaagtctccagaaacc

SEQ ID NO: 838176 - DNA, 33 bp, Homo sapien
ttctctcctgtcctcccaaagtctccagaaacc

SEQ ID NO: 838177 - DNA, 33 bp, Homo sapien
aagtgatgtggattagacaaaatcaaaggatgc

SEQ ID NO: 838178 - DNA, 33 bp, Homo sapien
aagtgatgtggattaggcaaaatcaaaggatgc

SEQ ID NO: 838179 - DNA, 33 bp, Homo sapien
aattagagacataataataaccaggatcataat

SEQ ID NO: 838180 - DNA, 33 bp, Homo sapien
aattagagacataatattaaccaggatcataat

SEQ ID NO: 838181 - DNA, 33 bp, Homo sapien
actaactcacatcaaaccagatctgccaatcac

SEQ ID NO: 838182 - DNA, 33 bp, Homo sapien
actaactcacatcaaatcagatctgccaatcac

SEQ ID NO: 838183 - DNA, 33 bp, Homo sapien
aaccatgactacgcaacgaactactgggcttgg

SEQ ID NO: 838184 - DNA, 33 bp, Homo sapien
aaccatgactacgcaatgaactactgggcttgg

SEQ ID NO: 838185 - DNA, 33 bp, Homo sapien
ggaaattgagacagcaacttctctgcatcaagg

SEQ ID NO: 838186 - DNA, 33 bp, Homo sapien
ggaaattgagacagcagcttctctgcatcaagg

SEQ ID NO: 838187 - DNA, 33 bp, Homo sapien
gccttcaatttcactcccagtaatccatcctcc

SEQ ID NO: 838188 - DNA, 33 bp, Homo sapien
gccttcaatttcactcgcagtaatccatcctcc

SEQ ID NO: 838189 - DNA, 33 bp, Homo sapien
ctcatatggctacatcactcccccatttaacag

SEQ ID NO: 838190 - DNA, 33 bp, Homo sapien
ctcatatggctacatctctcccccatttaacag

SEQ ID NO: 838191 - DNA, 33 bp, Homo sapien
aatgcagccttttctacgtttaatccccagcta

SEQ ID NO: 838192 - DNA, 33 bp, Homo sapien
aatgcagccttttctatgtttaatccccagcta

SEQ ID NO: 838193 - DNA, 33 bp, Homo sapien
attcacatcattctaacgcttttctggtttcta

SEQ ID NO: 838194 - DNA, 33 bp, Homo sapien
attcacatcattctaatgcttttctggtttcta

SEQ ID NO: 838195 - DNA, 33 bp, Homo sapien
aagcaaaaataacagcaactatgtcacagggtg

SEQ ID NO: 838196 - DNA, 33 bp, Homo sapien
aagcaaaaataacagcgactatgtcacagggtg

SEQ ID NO: 838197 - DNA, 33 bp, Homo sapien
caggagaactgtgtaaataacctgggtcgggga

SEQ ID NO: 838198 - DNA, 33 bp, Homo sapien
caggagaactgtgtaattaacctgggtcgggga

SEQ ID NO: 838199 - DNA, 33 bp, Homo sapien
ctcttctcacttgatgcatcctacctgagtaaa

SEQ ID NO: 838200 - DNA, 33 bp, Homo sapien
ctcttctcacttgatgtatcctacctgagtaaa

SEQ ID NO: 838201 - DNA, 33 bp, Homo sapien
cattggatgtccacaaacacctcaaagtcatgc

SEQ ID NO: 838202 - DNA, 33 bp, Homo sapien
cattggatgtccacaagcacctcaaagtcatgc

SEQ ID NO: 838203 - DNA, 33 bp, Homo sapien
tttcttggtgtagcataaaattggaaatccaaa

SEQ ID NO: 838204 - DNA, 33 bp, Homo sapien
tttcttggtgtagcatgaaattggaaatccaaa

SEQ ID NO: 838205 - DNA, 33 bp, Homo sapien
agggcacaattagaacagtacctgtcagatagt

SEQ ID NO: 838206 - DNA, 33 bp, Homo sapien
agggcacaattagaacggtacctgtcagatagt

SEQ ID NO: 838207 - DNA, 33 bp, Homo sapien
aaagctcagtgtgaaacggatagatgaagaagg

SEQ ID NO: 838208 - DNA, 33 bp, Homo sapien
aaagctcagtgtgaaatggatagatgaagaagg

SEQ ID NO: 838209 - DNA, 33 bp, Homo sapien
atcttttctggagggacgcgattcaacctctaa

SEQ ID NO: 838210 - DNA, 33 bp, Homo sapien
atcttttctggagggatgcgattcaacctctaa

SEQ ID NO: 838211 - DNA, 33 bp, Homo sapien
gggcaaggagataggcactcatttagctgggac

SEQ ID NO: 838212 - DNA, 33 bp, Homo sapien
gggcaaggagataggcgctcatttagctgggac

SEQ ID NO: 838213 - DNA, 33 bp, Homo sapien
gcatctgtgatttccactgatcctcacaaccta

SEQ ID NO: 838214 - DNA, 33 bp, Homo sapien
gcatctgtgatttccattgatcctcacaaccta

SEQ ID NO: 838215 - DNA, 33 bp, Homo sapien
aggcctgtcacatctcaagtgctgttgactgtt

SEQ ID NO: 838216 - DNA, 33 bp, Homo sapien
aggcctgtcacatctccagtgctgttgactgtt

SEQ ID NO: 838217 - DNA, 33 bp, Homo sapien
tgcgtaagaggcatgcaaaaccctggtctaaag

SEQ ID NO: 838218 - DNA, 33 bp, Homo sapien
tgcgtaagaggcatgcgaaaccctggtctaaag

SEQ ID NO: 838219 - DNA, 33 bp, Homo sapien
gagctgatccttagcaaccccaacaccctatgc

SEQ ID NO: 838220 - DNA, 33 bp, Homo sapien
gagctgatccttagcacccccaacaccctatgc

SEQ ID NO: 838221 - DNA, 33 bp, Homo sapien
ttaggacctcagagagacatggattacagagac

SEQ ID NO: 838222 - DNA, 33 bp, Homo sapien
ttaggacctcagagaggcatggattacagagac

SEQ ID NO: 838223 - DNA, 33 bp, Homo sapien
aaagtctactgagacccactcacattattaaac

SEQ ID NO: 838224 - DNA, 33 bp, Homo sapien
aaagtctactgagacctactcacattattaaac

SEQ ID NO: 838225 - DNA, 33 bp, Homo sapien
gccctgtcaggaacatcatctgcctgttcagac

SEQ ID NO: 838226 - DNA, 33 bp, Homo sapien
gccctgtcaggaacattatctgcctgttcagac

SEQ ID NO: 838227 - DNA, 33 bp, Homo sapien
taggaggaaaggacagaaattgtgaaaacttct

SEQ ID NO: 838228 - DNA, 33 bp, Homo sapien
taggaggaaaggacagcaattgtgaaaacttct

SEQ ID NO: 838229 - DNA, 33 bp, Homo sapien
ggaattggccagcagacggtcagtatcagcagg

SEQ ID NO: 838230 - DNA, 33 bp, Homo sapien
ggaattggccagcagatggtcagtatcagcagg

SEQ ID NO: 838231 - DNA, 33 bp, Homo sapien
agtttttggcatatcacgtaagcaggtttggta

SEQ ID NO: 838232 - DNA, 33 bp, Homo sapien
agtttttggcatatcatgtaagcaggtttggta

SEQ ID NO: 838233 - DNA, 33 bp, Homo sapien
gccttcaagaacagtaaagcccgcttctgagcc

SEQ ID NO: 838234 - DNA, 33 bp, Homo sapien
gccttcaagaacagtagagcccgcttctgagcc

SEQ ID NO: 838235 - DNA, 33 bp, Homo sapien
ttttgttttgtgattcccagaataaagcctgca

SEQ ID NO: 838236 - DNA, 33 bp, Homo sapien
ttttgttttgtgattctcagaataaagcctgca

SEQ ID NO: 838237 - DNA, 33 bp, Homo sapien
tgtcaagtgctcagtacagtagctggcccatgg

SEQ ID NO: 838238 - DNA, 33 bp, Homo sapien
tgtcaagtgctcagtatagtagctggcccatgg

SEQ ID NO: 838239 - DNA, 33 bp, Homo sapien
gaggggagacatgaagactcagagcggggatga

SEQ ID NO: 838240 - DNA, 33 bp, Homo sapien
gaggggagacatgaaggctcagagcggggatga

SEQ ID NO: 838241 - DNA, 33 bp, Homo sapien
gaggaaagtaggactcaagattgagatattaat

SEQ ID NO: 838242 - DNA, 33 bp, Homo sapien
gaggaaagtaggactcgagattgagatattaat

SEQ ID NO: 838243 - DNA, 33 bp, Homo sapien
tccctgtacttctcaccgccctaaatgtctaga

SEQ ID NO: 838244 - DNA, 33 bp, Homo sapien
tccctgtacttctcactgccctaaatgtctaga

SEQ ID NO: 838245 - DNA, 33 bp, Homo sapien
agctgaactcatcacaagggagaggctgatctt

SEQ ID NO: 838246 - DNA, 33 bp, Homo sapien
agctgaactcatcacaggggagaggctgatctt

SEQ ID NO: 838247 - DNA, 33 bp, Homo sapien
atgcaaactgattataacatttaaacacacaca

SEQ ID NO: 838248 - DNA, 33 bp, Homo sapien
atgcaaactgattatagcatttaaacacacaca

SEQ ID NO: 838249 - DNA, 33 bp, Homo sapien
tgttcagacatgattacggaatagatttgtttc

SEQ ID NO: 838250 - DNA, 33 bp, Homo sapien
tgttcagacatgattatggaatagatttgtttc

SEQ ID NO: 838251 - DNA, 33 bp, Homo sapien
agcagcagagaagcaacgtgaaatcaggactga

SEQ ID NO: 838252 - DNA, 33 bp, Homo sapien
agcagcagagaagcaatgtgaaatcaggactga

SEQ ID NO: 838253 - DNA, 33 bp, Homo sapien
ccatttcttagaaagacctgaactaggtgtgga

SEQ ID NO: 838254 - DNA, 33 bp, Homo sapien
ccatttcttagaaagatctgaactaggtgtgga

SEQ ID NO: 838255 - DNA, 33 bp, Homo sapien
gtggccactgaaattaacatgagactactataa

SEQ ID NO: 838256 - DNA, 33 bp, Homo sapien
gtggccactgaaattagcatgagactactataa

SEQ ID NO: 838257 - DNA, 33 bp, Homo sapien
atgacctaaccgagataaatcaggacaagccct

SEQ ID NO: 838258 - DNA, 33 bp, Homo sapien
atgacctaaccgagatcaatcaggacaagccct

SEQ ID NO: 838259 - DNA, 33 bp, Homo sapien
ctgataaaaggtatcacggcagttatcaccttg

SEQ ID NO: 838260 - DNA, 33 bp, Homo sapien
ctgataaaaggtatcatggcagttatcaccttg

SEQ ID NO: 838261 - DNA, 33 bp, Homo sapien
agtcttggtagtacgacccttgtctgagcgggg

SEQ ID NO: 838262 - DNA, 33 bp, Homo sapien
agtcttggtagtacgatccttgtctgagcgggg

SEQ ID NO: 838263 - DNA, 33 bp, Homo sapien
gtcatgcagtgagaaaatgtgacaaggtgaact

SEQ ID NO: 838264 - DNA, 33 bp, Homo sapien
gtcatgcagtgagaaactgtgacaaggtgaact

SEQ ID NO: 838265 - DNA, 33 bp, Homo sapien
ctctgtaagatgggcactcaaaggcaaggcagc

SEQ ID NO: 838266 - DNA, 33 bp, Homo sapien
ctctgtaagatgggcattcaaaggcaaggcagc

SEQ ID NO: 838267 - DNA, 33 bp, Homo sapien
tgtattatgcaatccacgtctatgttattctct

SEQ ID NO: 838268 - DNA, 33 bp, Homo sapien
tgtattatgcaatccaggtctatgttattctct

SEQ ID NO: 838269 - DNA, 33 bp, Homo sapien
gagaaatctaacttcacgaccttaattgaatta

SEQ ID NO: 838270 - DNA, 33 bp, Homo sapien
gagaaatctaacttcatgaccttaattgaatta

SEQ ID NO: 838271 - DNA, 33 bp, Homo sapien
aagggcctttcatctcaccgaggttttgacgcc

SEQ ID NO: 838272 - DNA, 33 bp, Homo sapien
aagggcctttcatctcgccgaggttttgacgcc

SEQ ID NO: 838273 - DNA, 33 bp, Homo sapien
ataaaataactcttccaacttcctgcagcaaac

SEQ ID NO: 838274 - DNA, 33 bp, Homo sapien
ataaaataactcttccgacttcctgcagcaaac

SEQ ID NO: 838275 - DNA, 33 bp, Homo sapien
ataggaagcagtgtaacgagatcatagagtccc

SEQ ID NO: 838276 - DNA, 33 bp, Homo sapien
ataggaagcagtgtaatgagatcatagagtccc

SEQ ID NO: 838277 - DNA, 33 bp, Homo sapien
caacatactcccatataaaaattgctcatgaga

SEQ ID NO: 838278 - DNA, 33 bp, Homo sapien
caacatactcccatattaaaattgctcatgaga

SEQ ID NO: 838279 - DNA, 33 bp, Homo sapien
cccctgactttcaagaacctcccgtctaatggg

SEQ ID NO: 838280 - DNA, 33 bp, Homo sapien
cccctgactttcaagagcctcccgtctaatggg

SEQ ID NO: 838281 - DNA, 33 bp, Homo sapien
tagcaaagttgtttaactgattaagagctctgc

SEQ ID NO: 838282 - DNA, 33 bp, Homo sapien
tagcaaagttgtttaattgattaagagctctgc

SEQ ID NO: 838283 - DNA, 33 bp, Homo sapien
tcctgttcttgctattaaaggcagaaaatggag

SEQ ID NO: 838284 - DNA, 33 bp, Homo sapien
tcctgttcttgctattgaaggcagaaaatggag

SEQ ID NO: 838285 - DNA, 33 bp, Homo sapien
tcttccattgtatcaagcttctagggtcctcag

SEQ ID NO: 838286 - DNA, 33 bp, Homo sapien
tcttccattgtatcaatcttctagggtcctcag

SEQ ID NO: 838287 - DNA, 33 bp, Homo sapien
actggggctttaggaacggagagtcagtcaagc

SEQ ID NO: 838288 - DNA, 33 bp, Homo sapien
actggggctttaggaagggagagtcagtcaagc

SEQ ID NO: 838289 - DNA, 33 bp, Homo sapien
tgagaaaaatcagccacagttatacctggcccc

SEQ ID NO: 838290 - DNA, 33 bp, Homo sapien
tgagaaaaatcagccagagttatacctggcccc

SEQ ID NO: 838291 - DNA, 33 bp, Homo sapien
tgcccaccacgagtaacgcaaacagacctccat

SEQ ID NO: 838292 - DNA, 33 bp, Homo sapien
tgcccaccacgagtaatgcaaacagacctccat

SEQ ID NO: 838293 - DNA, 33 bp, Homo sapien
taaaaggctttaagtgcaagccccatcagagcc

SEQ ID NO: 838294 - DNA, 33 bp, Homo sapien
taaaaggctttaagtggaagccccatcagagcc

SEQ ID NO: 838295 - DNA, 33 bp, Homo sapien
cccctttaggtacagacgtgctcttatccctgg

SEQ ID NO: 838296 - DNA, 33 bp, Homo sapien
cccctttaggtacagatgtgctcttatccctgg

SEQ ID NO: 838297 - DNA, 33 bp, Homo sapien
tctggaaatgctagacaagtagtatagcaactc

SEQ ID NO: 838298 - DNA, 33 bp, Homo sapien
tctggaaatgctagacgagtagtatagcaactc

SEQ ID NO: 838299 - DNA, 33 bp, Homo sapien
ataggtggagaaggagactcaggactcaaggtc

SEQ ID NO: 838300 - DNA, 33 bp, Homo sapien
ataggtggagaaggagcctcaggactcaaggtc

SEQ ID NO: 838301 - DNA, 33 bp, Homo sapien
atcctctccatgaacaatcatgaatacacatat

SEQ ID NO: 838302 - DNA, 33 bp, Homo sapien
atcctctccatgaacagtcatgaatacacatat

SEQ ID NO: 838303 - DNA, 33 bp, Homo sapien
tgtcgtaggtggcacccggatcactcatcctaa

SEQ ID NO: 838304 - DNA, 33 bp, Homo sapien
tgtcgtaggtggcacctggatcactcatcctaa

SEQ ID NO: 838305 - DNA, 33 bp, Homo sapien
actcatcaggggctcactaaatagttacagaat

SEQ ID NO: 838306 - DNA, 33 bp, Homo sapien
actcatcaggggctcattaaatagttacagaat

SEQ ID NO: 838307 - DNA, 33 bp, Homo sapien
ttgtatgatacctacagtgagtctctcctaagc

SEQ ID NO: 838308 - DNA, 33 bp, Homo sapien
ttgtatgatacctacattgagtctctcctaagc

SEQ ID NO: 838309 - DNA, 33 bp, Homo sapien
taaagaaaatcattaactggctgttaagaagtt

SEQ ID NO: 838310 - DNA, 33 bp, Homo sapien
taaagaaaatcattaattggctgttaagaagtt

SEQ ID NO: 838311 - DNA, 33 bp, Homo sapien
acatcacctacttagaagatgaaatgagataac

SEQ ID NO: 838312 - DNA, 33 bp, Homo sapien
acatcacctacttagaggatgaaatgagataac

SEQ ID NO: 838313 - DNA, 33 bp, Homo sapien
agcttgcaaagggaaaagtgattgtacaagggg

SEQ ID NO: 838314 - DNA, 33 bp, Homo sapien
agcttgcaaagggaaaggtgattgtacaagggg

SEQ ID NO: 838315 - DNA, 33 bp, Homo sapien
gttacccacagaggcaacccttcacacagggca

SEQ ID NO: 838316 - DNA, 33 bp, Homo sapien
gttacccacagaggcaccccttcacacagggca

SEQ ID NO: 838317 - DNA, 33 bp, Homo sapien
cggggggcgtgacctcaccgtggcctccttttc

SEQ ID NO: 838318 - DNA, 33 bp, Homo sapien
cggggggcgtgacctcgccgtggcctccttttc

SEQ ID NO: 838319 - DNA, 33 bp, Homo sapien
cagaatttcctttggaagacgcaagtcaagatg

SEQ ID NO: 838320 - DNA, 33 bp, Homo sapien
cagaatttcctttggaggacgcaagtcaagatg

SEQ ID NO: 838321 - DNA, 33 bp, Homo sapien
gatctcaggcaagcaaacctgtttctcttgagc

SEQ ID NO: 838322 - DNA, 33 bp, Homo sapien
gatctcaggcaagcaaccctgtttctcttgagc

SEQ ID NO: 838323 - DNA, 33 bp, Homo sapien
agccaccctttttccacaggtaccctgatttgc

SEQ ID NO: 838324 - DNA, 33 bp, Homo sapien
agccaccctttttccataggtaccctgatttgc

SEQ ID NO: 838325 - DNA, 33 bp, Homo sapien
aaacgtgaaggcttaacgaaaggagagcgctgc

SEQ ID NO: 838326 - DNA, 33 bp, Homo sapien
aaacgtgaaggcttaatgaaaggagagcgctgc

SEQ ID NO: 838327 - DNA, 33 bp, Homo sapien
ggagcataagatgtcacggaaggaggagcccca

SEQ ID NO: 838328 - DNA, 33 bp, Homo sapien
ggagcataagatgtcatggaaggaggagcccca

SEQ ID NO: 838329 - DNA, 33 bp, Homo sapien
tttagtaacacataaaccattttccttggttaa

SEQ ID NO: 838330 - DNA, 33 bp, Homo sapien
tttagtaacacataaagcattttccttggttaa

SEQ ID NO: 838331 - DNA, 33 bp, Homo sapien
aggttctttccagttccactagtttgtaatgct

SEQ ID NO: 838332 - DNA, 33 bp, Homo sapien
aggttctttccagttctactagtttgtaatgct

SEQ ID NO: 838333 - DNA, 33 bp, Homo sapien
cctggtagtttacaaagttctgtttagtaggtg

SEQ ID NO: 838334 - DNA, 33 bp, Homo sapien
cctggtagtttacaaatttctgtttagtaggtg

SEQ ID NO: 838335 - DNA, 33 bp, Homo sapien
aggtgaatctttgtccaattaaatcagggttct

SEQ ID NO: 838336 - DNA, 33 bp, Homo sapien
aggtgaatctttgtccgattaaatcagggttct

SEQ ID NO: 838337 - DNA, 33 bp, Homo sapien
tttgttaaaagctactaaagcgattctaatgtg

SEQ ID NO: 838338 - DNA, 33 bp, Homo sapien
tttgttaaaagctactcaagcgattctaatgtg

SEQ ID NO: 838339 - DNA, 33 bp, Homo sapien
atttcttccttcaaaagattcttatgaggcatg

SEQ ID NO: 838340 - DNA, 33 bp, Homo sapien
atttcttccttcaaaatattcttatgaggcatg

SEQ ID NO: 838341 - DNA, 33 bp, Homo sapien
ctgtggtgtgactttacgtcttgaagtgagccc

SEQ ID NO: 838342 - DNA, 33 bp, Homo sapien
ctgtggtgtgactttatgtcttgaagtgagccc

SEQ ID NO: 838343 - DNA, 33 bp, Homo sapien
aggactgtgtcagctacaaaaagattctgggag

SEQ ID NO: 838344 - DNA, 33 bp, Homo sapien
aggactgtgtcagctataaaaagattctgggag

SEQ ID NO: 838345 - DNA, 33 bp, Homo sapien
attaatccttttcatacgtccaaatgtttaaag

SEQ ID NO: 838346 - DNA, 33 bp, Homo sapien
attaatccttttcatatgtccaaatgtttaaag

SEQ ID NO: 838347 - DNA, 33 bp, Homo sapien
ttattatacatttctgaatcgttaaaaatattt

SEQ ID NO: 838348 - DNA, 33 bp, Homo sapien
ttattatacatttctgtatcgttaaaaatattt

SEQ ID NO: 838349 - DNA, 33 bp, Homo sapien
cacatcagccctttgcagaaaaccactatgtgt

SEQ ID NO: 838350 - DNA, 33 bp, Homo sapien
cacatcagccctttgcggaaaaccactatgtgt

SEQ ID NO: 838351 - DNA, 33 bp, Homo sapien
ctaatgcaatgatcacgctgaactaatccaaac

SEQ ID NO: 838352 - DNA, 33 bp, Homo sapien
ctaatgcaatgatcactctgaactaatccaaac

SEQ ID NO: 838353 - DNA, 33 bp, Homo sapien
cttcttctttaattgcccatcttctcctcttta

SEQ ID NO: 838354 - DNA, 33 bp, Homo sapien
cttcttctttaattgctcatcttctcctcttta

SEQ ID NO: 838355 - DNA, 33 bp, Homo sapien
gagtaaatcctcttcacgccagagcagaatttt

SEQ ID NO: 838356 - DNA, 33 bp, Homo sapien
gagtaaatcctcttcatgccagagcagaatttt

SEQ ID NO: 838357 - DNA, 33 bp, Homo sapien
ctggttgataacatagcaaattctgattgaaag

SEQ ID NO: 838358 - DNA, 33 bp, Homo sapien
ctggttgataacataggaaattctgattgaaag

SEQ ID NO: 838359 - DNA, 33 bp, Homo sapien
gtggggtcaatgtcagaagaaccttttggagac

SEQ ID NO: 838360 - DNA, 33 bp, Homo sapien
gtggggtcaatgtcaggagaaccttttggagac

SEQ ID NO: 838361 - DNA, 33 bp, Homo sapien
aaaggactggattgcaccgttcaacattattca

SEQ ID NO: 838362 - DNA, 33 bp, Homo sapien
aaaggactggattgcatcgttcaacattattca

SEQ ID NO: 838363 - DNA, 33 bp, Homo sapien
ctgtgactgctcagcactccctgctccatctgc

SEQ ID NO: 838364 - DNA, 33 bp, Homo sapien
ctgtgactgctcagcattccctgctccatctgc

SEQ ID NO: 838365 - DNA, 33 bp, Homo sapien
tgagagctgcttcctcaagatcgggacatgagt

SEQ ID NO: 838366 - DNA, 33 bp, Homo sapien
tgagagctgcttcctcgagatcgggacatgagt

SEQ ID NO: 838367 - DNA, 33 bp, Homo sapien
agccccctgcagagttaaaagcctgctcagcct

SEQ ID NO: 838368 - DNA, 33 bp, Homo sapien
agccccctgcagagtttaaagcctgctcagcct

SEQ ID NO: 838369 - DNA, 33 bp, Homo sapien
gatacacggcagttaaaccagttgataccagga

SEQ ID NO: 838370 - DNA, 33 bp, Homo sapien
gatacacggcagttaagccagttgataccagga

SEQ ID NO: 838371 - DNA, 33 bp, Homo sapien
ccaatgtgcttttcagaagataacagtgtctcc

SEQ ID NO: 838372 - DNA, 33 bp, Homo sapien
ccaatgtgcttttcaggagataacagtgtctcc

SEQ ID NO: 838373 - DNA, 33 bp, Homo sapien
ggactaaagtttcaaaatctggtgtgtagcttg

SEQ ID NO: 838374 - DNA, 33 bp, Homo sapien
ggactaaagtttcaaagtctggtgtgtagcttg

SEQ ID NO: 838375 - DNA, 33 bp, Homo sapien
acataaactggctggcaacatcaggcctcttaa

SEQ ID NO: 838376 - DNA, 33 bp, Homo sapien
acataaactggctggcgacatcaggcctcttaa

SEQ ID NO: 838377 - DNA, 33 bp, Homo sapien
atgacagaaatttggggaagttgataaaagaat

SEQ ID NO: 838378 - DNA, 33 bp, Homo sapien
atgacagaaatttgggtaagttgataaaagaat

SEQ ID NO: 838379 - DNA, 33 bp, Homo sapien
ggaaagggattgagagactaggtttaaataaat

SEQ ID NO: 838380 - DNA, 33 bp, Homo sapien
ggaaagggattgagaggctaggtttaaataaat

SEQ ID NO: 838381 - DNA, 33 bp, Homo sapien
gatgtaccaaaccgcaacattcttgggtgcaga

SEQ ID NO: 838382 - DNA, 33 bp, Homo sapien
gatgtaccaaaccgcagcattcttgggtgcaga

SEQ ID NO: 838383 - DNA, 33 bp, Homo sapien
ttttggaatgtatacaactttaaggtaaattct

SEQ ID NO: 838384 - DNA, 33 bp, Homo sapien
ttttggaatgtatacatctttaaggtaaattct

SEQ ID NO: 838385 - DNA, 33 bp, Homo sapien
ctgttaagttgtataacgctgcatacgtgtaac

SEQ ID NO: 838386 - DNA, 33 bp, Homo sapien
ctgttaagttgtataatgctgcatacgtgtaac

SEQ ID NO: 838387 - DNA, 33 bp, Homo sapien
tcgttcctgttccttccaagcttgtctctactg

SEQ ID NO: 838388 - DNA, 33 bp, Homo sapien
tcgttcctgttccttctaagcttgtctctactg

SEQ ID NO: 838389 - DNA, 33 bp, Homo sapien
cctgggaggtgtaaacaaaatgtaagccacgct

SEQ ID NO: 838390 - DNA, 33 bp, Homo sapien
cctgggaggtgtaaacgaaatgtaagccacgct

SEQ ID NO: 838391 - DNA, 33 bp, Homo sapien
cagtatgacacagtgaaagtgcggcaaataaaa

SEQ ID NO: 838392 - DNA, 33 bp, Homo sapien
cagtatgacacagtgagagtgcggcaaataaaa

SEQ ID NO: 838393 - DNA, 33 bp, Homo sapien
ggctggagtcaacaaacgcctaattaatcaatt

SEQ ID NO: 838394 - DNA, 33 bp, Homo sapien
ggctggagtcaacaaatgcctaattaatcaatt

SEQ ID NO: 838395 - DNA, 33 bp, Homo sapien
gaaccatgcaaatctacgcagttttcctaagac

SEQ ID NO: 838396 - DNA, 33 bp, Homo sapien
gaaccatgcaaatctatgcagttttcctaagac

SEQ ID NO: 838397 - DNA, 33 bp, Homo sapien
cacatctgattacaaccagcagggcttcccaac

SEQ ID NO: 838398 - DNA, 33 bp, Homo sapien
cacatctgattacaactagcagggcttcccaac

SEQ ID NO: 838399 - DNA, 33 bp, Homo sapien
gcttatgagtcctggaagatatcagcttgcatg

SEQ ID NO: 838400 - DNA, 33 bp, Homo sapien
gcttatgagtcctggatgatatcagcttgcatg

SEQ ID NO: 838401 - DNA, 33 bp, Homo sapien
aggggttatggaaaaccaaattgagacctggga

SEQ ID NO: 838402 - DNA, 33 bp, Homo sapien
aggggttatggaaaacgaaattgagacctggga

SEQ ID NO: 838403 - DNA, 33 bp, Homo sapien
atcttccttaagtctcacttcaaacaatgcctt

SEQ ID NO: 838404 - DNA, 33 bp, Homo sapien
atcttccttaagtctcccttcaaacaatgcctt

SEQ ID NO: 838405 - DNA, 33 bp, Homo sapien
tgcccagcatataacacatatttgctacaagtt

SEQ ID NO: 838406 - DNA, 33 bp, Homo sapien
tgcccagcatataacagatatttgctacaagtt

SEQ ID NO: 838407 - DNA, 33 bp, Homo sapien
ttaacagtaactacagaaaggattaaatgagtc

SEQ ID NO: 838408 - DNA, 33 bp, Homo sapien
ttaacagtaactacaggaaggattaaatgagtc

SEQ ID NO: 838409 - DNA, 33 bp, Homo sapien
tgtttgttttgttgaacgtcagttggctgtaag

SEQ ID NO: 838410 - DNA, 33 bp, Homo sapien
tgtttgttttgttgaaggtcagttggctgtaag

SEQ ID NO: 838411 - DNA, 33 bp, Homo sapien
gcttacccttgtggccagcaatgagccccatct

SEQ ID NO: 838412 - DNA, 33 bp, Homo sapien
gcttacccttgtggccggcaatgagccccatct

SEQ ID NO: 838413 - DNA, 33 bp, Homo sapien
ccacatacaaatcttaagcaaacaccagatttg

SEQ ID NO: 838414 - DNA, 33 bp, Homo sapien
ccacatacaaatcttaggcaaacaccagatttg

SEQ ID NO: 838415 - DNA, 33 bp, Homo sapien
tttctgcattcatgtcactaacagaactaggaa

SEQ ID NO: 838416 - DNA, 33 bp, Homo sapien
tttctgcattcatgtcgctaacagaactaggaa

SEQ ID NO: 838417 - DNA, 33 bp, Homo sapien
tcccaatctaggacaacggtacccaaaggaaat

SEQ ID NO: 838418 - DNA, 33 bp, Homo sapien
tcccaatctaggacaatggtacccaaaggaaat

SEQ ID NO: 838419 - DNA, 33 bp, Homo sapien
atcccactgtccagtaactgtgattatcagtgc

SEQ ID NO: 838420 - DNA, 33 bp, Homo sapien
atcccactgtccagtacctgtgattatcagtgc

SEQ ID NO: 838421 - DNA, 33 bp, Homo sapien
acatgattatttgagaaaatgtggagagtatag

SEQ ID NO: 838422 - DNA, 33 bp, Homo sapien
acatgattatttgagagaatgtggagagtatag

SEQ ID NO: 838423 - DNA, 33 bp, Homo sapien
gttgcatattgcaacacgataataccttgaaag

SEQ ID NO: 838424 - DNA, 33 bp, Homo sapien
gttgcatattgcaacatgataataccttgaaag

SEQ ID NO: 838425 - DNA, 33 bp, Homo sapien
gtaagaaattagggacgcaagaggcttagaagc

SEQ ID NO: 838426 - DNA, 33 bp, Homo sapien
gtaagaaattagggactcaagaggcttagaagc

SEQ ID NO: 838427 - DNA, 33 bp, Homo sapien
tgcaagaatggaagggaaagttgtagtaagaaa

SEQ ID NO: 838428 - DNA, 33 bp, Homo sapien
tgcaagaatggaagggtaagttgtagtaagaaa

SEQ ID NO: 838429 - DNA, 33 bp, Homo sapien
tcaatggaagctatgactatttgtgtgggatta

SEQ ID NO: 838430 - DNA, 33 bp, Homo sapien
tcaatggaagctatgattatttgtgtgggatta

SEQ ID NO: 838431 - DNA, 33 bp, Homo sapien
cactccttgacacccaactcttgatatttttaa

SEQ ID NO: 838432 - DNA, 33 bp, Homo sapien
cactccttgacacccacctcttgatatttttaa

SEQ ID NO: 838433 - DNA, 33 bp, Homo sapien
tgttttaatagggatccaatggagatgcaaaac

SEQ ID NO: 838434 - DNA, 33 bp, Homo sapien
tgttttaatagggatctaatggagatgcaaaac

SEQ ID NO: 838435 - DNA, 33 bp, Homo sapien
tatgctcatgtggtaaaaagcagagagaaaaga

SEQ ID NO: 838436 - DNA, 33 bp, Homo sapien
tatgctcatgtggtaagaagcagagagaaaaga

SEQ ID NO: 838437 - DNA, 33 bp, Homo sapien
tgctgtgacaattctccagtaaagggagggaag

SEQ ID NO: 838438 - DNA, 33 bp, Homo sapien
tgctgtgacaattctctagtaaagggagggaag

SEQ ID NO: 838439 - DNA, 33 bp, Homo sapien
aggtggaaggtgtgaacaaaaactttgtatttt

SEQ ID NO: 838440 - DNA, 33 bp, Homo sapien
aggtggaaggtgtgaataaaaactttgtatttt

SEQ ID NO: 838441 - DNA, 33 bp, Homo sapien
tcaggtcccgggtgatcagcttttctgcagtgg

SEQ ID NO: 838442 - DNA, 33 bp, Homo sapien
tcaggtcccgggtgatgagcttttctgcagtgg

SEQ ID NO: 838443 - DNA, 33 bp, Homo sapien
acaagaagctcctatgaattcacctgtcagcac

SEQ ID NO: 838444 - DNA, 33 bp, Homo sapien
acaagaagctcctatggattcacctgtcagcac

SEQ ID NO: 838445 - DNA, 33 bp, Homo sapien
tgataatggaagataacgtctggggtgcccact

SEQ ID NO: 838446 - DNA, 33 bp, Homo sapien
tgataatggaagataatgtctggggtgcccact

SEQ ID NO: 838447 - DNA, 33 bp, Homo sapien
ttaccagctaattctacaagttaggtggaacct

SEQ ID NO: 838448 - DNA, 33 bp, Homo sapien
ttaccagctaattctagaagttaggtggaacct

SEQ ID NO: 838449 - DNA, 33 bp, Homo sapien
aagccctggacacctcacgtttatatcaacaga

SEQ ID NO: 838450 - DNA, 33 bp, Homo sapien
aagccctggacacctcgcgtttatatcaacaga

SEQ ID NO: 838451 - DNA, 33 bp, Homo sapien
aatggtgaaggaggtaaaacatgactctggaag

SEQ ID NO: 838452 - DNA, 33 bp, Homo sapien
aatggtgaaggaggtacaacatgactctggaag

SEQ ID NO: 838453 - DNA, 33 bp, Homo sapien
tggcctgaagtacaaaagcctgcattttaatcc

SEQ ID NO: 838454 - DNA, 33 bp, Homo sapien
tggcctgaagtacaaaggcctgcattttaatcc

SEQ ID NO: 838455 - DNA, 33 bp, Homo sapien
gagatggcataatctgcataagacagaggtacc

SEQ ID NO: 838456 - DNA, 33 bp, Homo sapien
gagatggcataatctggataagacagaggtacc

SEQ ID NO: 838457 - DNA, 33 bp, Homo sapien
tatatcagtggacttaacccttcaggatccatt

SEQ ID NO: 838458 - DNA, 33 bp, Homo sapien
tatatcagtggacttatcccttcaggatccatt

SEQ ID NO: 838459 - DNA, 33 bp, Homo sapien
tgtgctgaccgcattaccaaaacccttagcaag

SEQ ID NO: 838460 - DNA, 33 bp, Homo sapien
tgtgctgaccgcattatcaaaacccttagcaag

SEQ ID NO: 838461 - DNA, 33 bp, Homo sapien
attcccccaacatcccaataattaaaagagtaa

SEQ ID NO: 838462 - DNA, 33 bp, Homo sapien
attcccccaacatcccgataattaaaagagtaa

SEQ ID NO: 838463 - DNA, 33 bp, Homo sapien
atttttaagcaaggtaagtgaagtctctgtgcc

SEQ ID NO: 838464 - DNA, 33 bp, Homo sapien
atttttaagcaaggtaggtgaagtctctgtgcc

SEQ ID NO: 838465 - DNA, 33 bp, Homo sapien
ctgagttctttggggaggaagaggagacttgtc

SEQ ID NO: 838466 - DNA, 33 bp, Homo sapien
ctgagttctttggggatgaagaggagacttgtc

SEQ ID NO: 838467 - DNA, 33 bp, Homo sapien
gtggaagcttgtaaggcatttagcaaaaaagtt

SEQ ID NO: 838468 - DNA, 33 bp, Homo sapien
gtggaagcttgtaaggtatttagcaaaaaagtt

SEQ ID NO: 838469 - DNA, 33 bp, Homo sapien
gatttgggtggtgtaactgaaagctaaatcctc

SEQ ID NO: 838470 - DNA, 33 bp, Homo sapien
gatttgggtggtgtaattgaaagctaaatcctc

SEQ ID NO: 838471 - DNA, 33 bp, Homo sapien
ctgatcacacctaacacgcagataaggctagga

SEQ ID NO: 838472 - DNA, 33 bp, Homo sapien
ctgatcacacctaacatgcagataaggctagga

SEQ ID NO: 838473 - DNA, 33 bp, Homo sapien
agctacttggaaggataaggttgaggatgcagt

SEQ ID NO: 838474 - DNA, 33 bp, Homo sapien
agctacttggaaggatgaggttgaggatgcagt

SEQ ID NO: 838475 - DNA, 33 bp, Homo sapien
tgatagaccatacttaacaatggcttttcttac

SEQ ID NO: 838476 - DNA, 33 bp, Homo sapien
tgatagaccatacttagcaatggcttttcttac

SEQ ID NO: 838477 - DNA, 33 bp, Homo sapien
ctatgtaaactcctgtaaaaactctcactgaag

SEQ ID NO: 838478 - DNA, 33 bp, Homo sapien
ctatgtaaactcctgtgaaaactctcactgaag

SEQ ID NO: 838479 - DNA, 33 bp, Homo sapien
tcagtcaatcagcagtaaacaagatttctacaa

SEQ ID NO: 838480 - DNA, 33 bp, Homo sapien
tcagtcaatcagcagtgaacaagatttctacaa

SEQ ID NO: 838481 - DNA, 33 bp, Homo sapien
ctgtcaagctgtctacacaagctatgggctact

SEQ ID NO: 838482 - DNA, 33 bp, Homo sapien
ctgtcaagctgtctacgcaagctatgggctact

SEQ ID NO: 838483 - DNA, 33 bp, Homo sapien
ggacttcatcagaaataacatctatccatttag

SEQ ID NO: 838484 - DNA, 33 bp, Homo sapien
ggacttcatcagaaatgacatctatccatttag

SEQ ID NO: 838485 - DNA, 33 bp, Homo sapien
cctgagacagaaatgtgaagcaaagggtgccag

SEQ ID NO: 838486 - DNA, 33 bp, Homo sapien
cctgagacagaaatgttaagcaaagggtgccag

SEQ ID NO: 838487 - DNA, 33 bp, Homo sapien
ggtgtctgggttgtcaaatgtcaaagggggagg

SEQ ID NO: 838488 - DNA, 33 bp, Homo sapien
ggtgtctgggttgtcagatgtcaaagggggagg

SEQ ID NO: 838489 - DNA, 33 bp, Homo sapien
aaaatacggacttgaagggcccagttcaattca

SEQ ID NO: 838490 - DNA, 33 bp, Homo sapien
aaaatacggacttgaatggcccagttcaattca

SEQ ID NO: 838491 - DNA, 33 bp, Homo sapien
gaaaggcggcttccaactcgtagatagataaga

SEQ ID NO: 838492 - DNA, 33 bp, Homo sapien
gaaaggcggcttccaagtcgtagatagataaga

SEQ ID NO: 838493 - DNA, 33 bp, Homo sapien
ctctgaagcctcttctcacttccttgggtatgt

SEQ ID NO: 838494 - DNA, 33 bp, Homo sapien
ctctgaagcctcttctgacttccttgggtatgt

SEQ ID NO: 838495 - DNA, 33 bp, Homo sapien
gttgtgacagttccacccttgaggatgttgtcc

SEQ ID NO: 838496 - DNA, 33 bp, Homo sapien
gttgtgacagttccactcttgaggatgttgtcc

SEQ ID NO: 838497 - DNA, 33 bp, Homo sapien
gccctcttcgttcctacgggccaaaaagatttc

SEQ ID NO: 838498 - DNA, 33 bp, Homo sapien
gccctcttcgttcctatgggccaaaaagatttc

SEQ ID NO: 838499 - DNA, 33 bp, Homo sapien
taaagtggagaaggaaagttactggctgcccag

SEQ ID NO: 838500 - DNA, 33 bp, Homo sapien
taaagtggagaaggaaggttactggctgcccag

SEQ ID NO: 838501 - DNA, 33 bp, Homo sapien
tgttgtttgtcttttacagcatttgaacaatgt

SEQ ID NO: 838502 - DNA, 33 bp, Homo sapien
tgttgtttgtcttttatagcatttgaacaatgt

SEQ ID NO: 838503 - DNA, 33 bp, Homo sapien
cttatgttaatgtcccacagatagctgacgttc

SEQ ID NO: 838504 - DNA, 33 bp, Homo sapien
cttatgttaatgtcccgcagatagctgacgttc

SEQ ID NO: 838505 - DNA, 33 bp, Homo sapien
cttcctgtctcctaaaccttctacccaggcact

SEQ ID NO: 838506 - DNA, 33 bp, Homo sapien
cttcctgtctcctaaatcttctacccaggcact

SEQ ID NO: 838507 - DNA, 33 bp, Homo sapien
gctaggaaaaagaagccagatcacagaggcagg

SEQ ID NO: 838508 - DNA, 33 bp, Homo sapien
gctaggaaaaagaagcgagatcacagaggcagg

SEQ ID NO: 838509 - DNA, 33 bp, Homo sapien
cctaaccagagaacaagcacgcagttaatgggg

SEQ ID NO: 838510 - DNA, 33 bp, Homo sapien
cctaaccagagaacaatcacgcagttaatgggg

SEQ ID NO: 838511 - DNA, 33 bp, Homo sapien
cactgtgatttctgagaaccaccctcatgtctc

SEQ ID NO: 838512 - DNA, 33 bp, Homo sapien
cactgtgatttctgaggaccaccctcatgtctc

SEQ ID NO: 838513 - DNA, 33 bp, Homo sapien
gtaaaatgtacagaaaaagaaaatggccgaagt

SEQ ID NO: 838514 - DNA, 33 bp, Homo sapien
gtaaaatgtacagaaacagaaaatggccgaagt

SEQ ID NO: 838515 - DNA, 33 bp, Homo sapien
ctgtacattttacacacgcgttgttctttcatc

SEQ ID NO: 838516 - DNA, 33 bp, Homo sapien
ctgtacattttacacatgcgttgttctttcatc

SEQ ID NO: 838517 - DNA, 33 bp, Homo sapien
gtaagacaaagagagacgcagagtgacagacag

SEQ ID NO: 838518 - DNA, 33 bp, Homo sapien
gtaagacaaagagagatgcagagtgacagacag

SEQ ID NO: 838519 - DNA, 33 bp, Homo sapien
cctcccatcatcgtgacaacatggcgatcttct

SEQ ID NO: 838520 - DNA, 33 bp, Homo sapien
cctcccatcatcgtgagaacatggcgatcttct

SEQ ID NO: 838521 - DNA, 33 bp, Homo sapien
gagcatttgctccgtaaccctcttctcctgcaa

SEQ ID NO: 838522 - DNA, 33 bp, Homo sapien
gagcatttgctccgtagccctcttctcctgcaa

SEQ ID NO: 838523 - DNA, 33 bp, Homo sapien
ctcaagaagatggaacacgagcatcagagcaaa

SEQ ID NO: 838524 - DNA, 33 bp, Homo sapien
ctcaagaagatggaacgcgagcatcagagcaaa

SEQ ID NO: 838525 - DNA, 33 bp, Homo sapien
catatttatgaagcaaaaataggtacagtcatt

SEQ ID NO: 838526 - DNA, 33 bp, Homo sapien
catatttatgaagcaagaataggtacagtcatt

SEQ ID NO: 838527 - DNA, 33 bp, Homo sapien
gtccaccatgagcaacagatttgaggtaccagt

SEQ ID NO: 838528 - DNA, 33 bp, Homo sapien
gtccaccatgagcaaccgatttgaggtaccagt

SEQ ID NO: 838529 - DNA, 33 bp, Homo sapien
atgctgaggagtaagacgtggtccaagccttca

SEQ ID NO: 838530 - DNA, 33 bp, Homo sapien
atgctgaggagtaagatgtggtccaagccttca

SEQ ID NO: 838531 - DNA, 33 bp, Homo sapien
ttcaccatgatcttcaactttcatgatgtcttc

SEQ ID NO: 838532 - DNA, 33 bp, Homo sapien
ttcaccatgatcttcacctttcatgatgtcttc

SEQ ID NO: 838533 - DNA, 33 bp, Homo sapien
caccactaatcctaagacccctgggcattcccc

SEQ ID NO: 838534 - DNA, 33 bp, Homo sapien
caccactaatcctaaggcccctgggcattcccc

SEQ ID NO: 838535 - DNA, 33 bp, Homo sapien
aatattcaggctattcactttattggaactgca

SEQ ID NO: 838536 - DNA, 33 bp, Homo sapien
aatattcaggctattcgctttattggaactgca

SEQ ID NO: 838537 - DNA, 33 bp, Homo sapien
gacagccaaagtggcacgggtgatggcaatagc

SEQ ID NO: 838538 - DNA, 33 bp, Homo sapien
gacagccaaagtggcatgggtgatggcaatagc

SEQ ID NO: 838539 - DNA, 33 bp, Homo sapien
gcatactgttaaatgacaactgtatcaagttta

SEQ ID NO: 838540 - DNA, 33 bp, Homo sapien
gcatactgttaaatgagaactgtatcaagttta

SEQ ID NO: 838541 - DNA, 33 bp, Homo sapien
gttttagtatttatgtaacaaagaggcaataag

SEQ ID NO: 838542 - DNA, 33 bp, Homo sapien
gttttagtatttatgtcacaaagaggcaataag

SEQ ID NO: 838543 - DNA, 33 bp, Homo sapien
tgtgtcgttagccacaaaacactattgtatcag

SEQ ID NO: 838544 - DNA, 33 bp, Homo sapien
tgtgtcgttagccacacaacactattgtatcag

SEQ ID NO: 838545 - DNA, 33 bp, Homo sapien
taaatctgtaatcaccagctatttctaaagtca

SEQ ID NO: 838546 - DNA, 33 bp, Homo sapien
taaatctgtaatcaccggctatttctaaagtca

SEQ ID NO: 838547 - DNA, 33 bp, Homo sapien
agatggcaatggaacacaaaggccagatgcaga

SEQ ID NO: 838548 - DNA, 33 bp, Homo sapien
agatggcaatggaacagaaaggccagatgcaga

SEQ ID NO: 838549 - DNA, 33 bp, Homo sapien
tatcctttcagccaaaatccagtctggaaagtg

SEQ ID NO: 838550 - DNA, 33 bp, Homo sapien
tatcctttcagccaaagtccagtctggaaagtg

SEQ ID NO: 838551 - DNA, 33 bp, Homo sapien
agctgcaactaaattaactgaggaaaagtatga

SEQ ID NO: 838552 - DNA, 33 bp, Homo sapien
agctgcaactaaattatctgaggaaaagtatga

SEQ ID NO: 838553 - DNA, 33 bp, Homo sapien
ggttaggggttaacctcaatgctccttgcaact

SEQ ID NO: 838554 - DNA, 33 bp, Homo sapien
ggttaggggttaacctgaatgctccttgcaact

SEQ ID NO: 838555 - DNA, 33 bp, Homo sapien
ggacaactgccttgaaaagcctgtgctcagaca

SEQ ID NO: 838556 - DNA, 33 bp, Homo sapien
ggacaactgccttgaagagcctgtgctcagaca

SEQ ID NO: 838557 - DNA, 33 bp, Homo sapien
ctcctcctaatccttaagaataacaggaggaaa

SEQ ID NO: 838558 - DNA, 33 bp, Homo sapien
ctcctcctaatccttatgaataacaggaggaaa

SEQ ID NO: 838559 - DNA, 33 bp, Homo sapien
gagagaaagctgggaaccttgcacgggccatca

SEQ ID NO: 838560 - DNA, 33 bp, Homo sapien
gagagaaagctgggaatcttgcacgggccatca

SEQ ID NO: 838561 - DNA, 33 bp, Homo sapien
gtgctgccaaagtatgaacaggactattaagtt

SEQ ID NO: 838562 - DNA, 33 bp, Homo sapien
gtgctgccaaagtatgcacaggactattaagtt

SEQ ID NO: 838563 - DNA, 33 bp, Homo sapien
ttgtcaatctctacacaaagtgaattttgatag

SEQ ID NO: 838564 - DNA, 33 bp, Homo sapien
ttgtcaatctctacactaagtgaattttgatag

SEQ ID NO: 838565 - DNA, 33 bp, Homo sapien
aggaggtgaagacccactgaagctaaggatgtg

SEQ ID NO: 838566 - DNA, 33 bp, Homo sapien
aggaggtgaagacccattgaagctaaggatgtg

SEQ ID NO: 838567 - DNA, 33 bp, Homo sapien
agttgagcaacaatgcacctgagagaccctagc

SEQ ID NO: 838568 - DNA, 33 bp, Homo sapien
agttgagcaacaatgcgcctgagagaccctagc

SEQ ID NO: 838569 - DNA, 33 bp, Homo sapien
agggacctcaggcaaaagagtaaaagcaagttt

SEQ ID NO: 838570 - DNA, 33 bp, Homo sapien
agggacctcaggcaaacgagtaaaagcaagttt

SEQ ID NO: 838571 - DNA, 33 bp, Homo sapien
gaattccagggtcagacactcctgtgaccagcc

SEQ ID NO: 838572 - DNA, 33 bp, Homo sapien
gaattccagggtcagatactcctgtgaccagcc

SEQ ID NO: 838573 - DNA, 33 bp, Homo sapien
gcccagcactccttccactgcacgtgccgctgt

SEQ ID NO: 838574 - DNA, 33 bp, Homo sapien
gcccagcactccttccgctgcacgtgccgctgt

SEQ ID NO: 838575 - DNA, 33 bp, Homo sapien
gcggggtctgagactcactatgcgtggaggccg

SEQ ID NO: 838576 - DNA, 33 bp, Homo sapien
gcggggtctgagactcgctatgcgtggaggccg

SEQ ID NO: 838577 - DNA, 33 bp, Homo sapien
tggaaccaagatttagcacatgagaagaatctg

SEQ ID NO: 838578 - DNA, 33 bp, Homo sapien
tggaaccaagatttaggacatgagaagaatctg

SEQ ID NO: 838579 - DNA, 33 bp, Homo sapien
gtctgtaaaatgcagactctctcctatgaaatc

SEQ ID NO: 838580 - DNA, 33 bp, Homo sapien
gtctgtaaaatgcagattctctcctatgaaatc

SEQ ID NO: 838581 - DNA, 33 bp, Homo sapien
cttatgatgattgtaaagaacatggctgagctg

SEQ ID NO: 838582 - DNA, 33 bp, Homo sapien
cttatgatgattgtaaggaacatggctgagctg

SEQ ID NO: 838583 - DNA, 33 bp, Homo sapien
agtcataactcctgaaatgcaaaacctggaagt

SEQ ID NO: 838584 - DNA, 33 bp, Homo sapien
agtcataactcctgaagtgcaaaacctggaagt

SEQ ID NO: 838585 - DNA, 33 bp, Homo sapien
ttaagtccactcttctgacttcattcaactcct

SEQ ID NO: 838586 - DNA, 33 bp, Homo sapien
ttaagtccactcttcttacttcattcaactcct

SEQ ID NO: 838587 - DNA, 33 bp, Homo sapien
agagctgtttcggttcacacacatatgggaaaa

SEQ ID NO: 838588 - DNA, 33 bp, Homo sapien
agagctgtttcggttcgcacacatatgggaaaa

SEQ ID NO: 838589 - DNA, 33 bp, Homo sapien
acttttagataaaaacactggatggccgagcat

SEQ ID NO: 838590 - DNA, 33 bp, Homo sapien
acttttagataaaaacgctggatggccgagcat

SEQ ID NO: 838591 - DNA, 33 bp, Homo sapien
gacaattgaaaaataaaatctaggcagcaagtg

SEQ ID NO: 838592 - DNA, 33 bp, Homo sapien
gacaattgaaaaataagatctaggcagcaagtg

SEQ ID NO: 838593 - DNA, 33 bp, Homo sapien
cagcatctgtcccacaaaatccttgtgagcatc

SEQ ID NO: 838594 - DNA, 33 bp, Homo sapien
cagcatctgtcccacagaatccttgtgagcatc

SEQ ID NO: 838595 - DNA, 33 bp, Homo sapien
aagtttgtttaattaccctctctgcaggctcat

SEQ ID NO: 838596 - DNA, 33 bp, Homo sapien
aagtttgtttaattactctctctgcaggctcat

SEQ ID NO: 838597 - DNA, 33 bp, Homo sapien
tcagcactgagagaaactcccttttgtccctgc

SEQ ID NO: 838598 - DNA, 33 bp, Homo sapien
tcagcactgagagaaattcccttttgtccctgc

SEQ ID NO: 838599 - DNA, 33 bp, Homo sapien
ggcagttgtagagagaaaaaaagactgaagaaa

SEQ ID NO: 838600 - DNA, 33 bp, Homo sapien
ggcagttgtagagagagaaaaagactgaagaaa

SEQ ID NO: 838601 - DNA, 33 bp, Homo sapien
tgggtggcagaaatgcacagaggtattgttggg

SEQ ID NO: 838602 - DNA, 33 bp, Homo sapien
tgggtggcagaaatgcgcagaggtattgttggg

SEQ ID NO: 838603 - DNA, 33 bp, Homo sapien
actcagtaagaccttgaaaatccatgacattag

SEQ ID NO: 838604 - DNA, 33 bp, Homo sapien
actcagtaagaccttgtaaatccatgacattag

SEQ ID NO: 838605 - DNA, 33 bp, Homo sapien
tggatttcacagtgcacaactcactggaggtgt

SEQ ID NO: 838606 - DNA, 33 bp, Homo sapien
tggatttcacagtgcagaactcactggaggtgt

SEQ ID NO: 838607 - DNA, 33 bp, Homo sapien
ttgagaccggttcaggcacagctgggaaactct

SEQ ID NO: 838608 - DNA, 33 bp, Homo sapien
ttgagaccggttcagggacagctgggaaactct

SEQ ID NO: 838609 - DNA, 33 bp, Homo sapien
actttcatgaactcaacgagatactgcaagagg

SEQ ID NO: 838610 - DNA, 33 bp, Homo sapien
actttcatgaactcaatgagatactgcaagagg

SEQ ID NO: 838611 - DNA, 33 bp, Homo sapien
agcatggtgagacctgaaataaagaatatggca

SEQ ID NO: 838612 - DNA, 33 bp, Homo sapien
agcatggtgagacctggaataaagaatatggca

SEQ ID NO: 838613 - DNA, 33 bp, Homo sapien
acatgtcccacatctaccatgttaagaatgaac

SEQ ID NO: 838614 - DNA, 33 bp, Homo sapien
acatgtcccacatctagcatgttaagaatgaac

SEQ ID NO: 838615 - DNA, 33 bp, Homo sapien
gaggtggtaacactgaataagtatttgagccat

SEQ ID NO: 838616 - DNA, 33 bp, Homo sapien
gaggtggtaacactgagtaagtatttgagccat

SEQ ID NO: 838617 - DNA, 33 bp, Homo sapien
acttacatgacaatataacagagtggaaaattg

SEQ ID NO: 838618 - DNA, 33 bp, Homo sapien
acttacatgacaatatgacagagtggaaaattg

SEQ ID NO: 838619 - DNA, 33 bp, Homo sapien
gttgttgaagaatgagaagattttagtcagaat

SEQ ID NO: 838620 - DNA, 33 bp, Homo sapien
gttgttgaagaatgaggagattttagtcagaat

SEQ ID NO: 838621 - DNA, 33 bp, Homo sapien
ttcaagtctctggaataatgagcagtgagagac

SEQ ID NO: 838622 - DNA, 33 bp, Homo sapien
ttcaagtctctggaatcatgagcagtgagagac

SEQ ID NO: 838623 - DNA, 33 bp, Homo sapien
gacgacatctgaggacaacaactactacttacg

SEQ ID NO: 838624 - DNA, 33 bp, Homo sapien
gacgacatctgaggacgacaactactacttacg

SEQ ID NO: 838625 - DNA, 33 bp, Homo sapien
tctctagactaggttccaggtgacctataccca

SEQ ID NO: 838626 - DNA, 33 bp, Homo sapien
tctctagactaggttcgaggtgacctataccca

SEQ ID NO: 838627 - DNA, 33 bp, Homo sapien
ggccaggaactgtctgcaggctccatctccttg

SEQ ID NO: 838628 - DNA, 33 bp, Homo sapien
ggccaggaactgtctgtaggctccatctccttg

SEQ ID NO: 838629 - DNA, 33 bp, Homo sapien
cgctcagtccaggatacgctgcatgccctcaaa

SEQ ID NO: 838630 - DNA, 33 bp, Homo sapien
cgctcagtccaggatatgctgcatgccctcaaa

SEQ ID NO: 838631 - DNA, 33 bp, Homo sapien
tctctgagcctttctcacttcatgtactttgag

SEQ ID NO: 838632 - DNA, 33 bp, Homo sapien
tctctgagcctttctctcttcatgtactttgag

SEQ ID NO: 838633 - DNA, 33 bp, Homo sapien
aatgttgcagatgtgaagctatgccactttggg

SEQ ID NO: 838634 - DNA, 33 bp, Homo sapien
aatgttgcagatgtgaggctatgccactttggg

SEQ ID NO: 838635 - DNA, 33 bp, Homo sapien
tcacagtcctttgagaacttagagtatggtctt

SEQ ID NO: 838636 - DNA, 33 bp, Homo sapien
tcacagtcctttgagagcttagagtatggtctt

SEQ ID NO: 838637 - DNA, 33 bp, Homo sapien
tgagtcctgtagggcaagtgaaattatctatga

SEQ ID NO: 838638 - DNA, 33 bp, Homo sapien
tgagtcctgtagggcaggtgaaattatctatga

SEQ ID NO: 838639 - DNA, 33 bp, Homo sapien
gcgttcatgatgctgaaccaaacagcgcaggtt

SEQ ID NO: 838640 - DNA, 33 bp, Homo sapien
gcgttcatgatgctgagccaaacagcgcaggtt

SEQ ID NO: 838641 - DNA, 33 bp, Homo sapien
atggagttgcttgaaggctggattgggtgggat

SEQ ID NO: 838642 - DNA, 33 bp, Homo sapien
atggagttgcttgaagtctggattgggtgggat

SEQ ID NO: 838643 - DNA, 33 bp, Homo sapien
gggcggtcaaccatcccagcttccggtgctgag

SEQ ID NO: 838644 - DNA, 33 bp, Homo sapien
gggcggtcaaccatcctagcttccggtgctgag

SEQ ID NO: 838645 - DNA, 33 bp, Homo sapien
gagcactttacatctcactaatatctattacat

SEQ ID NO: 838646 - DNA, 33 bp, Homo sapien
gagcactttacatctcgctaatatctattacat

SEQ ID NO: 838647 - DNA, 33 bp, Homo sapien
ggggctgtcagtttaacggacaggtgtttaatt

SEQ ID NO: 838648 - DNA, 33 bp, Homo sapien
ggggctgtcagtttaatggacaggtgtttaatt

SEQ ID NO: 838649 - DNA, 33 bp, Homo sapien
gggagagctggaaacccaacagcaggccggctc

SEQ ID NO: 838650 - DNA, 33 bp, Homo sapien
gggagagctggaaaccgaacagcaggccggctc

SEQ ID NO: 838651 - DNA, 33 bp, Homo sapien
atcagagtaagcggcacctctgggtccctgccc

SEQ ID NO: 838652 - DNA, 33 bp, Homo sapien
atcagagtaagcggcatctctgggtccctgccc

SEQ ID NO: 838653 - DNA, 33 bp, Homo sapien
ccaggactgaatgtgaaattagatgattttagg

SEQ ID NO: 838654 - DNA, 33 bp, Homo sapien
ccaggactgaatgtgagattagatgattttagg

SEQ ID NO: 838655 - DNA, 33 bp, Homo sapien
cccattccaacaattcaattccagtcaaaccag

SEQ ID NO: 838656 - DNA, 33 bp, Homo sapien
cccattccaacaattcgattccagtcaaaccag

SEQ ID NO: 838657 - DNA, 33 bp, Homo sapien
attttgcaaggacatacattttgtaaagacata

SEQ ID NO: 838658 - DNA, 33 bp, Homo sapien
attttgcaaggacatatattttgtaaagacata

SEQ ID NO: 838659 - DNA, 33 bp, Homo sapien
atcaggcattgataacagccccctcaaattcag

SEQ ID NO: 838660 - DNA, 33 bp, Homo sapien
atcaggcattgataacggccccctcaaattcag

SEQ ID NO: 838661 - DNA, 33 bp, Homo sapien
aggggcacctggtacccgcattttgtgccaatg

SEQ ID NO: 838662 - DNA, 33 bp, Homo sapien
aggggcacctggtacctgcattttgtgccaatg

SEQ ID NO: 838663 - DNA, 33 bp, Homo sapien
cctggcccagtgaatgccacgttagtagcttga

SEQ ID NO: 838664 - DNA, 33 bp, Homo sapien
cctggcccagtgaatgtcacgttagtagcttga

SEQ ID NO: 838665 - DNA, 33 bp, Homo sapien
agtatttagcgctatcagagacccagagtaagg

SEQ ID NO: 838666 - DNA, 33 bp, Homo sapien
agtatttagcgctatcggagacccagagtaagg

SEQ ID NO: 838667 - DNA, 33 bp, Homo sapien
cagcctgatagtgagaaatacagatttgacaag

SEQ ID NO: 838668 - DNA, 33 bp, Homo sapien
cagcctgatagtgagacatacagatttgacaag

SEQ ID NO: 838669 - DNA, 33 bp, Homo sapien
tgcagccatgcttaacactcttccgtggctccc

SEQ ID NO: 838670 - DNA, 33 bp, Homo sapien
tgcagccatgcttaacgctcttccgtggctccc

SEQ ID NO: 838671 - DNA, 33 bp, Homo sapien
tggacaccaacgtcaaaggccaagttgaatttg

SEQ ID NO: 838672 - DNA, 33 bp, Homo sapien
tggacaccaacgtcaatggccaagttgaatttg

SEQ ID NO: 838673 - DNA, 33 bp, Homo sapien
acaccaaggtaaacacaactaataacagcttcc

SEQ ID NO: 838674 - DNA, 33 bp, Homo sapien
acaccaaggtaaacacgactaataacagcttcc

SEQ ID NO: 838675 - DNA, 33 bp, Homo sapien
ctctgttctacctctacccaaaactcagggctg

SEQ ID NO: 838676 - DNA, 33 bp, Homo sapien
ctctgttctacctctatccaaaactcagggctg

SEQ ID NO: 838677 - DNA, 33 bp, Homo sapien
gatctgtcaacttaaacgtaaaaggaacagtgg

SEQ ID NO: 838678 - DNA, 33 bp, Homo sapien
gatctgtcaacttaaaggtaaaaggaacagtgg

SEQ ID NO: 838679 - DNA, 33 bp, Homo sapien
gcctagtaccctccaaatccttcttacaataag

SEQ ID NO: 838680 - DNA, 33 bp, Homo sapien
gcctagtaccctccaagtccttcttacaataag

SEQ ID NO: 838681 - DNA, 33 bp, Homo sapien
caggccaccagctatcaagggctaggaaagggt

SEQ ID NO: 838682 - DNA, 33 bp, Homo sapien
caggccaccagctatcgagggctaggaaagggt

SEQ ID NO: 838683 - DNA, 33 bp, Homo sapien
gtgtggtagtgaagaacgtggcttctggtttca

SEQ ID NO: 838684 - DNA, 33 bp, Homo sapien
gtgtggtagtgaagaatgtggcttctggtttca

SEQ ID NO: 838685 - DNA, 33 bp, Homo sapien
cagtgcaccacaattccagtgaaacctcatatc

SEQ ID NO: 838686 - DNA, 33 bp, Homo sapien
cagtgcaccacaattctagtgaaacctcatatc

SEQ ID NO: 838687 - DNA, 33 bp, Homo sapien
tgctatattcctcaaaagtcagaacctctgggt

SEQ ID NO: 838688 - DNA, 33 bp, Homo sapien
tgctatattcctcaaaggtcagaacctctgggt

SEQ ID NO: 838689 - DNA, 33 bp, Homo sapien
gggcatagtaaagtatcaagcaattaaaatttt

SEQ ID NO: 838690 - DNA, 33 bp, Homo sapien
gggcatagtaaagtatgaagcaattaaaatttt

SEQ ID NO: 838691 - DNA, 33 bp, Homo sapien
atcaatggaatcaaacggtgttttctttcgtgt

SEQ ID NO: 838692 - DNA, 33 bp, Homo sapien
atcaatggaatcaaactgtgttttctttcgtgt

SEQ ID NO: 838693 - DNA, 33 bp, Homo sapien
cgaagctcttgcaccaagaagaagggctttgga

SEQ ID NO: 838694 - DNA, 33 bp, Homo sapien
cgaagctcttgcaccaggaagaagggctttgga

SEQ ID NO: 838695 - DNA, 33 bp, Homo sapien
tctgggcaagtgagcccatgtgtaaggtacaag

SEQ ID NO: 838696 - DNA, 33 bp, Homo sapien
tctgggcaagtgagcctatgtgtaaggtacaag

SEQ ID NO: 838697 - DNA, 33 bp, Homo sapien
tggagagccacagagaatacgaggagaatggga

SEQ ID NO: 838698 - DNA, 33 bp, Homo sapien
tggagagccacagagagtacgaggagaatggga

SEQ ID NO: 838699 - DNA, 33 bp, Homo sapien
cacaggatgtgaacgggatgggatttggcccag

SEQ ID NO: 838700 - DNA, 33 bp, Homo sapien
cacaggatgtgaacggtatgggatttggcccag

SEQ ID NO: 838701 - DNA, 33 bp, Homo sapien
accaatcttgagctcacagaagaacatttcaag

SEQ ID NO: 838702 - DNA, 33 bp, Homo sapien
accaatcttgagctcatagaagaacatttcaag

SEQ ID NO: 838703 - DNA, 33 bp, Homo sapien
ctgggaaaggagctgcccttgatctcccttcat

SEQ ID NO: 838704 - DNA, 33 bp, Homo sapien
ctgggaaaggagctgcgcttgatctcccttcat

SEQ ID NO: 838705 - DNA, 33 bp, Homo sapien
caagctgtcccagaaaccagagagactgctcag

SEQ ID NO: 838706 - DNA, 33 bp, Homo sapien
caagctgtcccagaaatcagagagactgctcag

SEQ ID NO: 838707 - DNA, 33 bp, Homo sapien
ctttgcttgttccttccccgcaggccatcctgg

SEQ ID NO: 838708 - DNA, 33 bp, Homo sapien
ctttgcttgttccttctccgcaggccatcctgg

SEQ ID NO: 838709 - DNA, 33 bp, Homo sapien
ttcgtaaacaaaaggacgggcccacaacacggg

SEQ ID NO: 838710 - DNA, 33 bp, Homo sapien
ttcgtaaacaaaaggatgggcccacaacacggg

SEQ ID NO: 838711 - DNA, 33 bp, Homo sapien
tgtctcaccttcatccactctgcaggcctgctc

SEQ ID NO: 838712 - DNA, 33 bp, Homo sapien
tgtctcaccttcatcccctctgcaggcctgctc

SEQ ID NO: 838713 - DNA, 33 bp, Homo sapien
gaaactgaagttagaccgcgggaaggacggtcc

SEQ ID NO: 838714 - DNA, 33 bp, Homo sapien
gaaactgaagttagactgcgggaaggacggtcc

SEQ ID NO: 838715 - DNA, 33 bp, Homo sapien
tgagactggttccacaagtgggaggcaaaaaaa

SEQ ID NO: 838716 - DNA, 33 bp, Homo sapien
tgagactggttccacaggtgggaggcaaaaaaa

SEQ ID NO: 838717 - DNA, 33 bp, Homo sapien
agagctgcttgtctaactcaccacctgagcatt

SEQ ID NO: 838718 - DNA, 33 bp, Homo sapien
agagctgcttgtctaattcaccacctgagcatt

SEQ ID NO: 838719 - DNA, 33 bp, Homo sapien
ataaattgtgtttacagtggcatttaaaatggg

SEQ ID NO: 838720 - DNA, 33 bp, Homo sapien
ataaattgtgtttacattggcatttaaaatggg

SEQ ID NO: 838721 - DNA, 33 bp, Homo sapien
ggtgttatcagaagacagcttgtagcctggagc

SEQ ID NO: 838722 - DNA, 33 bp, Homo sapien
ggtgttatcagaagacggcttgtagcctggagc

SEQ ID NO: 838723 - DNA, 33 bp, Homo sapien
cagatcgccttgaggacgggattctatcttgtc

SEQ ID NO: 838724 - DNA, 33 bp, Homo sapien
cagatcgccttgaggatgggattctatcttgtc

SEQ ID NO: 838725 - DNA, 33 bp, Homo sapien
tgcaatgataaactcacgcagaggattacgcaa

SEQ ID NO: 838726 - DNA, 33 bp, Homo sapien
tgcaatgataaactcatgcagaggattacgcaa

SEQ ID NO: 838727 - DNA, 33 bp, Homo sapien
caggacccctgcctgccaggagtctcacctttg

SEQ ID NO: 838728 - DNA, 33 bp, Homo sapien
caggacccctgcctgctaggagtctcacctttg

SEQ ID NO: 838729 - DNA, 33 bp, Homo sapien
ggtagttatcttcaaacgtaaatctaatgaggt

SEQ ID NO: 838730 - DNA, 33 bp, Homo sapien
ggtagttatcttcaaatgtaaatctaatgaggt

SEQ ID NO: 838731 - DNA, 33 bp, Homo sapien
cattttgttcaatgaaagattacaagtccctag

SEQ ID NO: 838732 - DNA, 33 bp, Homo sapien
cattttgttcaatgaaggattacaagtccctag

SEQ ID NO: 838733 - DNA, 33 bp, Homo sapien
gctgatgaatagagaccgcgctgagatttattc

SEQ ID NO: 838734 - DNA, 33 bp, Homo sapien
gctgatgaatagagactgcgctgagatttattc

SEQ ID NO: 838735 - DNA, 33 bp, Homo sapien
gttattgttattagcaagaagcatctcgaggct

SEQ ID NO: 838736 - DNA, 33 bp, Homo sapien
gttattgttattagcacgaagcatctcgaggct

SEQ ID NO: 838737 - DNA, 33 bp, Homo sapien
agtgcatcagtcagtaggtttctagctacaaat

SEQ ID NO: 838738 - DNA, 33 bp, Homo sapien
agtgcatcagtcagtatgtttctagctacaaat

SEQ ID NO: 838739 - DNA, 33 bp, Homo sapien
aattgagaaatatacccaggaggttcacactgc

SEQ ID NO: 838740 - DNA, 33 bp, Homo sapien
aattgagaaatataccgaggaggttcacactgc

SEQ ID NO: 838741 - DNA, 33 bp, Homo sapien
ctgaggccggcccaggaactacttccggtattt

SEQ ID NO: 838742 - DNA, 33 bp, Homo sapien
ctgaggccggcccagggactacttccggtattt

SEQ ID NO: 838743 - DNA, 33 bp, Homo sapien
caacgttgagcaattaacgtgcgaggggagaga

SEQ ID NO: 838744 - DNA, 33 bp, Homo sapien
caacgttgagcaattagcgtgcgaggggagaga

SEQ ID NO: 838745 - DNA, 33 bp, Homo sapien
gctcgagcagccgccactcgaaccctgactgtc

SEQ ID NO: 838746 - DNA, 33 bp, Homo sapien
gctcgagcagccgccagtcgaaccctgactgtc

SEQ ID NO: 838747 - DNA, 33 bp, Homo sapien
accacccaaatgtccactaaagaaagatagata

SEQ ID NO: 838748 - DNA, 33 bp, Homo sapien
accacccaaatgtccattaaagaaagatagata

SEQ ID NO: 838749 - DNA, 33 bp, Homo sapien
acccatatcaaattacaaaactttcctaatcct

SEQ ID NO: 838750 - DNA, 33 bp, Homo sapien
acccatatcaaattacgaaactttcctaatcct

SEQ ID NO: 838751 - DNA, 33 bp, Homo sapien
agaccctcacaaataacatgcagaggctgtgtg

SEQ ID NO: 838752 - DNA, 33 bp, Homo sapien
agaccctcacaaataatatgcagaggctgtgtg

SEQ ID NO: 838753 - DNA, 33 bp, Homo sapien
ccaagctggattgtaaaaaccatagggcaaggg

SEQ ID NO: 838754 - DNA, 33 bp, Homo sapien
ccaagctggattgtaagaaccatagggcaaggg

SEQ ID NO: 838755 - DNA, 33 bp, Homo sapien
ccttccttgctcctctcaatagggttgttgaag

SEQ ID NO: 838756 - DNA, 33 bp, Homo sapien
ccttccttgctcctctgaatagggttgttgaag

SEQ ID NO: 838757 - DNA, 33 bp, Homo sapien
ataaatgggacctgccacatgacctgcatgcca

SEQ ID NO: 838758 - DNA, 33 bp, Homo sapien
ataaatgggacctgccgcatgacctgcatgcca

SEQ ID NO: 838759 - DNA, 33 bp, Homo sapien
atggagagacacagagaagcaagaatttcgcca

SEQ ID NO: 838760 - DNA, 33 bp, Homo sapien
atggagagacacagagcagcaagaatttcgcca

SEQ ID NO: 838761 - DNA, 33 bp, Homo sapien
cttggaatctgaaaaacggatagcaagcgttgc

SEQ ID NO: 838762 - DNA, 33 bp, Homo sapien
cttggaatctgaaaaatggatagcaagcgttgc

SEQ ID NO: 838763 - DNA, 33 bp, Homo sapien
ccagctccacactccacctaccagagaagcctc

SEQ ID NO: 838764 - DNA, 33 bp, Homo sapien
ccagctccacactccagctaccagagaagcctc

SEQ ID NO: 838765 - DNA, 33 bp, Homo sapien
caggctttttcttatcaccttctagtctcattt

SEQ ID NO: 838766 - DNA, 33 bp, Homo sapien
caggctttttcttatcgccttctagtctcattt

SEQ ID NO: 838767 - DNA, 33 bp, Homo sapien
agaagttgcctttacacaacgatcacagctatg

SEQ ID NO: 838768 - DNA, 33 bp, Homo sapien
agaagttgcctttacagaacgatcacagctatg

SEQ ID NO: 838769 - DNA, 33 bp, Homo sapien
gccaaccacgagttaaagctctccagccaaggt

SEQ ID NO: 838770 - DNA, 33 bp, Homo sapien
gccaaccacgagttaaggctctccagccaaggt

SEQ ID NO: 838771 - DNA, 33 bp, Homo sapien
actgggttgactctgaaaggtttatatcttatt

SEQ ID NO: 838772 - DNA, 33 bp, Homo sapien
actgggttgactctgagaggtttatatcttatt

SEQ ID NO: 838773 - DNA, 33 bp, Homo sapien
ctcacaggaagcccaaactaacatacaagcctc

SEQ ID NO: 838774 - DNA, 33 bp, Homo sapien
ctcacaggaagcccaagctaacatacaagcctc

SEQ ID NO: 838775 - DNA, 33 bp, Homo sapien
tgccgttccagcagaaaccctcccgctcgcatg

SEQ ID NO: 838776 - DNA, 33 bp, Homo sapien
tgccgttccagcagaagccctcccgctcgcatg

SEQ ID NO: 838777 - DNA, 33 bp, Homo sapien
tagaaatgttatcctcaactctctgcagagaag

SEQ ID NO: 838778 - DNA, 33 bp, Homo sapien
tagaaatgttatcctcgactctctgcagagaag

SEQ ID NO: 838779 - DNA, 33 bp, Homo sapien
ttaaagattctattcacagtagccacaaaaaaa

SEQ ID NO: 838780 - DNA, 33 bp, Homo sapien
ttaaagattctattcatagtagccacaaaaaaa

SEQ ID NO: 838781 - DNA, 33 bp, Homo sapien
ttaaaaggagataatacgctgaaaggagataac

SEQ ID NO: 838782 - DNA, 33 bp, Homo sapien
ttaaaaggagataatatgctgaaaggagataac

SEQ ID NO: 838783 - DNA, 33 bp, Homo sapien
gagcacatagaaggtacgcttaacccagccttg

SEQ ID NO: 838784 - DNA, 33 bp, Homo sapien
gagcacatagaaggtatgcttaacccagccttg

SEQ ID NO: 838785 - DNA, 33 bp, Homo sapien
ctaactgccttaccctaaagcctcagaacacac

SEQ ID NO: 838786 - DNA, 33 bp, Homo sapien
ctaactgccttaccctgaagcctcagaacacac

SEQ ID NO: 838787 - DNA, 33 bp, Homo sapien
gtgatttagggcccaccgccagaaaattgttct

SEQ ID NO: 838788 - DNA, 33 bp, Homo sapien
gtgatttagggcccactgccagaaaattgttct

SEQ ID NO: 838789 - DNA, 33 bp, Homo sapien
cacctggattatcacaatagcctcctcgttagt

SEQ ID NO: 838790 - DNA, 33 bp, Homo sapien
cacctggattatcacagtagcctcctcgttagt

SEQ ID NO: 838791 - DNA, 33 bp, Homo sapien
tagtttagttgataacgggtgagatttgaggtg

SEQ ID NO: 838792 - DNA, 33 bp, Homo sapien
tagtttagttgataactggtgagatttgaggtg

SEQ ID NO: 838793 - DNA, 33 bp, Homo sapien
caggctgagtttgggacggacaggctttccttg

SEQ ID NO: 838794 - DNA, 33 bp, Homo sapien
caggctgagtttgggatggacaggctttccttg

SEQ ID NO: 838795 - DNA, 33 bp, Homo sapien
gaaacctgaaggataacggccagcatggacttc

SEQ ID NO: 838796 - DNA, 33 bp, Homo sapien
gaaacctgaaggataatggccagcatggacttc

SEQ ID NO: 838797 - DNA, 33 bp, Homo sapien
gtaagagccctatgcacatttttgccaaattgg

SEQ ID NO: 838798 - DNA, 33 bp, Homo sapien
gtaagagccctatgcatatttttgccaaattgg

SEQ ID NO: 838799 - DNA, 33 bp, Homo sapien
ttctaccccccggtccaagttgcatcatctctt

SEQ ID NO: 838800 - DNA, 33 bp, Homo sapien
ttctaccccccggtccgagttgcatcatctctt

SEQ ID NO: 838801 - DNA, 33 bp, Homo sapien
tgcgtgcccttaagcgacattgatccttctggc

SEQ ID NO: 838802 - DNA, 33 bp, Homo sapien
tgcgtgcccttaagcgtcattgatccttctggc

SEQ ID NO: 838803 - DNA, 33 bp, Homo sapien
ggtatgggtgcacgaaggatagtatcacatgag

SEQ ID NO: 838804 - DNA, 33 bp, Homo sapien
ggtatgggtgcacgaatgatagtatcacatgag

SEQ ID NO: 838805 - DNA, 33 bp, Homo sapien
tcaatgatggagagctaaaggtttttgaaacag

SEQ ID NO: 838806 - DNA, 33 bp, Homo sapien
tcaatgatggagagctgaaggtttttgaaacag

SEQ ID NO: 838807 - DNA, 33 bp, Homo sapien
tgtcaatagcgctgcaataaatacggaggtgtg

SEQ ID NO: 838808 - DNA, 33 bp, Homo sapien
tgtcaatagcgctgcagtaaatacggaggtgtg

SEQ ID NO: 838809 - DNA, 33 bp, Homo sapien
aagacaccaagcccgacagtaaatgaagcacgg

SEQ ID NO: 838810 - DNA, 33 bp, Homo sapien
aagacaccaagcccgatagtaaatgaagcacgg

SEQ ID NO: 838811 - DNA, 33 bp, Homo sapien
ttacactctagagagacactgatgaactggaac

SEQ ID NO: 838812 - DNA, 33 bp, Homo sapien
ttacactctagagagatactgatgaactggaac

SEQ ID NO: 838813 - DNA, 33 bp, Homo sapien
aaactgctgagaccaacggcagttaaccatggt

SEQ ID NO: 838814 - DNA, 33 bp, Homo sapien
aaactgctgagaccaatggcagttaaccatggt

SEQ ID NO: 838815 - DNA, 33 bp, Homo sapien
ctgagatctctcaagtgaaataaaaatggcctc

SEQ ID NO: 838816 - DNA, 33 bp, Homo sapien
ctgagatctctcaagttaaataaaaatggcctc

SEQ ID NO: 838817 - DNA, 33 bp, Homo sapien
tgggaagaatgggaaggagagatcccatccaac

SEQ ID NO: 838818 - DNA, 33 bp, Homo sapien
tgggaagaatgggaagtagagatcccatccaac

SEQ ID NO: 838819 - DNA, 33 bp, Homo sapien
actgaccatttctcaactgcgtatctccttccc

SEQ ID NO: 838820 - DNA, 33 bp, Homo sapien
actgaccatttctcaattgcgtatctccttccc

SEQ ID NO: 838821 - DNA, 33 bp, Homo sapien
ggacttgcagggctggaagatagtgcaggctta

SEQ ID NO: 838822 - DNA, 33 bp, Homo sapien
ggacttgcagggctggcagatagtgcaggctta

SEQ ID NO: 838823 - DNA, 33 bp, Homo sapien
gggtgccataagctgaatagagagtaaccagtt

SEQ ID NO: 838824 - DNA, 33 bp, Homo sapien
gggtgccataagctgagtagagagtaaccagtt

SEQ ID NO: 838825 - DNA, 33 bp, Homo sapien
ctctaggtctgaatgaagagaagatgaattatc

SEQ ID NO: 838826 - DNA, 33 bp, Homo sapien
ctctaggtctgaatgaggagaagatgaattatc

SEQ ID NO: 838827 - DNA, 33 bp, Homo sapien
tagaatctgaccaaataatctaggtgaccacat

SEQ ID NO: 838828 - DNA, 33 bp, Homo sapien
tagaatctgaccaaatgatctaggtgaccacat

SEQ ID NO: 838829 - DNA, 33 bp, Homo sapien
gacacaccggtgagcacaaaagaaagtataccc

SEQ ID NO: 838830 - DNA, 33 bp, Homo sapien
gacacaccggtgagcagaaaagaaagtataccc

SEQ ID NO: 838831 - DNA, 33 bp, Homo sapien
gccaattcacttgcccaaaggaaaggatgtttc

SEQ ID NO: 838832 - DNA, 33 bp, Homo sapien
gccaattcacttgcccgaaggaaaggatgtttc

SEQ ID NO: 838833 - DNA, 33 bp, Homo sapien
gggagtgccctcaagaagcacactggcatggga

SEQ ID NO: 838834 - DNA, 33 bp, Homo sapien
gggagtgccctcaagacgcacactggcatggga

SEQ ID NO: 838835 - DNA, 33 bp, Homo sapien
cagttatttgtgtgtacgtctgtcttccacact

SEQ ID NO: 838836 - DNA, 33 bp, Homo sapien
cagttatttgtgtgtatgtctgtcttccacact

SEQ ID NO: 838837 - DNA, 33 bp, Homo sapien
cagctcacactcaaggcccagcttggatcggag

SEQ ID NO: 838838 - DNA, 33 bp, Homo sapien
cagctcacactcaaggtccagcttggatcggag

SEQ ID NO: 838839 - DNA, 33 bp, Homo sapien
aggcccttcctggaagcccagatttcagagtaa

SEQ ID NO: 838840 - DNA, 33 bp, Homo sapien
aggcccttcctggaagtccagatttcagagtaa

SEQ ID NO: 838841 - DNA, 33 bp, Homo sapien
tttgtcaccagctgtgaagatgagcagatgctt

SEQ ID NO: 838842 - DNA, 33 bp, Homo sapien
tttgtcaccagctgtggagatgagcagatgctt

SEQ ID NO: 838843 - DNA, 33 bp, Homo sapien
tgagaatcaaatgagagaatatccctaacccag

SEQ ID NO: 838844 - DNA, 33 bp, Homo sapien
tgagaatcaaatgagataatatccctaacccag

SEQ ID NO: 838845 - DNA, 33 bp, Homo sapien
gggcaccttgcaaaccaagctggtcatccagtt

SEQ ID NO: 838846 - DNA, 33 bp, Homo sapien
gggcaccttgcaaacccagctggtcatccagtt

SEQ ID NO: 838847 - DNA, 33 bp, Homo sapien
tctccgcctcactccactctccaaagctgccac

SEQ ID NO: 838848 - DNA, 33 bp, Homo sapien
tctccgcctcactccattctccaaagctgccac

SEQ ID NO: 838849 - DNA, 33 bp, Homo sapien
tcttgtctttttcctaccccactgtagctgggg

SEQ ID NO: 838850 - DNA, 33 bp, Homo sapien
tcttgtctttttcctatcccactgtagctgggg

SEQ ID NO: 838851 - DNA, 33 bp, Homo sapien
taagaacaagaacaaggctgcggaagcttgagg

SEQ ID NO: 838852 - DNA, 33 bp, Homo sapien
taagaacaagaacaagtctgcggaagcttgagg

SEQ ID NO: 838853 - DNA, 33 bp, Homo sapien
ggcagcagggactacaatcatcaactctatgtc

SEQ ID NO: 838854 - DNA, 33 bp, Homo sapien
ggcagcagggactacagtcatcaactctatgtc

SEQ ID NO: 838855 - DNA, 33 bp, Homo sapien
cagctctgggaagcaacgggaggtgaggcagct

SEQ ID NO: 838856 - DNA, 33 bp, Homo sapien
cagctctgggaagcaatgggaggtgaggcagct

SEQ ID NO: 838857 - DNA, 33 bp, Homo sapien
tgtacctcaattttcccaagtataatgtgggaa

SEQ ID NO: 838858 - DNA, 33 bp, Homo sapien
tgtacctcaattttccgaagtataatgtgggaa

SEQ ID NO: 838859 - DNA, 33 bp, Homo sapien
gaggctcggaggcatcaaagcatttttctgagt

SEQ ID NO: 838860 - DNA, 33 bp, Homo sapien
gaggctcggaggcatcgaagcatttttctgagt

SEQ ID NO: 838861 - DNA, 33 bp, Homo sapien
tgaaaaatggaggcaacgtctcaaatggctctt

SEQ ID NO: 838862 - DNA, 33 bp, Homo sapien
tgaaaaatggaggcaatgtctcaaatggctctt

SEQ ID NO: 838863 - DNA, 33 bp, Homo sapien
agatggaagggtggcactctttactcacaggat

SEQ ID NO: 838864 - DNA, 33 bp, Homo sapien
agatggaagggtggcattctttactcacaggat

SEQ ID NO: 838865 - DNA, 33 bp, Homo sapien
tcaaatccccacaccacgtttcaggtaccagct

SEQ ID NO: 838866 - DNA, 33 bp, Homo sapien
tcaaatccccacaccatgtttcaggtaccagct

SEQ ID NO: 838867 - DNA, 33 bp, Homo sapien
tgctcacaaaatcaaacaggatagttatttttg

SEQ ID NO: 838868 - DNA, 33 bp, Homo sapien
tgctcacaaaatcaaagaggatagttatttttg

SEQ ID NO: 838869 - DNA, 33 bp, Homo sapien
gccctatcagatgggcaccattattcctatttt

SEQ ID NO: 838870 - DNA, 33 bp, Homo sapien
gccctatcagatgggcgccattattcctatttt

SEQ ID NO: 838871 - DNA, 33 bp, Homo sapien
caatgaaatgcaaagcacacaagtaggctccag

SEQ ID NO: 838872 - DNA, 33 bp, Homo sapien
caatgaaatgcaaagcgcacaagtaggctccag

SEQ ID NO: 838873 - DNA, 33 bp, Homo sapien
tttggccgacactaaaccttcccagagtgaatg

SEQ ID NO: 838874 - DNA, 33 bp, Homo sapien
tttggccgacactaaagcttcccagagtgaatg

SEQ ID NO: 838875 - DNA, 33 bp, Homo sapien
tttcacgtgtgaaccacatctataaacactttt

SEQ ID NO: 838876 - DNA, 33 bp, Homo sapien
tttcacgtgtgaaccagatctataaacactttt

SEQ ID NO: 838877 - DNA, 33 bp, Homo sapien
agatgtatcttcagaaaatggcaggacgatcat

SEQ ID NO: 838878 - DNA, 33 bp, Homo sapien
agatgtatcttcagaatatggcaggacgatcat

SEQ ID NO: 838879 - DNA, 33 bp, Homo sapien
cattttctttgctagcacctcttgcttttaacc

SEQ ID NO: 838880 - DNA, 33 bp, Homo sapien
cattttctttgctagcgcctcttgcttttaacc

SEQ ID NO: 838881 - DNA, 33 bp, Homo sapien
agatcatctagggagcaagtgtgggtaaacaaa

SEQ ID NO: 838882 - DNA, 33 bp, Homo sapien
agatcatctagggagcgagtgtgggtaaacaaa

SEQ ID NO: 838883 - DNA, 33 bp, Homo sapien
ctcctccccatgcctacgatgcattacacgatc

SEQ ID NO: 838884 - DNA, 33 bp, Homo sapien
ctcctccccatgcctatgatgcattacacgatc

SEQ ID NO: 838885 - DNA, 33 bp, Homo sapien
tccccctcaggtagccactcaagtaattctgat

SEQ ID NO: 838886 - DNA, 33 bp, Homo sapien
tccccctcaggtagccgctcaagtaattctgat

SEQ ID NO: 838887 - DNA, 33 bp, Homo sapien
caagtactgttctaaacgctgggaattctggaa

SEQ ID NO: 838888 - DNA, 33 bp, Homo sapien
caagtactgttctaaatgctgggaattctggaa

SEQ ID NO: 838889 - DNA, 33 bp, Homo sapien
aggtcatggggcacaaagctgcaattcttttaa

SEQ ID NO: 838890 - DNA, 33 bp, Homo sapien
aggtcatggggcacaaggctgcaattcttttaa

SEQ ID NO: 838891 - DNA, 33 bp, Homo sapien
aaccatagagacatgaacctgtgctttttgggg

SEQ ID NO: 838892 - DNA, 33 bp, Homo sapien
aaccatagagacatgatcctgtgctttttgggg

SEQ ID NO: 838893 - DNA, 33 bp, Homo sapien
aaagcccatcattaaaaagaacacatttggcct

SEQ ID NO: 838894 - DNA, 33 bp, Homo sapien
aaagcccatcattaaacagaacacatttggcct

SEQ ID NO: 838895 - DNA, 33 bp, Homo sapien
gccagtcctccaggtacgctcatccatgtgtgc

SEQ ID NO: 838896 - DNA, 33 bp, Homo sapien
gccagtcctccaggtatgctcatccatgtgtgc

SEQ ID NO: 838897 - DNA, 33 bp, Homo sapien
ccaggattgagaagagacctatcaatattcgga

SEQ ID NO: 838898 - DNA, 33 bp, Homo sapien
ccaggattgagaagagccctatcaatattcgga

SEQ ID NO: 838899 - DNA, 33 bp, Homo sapien
ctcacaactgcttggaaaaaacaggatagcata

SEQ ID NO: 838900 - DNA, 33 bp, Homo sapien
ctcacaactgcttggataaaacaggatagcata

SEQ ID NO: 838901 - DNA, 33 bp, Homo sapien
tgttctgtgtcaagcacgatgctgcgtgttgga

SEQ ID NO: 838902 - DNA, 33 bp, Homo sapien
tgttctgtgtcaagcatgatgctgcgtgttgga

SEQ ID NO: 838903 - DNA, 33 bp, Homo sapien
cagctatatggctctcacttgtcccagatcccc

SEQ ID NO: 838904 - DNA, 33 bp, Homo sapien
cagctatatggctctcgcttgtcccagatcccc

SEQ ID NO: 838905 - DNA, 33 bp, Homo sapien
acaccatgcaagataccggatttgacctgcggt

SEQ ID NO: 838906 - DNA, 33 bp, Homo sapien
acaccatgcaagatactggatttgacctgcggt

SEQ ID NO: 838907 - DNA, 33 bp, Homo sapien
cattattcataggaaaagtttttcttgttcttt

SEQ ID NO: 838908 - DNA, 33 bp, Homo sapien
cattattcataggaaatgtttttcttgttcttt

SEQ ID NO: 838909 - DNA, 33 bp, Homo sapien
aactgcacattaagtacgtaccaaagacacaag

SEQ ID NO: 838910 - DNA, 33 bp, Homo sapien
aactgcacattaagtatgtaccaaagacacaag

SEQ ID NO: 838911 - DNA, 33 bp, Homo sapien
actcccttctgctgaggattcatgggaaagctg

SEQ ID NO: 838912 - DNA, 33 bp, Homo sapien
actcccttctgctgagtattcatgggaaagctg

SEQ ID NO: 838913 - DNA, 33 bp, Homo sapien
tttaccttgcctaacacggcactggtttaaatt

SEQ ID NO: 838914 - DNA, 33 bp, Homo sapien
tttaccttgcctaacatggcactggtttaaatt

SEQ ID NO: 838915 - DNA, 33 bp, Homo sapien
agcacaaaggccaaagcagaatggggccatgga

SEQ ID NO: 838916 - DNA, 33 bp, Homo sapien
agcacaaaggccaaaggagaatggggccatgga

SEQ ID NO: 838917 - DNA, 33 bp, Homo sapien
cctggtgtatttatccagagaacccactgtttc

SEQ ID NO: 838918 - DNA, 33 bp, Homo sapien
cctggtgtatttatcctgagaacccactgtttc

SEQ ID NO: 838919 - DNA, 33 bp, Homo sapien
gccctggggatcagtaagaagcccgacgcatag

SEQ ID NO: 838920 - DNA, 33 bp, Homo sapien
gccctggggatcagtaggaagcccgacgcatag

SEQ ID NO: 838921 - DNA, 33 bp, Homo sapien
gtggtttatgcacaaaagataaatacagagctc

SEQ ID NO: 838922 - DNA, 33 bp, Homo sapien
gtggtttatgcacaaatgataaatacagagctc

SEQ ID NO: 838923 - DNA, 33 bp, Homo sapien
acagaagaacttagctcacccttgatctacact

SEQ ID NO: 838924 - DNA, 33 bp, Homo sapien
acagaagaacttagctgacccttgatctacact

SEQ ID NO: 838925 - DNA, 33 bp, Homo sapien
ttacctggtatcaccacctaaaaaagttagaag

SEQ ID NO: 838926 - DNA, 33 bp, Homo sapien
ttacctggtatcaccatctaaaaaagttagaag

SEQ ID NO: 838927 - DNA, 33 bp, Homo sapien
aagtaaggaaatggtaaatacggacagagttac

SEQ ID NO: 838928 - DNA, 33 bp, Homo sapien
aagtaaggaaatggtatatacggacagagttac

SEQ ID NO: 838929 - DNA, 33 bp, Homo sapien
ttgctccttgcaatgccgaaattgttgctttat

SEQ ID NO: 838930 - DNA, 33 bp, Homo sapien
ttgctccttgcaatgctgaaattgttgctttat

SEQ ID NO: 838931 - DNA, 33 bp, Homo sapien
gccactggttcttcaaaaagctctttcaggcag

SEQ ID NO: 838932 - DNA, 33 bp, Homo sapien
gccactggttcttcaacaagctctttcaggcag

SEQ ID NO: 838933 - DNA, 33 bp, Homo sapien
ataaggctttccttccagcccacacttccagga

SEQ ID NO: 838934 - DNA, 33 bp, Homo sapien
ataaggctttccttccggcccacacttccagga

SEQ ID NO: 838935 - DNA, 33 bp, Homo sapien
tgctatgggaaaaaacaaagtaggaaatagtca

SEQ ID NO: 838936 - DNA, 33 bp, Homo sapien
tgctatgggaaaaaacgaagtaggaaatagtca

SEQ ID NO: 838937 - DNA, 33 bp, Homo sapien
ttctttggatagtgaccaggaagggttctgacc

SEQ ID NO: 838938 - DNA, 33 bp, Homo sapien
ttctttggatagtgacgaggaagggttctgacc

SEQ ID NO: 838939 - DNA, 33 bp, Homo sapien
aaagaccaagtggaaaaagatgcttcagctgtt

SEQ ID NO: 838940 - DNA, 33 bp, Homo sapien
aaagaccaagtggaaagagatgcttcagctgtt

SEQ ID NO: 838941 - DNA, 33 bp, Homo sapien
cacaatgtatgaattaccccagtgctctttccc

SEQ ID NO: 838942 - DNA, 33 bp, Homo sapien
cacaatgtatgaattagcccagtgctctttccc

SEQ ID NO: 838943 - DNA, 33 bp, Homo sapien
ggctccagggctcagccacaggtagtgtccaga

SEQ ID NO: 838944 - DNA, 33 bp, Homo sapien
ggctccagggctcagcgacaggtagtgtccaga

SEQ ID NO: 838945 - DNA, 33 bp, Homo sapien
cacacagagcggggttcaaacctagagctttct

SEQ ID NO: 838946 - DNA, 33 bp, Homo sapien
cacacagagcggggttgaaacctagagctttct

SEQ ID NO: 838947 - DNA, 33 bp, Homo sapien
ctggccaaatatcaataagcatcattcttatca

SEQ ID NO: 838948 - DNA, 33 bp, Homo sapien
ctggccaaatatcaatgagcatcattcttatca

SEQ ID NO: 838949 - DNA, 33 bp, Homo sapien
acagctgaatcacaccaaagtacaggcactggg

SEQ ID NO: 838950 - DNA, 33 bp, Homo sapien
acagctgaatcacaccgaagtacaggcactggg

SEQ ID NO: 838951 - DNA, 33 bp, Homo sapien
aggattttcattctgccgaggatctgttcatgg

SEQ ID NO: 838952 - DNA, 33 bp, Homo sapien
aggattttcattctgcggaggatctgttcatgg

SEQ ID NO: 838953 - DNA, 33 bp, Homo sapien
gcccagtgctactaagactctgctaggatatct

SEQ ID NO: 838954 - DNA, 33 bp, Homo sapien
gcccagtgctactaaggctctgctaggatatct

SEQ ID NO: 838955 - DNA, 33 bp, Homo sapien
aaccatgcctcttcccacatgagaagattcatt

SEQ ID NO: 838956 - DNA, 33 bp, Homo sapien
aaccatgcctcttcccgcatgagaagattcatt

SEQ ID NO: 838957 - DNA, 33 bp, Homo sapien
ctgtgactttgttggcaccccattgtgtgatgg

SEQ ID NO: 838958 - DNA, 33 bp, Homo sapien
ctgtgactttgttggcgccccattgtgtgatgg

SEQ ID NO: 838959 - DNA, 33 bp, Homo sapien
agagaggaggaactagcatttgtgtggataaag

SEQ ID NO: 838960 - DNA, 33 bp, Homo sapien
agagaggaggaactagtatttgtgtggataaag

SEQ ID NO: 838961 - DNA, 33 bp, Homo sapien
accaaccatggagatgcatataacacaatttga

SEQ ID NO: 838962 - DNA, 33 bp, Homo sapien
accaaccatggagatgtatataacacaatttga

SEQ ID NO: 838963 - DNA, 33 bp, Homo sapien
ggcttgaggcatttcaatctttggggatgaact

SEQ ID NO: 838964 - DNA, 33 bp, Homo sapien
ggcttgaggcatttcagtctttggggatgaact

SEQ ID NO: 838965 - DNA, 33 bp, Homo sapien
agataggatatgggaaactgtggctgcatctga

SEQ ID NO: 838966 - DNA, 33 bp, Homo sapien
agataggatatgggaagctgtggctgcatctga

SEQ ID NO: 838967 - DNA, 33 bp, Homo sapien
aggagttttagattaaaagggtgtgtgtgtgtg

SEQ ID NO: 838968 - DNA, 33 bp, Homo sapien
aggagttttagattaagagggtgtgtgtgtgtg

SEQ ID NO: 838969 - DNA, 33 bp, Homo sapien
gggcagataaggaaccaattcggagagttaagt

SEQ ID NO: 838970 - DNA, 33 bp, Homo sapien
gggcagataaggaacctattcggagagttaagt

SEQ ID NO: 838971 - DNA, 33 bp, Homo sapien
agctgtaagagaggcccacctaaaaggagctgt

SEQ ID NO: 838972 - DNA, 33 bp, Homo sapien
agctgtaagagaggcctacctaaaaggagctgt

SEQ ID NO: 838973 - DNA, 33 bp, Homo sapien
tgggagcccactgatgcaatcgatggaggtcag

SEQ ID NO: 838974 - DNA, 33 bp, Homo sapien
tgggagcccactgatggaatcgatggaggtcag

SEQ ID NO: 838975 - DNA, 33 bp, Homo sapien
atggaactgttagataatacagacaaacaaaaa

SEQ ID NO: 838976 - DNA, 33 bp, Homo sapien
atggaactgttagatagtacagacaaacaaaaa

SEQ ID NO: 838977 - DNA, 33 bp, Homo sapien
cagctaatgtgtagcacagttgggatgattgat

SEQ ID NO: 838978 - DNA, 33 bp, Homo sapien
cagctaatgtgtagcatagttgggatgattgat

SEQ ID NO: 838979 - DNA, 33 bp, Homo sapien
cttcatcggatgtgtccatttctcctcatttct

SEQ ID NO: 838980 - DNA, 33 bp, Homo sapien
cttcatcggatgtgtcgatttctcctcatttct

SEQ ID NO: 838981 - DNA, 33 bp, Homo sapien
tgtggtcttgggcttcccatgcatttattttta

SEQ ID NO: 838982 - DNA, 33 bp, Homo sapien
tgtggtcttgggcttctcatgcatttattttta

SEQ ID NO: 838983 - DNA, 33 bp, Homo sapien
aaagatgtggaaagaacgccaagacatattgtt

SEQ ID NO: 838984 - DNA, 33 bp, Homo sapien
aaagatgtggaaagaatgccaagacatattgtt

SEQ ID NO: 838985 - DNA, 33 bp, Homo sapien
tcctaagtacttgatacggttacaatacagttt

SEQ ID NO: 838986 - DNA, 33 bp, Homo sapien
tcctaagtacttgatatggttacaatacagttt

SEQ ID NO: 838987 - DNA, 33 bp, Homo sapien
ggcgttatatgttcccaatgttgataagcttct

SEQ ID NO: 838988 - DNA, 33 bp, Homo sapien
ggcgttatatgttccctatgttgataagcttct

SEQ ID NO: 838989 - DNA, 33 bp, Homo sapien
ggctgactgagtaccaactgagggctagataca

SEQ ID NO: 838990 - DNA, 33 bp, Homo sapien
ggctgactgagtaccatctgagggctagataca

SEQ ID NO: 838991 - DNA, 33 bp, Homo sapien
aaggtgcactcatttacagaagatgtcggattt

SEQ ID NO: 838992 - DNA, 33 bp, Homo sapien
aaggtgcactcatttagagaagatgtcggattt

SEQ ID NO: 838993 - DNA, 33 bp, Homo sapien
agctcacatggcattgcactgctgatgatcatc

SEQ ID NO: 838994 - DNA, 33 bp, Homo sapien
agctcacatggcattgtactgctgatgatcatc

SEQ ID NO: 838995 - DNA, 33 bp, Homo sapien
gcactgctgatgagaacgtcaaatggtgcagct

SEQ ID NO: 838996 - DNA, 33 bp, Homo sapien
gcactgctgatgagaatgtcaaatggtgcagct

SEQ ID NO: 838997 - DNA, 33 bp, Homo sapien
gagtgaaagtgaattcagaaagccaggcctgcc

SEQ ID NO: 838998 - DNA, 33 bp, Homo sapien
gagtgaaagtgaattcggaaagccaggcctgcc

SEQ ID NO: 838999 - DNA, 33 bp, Homo sapien
tataataacactgatcccataagagtataatgc

SEQ ID NO: 839000 - DNA, 33 bp, Homo sapien
tataataacactgatctcataagagtataatgc

SEQ ID NO: 839001 - DNA, 33 bp, Homo sapien
tgggctgtcattgacccaaatgttggtatgcag

SEQ ID NO: 839002 - DNA, 33 bp, Homo sapien
tgggctgtcattgacctaaatgttggtatgcag

SEQ ID NO: 839003 - DNA, 33 bp, Homo sapien
ttttctcctggaagtaaaggattctttctttgt

SEQ ID NO: 839004 - DNA, 33 bp, Homo sapien
ttttctcctggaagtataggattctttctttgt

SEQ ID NO: 839005 - DNA, 33 bp, Homo sapien
tgtcaactcattcctccaaagtaaacatgttat

SEQ ID NO: 839006 - DNA, 33 bp, Homo sapien
tgtcaactcattcctctaaagtaaacatgttat

SEQ ID NO: 839007 - DNA, 33 bp, Homo sapien
catgtcagttatttctaaagcctccataacaaa

SEQ ID NO: 839008 - DNA, 33 bp, Homo sapien
catgtcagttatttctgaagcctccataacaaa

SEQ ID NO: 839009 - DNA, 33 bp, Homo sapien
ctcttgttcatttatcagaagatgtgatagcaa

SEQ ID NO: 839010 - DNA, 33 bp, Homo sapien
ctcttgttcatttatctgaagatgtgatagcaa

SEQ ID NO: 839011 - DNA, 33 bp, Homo sapien
gatggagcacaaggaaaaagggggagattagta

SEQ ID NO: 839012 - DNA, 33 bp, Homo sapien
gatggagcacaaggaagaagggggagattagta

SEQ ID NO: 839013 - DNA, 33 bp, Homo sapien
aatgaactacagcaacacttatcaacacagata

SEQ ID NO: 839014 - DNA, 33 bp, Homo sapien
aatgaactacagcaacgcttatcaacacagata

SEQ ID NO: 839015 - DNA, 33 bp, Homo sapien
taggtgtgaggtggtaccttaactgcttgtgta

SEQ ID NO: 839016 - DNA, 33 bp, Homo sapien
taggtgtgaggtggtatcttaactgcttgtgta

SEQ ID NO: 839017 - DNA, 33 bp, Homo sapien
gtattcagattaaataagttctaccagactctt

SEQ ID NO: 839018 - DNA, 33 bp, Homo sapien
gtattcagattaaataggttctaccagactctt

SEQ ID NO: 839019 - DNA, 33 bp, Homo sapien
acaaaagcaataaggaataagtggttcacacct

SEQ ID NO: 839020 - DNA, 33 bp, Homo sapien
acaaaagcaataaggagtaagtggttcacacct

SEQ ID NO: 839021 - DNA, 33 bp, Homo sapien
aatatgcaaggaactacgattaacaagatttgc

SEQ ID NO: 839022 - DNA, 33 bp, Homo sapien
aatatgcaaggaactatgattaacaagatttgc

SEQ ID NO: 839023 - DNA, 33 bp, Homo sapien
tgtaaattgaatcatgccactgtatggaaaatg

SEQ ID NO: 839024 - DNA, 33 bp, Homo sapien
tgtaaattgaatcatgtcactgtatggaaaatg

SEQ ID NO: 839025 - DNA, 33 bp, Homo sapien
tgaagctgccatcttacgtggccaaagactttg

SEQ ID NO: 839026 - DNA, 33 bp, Homo sapien
tgaagctgccatcttatgtggccaaagactttg

SEQ ID NO: 839027 - DNA, 33 bp, Homo sapien
ttctggccactgatcgcaaaaactggccctgga

SEQ ID NO: 839028 - DNA, 33 bp, Homo sapien
ttctggccactgatcggaaaaactggccctgga

SEQ ID NO: 839029 - DNA, 33 bp, Homo sapien
taatttgataggttcccaaagagaaaagaagtt

SEQ ID NO: 839030 - DNA, 33 bp, Homo sapien
taatttgataggttcctaaagagaaaagaagtt

SEQ ID NO: 839031 - DNA, 33 bp, Homo sapien
atacatatgtacaaaacgctagggggtaactcc

SEQ ID NO: 839032 - DNA, 33 bp, Homo sapien
atacatatgtacaaaatgctagggggtaactcc

SEQ ID NO: 839033 - DNA, 33 bp, Homo sapien
aaaataaaaaaattagccaatcgtcatggcaca

SEQ ID NO: 839034 - DNA, 33 bp, Homo sapien
aaaataaaaaaattagtcaatcgtcatggcaca

SEQ ID NO: 839035 - DNA, 33 bp, Homo sapien
accttcacttctttcgcagtaaaaacccatttt

SEQ ID NO: 839036 - DNA, 33 bp, Homo sapien
accttcacttctttcgtagtaaaaacccatttt

SEQ ID NO: 839037 - DNA, 33 bp, Homo sapien
aaaagtcatcaacttaccacatacccatctttt

SEQ ID NO: 839038 - DNA, 33 bp, Homo sapien
aaaagtcatcaacttatcacatacccatctttt

SEQ ID NO: 839039 - DNA, 33 bp, Homo sapien
ctaaggtaaagttacacagtatgacgtagaagt

SEQ ID NO: 839040 - DNA, 33 bp, Homo sapien
ctaaggtaaagttacatagtatgacgtagaagt

SEQ ID NO: 839041 - DNA, 33 bp, Homo sapien
ggtggttttagttgcaccaatgagaacagtaat

SEQ ID NO: 839042 - DNA, 33 bp, Homo sapien
ggtggttttagttgcagcaatgagaacagtaat

SEQ ID NO: 839043 - DNA, 33 bp, Homo sapien
gagatgtaagtgtgaacgtatgtaaaagctggc

SEQ ID NO: 839044 - DNA, 33 bp, Homo sapien
gagatgtaagtgtgaatgtatgtaaaagctggc

SEQ ID NO: 839045 - DNA, 33 bp, Homo sapien
catcaccatagtcaataagctattctttgaact

SEQ ID NO: 839046 - DNA, 33 bp, Homo sapien
catcaccatagtcaattagctattctttgaact

SEQ ID NO: 839047 - DNA, 33 bp, Homo sapien
agagcacactttactacagaatcagaatagaat

SEQ ID NO: 839048 - DNA, 33 bp, Homo sapien
agagcacactttactatagaatcagaatagaat

SEQ ID NO: 839049 - DNA, 33 bp, Homo sapien
aaaagcaaacaaatagcacagataatctctagt

SEQ ID NO: 839050 - DNA, 33 bp, Homo sapien
aaaagcaaacaaataggacagataatctctagt

SEQ ID NO: 839051 - DNA, 33 bp, Homo sapien
ctaaattggcagagtagatcatctaaagccaaa

SEQ ID NO: 839052 - DNA, 33 bp, Homo sapien
ctaaattggcagagtatatcatctaaagccaaa

SEQ ID NO: 839053 - DNA, 33 bp, Homo sapien
atcttatgaatgaaggccagaaaaagggggaga

SEQ ID NO: 839054 - DNA, 33 bp, Homo sapien
atcttatgaatgaaggtcagaaaaagggggaga

SEQ ID NO: 839055 - DNA, 33 bp, Homo sapien
ttataatccacttgtacagagagaaacctggtc

SEQ ID NO: 839056 - DNA, 33 bp, Homo sapien
ttataatccacttgtagagagagaaacctggtc

SEQ ID NO: 839057 - DNA, 33 bp, Homo sapien
ttattttctctacactaaagttcttaggacagc

SEQ ID NO: 839058 - DNA, 33 bp, Homo sapien
ttattttctctacactgaagttcttaggacagc

SEQ ID NO: 839059 - DNA, 33 bp, Homo sapien
atgaacccacacataactagactaacaggtaaa

SEQ ID NO: 839060 - DNA, 33 bp, Homo sapien
atgaacccacacataattagactaacaggtaaa

SEQ ID NO: 839061 - DNA, 33 bp, Homo sapien
ccatgcagctcattaaaaaacaaaaatccagga

SEQ ID NO: 839062 - DNA, 33 bp, Homo sapien
ccatgcagctcattaacaaacaaaaatccagga

SEQ ID NO: 839063 - DNA, 33 bp, Homo sapien
gcttggagaatcaggaacaaagggcaagactgg

SEQ ID NO: 839064 - DNA, 33 bp, Homo sapien
gcttggagaatcaggagcaaagggcaagactgg

SEQ ID NO: 839065 - DNA, 33 bp, Homo sapien
aaaaatgttttaagtcccacaaattcacaataa

SEQ ID NO: 839066 - DNA, 33 bp, Homo sapien
aaaaatgttttaagtctcacaaattcacaataa

SEQ ID NO: 839067 - DNA, 33 bp, Homo sapien
cctggtgcactttctaggttttaataaatagta

SEQ ID NO: 839068 - DNA, 33 bp, Homo sapien
cctggtgcactttctatgttttaataaatagta

SEQ ID NO: 839069 - DNA, 33 bp, Homo sapien
ccaagaaagatgattaaaaagttggatgacttt

SEQ ID NO: 839070 - DNA, 33 bp, Homo sapien
ccaagaaagatgattagaaagttggatgacttt

SEQ ID NO: 839071 - DNA, 33 bp, Homo sapien
tataatttcagcactccagatttccattgtagt

SEQ ID NO: 839072 - DNA, 33 bp, Homo sapien
tataatttcagcactcgagatttccattgtagt

SEQ ID NO: 839073 - DNA, 33 bp, Homo sapien
aaagtatttgaactcaatgaatgagcatttata

SEQ ID NO: 839074 - DNA, 33 bp, Homo sapien
aaagtatttgaactcagtgaatgagcatttata

SEQ ID NO: 839075 - DNA, 33 bp, Homo sapien
cctttagtgggagcaaaacaacgcagtgtggca

SEQ ID NO: 839076 - DNA, 33 bp, Homo sapien
cctttagtgggagcaagacaacgcagtgtggca

SEQ ID NO: 839077 - DNA, 33 bp, Homo sapien
ccatctttcctgaaatcatccactaccccttct

SEQ ID NO: 839078 - DNA, 33 bp, Homo sapien
ccatctttcctgaaattatccactaccccttct

SEQ ID NO: 839079 - DNA, 33 bp, Homo sapien
gtgggaaggtggaggacgaaagaggacctggga

SEQ ID NO: 839080 - DNA, 33 bp, Homo sapien
gtgggaaggtggaggatgaaagaggacctggga

SEQ ID NO: 839081 - DNA, 33 bp, Homo sapien
caggcattgcactaaactctgctaacacagaaa

SEQ ID NO: 839082 - DNA, 33 bp, Homo sapien
caggcattgcactaaattctgctaacacagaaa

SEQ ID NO: 839083 - DNA, 33 bp, Homo sapien
aatgtaaattttatggaatgtcaatgatctctc

SEQ ID NO: 839084 - DNA, 33 bp, Homo sapien
aatgtaaattttatggtatgtcaatgatctctc

SEQ ID NO: 839085 - DNA, 33 bp, Homo sapien
cctttagctgccaccaatatcagtatcaatagt

SEQ ID NO: 839086 - DNA, 33 bp, Homo sapien
cctttagctgccaccagtatcagtatcaatagt

SEQ ID NO: 839087 - DNA, 33 bp, Homo sapien
gcacaatttagtctgcaatatttggaagacctt

SEQ ID NO: 839088 - DNA, 33 bp, Homo sapien
gcacaatttagtctgcgatatttggaagacctt

SEQ ID NO: 839089 - DNA, 33 bp, Homo sapien
ggcctgggtcaattccccgggcagactccttca

SEQ ID NO: 839090 - DNA, 33 bp, Homo sapien
ggcctgggtcaattcctcgggcagactccttca

SEQ ID NO: 839091 - DNA, 33 bp, Homo sapien
attagccaatctagccaactattaattctcctc

SEQ ID NO: 839092 - DNA, 33 bp, Homo sapien
attagccaatctagccgactattaattctcctc

SEQ ID NO: 839093 - DNA, 33 bp, Homo sapien
atttttatccttggaaaccatgctgcaaagcct

SEQ ID NO: 839094 - DNA, 33 bp, Homo sapien
atttttatccttggaagccatgctgcaaagcct

SEQ ID NO: 839095 - DNA, 33 bp, Homo sapien
gattcagaacaggcagaaattcatttttccagt

SEQ ID NO: 839096 - DNA, 33 bp, Homo sapien
gattcagaacaggcaggaattcatttttccagt

SEQ ID NO: 839097 - DNA, 33 bp, Homo sapien
gtcagcactggctttcaagggaggaggtgatgc

SEQ ID NO: 839098 - DNA, 33 bp, Homo sapien
gtcagcactggctttcgagggaggaggtgatgc

SEQ ID NO: 839099 - DNA, 33 bp, Homo sapien
gtgatggcacttagaacgcgtagctgggaggcc

SEQ ID NO: 839100 - DNA, 33 bp, Homo sapien
gtgatggcacttagaatgcgtagctgggaggcc

SEQ ID NO: 839101 - DNA, 33 bp, Homo sapien
tgccttgctgcctgagaattaaagagggaagta

SEQ ID NO: 839102 - DNA, 33 bp, Homo sapien
tgccttgctgcctgaggattaaagagggaagta

SEQ ID NO: 839103 - DNA, 33 bp, Homo sapien
cattctttgaaagatacgtctgaggcatcatgc

SEQ ID NO: 839104 - DNA, 33 bp, Homo sapien
cattctttgaaagatatgtctgaggcatcatgc

SEQ ID NO: 839105 - DNA, 33 bp, Homo sapien
tatgaaccaactgcacaagtacacagaggtagg

SEQ ID NO: 839106 - DNA, 33 bp, Homo sapien
tatgaaccaactgcacgagtacacagaggtagg

SEQ ID NO: 839107 - DNA, 33 bp, Homo sapien
agccttaaaaggatggaagttaagagcaaaaat

SEQ ID NO: 839108 - DNA, 33 bp, Homo sapien
agccttaaaaggatgggagttaagagcaaaaat

SEQ ID NO: 839109 - DNA, 33 bp, Homo sapien
aattggtagctggaaacagtcctaagaaacaag

SEQ ID NO: 839110 - DNA, 33 bp, Homo sapien
aattggtagctggaaatagtcctaagaaacaag

SEQ ID NO: 839111 - DNA, 33 bp, Homo sapien
ggccagttccacaaacaaggagaattaaaccct

SEQ ID NO: 839112 - DNA, 33 bp, Homo sapien
ggccagttccacaaacgaggagaattaaaccct

SEQ ID NO: 839113 - DNA, 33 bp, Homo sapien
aggagatggaaaccgacgtgaagtccctcattc

SEQ ID NO: 839114 - DNA, 33 bp, Homo sapien
aggagatggaaaccgatgtgaagtccctcattc

SEQ ID NO: 839115 - DNA, 33 bp, Homo sapien
ccctggggaaagaagccgatttgccaccctcca

SEQ ID NO: 839116 - DNA, 33 bp, Homo sapien
ccctggggaaagaagctgatttgccaccctcca

SEQ ID NO: 839117 - DNA, 33 bp, Homo sapien
accagtcacccactagaacctcaggataccttc

SEQ ID NO: 839118 - DNA, 33 bp, Homo sapien
accagtcacccactaggacctcaggataccttc

SEQ ID NO: 839119 - DNA, 33 bp, Homo sapien
agcataacccagttgaacatgaccctcctaaaa

SEQ ID NO: 839120 - DNA, 33 bp, Homo sapien
agcataacccagttgagcatgaccctcctaaaa

SEQ ID NO: 839121 - DNA, 33 bp, Homo sapien
gcctgtccccatcagacatttgggttgcaaaag

SEQ ID NO: 839122 - DNA, 33 bp, Homo sapien
gcctgtccccatcagatatttgggttgcaaaag

SEQ ID NO: 839123 - DNA, 33 bp, Homo sapien
atgaagagttctcaaaacaaacataaatgatta

SEQ ID NO: 839124 - DNA, 33 bp, Homo sapien
atgaagagttctcaaagcaaacataaatgatta

SEQ ID NO: 839125 - DNA, 33 bp, Homo sapien
gttttttttaaaagcaacctctctatgtaacgc

SEQ ID NO: 839126 - DNA, 33 bp, Homo sapien
gttttttttaaaagcatcctctctatgtaacgc

SEQ ID NO: 839127 - DNA, 33 bp, Homo sapien
ggatttagtgattaataactttccagagcagtg

SEQ ID NO: 839128 - DNA, 33 bp, Homo sapien
ggatttagtgattaatgactttccagagcagtg

SEQ ID NO: 839129 - DNA, 33 bp, Homo sapien
agctcttgggtcaactaaagaaaagagagacaa

SEQ ID NO: 839130 - DNA, 33 bp, Homo sapien
agctcttgggtcaactgaagaaaagagagacaa

SEQ ID NO: 839131 - DNA, 33 bp, Homo sapien
aagggccttccttcccaattctctgggcaatgg

SEQ ID NO: 839132 - DNA, 33 bp, Homo sapien
aagggccttccttcccgattctctgggcaatgg

SEQ ID NO: 839133 - DNA, 33 bp, Homo sapien
acaatctgagcccagaaccacatagattaattt

SEQ ID NO: 839134 - DNA, 33 bp, Homo sapien
acaatctgagcccagagccacatagattaattt

SEQ ID NO: 839135 - DNA, 33 bp, Homo sapien
gaggaacacagagaaacgcccagaaacaggtag

SEQ ID NO: 839136 - DNA, 33 bp, Homo sapien
gaggaacacagagaaatgcccagaaacaggtag

SEQ ID NO: 839137 - DNA, 33 bp, Homo sapien
acaggagcatccggacagtcattggagataagc

SEQ ID NO: 839138 - DNA, 33 bp, Homo sapien
acaggagcatccggacggtcattggagataagc

SEQ ID NO: 839139 - DNA, 33 bp, Homo sapien
catagggttgtcatcaagattaaagcaattaac

SEQ ID NO: 839140 - DNA, 33 bp, Homo sapien
catagggttgtcatcaggattaaagcaattaac

SEQ ID NO: 839141 - DNA, 33 bp, Homo sapien
ataacaacaacaatggaccaagtgcaatggctc

SEQ ID NO: 839142 - DNA, 33 bp, Homo sapien
ataacaacaacaatgggccaagtgcaatggctc

SEQ ID NO: 839143 - DNA, 33 bp, Homo sapien
tgtctgcttaggaatcaacaagaaagaacacat

SEQ ID NO: 839144 - DNA, 33 bp, Homo sapien
tgtctgcttaggaatcgacaagaaagaacacat

SEQ ID NO: 839145 - DNA, 33 bp, Homo sapien
tgaccaattctagtccaactctattcatttcac

SEQ ID NO: 839146 - DNA, 33 bp, Homo sapien
tgaccaattctagtcccactctattcatttcac

SEQ ID NO: 839147 - DNA, 33 bp, Homo sapien
gggcagctgtatggtgcagagaatttacggtga

SEQ ID NO: 839148 - DNA, 33 bp, Homo sapien
gggcagctgtatggtggagagaatttacggtga

SEQ ID NO: 839149 - DNA, 33 bp, Homo sapien
tggcagaggaggtttgaagatggtaaccagggg

SEQ ID NO: 839150 - DNA, 33 bp, Homo sapien
tggcagaggaggtttggagatggtaaccagggg

SEQ ID NO: 839151 - DNA, 33 bp, Homo sapien
tgtaatgtgctaccaactcctgttaagtctcct

SEQ ID NO: 839152 - DNA, 33 bp, Homo sapien
tgtaatgtgctaccaagtcctgttaagtctcct

SEQ ID NO: 839153 - DNA, 33 bp, Homo sapien
ttagctgtctgacaaaattcacaccttcttgct

SEQ ID NO: 839154 - DNA, 33 bp, Homo sapien
ttagctgtctgacaaagttcacaccttcttgct

SEQ ID NO: 839155 - DNA, 33 bp, Homo sapien
aggaagatgaggaagacgaagaagaggatgagg

SEQ ID NO: 839156 - DNA, 33 bp, Homo sapien
aggaagatgaggaagaggaagaagaggatgagg

SEQ ID NO: 839157 - DNA, 33 bp, Homo sapien
atgttaatgtttccacggcaaatatggatgata

SEQ ID NO: 839158 - DNA, 33 bp, Homo sapien
atgttaatgtttccactgcaaatatggatgata

SEQ ID NO: 839159 - DNA, 33 bp, Homo sapien
aagcaggacatacttacggtaaaaaggcaaatg

SEQ ID NO: 839160 - DNA, 33 bp, Homo sapien
aagcaggacatacttatggtaaaaaggcaaatg

SEQ ID NO: 839161 - DNA, 33 bp, Homo sapien
gacagggggtgacaataagaagaaatgtttgag

SEQ ID NO: 839162 - DNA, 33 bp, Homo sapien
gacagggggtgacaatgagaagaaatgtttgag

SEQ ID NO: 839163 - DNA, 33 bp, Homo sapien
ggtaaagtaatacatcaaatgcctacacagtaa

SEQ ID NO: 839164 - DNA, 33 bp, Homo sapien
ggtaaagtaatacatctaatgcctacacagtaa

SEQ ID NO: 839165 - DNA, 33 bp, Homo sapien
ctctcaggtgtgaacactggcgatgtgggctgc

SEQ ID NO: 839166 - DNA, 33 bp, Homo sapien
ctctcaggtgtgaacattggcgatgtgggctgc

SEQ ID NO: 839167 - DNA, 33 bp, Homo sapien
atttacattttccttacgacagcgatactgagc

SEQ ID NO: 839168 - DNA, 33 bp, Homo sapien
atttacattttccttatgacagcgatactgagc

SEQ ID NO: 839169 - DNA, 33 bp, Homo sapien
ctagaggtatggcagacgttctctttcccctgt

SEQ ID NO: 839170 - DNA, 33 bp, Homo sapien
ctagaggtatggcagatgttctctttcccctgt

SEQ ID NO: 839171 - DNA, 33 bp, Homo sapien
atagttgatgagggagcaagtaccagcattgga

SEQ ID NO: 839172 - DNA, 33 bp, Homo sapien
atagttgatgagggagtaagtaccagcattgga

SEQ ID NO: 839173 - DNA, 33 bp, Homo sapien
taatctggcacaggaaactcctaaattaaccag

SEQ ID NO: 839174 - DNA, 33 bp, Homo sapien
taatctggcacaggaatctcctaaattaaccag

SEQ ID NO: 839175 - DNA, 33 bp, Homo sapien
tagtcctaatgataaaacatgtgtgaaaaacag

SEQ ID NO: 839176 - DNA, 33 bp, Homo sapien
tagtcctaatgataaagcatgtgtgaaaaacag

SEQ ID NO: 839177 - DNA, 33 bp, Homo sapien
ataccacacccaataacgctaaccttctcaggg

SEQ ID NO: 839178 - DNA, 33 bp, Homo sapien
ataccacacccaataatgctaaccttctcaggg

SEQ ID NO: 839179 - DNA, 33 bp, Homo sapien
taaaaatttttctctacaggtctgtcagccata

SEQ ID NO: 839180 - DNA, 33 bp, Homo sapien
taaaaatttttctctataggtctgtcagccata

SEQ ID NO: 839181 - DNA, 33 bp, Homo sapien
gagtcactccattgccaaaacaccatctaccat

SEQ ID NO: 839182 - DNA, 33 bp, Homo sapien
gagtcactccattgccgaaacaccatctaccat

SEQ ID NO: 839183 - DNA, 33 bp, Homo sapien
tgttaggtaactaacaacaaagcagaaaaagct

SEQ ID NO: 839184 - DNA, 33 bp, Homo sapien
tgttaggtaactaacagcaaagcagaaaaagct

SEQ ID NO: 839185 - DNA, 33 bp, Homo sapien
ggactactgctcagcaacgaaaaggaatgaacc

SEQ ID NO: 839186 - DNA, 33 bp, Homo sapien
ggactactgctcagcagcgaaaaggaatgaacc

SEQ ID NO: 839187 - DNA, 33 bp, Homo sapien
aaaaggcaagggatccaaatgagcatttctcca

SEQ ID NO: 839188 - DNA, 33 bp, Homo sapien
aaaaggcaagggatccgaatgagcatttctcca

SEQ ID NO: 839189 - DNA, 33 bp, Homo sapien
acttgcaagttttagccactgtacacaaataca

SEQ ID NO: 839190 - DNA, 33 bp, Homo sapien
acttgcaagttttagctactgtacacaaataca

SEQ ID NO: 839191 - DNA, 33 bp, Homo sapien
gcacatcttacaaggcaataggcaaggagtgct

SEQ ID NO: 839192 - DNA, 33 bp, Homo sapien
gcacatcttacaaggcgataggcaaggagtgct

SEQ ID NO: 839193 - DNA, 33 bp, Homo sapien
aaaaagtcttgagggaagttcctgattcaattt

SEQ ID NO: 839194 - DNA, 33 bp, Homo sapien
aaaaagtcttgagggaggttcctgattcaattt

SEQ ID NO: 839195 - DNA, 33 bp, Homo sapien
tccgatatcctgagaactggtgtatgcaaaaaa

SEQ ID NO: 839196 - DNA, 33 bp, Homo sapien
tccgatatcctgagaagtggtgtatgcaaaaaa

SEQ ID NO: 839197 - DNA, 33 bp, Homo sapien
agattctcgatctctcgaacccttctcagcaac

SEQ ID NO: 839198 - DNA, 33 bp, Homo sapien
agattctcgatctctctaacccttctcagcaac

SEQ ID NO: 839199 - DNA, 33 bp, Homo sapien
tgttccactaagggtcaacaactatgctgtatg

SEQ ID NO: 839200 - DNA, 33 bp, Homo sapien
tgttccactaagggtcgacaactatgctgtatg

SEQ ID NO: 839201 - DNA, 33 bp, Homo sapien
ctgtgacagctacagacgaggagttttggccct

SEQ ID NO: 839202 - DNA, 33 bp, Homo sapien
ctgtgacagctacagatgaggagttttggccct

SEQ ID NO: 839203 - DNA, 33 bp, Homo sapien
agggaaagaattctccacttcacaggctgatca

SEQ ID NO: 839204 - DNA, 33 bp, Homo sapien
agggaaagaattctccgcttcacaggctgatca

SEQ ID NO: 839205 - DNA, 33 bp, Homo sapien
ccagcataccctgcaaagaagccacacaagcat

SEQ ID NO: 839206 - DNA, 33 bp, Homo sapien
ccagcataccctgcaaggaagccacacaagcat

SEQ ID NO: 839207 - DNA, 33 bp, Homo sapien
taggcacatagtgttcaataagtgcttgatgtt

SEQ ID NO: 839208 - DNA, 33 bp, Homo sapien
taggcacatagtgttcgataagtgcttgatgtt

SEQ ID NO: 839209 - DNA, 33 bp, Homo sapien
acacacacaaaccagacaaaacaaatgggctaa

SEQ ID NO: 839210 - DNA, 33 bp, Homo sapien
acacacacaaaccagagaaaacaaatgggctaa

SEQ ID NO: 839211 - DNA, 33 bp, Homo sapien
tcatgtttgtttgtcaagatggttaaatgtata

SEQ ID NO: 839212 - DNA, 33 bp, Homo sapien
tcatgtttgtttgtcaggatggttaaatgtata

SEQ ID NO: 839213 - DNA, 33 bp, Homo sapien
agaggaggaagactatcaaaggacagtcctgat

SEQ ID NO: 839214 - DNA, 33 bp, Homo sapien
agaggaggaagactattaaaggacagtcctgat

SEQ ID NO: 839215 - DNA, 33 bp, Homo sapien
tatccttggatgacaacggtgtcatgtgacact

SEQ ID NO: 839216 - DNA, 33 bp, Homo sapien
tatccttggatgacaatggtgtcatgtgacact

SEQ ID NO: 839217 - DNA, 33 bp, Homo sapien
tgtatggtaaatatccacttcagttctatcaca

SEQ ID NO: 839218 - DNA, 33 bp, Homo sapien
tgtatggtaaatatccgcttcagttctatcaca

SEQ ID NO: 839219 - DNA, 33 bp, Homo sapien
tgtgactgagtacaatcagaatattacctaaag

SEQ ID NO: 839220 - DNA, 33 bp, Homo sapien
tgtgactgagtacaattagaatattacctaaag

SEQ ID NO: 839221 - DNA, 33 bp, Homo sapien
gtataccaaactgatacagctgtgtttcatacc

SEQ ID NO: 839222 - DNA, 33 bp, Homo sapien
gtataccaaactgatatagctgtgtttcatacc

SEQ ID NO: 839223 - DNA, 33 bp, Homo sapien
tctaacactagaagacacagaagtattagaaga

SEQ ID NO: 839224 - DNA, 33 bp, Homo sapien
tctaacactagaagacgcagaagtattagaaga

SEQ ID NO: 839225 - DNA, 33 bp, Homo sapien
atcttcttttctagcaataattccaatgtgggt

SEQ ID NO: 839226 - DNA, 33 bp, Homo sapien
atcttcttttctagcagtaattccaatgtgggt

SEQ ID NO: 839227 - DNA, 33 bp, Homo sapien
cgttcaattgtacaacacctgctgtcctgtttg

SEQ ID NO: 839228 - DNA, 33 bp, Homo sapien
cgttcaattgtacaacgcctgctgtcctgtttg

SEQ ID NO: 839229 - DNA, 33 bp, Homo sapien
caaacgtaagacattccactttgtaaacagctc

SEQ ID NO: 839230 - DNA, 33 bp, Homo sapien
caaacgtaagacattctactttgtaaacagctc

SEQ ID NO: 839231 - DNA, 33 bp, Homo sapien
ttggctttagaagacaaaaccagtgttctcatt

SEQ ID NO: 839232 - DNA, 33 bp, Homo sapien
ttggctttagaagacagaaccagtgttctcatt

SEQ ID NO: 839233 - DNA, 33 bp, Homo sapien
tccatgtgttctggcaaatcccataccggtacc

SEQ ID NO: 839234 - DNA, 33 bp, Homo sapien
tccatgtgttctggcatatcccataccggtacc

SEQ ID NO: 839235 - DNA, 33 bp, Homo sapien
cttggagtctaagagacgtggttgcaaacttag

SEQ ID NO: 839236 - DNA, 33 bp, Homo sapien
cttggagtctaagagatgtggttgcaaacttag

SEQ ID NO: 839237 - DNA, 33 bp, Homo sapien
cagacaaccagaaggaaagttgcttcctctctc

SEQ ID NO: 839238 - DNA, 33 bp, Homo sapien
cagacaaccagaaggagagttgcttcctctctc

SEQ ID NO: 839239 - DNA, 33 bp, Homo sapien
ggacagccaaactataaacgcccagaaaacttt

SEQ ID NO: 839240 - DNA, 33 bp, Homo sapien
ggacagccaaactatatacgcccagaaaacttt

SEQ ID NO: 839241 - DNA, 33 bp, Homo sapien
ccagtgcccacgtagacgtagccatagttcttg

SEQ ID NO: 839242 - DNA, 33 bp, Homo sapien
ccagtgcccacgtagatgtagccatagttcttg

SEQ ID NO: 839243 - DNA, 33 bp, Homo sapien
ggctctctccagcagaagaaatctaatcccggc

SEQ ID NO: 839244 - DNA, 33 bp, Homo sapien
ggctctctccagcagaggaaatctaatcccggc

SEQ ID NO: 839245 - DNA, 33 bp, Homo sapien
cagtgtgagagacaggacctgcgtggagccaca

SEQ ID NO: 839246 - DNA, 33 bp, Homo sapien
cagtgtgagagacagggcctgcgtggagccaca

SEQ ID NO: 839247 - DNA, 33 bp, Homo sapien
atcgttgagttggccacgtataacctctttaac

SEQ ID NO: 839248 - DNA, 33 bp, Homo sapien
atcgttgagttggccatgtataacctctttaac

SEQ ID NO: 839249 - DNA, 33 bp, Homo sapien
tctgtttggaatggcaatacttgaaattcttct

SEQ ID NO: 839250 - DNA, 33 bp, Homo sapien
tctgtttggaatggcagtacttgaaattcttct

SEQ ID NO: 839251 - DNA, 33 bp, Homo sapien
agctaatataatcaaacagttcttggagatact

SEQ ID NO: 839252 - DNA, 33 bp, Homo sapien
agctaatataatcaaatagttcttggagatact

SEQ ID NO: 839253 - DNA, 33 bp, Homo sapien
ggacccaagtgcctccaccaagcagggaaccac

SEQ ID NO: 839254 - DNA, 33 bp, Homo sapien
ggacccaagtgcctccgccaagcagggaaccac

SEQ ID NO: 839255 - DNA, 33 bp, Homo sapien
tgatgggctcctctcccactcatcagaaaacat

SEQ ID NO: 839256 - DNA, 33 bp, Homo sapien
tgatgggctcctctcctactcatcagaaaacat

SEQ ID NO: 839257 - DNA, 33 bp, Homo sapien
gagatgttttaacgtaacccaatgctgcatttc

SEQ ID NO: 839258 - DNA, 33 bp, Homo sapien
gagatgttttaacgtaccccaatgctgcatttc

SEQ ID NO: 839259 - DNA, 33 bp, Homo sapien
ataacggcaaagaactaacctggattggctcct

SEQ ID NO: 839260 - DNA, 33 bp, Homo sapien
ataacggcaaagaactgacctggattggctcct

SEQ ID NO: 839261 - DNA, 33 bp, Homo sapien
ctccagagggactagaacttgtcgggcaacagg

SEQ ID NO: 839262 - DNA, 33 bp, Homo sapien
ctccagagggactagagcttgtcgggcaacagg

SEQ ID NO: 839263 - DNA, 33 bp, Homo sapien
tcaaatctcagctcaacctctcaaccagttctg

SEQ ID NO: 839264 - DNA, 33 bp, Homo sapien
tcaaatctcagctcaatctctcaaccagttctg

SEQ ID NO: 839265 - DNA, 33 bp, Homo sapien
tgcgctctgcctttgacgatcctccaagtggtg

SEQ ID NO: 839266 - DNA, 33 bp, Homo sapien
tgcgctctgcctttgatgatcctccaagtggtg

SEQ ID NO: 839267 - DNA, 33 bp, Homo sapien
ctggagactcattgcaccaggccctccctttca

SEQ ID NO: 839268 - DNA, 33 bp, Homo sapien
ctggagactcattgcatcaggccctccctttca

SEQ ID NO: 839269 - DNA, 33 bp, Homo sapien
aggaggcccctagtaaatgtttgatgaatgaat

SEQ ID NO: 839270 - DNA, 33 bp, Homo sapien
aggaggcccctagtaagtgtttgatgaatgaat

SEQ ID NO: 839271 - DNA, 33 bp, Homo sapien
aagaagcatgggactaaccagcaggtaaaactg

SEQ ID NO: 839272 - DNA, 33 bp, Homo sapien
aagaagcatgggactagccagcaggtaaaactg

SEQ ID NO: 839273 - DNA, 33 bp, Homo sapien
gccttaatgaagcttacgatcaagttgcagaga

SEQ ID NO: 839274 - DNA, 33 bp, Homo sapien
gccttaatgaagcttatgatcaagttgcagaga

SEQ ID NO: 839275 - DNA, 33 bp, Homo sapien
ttcaaacttatgtagaaactatggagatcaata

SEQ ID NO: 839276 - DNA, 33 bp, Homo sapien
ttcaaacttatgtagatactatggagatcaata

SEQ ID NO: 839277 - DNA, 33 bp, Homo sapien
tggatgttgaacaccaatgatgcctcaaagaca

SEQ ID NO: 839278 - DNA, 33 bp, Homo sapien
tggatgttgaacaccagtgatgcctcaaagaca

SEQ ID NO: 839279 - DNA, 33 bp, Homo sapien
cagtacaagaggccagacaagttttccaaagag

SEQ ID NO: 839280 - DNA, 33 bp, Homo sapien
cagtacaagaggccaggcaagttttccaaagag

SEQ ID NO: 839281 - DNA, 33 bp, Homo sapien
atataattgaactctaccacctatacacatact

SEQ ID NO: 839282 - DNA, 33 bp, Homo sapien
atataattgaactctatcacctatacacatact

SEQ ID NO: 839283 - DNA, 33 bp, Homo sapien
atccttctctacccacaaagggttacggcaaag

SEQ ID NO: 839284 - DNA, 33 bp, Homo sapien
atccttctctacccacgaagggttacggcaaag

SEQ ID NO: 839285 - DNA, 33 bp, Homo sapien
agatgtagaaactgagacacattgaagtaaaat

SEQ ID NO: 839286 - DNA, 33 bp, Homo sapien
agatgtagaaactgaggcacattgaagtaaaat

SEQ ID NO: 839287 - DNA, 33 bp, Homo sapien
catagcattgttataaggattaaacaagttata

SEQ ID NO: 839288 - DNA, 33 bp, Homo sapien
catagcattgttataatgattaaacaagttata

SEQ ID NO: 839289 - DNA, 33 bp, Homo sapien
tgtgagattcaactaaaggaaggccagaggaga

SEQ ID NO: 839290 - DNA, 33 bp, Homo sapien
tgtgagattcaactaacggaaggccagaggaga

SEQ ID NO: 839291 - DNA, 33 bp, Homo sapien
cctccctcccacaagaactgaaaggctgacggg

SEQ ID NO: 839292 - DNA, 33 bp, Homo sapien
cctccctcccacaagacctgaaaggctgacggg

SEQ ID NO: 839293 - DNA, 33 bp, Homo sapien
ccagattcaaaaagagaaaaaatagactctact

SEQ ID NO: 839294 - DNA, 33 bp, Homo sapien
ccagattcaaaaagaggaaaaatagactctact

SEQ ID NO: 839295 - DNA, 33 bp, Homo sapien
cttacaactcactaaactggggcagggatggct

SEQ ID NO: 839296 - DNA, 33 bp, Homo sapien
cttacaactcactaaattggggcagggatggct

SEQ ID NO: 839297 - DNA, 33 bp, Homo sapien
caggtcccttccatccagccaacacatatttac

SEQ ID NO: 839298 - DNA, 33 bp, Homo sapien
caggtcccttccatccggccaacacatatttac

SEQ ID NO: 839299 - DNA, 33 bp, Homo sapien
gaaagaggggaacaagaacagaagtatttttga

SEQ ID NO: 839300 - DNA, 33 bp, Homo sapien
gaaagaggggaacaaggacagaagtatttttga

SEQ ID NO: 839301 - DNA, 33 bp, Homo sapien
actcagagcaagtgacaacattattgcttagct

SEQ ID NO: 839302 - DNA, 33 bp, Homo sapien
actcagagcaagtgacgacattattgcttagct

SEQ ID NO: 839303 - DNA, 33 bp, Homo sapien
acaagattgaaaggaaacctacaagcctgagtg

SEQ ID NO: 839304 - DNA, 33 bp, Homo sapien
acaagattgaaaggaagcctacaagcctgagtg

SEQ ID NO: 839305 - DNA, 33 bp, Homo sapien
aggacttgagcattaacagtttatttggaagat

SEQ ID NO: 839306 - DNA, 33 bp, Homo sapien
aggacttgagcattaatagtttatttggaagat

SEQ ID NO: 839307 - DNA, 33 bp, Homo sapien
caagcactgacaacagaaatagaagaagtcttg

SEQ ID NO: 839308 - DNA, 33 bp, Homo sapien
caagcactgacaacaggaatagaagaagtcttg

SEQ ID NO: 839309 - DNA, 33 bp, Homo sapien
ggtcagatactgacaaggaacagttttctatgt

SEQ ID NO: 839310 - DNA, 33 bp, Homo sapien
ggtcagatactgacaatgaacagttttctatgt

SEQ ID NO: 839311 - DNA, 33 bp, Homo sapien
ttaataataggatacccagaaacaaatacctca

SEQ ID NO: 839312 - DNA, 33 bp, Homo sapien
ttaataataggataccgagaaacaaatacctca

SEQ ID NO: 839313 - DNA, 33 bp, Homo sapien
gattccatttatacaacgttccaaagtcaggcc

SEQ ID NO: 839314 - DNA, 33 bp, Homo sapien
gattccatttatacaatgttccaaagtcaggcc

SEQ ID NO: 839315 - DNA, 33 bp, Homo sapien
gcacgttctcctcataccgtttgtcgtcaatcc

SEQ ID NO: 839316 - DNA, 33 bp, Homo sapien
gcacgttctcctcatatcgtttgtcgtcaatcc

SEQ ID NO: 839317 - DNA, 33 bp, Homo sapien
caactggccctccgaacgctatcccactttcca

SEQ ID NO: 839318 - DNA, 33 bp, Homo sapien
caactggccctccgaatgctatcccactttcca

SEQ ID NO: 839319 - DNA, 33 bp, Homo sapien
tcatatatgcaacacacaggtggtgaacacttg

SEQ ID NO: 839320 - DNA, 33 bp, Homo sapien
tcatatatgcaacacataggtggtgaacacttg

SEQ ID NO: 839321 - DNA, 33 bp, Homo sapien
acgttgttattgcacacggaccttgttctgtaa

SEQ ID NO: 839322 - DNA, 33 bp, Homo sapien
acgttgttattgcacatggaccttgttctgtaa

SEQ ID NO: 839323 - DNA, 33 bp, Homo sapien
tctcttcaccgcgcacagtcaagcttccttgac

SEQ ID NO: 839324 - DNA, 33 bp, Homo sapien
tctcttcaccgcgcaccgtcaagcttccttgac

SEQ ID NO: 839325 - DNA, 33 bp, Homo sapien
gcagcgggaggagcaaagctgtctaggggaaat

SEQ ID NO: 839326 - DNA, 33 bp, Homo sapien
gcagcgggaggagcaaggctgtctaggggaaat

SEQ ID NO: 839327 - DNA, 33 bp, Homo sapien
aagacccgcaggaaggcaggctgagagtgggga

SEQ ID NO: 839328 - DNA, 33 bp, Homo sapien
aagacccgcaggaaggtaggctgagagtgggga

SEQ ID NO: 839329 - DNA, 33 bp, Homo sapien
tgtgtgcagtgtgggaagtttgtgtgtctgagt

SEQ ID NO: 839330 - DNA, 33 bp, Homo sapien
tgtgtgcagtgtgggacgtttgtgtgtctgagt

SEQ ID NO: 839331 - DNA, 33 bp, Homo sapien
aaatacacaataataagaagaagcatgcatgat

SEQ ID NO: 839332 - DNA, 33 bp, Homo sapien
aaatacacaataataataagaagcatgcatgat

SEQ ID NO: 839333 - DNA, 33 bp, Homo sapien
actgctaaaaagcaaccgagaagttcactgatg

SEQ ID NO: 839334 - DNA, 33 bp, Homo sapien
actgctaaaaagcaactgagaagttcactgatg

SEQ ID NO: 839335 - DNA, 33 bp, Homo sapien
tcagcattattatccccattttatggaggagga

SEQ ID NO: 839336 - DNA, 33 bp, Homo sapien
tcagcattattatcccgattttatggaggagga

SEQ ID NO: 839337 - DNA, 33 bp, Homo sapien
ccatgacagtaccgcacagtagaaattgtactc

SEQ ID NO: 839338 - DNA, 33 bp, Homo sapien
ccatgacagtaccgcatagtagaaattgtactc

SEQ ID NO: 839339 - DNA, 33 bp, Homo sapien
ttatggaggaggaaaccgttagttggagagtga

SEQ ID NO: 839340 - DNA, 33 bp, Homo sapien
ttatggaggaggaaactgttagttggagagtga

SEQ ID NO: 839341 - DNA, 33 bp, Homo sapien
cccctttctgccagcacgtggaagtgacatgga

SEQ ID NO: 839342 - DNA, 33 bp, Homo sapien
cccctttctgccagcatgtggaagtgacatgga

SEQ ID NO: 839343 - DNA, 33 bp, Homo sapien
tggttgcctcaatgaacacagaagcatgtggtt

SEQ ID NO: 839344 - DNA, 33 bp, Homo sapien
tggttgcctcaatgaatacagaagcatgtggtt

SEQ ID NO: 839345 - DNA, 33 bp, Homo sapien
gactctcagtaggaaaacagctaacgaggtgat

SEQ ID NO: 839346 - DNA, 33 bp, Homo sapien
gactctcagtaggaaagcagctaacgaggtgat

SEQ ID NO: 839347 - DNA, 33 bp, Homo sapien
cttgcctgtaggtcacaggaatgtcaagagcac

SEQ ID NO: 839348 - DNA, 33 bp, Homo sapien
cttgcctgtaggtcacgggaatgtcaagagcac

SEQ ID NO: 839349 - DNA, 33 bp, Homo sapien
tggcagcaggcacttccctgggtgctcttgaca

SEQ ID NO: 839350 - DNA, 33 bp, Homo sapien
tggcagcaggcacttctctgggtgctcttgaca

SEQ ID NO: 839351 - DNA, 33 bp, Homo sapien
ctgggagaagctcctacgtctgggaatggaaat

SEQ ID NO: 839352 - DNA, 33 bp, Homo sapien
ctgggagaagctcctatgtctgggaatggaaat

SEQ ID NO: 839353 - DNA, 33 bp, Homo sapien
tagatcttggcaaccaaagagacaggatgatct

SEQ ID NO: 839354 - DNA, 33 bp, Homo sapien
tagatcttggcaaccagagagacaggatgatct

SEQ ID NO: 839355 - DNA, 33 bp, Homo sapien
cacctcattccttatcaagaccctgtcctctga

SEQ ID NO: 839356 - DNA, 33 bp, Homo sapien
cacctcattccttatcgagaccctgtcctctga

SEQ ID NO: 839357 - DNA, 33 bp, Homo sapien
tcaagtttttcttgaacgtaatgactttcctct

SEQ ID NO: 839358 - DNA, 33 bp, Homo sapien
tcaagtttttcttgaatgtaatgactttcctct

SEQ ID NO: 839359 - DNA, 33 bp, Homo sapien
ccatttcaagataaacaaatccactgtaaggac

SEQ ID NO: 839360 - DNA, 33 bp, Homo sapien
ccatttcaagataaacgaatccactgtaaggac

SEQ ID NO: 839361 - DNA, 33 bp, Homo sapien
tttcaaagttctttccagccctgggaagaaagt

SEQ ID NO: 839362 - DNA, 33 bp, Homo sapien
tttcaaagttctttccggccctgggaagaaagt

SEQ ID NO: 839363 - DNA, 33 bp, Homo sapien
tttatgcaatatggttcaacaggaacagggtag

SEQ ID NO: 839364 - DNA, 33 bp, Homo sapien
tttatgcaatatggttgaacaggaacagggtag

SEQ ID NO: 839365 - DNA, 33 bp, Homo sapien
gcctgggcactttaaacagcatcaaagcaatcc

SEQ ID NO: 839366 - DNA, 33 bp, Homo sapien
gcctgggcactttaaagagcatcaaagcaatcc

SEQ ID NO: 839367 - DNA, 33 bp, Homo sapien
taactaacagatacgcaagcaagtctgcctagt

SEQ ID NO: 839368 - DNA, 33 bp, Homo sapien
taactaacagatacgcgagcaagtctgcctagt

SEQ ID NO: 839369 - DNA, 33 bp, Homo sapien
tcatttcctactgtcaacaggttctttctgact

SEQ ID NO: 839370 - DNA, 33 bp, Homo sapien
tcatttcctactgtcagcaggttctttctgact

SEQ ID NO: 839371 - DNA, 33 bp, Homo sapien
ccttgttcctatatgacaatgcagccaaacctt

SEQ ID NO: 839372 - DNA, 33 bp, Homo sapien
ccttgttcctatatgataatgcagccaaacctt

SEQ ID NO: 839373 - DNA, 33 bp, Homo sapien
aagccaagcggaaatgaacctctgtcattttgt

SEQ ID NO: 839374 - DNA, 33 bp, Homo sapien
aagccaagcggaaatggacctctgtcattttgt

SEQ ID NO: 839375 - DNA, 33 bp, Homo sapien
ttttaatgagaaatttcaaacattcagacaaat

SEQ ID NO: 839376 - DNA, 33 bp, Homo sapien
ttttaatgagaaattttaaacattcagacaaat

SEQ ID NO: 839377 - DNA, 33 bp, Homo sapien
aggctgccatgcaaagaagggttaaactggttc

SEQ ID NO: 839378 - DNA, 33 bp, Homo sapien
aggctgccatgcaaaggagggttaaactggttc

SEQ ID NO: 839379 - DNA, 33 bp, Homo sapien
cagcagaaggtgaactcagggagtcagttttta

SEQ ID NO: 839380 - DNA, 33 bp, Homo sapien
cagcagaaggtgaacttagggagtcagttttta

SEQ ID NO: 839381 - DNA, 33 bp, Homo sapien
ctgggagggacatgccactgttatcctcatttt

SEQ ID NO: 839382 - DNA, 33 bp, Homo sapien
ctgggagggacatgcctctgttatcctcatttt

SEQ ID NO: 839383 - DNA, 33 bp, Homo sapien
tgagcagattctgggacaccagccatataacca

SEQ ID NO: 839384 - DNA, 33 bp, Homo sapien
tgagcagattctgggagaccagccatataacca

SEQ ID NO: 839385 - DNA, 33 bp, Homo sapien
actttggcagtcaccaactgagacccacagatt

SEQ ID NO: 839386 - DNA, 33 bp, Homo sapien
actttggcagtcaccatctgagacccacagatt

SEQ ID NO: 839387 - DNA, 33 bp, Homo sapien
ctgcagttgcctcatcactctttgctgcccttc

SEQ ID NO: 839388 - DNA, 33 bp, Homo sapien
ctgcagttgcctcatcgctctttgctgcccttc

SEQ ID NO: 839389 - DNA, 33 bp, Homo sapien
atgtctgtatatctagaaatgctctttgcttta

SEQ ID NO: 839390 - DNA, 33 bp, Homo sapien
atgtctgtatatctagcaatgctctttgcttta

SEQ ID NO: 839391 - DNA, 33 bp, Homo sapien
cactgtccttgctcagaagcctagcataagctc

SEQ ID NO: 839392 - DNA, 33 bp, Homo sapien
cactgtccttgctcaggagcctagcataagctc

SEQ ID NO: 839393 - DNA, 33 bp, Homo sapien
aggaggccaacagctacgtcctgagcctcagct

SEQ ID NO: 839394 - DNA, 33 bp, Homo sapien
aggaggccaacagctatgtcctgagcctcagct

SEQ ID NO: 839395 - DNA, 33 bp, Homo sapien
catagaaaaaatgtgcagatacatggaaatagc

SEQ ID NO: 839396 - DNA, 33 bp, Homo sapien
catagaaaaaatgtgccgatacatggaaatagc

SEQ ID NO: 839397 - DNA, 33 bp, Homo sapien
ggatttgtgggaaacacggttggcagaaatagc

SEQ ID NO: 839398 - DNA, 33 bp, Homo sapien
ggatttgtgggaaacatggttggcagaaatagc

SEQ ID NO: 839399 - DNA, 33 bp, Homo sapien
ctctggccagtcagtagcttccctgggtacctg

SEQ ID NO: 839400 - DNA, 33 bp, Homo sapien
ctctggccagtcagtatcttccctgggtacctg

SEQ ID NO: 839401 - DNA, 33 bp, Homo sapien
tgaagcacaggcagccaagtcttctcccacctc

SEQ ID NO: 839402 - DNA, 33 bp, Homo sapien
tgaagcacaggcagccgagtcttctcccacctc

SEQ ID NO: 839403 - DNA, 33 bp, Homo sapien
tctgattggctaaacccgaattatatcccaatc

SEQ ID NO: 839404 - DNA, 33 bp, Homo sapien
tctgattggctaaacctgaattatatcccaatc

SEQ ID NO: 839405 - DNA, 33 bp, Homo sapien
ggtgaaagcagagtaaacagtccccctctcccc

SEQ ID NO: 839406 - DNA, 33 bp, Homo sapien
ggtgaaagcagagtaaccagtccccctctcccc

SEQ ID NO: 839407 - DNA, 33 bp, Homo sapien
gttggctgttgtccaccgtctgcagatccaggc

SEQ ID NO: 839408 - DNA, 33 bp, Homo sapien
gttggctgttgtccactgtctgcagatccaggc

SEQ ID NO: 839409 - DNA, 33 bp, Homo sapien
cgtctatgtccatttcgcctgtcctcccagcca

SEQ ID NO: 839410 - DNA, 33 bp, Homo sapien
cgtctatgtccatttctcctgtcctcccagcca

SEQ ID NO: 839411 - DNA, 33 bp, Homo sapien
taaaattggctgtattaaaatatgacgtagggt

SEQ ID NO: 839412 - DNA, 33 bp, Homo sapien
taaaattggctgtattgaaatatgacgtagggt

SEQ ID NO: 839413 - DNA, 33 bp, Homo sapien
tcatgaaacacccttacaaccagtcacagcaag

SEQ ID NO: 839414 - DNA, 33 bp, Homo sapien
tcatgaaacacccttataaccagtcacagcaag

SEQ ID NO: 839415 - DNA, 33 bp, Homo sapien
attttgactcacttcaaccctacaaggtacgta

SEQ ID NO: 839416 - DNA, 33 bp, Homo sapien
attttgactcacttcatccctacaaggtacgta

SEQ ID NO: 839417 - DNA, 33 bp, Homo sapien
ccagcttaagcagttacagacatcatagaatat

SEQ ID NO: 839418 - DNA, 33 bp, Homo sapien
ccagcttaagcagttatagacatcatagaatat

SEQ ID NO: 839419 - DNA, 33 bp, Homo sapien
aatgctggaaagaactgaattgtgatccgttac

SEQ ID NO: 839420 - DNA, 33 bp, Homo sapien
aatgctggaaagaacttaattgtgatccgttac

SEQ ID NO: 839421 - DNA, 33 bp, Homo sapien
ctcctgaagctagtcacctctggcacagatgtc

SEQ ID NO: 839422 - DNA, 33 bp, Homo sapien
ctcctgaagctagtcatctctggcacagatgtc

SEQ ID NO: 839423 - DNA, 33 bp, Homo sapien
tgtgcaccctgaccataagagatacagactgca

SEQ ID NO: 839424 - DNA, 33 bp, Homo sapien
tgtgcaccctgaccatgagagatacagactgca

SEQ ID NO: 839425 - DNA, 33 bp, Homo sapien
gctgcaacataatcttcaaaaaactcaggaaac

SEQ ID NO: 839426 - DNA, 33 bp, Homo sapien
gctgcaacataatctttaaaaaactcaggaaac

SEQ ID NO: 839427 - DNA, 33 bp, Homo sapien
tatttccagtgatgaacagtgaactgtctttcg

SEQ ID NO: 839428 - DNA, 33 bp, Homo sapien
tatttccagtgatgaatagtgaactgtctttcg

SEQ ID NO: 839429 - DNA, 33 bp, Homo sapien
aaggcacctttctaccccatcctgtgttatgtc

SEQ ID NO: 839430 - DNA, 33 bp, Homo sapien
aaggcacctttctaccgcatcctgtgttatgtc

SEQ ID NO: 839431 - DNA, 33 bp, Homo sapien
aaattcttcgattccaatgaaaatatccctgat

SEQ ID NO: 839432 - DNA, 33 bp, Homo sapien
aaattcttcgattccagtgaaaatatccctgat

SEQ ID NO: 839433 - DNA, 33 bp, Homo sapien
gaacagggttaaggaagtatatagcctatgact

SEQ ID NO: 839434 - DNA, 33 bp, Homo sapien
gaacagggttaaggaattatatagcctatgact

SEQ ID NO: 839435 - DNA, 33 bp, Homo sapien
ttcccagaacttgtaccgctaaacatcccaaag

SEQ ID NO: 839436 - DNA, 33 bp, Homo sapien
ttcccagaacttgtactgctaaacatcccaaag

SEQ ID NO: 839437 - DNA, 33 bp, Homo sapien
ctcaagaccacctaagactgctagaatgttcag

SEQ ID NO: 839438 - DNA, 33 bp, Homo sapien
ctcaagaccacctaaggctgctagaatgttcag

SEQ ID NO: 839439 - DNA, 33 bp, Homo sapien
gcattcttcaatcctgaaacaccctcgcaggta

SEQ ID NO: 839440 - DNA, 33 bp, Homo sapien
gcattcttcaatcctggaacaccctcgcaggta

SEQ ID NO: 839441 - DNA, 33 bp, Homo sapien
gagtgaggttttgaaccctttactgcttctgga

SEQ ID NO: 839442 - DNA, 33 bp, Homo sapien
gagtgaggttttgaacgctttactgcttctgga

SEQ ID NO: 839443 - DNA, 33 bp, Homo sapien
cttgtctcctgaagaccctctccaattcatcac

SEQ ID NO: 839444 - DNA, 33 bp, Homo sapien
cttgtctcctgaagactctctccaattcatcac

SEQ ID NO: 839445 - DNA, 33 bp, Homo sapien
ctctcttagataactcactttggaagagcaagc

SEQ ID NO: 839446 - DNA, 33 bp, Homo sapien
ctctcttagataactcgctttggaagagcaagc

SEQ ID NO: 839447 - DNA, 33 bp, Homo sapien
tgtgcaactcctgagactaggtcagaaaaggca

SEQ ID NO: 839448 - DNA, 33 bp, Homo sapien
tgtgcaactcctgagattaggtcagaaaaggca

SEQ ID NO: 839449 - DNA, 33 bp, Homo sapien
tacaggtgctagaacccgatcaatctggggtat

SEQ ID NO: 839450 - DNA, 33 bp, Homo sapien
tacaggtgctagaacctgatcaatctggggtat

SEQ ID NO: 839451 - DNA, 33 bp, Homo sapien
gaggaatatcaagggcactccaatccccctcac

SEQ ID NO: 839452 - DNA, 33 bp, Homo sapien
gaggaatatcaagggcgctccaatccccctcac

SEQ ID NO: 839453 - DNA, 33 bp, Homo sapien
aatataatgtgggtgacatgagggagagacctc

SEQ ID NO: 839454 - DNA, 33 bp, Homo sapien
aatataatgtgggtgatatgagggagagacctc

SEQ ID NO: 839455 - DNA, 33 bp, Homo sapien
aggtcagtgagagcctcaagctaacaggtccat

SEQ ID NO: 839456 - DNA, 33 bp, Homo sapien
aggtcagtgagagccttaagctaacaggtccat

SEQ ID NO: 839457 - DNA, 33 bp, Homo sapien
taaatactagtaaaaaatgttgtaagaaatgtg

SEQ ID NO: 839458 - DNA, 33 bp, Homo sapien
taaatactagtaaaaattgttgtaagaaatgtg

SEQ ID NO: 839459 - DNA, 33 bp, Homo sapien
tctgcttctttgcttgcaaggcttctcagaatg

SEQ ID NO: 839460 - DNA, 33 bp, Homo sapien
tctgcttctttgcttggaaggcttctcagaatg

SEQ ID NO: 839461 - DNA, 33 bp, Homo sapien
ttggccaggaagaaaacggctctaaggccctct

SEQ ID NO: 839462 - DNA, 33 bp, Homo sapien
ttggccaggaagaaaatggctctaaggccctct

SEQ ID NO: 839463 - DNA, 33 bp, Homo sapien
ccttaacaccaaagctcagcctgccagacttcc

SEQ ID NO: 839464 - DNA, 33 bp, Homo sapien
ccttaacaccaaagcttagcctgccagacttcc

SEQ ID NO: 839465 - DNA, 33 bp, Homo sapien
gaaggtaaaacttaaccccaactcagttcatcc

SEQ ID NO: 839466 - DNA, 33 bp, Homo sapien
gaaggtaaaacttaactccaactcagttcatcc

SEQ ID NO: 839467 - DNA, 33 bp, Homo sapien
cacaagcatgtttctacacaattagtggtttga

SEQ ID NO: 839468 - DNA, 33 bp, Homo sapien
cacaagcatgtttctatacaattagtggtttga

SEQ ID NO: 839469 - DNA, 33 bp, Homo sapien
agctctttttggccaacgctagagctcccaaga

SEQ ID NO: 839470 - DNA, 33 bp, Homo sapien
agctctttttggccaatgctagagctcccaaga

SEQ ID NO: 839471 - DNA, 33 bp, Homo sapien
gcccttatccaaaggacgtgttaggctaattgt

SEQ ID NO: 839472 - DNA, 33 bp, Homo sapien
gcccttatccaaaggaggtgttaggctaattgt

SEQ ID NO: 839473 - DNA, 33 bp, Homo sapien
tccagggactccttccactaagcaggcgctgag

SEQ ID NO: 839474 - DNA, 33 bp, Homo sapien
tccagggactccttccgctaagcaggcgctgag

SEQ ID NO: 839475 - DNA, 33 bp, Homo sapien
acttcatgtcaaccataactgccaatggccctg

SEQ ID NO: 839476 - DNA, 33 bp, Homo sapien
acttcatgtcaaccatcactgccaatggccctg

SEQ ID NO: 839477 - DNA, 33 bp, Homo sapien
cccctgggttcagtgccaccctctgctctgccc

SEQ ID NO: 839478 - DNA, 33 bp, Homo sapien
cccctgggttcagtgctaccctctgctctgccc

SEQ ID NO: 839479 - DNA, 33 bp, Homo sapien
ccgcttgggtctttcacaaccattatctctaac

SEQ ID NO: 839480 - DNA, 33 bp, Homo sapien
ccgcttgggtctttcataaccattatctctaac

SEQ ID NO: 839481 - DNA, 33 bp, Homo sapien
gctaacagtctgatggaataaaggcactaatca

SEQ ID NO: 839482 - DNA, 33 bp, Homo sapien
gctaacagtctgatgggataaaggcactaatca

SEQ ID NO: 839483 - DNA, 33 bp, Homo sapien
ccttgcccttcacatcactcctggaaataggga

SEQ ID NO: 839484 - DNA, 33 bp, Homo sapien
ccttgcccttcacatcgctcctggaaataggga

SEQ ID NO: 839485 - DNA, 33 bp, Homo sapien
ggctcatagacagtacaacagaggcaaaggagg

SEQ ID NO: 839486 - DNA, 33 bp, Homo sapien
ggctcatagacagtacgacagaggcaaaggagg

SEQ ID NO: 839487 - DNA, 33 bp, Homo sapien
atgtctccttgtgtcacgtaggccctggcccag

SEQ ID NO: 839488 - DNA, 33 bp, Homo sapien
atgtctccttgtgtcatgtaggccctggcccag

SEQ ID NO: 839489 - DNA, 33 bp, Homo sapien
cctcccctcctcaacagtctttgtctttctttc

SEQ ID NO: 839490 - DNA, 33 bp, Homo sapien
cctcccctcctcaacattctttgtctttctttc

SEQ ID NO: 839491 - DNA, 33 bp, Homo sapien
atccccaggcaaatgaaaagaccaaatgttagg

SEQ ID NO: 839492 - DNA, 33 bp, Homo sapien
atccccaggcaaatgagaagaccaaatgttagg

SEQ ID NO: 839493 - DNA, 33 bp, Homo sapien
tctgcctgttattgagaatgacagtgagtgagc

SEQ ID NO: 839494 - DNA, 33 bp, Homo sapien
tctgcctgttattgaggatgacagtgagtgagc

SEQ ID NO: 839495 - DNA, 33 bp, Homo sapien
tgtcaggtctgaagacaatgatgttacccttgc

SEQ ID NO: 839496 - DNA, 33 bp, Homo sapien
tgtcaggtctgaagacgatgatgttacccttgc

SEQ ID NO: 839497 - DNA, 33 bp, Homo sapien
ctgtgaatttcatccaccctcaacgttcctcca

SEQ ID NO: 839498 - DNA, 33 bp, Homo sapien
ctgtgaatttcatccatcctcaacgttcctcca

SEQ ID NO: 839499 - DNA, 33 bp, Homo sapien
ggtcctggttcaaatccgagtgaagatgcagga

SEQ ID NO: 839500 - DNA, 33 bp, Homo sapien
ggtcctggttcaaatctgagtgaagatgcagga

SEQ ID NO: 839501 - DNA, 33 bp, Homo sapien
gtgaaagcttaggctccgaatctaaagagactg

SEQ ID NO: 839502 - DNA, 33 bp, Homo sapien
gtgaaagcttaggctctgaatctaaagagactg

SEQ ID NO: 839503 - DNA, 33 bp, Homo sapien
cactgtgctaggtacaagaatttaaaggtgagt

SEQ ID NO: 839504 - DNA, 33 bp, Homo sapien
cactgtgctaggtacaggaatttaaaggtgagt

SEQ ID NO: 839505 - DNA, 33 bp, Homo sapien
ggctgcatatcctgagaatttccccttattgaa

SEQ ID NO: 839506 - DNA, 33 bp, Homo sapien
ggctgcatatcctgagcatttccccttattgaa

SEQ ID NO: 839507 - DNA, 33 bp, Homo sapien
ttctacaggtcaggaaactgagtataacctaga

SEQ ID NO: 839508 - DNA, 33 bp, Homo sapien
ttctacaggtcaggaatctgagtataacctaga

SEQ ID NO: 839509 - DNA, 33 bp, Homo sapien
agaaaaatgtgtcataaatggtcagttggtact

SEQ ID NO: 839510 - DNA, 33 bp, Homo sapien
agaaaaatgtgtcatagatggtcagttggtact

SEQ ID NO: 839511 - DNA, 33 bp, Homo sapien
gtgcaggactcctcacagatttccatatcaatg

SEQ ID NO: 839512 - DNA, 33 bp, Homo sapien
gtgcaggactcctcacggatttccatatcaatg

SEQ ID NO: 839513 - DNA, 33 bp, Homo sapien
gttctgggaactattaaagatcttctgaaacag

SEQ ID NO: 839514 - DNA, 33 bp, Homo sapien
gttctgggaactattagagatcttctgaaacag

SEQ ID NO: 839515 - DNA, 33 bp, Homo sapien
aaacaatataaccaataaagtcaatcttctgta

SEQ ID NO: 839516 - DNA, 33 bp, Homo sapien
aaacaatataaccaatgaagtcaatcttctgta

SEQ ID NO: 839517 - DNA, 33 bp, Homo sapien
tcaaactagtgactcaaggcatttttacagcca

SEQ ID NO: 839518 - DNA, 33 bp, Homo sapien
tcaaactagtgactcacggcatttttacagcca

SEQ ID NO: 839519 - DNA, 33 bp, Homo sapien
aacaaaactaaccaaactgagtgcctcgtatta

SEQ ID NO: 839520 - DNA, 33 bp, Homo sapien
aacaaaactaaccaaattgagtgcctcgtatta

SEQ ID NO: 839521 - DNA, 33 bp, Homo sapien
tagtctggttgcctaacgatagatgcttcttat

SEQ ID NO: 839522 - DNA, 33 bp, Homo sapien
tagtctggttgcctaatgatagatgcttcttat

SEQ ID NO: 839523 - DNA, 33 bp, Homo sapien
tctaatttctatttcactcccactctactgccc

SEQ ID NO: 839524 - DNA, 33 bp, Homo sapien
tctaatttctatttcattcccactctactgccc

SEQ ID NO: 839525 - DNA, 33 bp, Homo sapien
aaggtcaaacagctaacaggtggcacacacggg

SEQ ID NO: 839526 - DNA, 33 bp, Homo sapien
aaggtcaaacagctaataggtggcacacacggg

SEQ ID NO: 839527 - DNA, 33 bp, Homo sapien
gtattagtattccccaactcgcaagaaagggaa

SEQ ID NO: 839528 - DNA, 33 bp, Homo sapien
gtattagtattccccatctcgcaagaaagggaa

SEQ ID NO: 839529 - DNA, 33 bp, Homo sapien
cttggtagttttcctcagaagtatcataaaaac

SEQ ID NO: 839530 - DNA, 33 bp, Homo sapien
cttggtagttttcctcggaagtatcataaaaac

SEQ ID NO: 839531 - DNA, 33 bp, Homo sapien
actaccaagctcttgacgcagatttcaggaaat

SEQ ID NO: 839532 - DNA, 33 bp, Homo sapien
actaccaagctcttgatgcagatttcaggaaat

SEQ ID NO: 839533 - DNA, 33 bp, Homo sapien
atggtcagttctgcctaaagagatcagcaagac

SEQ ID NO: 839534 - DNA, 33 bp, Homo sapien
atggtcagttctgcctgaagagatcagcaagac

SEQ ID NO: 839535 - DNA, 33 bp, Homo sapien
agcctgaagtgctttcgctactaaataaccagt

SEQ ID NO: 839536 - DNA, 33 bp, Homo sapien
agcctgaagtgctttctctactaaataaccagt

SEQ ID NO: 839537 - DNA, 33 bp, Homo sapien
aaagtggattttgtcacgttagctgtaaaaatg

SEQ ID NO: 839538 - DNA, 33 bp, Homo sapien
aaagtggattttgtcatgttagctgtaaaaatg

SEQ ID NO: 839539 - DNA, 33 bp, Homo sapien
tgtccatatttgcttggaaccttagcgcaatat

SEQ ID NO: 839540 - DNA, 33 bp, Homo sapien
tgtccatatttgcttgtaaccttagcgcaatat

SEQ ID NO: 839541 - DNA, 33 bp, Homo sapien
aattgttggcattaaaggaaagctaacaacttt

SEQ ID NO: 839542 - DNA, 33 bp, Homo sapien
aattgttggcattaaatgaaagctaacaacttt

SEQ ID NO: 839543 - DNA, 33 bp, Homo sapien
ttaatatcatgagtgaccgaaggaagggccagt

SEQ ID NO: 839544 - DNA, 33 bp, Homo sapien
ttaatatcatgagtgatcgaaggaagggccagt

SEQ ID NO: 839545 - DNA, 33 bp, Homo sapien
gaagggagataccaccaccaagaaggtcccgat

SEQ ID NO: 839546 - DNA, 33 bp, Homo sapien
gaagggagataccaccgccaagaaggtcccgat

SEQ ID NO: 839547 - DNA, 33 bp, Homo sapien
aattcgccaggtcctcaattcattgggtaaaat

SEQ ID NO: 839548 - DNA, 33 bp, Homo sapien
aattcgccaggtcctcgattcattgggtaaaat

SEQ ID NO: 839549 - DNA, 33 bp, Homo sapien
gcacaactgtacatgacggtcctgccagcagag

SEQ ID NO: 839550 - DNA, 33 bp, Homo sapien
gcacaactgtacatgatggtcctgccagcagag

SEQ ID NO: 839551 - DNA, 33 bp, Homo sapien
gcacaggggcataaaacttccccattgactaga

SEQ ID NO: 839552 - DNA, 33 bp, Homo sapien
gcacaggggcataaaagttccccattgactaga

SEQ ID NO: 839553 - DNA, 33 bp, Homo sapien
ttaagagtaaggctccaacttctgtttccaaga

SEQ ID NO: 839554 - DNA, 33 bp, Homo sapien
ttaagagtaaggctccgacttctgtttccaaga

SEQ ID NO: 839555 - DNA, 33 bp, Homo sapien
tctcaggccgtctgccaaattagataccaataa

SEQ ID NO: 839556 - DNA, 33 bp, Homo sapien
tctcaggccgtctgccgaattagataccaataa

SEQ ID NO: 839557 - DNA, 33 bp, Homo sapien
agcgaatcaagttgacagagtcttgcacaggcg

SEQ ID NO: 839558 - DNA, 33 bp, Homo sapien
agcgaatcaagttgacggagtcttgcacaggcg

SEQ ID NO: 839559 - DNA, 33 bp, Homo sapien
tccttccttttggttacagaggactccttatct

SEQ ID NO: 839560 - DNA, 33 bp, Homo sapien
tccttccttttggttatagaggactccttatct

SEQ ID NO: 839561 - DNA, 33 bp, Homo sapien
acatatagttcacgtacgaatggaaaagtctag

SEQ ID NO: 839562 - DNA, 33 bp, Homo sapien
acatatagttcacgtatgaatggaaaagtctag

SEQ ID NO: 839563 - DNA, 33 bp, Homo sapien
gcggaaaaacgagacaaaatctagatgtcaacc

SEQ ID NO: 839564 - DNA, 33 bp, Homo sapien
gcggaaaaacgagacacaatctagatgtcaacc

SEQ ID NO: 839565 - DNA, 33 bp, Homo sapien
attgtttccagagagaaaaagtgccttgtttaa

SEQ ID NO: 839566 - DNA, 33 bp, Homo sapien
attgtttccagagagacaaagtgccttgtttaa

SEQ ID NO: 839567 - DNA, 33 bp, Homo sapien
tgaagtccaactcagaaatgggtcttgaaccat

SEQ ID NO: 839568 - DNA, 33 bp, Homo sapien
tgaagtccaactcagagatgggtcttgaaccat

SEQ ID NO: 839569 - DNA, 33 bp, Homo sapien
ccaattcctctgaccagtgagaccaaaggaaag

SEQ ID NO: 839570 - DNA, 33 bp, Homo sapien
ccaattcctctgaccattgagaccaaaggaaag

SEQ ID NO: 839571 - DNA, 33 bp, Homo sapien
tgaaatcattcactcacggtcactccattttct

SEQ ID NO: 839572 - DNA, 33 bp, Homo sapien
tgaaatcattcactcatggtcactccattttct

SEQ ID NO: 839573 - DNA, 33 bp, Homo sapien
gcccaagcccacaggaacaacttactcgtcatc

SEQ ID NO: 839574 - DNA, 33 bp, Homo sapien
gcccaagcccacaggaccaacttactcgtcatc

SEQ ID NO: 839575 - DNA, 33 bp, Homo sapien
gccagaaattccataaacggaaaagaattgcat

SEQ ID NO: 839576 - DNA, 33 bp, Homo sapien
gccagaaattccataagcggaaaagaattgcat

SEQ ID NO: 839577 - DNA, 33 bp, Homo sapien
cccagcaaaatttcaccgtaacctccactaata

SEQ ID NO: 839578 - DNA, 33 bp, Homo sapien
cccagcaaaatttcactgtaacctccactaata

SEQ ID NO: 839579 - DNA, 33 bp, Homo sapien
ctctgctagagccctcactacatggctggccat

SEQ ID NO: 839580 - DNA, 33 bp, Homo sapien
ctctgctagagccctcgctacatggctggccat

SEQ ID NO: 839581 - DNA, 33 bp, Homo sapien
gctcatagagagtatgacactgcctgtggccac

SEQ ID NO: 839582 - DNA, 33 bp, Homo sapien
gctcatagagagtatggcactgcctgtggccac

SEQ ID NO: 839583 - DNA, 33 bp, Homo sapien
gccatggtgaaggtaaagctgctaatgccaccc

SEQ ID NO: 839584 - DNA, 33 bp, Homo sapien
gccatggtgaaggtaaggctgctaatgccaccc

SEQ ID NO: 839585 - DNA, 33 bp, Homo sapien
cactcaacttggaccaatgaaaatgccatctca

SEQ ID NO: 839586 - DNA, 33 bp, Homo sapien
cactcaacttggaccagtgaaaatgccatctca

SEQ ID NO: 839587 - DNA, 33 bp, Homo sapien
gcagaagtgcagccgactcatttccattctgtc

SEQ ID NO: 839588 - DNA, 33 bp, Homo sapien
gcagaagtgcagccgattcatttccattctgtc

SEQ ID NO: 839589 - DNA, 33 bp, Homo sapien
ccatttacctgatacacagactctgcctttaat

SEQ ID NO: 839590 - DNA, 33 bp, Homo sapien
ccatttacctgatacatagactctgcctttaat

SEQ ID NO: 839591 - DNA, 33 bp, Homo sapien
ttccaggttctcatcacgttgggtcagccagta

SEQ ID NO: 839592 - DNA, 33 bp, Homo sapien
ttccaggttctcatcatgttgggtcagccagta

SEQ ID NO: 839593 - DNA, 33 bp, Homo sapien
tgatgagaacctggaagaagtggttttgaggat

SEQ ID NO: 839594 - DNA, 33 bp, Homo sapien
tgatgagaacctggaataagtggttttgaggat

SEQ ID NO: 839595 - DNA, 33 bp, Homo sapien
gcagataaatatcaggacactgacttgaaaagc

SEQ ID NO: 839596 - DNA, 33 bp, Homo sapien
gcagataaatatcagggcactgacttgaaaagc

SEQ ID NO: 839597 - DNA, 33 bp, Homo sapien
acatgtaaagtgtctgcaacagcgtctggccca

SEQ ID NO: 839598 - DNA, 33 bp, Homo sapien
acatgtaaagtgtctggaacagcgtctggccca

SEQ ID NO: 839599 - DNA, 33 bp, Homo sapien
gttttgtgaggagtaaatggatgaatacatgta

SEQ ID NO: 839600 - DNA, 33 bp, Homo sapien
gttttgtgaggagtaagtggatgaatacatgta

SEQ ID NO: 839601 - DNA, 33 bp, Homo sapien
tgggtcttcaaaacaacgagagctggacaggaa

SEQ ID NO: 839602 - DNA, 33 bp, Homo sapien
tgggtcttcaaaacaatgagagctggacaggaa

SEQ ID NO: 839603 - DNA, 33 bp, Homo sapien
agccctctttctgtgacaagccttggaaaaact

SEQ ID NO: 839604 - DNA, 33 bp, Homo sapien
agccctctttctgtgataagccttggaaaaact

SEQ ID NO: 839605 - DNA, 33 bp, Homo sapien
attataccaattctgccaagctcttaagattgt

SEQ ID NO: 839606 - DNA, 33 bp, Homo sapien
attataccaattctgctaagctcttaagattgt

SEQ ID NO: 839607 - DNA, 33 bp, Homo sapien
tatatggaagaaatggacaaaacagaactgcag

SEQ ID NO: 839608 - DNA, 33 bp, Homo sapien
tatatggaagaaatgggcaaaacagaactgcag

SEQ ID NO: 839609 - DNA, 33 bp, Homo sapien
tatcagtccttactctcagaccttagggttatc

SEQ ID NO: 839610 - DNA, 33 bp, Homo sapien
tatcagtccttactctgagaccttagggttatc

SEQ ID NO: 839611 - DNA, 33 bp, Homo sapien
ttggctgactccatctaactttatgtgttcatt

SEQ ID NO: 839612 - DNA, 33 bp, Homo sapien
ttggctgactccatctgactttatgtgttcatt

SEQ ID NO: 839613 - DNA, 33 bp, Homo sapien
tcaaacatacagcaacaagagaaaaaaaataaa

SEQ ID NO: 839614 - DNA, 33 bp, Homo sapien
tcaaacatacagcaacgagagaaaaaaaataaa

SEQ ID NO: 839615 - DNA, 33 bp, Homo sapien
tgatctttgcctagtcacttgcccactctgtgc

SEQ ID NO: 839616 - DNA, 33 bp, Homo sapien
tgatctttgcctagtctcttgcccactctgtgc

SEQ ID NO: 839617 - DNA, 33 bp, Homo sapien
attgagccaagtgccacgagaatacaaatggta

SEQ ID NO: 839618 - DNA, 33 bp, Homo sapien
attgagccaagtgccatgagaatacaaatggta

SEQ ID NO: 839619 - DNA, 33 bp, Homo sapien
cagatagaaaagacaacgggtgagtttcaataa

SEQ ID NO: 839620 - DNA, 33 bp, Homo sapien
cagatagaaaagacaatgggtgagtttcaataa

SEQ ID NO: 839621 - DNA, 33 bp, Homo sapien
atgggtggcagatgaacgtgaaaagataccagc

SEQ ID NO: 839622 - DNA, 33 bp, Homo sapien
atgggtggcagatgaaggtgaaaagataccagc

SEQ ID NO: 839623 - DNA, 33 bp, Homo sapien
ccacggtgagggatccagcatcttgacctaaaa

SEQ ID NO: 839624 - DNA, 33 bp, Homo sapien
ccacggtgagggatccggcatcttgacctaaaa

SEQ ID NO: 839625 - DNA, 33 bp, Homo sapien
cagcccttcctattatcactcaggccaatattc

SEQ ID NO: 839626 - DNA, 33 bp, Homo sapien
cagcccttcctattattactcaggccaatattc

SEQ ID NO: 839627 - DNA, 33 bp, Homo sapien
cactgctcattgcctacgctttatccagtccgt

SEQ ID NO: 839628 - DNA, 33 bp, Homo sapien
cactgctcattgcctatgctttatccagtccgt

SEQ ID NO: 839629 - DNA, 33 bp, Homo sapien
gcagggcctatgtataagatggaatttcactcc

SEQ ID NO: 839630 - DNA, 33 bp, Homo sapien
gcagggcctatgtataggatggaatttcactcc

SEQ ID NO: 839631 - DNA, 33 bp, Homo sapien
tgccacctggcaacaaatatagatttatagttc

SEQ ID NO: 839632 - DNA, 33 bp, Homo sapien
tgccacctggcaacaagtatagatttatagttc

SEQ ID NO: 839633 - DNA, 33 bp, Homo sapien
tttgggagaagtataacacctggcttcgttgtt

SEQ ID NO: 839634 - DNA, 33 bp, Homo sapien
tttgggagaagtataatacctggcttcgttgtt

SEQ ID NO: 839635 - DNA, 33 bp, Homo sapien
tgacacaagtgcacgaatatctgtctgctggtg

SEQ ID NO: 839636 - DNA, 33 bp, Homo sapien
tgacacaagtgcacgagtatctgtctgctggtg

SEQ ID NO: 839637 - DNA, 33 bp, Homo sapien
ttcccagttttgctccaagagttagccttggct

SEQ ID NO: 839638 - DNA, 33 bp, Homo sapien
ttcccagttttgctccgagagttagccttggct

SEQ ID NO: 839639 - DNA, 33 bp, Homo sapien
gggagcacatatcgaaccccacctgagcttgtg

SEQ ID NO: 839640 - DNA, 33 bp, Homo sapien
gggagcacatatcgaagcccacctgagcttgtg

SEQ ID NO: 839641 - DNA, 33 bp, Homo sapien
gaggaaagatcagaaccgctcatcaggtacagt

SEQ ID NO: 839642 - DNA, 33 bp, Homo sapien
gaggaaagatcagaactgctcatcaggtacagt

SEQ ID NO: 839643 - DNA, 33 bp, Homo sapien
catttcacttaacagaatatctttgtgcgcata

SEQ ID NO: 839644 - DNA, 33 bp, Homo sapien
catttcacttaacagagtatctttgtgcgcata

SEQ ID NO: 839645 - DNA, 33 bp, Homo sapien
aattgcctgttgtcttcaaatttctgcagtgct

SEQ ID NO: 839646 - DNA, 33 bp, Homo sapien
aattgcctgttgtctttaaatttctgcagtgct

SEQ ID NO: 839647 - DNA, 33 bp, Homo sapien
gtcaactgctcaaccacatcatggccttgattt

SEQ ID NO: 839648 - DNA, 33 bp, Homo sapien
gtcaactgctcaaccatatcatggccttgattt

SEQ ID NO: 839649 - DNA, 33 bp, Homo sapien
ctccaaagacattccactggaaggctccatcca

SEQ ID NO: 839650 - DNA, 33 bp, Homo sapien
ctccaaagacattccattggaaggctccatcca

SEQ ID NO: 839651 - DNA, 33 bp, Homo sapien
gaagtgggaaggctgaacacattgatgtaaatc

SEQ ID NO: 839652 - DNA, 33 bp, Homo sapien
gaagtgggaaggctgagcacattgatgtaaatc

SEQ ID NO: 839653 - DNA, 33 bp, Homo sapien
gaatataacacacactaagtagatgtcatgagt

SEQ ID NO: 839654 - DNA, 33 bp, Homo sapien
gaatataacacacactgagtagatgtcatgagt

SEQ ID NO: 839655 - DNA, 33 bp, Homo sapien
agtgtcaggaggggcacgataggagtcaaaaga

SEQ ID NO: 839656 - DNA, 33 bp, Homo sapien
agtgtcaggaggggcatgataggagtcaaaaga

SEQ ID NO: 839657 - DNA, 33 bp, Homo sapien
gaaagtgtacaagccccagtccgaagagctgag

SEQ ID NO: 839658 - DNA, 33 bp, Homo sapien
gaaagtgtacaagccctagtccgaagagctgag

SEQ ID NO: 839659 - DNA, 33 bp, Homo sapien
agcccaactcatttaccaaggaggctcagtgtt

SEQ ID NO: 839660 - DNA, 33 bp, Homo sapien
agcccaactcatttactaaggaggctcagtgtt

SEQ ID NO: 839661 - DNA, 33 bp, Homo sapien
ctgttttattctaagcaagtatgtattcctaat

SEQ ID NO: 839662 - DNA, 33 bp, Homo sapien
ctgttttattctaagcgagtatgtattcctaat

SEQ ID NO: 839663 - DNA, 33 bp, Homo sapien
actatggaagtgctggaacaaaataaaccaaat

SEQ ID NO: 839664 - DNA, 33 bp, Homo sapien
actatggaagtgctgggacaaaataaaccaaat

SEQ ID NO: 839665 - DNA, 33 bp, Homo sapien
taaatgttccaatccaggttttttcgatcactg

SEQ ID NO: 839666 - DNA, 33 bp, Homo sapien
taaatgttccaatccatgttttttcgatcactg

SEQ ID NO: 839667 - DNA, 33 bp, Homo sapien
ggaagaaataaggaccaagttggagaataaaga

SEQ ID NO: 839668 - DNA, 33 bp, Homo sapien
ggaagaaataaggacctagttggagaataaaga

SEQ ID NO: 839669 - DNA, 33 bp, Homo sapien
agtaagtgcttacaaaatgtttattgaattgga

SEQ ID NO: 839670 - DNA, 33 bp, Homo sapien
agtaagtgcttacaaactgtttattgaattgga

SEQ ID NO: 839671 - DNA, 33 bp, Homo sapien
tatattttcctaaccaactgatagagccaggtg

SEQ ID NO: 839672 - DNA, 33 bp, Homo sapien
tatattttcctaaccatctgatagagccaggtg

SEQ ID NO: 839673 - DNA, 33 bp, Homo sapien
gttttatttcctggcccaatagaggctgtgctc

SEQ ID NO: 839674 - DNA, 33 bp, Homo sapien
gttttatttcctggcctaatagaggctgtgctc

SEQ ID NO: 839675 - DNA, 33 bp, Homo sapien
gtggagatacacaaacagctttctctggagagg

SEQ ID NO: 839676 - DNA, 33 bp, Homo sapien
gtggagatacacaaacggctttctctggagagg

SEQ ID NO: 839677 - DNA, 33 bp, Homo sapien
caggcgccatctgggaacgattagaggctgact

SEQ ID NO: 839678 - DNA, 33 bp, Homo sapien
caggcgccatctgggagcgattagaggctgact

SEQ ID NO: 839679 - DNA, 33 bp, Homo sapien
gagaaggaacccgtgacaaaaagagcttccgag

SEQ ID NO: 839680 - DNA, 33 bp, Homo sapien
gagaaggaacccgtgataaaaagagcttccgag

SEQ ID NO: 839681 - DNA, 33 bp, Homo sapien
tctttgacacttgttaccataagaaggcacatt

SEQ ID NO: 839682 - DNA, 33 bp, Homo sapien
tctttgacacttgttagcataagaaggcacatt

SEQ ID NO: 839683 - DNA, 33 bp, Homo sapien
taagaatccacagttcactggatctcacatcca

SEQ ID NO: 839684 - DNA, 33 bp, Homo sapien
taagaatccacagttcgctggatctcacatcca

SEQ ID NO: 839685 - DNA, 33 bp, Homo sapien
tgacttcatattcttgaatgaaggggctgtgtc

SEQ ID NO: 839686 - DNA, 33 bp, Homo sapien
tgacttcatattcttggatgaaggggctgtgtc

SEQ ID NO: 839687 - DNA, 33 bp, Homo sapien
aaagcaagctcaaactcagcgagcaccgcctat

SEQ ID NO: 839688 - DNA, 33 bp, Homo sapien
aaagcaagctcaaacttagcgagcaccgcctat

SEQ ID NO: 839689 - DNA, 33 bp, Homo sapien
gcacatagcagatgcccggaaagttgcttgtgt

SEQ ID NO: 839690 - DNA, 33 bp, Homo sapien
gcacatagcagatgcctggaaagttgcttgtgt

SEQ ID NO: 839691 - DNA, 33 bp, Homo sapien
ctgccggactgttccacgggatcctcaaattta

SEQ ID NO: 839692 - DNA, 33 bp, Homo sapien
ctgccggactgttccatgggatcctcaaattta

SEQ ID NO: 839693 - DNA, 33 bp, Homo sapien
cagccctcctgagctacggttcccgtgtctaaa

SEQ ID NO: 839694 - DNA, 33 bp, Homo sapien
cagccctcctgagctatggttcccgtgtctaaa

SEQ ID NO: 839695 - DNA, 33 bp, Homo sapien
gttcctctcaggtctaaaactctgctttctttt

SEQ ID NO: 839696 - DNA, 33 bp, Homo sapien
gttcctctcaggtctacaactctgctttctttt

SEQ ID NO: 839697 - DNA, 33 bp, Homo sapien
gccatgagtaatgaagacctttgtttcttacct

SEQ ID NO: 839698 - DNA, 33 bp, Homo sapien
gccatgagtaatgaagtcctttgtttcttacct

SEQ ID NO: 839699 - DNA, 33 bp, Homo sapien
gctcaactcagaagaacgaagctccatcgggag

SEQ ID NO: 839700 - DNA, 33 bp, Homo sapien
gctcaactcagaagaatgaagctccatcgggag

SEQ ID NO: 839701 - DNA, 33 bp, Homo sapien
ctgccctgtgacagaacgtcctaccttggatga

SEQ ID NO: 839702 - DNA, 33 bp, Homo sapien
ctgccctgtgacagaatgtcctaccttggatga

SEQ ID NO: 839703 - DNA, 33 bp, Homo sapien
tgtcgtacttctgcaacctgaatatcaaataaa

SEQ ID NO: 839704 - DNA, 33 bp, Homo sapien
tgtcgtacttctgcaatctgaatatcaaataaa

SEQ ID NO: 839705 - DNA, 33 bp, Homo sapien
ttacacaaaaggataccagcctcttatatccca

SEQ ID NO: 839706 - DNA, 33 bp, Homo sapien
ttacacaaaaggatactagcctcttatatccca

SEQ ID NO: 839707 - DNA, 33 bp, Homo sapien
ctccctacttttaattggcaacaagaaaaagga

SEQ ID NO: 839708 - DNA, 33 bp, Homo sapien
ctccctacttttaatttgcaacaagaaaaagga

SEQ ID NO: 839709 - DNA, 33 bp, Homo sapien
catgaaagcgagatcaacaggaatgaggagacc

SEQ ID NO: 839710 - DNA, 33 bp, Homo sapien
catgaaagcgagatcagcaggaatgaggagacc

SEQ ID NO: 839711 - DNA, 33 bp, Homo sapien
cccgagatctcaagaacacatcaggagaaggga

SEQ ID NO: 839712 - DNA, 33 bp, Homo sapien
cccgagatctcaagaagacatcaggagaaggga

SEQ ID NO: 839713 - DNA, 33 bp, Homo sapien
tgtaacaatgagtgaagtatctctgtggaacct

SEQ ID NO: 839714 - DNA, 33 bp, Homo sapien
tgtaacaatgagtgaattatctctgtggaacct

SEQ ID NO: 839715 - DNA, 33 bp, Homo sapien
gtatgtccagccttgcaccagtcactgttgcca

SEQ ID NO: 839716 - DNA, 33 bp, Homo sapien
gtatgtccagccttgctccagtcactgttgcca

SEQ ID NO: 839717 - DNA, 33 bp, Homo sapien
gggtgagagcagcagacggaaggctaaaaaggt

SEQ ID NO: 839718 - DNA, 33 bp, Homo sapien
gggtgagagcagcagatggaaggctaaaaaggt

SEQ ID NO: 839719 - DNA, 33 bp, Homo sapien
gcaccaacatatcaaccaacttgacctaatatt

SEQ ID NO: 839720 - DNA, 33 bp, Homo sapien
gcaccaacatatcaactaacttgacctaatatt

SEQ ID NO: 839721 - DNA, 33 bp, Homo sapien
aacttgtgtattgtgccctttgatgtagtattc

SEQ ID NO: 839722 - DNA, 33 bp, Homo sapien
aacttgtgtattgtgctctttgatgtagtattc

SEQ ID NO: 839723 - DNA, 33 bp, Homo sapien
aagtggtgtatggaaacaaataggaaagtggaa

SEQ ID NO: 839724 - DNA, 33 bp, Homo sapien
aagtggtgtatggaaataaataggaaagtggaa

SEQ ID NO: 839725 - DNA, 33 bp, Homo sapien
gatacaaaagtacatacggcaatgccctgaaac

SEQ ID NO: 839726 - DNA, 33 bp, Homo sapien
gatacaaaagtacatatggcaatgccctgaaac

SEQ ID NO: 839727 - DNA, 33 bp, Homo sapien
actttcttttttgcaactgaagtttaatcagga

SEQ ID NO: 839728 - DNA, 33 bp, Homo sapien
actttcttttttgcaattgaagtttaatcagga

SEQ ID NO: 839729 - DNA, 33 bp, Homo sapien
aataatcccaagacaactggacagcactgacta

SEQ ID NO: 839730 - DNA, 33 bp, Homo sapien
aataatcccaagacaattggacagcactgacta

SEQ ID NO: 839731 - DNA, 33 bp, Homo sapien
tttaaaataccagtgacataagagcagtttgat

SEQ ID NO: 839732 - DNA, 33 bp, Homo sapien
tttaaaataccagtgatataagagcagtttgat

SEQ ID NO: 839733 - DNA, 33 bp, Homo sapien
aaatgtatatagccataaaaccaccatcacaat

SEQ ID NO: 839734 - DNA, 33 bp, Homo sapien
aaatgtatatagccattaaaccaccatcacaat

SEQ ID NO: 839735 - DNA, 33 bp, Homo sapien
ttattcactcttttcaagcccccagtttgcccc

SEQ ID NO: 839736 - DNA, 33 bp, Homo sapien
ttattcactcttttcaggcccccagtttgcccc

SEQ ID NO: 839737 - DNA, 33 bp, Homo sapien
cctaaatgcaaagaaagataaaccaagtacacc

SEQ ID NO: 839738 - DNA, 33 bp, Homo sapien
cctaaatgcaaagaaatataaaccaagtacacc

SEQ ID NO: 839739 - DNA, 33 bp, Homo sapien
ggaattctatgaaaacaatgataaaccaatgtc

SEQ ID NO: 839740 - DNA, 33 bp, Homo sapien
ggaattctatgaaaacgatgataaaccaatgtc

SEQ ID NO: 839741 - DNA, 33 bp, Homo sapien
tgatggactttgcttcaaacagtgtcaaaatca

SEQ ID NO: 839742 - DNA, 33 bp, Homo sapien
tgatggactttgcttcgaacagtgtcaaaatca

SEQ ID NO: 839743 - DNA, 33 bp, Homo sapien
taacattagatttctagaggatgactaatggac

SEQ ID NO: 839744 - DNA, 33 bp, Homo sapien
taacattagatttctataggatgactaatggac

SEQ ID NO: 839745 - DNA, 33 bp, Homo sapien
ctttagattgaaagaaaaaaatgaaagatgcag

SEQ ID NO: 839746 - DNA, 33 bp, Homo sapien
ctttagattgaaagaagaaaatgaaagatgcag

SEQ ID NO: 839747 - DNA, 33 bp, Homo sapien
aatacttcaaagcttccagcactgtgcttaaca

SEQ ID NO: 839748 - DNA, 33 bp, Homo sapien
aatacttcaaagcttctagcactgtgcttaaca

SEQ ID NO: 839749 - DNA, 33 bp, Homo sapien
acgtatactgtcatgcccaagtagttttgtttg

SEQ ID NO: 839750 - DNA, 33 bp, Homo sapien
acgtatactgtcatgctcaagtagttttgtttg

SEQ ID NO: 839751 - DNA, 33 bp, Homo sapien
gaatatatcatgactaagtccattcaccagtca

SEQ ID NO: 839752 - DNA, 33 bp, Homo sapien
gaatatatcatgactaggtccattcaccagtca

SEQ ID NO: 839753 - DNA, 33 bp, Homo sapien
aaaggctgcttggaatcagtctggatggttttg

SEQ ID NO: 839754 - DNA, 33 bp, Homo sapien
aaaggctgcttggaatgagtctggatggttttg

SEQ ID NO: 839755 - DNA, 33 bp, Homo sapien
ttccaagcagcctttaagatatttccctattaa

SEQ ID NO: 839756 - DNA, 33 bp, Homo sapien
ttccaagcagcctttaggatatttccctattaa

SEQ ID NO: 839757 - DNA, 33 bp, Homo sapien
atatacagaaccaagcacgtatgtaacctttag

SEQ ID NO: 839758 - DNA, 33 bp, Homo sapien
atatacagaaccaagcgcgtatgtaacctttag

SEQ ID NO: 839759 - DNA, 33 bp, Homo sapien
agagcacagtcacaaaatatctgtttctgtcct

SEQ ID NO: 839760 - DNA, 33 bp, Homo sapien
agagcacagtcacaaagtatctgtttctgtcct

SEQ ID NO: 839761 - DNA, 33 bp, Homo sapien
acgtatcaggagaaacaataacctggaaattga

SEQ ID NO: 839762 - DNA, 33 bp, Homo sapien
acgtatcaggagaaacgataacctggaaattga

SEQ ID NO: 839763 - DNA, 33 bp, Homo sapien
ctgtaggaaaaaatgacattaggccaagaagga

SEQ ID NO: 839764 - DNA, 33 bp, Homo sapien
ctgtaggaaaaaatgatattaggccaagaagga

SEQ ID NO: 839765 - DNA, 33 bp, Homo sapien
ctctagtaacactagtaacctcgtggtaaaatt

SEQ ID NO: 839766 - DNA, 33 bp, Homo sapien
ctctagtaacactagtgacctcgtggtaaaatt

SEQ ID NO: 839767 - DNA, 33 bp, Homo sapien
tgatatttaaatgcatcatctagttttagccct

SEQ ID NO: 839768 - DNA, 33 bp, Homo sapien
tgatatttaaatgcatgatctagttttagccct

SEQ ID NO: 839769 - DNA, 33 bp, Homo sapien
tacatggcacatatgacaaagggtgacctaact

SEQ ID NO: 839770 - DNA, 33 bp, Homo sapien
tacatggcacatatgataaagggtgacctaact

SEQ ID NO: 839771 - DNA, 33 bp, Homo sapien
agtcattaactgtgcacacataaaaataatcaa

SEQ ID NO: 839772 - DNA, 33 bp, Homo sapien
agtcattaactgtgcatacataaaaataatcaa

SEQ ID NO: 839773 - DNA, 33 bp, Homo sapien
cttgctgtactgtaaaacctttcagctcatcta

SEQ ID NO: 839774 - DNA, 33 bp, Homo sapien
cttgctgtactgtaaagcctttcagctcatcta

SEQ ID NO: 839775 - DNA, 33 bp, Homo sapien
ttactccttgaagggaaggcaatgtgtatagta

SEQ ID NO: 839776 - DNA, 33 bp, Homo sapien
ttactccttgaagggacggcaatgtgtatagta

SEQ ID NO: 839777 - DNA, 33 bp, Homo sapien
gcttctggtttcaaaacagaggccatttcacag

SEQ ID NO: 839778 - DNA, 33 bp, Homo sapien
gcttctggtttcaaaatagaggccatttcacag

SEQ ID NO: 839779 - DNA, 33 bp, Homo sapien
gacattcgtccacttacatttcattaagcaatg

SEQ ID NO: 839780 - DNA, 33 bp, Homo sapien
gacattcgtccacttatatttcattaagcaatg

SEQ ID NO: 839781 - DNA, 33 bp, Homo sapien
gttcacgtttgtaaaccaagtatgataagtcca

SEQ ID NO: 839782 - DNA, 33 bp, Homo sapien
gttcacgtttgtaaactaagtatgataagtcca

SEQ ID NO: 839783 - DNA, 33 bp, Homo sapien
gtccattatcttttaacatgtgattctgttcag

SEQ ID NO: 839784 - DNA, 33 bp, Homo sapien
gtccattatcttttaatatgtgattctgttcag

SEQ ID NO: 839785 - DNA, 33 bp, Homo sapien
cattttctagcttaaacaaagtgtggcttcttt

SEQ ID NO: 839786 - DNA, 33 bp, Homo sapien
cattttctagcttaaataaagtgtggcttcttt

SEQ ID NO: 839787 - DNA, 33 bp, Homo sapien
catcatgaatagacaacggaactttacacagag

SEQ ID NO: 839788 - DNA, 33 bp, Homo sapien
catcatgaatagacaatggaactttacacagag

SEQ ID NO: 839789 - DNA, 33 bp, Homo sapien
gaaatgggctgagaacactgtttacctgatgat

SEQ ID NO: 839790 - DNA, 33 bp, Homo sapien
gaaatgggctgagaaccctgtttacctgatgat

SEQ ID NO: 839791 - DNA, 33 bp, Homo sapien
aatccttggagttgtaagattttaagactattg

SEQ ID NO: 839792 - DNA, 33 bp, Homo sapien
aatccttggagttgtacgattttaagactattg

SEQ ID NO: 839793 - DNA, 33 bp, Homo sapien
acctctctccacataccagaagctttcaatgct

SEQ ID NO: 839794 - DNA, 33 bp, Homo sapien
acctctctccacatactagaagctttcaatgct

SEQ ID NO: 839795 - DNA, 33 bp, Homo sapien
attttgtcgtccaaaccatgaagactaaaacat

SEQ ID NO: 839796 - DNA, 33 bp, Homo sapien
attttgtcgtccaaactatgaagactaaaacat

SEQ ID NO: 839797 - DNA, 33 bp, Homo sapien
gtagtctgtgtatttaaagaaggtttgaagctt

SEQ ID NO: 839798 - DNA, 33 bp, Homo sapien
gtagtctgtgtatttagagaaggtttgaagctt

SEQ ID NO: 839799 - DNA, 33 bp, Homo sapien
ttttatgagttcttcacaatttaatttatcttt

SEQ ID NO: 839800 - DNA, 33 bp, Homo sapien
ttttatgagttcttcagaatttaatttatcttt

SEQ ID NO: 839801 - DNA, 33 bp, Homo sapien
ttctcaatggtagggacacagcattgaataaaa

SEQ ID NO: 839802 - DNA, 33 bp, Homo sapien
ttctcaatggtagggagacagcattgaataaaa

SEQ ID NO: 839803 - DNA, 33 bp, Homo sapien
acgaacaccccatgcaaagggaataggaagtgc

SEQ ID NO: 839804 - DNA, 33 bp, Homo sapien
acgaacaccccatgcacagggaataggaagtgc

SEQ ID NO: 839805 - DNA, 33 bp, Homo sapien
atcatttcagtagccacgtgcatgatccttcta

SEQ ID NO: 839806 - DNA, 33 bp, Homo sapien
atcatttcagtagccatgtgcatgatccttcta

SEQ ID NO: 839807 - DNA, 33 bp, Homo sapien
tgtaacaggagtattacagacaaaagcacaatg

SEQ ID NO: 839808 - DNA, 33 bp, Homo sapien
tgtaacaggagtattatagacaaaagcacaatg

SEQ ID NO: 839809 - DNA, 33 bp, Homo sapien
gtttcttgcacctcaccatactgttttctcaaa

SEQ ID NO: 839810 - DNA, 33 bp, Homo sapien
gtttcttgcacctcacgatactgttttctcaaa

SEQ ID NO: 839811 - DNA, 33 bp, Homo sapien
tttgagttatatagacacatatgtttgaatgac

SEQ ID NO: 839812 - DNA, 33 bp, Homo sapien
tttgagttatatagactcatatgtttgaatgac

SEQ ID NO: 839813 - DNA, 33 bp, Homo sapien
ttgttacagatctttcacaagtatgtgttgtta

SEQ ID NO: 839814 - DNA, 33 bp, Homo sapien
ttgttacagatctttcccaagtatgtgttgtta

SEQ ID NO: 839815 - DNA, 33 bp, Homo sapien
aatctgtgagaaggaaaaatgagcatgggaaat

SEQ ID NO: 839816 - DNA, 33 bp, Homo sapien
aatctgtgagaaggaataatgagcatgggaaat

SEQ ID NO: 839817 - DNA, 33 bp, Homo sapien
aaaaactcacagctaccatccaacttaatggtg

SEQ ID NO: 839818 - DNA, 33 bp, Homo sapien
aaaaactcacagctactatccaacttaatggtg

SEQ ID NO: 839819 - DNA, 33 bp, Homo sapien
aaataaataatgctgacgtaaaaaaatacaaat

SEQ ID NO: 839820 - DNA, 33 bp, Homo sapien
aaataaataatgctgatgtaaaaaaatacaaat

SEQ ID NO: 839821 - DNA, 33 bp, Homo sapien
tcctcttttcagttacaatgagcaatgctgcta

SEQ ID NO: 839822 - DNA, 33 bp, Homo sapien
tcctcttttcagttactatgagcaatgctgcta

SEQ ID NO: 839823 - DNA, 33 bp, Homo sapien
cagccccactaagaagccttcactaggaattac

SEQ ID NO: 839824 - DNA, 33 bp, Homo sapien
cagccccactaagaaggcttcactaggaattac

SEQ ID NO: 839825 - DNA, 33 bp, Homo sapien
agaaaactgaaccaagccatacaggaggacacc

SEQ ID NO: 839826 - DNA, 33 bp, Homo sapien
agaaaactgaaccaagtcatacaggaggacacc

SEQ ID NO: 839827 - DNA, 33 bp, Homo sapien
aatcagtaagacctaaagtaaaatcctggctgc

SEQ ID NO: 839828 - DNA, 33 bp, Homo sapien
aatcagtaagacctaaggtaaaatcctggctgc

SEQ ID NO: 839829 - DNA, 33 bp, Homo sapien
aggaactgattttacactcccctctgtggatcg

SEQ ID NO: 839830 - DNA, 33 bp, Homo sapien
aggaactgattttacattcccctctgtggatcg

SEQ ID NO: 839831 - DNA, 33 bp, Homo sapien
tggattaccaatactgccaaaataatgtccgga

SEQ ID NO: 839832 - DNA, 33 bp, Homo sapien
tggattaccaatactgtcaaaataatgtccgga

SEQ ID NO: 839833 - DNA, 33 bp, Homo sapien
aaaacaggagcaaaagcagttgcagaaagacag

SEQ ID NO: 839834 - DNA, 33 bp, Homo sapien
aaaacaggagcaaaagtagttgcagaaagacag

SEQ ID NO: 839835 - DNA, 33 bp, Homo sapien
tcctctccagctatggaagttttagatggcatc

SEQ ID NO: 839836 - DNA, 33 bp, Homo sapien
tcctctccagctatgggagttttagatggcatc

SEQ ID NO: 839837 - DNA, 33 bp, Homo sapien
tctggtggagatatacaaggagatgaatgttgt

SEQ ID NO: 839838 - DNA, 33 bp, Homo sapien
tctggtggagatatacgaggagatgaatgttgt

SEQ ID NO: 839839 - DNA, 33 bp, Homo sapien
atattcaaaacaactaaacaacagttaacaagg

SEQ ID NO: 839840 - DNA, 33 bp, Homo sapien
atattcaaaacaactacacaacagttaacaagg

SEQ ID NO: 839841 - DNA, 33 bp, Homo sapien
atgtcttcatttttacacaaaagtcaccattaa

SEQ ID NO: 839842 - DNA, 33 bp, Homo sapien
atgtcttcatttttactcaaaagtcaccattaa

SEQ ID NO: 839843 - DNA, 33 bp, Homo sapien
ttatttgagctttatgaacttgcctttcaatca

SEQ ID NO: 839844 - DNA, 33 bp, Homo sapien
ttatttgagctttatggacttgcctttcaatca

SEQ ID NO: 839845 - DNA, 33 bp, Homo sapien
aatactacacatttgcaatgaaaaacttgtaga

SEQ ID NO: 839846 - DNA, 33 bp, Homo sapien
aatactacacatttgctatgaaaaacttgtaga

SEQ ID NO: 839847 - DNA, 33 bp, Homo sapien
aaaagataagaagtaaacctagagtaagcagaa

SEQ ID NO: 839848 - DNA, 33 bp, Homo sapien
aaaagataagaagtaatcctagagtaagcagaa

SEQ ID NO: 839849 - DNA, 33 bp, Homo sapien
tcattttaccataaacaaaaaccagagtaattg

SEQ ID NO: 839850 - DNA, 33 bp, Homo sapien
tcattttaccataaacgaaaaccagagtaattg

SEQ ID NO: 839851 - DNA, 33 bp, Homo sapien
tcctcacgtgttctgaatatattgaaaagagac

SEQ ID NO: 839852 - DNA, 33 bp, Homo sapien
tcctcacgtgttctgagtatattgaaaagagac

SEQ ID NO: 839853 - DNA, 33 bp, Homo sapien
ttccctgttaggagtaaaagagatcacaaggac

SEQ ID NO: 839854 - DNA, 33 bp, Homo sapien
ttccctgttaggagtacaagagatcacaaggac

SEQ ID NO: 839855 - DNA, 33 bp, Homo sapien
tagataatgacaatgaatatctcaaaatttaac

SEQ ID NO: 839856 - DNA, 33 bp, Homo sapien
tagataatgacaatgagtatctcaaaatttaac

SEQ ID NO: 839857 - DNA, 33 bp, Homo sapien
aatgcctcagttgttaaatagtattggcatctg

SEQ ID NO: 839858 - DNA, 33 bp, Homo sapien
aatgcctcagttgttagatagtattggcatctg

SEQ ID NO: 839859 - DNA, 33 bp, Homo sapien
cattccacataatctcacatttagacagctgct

SEQ ID NO: 839860 - DNA, 33 bp, Homo sapien
cattccacataatctctcatttagacagctgct

SEQ ID NO: 839861 - DNA, 33 bp, Homo sapien
agattgctgtagttcaatacacttcttttgctt

SEQ ID NO: 839862 - DNA, 33 bp, Homo sapien
agattgctgtagttcagtacacttcttttgctt

SEQ ID NO: 839863 - DNA, 33 bp, Homo sapien
ctagtggctatcacaccggataaaaaggaacta

SEQ ID NO: 839864 - DNA, 33 bp, Homo sapien
ctagtggctatcacactggataaaaaggaacta

SEQ ID NO: 839865 - DNA, 33 bp, Homo sapien
agagccctgatatgtacagtctctgaattttta

SEQ ID NO: 839866 - DNA, 33 bp, Homo sapien
agagccctgatatgtatagtctctgaattttta

SEQ ID NO: 839867 - DNA, 33 bp, Homo sapien
atgggtaaagtaaggaagaactcagagaactca

SEQ ID NO: 839868 - DNA, 33 bp, Homo sapien
atgggtaaagtaaggaggaactcagagaactca

SEQ ID NO: 839869 - DNA, 33 bp, Homo sapien
cccttcttacagatttcaaaggaaaggattagt

SEQ ID NO: 839870 - DNA, 33 bp, Homo sapien
cccttcttacagatttgaaaggaaaggattagt

SEQ ID NO: 839871 - DNA, 33 bp, Homo sapien
tcaacagacatttctaataaatatgctacctct

SEQ ID NO: 839872 - DNA, 33 bp, Homo sapien
tcaacagacatttctagtaaatatgctacctct

SEQ ID NO: 839873 - DNA, 33 bp, Homo sapien
aagaagttaatgtcaaaagaagttaattatcta

SEQ ID NO: 839874 - DNA, 33 bp, Homo sapien
aagaagttaatgtcaacagaagttaattatcta

SEQ ID NO: 839875 - DNA, 33 bp, Homo sapien
tattaatatctgactacgccaaaccacaatgga

SEQ ID NO: 839876 - DNA, 33 bp, Homo sapien
tattaatatctgactatgccaaaccacaatgga

SEQ ID NO: 839877 - DNA, 33 bp, Homo sapien
ttaatactgtcatagccctctgaatctggcatt

SEQ ID NO: 839878 - DNA, 33 bp, Homo sapien
ttaatactgtcatagctctctgaatctggcatt

SEQ ID NO: 839879 - DNA, 33 bp, Homo sapien
ttgatacatcttttcacgctggtttttcttttg

SEQ ID NO: 839880 - DNA, 33 bp, Homo sapien
ttgatacatcttttcatgctggtttttcttttg

SEQ ID NO: 839881 - DNA, 33 bp, Homo sapien
cgttcccatggaatccaatatgtaaaactcttg

SEQ ID NO: 839882 - DNA, 33 bp, Homo sapien
cgttcccatggaatccgatatgtaaaactcttg

SEQ ID NO: 839883 - DNA, 33 bp, Homo sapien
gtcatgagtgttatcaaaaaagtttatacagga

SEQ ID NO: 839884 - DNA, 33 bp, Homo sapien
gtcatgagtgttatcagaaaagtttatacagga

SEQ ID NO: 839885 - DNA, 33 bp, Homo sapien
gcaaaccttctaaaacaggattatggtgatggt

SEQ ID NO: 839886 - DNA, 33 bp, Homo sapien
gcaaaccttctaaaactggattatggtgatggt

SEQ ID NO: 839887 - DNA, 33 bp, Homo sapien
taaatgaagatatgataaaaagtggcagaggtg

SEQ ID NO: 839888 - DNA, 33 bp, Homo sapien
taaatgaagatatgatcaaaagtggcagaggtg

SEQ ID NO: 839889 - DNA, 33 bp, Homo sapien
ccccatttattgaaacagccaatgtgaaaacag

SEQ ID NO: 839890 - DNA, 33 bp, Homo sapien
ccccatttattgaaacggccaatgtgaaaacag

SEQ ID NO: 839891 - DNA, 33 bp, Homo sapien
ggtattgagaacttaccgagtgatttcaggctt

SEQ ID NO: 839892 - DNA, 33 bp, Homo sapien
ggtattgagaacttactgagtgatttcaggctt

SEQ ID NO: 839893 - DNA, 33 bp, Homo sapien
tcccttctagacagaacggtccctttaatgttc

SEQ ID NO: 839894 - DNA, 33 bp, Homo sapien
tcccttctagacagaatggtccctttaatgttc

SEQ ID NO: 839895 - DNA, 33 bp, Homo sapien
actgtgcaaatgttgacatttttagtactttac

SEQ ID NO: 839896 - DNA, 33 bp, Homo sapien
actgtgcaaatgttgatatttttagtactttac

SEQ ID NO: 839897 - DNA, 33 bp, Homo sapien
agcgagttttgactgcactttaccccttcaaat

SEQ ID NO: 839898 - DNA, 33 bp, Homo sapien
agcgagttttgactgcgctttaccccttcaaat

SEQ ID NO: 839899 - DNA, 33 bp, Homo sapien
aatggaaggaatggaactgagaaacagcctaag

SEQ ID NO: 839900 - DNA, 33 bp, Homo sapien
aatggaaggaatggaattgagaaacagcctaag

SEQ ID NO: 839901 - DNA, 33 bp, Homo sapien
atgtcagcggcagctcacttttatcctccatta

SEQ ID NO: 839902 - DNA, 33 bp, Homo sapien
atgtcagcggcagctcgcttttatcctccatta

SEQ ID NO: 839903 - DNA, 33 bp, Homo sapien
tttaggtctgtgctccaatgtcatctccccaga

SEQ ID NO: 839904 - DNA, 33 bp, Homo sapien
tttaggtctgtgctccgatgtcatctccccaga

SEQ ID NO: 839905 - DNA, 33 bp, Homo sapien
atacatagtcctaagacaatctacttatatagg

SEQ ID NO: 839906 - DNA, 33 bp, Homo sapien
atacatagtcctaagagaatctacttatatagg

SEQ ID NO: 839907 - DNA, 33 bp, Homo sapien
agaggaaccaaatataaggaagacgtagaaggg

SEQ ID NO: 839908 - DNA, 33 bp, Homo sapien
agaggaaccaaatatacggaagacgtagaaggg

SEQ ID NO: 839909 - DNA, 33 bp, Homo sapien
gggtaaaatgagaaaaatgaatgaacaggctac

SEQ ID NO: 839910 - DNA, 33 bp, Homo sapien
gggtaaaatgagaaaagtgaatgaacaggctac

SEQ ID NO: 839911 - DNA, 33 bp, Homo sapien
atttcagaaaatcttcactaacagtaacatcat

SEQ ID NO: 839912 - DNA, 33 bp, Homo sapien
atttcagaaaatcttcgctaacagtaacatcat

SEQ ID NO: 839913 - DNA, 33 bp, Homo sapien
cctttggcttgagaataatacactttaaaaaaa

SEQ ID NO: 839914 - DNA, 33 bp, Homo sapien
cctttggcttgagaatgatacactttaaaaaaa

SEQ ID NO: 839915 - DNA, 33 bp, Homo sapien
atggataggtggataaacgctattccattggaa

SEQ ID NO: 839916 - DNA, 33 bp, Homo sapien
atggataggtggataatcgctattccattggaa

SEQ ID NO: 839917 - DNA, 33 bp, Homo sapien
ttcattttttggtagacgaggaagctaagacca

SEQ ID NO: 839918 - DNA, 33 bp, Homo sapien
ttcattttttggtagatgaggaagctaagacca

SEQ ID NO: 839919 - DNA, 33 bp, Homo sapien
tgtgtttagctgaatacgacttttgttgcaata

SEQ ID NO: 839920 - DNA, 33 bp, Homo sapien
tgtgtttagctgaatatgacttttgttgcaata

SEQ ID NO: 839921 - DNA, 33 bp, Homo sapien
tcatccaacgggccaaagagtagatgttccaaa

SEQ ID NO: 839922 - DNA, 33 bp, Homo sapien
tcatccaacgggccaacgagtagatgttccaaa

SEQ ID NO: 839923 - DNA, 33 bp, Homo sapien
attatcttcaaagaacacttccaagtatctaca

SEQ ID NO: 839924 - DNA, 33 bp, Homo sapien
attatcttcaaagaacgcttccaagtatctaca

SEQ ID NO: 839925 - DNA, 33 bp, Homo sapien
aacgctgcaacctaggaagaatcatgagaaggg

SEQ ID NO: 839926 - DNA, 33 bp, Homo sapien
aacgctgcaacctaggcagaatcatgagaaggg

SEQ ID NO: 839927 - DNA, 33 bp, Homo sapien
tgcttttgcagggatgacaaacacatggttata

SEQ ID NO: 839928 - DNA, 33 bp, Homo sapien
tgcttttgcagggatggcaaacacatggttata

SEQ ID NO: 839929 - DNA, 33 bp, Homo sapien
aaagtcagcaacaaaaggaaaatggaagataag

SEQ ID NO: 839930 - DNA, 33 bp, Homo sapien
aaagtcagcaacaaaatgaaaatggaagataag

SEQ ID NO: 839931 - DNA, 33 bp, Homo sapien
gattatactttcactccgaattgcttcaacaat

SEQ ID NO: 839932 - DNA, 33 bp, Homo sapien
gattatactttcactctgaattgcttcaacaat

SEQ ID NO: 839933 - DNA, 33 bp, Homo sapien
tatccttgtcacatctcaagaaacatgaagcca

SEQ ID NO: 839934 - DNA, 33 bp, Homo sapien
tatccttgtcacatcttaagaaacatgaagcca

SEQ ID NO: 839935 - DNA, 33 bp, Homo sapien
atactgtaaacctagcagaaatttgttgcattg

SEQ ID NO: 839936 - DNA, 33 bp, Homo sapien
atactgtaaacctagcggaaatttgttgcattg

SEQ ID NO: 839937 - DNA, 33 bp, Homo sapien
acaactaatttccatcaaccgaaatgccctgac

SEQ ID NO: 839938 - DNA, 33 bp, Homo sapien
acaactaatttccatcgaccgaaatgccctgac

SEQ ID NO: 839939 - DNA, 33 bp, Homo sapien
catgtgagtgaagaagactcagaagattctagc

SEQ ID NO: 839940 - DNA, 33 bp, Homo sapien
catgtgagtgaagaagcctcagaagattctagc

SEQ ID NO: 839941 - DNA, 33 bp, Homo sapien
ctgattttggaatggcaaatgaaatctgcctct

SEQ ID NO: 839942 - DNA, 33 bp, Homo sapien
ctgattttggaatggccaatgaaatctgcctct

SEQ ID NO: 839943 - DNA, 33 bp, Homo sapien
cgcgagagaatctgcactgaagccccagctcta

SEQ ID NO: 839944 - DNA, 33 bp, Homo sapien
cgcgagagaatctgcattgaagccccagctcta

SEQ ID NO: 839945 - DNA, 33 bp, Homo sapien
agggccccggtcattcacttcatacctaaaatc

SEQ ID NO: 839946 - DNA, 33 bp, Homo sapien
agggccccggtcattcgcttcatacctaaaatc

SEQ ID NO: 839947 - DNA, 33 bp, Homo sapien
aactcttatcaagatcccttttgtccagtccaa

SEQ ID NO: 839948 - DNA, 33 bp, Homo sapien
aactcttatcaagatctcttttgtccagtccaa

SEQ ID NO: 839949 - DNA, 33 bp, Homo sapien
gaccaaaggagcttaactgcaaaggcaccagct

SEQ ID NO: 839950 - DNA, 33 bp, Homo sapien
gaccaaaggagcttaattgcaaaggcaccagct

SEQ ID NO: 839951 - DNA, 33 bp, Homo sapien
ttcctggccgggatgccctgctgcctcctcttg

SEQ ID NO: 839952 - DNA, 33 bp, Homo sapien
ttcctggccgggatgcgctgctgcctcctcttg

SEQ ID NO: 839953 - DNA, 33 bp, Homo sapien
gagctatattcagccccagttacattgtctgtt

SEQ ID NO: 839954 - DNA, 33 bp, Homo sapien
gagctatattcagccctagttacattgtctgtt

SEQ ID NO: 839955 - DNA, 33 bp, Homo sapien
acctttcttccaataaatggtgttctttcagct

SEQ ID NO: 839956 - DNA, 33 bp, Homo sapien
acctttcttccaataagtggtgttctttcagct

SEQ ID NO: 839957 - DNA, 33 bp, Homo sapien
caagcttttggctttcaacaatcctcagttgaa

SEQ ID NO: 839958 - DNA, 33 bp, Homo sapien
caagcttttggctttcgacaatcctcagttgaa

SEQ ID NO: 839959 - DNA, 33 bp, Homo sapien
gcctgtgaagcttgagcatgagtctgccttagt

SEQ ID NO: 839960 - DNA, 33 bp, Homo sapien
gcctgtgaagcttgagtatgagtctgccttagt

SEQ ID NO: 839961 - DNA, 33 bp, Homo sapien
acaaacatggatataaactagtgagatctgtgt

SEQ ID NO: 839962 - DNA, 33 bp, Homo sapien
acaaacatggatataagctagtgagatctgtgt

SEQ ID NO: 839963 - DNA, 33 bp, Homo sapien
tctttccggggaccacaaatcgacctaccataa

SEQ ID NO: 839964 - DNA, 33 bp, Homo sapien
tctttccggggaccacgaatcgacctaccataa

SEQ ID NO: 839965 - DNA, 33 bp, Homo sapien
tgttgttaactcctcactgacatgtaagcctta

SEQ ID NO: 839966 - DNA, 33 bp, Homo sapien
tgttgttaactcctcattgacatgtaagcctta

SEQ ID NO: 839967 - DNA, 33 bp, Homo sapien
agatctgattataaaggcaagtgatgggttcac

SEQ ID NO: 839968 - DNA, 33 bp, Homo sapien
agatctgattataaagtcaagtgatgggttcac

SEQ ID NO: 839969 - DNA, 33 bp, Homo sapien
gattcttttgaagtagcagttttcaaacctttt

SEQ ID NO: 839970 - DNA, 33 bp, Homo sapien
gattcttttgaagtagtagttttcaaacctttt

SEQ ID NO: 839971 - DNA, 33 bp, Homo sapien
ttgtgaatagtatggtcaagaagggttctcaga

SEQ ID NO: 839972 - DNA, 33 bp, Homo sapien
ttgtgaatagtatggttaagaagggttctcaga

SEQ ID NO: 839973 - DNA, 33 bp, Homo sapien
aaaagttcaatgcagaacgcggcaaacctactc

SEQ ID NO: 839974 - DNA, 33 bp, Homo sapien
aaaagttcaatgcagagcgcggcaaacctactc

SEQ ID NO: 839975 - DNA, 33 bp, Homo sapien
acatccttgtcggaaaccttgctgcctattgct

SEQ ID NO: 839976 - DNA, 33 bp, Homo sapien
acatccttgtcggaaagcttgctgcctattgct

SEQ ID NO: 839977 - DNA, 33 bp, Homo sapien
ctgccaccctttatgacaatcctgtgaacgctg

SEQ ID NO: 839978 - DNA, 33 bp, Homo sapien
ctgccaccctttatgataatcctgtgaacgctg

SEQ ID NO: 839979 - DNA, 33 bp, Homo sapien
gtggccagaaaagcacacttgagaaggtgactt

SEQ ID NO: 839980 - DNA, 33 bp, Homo sapien
gtggccagaaaagcacgcttgagaaggtgactt

SEQ ID NO: 839981 - DNA, 33 bp, Homo sapien
ttctaaatagtccatccaaatctagtaggcttt

SEQ ID NO: 839982 - DNA, 33 bp, Homo sapien
ttctaaatagtccatctaaatctagtaggcttt

SEQ ID NO: 839983 - DNA, 33 bp, Homo sapien
gtggggagggagaaaggaggtgctgaaggagag

SEQ ID NO: 839984 - DNA, 33 bp, Homo sapien
gtggggagggagaaagtaggtgctgaaggagag

SEQ ID NO: 839985 - DNA, 33 bp, Homo sapien
aaaaccccctttgggaacagagtggctggcaca

SEQ ID NO: 839986 - DNA, 33 bp, Homo sapien
aaaaccccctttgggagcagagtggctggcaca

SEQ ID NO: 839987 - DNA, 33 bp, Homo sapien
aacaggtccatgattaagctcagaaacagcatt

SEQ ID NO: 839988 - DNA, 33 bp, Homo sapien
aacaggtccatgattaggctcagaaacagcatt

SEQ ID NO: 839989 - DNA, 33 bp, Homo sapien
caacttgtcacaaatacatctgaacattgttag

SEQ ID NO: 839990 - DNA, 33 bp, Homo sapien
caacttgtcacaaatatatctgaacattgttag

SEQ ID NO: 839991 - DNA, 33 bp, Homo sapien
ttctacaaaggaagccagagaatgtaggttttt

SEQ ID NO: 839992 - DNA, 33 bp, Homo sapien
ttctacaaaggaagccggagaatgtaggttttt

SEQ ID NO: 839993 - DNA, 33 bp, Homo sapien
agtttcaccacaaaaacgcatgatcaggttttt

SEQ ID NO: 839994 - DNA, 33 bp, Homo sapien
agtttcaccacaaaaatgcatgatcaggttttt

SEQ ID NO: 839995 - DNA, 33 bp, Homo sapien
gtcacggtaagtccttaaaccaccaatatcaga

SEQ ID NO: 839996 - DNA, 33 bp, Homo sapien
gtcacggtaagtccttgaaccaccaatatcaga

SEQ ID NO: 839997 - DNA, 33 bp, Homo sapien
ctctgagaatcaaaaactggaccatttcaaggg

SEQ ID NO: 839998 - DNA, 33 bp, Homo sapien
ctctgagaatcaaaaattggaccatttcaaggg

SEQ ID NO: 839999 - DNA, 33 bp, Homo sapien
gtgtgcatttacagaacgtttcatcttaatcaa

SEQ ID NO: 840000 - DNA, 33 bp, Homo sapien
gtgtgcatttacagaatgtttcatcttaatcaa

SEQ ID NO: 840001 - DNA, 33 bp, Homo sapien
gtggaagaataattaaagagttgtgaagtgagg

SEQ ID NO: 840002 - DNA, 33 bp, Homo sapien
gtggaagaataattaaggagttgtgaagtgagg

SEQ ID NO: 840003 - DNA, 33 bp, Homo sapien
catggcaacagagagcgatcaaagttattaaaa

SEQ ID NO: 840004 - DNA, 33 bp, Homo sapien
catggcaacagagagctatcaaagttattaaaa

SEQ ID NO: 840005 - DNA, 33 bp, Homo sapien
tttctttctgaggcaactgtcatatagggataa

SEQ ID NO: 840006 - DNA, 33 bp, Homo sapien
tttctttctgaggcaattgtcatatagggataa

SEQ ID NO: 840007 - DNA, 33 bp, Homo sapien
taggaagagcagtgaagaattacgtgtttataa

SEQ ID NO: 840008 - DNA, 33 bp, Homo sapien
taggaagagcagtgaataattacgtgtttataa

SEQ ID NO: 840009 - DNA, 33 bp, Homo sapien
atttttggttttggaacgggcgccttgtttaat

SEQ ID NO: 840010 - DNA, 33 bp, Homo sapien
atttttggttttggaatgggcgccttgtttaat

SEQ ID NO: 840011 - DNA, 33 bp, Homo sapien
taactggtttttatcaatctagggtaacttgcc

SEQ ID NO: 840012 - DNA, 33 bp, Homo sapien
taactggtttttatcactctagggtaacttgcc

SEQ ID NO: 840013 - DNA, 33 bp, Homo sapien
acctctgagaaaaacacggaaattcaatcaatc

SEQ ID NO: 840014 - DNA, 33 bp, Homo sapien
acctctgagaaaaacatggaaattcaatcaatc

SEQ ID NO: 840015 - DNA, 33 bp, Homo sapien
tcatcaaatctaagtgacaccaattaaaaaatc

SEQ ID NO: 840016 - DNA, 33 bp, Homo sapien
tcatcaaatctaagtgccaccaattaaaaaatc

SEQ ID NO: 840017 - DNA, 33 bp, Homo sapien
tcagggttcactcacaaaagcataacctctgga

SEQ ID NO: 840018 - DNA, 33 bp, Homo sapien
tcagggttcactcacagaagcataacctctgga

SEQ ID NO: 840019 - DNA, 33 bp, Homo sapien
tccaagctgcttagcccacccaattgatttacc

SEQ ID NO: 840020 - DNA, 33 bp, Homo sapien
tccaagctgcttagcctacccaattgatttacc

SEQ ID NO: 840021 - DNA, 33 bp, Homo sapien
cttaagcaatgttgtccagattcttatttttgg

SEQ ID NO: 840022 - DNA, 33 bp, Homo sapien
cttaagcaatgttgtctagattcttatttttgg

SEQ ID NO: 840023 - DNA, 33 bp, Homo sapien
atttaaagaaaatgcaactcttcatatatcttt

SEQ ID NO: 840024 - DNA, 33 bp, Homo sapien
atttaaagaaaatgcatctcttcatatatcttt

SEQ ID NO: 840025 - DNA, 33 bp, Homo sapien
taatgcttaccaatcaacagtgcaatcttaagc

SEQ ID NO: 840026 - DNA, 33 bp, Homo sapien
taatgcttaccaatcagcagtgcaatcttaagc

SEQ ID NO: 840027 - DNA, 33 bp, Homo sapien
ttaagattgatggttaagatgtgtgttcaagct

SEQ ID NO: 840028 - DNA, 33 bp, Homo sapien
ttaagattgatggttacgatgtgtgttcaagct

SEQ ID NO: 840029 - DNA, 33 bp, Homo sapien
tctgtccagattttaaacccgctttgtctagtc

SEQ ID NO: 840030 - DNA, 33 bp, Homo sapien
tctgtccagattttaaccccgctttgtctagtc

SEQ ID NO: 840031 - DNA, 33 bp, Homo sapien
actggtaggcgatatcccagacaggtcaaggcc

SEQ ID NO: 840032 - DNA, 33 bp, Homo sapien
actggtaggcgatatctcagacaggtcaaggcc

SEQ ID NO: 840033 - DNA, 33 bp, Homo sapien
tgggttctgcctcatactaggtcattaactaat

SEQ ID NO: 840034 - DNA, 33 bp, Homo sapien
tgggttctgcctcatattaggtcattaactaat

SEQ ID NO: 840035 - DNA, 33 bp, Homo sapien
gcactgtccttcaaccgagctggggaagtgaat

SEQ ID NO: 840036 - DNA, 33 bp, Homo sapien
gcactgtccttcaacctagctggggaagtgaat

SEQ ID NO: 840037 - DNA, 33 bp, Homo sapien
taattgattcaacagcactgtcaagggacaacg

SEQ ID NO: 840038 - DNA, 33 bp, Homo sapien
taattgattcaacagccctgtcaagggacaacg

SEQ ID NO: 840039 - DNA, 33 bp, Homo sapien
gttctggaatctacaacgaagcaaaccactcat

SEQ ID NO: 840040 - DNA, 33 bp, Homo sapien
gttctggaatctacaatgaagcaaaccactcat

SEQ ID NO: 840041 - DNA, 33 bp, Homo sapien
agttggccatttgacaaacacaatccacacact

SEQ ID NO: 840042 - DNA, 33 bp, Homo sapien
agttggccatttgacatacacaatccacacact

SEQ ID NO: 840043 - DNA, 33 bp, Homo sapien
ccaggattgcatttgacgctggttgaacgagaa

SEQ ID NO: 840044 - DNA, 33 bp, Homo sapien
ccaggattgcatttgatgctggttgaacgagaa

SEQ ID NO: 840045 - DNA, 33 bp, Homo sapien
tgccccctcaaatctacgtttcactcatcgaag

SEQ ID NO: 840046 - DNA, 33 bp, Homo sapien
tgccccctcaaatctatgtttcactcatcgaag

SEQ ID NO: 840047 - DNA, 33 bp, Homo sapien
aatgtcttagatcaaagaaacaaggcatttatc

SEQ ID NO: 840048 - DNA, 33 bp, Homo sapien
aatgtcttagatcaaataaacaaggcatttatc

SEQ ID NO: 840049 - DNA, 33 bp, Homo sapien
gccctgctctgaatcacagcccactgacgcagg

SEQ ID NO: 840050 - DNA, 33 bp, Homo sapien
gccctgctctgaatcatagcccactgacgcagg

SEQ ID NO: 840051 - DNA, 33 bp, Homo sapien
aagggtgttcagttcccacagggcatgaggctg

SEQ ID NO: 840052 - DNA, 33 bp, Homo sapien
aagggtgttcagttcctacagggcatgaggctg

SEQ ID NO: 840053 - DNA, 33 bp, Homo sapien
acttccgattcttttcaccaacatgaaaagttg

SEQ ID NO: 840054 - DNA, 33 bp, Homo sapien
acttccgattcttttctccaacatgaaaagttg

SEQ ID NO: 840055 - DNA, 33 bp, Homo sapien
gtgatctgcatgaatcaatgcggtgggatggtt

SEQ ID NO: 840056 - DNA, 33 bp, Homo sapien
gtgatctgcatgaatcgatgcggtgggatggtt

SEQ ID NO: 840057 - DNA, 33 bp, Homo sapien
cagaactgaaacccaacctaatgctactaaact

SEQ ID NO: 840058 - DNA, 33 bp, Homo sapien
cagaactgaaacccaatctaatgctactaaact

SEQ ID NO: 840059 - DNA, 33 bp, Homo sapien
agtctcttaacataggaatctttgtgcatgtca

SEQ ID NO: 840060 - DNA, 33 bp, Homo sapien
agtctcttaacataggcatctttgtgcatgtca

SEQ ID NO: 840061 - DNA, 33 bp, Homo sapien
tcctttctaaaatggggacaaaagtaggtgata

SEQ ID NO: 840062 - DNA, 33 bp, Homo sapien
tcctttctaaaatgggtacaaaagtaggtgata

SEQ ID NO: 840063 - DNA, 33 bp, Homo sapien
ttgtgccaggcattgcgctaagacaggggtttt

SEQ ID NO: 840064 - DNA, 33 bp, Homo sapien
ttgtgccaggcattgctctaagacaggggtttt

SEQ ID NO: 840065 - DNA, 33 bp, Homo sapien
actgttgtgggtgaaacagagagttccagctgt

SEQ ID NO: 840066 - DNA, 33 bp, Homo sapien
actgttgtgggtgaaatagagagttccagctgt

SEQ ID NO: 840067 - DNA, 33 bp, Homo sapien
gggatctggctaaagggcaatagagttgggcat

SEQ ID NO: 840068 - DNA, 33 bp, Homo sapien
gggatctggctaaaggtcaatagagttgggcat

SEQ ID NO: 840069 - DNA, 33 bp, Homo sapien
ctagtaaagggaagaccgaagacaattgcaaac

SEQ ID NO: 840070 - DNA, 33 bp, Homo sapien
ctagtaaagggaagactgaagacaattgcaaac

SEQ ID NO: 840071 - DNA, 33 bp, Homo sapien
cacaccaagttataaactacagcttaggaacca

SEQ ID NO: 840072 - DNA, 33 bp, Homo sapien
cacaccaagttataaattacagcttaggaacca

SEQ ID NO: 840073 - DNA, 33 bp, Homo sapien
aatcctgagggcaaagaagaatacacgtgattt

SEQ ID NO: 840074 - DNA, 33 bp, Homo sapien
aatcctgagggcaaaggagaatacacgtgattt

SEQ ID NO: 840075 - DNA, 33 bp, Homo sapien
tatctctggaactgccacatgaaatagtaaatg

SEQ ID NO: 840076 - DNA, 33 bp, Homo sapien
tatctctggaactgccgcatgaaatagtaaatg

SEQ ID NO: 840077 - DNA, 33 bp, Homo sapien
acatttgttggctgaacactttgatcatatctt

SEQ ID NO: 840078 - DNA, 33 bp, Homo sapien
acatttgttggctgaatactttgatcatatctt

SEQ ID NO: 840079 - DNA, 33 bp, Homo sapien
gattgagacttttacaatcattggtagaaaagt

SEQ ID NO: 840080 - DNA, 33 bp, Homo sapien
gattgagacttttacagtcattggtagaaaagt

SEQ ID NO: 840081 - DNA, 33 bp, Homo sapien
catagcgctaagaccactaagcctgaacttttg

SEQ ID NO: 840082 - DNA, 33 bp, Homo sapien
catagcgctaagaccattaagcctgaacttttg

SEQ ID NO: 840083 - DNA, 33 bp, Homo sapien
tactcctcacgggagacactttgtggttagaaa

SEQ ID NO: 840084 - DNA, 33 bp, Homo sapien
tactcctcacgggagatactttgtggttagaaa

SEQ ID NO: 840085 - DNA, 33 bp, Homo sapien
ggagagaatgtttgcactgacctacctaattgt

SEQ ID NO: 840086 - DNA, 33 bp, Homo sapien
ggagagaatgtttgcattgacctacctaattgt

SEQ ID NO: 840087 - DNA, 33 bp, Homo sapien
ggtggtgcagtgagtgcaagtggttctgatggc

SEQ ID NO: 840088 - DNA, 33 bp, Homo sapien
ggtggtgcagtgagtggaagtggttctgatggc

SEQ ID NO: 840089 - DNA, 33 bp, Homo sapien
ccaatcaagataatgcaaataataatgctatgt

SEQ ID NO: 840090 - DNA, 33 bp, Homo sapien
ccaatcaagataatgcgaataataatgctatgt

SEQ ID NO: 840091 - DNA, 33 bp, Homo sapien
cggagaaggtgcacccaaaaattcttgaggatt

SEQ ID NO: 840092 - DNA, 33 bp, Homo sapien
cggagaaggtgcacccgaaaattcttgaggatt

SEQ ID NO: 840093 - DNA, 33 bp, Homo sapien
tattgttagtcttccactctgggagctgggaaa

SEQ ID NO: 840094 - DNA, 33 bp, Homo sapien
tattgttagtcttccagtctgggagctgggaaa

SEQ ID NO: 840095 - DNA, 33 bp, Homo sapien
gtatgatgtaacataacgcgtaatacactcaca

SEQ ID NO: 840096 - DNA, 33 bp, Homo sapien
gtatgatgtaacataatgcgtaatacactcaca

SEQ ID NO: 840097 - DNA, 33 bp, Homo sapien
aaaattgaataacctacgctctatctcttaaag

SEQ ID NO: 840098 - DNA, 33 bp, Homo sapien
aaaattgaataacctatgctctatctcttaaag

SEQ ID NO: 840099 - DNA, 33 bp, Homo sapien
ccacgtgcaataaacacgaccctgaggccctgc

SEQ ID NO: 840100 - DNA, 33 bp, Homo sapien
ccacgtgcaataaacatgaccctgaggccctgc

SEQ ID NO: 840101 - DNA, 33 bp, Homo sapien
aaaatacgttgcctcaatataaggtttgggcta

SEQ ID NO: 840102 - DNA, 33 bp, Homo sapien
aaaatacgttgcctcagtataaggtttgggcta

SEQ ID NO: 840103 - DNA, 33 bp, Homo sapien
tgtctggcttaggtaactacaagcaagggtgat

SEQ ID NO: 840104 - DNA, 33 bp, Homo sapien
tgtctggcttaggtaattacaagcaagggtgat

SEQ ID NO: 840105 - DNA, 33 bp, Homo sapien
tctgttcttctaggcacgagaaaaatgaattcc

SEQ ID NO: 840106 - DNA, 33 bp, Homo sapien
tctgttcttctaggcatgagaaaaatgaattcc

SEQ ID NO: 840107 - DNA, 33 bp, Homo sapien
tgcctggccaatacgaggacatcaattaatggt

SEQ ID NO: 840108 - DNA, 33 bp, Homo sapien
tgcctggccaatacgatgacatcaattaatggt

SEQ ID NO: 840109 - DNA, 33 bp, Homo sapien
cctcgtaaatatttgaaatcctcactccacata

SEQ ID NO: 840110 - DNA, 33 bp, Homo sapien
cctcgtaaatatttgatatcctcactccacata

SEQ ID NO: 840111 - DNA, 33 bp, Homo sapien
tgggtaaaatatgtgacgaggaaacaaggggaa

SEQ ID NO: 840112 - DNA, 33 bp, Homo sapien
tgggtaaaatatgtgatgaggaaacaaggggaa

SEQ ID NO: 840113 - DNA, 33 bp, Homo sapien
tccaatctacagacaacggtcacaggtgggttc

SEQ ID NO: 840114 - DNA, 33 bp, Homo sapien
tccaatctacagacaatggtcacaggtgggttc

SEQ ID NO: 840115 - DNA, 33 bp, Homo sapien
caaactactcctgggacgtacaatggaaatgtg

SEQ ID NO: 840116 - DNA, 33 bp, Homo sapien
caaactactcctgggatgtacaatggaaatgtg

SEQ ID NO: 840117 - DNA, 33 bp, Homo sapien
tttttgatgggtaaaaattgagaaataaaagag

SEQ ID NO: 840118 - DNA, 33 bp, Homo sapien
tttttgatgggtaaaatttgagaaataaaagag

SEQ ID NO: 840119 - DNA, 33 bp, Homo sapien
ttgtgttctgctaccaatgcttgatttcagata

SEQ ID NO: 840120 - DNA, 33 bp, Homo sapien
ttgtgttctgctaccagtgcttgatttcagata

SEQ ID NO: 840121 - DNA, 33 bp, Homo sapien
aatgaaacatctggtcaaaaagtgagaaatcca

SEQ ID NO: 840122 - DNA, 33 bp, Homo sapien
aatgaaacatctggtcgaaaagtgagaaatcca

SEQ ID NO: 840123 - DNA, 33 bp, Homo sapien
ttgcaccctttggttacatcaacatgatctcaa

SEQ ID NO: 840124 - DNA, 33 bp, Homo sapien
ttgcaccctttggttatatcaacatgatctcaa

SEQ ID NO: 840125 - DNA, 33 bp, Homo sapien
aggggaagaagacaccaagagaaagatgagaga

SEQ ID NO: 840126 - DNA, 33 bp, Homo sapien
aggggaagaagacaccgagagaaagatgagaga

SEQ ID NO: 840127 - DNA, 33 bp, Homo sapien
atagctcaaggcagaaattcagtgtctgaagtg

SEQ ID NO: 840128 - DNA, 33 bp, Homo sapien
atagctcaaggcagaagttcagtgtctgaagtg

SEQ ID NO: 840129 - DNA, 33 bp, Homo sapien
tgtactaagccctctgaaggtgatgactcaatt

SEQ ID NO: 840130 - DNA, 33 bp, Homo sapien
tgtactaagccctctgcaggtgatgactcaatt

SEQ ID NO: 840131 - DNA, 33 bp, Homo sapien
cattttctaccttgcgaatacatttgaatcccg

SEQ ID NO: 840132 - DNA, 33 bp, Homo sapien
cattttctaccttgcgcatacatttgaatcccg

SEQ ID NO: 840133 - DNA, 33 bp, Homo sapien
tcttctccttctacaacctcgagtctttacatt

SEQ ID NO: 840134 - DNA, 33 bp, Homo sapien
tcttctccttctacaatctcgagtctttacatt

SEQ ID NO: 840135 - DNA, 33 bp, Homo sapien
tgggggacagataatgaaaggtggctttgagcc

SEQ ID NO: 840136 - DNA, 33 bp, Homo sapien
tgggggacagataatggaaggtggctttgagcc

SEQ ID NO: 840137 - DNA, 33 bp, Homo sapien
aggccttgaataaatcacatcagctggctctgg

SEQ ID NO: 840138 - DNA, 33 bp, Homo sapien
aggccttgaataaatcgcatcagctggctctgg

SEQ ID NO: 840139 - DNA, 33 bp, Homo sapien
aaacaaacctctaagaaacaacaacaaaatgct

SEQ ID NO: 840140 - DNA, 33 bp, Homo sapien
aaacaaacctctaagacacaacaacaaaatgct

SEQ ID NO: 840141 - DNA, 33 bp, Homo sapien
aattaaatctgtagaacggactgccagcaaaag

SEQ ID NO: 840142 - DNA, 33 bp, Homo sapien
aattaaatctgtagaatggactgccagcaaaag

SEQ ID NO: 840143 - DNA, 33 bp, Homo sapien
gggccttcgtgcgccacacagaaggtagaccac

SEQ ID NO: 840144 - DNA, 33 bp, Homo sapien
gggccttcgtgcgccatacagaaggtagaccac

SEQ ID NO: 840145 - DNA, 33 bp, Homo sapien
cattactcagattctacacaaccagagagagct

SEQ ID NO: 840146 - DNA, 33 bp, Homo sapien
cattactcagattctatacaaccagagagagct

SEQ ID NO: 840147 - DNA, 33 bp, Homo sapien
acttcacttaaatgtagactggattttctcatg

SEQ ID NO: 840148 - DNA, 33 bp, Homo sapien
acttcacttaaatgtatactggattttctcatg

SEQ ID NO: 840149 - DNA, 33 bp, Homo sapien
gaattatttacttcccaatacaccaactctgtt

SEQ ID NO: 840150 - DNA, 33 bp, Homo sapien
gaattatttacttcccgatacaccaactctgtt

SEQ ID NO: 840151 - DNA, 33 bp, Homo sapien
catactgttgatcttacagggctattgtaaaaa

SEQ ID NO: 840152 - DNA, 33 bp, Homo sapien
catactgttgatcttatagggctattgtaaaaa

SEQ ID NO: 840153 - DNA, 33 bp, Homo sapien
ttgatctagtgaacacacgacaaggaagtgttg

SEQ ID NO: 840154 - DNA, 33 bp, Homo sapien
ttgatctagtgaacactcgacaaggaagtgttg

SEQ ID NO: 840155 - DNA, 33 bp, Homo sapien
tttagaaacaacttgagacttcctggattcctc

SEQ ID NO: 840156 - DNA, 33 bp, Homo sapien
tttagaaacaacttgatacttcctggattcctc

SEQ ID NO: 840157 - DNA, 33 bp, Homo sapien
agaacttatagctctacggtctatactctccct

SEQ ID NO: 840158 - DNA, 33 bp, Homo sapien
agaacttatagctctatggtctatactctccct

SEQ ID NO: 840159 - DNA, 33 bp, Homo sapien
cctggtgtttgtggagcaataatcttagcaata

SEQ ID NO: 840160 - DNA, 33 bp, Homo sapien
cctggtgtttgtggaggaataatcttagcaata

SEQ ID NO: 840161 - DNA, 33 bp, Homo sapien
tagatgcttgaattaacttaaaatactgtgaaa

SEQ ID NO: 840162 - DNA, 33 bp, Homo sapien
tagatgcttgaattaagttaaaatactgtgaaa

SEQ ID NO: 840163 - DNA, 33 bp, Homo sapien
taggtttgcttgaaatcaattctttatgaaatt

SEQ ID NO: 840164 - DNA, 33 bp, Homo sapien
taggtttgcttgaaattaattctttatgaaatt

SEQ ID NO: 840165 - DNA, 33 bp, Homo sapien
agggagccaagctcatcatatatggagagagct

SEQ ID NO: 840166 - DNA, 33 bp, Homo sapien
agggagccaagctcattatatatggagagagct

SEQ ID NO: 840167 - DNA, 33 bp, Homo sapien
aaataggcactgaatagaaagtaagtttcaggt

SEQ ID NO: 840168 - DNA, 33 bp, Homo sapien
aaataggcactgaatataaagtaagtttcaggt

SEQ ID NO: 840169 - DNA, 33 bp, Homo sapien
acttcactatgtgaatgaccttagataagttac

SEQ ID NO: 840170 - DNA, 33 bp, Homo sapien
acttcactatgtgaattaccttagataagttac

SEQ ID NO: 840171 - DNA, 33 bp, Homo sapien
tcttttatgcttttaaagattgttgaggatccc

SEQ ID NO: 840172 - DNA, 33 bp, Homo sapien
tcttttatgcttttaaggattgttgaggatccc

SEQ ID NO: 840173 - DNA, 33 bp, Homo sapien
ccagaagtccatgaacaacattggagaaccatt

SEQ ID NO: 840174 - DNA, 33 bp, Homo sapien
ccagaagtccatgaaccacattggagaaccatt

SEQ ID NO: 840175 - DNA, 33 bp, Homo sapien
ttgattaacccggaaacagattgaaagacaaca

SEQ ID NO: 840176 - DNA, 33 bp, Homo sapien
ttgattaacccggaaagagattgaaagacaaca

SEQ ID NO: 840177 - DNA, 33 bp, Homo sapien
cctggaggctggattgaacaatgcaggtgtatt

SEQ ID NO: 840178 - DNA, 33 bp, Homo sapien
cctggaggctggattgcacaatgcaggtgtatt

SEQ ID NO: 840179 - DNA, 33 bp, Homo sapien
ccctgggagctcaggacctgtcgtaggagtgtg

SEQ ID NO: 840180 - DNA, 33 bp, Homo sapien
ccctgggagctcaggagctgtcgtaggagtgtg

SEQ ID NO: 840181 - DNA, 33 bp, Homo sapien
gaagttcatcacgtagcatcatctgttctaaac

SEQ ID NO: 840182 - DNA, 33 bp, Homo sapien
gaagttcatcacgtagtatcatctgttctaaac

SEQ ID NO: 840183 - DNA, 33 bp, Homo sapien
attcctgaggctccataaaaaaacaatttgaag

SEQ ID NO: 840184 - DNA, 33 bp, Homo sapien
attcctgaggctccatcaaaaaacaatttgaag

SEQ ID NO: 840185 - DNA, 33 bp, Homo sapien
atactgagaatcactacgtttgatccagtgaag

SEQ ID NO: 840186 - DNA, 33 bp, Homo sapien
atactgagaatcactatgtttgatccagtgaag

SEQ ID NO: 840187 - DNA, 33 bp, Homo sapien
tagtgtgtggggatcactcaaaaatataatgaa

SEQ ID NO: 840188 - DNA, 33 bp, Homo sapien
tagtgtgtggggatcattcaaaaatataatgaa

SEQ ID NO: 840189 - DNA, 33 bp, Homo sapien
tgtacactaaccaatcacagttgttagcaaatc

SEQ ID NO: 840190 - DNA, 33 bp, Homo sapien
tgtacactaaccaatcgcagttgttagcaaatc

SEQ ID NO: 840191 - DNA, 33 bp, Homo sapien
atttatgtcaatctcaagaaaaaagctgagggc

SEQ ID NO: 840192 - DNA, 33 bp, Homo sapien
atttatgtcaatctcaggaaaaaagctgagggc

SEQ ID NO: 840193 - DNA, 33 bp, Homo sapien
tgtgtacagtgcccacagacctacagagacaga

SEQ ID NO: 840194 - DNA, 33 bp, Homo sapien
tgtgtacagtgcccacggacctacagagacaga

SEQ ID NO: 840195 - DNA, 33 bp, Homo sapien
gggtagcaatgaagtaagacgaatatctactac

SEQ ID NO: 840196 - DNA, 33 bp, Homo sapien
gggtagcaatgaagtaggacgaatatctactac

SEQ ID NO: 840197 - DNA, 33 bp, Homo sapien
gtataaactcatggaacctacttatagtctctg

SEQ ID NO: 840198 - DNA, 33 bp, Homo sapien
gtataaactcatggaatctacttatagtctctg

SEQ ID NO: 840199 - DNA, 33 bp, Homo sapien
agagcagaaactgccccgagtgtttaccattag

SEQ ID NO: 840200 - DNA, 33 bp, Homo sapien
agagcagaaactgccctgagtgtttaccattag

SEQ ID NO: 840201 - DNA, 33 bp, Homo sapien
ggctgtgctgcaaaacactgcttagtgccttcc

SEQ ID NO: 840202 - DNA, 33 bp, Homo sapien
ggctgtgctgcaaaacgctgcttagtgccttcc

SEQ ID NO: 840203 - DNA, 33 bp, Homo sapien
ctgccatacatatctgcaaatgactctaggtct

SEQ ID NO: 840204 - DNA, 33 bp, Homo sapien
ctgccatacatatctgtaaatgactctaggtct

SEQ ID NO: 840205 - DNA, 33 bp, Homo sapien
tttttgccattgctatcacggctgcattcactg

SEQ ID NO: 840206 - DNA, 33 bp, Homo sapien
tttttgccattgctattacggctgcattcactg

SEQ ID NO: 840207 - DNA, 33 bp, Homo sapien
tgtggtccagagaggtcaagcagcccatcctgg

SEQ ID NO: 840208 - DNA, 33 bp, Homo sapien
tgtggtccagagaggttaagcagcccatcctgg

SEQ ID NO: 840209 - DNA, 33 bp, Homo sapien
aacacactggtgaaccagagcctgacaccaaag

SEQ ID NO: 840210 - DNA, 33 bp, Homo sapien
aacacactggtgaacccgagcctgacaccaaag

SEQ ID NO: 840211 - DNA, 33 bp, Homo sapien
ccaccactaacatgggaccagcagctgacaact

SEQ ID NO: 840212 - DNA, 33 bp, Homo sapien
ccaccactaacatggggccagcagctgacaact

SEQ ID NO: 840213 - DNA, 33 bp, Homo sapien
tgggataagtaaatgactagtcttggataagaa

SEQ ID NO: 840214 - DNA, 33 bp, Homo sapien
tgggataagtaaatgagtagtcttggataagaa

SEQ ID NO: 840215 - DNA, 33 bp, Homo sapien
tgtcctcacttaatggccaagctcctactttag

SEQ ID NO: 840216 - DNA, 33 bp, Homo sapien
tgtcctcacttaatggtcaagctcctactttag

SEQ ID NO: 840217 - DNA, 33 bp, Homo sapien
gctctttgagcaacataagaaattatttcctga

SEQ ID NO: 840218 - DNA, 33 bp, Homo sapien
gctctttgagcaacatgagaaattatttcctga

SEQ ID NO: 840219 - DNA, 33 bp, Homo sapien
ctcttccagtaagttacaggttataggtgcttc

SEQ ID NO: 840220 - DNA, 33 bp, Homo sapien
ctcttccagtaagttataggttataggtgcttc

SEQ ID NO: 840221 - DNA, 33 bp, Homo sapien
taagtctgccaaagccaagaggaacttagtgag

SEQ ID NO: 840222 - DNA, 33 bp, Homo sapien
taagtctgccaaagccgagaggaacttagtgag

SEQ ID NO: 840223 - DNA, 33 bp, Homo sapien
actgaggtatagtttgaaattcaaccacgaccc

SEQ ID NO: 840224 - DNA, 33 bp, Homo sapien
actgaggtatagtttgcaattcaaccacgaccc

SEQ ID NO: 840225 - DNA, 33 bp, Homo sapien
ttcctctctggcttaccgctttcttattcacgt

SEQ ID NO: 840226 - DNA, 33 bp, Homo sapien
ttcctctctggcttactgctttcttattcacgt

SEQ ID NO: 840227 - DNA, 33 bp, Homo sapien
gcctacagcaacaataccaagtttcccaaataa

SEQ ID NO: 840228 - DNA, 33 bp, Homo sapien
gcctacagcaacaatagcaagtttcccaaataa

SEQ ID NO: 840229 - DNA, 33 bp, Homo sapien
aaatgaagtcccattccccagctaccttccaat

SEQ ID NO: 840230 - DNA, 33 bp, Homo sapien
aaatgaagtcccattctccagctaccttccaat

SEQ ID NO: 840231 - DNA, 33 bp, Homo sapien
ttaggaataggatacacgggacccaaacacagc

SEQ ID NO: 840232 - DNA, 33 bp, Homo sapien
ttaggaataggatacatgggacccaaacacagc

SEQ ID NO: 840233 - DNA, 33 bp, Homo sapien
gagaacacacagacaaatagaggggaacaacac

SEQ ID NO: 840234 - DNA, 33 bp, Homo sapien
gagaacacacagacaagtagaggggaacaacac

SEQ ID NO: 840235 - DNA, 33 bp, Homo sapien
tttggcaccaatataactaaaaatttgatgaag

SEQ ID NO: 840236 - DNA, 33 bp, Homo sapien
tttggcaccaatataagtaaaaatttgatgaag

SEQ ID NO: 840237 - DNA, 33 bp, Homo sapien
gtgtcacccgatagcaaattctacccctcccac

SEQ ID NO: 840238 - DNA, 33 bp, Homo sapien
gtgtcacccgatagcatattctacccctcccac

SEQ ID NO: 840239 - DNA, 33 bp, Homo sapien
atatgtaaaatcttgaagcctggcagattacac

SEQ ID NO: 840240 - DNA, 33 bp, Homo sapien
atatgtaaaatcttgaggcctggcagattacac

SEQ ID NO: 840241 - DNA, 33 bp, Homo sapien
ttgttgtcgtttttaaataatggaagcaaattt

SEQ ID NO: 840242 - DNA, 33 bp, Homo sapien
ttgttgtcgtttttaagtaatggaagcaaattt

SEQ ID NO: 840243 - DNA, 33 bp, Homo sapien
ttgaatccctggagaccggaccatagtaggtga

SEQ ID NO: 840244 - DNA, 33 bp, Homo sapien
ttgaatccctggagactggaccatagtaggtga

SEQ ID NO: 840245 - DNA, 33 bp, Homo sapien
atgtcatgtgaaaaaccggctgggccctgccct

SEQ ID NO: 840246 - DNA, 33 bp, Homo sapien
atgtcatgtgaaaaactggctgggccctgccct

SEQ ID NO: 840247 - DNA, 33 bp, Homo sapien
ttggagagaatttgacactagatgtatttgttt

SEQ ID NO: 840248 - DNA, 33 bp, Homo sapien
ttggagagaatttgacgctagatgtatttgttt

SEQ ID NO: 840249 - DNA, 33 bp, Homo sapien
aaaatgcaggctccagaaggtattttctttctt

SEQ ID NO: 840250 - DNA, 33 bp, Homo sapien
aaaatgcaggctccaggaggtattttctttctt

SEQ ID NO: 840251 - DNA, 33 bp, Homo sapien
aaaccacctctccaaaagacagagtaacaaacc

SEQ ID NO: 840252 - DNA, 33 bp, Homo sapien
aaaccacctctccaaaggacagagtaacaaacc

SEQ ID NO: 840253 - DNA, 33 bp, Homo sapien
caggttgccttctgaaagtggtgcatggaacat

SEQ ID NO: 840254 - DNA, 33 bp, Homo sapien
caggttgccttctgaatgtggtgcatggaacat

SEQ ID NO: 840255 - DNA, 33 bp, Homo sapien
ggcatcctgtccatctaaagtgaatcattttac

SEQ ID NO: 840256 - DNA, 33 bp, Homo sapien
ggcatcctgtccatctgaagtgaatcattttac

SEQ ID NO: 840257 - DNA, 33 bp, Homo sapien
aacttcataatgaacacgttgaaggacagcaat

SEQ ID NO: 840258 - DNA, 33 bp, Homo sapien
aacttcataatgaacatgttgaaggacagcaat

SEQ ID NO: 840259 - DNA, 33 bp, Homo sapien
ccattattttggttgccgatgaaggctggacaa

SEQ ID NO: 840260 - DNA, 33 bp, Homo sapien
ccattattttggttgcggatgaaggctggacaa

SEQ ID NO: 840261 - DNA, 33 bp, Homo sapien
catgtttgttgtaacccgaggtatccaaatgct

SEQ ID NO: 840262 - DNA, 33 bp, Homo sapien
catgtttgttgtaacctgaggtatccaaatgct

SEQ ID NO: 840263 - DNA, 33 bp, Homo sapien
gtcataaatttttctgcagcatttggatacctc

SEQ ID NO: 840264 - DNA, 33 bp, Homo sapien
gtcataaatttttctgtagcatttggatacctc

SEQ ID NO: 840265 - DNA, 33 bp, Homo sapien
aaaactgactccagtaaagaaagagaaaacaaa

SEQ ID NO: 840266 - DNA, 33 bp, Homo sapien
aaaactgactccagtagagaaagagaaaacaaa

SEQ ID NO: 840267 - DNA, 33 bp, Homo sapien
tgatatccaagcctgacagagtcactaaaaaaa

SEQ ID NO: 840268 - DNA, 33 bp, Homo sapien
tgatatccaagcctgatagagtcactaaaaaaa

SEQ ID NO: 840269 - DNA, 33 bp, Homo sapien
atggaactgcagaagccgactgtaaaatttgtg

SEQ ID NO: 840270 - DNA, 33 bp, Homo sapien
atggaactgcagaagctgactgtaaaatttgtg

SEQ ID NO: 840271 - DNA, 33 bp, Homo sapien
catggggccatgtaaaagtacaatgagaaggca

SEQ ID NO: 840272 - DNA, 33 bp, Homo sapien
catggggccatgtaaaggtacaatgagaaggca

SEQ ID NO: 840273 - DNA, 33 bp, Homo sapien
cttcttagaggaaagaagaagccctgaaaagaa

SEQ ID NO: 840274 - DNA, 33 bp, Homo sapien
cttcttagaggaaagaggaagccctgaaaagaa

SEQ ID NO: 840275 - DNA, 33 bp, Homo sapien
tcatctttgattccacggagcacctggtaggtg

SEQ ID NO: 840276 - DNA, 33 bp, Homo sapien
tcatctttgattccactgagcacctggtaggtg

SEQ ID NO: 840277 - DNA, 33 bp, Homo sapien
agctctgtttcaagaaatatgtgaatacccacc

SEQ ID NO: 840278 - DNA, 33 bp, Homo sapien
agctctgtttcaagaattatgtgaatacccacc

SEQ ID NO: 840279 - DNA, 33 bp, Homo sapien
cctgtaagaaagattcacaaccatttgactctt

SEQ ID NO: 840280 - DNA, 33 bp, Homo sapien
cctgtaagaaagattctcaaccatttgactctt

SEQ ID NO: 840281 - DNA, 33 bp, Homo sapien
tttcaccagggcctcacagtttcaaattcagta

SEQ ID NO: 840282 - DNA, 33 bp, Homo sapien
tttcaccagggcctcagagtttcaaattcagta

SEQ ID NO: 840283 - DNA, 33 bp, Homo sapien
caatactgaggtgacaagtttggtataaggatt

SEQ ID NO: 840284 - DNA, 33 bp, Homo sapien
caatactgaggtgacaggtttggtataaggatt

SEQ ID NO: 840285 - DNA, 33 bp, Homo sapien
gacgtaaaccattcaacaattttggcaactcta

SEQ ID NO: 840286 - DNA, 33 bp, Homo sapien
gacgtaaaccattcaataattttggcaactcta

SEQ ID NO: 840287 - DNA, 33 bp, Homo sapien
cgttcacctagaaaaacgcttttgagattcatc

SEQ ID NO: 840288 - DNA, 33 bp, Homo sapien
cgttcacctagaaaaatgcttttgagattcatc

SEQ ID NO: 840289 - DNA, 33 bp, Homo sapien
tgaccagagccacgaacataattcctgaatcac

SEQ ID NO: 840290 - DNA, 33 bp, Homo sapien
tgaccagagccacgaagataattcctgaatcac

SEQ ID NO: 840291 - DNA, 33 bp, Homo sapien
tgtaccctagaactggacatatagatttctgtt

SEQ ID NO: 840292 - DNA, 33 bp, Homo sapien
tgtaccctagaactggccatatagatttctgtt

SEQ ID NO: 840293 - DNA, 33 bp, Homo sapien
ttaaaatggacagaaaagctgtttcaaacactt

SEQ ID NO: 840294 - DNA, 33 bp, Homo sapien
ttaaaatggacagaaaggctgtttcaaacactt

SEQ ID NO: 840295 - DNA, 33 bp, Homo sapien
tcttggggaggagcaacgagttggtatgtgatg

SEQ ID NO: 840296 - DNA, 33 bp, Homo sapien
tcttggggaggagcaatgagttggtatgtgatg

SEQ ID NO: 840297 - DNA, 33 bp, Homo sapien
ataaaacaaatctaatgaacttatggctagaga

SEQ ID NO: 840298 - DNA, 33 bp, Homo sapien
ataaaacaaatctaattaacttatggctagaga

SEQ ID NO: 840299 - DNA, 33 bp, Homo sapien
tctagtgtttttggaaagttggagttattaatg

SEQ ID NO: 840300 - DNA, 33 bp, Homo sapien
tctagtgtttttggaatgttggagttattaatg

SEQ ID NO: 840301 - DNA, 33 bp, Homo sapien
tttctcagattgcataaatttaaggggaaaggc

SEQ ID NO: 840302 - DNA, 33 bp, Homo sapien
tttctcagattgcatacatttaaggggaaaggc

SEQ ID NO: 840303 - DNA, 33 bp, Homo sapien
aattttattgcttatcagacaaaagcaaatgat

SEQ ID NO: 840304 - DNA, 33 bp, Homo sapien
aattttattgcttatctgacaaaagcaaatgat

SEQ ID NO: 840305 - DNA, 33 bp, Homo sapien
cagacttgttgagctgaaatattctgatcattt

SEQ ID NO: 840306 - DNA, 33 bp, Homo sapien
cagacttgttgagctggaatattctgatcattt

SEQ ID NO: 840307 - DNA, 33 bp, Homo sapien
taagatatcctcaaataatgaaaataaatgctg

SEQ ID NO: 840308 - DNA, 33 bp, Homo sapien
taagatatcctcaaatcatgaaaataaatgctg

SEQ ID NO: 840309 - DNA, 33 bp, Homo sapien
ggaagtgaggctatgccaagtaaaagtagctat

SEQ ID NO: 840310 - DNA, 33 bp, Homo sapien
ggaagtgaggctatgcgaagtaaaagtagctat

SEQ ID NO: 840311 - DNA, 33 bp, Homo sapien
atatgtgataaggtgaactctccaactgttgtc

SEQ ID NO: 840312 - DNA, 33 bp, Homo sapien
atatgtgataaggtgatctctccaactgttgtc

SEQ ID NO: 840313 - DNA, 33 bp, Homo sapien
cccaccctggaaatggaaaaacataccagccac

SEQ ID NO: 840314 - DNA, 33 bp, Homo sapien
cccaccctggaaatgggaaaacataccagccac

SEQ ID NO: 840315 - DNA, 33 bp, Homo sapien
ctgcttcaagaaaagacagcttgctggtaaagg

SEQ ID NO: 840316 - DNA, 33 bp, Homo sapien
ctgcttcaagaaaagatagcttgctggtaaagg

SEQ ID NO: 840317 - DNA, 33 bp, Homo sapien
ctttgggtacttacaaagtggatttaggcaagg

SEQ ID NO: 840318 - DNA, 33 bp, Homo sapien
ctttgggtacttacaaggtggatttaggcaagg

SEQ ID NO: 840319 - DNA, 33 bp, Homo sapien
gaacgtgcagataacacgataataatcaaagga

SEQ ID NO: 840320 - DNA, 33 bp, Homo sapien
gaacgtgcagataacatgataataatcaaagga

SEQ ID NO: 840321 - DNA, 33 bp, Homo sapien
aagtgatggtaacgtcaagcctctaattcatat

SEQ ID NO: 840322 - DNA, 33 bp, Homo sapien
aagtgatggtaacgtcgagcctctaattcatat

SEQ ID NO: 840323 - DNA, 33 bp, Homo sapien
aactactggaaaaagcagagctacttgtgctgg

SEQ ID NO: 840324 - DNA, 33 bp, Homo sapien
aactactggaaaaagctgagctacttgtgctgg

SEQ ID NO: 840325 - DNA, 33 bp, Homo sapien
aggcttcaaaggagagaaaatccatactgcttg

SEQ ID NO: 840326 - DNA, 33 bp, Homo sapien
aggcttcaaaggagagtaaatccatactgcttg

SEQ ID NO: 840327 - DNA, 33 bp, Homo sapien
agaagatgagaatggaaatgagtagtagctgga

SEQ ID NO: 840328 - DNA, 33 bp, Homo sapien
agaagatgagaatggagatgagtagtagctgga

SEQ ID NO: 840329 - DNA, 33 bp, Homo sapien
gttaccaccctcctagaattctacacagtttca

SEQ ID NO: 840330 - DNA, 33 bp, Homo sapien
gttaccaccctcctagcattctacacagtttca

SEQ ID NO: 840331 - DNA, 33 bp, Homo sapien
accaatggctgtaaaagatgtgaatgatactct

SEQ ID NO: 840332 - DNA, 33 bp, Homo sapien
accaatggctgtaaaatatgtgaatgatactct

SEQ ID NO: 840333 - DNA, 33 bp, Homo sapien
aactatacaatcataacgtgaagtaaaaatgtg

SEQ ID NO: 840334 - DNA, 33 bp, Homo sapien
aactatacaatcataatgtgaagtaaaaatgtg

SEQ ID NO: 840335 - DNA, 33 bp, Homo sapien
gcaagaaaacttagaactccatgtacaaagtcc

SEQ ID NO: 840336 - DNA, 33 bp, Homo sapien
gcaagaaaacttagaattccatgtacaaagtcc

SEQ ID NO: 840337 - DNA, 33 bp, Homo sapien
gctttatatgattacccatgcctgggctccatt

SEQ ID NO: 840338 - DNA, 33 bp, Homo sapien
gctttatatgattacctatgcctgggctccatt

SEQ ID NO: 840339 - DNA, 33 bp, Homo sapien
agagctaaggtgaatcaaagccttgtaggcaag

SEQ ID NO: 840340 - DNA, 33 bp, Homo sapien
agagctaaggtgaatcgaagccttgtaggcaag

SEQ ID NO: 840341 - DNA, 33 bp, Homo sapien
tgggaatggaaggatacgcaagtaaaaatctag

SEQ ID NO: 840342 - DNA, 33 bp, Homo sapien
tgggaatggaaggatatgcaagtaaaaatctag

SEQ ID NO: 840343 - DNA, 33 bp, Homo sapien
tacactctaaaatttcaagggcttaccagaaga

SEQ ID NO: 840344 - DNA, 33 bp, Homo sapien
tacactctaaaatttcgagggcttaccagaaga

SEQ ID NO: 840345 - DNA, 33 bp, Homo sapien
aaaatcagaaaagatgaagatttgaacaactcc

SEQ ID NO: 840346 - DNA, 33 bp, Homo sapien
aaaatcagaaaagatgcagatttgaacaactcc

SEQ ID NO: 840347 - DNA, 33 bp, Homo sapien
tgttggactataaaacaagtctcagaagattga

SEQ ID NO: 840348 - DNA, 33 bp, Homo sapien
tgttggactataaaacgagtctcagaagattga

SEQ ID NO: 840349 - DNA, 33 bp, Homo sapien
tgatttgtattttcacagatttcacaacttgtc

SEQ ID NO: 840350 - DNA, 33 bp, Homo sapien
tgatttgtattttcacggatttcacaacttgtc

SEQ ID NO: 840351 - DNA, 33 bp, Homo sapien
caaataccggatgtgaaaataatctttaagctg

SEQ ID NO: 840352 - DNA, 33 bp, Homo sapien
caaataccggatgtgagaataatctttaagctg

SEQ ID NO: 840353 - DNA, 33 bp, Homo sapien
aattgtctgccacctaacattaagtatatcgat

SEQ ID NO: 840354 - DNA, 33 bp, Homo sapien
aattgtctgccacctaccattaagtatatcgat

SEQ ID NO: 840355 - DNA, 33 bp, Homo sapien
tccacactccaagaagctttatcttctagctgc

SEQ ID NO: 840356 - DNA, 33 bp, Homo sapien
tccacactccaagaagttttatcttctagctgc

SEQ ID NO: 840357 - DNA, 33 bp, Homo sapien
cttcaccccatgaaaaattggcacctagttctt

SEQ ID NO: 840358 - DNA, 33 bp, Homo sapien
cttcaccccatgaaaagttggcacctagttctt

SEQ ID NO: 840359 - DNA, 33 bp, Homo sapien
cagctagaattttctgcaaattgtagatgctgt

SEQ ID NO: 840360 - DNA, 33 bp, Homo sapien
cagctagaattttctgtaaattgtagatgctgt

SEQ ID NO: 840361 - DNA, 33 bp, Homo sapien
gagctttctaaataggccaacatcttttataat

SEQ ID NO: 840362 - DNA, 33 bp, Homo sapien
gagctttctaaataggtcaacatcttttataat

SEQ ID NO: 840363 - DNA, 33 bp, Homo sapien
gtgtcagtcttttgcacattgtcatgttttaat

SEQ ID NO: 840364 - DNA, 33 bp, Homo sapien
gtgtcagtcttttgcatattgtcatgttttaat

SEQ ID NO: 840365 - DNA, 33 bp, Homo sapien
ctgtgcttccttgttacggatggtcttccccat

SEQ ID NO: 840366 - DNA, 33 bp, Homo sapien
ctgtgcttccttgttatggatggtcttccccat

SEQ ID NO: 840367 - DNA, 33 bp, Homo sapien
ctaggaaaacaaatgaaacaggagcagagagaa

SEQ ID NO: 840368 - DNA, 33 bp, Homo sapien
ctaggaaaacaaatgagacaggagcagagagaa

SEQ ID NO: 840369 - DNA, 33 bp, Homo sapien
tcaaatttaataccaacatatgagacctggcca

SEQ ID NO: 840370 - DNA, 33 bp, Homo sapien
tcaaatttaataccaagatatgagacctggcca

SEQ ID NO: 840371 - DNA, 33 bp, Homo sapien
tcacctaaacaatccacaaatactaggacttcc

SEQ ID NO: 840372 - DNA, 33 bp, Homo sapien
tcacctaaacaatccagaaatactaggacttcc

SEQ ID NO: 840373 - DNA, 33 bp, Homo sapien
tcacatagatctatcacaggtgggactggaacc

SEQ ID NO: 840374 - DNA, 33 bp, Homo sapien
tcacatagatctatcataggtgggactggaacc

SEQ ID NO: 840375 - DNA, 33 bp, Homo sapien
ggagagatatttaggacgtaacatcatcaggat

SEQ ID NO: 840376 - DNA, 33 bp, Homo sapien
ggagagatatttaggaggtaacatcatcaggat

SEQ ID NO: 840377 - DNA, 33 bp, Homo sapien
attttaaagtccttaacgtaatcgcatctgcag

SEQ ID NO: 840378 - DNA, 33 bp, Homo sapien
attttaaagtccttaatgtaatcgcatctgcag

SEQ ID NO: 840379 - DNA, 33 bp, Homo sapien
aattctacaacttgacagaacataatatcaaca

SEQ ID NO: 840380 - DNA, 33 bp, Homo sapien
aattctacaacttgacggaacataatatcaaca

SEQ ID NO: 840381 - DNA, 33 bp, Homo sapien
tctgtaaggtaggcaaagccatgttccttctcc

SEQ ID NO: 840382 - DNA, 33 bp, Homo sapien
tctgtaaggtaggcaaggccatgttccttctcc

SEQ ID NO: 840383 - DNA, 33 bp, Homo sapien
ctgtttagtagctacaagagttatgcaggcagg

SEQ ID NO: 840384 - DNA, 33 bp, Homo sapien
ctgtttagtagctacaggagttatgcaggcagg

SEQ ID NO: 840385 - DNA, 33 bp, Homo sapien
tatagccatgggtctgaatgagtgagtttagtg

SEQ ID NO: 840386 - DNA, 33 bp, Homo sapien
tatagccatgggtctggatgagtgagtttagtg

SEQ ID NO: 840387 - DNA, 33 bp, Homo sapien
ccaggtgcaagtcgccaagtcctgggataggtg

SEQ ID NO: 840388 - DNA, 33 bp, Homo sapien
ccaggtgcaagtcgccgagtcctgggataggtg

SEQ ID NO: 840389 - DNA, 33 bp, Homo sapien
tgctagctgtgagacagtgagcaactgagcttc

SEQ ID NO: 840390 - DNA, 33 bp, Homo sapien
tgctagctgtgagacattgagcaactgagcttc

SEQ ID NO: 840391 - DNA, 33 bp, Homo sapien
gtgttagtgctttccaaagatagcccctaccct

SEQ ID NO: 840392 - DNA, 33 bp, Homo sapien
gtgttagtgctttccagagatagcccctaccct

SEQ ID NO: 840393 - DNA, 33 bp, Homo sapien
agtgaccagacaggtacgaccttaacccaaacc

SEQ ID NO: 840394 - DNA, 33 bp, Homo sapien
agtgaccagacaggtatgaccttaacccaaacc

SEQ ID NO: 840395 - DNA, 33 bp, Homo sapien
gcatgagaattcactcaagttttctgacaagta

SEQ ID NO: 840396 - DNA, 33 bp, Homo sapien
gcatgagaattcactcgagttttctgacaagta

SEQ ID NO: 840397 - DNA, 33 bp, Homo sapien
ctgtctctaatagctcaagaatttctagtgtca

SEQ ID NO: 840398 - DNA, 33 bp, Homo sapien
ctgtctctaatagctccagaatttctagtgtca

SEQ ID NO: 840399 - DNA, 33 bp, Homo sapien
taaagcaaagctagtacagtttgaccaatgaga

SEQ ID NO: 840400 - DNA, 33 bp, Homo sapien
taaagcaaagctagtatagtttgaccaatgaga

SEQ ID NO: 840401 - DNA, 33 bp, Homo sapien
ctttaatgaagtcagagaagtaagctcattgga

SEQ ID NO: 840402 - DNA, 33 bp, Homo sapien
ctttaatgaagtcagataagtaagctcattgga

SEQ ID NO: 840403 - DNA, 33 bp, Homo sapien
actatcaagcattagaaatggtagttattgcct

SEQ ID NO: 840404 - DNA, 33 bp, Homo sapien
actatcaagcattagatatggtagttattgcct

SEQ ID NO: 840405 - DNA, 33 bp, Homo sapien
ttcttatagttacctacgctgatagaaataagg

SEQ ID NO: 840406 - DNA, 33 bp, Homo sapien
ttcttatagttacctatgctgatagaaataagg

SEQ ID NO: 840407 - DNA, 33 bp, Homo sapien
caaaattgagaggtacagagattttccacatat

SEQ ID NO: 840408 - DNA, 33 bp, Homo sapien
caaaattgagaggtaccgagattttccacatat

SEQ ID NO: 840409 - DNA, 33 bp, Homo sapien
agaggtgatgtttgtcaatttcaagatgcaagg

SEQ ID NO: 840410 - DNA, 33 bp, Homo sapien
agaggtgatgtttgtcgatttcaagatgcaagg

SEQ ID NO: 840411 - DNA, 33 bp, Homo sapien
tggtggagacaggtacaagctagatacagaata

SEQ ID NO: 840412 - DNA, 33 bp, Homo sapien
tggtggagacaggtaccagctagatacagaata

SEQ ID NO: 840413 - DNA, 33 bp, Homo sapien
atgatgacaacaaggtaaaggtgctatctcttg

SEQ ID NO: 840414 - DNA, 33 bp, Homo sapien
atgatgacaacaaggtcaaggtgctatctcttg

SEQ ID NO: 840415 - DNA, 33 bp, Homo sapien
ataagagaggcaagcaacactttatataatact

SEQ ID NO: 840416 - DNA, 33 bp, Homo sapien
ataagagaggcaagcagcactttatataatact

SEQ ID NO: 840417 - DNA, 33 bp, Homo sapien
gtgatatatcttggagaaaaatcagcttctcag

SEQ ID NO: 840418 - DNA, 33 bp, Homo sapien
gtgatatatcttggagtaaaatcagcttctcag

SEQ ID NO: 840419 - DNA, 33 bp, Homo sapien
aagaaggtacacttggcagagagaaaatccatt

SEQ ID NO: 840420 - DNA, 33 bp, Homo sapien
aagaaggtacacttggtagagagaaaatccatt

SEQ ID NO: 840421 - DNA, 33 bp, Homo sapien
agaagatgcagtttgccaaaccttttaatttta

SEQ ID NO: 840422 - DNA, 33 bp, Homo sapien
agaagatgcagtttgctaaaccttttaatttta

SEQ ID NO: 840423 - DNA, 33 bp, Homo sapien
acaagagcagatgggacagcaagaatgaagaac

SEQ ID NO: 840424 - DNA, 33 bp, Homo sapien
acaagagcagatgggagagcaagaatgaagaac

SEQ ID NO: 840425 - DNA, 33 bp, Homo sapien
tctttttcctggggccgcctatgacactgtggg

SEQ ID NO: 840426 - DNA, 33 bp, Homo sapien
tctttttcctggggcctcctatgacactgtggg

SEQ ID NO: 840427 - DNA, 33 bp, Homo sapien
gaacacaaatcaagaacgagtgcaattttctgg

SEQ ID NO: 840428 - DNA, 33 bp, Homo sapien
gaacacaaatcaagaatgagtgcaattttctgg

SEQ ID NO: 840429 - DNA, 33 bp, Homo sapien
ttgctttcctgaacaagttgctattttatttct

SEQ ID NO: 840430 - DNA, 33 bp, Homo sapien
ttgctttcctgaacaatttgctattttatttct

SEQ ID NO: 840431 - DNA, 33 bp, Homo sapien
aatcaggaatgagagagagtctgggagcaagat

SEQ ID NO: 840432 - DNA, 33 bp, Homo sapien
aatcaggaatgagagatagtctgggagcaagat

SEQ ID NO: 840433 - DNA, 33 bp, Homo sapien
ttatatcatttttacacctacaaaagtctggag

SEQ ID NO: 840434 - DNA, 33 bp, Homo sapien
ttatatcatttttacagctacaaaagtctggag

SEQ ID NO: 840435 - DNA, 33 bp, Homo sapien
cactaaagaatcattcaaaaacttagtgtattt

SEQ ID NO: 840436 - DNA, 33 bp, Homo sapien
cactaaagaatcattcgaaaacttagtgtattt

SEQ ID NO: 840437 - DNA, 33 bp, Homo sapien
gaatacagactggggaaagcaaataataagcct

SEQ ID NO: 840438 - DNA, 33 bp, Homo sapien
gaatacagactggggagagcaaataataagcct

SEQ ID NO: 840439 - DNA, 33 bp, Homo sapien
taagctatagcctcccaaatctctgtgttaggt

SEQ ID NO: 840440 - DNA, 33 bp, Homo sapien
taagctatagcctcccgaatctctgtgttaggt

SEQ ID NO: 840441 - DNA, 33 bp, Homo sapien
ttggaatacccactaaaaacactctgcattttg

SEQ ID NO: 840442 - DNA, 33 bp, Homo sapien
ttggaatacccactaacaacactctgcattttg

SEQ ID NO: 840443 - DNA, 33 bp, Homo sapien
taagtttctgcaagaacatggactgttacttta

SEQ ID NO: 840444 - DNA, 33 bp, Homo sapien
taagtttctgcaagaatatggactgttacttta

SEQ ID NO: 840445 - DNA, 33 bp, Homo sapien
cttcttctaaacctcagtactacagtattctca

SEQ ID NO: 840446 - DNA, 33 bp, Homo sapien
cttcttctaaacctcattactacagtattctca

SEQ ID NO: 840447 - DNA, 33 bp, Homo sapien
aactgccaaacttgtcacataatgagaatactg

SEQ ID NO: 840448 - DNA, 33 bp, Homo sapien
aactgccaaacttgtcgcataatgagaatactg

SEQ ID NO: 840449 - DNA, 33 bp, Homo sapien
aaaaaaaatgaagcccaatatgctggcacacac

SEQ ID NO: 840450 - DNA, 33 bp, Homo sapien
aaaaaaaatgaagcccgatatgctggcacacac

SEQ ID NO: 840451 - DNA, 33 bp, Homo sapien
gtctttattatcttcccaagtcttcattatctg

SEQ ID NO: 840452 - DNA, 33 bp, Homo sapien
gtctttattatcttcctaagtcttcattatctg

SEQ ID NO: 840453 - DNA, 33 bp, Homo sapien
actggtgaatataagagaagacaactggccttt

SEQ ID NO: 840454 - DNA, 33 bp, Homo sapien
actggtgaatataagataagacaactggccttt

SEQ ID NO: 840455 - DNA, 33 bp, Homo sapien
aaatgacaaacataagcaatttagctaaactac

SEQ ID NO: 840456 - DNA, 33 bp, Homo sapien
aaatgacaaacataaggaatttagctaaactac

SEQ ID NO: 840457 - DNA, 33 bp, Homo sapien
acagatctggaataacacttagggcacaggttc

SEQ ID NO: 840458 - DNA, 33 bp, Homo sapien
acagatctggaataacgcttagggcacaggttc

SEQ ID NO: 840459 - DNA, 33 bp, Homo sapien
ttcttactccttcagccgaagaatttgcgtaga

SEQ ID NO: 840460 - DNA, 33 bp, Homo sapien
ttcttactccttcagcggaagaatttgcgtaga

SEQ ID NO: 840461 - DNA, 33 bp, Homo sapien
tgtgggccttagtcacccttaaaggaagatggt

SEQ ID NO: 840462 - DNA, 33 bp, Homo sapien
tgtgggccttagtcactcttaaaggaagatggt

SEQ ID NO: 840463 - DNA, 33 bp, Homo sapien
ccagtctccttttccaatgagtcagctacatga

SEQ ID NO: 840464 - DNA, 33 bp, Homo sapien
ccagtctccttttccactgagtcagctacatga

SEQ ID NO: 840465 - DNA, 33 bp, Homo sapien
aagtctgagctttatgcagtcagaaaaacctga

SEQ ID NO: 840466 - DNA, 33 bp, Homo sapien
aagtctgagctttatgtagtcagaaaaacctga

SEQ ID NO: 840467 - DNA, 33 bp, Homo sapien
agaattttagcttcaaaaaaatttagtagacta

SEQ ID NO: 840468 - DNA, 33 bp, Homo sapien
agaattttagcttcaagaaaatttagtagacta

SEQ ID NO: 840469 - DNA, 33 bp, Homo sapien
aactctattcaaaatccagctaaactctatcct

SEQ ID NO: 840470 - DNA, 33 bp, Homo sapien
aactctattcaaaatctagctaaactctatcct

SEQ ID NO: 840471 - DNA, 33 bp, Homo sapien
ccgttatgggctgatccgaatcctttaccccca

SEQ ID NO: 840472 - DNA, 33 bp, Homo sapien
ccgttatgggctgatctgaatcctttaccccca

SEQ ID NO: 840473 - DNA, 33 bp, Homo sapien
aacactgtatttgaaaggtaccaaaatagtttt

SEQ ID NO: 840474 - DNA, 33 bp, Homo sapien
aacactgtatttgaaatgtaccaaaatagtttt

SEQ ID NO: 840475 - DNA, 33 bp, Homo sapien
cagtccaatcatttaaataatagctaacatgtg

SEQ ID NO: 840476 - DNA, 33 bp, Homo sapien
cagtccaatcatttaagtaatagctaacatgtg

SEQ ID NO: 840477 - DNA, 33 bp, Homo sapien
ttttacaatcccttgaagtagaagaggggtgac

SEQ ID NO: 840478 - DNA, 33 bp, Homo sapien
ttttacaatcccttgaggtagaagaggggtgac

SEQ ID NO: 840479 - DNA, 33 bp, Homo sapien
aagaaaattaaaagccaatgtttaagatgaatc

SEQ ID NO: 840480 - DNA, 33 bp, Homo sapien
aagaaaattaaaagccgatgtttaagatgaatc

SEQ ID NO: 840481 - DNA, 33 bp, Homo sapien
ttcagtgtaaagtgtaccggagtgcggaaaatg

SEQ ID NO: 840482 - DNA, 33 bp, Homo sapien
ttcagtgtaaagtgtatcggagtgcggaaaatg

SEQ ID NO: 840483 - DNA, 33 bp, Homo sapien
atgttgctggcaatgaaagaagtgaataaaatg

SEQ ID NO: 840484 - DNA, 33 bp, Homo sapien
atgttgctggcaatgagagaagtgaataaaatg

SEQ ID NO: 840485 - DNA, 33 bp, Homo sapien
aattgttagaaataaaactcggagtcttaaaga

SEQ ID NO: 840486 - DNA, 33 bp, Homo sapien
aattgttagaaataaagctcggagtcttaaaga

SEQ ID NO: 840487 - DNA, 33 bp, Homo sapien
aagcacccttctgcaccgaagtaaatttgcttt

SEQ ID NO: 840488 - DNA, 33 bp, Homo sapien
aagcacccttctgcactgaagtaaatttgcttt

SEQ ID NO: 840489 - DNA, 33 bp, Homo sapien
attgcctcttgaggtgcaagtcaaacttacatg

SEQ ID NO: 840490 - DNA, 33 bp, Homo sapien
attgcctcttgaggtggaagtcaaacttacatg

SEQ ID NO: 840491 - DNA, 33 bp, Homo sapien
gatataaggcattcaccaaatacatatgggaag

SEQ ID NO: 840492 - DNA, 33 bp, Homo sapien
gatataaggcattcactaaatacatatgggaag

SEQ ID NO: 840493 - DNA, 33 bp, Homo sapien
ttcacataccataaaactggattcatttaaaat

SEQ ID NO: 840494 - DNA, 33 bp, Homo sapien
ttcacataccataaaattggattcatttaaaat

SEQ ID NO: 840495 - DNA, 33 bp, Homo sapien
aattgtcaacacagtgaaaaaaggccaataaca

SEQ ID NO: 840496 - DNA, 33 bp, Homo sapien
aattgtcaacacagtgtaaaaaggccaataaca

SEQ ID NO: 840497 - DNA, 33 bp, Homo sapien
ccaagagggtgagtagcactatgtatgtccagg

SEQ ID NO: 840498 - DNA, 33 bp, Homo sapien
ccaagagggtgagtagtactatgtatgtccagg

SEQ ID NO: 840499 - DNA, 33 bp, Homo sapien
tagaagtttatttcgaacccgaagcaggactaa

SEQ ID NO: 840500 - DNA, 33 bp, Homo sapien
tagaagtttatttcgaccccgaagcaggactaa

SEQ ID NO: 840501 - DNA, 33 bp, Homo sapien
ctatgaatcaatcaagaaaaggaaactatctca

SEQ ID NO: 840502 - DNA, 33 bp, Homo sapien
ctatgaatcaatcaaggaaaggaaactatctca

SEQ ID NO: 840503 - DNA, 33 bp, Homo sapien
gatccctcacatacaccatactccagccttgcc

SEQ ID NO: 840504 - DNA, 33 bp, Homo sapien
gatccctcacatacactatactccagccttgcc

SEQ ID NO: 840505 - DNA, 33 bp, Homo sapien
aatcgatcaaagttgacagactggcaaaggagg

SEQ ID NO: 840506 - DNA, 33 bp, Homo sapien
aatcgatcaaagttgatagactggcaaaggagg

SEQ ID NO: 840507 - DNA, 33 bp, Homo sapien
aggagcagcctagcagcccaacaagactaagca

SEQ ID NO: 840508 - DNA, 33 bp, Homo sapien
aggagcagcctagcagtccaacaagactaagca

SEQ ID NO: 840509 - DNA, 33 bp, Homo sapien
gagtatgtgaatgttcactgcataatgctttta

SEQ ID NO: 840510 - DNA, 33 bp, Homo sapien
gagtatgtgaatgttcgctgcataatgctttta

SEQ ID NO: 840511 - DNA, 33 bp, Homo sapien
agtatctgagatttcagatttggatgactggca

SEQ ID NO: 840512 - DNA, 33 bp, Homo sapien
agtatctgagatttcatatttggatgactggca

SEQ ID NO: 840513 - DNA, 33 bp, Homo sapien
aactctcagacagttacggactaagtgactttg

SEQ ID NO: 840514 - DNA, 33 bp, Homo sapien
aactctcagacagttatggactaagtgactttg

SEQ ID NO: 840515 - DNA, 33 bp, Homo sapien
agggcttcctctaacacggcctttcccgaacct

SEQ ID NO: 840516 - DNA, 33 bp, Homo sapien
agggcttcctctaacatggcctttcccgaacct

SEQ ID NO: 840517 - DNA, 33 bp, Homo sapien
cagcctttaccaggagcaagcatgcacacggcc

SEQ ID NO: 840518 - DNA, 33 bp, Homo sapien
cagcctttaccaggagtaagcatgcacacggcc

SEQ ID NO: 840519 - DNA, 33 bp, Homo sapien
tgtttattcacatcacaaaggaatcataaacat

SEQ ID NO: 840520 - DNA, 33 bp, Homo sapien
tgtttattcacatcacgaaggaatcataaacat

SEQ ID NO: 840521 - DNA, 33 bp, Homo sapien
ataaaaactgcattgaacatgggaaagttaagg

SEQ ID NO: 840522 - DNA, 33 bp, Homo sapien
ataaaaactgcattgaccatgggaaagttaagg

SEQ ID NO: 840523 - DNA, 33 bp, Homo sapien
ggttaacaaatatgaaggtgtagcagaatttag

SEQ ID NO: 840524 - DNA, 33 bp, Homo sapien
ggttaacaaatatgaatgtgtagcagaatttag

SEQ ID NO: 840525 - DNA, 33 bp, Homo sapien
tgcagaggaagtattacaaagatatgtcattag

SEQ ID NO: 840526 - DNA, 33 bp, Homo sapien
tgcagaggaagtattataaagatatgtcattag

SEQ ID NO: 840527 - DNA, 33 bp, Homo sapien; identical to SEQ ID NO: 840525

SEQ ID NO: 840528 - DNA, 33 bp, Homo sapien; identical to SEQ ID NO: 840526

SEQ ID NO: 840529 - DNA, 33 bp, Homo sapien
tgggactttcataatcagaagtgaaggtccacc

SEQ ID NO: 840530 - DNA, 33 bp, Homo sapien
tgggactttcataatccgaagtgaaggtccacc

SEQ ID NO: 840531 - DNA, 33 bp, Homo sapien
tgatactgttcaaagacaggcatttggtccaca

SEQ ID NO: 840532 - DNA, 33 bp, Homo sapien
tgatactgttcaaagagaggcatttggtccaca

SEQ ID NO: 840533 - DNA, 33 bp, Homo sapien
atcagtgtatttagcacagactggcaaatgaca

SEQ ID NO: 840534 - DNA, 33 bp, Homo sapien
atcagtgtatttagcagagactggcaaatgaca

SEQ ID NO: 840535 - DNA, 33 bp, Homo sapien
aatcggtgaccaagaaccggacttcttatatgc

SEQ ID NO: 840536 - DNA, 33 bp, Homo sapien
aatcggtgaccaagaatcggacttcttatatgc

SEQ ID NO: 840537 - DNA, 33 bp, Homo sapien
ctgtcagccacaatacaactatgccattcagga

SEQ ID NO: 840538 - DNA, 33 bp, Homo sapien
ctgtcagccacaatacgactatgccattcagga

SEQ ID NO: 840539 - DNA, 33 bp, Homo sapien
tcattgacaagagctacctagaaaacttgcagt

SEQ ID NO: 840540 - DNA, 33 bp, Homo sapien
tcattgacaagagctatctagaaaacttgcagt

SEQ ID NO: 840541 - DNA, 33 bp, Homo sapien
cagtaaactcaaacaagcttggtgataacgatc

SEQ ID NO: 840542 - DNA, 33 bp, Homo sapien
cagtaaactcaaacaatcttggtgataacgatc

SEQ ID NO: 840543 - DNA, 33 bp, Homo sapien
ctgtttttctgagacaaggctacatgaaaacaa

SEQ ID NO: 840544 - DNA, 33 bp, Homo sapien
ctgtttttctgagacagggctacatgaaaacaa

SEQ ID NO: 840545 - DNA, 33 bp, Homo sapien
tcatagatgggctccaaactgaattattagcag

SEQ ID NO: 840546 - DNA, 33 bp, Homo sapien
tcatagatgggctccagactgaattattagcag

SEQ ID NO: 840547 - DNA, 33 bp, Homo sapien
gtagaacccgaggcaagaggaaagatggcatgg

SEQ ID NO: 840548 - DNA, 33 bp, Homo sapien
gtagaacccgaggcaataggaaagatggcatgg

SEQ ID NO: 840549 - DNA, 33 bp, Homo sapien
tcatgtctgtgagctaagaggtaatttagtcaa

SEQ ID NO: 840550 - DNA, 33 bp, Homo sapien
tcatgtctgtgagctaggaggtaatttagtcaa

SEQ ID NO: 840551 - DNA, 33 bp, Homo sapien
gcaatctattggctataagaccttaaaacttat

SEQ ID NO: 840552 - DNA, 33 bp, Homo sapien
gcaatctattggctatcagaccttaaaacttat

SEQ ID NO: 840553 - DNA, 33 bp, Homo sapien
tcaccaaactaatgtacaagacaatgatctatg

SEQ ID NO: 840554 - DNA, 33 bp, Homo sapien
tcaccaaactaatgtataagacaatgatctatg

SEQ ID NO: 840555 - DNA, 33 bp, Homo sapien
agtgctttgaatatgcaaccatttatgagagca

SEQ ID NO: 840556 - DNA, 33 bp, Homo sapien
agtgctttgaatatgcgaccatttatgagagca

SEQ ID NO: 840557 - DNA, 33 bp, Homo sapien
ggcactggcataagaggaggaggtggtacagaa

SEQ ID NO: 840558 - DNA, 33 bp, Homo sapien
ggcactggcataagagtaggaggtggtacagaa

SEQ ID NO: 840559 - DNA, 33 bp, Homo sapien
ggaaggttggctaaaagcatcctagcctgagct

SEQ ID NO: 840560 - DNA, 33 bp, Homo sapien
ggaaggttggctaaaatcatcctagcctgagct

SEQ ID NO: 840561 - DNA, 33 bp, Homo sapien
acaaaattgctttagcactggaatttcatgtca

SEQ ID NO: 840562 - DNA, 33 bp, Homo sapien
acaaaattgctttagcgctggaatttcatgtca

SEQ ID NO: 840563 - DNA, 33 bp, Homo sapien
cctcgcctcattcttccaacagcctaccttatg

SEQ ID NO: 840564 - DNA, 33 bp, Homo sapien
cctcgcctcattcttctaacagcctaccttatg

SEQ ID NO: 840565 - DNA, 33 bp, Homo sapien
tcttttctgatagtgaactatgaaacaggtttg

SEQ ID NO: 840566 - DNA, 33 bp, Homo sapien
tcttttctgatagtgatctatgaaacaggtttg

SEQ ID NO: 840567 - DNA, 33 bp, Homo sapien
tgagaagcttgttaacccaagtttttaagatgg

SEQ ID NO: 840568 - DNA, 33 bp, Homo sapien
tgagaagcttgttaactcaagtttttaagatgg

SEQ ID NO: 840569 - DNA, 33 bp, Homo sapien
acactgaccaaattaccgacattttgagcataa

SEQ ID NO: 840570 - DNA, 33 bp, Homo sapien
acactgaccaaattactgacattttgagcataa

SEQ ID NO: 840571 - DNA, 33 bp, Homo sapien
aatgaaagcacatgaaagctgagagaacttacc

SEQ ID NO: 840572 - DNA, 33 bp, Homo sapien
aatgaaagcacatgaaggctgagagaacttacc

SEQ ID NO: 840573 - DNA, 33 bp, Homo sapien
cccaagaacacagaggaccatgtataataaatg

SEQ ID NO: 840574 - DNA, 33 bp, Homo sapien
cccaagaacacagaggtccatgtataataaatg

SEQ ID NO: 840575 - DNA, 33 bp, Homo sapien
ggatttgacattccaaagtttttccaggtgtgc

SEQ ID NO: 840576 - DNA, 33 bp, Homo sapien
ggatttgacattccaacgtttttccaggtgtgc

SEQ ID NO: 840577 - DNA, 33 bp, Homo sapien
aaagttgcaacacataccatttgagtcaactta

SEQ ID NO: 840578 - DNA, 33 bp, Homo sapien
aaagttgcaacacatatcatttgagtcaactta

SEQ ID NO: 840579 - DNA, 33 bp, Homo sapien
atttttttttagaccaacctctagaccaggaac

SEQ ID NO: 840580 - DNA, 33 bp, Homo sapien
atttttttttagaccagcctctagaccaggaac

SEQ ID NO: 840581 - DNA, 33 bp, Homo sapien
aatttatatttttgacaggattcaaactgcagg

SEQ ID NO: 840582 - DNA, 33 bp, Homo sapien
aatttatatttttgacgggattcaaactgcagg

SEQ ID NO: 840583 - DNA, 33 bp, Homo sapien
ggaagctgggctggaaacagtcctatacattga

SEQ ID NO: 840584 - DNA, 33 bp, Homo sapien
ggaagctgggctggaaccagtcctatacattga

SEQ ID NO: 840585 - DNA, 33 bp, Homo sapien
ctggctgccaagtcaccggacctgatttgaata

SEQ ID NO: 840586 - DNA, 33 bp, Homo sapien
ctggctgccaagtcacgggacctgatttgaata

SEQ ID NO: 840587 - DNA, 33 bp, Homo sapien
cacacttttttggacactgggccactacattgg

SEQ ID NO: 840588 - DNA, 33 bp, Homo sapien
cacacttttttggacattgggccactacattgg

SEQ ID NO: 840589 - DNA, 33 bp, Homo sapien
cagtactatgaggataaaagtcatgtggaatag

SEQ ID NO: 840590 - DNA, 33 bp, Homo sapien
cagtactatgaggatacaagtcatgtggaatag

SEQ ID NO: 840591 - DNA, 33 bp, Homo sapien
cagagacacaagatctaaattctaagtctggct

SEQ ID NO: 840592 - DNA, 33 bp, Homo sapien
cagagacacaagatctgaattctaagtctggct

SEQ ID NO: 840593 - DNA, 33 bp, Homo sapien
gaaagcagagcaactgcagcagtttccacacct

SEQ ID NO: 840594 - DNA, 33 bp, Homo sapien
gaaagcagagcaactgtagcagtttccacacct

SEQ ID NO: 840595 - DNA, 33 bp, Homo sapien
caaacctgccttcctcaaaatatcccttcatgt

SEQ ID NO: 840596 - DNA, 33 bp, Homo sapien
caaacctgccttcctcgaaatatcccttcatgt

SEQ ID NO: 840597 - DNA, 33 bp, Homo sapien
tcatgagaagcctgcacataggacacttttcat

SEQ ID NO: 840598 - DNA, 33 bp, Homo sapien
tcatgagaagcctgcatataggacacttttcat

SEQ ID NO: 840599 - DNA, 33 bp, Homo sapien
aaaatcattaacctacacagagaaatacaggga

SEQ ID NO: 840600 - DNA, 33 bp, Homo sapien
aaaatcattaacctacccagagaaatacaggga

SEQ ID NO: 840601 - DNA, 33 bp, Homo sapien
tggctgatgatctgaacggttttatcctgaaac

SEQ ID NO: 840602 - DNA, 33 bp, Homo sapien
tggctgatgatctgaatggttttatcctgaaac

SEQ ID NO: 840603 - DNA, 33 bp, Homo sapien
ctacctttttcttaaaatcaaaatcacaattct

SEQ ID NO: 840604 - DNA, 33 bp, Homo sapien
ctacctttttcttaaagtcaaaatcacaattct

SEQ ID NO: 840605 - DNA, 33 bp, Homo sapien
ggattatggcgattcacgtcttcacatcatcac

SEQ ID NO: 840606 - DNA, 33 bp, Homo sapien
ggattatggcgattcatgtcttcacatcatcac

SEQ ID NO: 840607 - DNA, 33 bp, Homo sapien
caaacacacaaactcaacgtgttgcaaatgaga

SEQ ID NO: 840608 - DNA, 33 bp, Homo sapien
caaacacacaaactcagcgtgttgcaaatgaga

SEQ ID NO: 840609 - DNA, 33 bp, Homo sapien
taggtaaagcacaaaaagtattgcattttaaaa

SEQ ID NO: 840610 - DNA, 33 bp, Homo sapien
taggtaaagcacaaaacgtattgcattttaaaa

SEQ ID NO: 840611 - DNA, 33 bp, Homo sapien
aggcataggagcaacacgaagcaagaagggatt

SEQ ID NO: 840612 - DNA, 33 bp, Homo sapien
aggcataggagcaacatgaagcaagaagggatt

SEQ ID NO: 840613 - DNA, 33 bp, Homo sapien
gtgctttggggccccacatttggtcctgtacct

SEQ ID NO: 840614 - DNA, 33 bp, Homo sapien
gtgctttggggccccagatttggtcctgtacct

SEQ ID NO: 840615 - DNA, 33 bp, Homo sapien
ggcacatccaagtaaaagcctcgagagcttaaa

SEQ ID NO: 840616 - DNA, 33 bp, Homo sapien
ggcacatccaagtaaaggcctcgagagcttaaa

SEQ ID NO: 840617 - DNA, 33 bp, Homo sapien
cctgcctccatgcagcgctcatctggaggactt

SEQ ID NO: 840618 - DNA, 33 bp, Homo sapien
cctgcctccatgcagctctcatctggaggactt

SEQ ID NO: 840619 - DNA, 33 bp, Homo sapien
ccaagtgatcactcccaactgatgcctgatgca

SEQ ID NO: 840620 - DNA, 33 bp, Homo sapien
ccaagtgatcactcccgactgatgcctgatgca

SEQ ID NO: 840621 - DNA, 33 bp, Homo sapien
tgttatagttttacaaagtggagcaacttcacg

SEQ ID NO: 840622 - DNA, 33 bp, Homo sapien
tgttatagttttacaaggtggagcaacttcacg

SEQ ID NO: 840623 - DNA, 33 bp, Homo sapien
gggagagggactttagaacaataatgacctggg

SEQ ID NO: 840624 - DNA, 33 bp, Homo sapien
gggagagggactttaggacaataatgacctggg

SEQ ID NO: 840625 - DNA, 33 bp, Homo sapien
tcatctcgaatatcacaaaatttatgactgata

SEQ ID NO: 840626 - DNA, 33 bp, Homo sapien
tcatctcgaatatcaccaaatttatgactgata

SEQ ID NO: 840627 - DNA, 33 bp, Homo sapien
ttttgagtgtgttctacgggttaattcaaggaa

SEQ ID NO: 840628 - DNA, 33 bp, Homo sapien
ttttgagtgtgttctatgggttaattcaaggaa

SEQ ID NO: 840629 - DNA, 33 bp, Homo sapien
gtgcttaagacgtaaccatttattactccaagg

SEQ ID NO: 840630 - DNA, 33 bp, Homo sapien
gtgcttaagacgtaacgatttattactccaagg

SEQ ID NO: 840631 - DNA, 33 bp, Homo sapien
atgaatatgagcatcaggaagtagaaatagaag

SEQ ID NO: 840632 - DNA, 33 bp, Homo sapien
atgaatatgagcatcatgaagtagaaatagaag

SEQ ID NO: 840633 - DNA, 33 bp, Homo sapien
catctgtaggaagaggaatgactactgctttgc

SEQ ID NO: 840634 - DNA, 33 bp, Homo sapien
catctgtaggaagaggtatgactactgctttgc

SEQ ID NO: 840635 - DNA, 33 bp, Homo sapien
gaatgtgttaggagacagtcaggagacagtgtg

SEQ ID NO: 840636 - DNA, 33 bp, Homo sapien
gaatgtgttaggagacggtcaggagacagtgtg

SEQ ID NO: 840637 - DNA, 33 bp, Homo sapien
tatattgggtggcagcagaatcccctgagcttt

SEQ ID NO: 840638 - DNA, 33 bp, Homo sapien
tatattgggtggcagcggaatcccctgagcttt

SEQ ID NO: 840639 - DNA, 33 bp, Homo sapien
aattgggacaagaataaaaataagggccacata

SEQ ID NO: 840640 - DNA, 33 bp, Homo sapien
aattgggacaagaatacaaataagggccacata

SEQ ID NO: 840641 - DNA, 33 bp, Homo sapien
cctcatctgataccaactaggacagccatcatt

SEQ ID NO: 840642 - DNA, 33 bp, Homo sapien
cctcatctgataccaagtaggacagccatcatt

SEQ ID NO: 840643 - DNA, 33 bp, Homo sapien
tgtatgatgtgtattacatttgtttataagaga

SEQ ID NO: 840644 - DNA, 33 bp, Homo sapien
tgtatgatgtgtattatatttgtttataagaga

SEQ ID NO: 840645 - DNA, 33 bp, Homo sapien
gtatatgaatgactcaaaacacaactcaatgac

SEQ ID NO: 840646 - DNA, 33 bp, Homo sapien
gtatatgaatgactcagaacacaactcaatgac

SEQ ID NO: 840647 - DNA, 33 bp, Homo sapien
atacccaactaagagaataaggacttgagatgt

SEQ ID NO: 840648 - DNA, 33 bp, Homo sapien
atacccaactaagagagtaaggacttgagatgt

SEQ ID NO: 840649 - DNA, 33 bp, Homo sapien
gcaccagtggtggcacaggaaaagtgtagctgt

SEQ ID NO: 840650 - DNA, 33 bp, Homo sapien
gcaccagtggtggcacgggaaaagtgtagctgt

SEQ ID NO: 840651 - DNA, 33 bp, Homo sapien
tgggtcctacatatgcgccataaccttacaaca

SEQ ID NO: 840652 - DNA, 33 bp, Homo sapien
tgggtcctacatatgctccataaccttacaaca

SEQ ID NO: 840653 - DNA, 33 bp, Homo sapien
tctgcatctttgagagaagtgtaaattttttga

SEQ ID NO: 840654 - DNA, 33 bp, Homo sapien
tctgcatctttgagaggagtgtaaattttttga

SEQ ID NO: 840655 - DNA, 33 bp, Homo sapien
acctttaagcttatcaaatgaatgtggatctgt

SEQ ID NO: 840656 - DNA, 33 bp, Homo sapien
acctttaagcttatcagatgaatgtggatctgt

SEQ ID NO: 840657 - DNA, 33 bp, Homo sapien
cacaagctaaagatgaaaagtcagggctatgag

SEQ ID NO: 840658 - DNA, 33 bp, Homo sapien
cacaagctaaagatgagaagtcagggctatgag

SEQ ID NO: 840659 - DNA, 33 bp, Homo sapien
ggctattctcaacacagaactcattcagggctc

SEQ ID NO: 840660 - DNA, 33 bp, Homo sapien
ggctattctcaacacataactcattcagggctc

SEQ ID NO: 840661 - DNA, 33 bp, Homo sapien
atggttctataccccacaaatatgtatgagagt

SEQ ID NO: 840662 - DNA, 33 bp, Homo sapien
atggttctataccccagaaatatgtatgagagt

SEQ ID NO: 840663 - DNA, 33 bp, Homo sapien
gatgctcatggagaacaagagagtgtctttatg

SEQ ID NO: 840664 - DNA, 33 bp, Homo sapien
gatgctcatggagaaccagagagtgtctttatg

SEQ ID NO: 840665 - DNA, 33 bp, Homo sapien
aggtacaaatacagacactgccttctcagaagt

SEQ ID NO: 840666 - DNA, 33 bp, Homo sapien
aggtacaaatacagactctgccttctcagaagt

SEQ ID NO: 840667 - DNA, 33 bp, Homo sapien
agaaacagagagaaaccgttaggcattcttgct

SEQ ID NO: 840668 - DNA, 33 bp, Homo sapien
agaaacagagagaaactgttaggcattcttgct

SEQ ID NO: 840669 - DNA, 33 bp, Homo sapien
ccaaagagcactcagcagaaaatgttagggtag

SEQ ID NO: 840670 - DNA, 33 bp, Homo sapien
ccaaagagcactcagcggaaaatgttagggtag

SEQ ID NO: 840671 - DNA, 33 bp, Homo sapien
ttcttttgcatgctaaccccagccattgtagct

SEQ ID NO: 840672 - DNA, 33 bp, Homo sapien
ttcttttgcatgctaatcccagccattgtagct

SEQ ID NO: 840673 - DNA, 33 bp, Homo sapien
ctttcagtagatcaagaaccagggcaaagtcac

SEQ ID NO: 840674 - DNA, 33 bp, Homo sapien
ctttcagtagatcaaggaccagggcaaagtcac

SEQ ID NO: 840675 - DNA, 33 bp, Homo sapien
gaatccagcggacctccgaacttcatttgttca

SEQ ID NO: 840676 - DNA, 33 bp, Homo sapien
gaatccagcggacctcggaacttcatttgttca

SEQ ID NO: 840677 - DNA, 33 bp, Homo sapien
taaaaagccgagaaaaagcattagagacaggga

SEQ ID NO: 840678 - DNA, 33 bp, Homo sapien
taaaaagccgagaaaaggcattagagacaggga

SEQ ID NO: 840679 - DNA, 33 bp, Homo sapien
gtcaaattctgacacaatccagcaagtaactat

SEQ ID NO: 840680 - DNA, 33 bp, Homo sapien
gtcaaattctgacacagtccagcaagtaactat

SEQ ID NO: 840681 - DNA, 33 bp, Homo sapien
gggaggacagaaaagacagccacttccatcttt

SEQ ID NO: 840682 - DNA, 33 bp, Homo sapien
gggaggacagaaaagatagccacttccatcttt

SEQ ID NO: 840683 - DNA, 33 bp, Homo sapien
ggatataactgaggaaacttcttctgcattttt

SEQ ID NO: 840684 - DNA, 33 bp, Homo sapien
ggatataactgaggaatcttcttctgcattttt

SEQ ID NO: 840685 - DNA, 33 bp, Homo sapien
ttgcatttgtacaacacggtttttccatagagt

SEQ ID NO: 840686 - DNA, 33 bp, Homo sapien
ttgcatttgtacaacatggtttttccatagagt

SEQ ID NO: 840687 - DNA, 33 bp, Homo sapien
ccctggcctgctgcctaactatgagtaggtgtg

SEQ ID NO: 840688 - DNA, 33 bp, Homo sapien
ccctggcctgctgccttactatgagtaggtgtg

SEQ ID NO: 840689 - DNA, 33 bp, Homo sapien
tccttttctaccacgaaaagcaagtgcagaggt

SEQ ID NO: 840690 - DNA, 33 bp, Homo sapien
tccttttctaccacgagaagcaagtgcagaggt

SEQ ID NO: 840691 - DNA, 33 bp, Homo sapien
gttaagttttggatgacaggcaacacctgaaaa

SEQ ID NO: 840692 - DNA, 33 bp, Homo sapien
gttaagttttggatgataggcaacacctgaaaa

SEQ ID NO: 840693 - DNA, 33 bp, Homo sapien
ggaatggaggcctctacagtgaccagatgtgca

SEQ ID NO: 840694 - DNA, 33 bp, Homo sapien
ggaatggaggcctctagagtgaccagatgtgca

SEQ ID NO: 840695 - DNA, 33 bp, Homo sapien
tccaggttctcccctaagcattgcaggagaagg

SEQ ID NO: 840696 - DNA, 33 bp, Homo sapien
tccaggttctcccctaggcattgcaggagaagg

SEQ ID NO: 840697 - DNA, 33 bp, Homo sapien
ctctggggtacatttcacgctccctgagattag

SEQ ID NO: 840698 - DNA, 33 bp, Homo sapien
ctctggggtacatttctcgctccctgagattag

SEQ ID NO: 840699 - DNA, 33 bp, Homo sapien
tgacctggccatatcacaccctttctgagcctc

SEQ ID NO: 840700 - DNA, 33 bp, Homo sapien
tgacctggccatatcataccctttctgagcctc

SEQ ID NO: 840701 - DNA, 33 bp, Homo sapien
gcattgcaaaaaaatacgctgtagaaactttga

SEQ ID NO: 840702 - DNA, 33 bp, Homo sapien
gcattgcaaaaaaatatgctgtagaaactttga

SEQ ID NO: 840703 - DNA, 33 bp, Homo sapien
aatagataacgaattgacaaatggtcctgaaaa

SEQ ID NO: 840704 - DNA, 33 bp, Homo sapien
aatagataacgaattgtcaaatggtcctgaaaa

SEQ ID NO: 840705 - DNA, 33 bp, Homo sapien
aggaaatagcttgaaaacaattacacctgccta

SEQ ID NO: 840706 - DNA, 33 bp, Homo sapien
aggaaatagcttgaaagcaattacacctgccta

SEQ ID NO: 840707 - DNA, 33 bp, Homo sapien
gaagtgaggctaactaagggccatcttgaaggc

SEQ ID NO: 840708 - DNA, 33 bp, Homo sapien
gaagtgaggctaactaggggccatcttgaaggc

SEQ ID NO: 840709 - DNA, 33 bp, Homo sapien
aaggctcaaagaggacaagaggatagaattccc

SEQ ID NO: 840710 - DNA, 33 bp, Homo sapien
aaggctcaaagaggaccagaggatagaattccc

SEQ ID NO: 840711 - DNA, 33 bp, Homo sapien
aggaacaggagcagaaaactctttgtcctttta

SEQ ID NO: 840712 - DNA, 33 bp, Homo sapien
aggaacaggagcagaatactctttgtcctttta

SEQ ID NO: 840713 - DNA, 33 bp, Homo sapien
aggacagctgtattagacagtgcttccaaagga

SEQ ID NO: 840714 - DNA, 33 bp, Homo sapien
aggacagctgtattaggcagtgcttccaaagga

SEQ ID NO: 840715 - DNA, 33 bp, Homo sapien
cccacgtcctacattcacagacagaaaagagac

SEQ ID NO: 840716 - DNA, 33 bp, Homo sapien
cccacgtcctacattcgcagacagaaaagagac

SEQ ID NO: 840717 - DNA, 33 bp, Homo sapien
ctctcgcactacaataacaaaattgaatagttg

SEQ ID NO: 840718 - DNA, 33 bp, Homo sapien
ctctcgcactacaatagcaaaattgaatagttg

SEQ ID NO: 840719 - DNA, 33 bp, Homo sapien
gattgctagtgggctggattccaaggacttagt

SEQ ID NO: 840720 - DNA, 33 bp, Homo sapien
gattgctagtgggctgtattccaaggacttagt

SEQ ID NO: 840721 - DNA, 33 bp, Homo sapien
aacttgcagaattccaaatcctgagacttcctt

SEQ ID NO: 840722 - DNA, 33 bp, Homo sapien
aacttgcagaattccacatcctgagacttcctt

SEQ ID NO: 840723 - DNA, 33 bp, Homo sapien
ttaaacaactccccaaagtcacccatgtggcac

SEQ ID NO: 840724 - DNA, 33 bp, Homo sapien
ttaaacaactccccaaggtcacccatgtggcac

SEQ ID NO: 840725 - DNA, 33 bp, Homo sapien
aaacagccagattagaccctacgacatttcttt

SEQ ID NO: 840726 - DNA, 33 bp, Homo sapien
aaacagccagattagatcctacgacatttcttt

SEQ ID NO: 840727 - DNA, 33 bp, Homo sapien
cagattaaagtcattaccctcatggtggcacaa

SEQ ID NO: 840728 - DNA, 33 bp, Homo sapien
cagattaaagtcattatcctcatggtggcacaa

SEQ ID NO: 840729 - DNA, 33 bp, Homo sapien
taatgttatctgtgcaataaggcttgatcctcc

SEQ ID NO: 840730 - DNA, 33 bp, Homo sapien
taatgttatctgtgcagtaaggcttgatcctcc

SEQ ID NO: 840731 - DNA, 33 bp, Homo sapien
ctggtgaacaataaaacgggaagtcagaggaag

SEQ ID NO: 840732 - DNA, 33 bp, Homo sapien
ctggtgaacaataaaatgggaagtcagaggaag

SEQ ID NO: 840733 - DNA, 33 bp, Homo sapien
tatagaaaagctgctacaaccaagatcagttcc

SEQ ID NO: 840734 - DNA, 33 bp, Homo sapien
tatagaaaagctgctagaaccaagatcagttcc

SEQ ID NO: 840735 - DNA, 33 bp, Homo sapien
ttagagatctcaataaaacctgaactgtatgga

SEQ ID NO: 840736 - DNA, 33 bp, Homo sapien
ttagagatctcaataagacctgaactgtatgga

SEQ ID NO: 840737 - DNA, 33 bp, Homo sapien
gttactgtaattcacccctgagaaatcaccaaa

SEQ ID NO: 840738 - DNA, 33 bp, Homo sapien
gttactgtaattcacctctgagaaatcaccaaa

SEQ ID NO: 840739 - DNA, 33 bp, Homo sapien
catggtctttctattacaccacataactggctt

SEQ ID NO: 840740 - DNA, 33 bp, Homo sapien
catggtctttctattataccacataactggctt

SEQ ID NO: 840741 - DNA, 33 bp, Homo sapien
tttgtcttgagttggacgctttagggaaaactt

SEQ ID NO: 840742 - DNA, 33 bp, Homo sapien
tttgtcttgagttggatgctttagggaaaactt

SEQ ID NO: 840743 - DNA, 33 bp, Homo sapien
cttccacattcctagaatcatgagatcttggac

SEQ ID NO: 840744 - DNA, 33 bp, Homo sapien
cttccacattcctagattcatgagatcttggac

SEQ ID NO: 840745 - DNA, 33 bp, Homo sapien
atgagttggcttaaaacagtaattcaagtcaca

SEQ ID NO: 840746 - DNA, 33 bp, Homo sapien
atgagttggcttaaaatagtaattcaagtcaca

SEQ ID NO: 840747 - DNA, 33 bp, Homo sapien
aagttcagaggttgccatctagccttcctcact

SEQ ID NO: 840748 - DNA, 33 bp, Homo sapien
aagttcagaggttgccgtctagccttcctcact

SEQ ID NO: 840749 - DNA, 33 bp, Homo sapien
tccctgatgcatggcaactgctggagcattctc

SEQ ID NO: 840750 - DNA, 33 bp, Homo sapien
tccctgatgcatggcacctgctggagcattctc

SEQ ID NO: 840751 - DNA, 33 bp, Homo sapien
ggagaggttcattgagaaaagagtcatttagcc

SEQ ID NO: 840752 - DNA, 33 bp, Homo sapien
ggagaggttcattgaggaaagagtcatttagcc

SEQ ID NO: 840753 - DNA, 33 bp, Homo sapien
atttggtaaggctcaactatatactggttacta

SEQ ID NO: 840754 - DNA, 33 bp, Homo sapien
atttggtaaggctcaagtatatactggttacta

SEQ ID NO: 840755 - DNA, 33 bp, Homo sapien
gaaagaaaagttaaacaaattagcagagacacc

SEQ ID NO: 840756 - DNA, 33 bp, Homo sapien
gaaagaaaagttaaaccaattagcagagacacc

SEQ ID NO: 840757 - DNA, 33 bp, Homo sapien
agcattgctattttggaatttaaagcacatgct

SEQ ID NO: 840758 - DNA, 33 bp, Homo sapien
agcattgctattttgggatttaaagcacatgct

SEQ ID NO: 840759 - DNA, 33 bp, Homo sapien
aatgaagtggttaccacactaatcttgtgagcc

SEQ ID NO: 840760 - DNA, 33 bp, Homo sapien
aatgaagtggttaccatactaatcttgtgagcc

SEQ ID NO: 840761 - DNA, 33 bp, Homo sapien
ggctatatcatttgtacaaaccagcgcaacatg

SEQ ID NO: 840762 - DNA, 33 bp, Homo sapien
ggctatatcatttgtagaaaccagcgcaacatg

SEQ ID NO: 840763 - DNA, 33 bp, Homo sapien
aaggttgttctgagaaagtgagacttgagtgaa

SEQ ID NO: 840764 - DNA, 33 bp, Homo sapien
aaggttgttctgagaaggtgagacttgagtgaa

SEQ ID NO: 840765 - DNA, 33 bp, Homo sapien
ccaccaggagacacaacagtgattccccccaac

SEQ ID NO: 840766 - DNA, 33 bp, Homo sapien
ccaccaggagacacaagagtgattccccccaac

SEQ ID NO: 840767 - DNA, 33 bp, Homo sapien; identical to SEQ ID NO: 840765

SEQ ID NO: 840768 - DNA, 33 bp, Homo sapien; identical to SEQ ID NO: 840766

SEQ ID NO: 840769 - DNA, 33 bp, Homo sapien
aaggaggtgcattacactccaaaagaactgctt

SEQ ID NO: 840770 - DNA, 33 bp, Homo sapien
aaggaggtgcattacattccaaaagaactgctt

SEQ ID NO: 840771 - DNA, 33 bp, Homo sapien
ttgtacgtcttaacaaaagggccatgttatcat

SEQ ID NO: 840772 - DNA, 33 bp, Homo sapien
ttgtacgtcttaacaagagggccatgttatcat

SEQ ID NO: 840773 - DNA, 33 bp, Homo sapien
cataggtgatcctagacaaaggcatatgatgct

SEQ ID NO: 840774 - DNA, 33 bp, Homo sapien
cataggtgatcctagagaaaggcatatgatgct

SEQ ID NO: 840775 - DNA, 33 bp, Homo sapien
tgaatagtgctgtgagaaacatgcgagggcatg

SEQ ID NO: 840776 - DNA, 33 bp, Homo sapien
tgaatagtgctgtgaggaacatgcgagggcatg

SEQ ID NO: 840777 - DNA, 33 bp, Homo sapien
aggagggttcattcacgggagatttcaggcttg

SEQ ID NO: 840778 - DNA, 33 bp, Homo sapien
aggagggttcattcactggagatttcaggcttg

SEQ ID NO: 840779 - DNA, 33 bp, Homo sapien
atctatcccttcatcaatacatcatatttttat

SEQ ID NO: 840780 - DNA, 33 bp, Homo sapien
atctatcccttcatcagtacatcatatttttat

SEQ ID NO: 840781 - DNA, 33 bp, Homo sapien
tctttgttgatctttaactcttgggctatttca

SEQ ID NO: 840782 - DNA, 33 bp, Homo sapien
tctttgttgatctttacctcttgggctatttca

SEQ ID NO: 840783 - DNA, 33 bp, Homo sapien
tttatgtcttagaagggatgaggggagattgct

SEQ ID NO: 840784 - DNA, 33 bp, Homo sapien
tttatgtcttagaaggtatgaggggagattgct

SEQ ID NO: 840785 - DNA, 33 bp, Homo sapien
tgggagagtcaaatgacatcctttatgtggtga

SEQ ID NO: 840786 - DNA, 33 bp, Homo sapien
tgggagagtcaaatgagatcctttatgtggtga

SEQ ID NO: 840787 - DNA, 33 bp, Homo sapien
gtccttttgagggaacagaagagtcagagtcag

SEQ ID NO: 840788 - DNA, 33 bp, Homo sapien
gtccttttgagggaacggaagagtcagagtcag

SEQ ID NO: 840789 - DNA, 33 bp, Homo sapien
tcttggatatgcttcaaaataatttgagtttag

SEQ ID NO: 840790 - DNA, 33 bp, Homo sapien
tcttggatatgcttcagaataatttgagtttag

SEQ ID NO: 840791 - DNA, 33 bp, Homo sapien
tctttgtgtgaagaaacggttccatattccgat

SEQ ID NO: 840792 - DNA, 33 bp, Homo sapien
tctttgtgtgaagaaatggttccatattccgat

SEQ ID NO: 840793 - DNA, 33 bp, Homo sapien
tctccctaaatttcgaactttgaattctctcca

SEQ ID NO: 840794 - DNA, 33 bp, Homo sapien
tctccctaaatttcgatctttgaattctctcca

SEQ ID NO: 840795 - DNA, 33 bp, Homo sapien
gtcagtcaacagggaaatgatttttcagtttga

SEQ ID NO: 840796 - DNA, 33 bp, Homo sapien
gtcagtcaacagggaagtgatttttcagtttga

SEQ ID NO: 840797 - DNA, 33 bp, Homo sapien
gcaaaacaaggatgtaagtaaaacagacgttct

SEQ ID NO: 840798 - DNA, 33 bp, Homo sapien
gcaaaacaaggatgtaggtaaaacagacgttct

SEQ ID NO: 840799 - DNA, 33 bp, Homo sapien
gagttttagctagttaagaacattcttccatct

SEQ ID NO: 840800 - DNA, 33 bp, Homo sapien
gagttttagctagttaggaacattcttccatct

SEQ ID NO: 840801 - DNA, 33 bp, Homo sapien
ggagcttcaacttctacctgagaaaatttttct

SEQ ID NO: 840802 - DNA, 33 bp, Homo sapien
ggagcttcaacttctatctgagaaaatttttct

SEQ ID NO: 840803 - DNA, 33 bp, Homo sapien
ctgggattattggtgccgaacaatgaagccaag

SEQ ID NO: 840804 - DNA, 33 bp, Homo sapien
ctgggattattggtgctgaacaatgaagccaag

SEQ ID NO: 840805 - DNA, 33 bp, Homo sapien
tgcagatacagggacaaagatggccacagcaca

SEQ ID NO: 840806 - DNA, 33 bp, Homo sapien
tgcagatacagggacagagatggccacagcaca

SEQ ID NO: 840807 - DNA, 33 bp, Homo sapien
ctgctgttggtatacaaatttttaaccatgcta

SEQ ID NO: 840808 - DNA, 33 bp, Homo sapien
ctgctgttggtatacagatttttaaccatgcta

SEQ ID NO: 840809 - DNA, 33 bp, Homo sapien
aaacaccgtgcaaagaactcttgaagtaaatgg

SEQ ID NO: 840810 - DNA, 33 bp, Homo sapien
aaacaccgtgcaaagatctcttgaagtaaatgg

SEQ ID NO: 840811 - DNA, 33 bp, Homo sapien
tgttcttcatgagtaactggtggctaacatggc

SEQ ID NO: 840812 - DNA, 33 bp, Homo sapien
tgttcttcatgagtaattggtggctaacatggc

SEQ ID NO: 840813 - DNA, 33 bp, Homo sapien
tccagtcctctcattacacagaagatgaagctg

SEQ ID NO: 840814 - DNA, 33 bp, Homo sapien
tccagtcctctcattatacagaagatgaagctg

SEQ ID NO: 840815 - DNA, 33 bp, Homo sapien
ctcaaccaagagataaggtaccaaacagcagaa

SEQ ID NO: 840816 - DNA, 33 bp, Homo sapien
ctcaaccaagagataatgtaccaaacagcagaa

SEQ ID NO: 840817 - DNA, 33 bp, Homo sapien
cactcttggtacctccactgggctcaaagcctt

SEQ ID NO: 840818 - DNA, 33 bp, Homo sapien
cactcttggtacctccgctgggctcaaagcctt

SEQ ID NO: 840819 - DNA, 33 bp, Homo sapien
aattagaattgaaatcactgctgagaaagagaa

SEQ ID NO: 840820 - DNA, 33 bp, Homo sapien
aattagaattgaaatcgctgctgagaaagagaa

SEQ ID NO: 840821 - DNA, 33 bp, Homo sapien
ggcatcctctatattcaccagctttaaaaatgg

SEQ ID NO: 840822 - DNA, 33 bp, Homo sapien
ggcatcctctatattcgccagctttaaaaatgg

SEQ ID NO: 840823 - DNA, 33 bp, Homo sapien
agaaagtgccaagtaacagtgtttttctctgtt

SEQ ID NO: 840824 - DNA, 33 bp, Homo sapien
agaaagtgccaagtaatagtgtttttctctgtt

SEQ ID NO: 840825 - DNA, 33 bp, Homo sapien
cactgccaaaatcctacctatgcagttaaagcg

SEQ ID NO: 840826 - DNA, 33 bp, Homo sapien
cactgccaaaatcctatctatgcagttaaagcg

SEQ ID NO: 840827 - DNA, 33 bp, Homo sapien
atctcagaatgaaacactgaggtttgcttggcc

SEQ ID NO: 840828 - DNA, 33 bp, Homo sapien
atctcagaatgaaacattgaggtttgcttggcc

SEQ ID NO: 840829 - DNA, 33 bp, Homo sapien
aaaaagctacatcgtccaagatcgtaaaaccag

SEQ ID NO: 840830 - DNA, 33 bp, Homo sapien
aaaaagctacatcgtctaagatcgtaaaaccag

SEQ ID NO: 840831 - DNA, 33 bp, Homo sapien
actgatatccagttccaccattggctggtttta

SEQ ID NO: 840832 - DNA, 33 bp, Homo sapien
actgatatccagttccgccattggctggtttta

SEQ ID NO: 840833 - DNA, 33 bp, Homo sapien
tcacaattcaattttcgaacatctccatcatcc

SEQ ID NO: 840834 - DNA, 33 bp, Homo sapien
tcacaattcaattttctaacatctccatcatcc

SEQ ID NO: 840835 - DNA, 33 bp, Homo sapien
tgctttcgccatgtgacgagattgctccccttt

SEQ ID NO: 840836 - DNA, 33 bp, Homo sapien
tgctttcgccatgtgatgagattgctccccttt

SEQ ID NO: 840837 - DNA, 33 bp, Homo sapien
gtgagatattgccagacctagttgtttaaaagg

SEQ ID NO: 840838 - DNA, 33 bp, Homo sapien
gtgagatattgccagatctagttgtttaaaagg

SEQ ID NO: 840839 - DNA, 33 bp, Homo sapien
caggaaaagtttattaacagaaaatgaagcaaa

SEQ ID NO: 840840 - DNA, 33 bp, Homo sapien
caggaaaagtttattaccagaaaatgaagcaaa

SEQ ID NO: 840841 - DNA, 33 bp, Homo sapien
aggaagaaatacatcaacaccttctctagctaa

SEQ ID NO: 840842 - DNA, 33 bp, Homo sapien
aggaagaaatacatcagcaccttctctagctaa

SEQ ID NO: 840843 - DNA, 33 bp, Homo sapien
aggaagccctgacttacagcaatttgccaatat

SEQ ID NO: 840844 - DNA, 33 bp, Homo sapien
aggaagccctgacttatagcaatttgccaatat

SEQ ID NO: 840845 - DNA, 33 bp, Homo sapien
tctcaaaggtaatgtacatgaacagatactaat

SEQ ID NO: 840846 - DNA, 33 bp, Homo sapien
tctcaaaggtaatgtatatgaacagatactaat

SEQ ID NO: 840847 - DNA, 33 bp, Homo sapien
tggttgaaagatttagaacagtttagtaatact

SEQ ID NO: 840848 - DNA, 33 bp, Homo sapien
tggttgaaagatttagtacagtttagtaatact

SEQ ID NO: 840849 - DNA, 33 bp, Homo sapien
ttctgcatgggcaacacaaaaatagccaatcaa

SEQ ID NO: 840850 - DNA, 33 bp, Homo sapien
ttctgcatgggcaacataaaaatagccaatcaa

SEQ ID NO: 840851 - DNA, 33 bp, Homo sapien
tttatcaccttatctcccctaccattatttgag

SEQ ID NO: 840852 - DNA, 33 bp, Homo sapien
tttatcaccttatctctcctaccattatttgag

SEQ ID NO: 840853 - DNA, 33 bp, Homo sapien
ccaaactcaaaaacacagtaatgatcttgcttt

SEQ ID NO: 840854 - DNA, 33 bp, Homo sapien
ccaaactcaaaaacacggtaatgatcttgcttt

SEQ ID NO: 840855 - DNA, 33 bp, Homo sapien
ttagatacgagtatagcatgctgatggtgttaa

SEQ ID NO: 840856 - DNA, 33 bp, Homo sapien
ttagatacgagtatagtatgctgatggtgttaa

SEQ ID NO: 840857 - DNA, 33 bp, Homo sapien
ctcactaaatcttacacatacggaatttcttga

SEQ ID NO: 840858 - DNA, 33 bp, Homo sapien
ctcactaaatcttacatatacggaatttcttga

SEQ ID NO: 840859 - DNA, 33 bp, Homo sapien
tgtccttttgatccacagtagctttaattttga

SEQ ID NO: 840860 - DNA, 33 bp, Homo sapien
tgtccttttgatccacggtagctttaattttga

SEQ ID NO: 840861 - DNA, 33 bp, Homo sapien
tcttaattgatctcaaactacttaaaagttagc

SEQ ID NO: 840862 - DNA, 33 bp, Homo sapien
tcttaattgatctcaagctacttaaaagttagc

SEQ ID NO: 840863 - DNA, 33 bp, Homo sapien
aagcaggcacaacttacatggctggagcaggag

SEQ ID NO: 840864 - DNA, 33 bp, Homo sapien
aagcaggcacaacttatatggctggagcaggag

SEQ ID NO: 840865 - DNA, 33 bp, Homo sapien
ctctatttttccagaaacctactctgtcacaat

SEQ ID NO: 840866 - DNA, 33 bp, Homo sapien
ctctatttttccagaagcctactctgtcacaat

SEQ ID NO: 840867 - DNA, 33 bp, Homo sapien
taatccgaacacttcaagaggccaaagtgtgag

SEQ ID NO: 840868 - DNA, 33 bp, Homo sapien
taatccgaacacttcaggaggccaaagtgtgag

SEQ ID NO: 840869 - DNA, 33 bp, Homo sapien
tgtttattttggcttacgttaggtagatcttta

SEQ ID NO: 840870 - DNA, 33 bp, Homo sapien
tgtttattttggcttatgttaggtagatcttta

SEQ ID NO: 840871 - DNA, 33 bp, Homo sapien
aaatcctcacactaacgatttaactaccgcagt

SEQ ID NO: 840872 - DNA, 33 bp, Homo sapien
aaatcctcacactaactatttaactaccgcagt

SEQ ID NO: 840873 - DNA, 33 bp, Homo sapien
gtatgtctgagtcttaacccttcatacgtgtaa

SEQ ID NO: 840874 - DNA, 33 bp, Homo sapien
gtatgtctgagtcttagcccttcatacgtgtaa

SEQ ID NO: 840875 - DNA, 33 bp, Homo sapien
ctactttagtctaaaacattgaagttaagaatg

SEQ ID NO: 840876 - DNA, 33 bp, Homo sapien
ctactttagtctaaaatattgaagttaagaatg

SEQ ID NO: 840877 - DNA, 33 bp, Homo sapien
acattctgtgaatctacgaaattgtttatcaag

SEQ ID NO: 840878 - DNA, 33 bp, Homo sapien
acattctgtgaatctatgaaattgtttatcaag

SEQ ID NO: 840879 - DNA, 33 bp, Homo sapien
tacatatataaatacaacaaggatgagtaaaga

SEQ ID NO: 840880 - DNA, 33 bp, Homo sapien
tacatatataaatacagcaaggatgagtaaaga

SEQ ID NO: 840881 - DNA, 33 bp, Homo sapien
aggaactctcactagcaaaatcatacagttatc

SEQ ID NO: 840882 - DNA, 33 bp, Homo sapien
aggaactctcactagccaaatcatacagttatc

SEQ ID NO: 840883 - DNA, 33 bp, Homo sapien
tctgattgtccttgaactgctatgcttgaagaa

SEQ ID NO: 840884 - DNA, 33 bp, Homo sapien
tctgattgtccttgaattgctatgcttgaagaa

SEQ ID NO: 840885 - DNA, 33 bp, Homo sapien
atgggctaccatgttaagtttaagccaatgcat

SEQ ID NO: 840886 - DNA, 33 bp, Homo sapien
atgggctaccatgttaggtttaagccaatgcat

SEQ ID NO: 840887 - DNA, 33 bp, Homo sapien
tggatttcatttgaaaaggtagaataactagtt

SEQ ID NO: 840888 - DNA, 33 bp, Homo sapien
tggatttcatttgaaacggtagaataactagtt

SEQ ID NO: 840889 - DNA, 33 bp, Homo sapien
gaattaccaggctcaaattctaatcctggacct

SEQ ID NO: 840890 - DNA, 33 bp, Homo sapien
gaattaccaggctcaatttctaatcctggacct

SEQ ID NO: 840891 - DNA, 33 bp, Homo sapien
acagatctgagtactcgctgtgcagttcccacc

SEQ ID NO: 840892 - DNA, 33 bp, Homo sapien
acagatctgagtactctctgtgcagttcccacc

SEQ ID NO: 840893 - DNA, 33 bp, Homo sapien
tgtgttcacaaacccacgagctctctaaactct

SEQ ID NO: 840894 - DNA, 33 bp, Homo sapien
tgtgttcacaaacccatgagctctctaaactct

SEQ ID NO: 840895 - DNA, 33 bp, Homo sapien
catttgcaacatcatcaacgaatctggaggatg

SEQ ID NO: 840896 - DNA, 33 bp, Homo sapien
catttgcaacatcatcgacgaatctggaggatg

SEQ ID NO: 840897 - DNA, 33 bp, Homo sapien
ccattgtgcctcttacaattgataagtccgaat

SEQ ID NO: 840898 - DNA, 33 bp, Homo sapien
ccattgtgcctcttacgattgataagtccgaat

SEQ ID NO: 840899 - DNA, 33 bp, Homo sapien
ggatgccaatgttccacactaacaagtgacaca

SEQ ID NO: 840900 - DNA, 33 bp, Homo sapien
ggatgccaatgttccagactaacaagtgacaca

SEQ ID NO: 840901 - DNA, 33 bp, Homo sapien
gtactggcagactccaactctatatgaattata

SEQ ID NO: 840902 - DNA, 33 bp, Homo sapien
gtactggcagactccagctctatatgaattata

SEQ ID NO: 840903 - DNA, 33 bp, Homo sapien
ctcacgtctctaaaaacggagctgcccgagtga

SEQ ID NO: 840904 - DNA, 33 bp, Homo sapien
ctcacgtctctaaaaatggagctgcccgagtga

SEQ ID NO: 840905 - DNA, 33 bp, Homo sapien
gagactgctgttcgtacagtgaacaagtgatgg

SEQ ID NO: 840906 - DNA, 33 bp, Homo sapien
gagactgctgttcgtatagtgaacaagtgatgg

SEQ ID NO: 840907 - DNA, 33 bp, Homo sapien
gctattggtcaattgacgtatctcactagaagg

SEQ ID NO: 840908 - DNA, 33 bp, Homo sapien
gctattggtcaattgatgtatctcactagaagg

SEQ ID NO: 840909 - DNA, 33 bp, Homo sapien
ccggtactcagtttcacgtagggctgtggagga

SEQ ID NO: 840910 - DNA, 33 bp, Homo sapien
ccggtactcagtttcatgtagggctgtggagga

SEQ ID NO: 840911 - DNA, 33 bp, Homo sapien
atcacctaatgcagagcaacttttacaacttcc

SEQ ID NO: 840912 - DNA, 33 bp, Homo sapien
atcacctaatgcagagtaacttttacaacttcc

SEQ ID NO: 840913 - DNA, 33 bp, Homo sapien
ctccaaattcttcctaaatccttggcagaagac

SEQ ID NO: 840914 - DNA, 33 bp, Homo sapien
ctccaaattcttcctagatccttggcagaagac

SEQ ID NO: 840915 - DNA, 33 bp, Homo sapien
ctaaaggactcaacaaggcaaacaacagggagc

SEQ ID NO: 840916 - DNA, 33 bp, Homo sapien
ctaaaggactcaacaatgcaaacaacagggagc

SEQ ID NO: 840917 - DNA, 33 bp, Homo sapien
atcactgacacctgccagactcttaatgccctc

SEQ ID NO: 840918 - DNA, 33 bp, Homo sapien
atcactgacacctgccggactcttaatgccctc

SEQ ID NO: 840919 - DNA, 33 bp, Homo sapien
cagactaggacctcaacggacaagcaaaggatc

SEQ ID NO: 840920 - DNA, 33 bp, Homo sapien
cagactaggacctcaatggacaagcaaaggatc

SEQ ID NO: 840921 - DNA, 33 bp, Homo sapien
gaatattagccatcagaatatttgtggaaaaaa

SEQ ID NO: 840922 - DNA, 33 bp, Homo sapien
gaatattagccatcagcatatttgtggaaaaaa

SEQ ID NO: 840923 - DNA, 33 bp, Homo sapien
tcattaattttttgagaatgtaaacacttgact

SEQ ID NO: 840924 - DNA, 33 bp, Homo sapien
tcattaattttttgaggatgtaaacacttgact

SEQ ID NO: 840925 - DNA, 33 bp, Homo sapien
attctttgcataacaaaacaatgtttctaagtc

SEQ ID NO: 840926 - DNA, 33 bp, Homo sapien
attctttgcataacaatacaatgtttctaagtc

SEQ ID NO: 840927 - DNA, 33 bp, Homo sapien
ttttttatattggaaccgctgacaacataggaa

SEQ ID NO: 840928 - DNA, 33 bp, Homo sapien
ttttttatattggaactgctgacaacataggaa

SEQ ID NO: 840929 - DNA, 33 bp, Homo sapien
gcagtccagggccttgcataaaaagtgggtctt

SEQ ID NO: 840930 - DNA, 33 bp, Homo sapien
gcagtccagggccttgtataaaaagtgggtctt

SEQ ID NO: 840931 - DNA, 33 bp, Homo sapien
tcttctgttcttgacaaggttgtatatttcagg

SEQ ID NO: 840932 - DNA, 33 bp, Homo sapien
tcttctgttcttgacagggttgtatatttcagg

SEQ ID NO: 840933 - DNA, 33 bp, Homo sapien
gcatttccccctcctgcaatatgtgcaaaaaca

SEQ ID NO: 840934 - DNA, 33 bp, Homo sapien
gcatttccccctcctggaatatgtgcaaaaaca

SEQ ID NO: 840935 - DNA, 33 bp, Homo sapien
gaggaaaacacattaaactatccagacttaggc

SEQ ID NO: 840936 - DNA, 33 bp, Homo sapien
gaggaaaacacattaatctatccagacttaggc

SEQ ID NO: 840937 - DNA, 33 bp, Homo sapien
attaggtcagtctatacaaatgccttcaaggtt

SEQ ID NO: 840938 - DNA, 33 bp, Homo sapien
attaggtcagtctatataaatgccttcaaggtt

SEQ ID NO: 840939 - DNA, 33 bp, Homo sapien
tcacagagccagagaaaggctacatgagacctg

SEQ ID NO: 840940 - DNA, 33 bp, Homo sapien
tcacagagccagagaacggctacatgagacctg

SEQ ID NO: 840941 - DNA, 33 bp, Homo sapien
cttttctgtgttactccgactagaccacaaaaa

SEQ ID NO: 840942 - DNA, 33 bp, Homo sapien
cttttctgtgttactctgactagaccacaaaaa

SEQ ID NO: 840943 - DNA, 33 bp, Homo sapien
tttcgtggcctttctgaattgttatagaagagt

SEQ ID NO: 840944 - DNA, 33 bp, Homo sapien
tttcgtggcctttctgcattgttatagaagagt

SEQ ID NO: 840945 - DNA, 33 bp, Homo sapien
tatgaaaaaacatgaccactaatcggcttttac

SEQ ID NO: 840946 - DNA, 33 bp, Homo sapien
tatgaaaaaacatgactactaatcggcttttac

SEQ ID NO: 840947 - DNA, 33 bp, Homo sapien
ttgacaggagccctgcaaagagatattcattca

SEQ ID NO: 840948 - DNA, 33 bp, Homo sapien
ttgacaggagccctgcgaagagatattcattca

SEQ ID NO: 840949 - DNA, 33 bp, Homo sapien
atctactcaaccaaagacaattatttggcttag

SEQ ID NO: 840950 - DNA, 33 bp, Homo sapien
atctactcaaccaaaggcaattatttggcttag

SEQ ID NO: 840951 - DNA, 33 bp, Homo sapien
tatttggtactgtaacaaggccaaatttatgat

SEQ ID NO: 840952 - DNA, 33 bp, Homo sapien
tatttggtactgtaacgaggccaaatttatgat

SEQ ID NO: 840953 - DNA, 33 bp, Homo sapien
aaatggtattagcatacggaaatcataaatttg

SEQ ID NO: 840954 - DNA, 33 bp, Homo sapien
aaatggtattagcatatggaaatcataaatttg

SEQ ID NO: 840955 - DNA, 33 bp, Homo sapien
aaaaagcttgtttgtgaagacttgtaatgataa

SEQ ID NO: 840956 - DNA, 33 bp, Homo sapien
aaaaagcttgtttgtgcagacttgtaatgataa

SEQ ID NO: 840957 - DNA, 33 bp, Homo sapien
gcaattccaatctaaacatttgttgaagttagc

SEQ ID NO: 840958 - DNA, 33 bp, Homo sapien
gcaattccaatctaaatatttgttgaagttagc

SEQ ID NO: 840959 - DNA, 33 bp, Homo sapien
ctttgagaatataaacagatggccattttcaca

SEQ ID NO: 840960 - DNA, 33 bp, Homo sapien
ctttgagaatataaacggatggccattttcaca

SEQ ID NO: 840961 - DNA, 33 bp, Homo sapien
cagaaaattttcataaacatacagtctatcgtg

SEQ ID NO: 840962 - DNA, 33 bp, Homo sapien
cagaaaattttcataagcatacagtctatcgtg

SEQ ID NO: 840963 - DNA, 33 bp, Homo sapien
tcatgtctctttttcacaaggacttcttagtgc

SEQ ID NO: 840964 - DNA, 33 bp, Homo sapien
tcatgtctctttttcagaaggacttcttagtgc

SEQ ID NO: 840965 - DNA, 33 bp, Homo sapien
actgcttcagtgtctacggtgaaagattcactt

SEQ ID NO: 840966 - DNA, 33 bp, Homo sapien
actgcttcagtgtctatggtgaaagattcactt

SEQ ID NO: 840967 - DNA, 33 bp, Homo sapien
ataaagtaaacatagaatagaagaagcagtcaa

SEQ ID NO: 840968 - DNA, 33 bp, Homo sapien
ataaagtaaacatagactagaagaagcagtcaa

SEQ ID NO: 840969 - DNA, 33 bp, Homo sapien
tgctttctacctcttaccagttgtaaacagaat

SEQ ID NO: 840970 - DNA, 33 bp, Homo sapien
tgctttctacctcttatcagttgtaaacagaat

SEQ ID NO: 840971 - DNA, 33 bp, Homo sapien
gtcactttggaaagcaaggtatcttatgactgc

SEQ ID NO: 840972 - DNA, 33 bp, Homo sapien
gtcactttggaaagcagggtatcttatgactgc

SEQ ID NO: 840973 - DNA, 33 bp, Homo sapien
tgtaaaggatggtaatcatgaggtcttagagta

SEQ ID NO: 840974 - DNA, 33 bp, Homo sapien
tgtaaaggatggtaatgatgaggtcttagagta

SEQ ID NO: 840975 - DNA, 33 bp, Homo sapien
tgggggcagcagatgacagttacagtgaaattc

SEQ ID NO: 840976 - DNA, 33 bp, Homo sapien
tgggggcagcagatgagagttacagtgaaattc

SEQ ID NO: 840977 - DNA, 33 bp, Homo sapien
aaaaattaatactcggccatgactttaagtaag

SEQ ID NO: 840978 - DNA, 33 bp, Homo sapien
aaaaattaatactcgggcatgactttaagtaag

SEQ ID NO: 840979 - DNA, 33 bp, Homo sapien
ctgggaatcatatgccaaagagttaacagagcg

SEQ ID NO: 840980 - DNA, 33 bp, Homo sapien
ctgggaatcatatgccgaagagttaacagagcg

SEQ ID NO: 840981 - DNA, 33 bp, Homo sapien
atttgtggcgtttgccaccttccatgatgtagc

SEQ ID NO: 840982 - DNA, 33 bp, Homo sapien
atttgtggcgtttgccgccttccatgatgtagc

SEQ ID NO: 840983 - DNA, 33 bp, Homo sapien
agcttcatttaagaacaacctcctgcatgaaat

SEQ ID NO: 840984 - DNA, 33 bp, Homo sapien
agcttcatttaagaaccacctcctgcatgaaat

SEQ ID NO: 840985 - DNA, 33 bp, Homo sapien
ccattctttccattccactccaacaaacagaat

SEQ ID NO: 840986 - DNA, 33 bp, Homo sapien
ccattctttccattcctctccaacaaacagaat

SEQ ID NO: 840987 - DNA, 33 bp, Homo sapien
agctattgatcttgaccctcagtatctctgaat

SEQ ID NO: 840988 - DNA, 33 bp, Homo sapien
agctattgatcttgactctcagtatctctgaat

SEQ ID NO: 840989 - DNA, 33 bp, Homo sapien
catggaagtgtcacccaaggggttcgcaaatta

SEQ ID NO: 840990 - DNA, 33 bp, Homo sapien
catggaagtgtcacccgaggggttcgcaaatta

SEQ ID NO: 840991 - DNA, 33 bp, Homo sapien
ttctgcttgacagtcaacttcacctgatcacta

SEQ ID NO: 840992 - DNA, 33 bp, Homo sapien
ttctgcttgacagtcagcttcacctgatcacta

SEQ ID NO: 840993 - DNA, 33 bp, Homo sapien
gatctaaacactggcccagaaacatgcgggaaa

SEQ ID NO: 840994 - DNA, 33 bp, Homo sapien
gatctaaacactggcctagaaacatgcgggaaa

SEQ ID NO: 840995 - DNA, 33 bp, Homo sapien
atacttggtaatatagccacttttttaattgtt

SEQ ID NO: 840996 - DNA, 33 bp, Homo sapien
atacttggtaatataggcacttttttaattgtt

SEQ ID NO: 840997 - DNA, 33 bp, Homo sapien
aaatggaattgataaaccttgttgacatggtat

SEQ ID NO: 840998 - DNA, 33 bp, Homo sapien
aaatggaattgataaatcttgttgacatggtat

SEQ ID NO: 840999 - DNA, 33 bp, Homo sapien
cctgttttcagcaaaaagtataattctgtatca

SEQ ID NO: 841000 - DNA, 33 bp, Homo sapien
cctgttttcagcaaaaggtataattctgtatca

SEQ ID NO: 841001 - DNA, 33 bp, Homo sapien
tgtttaagtttggaaacacagtgtttgagagtt

SEQ ID NO: 841002 - DNA, 33 bp, Homo sapien
tgtttaagtttggaaatacagtgtttgagagtt

SEQ ID NO: 841003 - DNA, 33 bp, Homo sapien
cttttgacatatcataggtggacttattttttt

SEQ ID NO: 841004 - DNA, 33 bp, Homo sapien
cttttgacatatcatatgtggacttattttttt

SEQ ID NO: 841005 - DNA, 33 bp, Homo sapien
actcttcgcttcacaaatcaactttcagagttt

SEQ ID NO: 841006 - DNA, 33 bp, Homo sapien
actcttcgcttcacaagtcaactttcagagttt

SEQ ID NO: 841007 - DNA, 33 bp, Homo sapien
acaggagagaagatgaagggtaacaaactggga

SEQ ID NO: 841008 - DNA, 33 bp, Homo sapien
acaggagagaagatgatgggtaacaaactggga

SEQ ID NO: 841009 - DNA, 33 bp, Homo sapien
ggctctatacgtggaaagtagtagtctcataac

SEQ ID NO: 841010 - DNA, 33 bp, Homo sapien
ggctctatacgtggaaggtagtagtctcataac

SEQ ID NO: 841011 - DNA, 33 bp, Homo sapien
ttgtccataattgctcaattccaattaattaac

SEQ ID NO: 841012 - DNA, 33 bp, Homo sapien
ttgtccataattgctctattccaattaattaac

SEQ ID NO: 841013 - DNA, 33 bp, Homo sapien
gtgcacgtcctctttgaaactctcctcagtagg

SEQ ID NO: 841014 - DNA, 33 bp, Homo sapien
gtgcacgtcctctttgtaactctcctcagtagg

SEQ ID NO: 841015 - DNA, 33 bp, Homo sapien
tgatgataattttacccgcgtggattttctcat

SEQ ID NO: 841016 - DNA, 33 bp, Homo sapien
tgatgataattttacctgcgtggattttctcat

SEQ ID NO: 841017 - DNA, 33 bp, Homo sapien
ctccctcatcattccaaagaatacaaaccagac

SEQ ID NO: 841018 - DNA, 33 bp, Homo sapien
ctccctcatcattccacagaatacaaaccagac

SEQ ID NO: 841019 - DNA, 33 bp, Homo sapien
tgtgaggggattgtgaaacaagttgatgactgt

SEQ ID NO: 841020 - DNA, 33 bp, Homo sapien
tgtgaggggattgtgacacaagttgatgactgt

SEQ ID NO: 841021 - DNA, 33 bp, Homo sapien
tcttctcactgacaggacacacttcggcacctg

SEQ ID NO: 841022 - DNA, 33 bp, Homo sapien
tcttctcactgacagggcacacttcggcacctg

SEQ ID NO: 841023 - DNA, 33 bp, Homo sapien
cttttctgagtggaagacttcatggtaattacc

SEQ ID NO: 841024 - DNA, 33 bp, Homo sapien
cttttctgagtggaagtcttcatggtaattacc

SEQ ID NO: 841025 - DNA, 33 bp, Homo sapien
gatggtattgggaaccaactataggctaggagg

SEQ ID NO: 841026 - DNA, 33 bp, Homo sapien
gatggtattgggaaccgactataggctaggagg

SEQ ID NO: 841027 - DNA, 33 bp, Homo sapien
cttaaaggcctcactcacatcacattggccagt

SEQ ID NO: 841028 - DNA, 33 bp, Homo sapien
cttaaaggcctcactcgcatcacattggccagt

SEQ ID NO: 841029 - DNA, 33 bp, Homo sapien
tcttctcataaaccccaatgaggcaaatactac

SEQ ID NO: 841030 - DNA, 33 bp, Homo sapien
tcttctcataaaccccgatgaggcaaatactac

SEQ ID NO: 841031 - DNA, 33 bp, Homo sapien
actgtgaggagagagaaacctatttgccttatt

SEQ ID NO: 841032 - DNA, 33 bp, Homo sapien
actgtgaggagagagagacctatttgccttatt

SEQ ID NO: 841033 - DNA, 33 bp, Homo sapien
atcttcttactgagtaaacatcgagaactcagt

SEQ ID NO: 841034 - DNA, 33 bp, Homo sapien
atcttcttactgagtagacatcgagaactcagt

SEQ ID NO: 841035 - DNA, 33 bp, Homo sapien
ctcatatcttcgttcagctctgttagcctaact

SEQ ID NO: 841036 - DNA, 33 bp, Homo sapien
ctcatatcttcgttcatctctgttagcctaact

SEQ ID NO: 841037 - DNA, 33 bp, Homo sapien
attattaggatacagacagcctagtttagccta

SEQ ID NO: 841038 - DNA, 33 bp, Homo sapien
attattaggatacagagagcctagtttagccta

SEQ ID NO: 841039 - DNA, 33 bp, Homo sapien
gaaagcgctaacatgacgtcctaaacattatca

SEQ ID NO: 841040 - DNA, 33 bp, Homo sapien
gaaagcgctaacatgatgtcctaaacattatca

SEQ ID NO: 841041 - DNA, 33 bp, Homo sapien
ctcaatttcataccaccgcaaaactatggtaaa

SEQ ID NO: 841042 - DNA, 33 bp, Homo sapien
ctcaatttcataccactgcaaaactatggtaaa

SEQ ID NO: 841043 - DNA, 33 bp, Homo sapien
taaggcataaaacaaaaagcaataagaaatctg

SEQ ID NO: 841044 - DNA, 33 bp, Homo sapien
taaggcataaaacaaagagcaataagaaatctg

SEQ ID NO: 841045 - DNA, 33 bp, Homo sapien
gtgaatgtaagtgtaaataggttcccaaactca

SEQ ID NO: 841046 - DNA, 33 bp, Homo sapien
gtgaatgtaagtgtaactaggttcccaaactca

SEQ ID NO: 841047 - DNA, 33 bp, Homo sapien
gtctaacctacacttacaacattgcagattaat

SEQ ID NO: 841048 - DNA, 33 bp, Homo sapien
gtctaacctacacttagaacattgcagattaat

SEQ ID NO: 841049 - DNA, 33 bp, Homo sapien
atacagtaaaagccaacgaaaatccatatcaac

SEQ ID NO: 841050 - DNA, 33 bp, Homo sapien
atacagtaaaagccaatgaaaatccatatcaac

SEQ ID NO: 841051 - DNA, 33 bp, Homo sapien
ggcattgggatgtcacaatcgggggtgattttc

SEQ ID NO: 841052 - DNA, 33 bp, Homo sapien
ggcattgggatgtcacgatcgggggtgattttc

SEQ ID NO: 841053 - DNA, 33 bp, Homo sapien
acctctgtcaatgtgaactgaacagaggaggaa

SEQ ID NO: 841054 - DNA, 33 bp, Homo sapien
acctctgtcaatgtgatctgaacagaggaggaa

SEQ ID NO: 841055 - DNA, 33 bp, Homo sapien
ttcgaaaacttgaaaagcatggaaggtacagag

SEQ ID NO: 841056 - DNA, 33 bp, Homo sapien
ttcgaaaacttgaaaatcatggaaggtacagag

SEQ ID NO: 841057 - DNA, 33 bp, Homo sapien
taccaggcctagagcacagttttaaagttttct

SEQ ID NO: 841058 - DNA, 33 bp, Homo sapien
taccaggcctagagcagagttttaaagttttct

SEQ ID NO: 841059 - DNA, 33 bp, Homo sapien
atcttagctgtctgcaagggtcttcatttgact

SEQ ID NO: 841060 - DNA, 33 bp, Homo sapien
atcttagctgtctgcatgggtcttcatttgact

SEQ ID NO: 841061 - DNA, 33 bp, Homo sapien
ctagtattttgaggtgaagatgatcgttcccta

SEQ ID NO: 841062 - DNA, 33 bp, Homo sapien
ctagtattttgaggtggagatgatcgttcccta

SEQ ID NO: 841063 - DNA, 33 bp, Homo sapien
tcagaacatttcatcaacctgaaagaacttctg

SEQ ID NO: 841064 - DNA, 33 bp, Homo sapien
tcagaacatttcatcaccctgaaagaacttctg

SEQ ID NO: 841065 - DNA, 33 bp, Homo sapien
ggcagatggagccttgcaaatcacagcaaagac

SEQ ID NO: 841066 - DNA, 33 bp, Homo sapien
ggcagatggagccttgtaaatcacagcaaagac

SEQ ID NO: 841067 - DNA, 33 bp, Homo sapien
cagtcaaaagggagcaagaaagtgatatactat

SEQ ID NO: 841068 - DNA, 33 bp, Homo sapien
cagtcaaaagggagcatgaaagtgatatactat

SEQ ID NO: 841069 - DNA, 33 bp, Homo sapien
aaagctacttcctgaacctttatgagaattcat

SEQ ID NO: 841070 - DNA, 33 bp, Homo sapien
aaagctacttcctgaatctttatgagaattcat

SEQ ID NO: 841071 - DNA, 33 bp, Homo sapien
actgtagacctttcaacatggatgtttaatcac

SEQ ID NO: 841072 - DNA, 33 bp, Homo sapien
actgtagacctttcaatatggatgtttaatcac

SEQ ID NO: 841073 - DNA, 33 bp, Homo sapien
agagaagatgcacagaatagagtaacaagcaga

SEQ ID NO: 841074 - DNA, 33 bp, Homo sapien
agagaagatgcacagagtagagtaacaagcaga

SEQ ID NO: 841075 - DNA, 33 bp, Homo sapien
aagctatggctttggaaatccaagtttgaattg

SEQ ID NO: 841076 - DNA, 33 bp, Homo sapien
aagctatggctttggagatccaagtttgaattg

SEQ ID NO: 841077 - DNA, 33 bp, Homo sapien
gagtttaatcctcagaaagtgaccatcttttta

SEQ ID NO: 841078 - DNA, 33 bp, Homo sapien
gagtttaatcctcagagagtgaccatcttttta

SEQ ID NO: 841079 - DNA, 33 bp, Homo sapien
ttgtgtgtacttgtatcagtgttggcataggta

SEQ ID NO: 841080 - DNA, 33 bp, Homo sapien
ttgtgtgtacttgtatgagtgttggcataggta

SEQ ID NO: 841081 - DNA, 33 bp, Homo sapien
tgtgaacacctattcacacattacaatgctctc

SEQ ID NO: 841082 - DNA, 33 bp, Homo sapien
tgtgaacacctattcatacattacaatgctctc

SEQ ID NO: 841083 - DNA, 33 bp, Homo sapien
tacaagaataatagagaatcaggatgaaatggt

SEQ ID NO: 841084 - DNA, 33 bp, Homo sapien
tacaagaataatagagcatcaggatgaaatggt

SEQ ID NO: 841085 - DNA, 33 bp, Homo sapien
ttttatagttttttcacataagcattgaatcct

SEQ ID NO: 841086 - DNA, 33 bp, Homo sapien
ttttatagttttttcagataagcattgaatcct

SEQ ID NO: 841087 - DNA, 33 bp, Homo sapien
atattcctctgaaaaaactcaagcctaatctaa

SEQ ID NO: 841088 - DNA, 33 bp, Homo sapien
atattcctctgaaaaacctcaagcctaatctaa

SEQ ID NO: 841089 - DNA, 33 bp, Homo sapien
caagaggctgttcaagacaacatatctcataat

SEQ ID NO: 841090 - DNA, 33 bp, Homo sapien
caagaggctgttcaaggcaacatatctcataat

SEQ ID NO: 841091 - DNA, 33 bp, Homo sapien
caggttactgatcgccacagttatgtgcaaatt

SEQ ID NO: 841092 - DNA, 33 bp, Homo sapien
caggttactgatcgccgcagttatgtgcaaatt

SEQ ID NO: 841093 - DNA, 33 bp, Homo sapien
agtaaaggcctaatgagggatgcaagcactact

SEQ ID NO: 841094 - DNA, 33 bp, Homo sapien
agtaaaggcctaatgatggatgcaagcactact

SEQ ID NO: 841095 - DNA, 33 bp, Homo sapien
gcatccattgacaatcagacccacttagactaa

SEQ ID NO: 841096 - DNA, 33 bp, Homo sapien
gcatccattgacaatctgacccacttagactaa

SEQ ID NO: 841097 - DNA, 33 bp, Homo sapien
tctattcaagtgacaacctaatctttctcacta

SEQ ID NO: 841098 - DNA, 33 bp, Homo sapien
tctattcaagtgacaatctaatctttctcacta

SEQ ID NO: 841099 - DNA, 33 bp, Homo sapien
ccatgacaaaataccactactaatgtttcacat

SEQ ID NO: 841100 - DNA, 33 bp, Homo sapien
ccatgacaaaataccagtactaatgtttcacat

SEQ ID NO: 841101 - DNA, 33 bp, Homo sapien
ctttaacatctgttcagaggtgtggttattaat

SEQ ID NO: 841102 - DNA, 33 bp, Homo sapien
ctttaacatctgttcataggtgtggttattaat

SEQ ID NO: 841103 - DNA, 33 bp, Homo sapien
ctttactgcagctaaaataaagaactggggaca

SEQ ID NO: 841104 - DNA, 33 bp, Homo sapien
ctttactgcagctaaagtaaagaactggggaca

SEQ ID NO: 841105 - DNA, 33 bp, Homo sapien
ttcttagagtccagaaaagtcgttgcttaaaga

SEQ ID NO: 841106 - DNA, 33 bp, Homo sapien
ttcttagagtccagaacagtcgttgcttaaaga

SEQ ID NO: 841107 - DNA, 33 bp, Homo sapien
tataaggtttccctgaagaatctctagtttcta

SEQ ID NO: 841108 - DNA, 33 bp, Homo sapien
tataaggtttccctgaggaatctctagtttcta

SEQ ID NO: 841109 - DNA, 33 bp, Homo sapien
cgattagagaccaacaatgaatcttttgaaaac

SEQ ID NO: 841110 - DNA, 33 bp, Homo sapien
cgattagagaccaacagtgaatcttttgaaaac

SEQ ID NO: 841111 - DNA, 33 bp, Homo sapien
tctgggtggggcctaaatatctatctaacaagc

SEQ ID NO: 841112 - DNA, 33 bp, Homo sapien
tctgggtggggcctaagtatctatctaacaagc

SEQ ID NO: 841113 - DNA, 33 bp, Homo sapien
ttttagtatttttccaatgattaccagacgtga

SEQ ID NO: 841114 - DNA, 33 bp, Homo sapien
ttttagtatttttccagtgattaccagacgtga

SEQ ID NO: 841115 - DNA, 33 bp, Homo sapien
caagttatccaaagcacagtgctatcatttgaa

SEQ ID NO: 841116 - DNA, 33 bp, Homo sapien
caagttatccaaagcagagtgctatcatttgaa

SEQ ID NO: 841117 - DNA, 33 bp, Homo sapien
tacttgtaagaaagaaaaataattgatggcaat

SEQ ID NO: 841118 - DNA, 33 bp, Homo sapien
tacttgtaagaaagaacaataattgatggcaat

SEQ ID NO: 841119 - DNA, 33 bp, Homo sapien
aattatttatatgccacggtgtagaaagctgta

SEQ ID NO: 841120 - DNA, 33 bp, Homo sapien
aattatttatatgccagggtgtagaaagctgta

SEQ ID NO: 841121 - DNA, 33 bp, Homo sapien
aacacttttcaaaagccgacataaatgtgacca

SEQ ID NO: 841122 - DNA, 33 bp, Homo sapien
aacacttttcaaaagctgacataaatgtgacca

SEQ ID NO: 841123 - DNA, 33 bp, Homo sapien
attctcttttcaaccacgttcattttggagata

SEQ ID NO: 841124 - DNA, 33 bp, Homo sapien
attctcttttcaaccatgttcattttggagata

SEQ ID NO: 841125 - DNA, 33 bp, Homo sapien
aagtacaggacaggtacgcccagtgggtgaaga

SEQ ID NO: 841126 - DNA, 33 bp, Homo sapien
aagtacaggacaggtatgcccagtgggtgaaga

SEQ ID NO: 841127 - DNA, 33 bp, Homo sapien
acattgaaagccaaagaataaaatgttggtagc

SEQ ID NO: 841128 - DNA, 33 bp, Homo sapien
acattgaaagccaaaggataaaatgttggtagc

SEQ ID NO: 841129 - DNA, 33 bp, Homo sapien
ggctagggagaggtgacgagaaaaaccagcaac

SEQ ID NO: 841130 - DNA, 33 bp, Homo sapien
ggctagggagaggtgatgagaaaaaccagcaac

SEQ ID NO: 841131 - DNA, 33 bp, Homo sapien
tgcctatagctgaaatcattctggactctccat

SEQ ID NO: 841132 - DNA, 33 bp, Homo sapien
tgcctatagctgaaattattctggactctccat

SEQ ID NO: 841133 - DNA, 33 bp, Homo sapien
ttgcatcagagtaactaaggctatgctgtggaa

SEQ ID NO: 841134 - DNA, 33 bp, Homo sapien
ttgcatcagagtaactcaggctatgctgtggaa

SEQ ID NO: 841135 - DNA, 33 bp, Homo sapien
ccgagcactaaatgtcaaccattaatttccttt

SEQ ID NO: 841136 - DNA, 33 bp, Homo sapien
ccgagcactaaatgtccaccattaatttccttt

SEQ ID NO: 841137 - DNA, 33 bp, Homo sapien
atacatttgagcaacacgataaatatgtggtat

SEQ ID NO: 841138 - DNA, 33 bp, Homo sapien
atacatttgagcaacatgataaatatgtggtat

SEQ ID NO: 841139 - DNA, 33 bp, Homo sapien
ttgcattttgaagtaacgactgtcttttatcct

SEQ ID NO: 841140 - DNA, 33 bp, Homo sapien
ttgcattttgaagtaatgactgtcttttatcct

SEQ ID NO: 841141 - DNA, 33 bp, Homo sapien
tccatacatgtaactcactttcataatttattc

SEQ ID NO: 841142 - DNA, 33 bp, Homo sapien
tccatacatgtaactcgctttcataatttattc

SEQ ID NO: 841143 - DNA, 33 bp, Homo sapien
aggtcctacccagtgaagaagattgggatcacg

SEQ ID NO: 841144 - DNA, 33 bp, Homo sapien
aggtcctacccagtgaggaagattgggatcacg

SEQ ID NO: 841145 - DNA, 33 bp, Homo sapien
acttgattgtggtggactagttttttcatatgc

SEQ ID NO: 841146 - DNA, 33 bp, Homo sapien
acttgattgtggtggattagttttttcatatgc

SEQ ID NO: 841147 - DNA, 33 bp, Homo sapien
ctctagtatagttggaaatcaggttatgtgata

SEQ ID NO: 841148 - DNA, 33 bp, Homo sapien
ctctagtatagttggacatcaggttatgtgata

SEQ ID NO: 841149 - DNA, 33 bp, Homo sapien
gtaaatgtccaaataacgtgtatacatcatggc

SEQ ID NO: 841150 - DNA, 33 bp, Homo sapien
gtaaatgtccaaataatgtgtatacatcatggc

SEQ ID NO: 841151 - DNA, 33 bp, Homo sapien
ggagtggtattgttcccgagatcagcaactcaa

SEQ ID NO: 841152 - DNA, 33 bp, Homo sapien
ggagtggtattgttcctgagatcagcaactcaa

SEQ ID NO: 841153 - DNA, 33 bp, Homo sapien
atagagatagtgagcactaagataccaaaatct

SEQ ID NO: 841154 - DNA, 33 bp, Homo sapien
atagagatagtgagcattaagataccaaaatct

SEQ ID NO: 841155 - DNA, 33 bp, Homo sapien
ctacagatggaaacacacctctttgacctttga

SEQ ID NO: 841156 - DNA, 33 bp, Homo sapien
ctacagatggaaacacgcctctttgacctttga

SEQ ID NO: 841157 - DNA, 33 bp, Homo sapien
tactggaagtagaacacgaagctccttataggg

SEQ ID NO: 841158 - DNA, 33 bp, Homo sapien
tactggaagtagaacatgaagctccttataggg

SEQ ID NO: 841159 - DNA, 33 bp, Homo sapien
ttacgatttgcctttacggagcgtctttttctg

SEQ ID NO: 841160 - DNA, 33 bp, Homo sapien
ttacgatttgcctttatggagcgtctttttctg

SEQ ID NO: 841161 - DNA, 33 bp, Homo sapien
accctcctaactcttcacgttcctttctttcaa

SEQ ID NO: 841162 - DNA, 33 bp, Homo sapien
accctcctaactcttcgcgttcctttctttcaa

SEQ ID NO: 841163 - DNA, 33 bp, Homo sapien
gtcctggagtagaaagcatgagttggaagggat

SEQ ID NO: 841164 - DNA, 33 bp, Homo sapien
gtcctggagtagaaaggatgagttggaagggat

SEQ ID NO: 841165 - DNA, 33 bp, Homo sapien
agacaagatcaagttccagagtatcagactttt

SEQ ID NO: 841166 - DNA, 33 bp, Homo sapien
agacaagatcaagttctagagtatcagactttt

SEQ ID NO: 841167 - DNA, 33 bp, Homo sapien
attaccaaatagttatcaagtgcttattaagta

SEQ ID NO: 841168 - DNA, 33 bp, Homo sapien
attaccaaatagttattaagtgcttattaagta

SEQ ID NO: 841169 - DNA, 33 bp, Homo sapien
cctccagaaaggaatgaaatttttagctgagtg

SEQ ID NO: 841170 - DNA, 33 bp, Homo sapien
cctccagaaaggaatgcaatttttagctgagtg

SEQ ID NO: 841171 - DNA, 33 bp, Homo sapien
tcctgtgtgcgtcacaacctctaatttatgtga

SEQ ID NO: 841172 - DNA, 33 bp, Homo sapien
tcctgtgtgcgtcacagcctctaatttatgtga

SEQ ID NO: 841173 - DNA, 33 bp, Homo sapien
cttaattctgagtttgcaactttattttaaatt

SEQ ID NO: 841174 - DNA, 33 bp, Homo sapien
cttaattctgagtttgtaactttattttaaatt

SEQ ID NO: 841175 - DNA, 33 bp, Homo sapien
gtttgcaggtagacagaaaaaaggagttctttc

SEQ ID NO: 841176 - DNA, 33 bp, Homo sapien
gtttgcaggtagacaggaaaaaggagttctttc

SEQ ID NO: 841177 - DNA, 33 bp, Homo sapien
ccaggaaggaagggcaagttttacatggaggaa

SEQ ID NO: 841178 - DNA, 33 bp, Homo sapien
ccaggaaggaagggcaggttttacatggaggaa

SEQ ID NO: 841179 - DNA, 33 bp, Homo sapien
ttgacatcgttccctcaaaagctggaacacccc

SEQ ID NO: 841180 - DNA, 33 bp, Homo sapien
ttgacatcgttccctccaaagctggaacacccc

SEQ ID NO: 841181 - DNA, 33 bp, Homo sapien
acataatttaaatgaggatctgattccaaaaca

SEQ ID NO: 841182 - DNA, 33 bp, Homo sapien
acataatttaaatgagtatctgattccaaaaca

SEQ ID NO: 841183 - DNA, 33 bp, Homo sapien
taaattttcctggaaactgtaggaaactctatg

SEQ ID NO: 841184 - DNA, 33 bp, Homo sapien
taaattttcctggaaagtgtaggaaactctatg

SEQ ID NO: 841185 - DNA, 33 bp, Homo sapien
tgtataagagaacagactctgtgactgacagac

SEQ ID NO: 841186 - DNA, 33 bp, Homo sapien
tgtataagagaacagattctgtgactgacagac

SEQ ID NO: 841187 - DNA, 33 bp, Homo sapien
agtgataactctcttgaagctctcctgatgcag

SEQ ID NO: 841188 - DNA, 33 bp, Homo sapien
agtgataactctcttgcagctctcctgatgcag

SEQ ID NO: 841189 - DNA, 33 bp, Homo sapien
agctctcctgatgcaggcaactgttgctttagg

SEQ ID NO: 841190 - DNA, 33 bp, Homo sapien
agctctcctgatgcagtcaactgttgctttagg

SEQ ID NO: 841191 - DNA, 33 bp, Homo sapien
agccagcatgcagagcaagtcagagcagtgcgg

SEQ ID NO: 841192 - DNA, 33 bp, Homo sapien
agccagcatgcagagcgagtcagagcagtgcgg

SEQ ID NO: 841193 - DNA, 33 bp, Homo sapien
gttgtgctaacgacccactacatatcagagaac

SEQ ID NO: 841194 - DNA, 33 bp, Homo sapien
gttgtgctaacgaccctctacatatcagagaac

SEQ ID NO: 841195 - DNA, 33 bp, Homo sapien
ctaagatctattacaaataaacctttcagattg

SEQ ID NO: 841196 - DNA, 33 bp, Homo sapien
ctaagatctattacaagtaaacctttcagattg

SEQ ID NO: 841197 - DNA, 33 bp, Homo sapien
gtgaagttacaagacccggatgtggaatcagtg

SEQ ID NO: 841198 - DNA, 33 bp, Homo sapien
gtgaagttacaagacctggatgtggaatcagtg

SEQ ID NO: 841199 - DNA, 33 bp, Homo sapien
tcttgtaacttcacataatgtatcattcttggg

SEQ ID NO: 841200 - DNA, 33 bp, Homo sapien
tcttgtaacttcacatcatgtatcattcttggg

SEQ ID NO: 841201 - DNA, 33 bp, Homo sapien
gcaaattatctttcagaacttgactcagctccg

SEQ ID NO: 841202 - DNA, 33 bp, Homo sapien
gcaaattatctttcagtacttgactcagctccg

SEQ ID NO: 841203 - DNA, 33 bp, Homo sapien
acatttttaacttaccagatagaattgacatcc

SEQ ID NO: 841204 - DNA, 33 bp, Homo sapien
acatttttaacttaccggatagaattgacatcc

SEQ ID NO: 841205 - DNA, 33 bp, Homo sapien
aaaacagtttcaaagcaatcatataaacagata

SEQ ID NO: 841206 - DNA, 33 bp, Homo sapien
aaaacagtttcaaagcgatcatataaacagata

SEQ ID NO: 841207 - DNA, 33 bp, Homo sapien
acaactggagaagacaactttaatacatatttc

SEQ ID NO: 841208 - DNA, 33 bp, Homo sapien
acaactggagaagacatctttaatacatatttc

SEQ ID NO: 841209 - DNA, 33 bp, Homo sapien
atcacaaaaactaaggcaatctgagaaagcata

SEQ ID NO: 841210 - DNA, 33 bp, Homo sapien
atcacaaaaactaaggtaatctgagaaagcata

SEQ ID NO: 841211 - DNA, 33 bp, Homo sapien
ggatgatctttttgtgaactatcttactgaggt

SEQ ID NO: 841212 - DNA, 33 bp, Homo sapien
ggatgatctttttgtggactatcttactgaggt

SEQ ID NO: 841213 - DNA, 33 bp, Homo sapien
tccatgctcatgcctacaaaaagtcaatattgc

SEQ ID NO: 841214 - DNA, 33 bp, Homo sapien
tccatgctcatgcctagaaaaagtcaatattgc

SEQ ID NO: 841215 - DNA, 33 bp, Homo sapien
tgcttattcataaagacgtaggtaagtaggtag

SEQ ID NO: 841216 - DNA, 33 bp, Homo sapien
tgcttattcataaagatgtaggtaagtaggtag

SEQ ID NO: 841217 - DNA, 33 bp, Homo sapien
cacgaaaatgttacaacaagatatgaaaaaggc

SEQ ID NO: 841218 - DNA, 33 bp, Homo sapien
cacgaaaatgttacaagaagatatgaaaaaggc

SEQ ID NO: 841219 - DNA, 33 bp, Homo sapien
ttgtttaagtgccttacaaattctggatattag

SEQ ID NO: 841220 - DNA, 33 bp, Homo sapien
ttgtttaagtgccttataaattctggatattag

SEQ ID NO: 841221 - DNA, 33 bp, Homo sapien
agaaaatgtactatcaatagtaaaccccttgga

SEQ ID NO: 841222 - DNA, 33 bp, Homo sapien
agaaaatgtactatcagtagtaaaccccttgga

SEQ ID NO: 841223 - DNA, 33 bp, Homo sapien
atcaatcacttttactcaaattcagtgttttag

SEQ ID NO: 841224 - DNA, 33 bp, Homo sapien
atcaatcacttttacttaaattcagtgttttag

SEQ ID NO: 841225 - DNA, 33 bp, Homo sapien
gcttggaattaagataaagcaatgaagggtaat

SEQ ID NO: 841226 - DNA, 33 bp, Homo sapien
gcttggaattaagatagagcaatgaagggtaat

SEQ ID NO: 841227 - DNA, 33 bp, Homo sapien
gagttttcggctgagcaacaatctgagcttgca

SEQ ID NO: 841228 - DNA, 33 bp, Homo sapien
gagttttcggctgagcgacaatctgagcttgca

SEQ ID NO: 841229 - DNA, 33 bp, Homo sapien
gtaaaaagcaaaaataaaacagcgatatttccc

SEQ ID NO: 841230 - DNA, 33 bp, Homo sapien
gtaaaaagcaaaaatagaacagcgatatttccc

SEQ ID NO: 841231 - DNA, 33 bp, Homo sapien
cactcaatgattgctacgaacattaataaacta

SEQ ID NO: 841232 - DNA, 33 bp, Homo sapien
cactcaatgattgctatgaacattaataaacta

SEQ ID NO: 841233 - DNA, 33 bp, Homo sapien
tcccgtagatacaaaacgattgtgcaagaccag

SEQ ID NO: 841234 - DNA, 33 bp, Homo sapien
tcccgtagatacaaaatgattgtgcaagaccag

SEQ ID NO: 841235 - DNA, 33 bp, Homo sapien
gagggctcagttagggaagtttgaacaaataag

SEQ ID NO: 841236 - DNA, 33 bp, Homo sapien
gagggctcagttagggtagtttgaacaaataag

SEQ ID NO: 841237 - DNA, 33 bp, Homo sapien
tctcagaatacgtatgaaatatgaaataatatg

SEQ ID NO: 841238 - DNA, 33 bp, Homo sapien
tctcagaatacgtatggaatatgaaataatatg

SEQ ID NO: 841239 - DNA, 33 bp, Homo sapien
atgttacatttaaaaagagtctcccatcacaac

SEQ ID NO: 841240 - DNA, 33 bp, Homo sapien
atgttacatttaaaaatagtctcccatcacaac

SEQ ID NO: 841241 - DNA, 33 bp, Homo sapien
ttgtaggatgaatggacaacaggaatgaataca

SEQ ID NO: 841242 - DNA, 33 bp, Homo sapien
ttgtaggatgaatggataacaggaatgaataca

SEQ ID NO: 841243 - DNA, 33 bp, Homo sapien
acaatggagggaaataaaatactagaatgctgc

SEQ ID NO: 841244 - DNA, 33 bp, Homo sapien
acaatggagggaaatagaatactagaatgctgc

SEQ ID NO: 841245 - DNA, 33 bp, Homo sapien
aagatctatttaggaaaaacctgacaatatata

SEQ ID NO: 841246 - DNA, 33 bp, Homo sapien
aagatctatttaggaagaacctgacaatatata

SEQ ID NO: 841247 - DNA, 33 bp, Homo sapien
gtagaggaagatgatcaaatagaagcctccatt

SEQ ID NO: 841248 - DNA, 33 bp, Homo sapien
gtagaggaagatgatccaatagaagcctccatt

SEQ ID NO: 841249 - DNA, 33 bp, Homo sapien
ggtgttggaagttcaacgctctttcctactccc

SEQ ID NO: 841250 - DNA, 33 bp, Homo sapien
ggtgttggaagttcaaggctctttcctactccc

SEQ ID NO: 841251 - DNA, 33 bp, Homo sapien
aacaaaaaaactagaaatgtgtaatgtgtaact

SEQ ID NO: 841252 - DNA, 33 bp, Homo sapien
aacaaaaaaactagaactgtgtaatgtgtaact

SEQ ID NO: 841253 - DNA, 33 bp, Homo sapien
tgaatcttcctcagtacccccatcgtctttgtc

SEQ ID NO: 841254 - DNA, 33 bp, Homo sapien
tgaatcttcctcagtatccccatcgtctttgtc

SEQ ID NO: 841255 - DNA, 33 bp, Homo sapien
agtaacaaataggacacagaacaatgaggaaac

SEQ ID NO: 841256 - DNA, 33 bp, Homo sapien
agtaacaaataggacagagaacaatgaggaaac

SEQ ID NO: 841257 - DNA, 33 bp, Homo sapien
agaagctgggaacaataatctgtctgtctccgt

SEQ ID NO: 841258 - DNA, 33 bp, Homo sapien
agaagctgggaacaatcatctgtctgtctccgt

SEQ ID NO: 841259 - DNA, 33 bp, Homo sapien
tggaaagtaaattttcaccaagagccctagggt

SEQ ID NO: 841260 - DNA, 33 bp, Homo sapien
tggaaagtaaattttcgccaagagccctagggt

SEQ ID NO: 841261 - DNA, 33 bp, Homo sapien
atgtggataaaacagaaggaaacaacagaaagc

SEQ ID NO: 841262 - DNA, 33 bp, Homo sapien
atgtggataaaacagatggaaacaacagaaagc

SEQ ID NO: 841263 - DNA, 33 bp, Homo sapien
aataccttgagtaaataaactgaggtgttttat

SEQ ID NO: 841264 - DNA, 33 bp, Homo sapien
aataccttgagtaaattaactgaggtgttttat

SEQ ID NO: 841265 - DNA, 33 bp, Homo sapien
acagatttagtagcaccccttgtggtacccttg

SEQ ID NO: 841266 - DNA, 33 bp, Homo sapien
acagatttagtagcactccttgtggtacccttg

SEQ ID NO: 841267 - DNA, 33 bp, Homo sapien
aggaaacaggatctcacagttcaagtagctctc

SEQ ID NO: 841268 - DNA, 33 bp, Homo sapien
aggaaacaggatctcatagttcaagtagctctc

SEQ ID NO: 841269 - DNA, 33 bp, Homo sapien
tctggcacaaatatgacgctaaataaatatttg

SEQ ID NO: 841270 - DNA, 33 bp, Homo sapien
tctggcacaaatatgatgctaaataaatatttg

SEQ ID NO: 841271 - DNA, 33 bp, Homo sapien
attttttgtattctccaatggtctgaacacaga

SEQ ID NO: 841272 - DNA, 33 bp, Homo sapien
attttttgtattctccgatggtctgaacacaga

SEQ ID NO: 841273 - DNA, 33 bp, Homo sapien
gcagtaccttgaagacacagagatatcagagat

SEQ ID NO: 841274 - DNA, 33 bp, Homo sapien
gcagtaccttgaagacgcagagatatcagagat

SEQ ID NO: 841275 - DNA, 33 bp, Homo sapien
ctcttctagcatcaacaatagagcttcagtgca

SEQ ID NO: 841276 - DNA, 33 bp, Homo sapien
ctcttctagcatcaaccatagagcttcagtgca

SEQ ID NO: 841277 - DNA, 33 bp, Homo sapien
ttcactgacagaagtacgaaagaaagagacatc

SEQ ID NO: 841278 - DNA, 33 bp, Homo sapien
ttcactgacagaagtatgaaagaaagagacatc

SEQ ID NO: 841279 - DNA, 33 bp, Homo sapien
tacacaacaactcagaagtttgcatttgcgatg

SEQ ID NO: 841280 - DNA, 33 bp, Homo sapien
tacacaacaactcagaggtttgcatttgcgatg

SEQ ID NO: 841281 - DNA, 33 bp, Homo sapien
agtaccttctaaagctcaatatgcacatacaac

SEQ ID NO: 841282 - DNA, 33 bp, Homo sapien
agtaccttctaaagctgaatatgcacatacaac

SEQ ID NO: 841283 - DNA, 33 bp, Homo sapien
gaaagctgctgaagaacggacagaaaggattgg

SEQ ID NO: 841284 - DNA, 33 bp, Homo sapien
gaaagctgctgaagaatggacagaaaggattgg

SEQ ID NO: 841285 - DNA, 33 bp, Homo sapien
aatctcaggatatgaagttaatgaatcagagta

SEQ ID NO: 841286 - DNA, 33 bp, Homo sapien
aatctcaggatatgaatttaatgaatcagagta

SEQ ID NO: 841287 - DNA, 33 bp, Homo sapien
aaaatcagttctcttacagtagatagtgctcaa

SEQ ID NO: 841288 - DNA, 33 bp, Homo sapien
aaaatcagttctcttatagtagatagtgctcaa

SEQ ID NO: 841289 - DNA, 33 bp, Homo sapien
gttgtattatggcatgacaggaaatgaggctga

SEQ ID NO: 841290 - DNA, 33 bp, Homo sapien
gttgtattatggcatggcaggaaatgaggctga

SEQ ID NO: 841291 - DNA, 33 bp, Homo sapien
ttgctttctgttgacaaccatgtggaagtgaaa

SEQ ID NO: 841292 - DNA, 33 bp, Homo sapien
ttgctttctgttgacatccatgtggaagtgaaa

SEQ ID NO: 841293 - DNA, 33 bp, Homo sapien
aagccattcttggccaaccaatcataagtatcc

SEQ ID NO: 841294 - DNA, 33 bp, Homo sapien
aagccattcttggccatccaatcataagtatcc

SEQ ID NO: 841295 - DNA, 33 bp, Homo sapien
aagtgaacttcagcaacggcaaagaaatttggc

SEQ ID NO: 841296 - DNA, 33 bp, Homo sapien
aagtgaacttcagcaatggcaaagaaatttggc

SEQ ID NO: 841297 - DNA, 33 bp, Homo sapien
tgacatgatactcaaactcgaaaatatttacag

SEQ ID NO: 841298 - DNA, 33 bp, Homo sapien
tgacatgatactcaaagtcgaaaatatttacag

SEQ ID NO: 841299 - DNA, 33 bp, Homo sapien
ctggtttgtttattacaggtcctaaatccatgg

SEQ ID NO: 841300 - DNA, 33 bp, Homo sapien
ctggtttgtttattacgggtcctaaatccatgg

SEQ ID NO: 841301 - DNA, 33 bp, Homo sapien
aatcatttgaattgcgaatgattttgaggaaag

SEQ ID NO: 841302 - DNA, 33 bp, Homo sapien
aatcatttgaattgcggatgattttgaggaaag

SEQ ID NO: 841303 - DNA, 33 bp, Homo sapien
taagccttgagagtaacgtgactatgtggcctg

SEQ ID NO: 841304 - DNA, 33 bp, Homo sapien
taagccttgagagtaatgtgactatgtggcctg

SEQ ID NO: 841305 - DNA, 33 bp, Homo sapien
ttttattgcaactttgcatcttggagcattttc

SEQ ID NO: 841306 - DNA, 33 bp, Homo sapien
ttttattgcaactttgtatcttggagcattttc

SEQ ID NO: 841307 - DNA, 33 bp, Homo sapien
ataccaattttctccacgtatcaattgtcaaat

SEQ ID NO: 841308 - DNA, 33 bp, Homo sapien
ataccaattttctccatgtatcaattgtcaaat

SEQ ID NO: 841309 - DNA, 33 bp, Homo sapien
atacaataatcctaaaactttgtgatgaatgta

SEQ ID NO: 841310 - DNA, 33 bp, Homo sapien
atacaataatcctaaagctttgtgatgaatgta

SEQ ID NO: 841311 - DNA, 33 bp, Homo sapien
ttaagggctgtagcaacgtctccttttcattgt

SEQ ID NO: 841312 - DNA, 33 bp, Homo sapien
ttaagggctgtagcaatgtctccttttcattgt

SEQ ID NO: 841313 - DNA, 33 bp, Homo sapien
cctggttcctgtttgcagagttctaacaaaacc

SEQ ID NO: 841314 - DNA, 33 bp, Homo sapien
cctggttcctgtttgccgagttctaacaaaacc

SEQ ID NO: 841315 - DNA, 33 bp, Homo sapien
tgtttgttgtctaggcaatctggtcactaactg

SEQ ID NO: 841316 - DNA, 33 bp, Homo sapien
tgtttgttgtctaggcgatctggtcactaactg

SEQ ID NO: 841317 - DNA, 33 bp, Homo sapien
cttgagttcagacaaacaggagaagtcaatagc

SEQ ID NO: 841318 - DNA, 33 bp, Homo sapien
cttgagttcagacaaagaggagaagtcaatagc

SEQ ID NO: 841319 - DNA, 33 bp, Homo sapien
aaatggggtaagtctacgcaaactaacttagaa

SEQ ID NO: 841320 - DNA, 33 bp, Homo sapien
aaatggggtaagtctatgcaaactaacttagaa

SEQ ID NO: 841321 - DNA, 33 bp, Homo sapien
tgggtaaaaggctgcacatctgtagcaataaaa

SEQ ID NO: 841322 - DNA, 33 bp, Homo sapien
tgggtaaaaggctgcatatctgtagcaataaaa

SEQ ID NO: 841323 - DNA, 33 bp, Homo sapien
attcaaagcaccagaaacacttaaaacagctgt

SEQ ID NO: 841324 - DNA, 33 bp, Homo sapien
attcaaagcaccagaagcacttaaaacagctgt

SEQ ID NO: 841325 - DNA, 33 bp, Homo sapien
tcaatgtgcaaaatccacaagcattgctataca

SEQ ID NO: 841326 - DNA, 33 bp, Homo sapien
tcaatgtgcaaaatccgcaagcattgctataca

SEQ ID NO: 841327 - DNA, 33 bp, Homo sapien
ccaccaaagctttgacaccaatgttggtatgac

SEQ ID NO: 841328 - DNA, 33 bp, Homo sapien
ccaccaaagctttgactccaatgttggtatgac

SEQ ID NO: 841329 - DNA, 33 bp, Homo sapien
ctgaaccaggctcagacggctgaaattacaaat

SEQ ID NO: 841330 - DNA, 33 bp, Homo sapien
ctgaaccaggctcagatggctgaaattacaaat

SEQ ID NO: 841331 - DNA, 33 bp, Homo sapien
atcctaaaggctctgccaaaaagctaccagagc

SEQ ID NO: 841332 - DNA, 33 bp, Homo sapien
atcctaaaggctctgcgaaaaagctaccagagc

SEQ ID NO: 841333 - DNA, 33 bp, Homo sapien
atatatgaacaatagcacataaatcctacataa

SEQ ID NO: 841334 - DNA, 33 bp, Homo sapien
atatatgaacaatagcccataaatcctacataa

SEQ ID NO: 841335 - DNA, 33 bp, Homo sapien
cctcagcctactaaaccgcttccagtccgaagg

SEQ ID NO: 841336 - DNA, 33 bp, Homo sapien
cctcagcctactaaactgcttccagtccgaagg

SEQ ID NO: 841337 - DNA, 33 bp, Homo sapien
ggagagggaattcacagtagtccgaccagtacg

SEQ ID NO: 841338 - DNA, 33 bp, Homo sapien
ggagagggaattcacattagtccgaccagtacg

SEQ ID NO: 841339 - DNA, 33 bp, Homo sapien
aaagggggaaatgagaaggcaactttgtatata

SEQ ID NO: 841340 - DNA, 33 bp, Homo sapien
aaagggggaaatgagagggcaactttgtatata

SEQ ID NO: 841341 - DNA, 33 bp, Homo sapien
actttcactgaaggcaaacacatagaagaaaac

SEQ ID NO: 841342 - DNA, 33 bp, Homo sapien
actttcactgaaggcagacacatagaagaaaac

SEQ ID NO: 841343 - DNA, 33 bp, Homo sapien
ctgatttttgtaactgaaatctgtttatggaga

SEQ ID NO: 841344 - DNA, 33 bp, Homo sapien
ctgatttttgtaactgtaatctgtttatggaga

SEQ ID NO: 841345 - DNA, 33 bp, Homo sapien
aattacctattcttgaagatgtttaaagatcag

SEQ ID NO: 841346 - DNA, 33 bp, Homo sapien
aattacctattcttgaggatgtttaaagatcag

SEQ ID NO: 841347 - DNA, 33 bp, Homo sapien
cagagttagaatataacgtagaccaaatgaatg

SEQ ID NO: 841348 - DNA, 33 bp, Homo sapien
cagagttagaatataatgtagaccaaatgaatg

SEQ ID NO: 841349 - DNA, 33 bp, Homo sapien
taataatacgcataaaagaagataatgttatct

SEQ ID NO: 841350 - DNA, 33 bp, Homo sapien
taataatacgcataaaggaagataatgttatct

SEQ ID NO: 841351 - DNA, 33 bp, Homo sapien
caagagacagtacattaaacacctctggcatca

SEQ ID NO: 841352 - DNA, 33 bp, Homo sapien
caagagacagtacattgaacacctctggcatca

SEQ ID NO: 841353 - DNA, 33 bp, Homo sapien
gttttcgaaatgtaaacgttatgctttcaagtt

SEQ ID NO: 841354 - DNA, 33 bp, Homo sapien
gttttcgaaatgtaaatgttatgctttcaagtt

SEQ ID NO: 841355 - DNA, 33 bp, Homo sapien
gttattgaaattgagacggtatttaaagttaca

SEQ ID NO: 841356 - DNA, 33 bp, Homo sapien
gttattgaaattgagatggtatttaaagttaca

SEQ ID NO: 841357 - DNA, 33 bp, Homo sapien
agagctttccaaacaacgacaatagctaagaca

SEQ ID NO: 841358 - DNA, 33 bp, Homo sapien
agagctttccaaacaatgacaatagctaagaca

SEQ ID NO: 841359 - DNA, 33 bp, Homo sapien
tgttaacagtagcaggcattccagcataattta

SEQ ID NO: 841360 - DNA, 33 bp, Homo sapien
tgttaacagtagcaggtattccagcataattta

SEQ ID NO: 841361 - DNA, 33 bp, Homo sapien
aaaaacaagcaataagcactccgtaatcagtaa

SEQ ID NO: 841362 - DNA, 33 bp, Homo sapien
aaaaacaagcaataaggactccgtaatcagtaa

SEQ ID NO: 841363 - DNA, 33 bp, Homo sapien
tctctacactaccctacctactttctcgttaca

SEQ ID NO: 841364 - DNA, 33 bp, Homo sapien
tctctacactaccctatctactttctcgttaca

SEQ ID NO: 841365 - DNA, 33 bp, Homo sapien
aatattaaggcaagtaatacaaactccttacta

SEQ ID NO: 841366 - DNA, 33 bp, Homo sapien
aatattaaggcaagtactacaaactccttacta

SEQ ID NO: 841367 - DNA, 33 bp, Homo sapien
tcaagttccagatttaggtgttagactctttat

SEQ ID NO: 841368 - DNA, 33 bp, Homo sapien
tcaagttccagatttatgtgttagactctttat

SEQ ID NO: 841369 - DNA, 33 bp, Homo sapien
ttgctgtagtagtaaaatatggcagaaggggag

SEQ ID NO: 841370 - DNA, 33 bp, Homo sapien
ttgctgtagtagtaaagtatggcagaaggggag

SEQ ID NO: 841371 - DNA, 33 bp, Homo sapien
ggcagtttatcttgtcaattataccacaataaa

SEQ ID NO: 841372 - DNA, 33 bp, Homo sapien
ggcagtttatcttgtcgattataccacaataaa

SEQ ID NO: 841373 - DNA, 33 bp, Homo sapien
tttcattctattcagcaagataattaatctacc

SEQ ID NO: 841374 - DNA, 33 bp, Homo sapien
tttcattctattcagcgagataattaatctacc

SEQ ID NO: 841375 - DNA, 33 bp, Homo sapien
ttatttttgcaattccaaggaacttttaaatta

SEQ ID NO: 841376 - DNA, 33 bp, Homo sapien
ttatttttgcaattcccaggaacttttaaatta

SEQ ID NO: 841377 - DNA, 33 bp, Homo sapien
attctaggcacatcaagaatctataagaaataa

SEQ ID NO: 841378 - DNA, 33 bp, Homo sapien
attctaggcacatcaataatctataagaaataa

SEQ ID NO: 841379 - DNA, 33 bp, Homo sapien
gatccatgaggtgggcaagaaattgggactctc

SEQ ID NO: 841380 - DNA, 33 bp, Homo sapien
gatccatgaggtgggcgagaaattgggactctc

SEQ ID NO: 841381 - DNA, 33 bp, Homo sapien
cctcttaatgttaaaactgagcaagtcaacctg

SEQ ID NO: 841382 - DNA, 33 bp, Homo sapien
cctcttaatgttaaaattgagcaagtcaacctg

SEQ ID NO: 841383 - DNA, 33 bp, Homo sapien
ttactctcttcataaacttgcttttgctttgca

SEQ ID NO: 841384 - DNA, 33 bp, Homo sapien
ttactctcttcataaatttgcttttgctttgca

SEQ ID NO: 841385 - DNA, 33 bp, Homo sapien
gtgtgcaacagggatagagccctcatggagaaa

SEQ ID NO: 841386 - DNA, 33 bp, Homo sapien
gtgtgcaacagggatatagccctcatggagaaa

SEQ ID NO: 841387 - DNA, 33 bp, Homo sapien
acaatgcactagaaaaaaaagacacattttctg

SEQ ID NO: 841388 - DNA, 33 bp, Homo sapien
acaatgcactagaaaagaaagacacattttctg

SEQ ID NO: 841389 - DNA, 33 bp, Homo sapien
cttgttatgctttagcaaagagactggtgacat

SEQ ID NO: 841390 - DNA, 33 bp, Homo sapien
cttgttatgctttagcgaagagactggtgacat

SEQ ID NO: 841391 - DNA, 33 bp, Homo sapien
aaatcccagaaacatgaagataatgagtgaggc

SEQ ID NO: 841392 - DNA, 33 bp, Homo sapien
aaatcccagaaacatggagataatgagtgaggc

SEQ ID NO: 841393 - DNA, 33 bp, Homo sapien
tgagctcagtcacataaccaataatataatcaa

SEQ ID NO: 841394 - DNA, 33 bp, Homo sapien
tgagctcagtcacatagccaataatataatcaa

SEQ ID NO: 841395 - DNA, 33 bp, Homo sapien
cccataagttaaagcaagcagttcccaaccagg

SEQ ID NO: 841396 - DNA, 33 bp, Homo sapien
cccataagttaaagcaggcagttcccaaccagg

SEQ ID NO: 841397 - DNA, 33 bp, Homo sapien
attccagacgtccaaactgaggtgtcagacagg

SEQ ID NO: 841398 - DNA, 33 bp, Homo sapien
attccagacgtccaaattgaggtgtcagacagg

SEQ ID NO: 841399 - DNA, 33 bp, Homo sapien
ttagctccctgtttcaatcattggtcatctagt

SEQ ID NO: 841400 - DNA, 33 bp, Homo sapien
ttagctccctgtttcagtcattggtcatctagt

SEQ ID NO: 841401 - DNA, 33 bp, Homo sapien
gcaaggaaaatgtaaacgaggttgttgaataag

SEQ ID NO: 841402 - DNA, 33 bp, Homo sapien
gcaaggaaaatgtaaatgaggttgttgaataag

SEQ ID NO: 841403 - DNA, 33 bp, Homo sapien
ctcttctcacttgtgtaaaagagcacatcttct

SEQ ID NO: 841404 - DNA, 33 bp, Homo sapien
ctcttctcacttgtgttaaagagcacatcttct

SEQ ID NO: 841405 - DNA, 33 bp, Homo sapien
ttgtcttttgtgtgaaatgctatagaaatcttt

SEQ ID NO: 841406 - DNA, 33 bp, Homo sapien
ttgtcttttgtgtgaagtgctatagaaatcttt

SEQ ID NO: 841407 - DNA, 33 bp, Homo sapien
ctttggatttttcatcaatcttgcacagcattc

SEQ ID NO: 841408 - DNA, 33 bp, Homo sapien
ctttggatttttcatcgatcttgcacagcattc

SEQ ID NO: 841409 - DNA, 33 bp, Homo sapien
atggacatacagagcaatattttaacacacaat

SEQ ID NO: 841410 - DNA, 33 bp, Homo sapien
atggacatacagagcactattttaacacacaat

SEQ ID NO: 841411 - DNA, 33 bp, Homo sapien
tggagctttttagttcaatagacctgacttagt

SEQ ID NO: 841412 - DNA, 33 bp, Homo sapien
tggagctttttagttcgatagacctgacttagt

SEQ ID NO: 841413 - DNA, 33 bp, Homo sapien
ttctcagtatattacccaggctggtttcaaatt

SEQ ID NO: 841414 - DNA, 33 bp, Homo sapien
ttctcagtatattaccgaggctggtttcaaatt

SEQ ID NO: 841415 - DNA, 33 bp, Homo sapien
tttaacttcaaagtaaataactgatagtcttgt

SEQ ID NO: 841416 - DNA, 33 bp, Homo sapien
tttaacttcaaagtaagtaactgatagtcttgt

SEQ ID NO: 841417 - DNA, 33 bp, Homo sapien
ctttcgtattactctcaaacaactgaaaagtta

SEQ ID NO: 841418 - DNA, 33 bp, Homo sapien
ctttcgtattactctccaacaactgaaaagtta

SEQ ID NO: 841419 - DNA, 33 bp, Homo sapien
aagcagcagacaagaacctgaaaagatgagcac

SEQ ID NO: 841420 - DNA, 33 bp, Homo sapien
aagcagcagacaagaagctgaaaagatgagcac

SEQ ID NO: 841421 - DNA, 33 bp, Homo sapien
tgagtggaatttaaacaggtaatgataagagtg

SEQ ID NO: 841422 - DNA, 33 bp, Homo sapien
tgagtggaatttaaacgggtaatgataagagtg

SEQ ID NO: 841423 - DNA, 33 bp, Homo sapien
aatctgtgagttacaacaactgtggaggacctg

SEQ ID NO: 841424 - DNA, 33 bp, Homo sapien
aatctgtgagttacaagaactgtggaggacctg

SEQ ID NO: 841425 - DNA, 33 bp, Homo sapien
ctcacagatttaaacacagcataaagcactaat

SEQ ID NO: 841426 - DNA, 33 bp, Homo sapien
ctcacagatttaaacatagcataaagcactaat

SEQ ID NO: 841427 - DNA, 33 bp, Homo sapien
tattataggggaagtcagaaaagattgttatat

SEQ ID NO: 841428 - DNA, 33 bp, Homo sapien
tattataggggaagtcggaaaagattgttatat

SEQ ID NO: 841429 - DNA, 33 bp, Homo sapien
tcagataccattttgaagaaacgacttgcccta

SEQ ID NO: 841430 - DNA, 33 bp, Homo sapien
tcagataccattttgaggaaacgacttgcccta

SEQ ID NO: 841431 - DNA, 33 bp, Homo sapien
atgtcgaacaatctggaaaaagaatcaagaaag

SEQ ID NO: 841432 - DNA, 33 bp, Homo sapien
atgtcgaacaatctgggaaaagaatcaagaaag

SEQ ID NO: 841433 - DNA, 33 bp, Homo sapien
agcatggtagtttgaaatctgagatagaaaaag

SEQ ID NO: 841434 - DNA, 33 bp, Homo sapien
agcatggtagtttgaattctgagatagaaaaag

SEQ ID NO: 841435 - DNA, 33 bp, Homo sapien
catcactcttgtttacaacccaacttaataaac

SEQ ID NO: 841436 - DNA, 33 bp, Homo sapien
catcactcttgtttacgacccaacttaataaac

SEQ ID NO: 841437 - DNA, 33 bp, Homo sapien
ggacacatttatactgaaacaatggcagtataa

SEQ ID NO: 841438 - DNA, 33 bp, Homo sapien
ggacacatttatactggaacaatggcagtataa

SEQ ID NO: 841439 - DNA, 33 bp, Homo sapien
tatccaaaatcttgcagagtctgagtgaggctg

SEQ ID NO: 841440 - DNA, 33 bp, Homo sapien
tatccaaaatcttgcatagtctgagtgaggctg

SEQ ID NO: 841441 - DNA, 33 bp, Homo sapien
ttggtaatcaggaagactaacttggaaaaaaga

SEQ ID NO: 841442 - DNA, 33 bp, Homo sapien
ttggtaatcaggaagagtaacttggaaaaaaga

SEQ ID NO: 841443 - DNA, 33 bp, Homo sapien
tccactctcttttaacacttgatctgagttgtg

SEQ ID NO: 841444 - DNA, 33 bp, Homo sapien
tccactctcttttaacgcttgatctgagttgtg

SEQ ID NO: 841445 - DNA, 33 bp, Homo sapien
aaatcattagagcataataagtcctaaactttg

SEQ ID NO: 841446 - DNA, 33 bp, Homo sapien
aaatcattagagcatagtaagtcctaaactttg

SEQ ID NO: 841447 - DNA, 33 bp, Homo sapien
ggtgacttaacactaaagacagaaactcttggg

SEQ ID NO: 841448 - DNA, 33 bp, Homo sapien
ggtgacttaacactaaggacagaaactcttggg

SEQ ID NO: 841449 - DNA, 33 bp, Homo sapien
gctaactgtattgttaaccagtccgtgtattta

SEQ ID NO: 841450 - DNA, 33 bp, Homo sapien
gctaactgtattgttatccagtccgtgtattta

SEQ ID NO: 841451 - DNA, 33 bp, Homo sapien
tagcaacagggctaaactctcagtgtttcgagc

SEQ ID NO: 841452 - DNA, 33 bp, Homo sapien
tagcaacagggctaaattctcagtgtttcgagc

SEQ ID NO: 841453 - DNA, 33 bp, Homo sapien
tctttcacttgccagacatataattgcttcaaa

SEQ ID NO: 841454 - DNA, 33 bp, Homo sapien
tctttcacttgccagagatataattgcttcaaa

SEQ ID NO: 841455 - DNA, 33 bp, Homo sapien
tcagaaaacaagcagaaaacatcttaccaaatg

SEQ ID NO: 841456 - DNA, 33 bp, Homo sapien
tcagaaaacaagcagacaacatcttaccaaatg

SEQ ID NO: 841457 - DNA, 33 bp, Homo sapien
tgtctaaggccaattcaatttttaatcatatgt

SEQ ID NO: 841458 - DNA, 33 bp, Homo sapien
tgtctaaggccaattccatttttaatcatatgt

SEQ ID NO: 841459 - DNA, 33 bp, Homo sapien
taattgcaattcccccaagctgcatttaaacaa

SEQ ID NO: 841460 - DNA, 33 bp, Homo sapien
taattgcaattcccccgagctgcatttaaacaa

SEQ ID NO: 841461 - DNA, 33 bp, Homo sapien
ctgacaaaagtgagtgaagcgccagtacacaag

SEQ ID NO: 841462 - DNA, 33 bp, Homo sapien
ctgacaaaagtgagtggagcgccagtacacaag

SEQ ID NO: 841463 - DNA, 33 bp, Homo sapien
gtagaagaaaggcaaactgaccctctctttctt

SEQ ID NO: 841464 - DNA, 33 bp, Homo sapien
gtagaagaaaggcaaattgaccctctctttctt

SEQ ID NO: 841465 - DNA, 33 bp, Homo sapien
ttttctttatgaccaaatcccattggaaattgt

SEQ ID NO: 841466 - DNA, 33 bp, Homo sapien
ttttctttatgaccaagtcccattggaaattgt

SEQ ID NO: 841467 - DNA, 33 bp, Homo sapien
tgtattttagggcataacactcttttaggtgta

SEQ ID NO: 841468 - DNA, 33 bp, Homo sapien
tgtattttagggcatagcactcttttaggtgta

SEQ ID NO: 841469 - DNA, 33 bp, Homo sapien
gccagaaagagaagaacgtaaactgttttggcc

SEQ ID NO: 841470 - DNA, 33 bp, Homo sapien
gccagaaagagaagaatgtaaactgttttggcc

SEQ ID NO: 841471 - DNA, 33 bp, Homo sapien
ggataggataatgaaccggtaaagatgactaag

SEQ ID NO: 841472 - DNA, 33 bp, Homo sapien
ggataggataatgaactggtaaagatgactaag

SEQ ID NO: 841473 - DNA, 33 bp, Homo sapien
tactcagagtggaaaaactgaacaaacaaacaa

SEQ ID NO: 841474 - DNA, 33 bp, Homo sapien
tactcagagtggaaaatctgaacaaacaaacaa

SEQ ID NO: 841475 - DNA, 33 bp, Homo sapien
ttccaccaggactagacaaataattttcaggac

SEQ ID NO: 841476 - DNA, 33 bp, Homo sapien
ttccaccaggactagataaataattttcaggac

SEQ ID NO: 841477 - DNA, 33 bp, Homo sapien
gactttgtacctctcccgacttaaaagatgttt

SEQ ID NO: 841478 - DNA, 33 bp, Homo sapien
gactttgtacctctcctgacttaaaagatgttt

SEQ ID NO: 841479 - DNA, 33 bp, Homo sapien
tcccttgaactgacacggtatgttttcctccat

SEQ ID NO: 841480 - DNA, 33 bp, Homo sapien
tcccttgaactgacactgtatgttttcctccat

SEQ ID NO: 841481 - DNA, 33 bp, Homo sapien
ttcaaacagtgtgaggcacaatttttaacaatg

SEQ ID NO: 841482 - DNA, 33 bp, Homo sapien
ttcaaacagtgtgaggtacaatttttaacaatg

SEQ ID NO: 841483 - DNA, 33 bp, Homo sapien
catgagtgtagcctaactggtatgcagcttaat

SEQ ID NO: 841484 - DNA, 33 bp, Homo sapien
catgagtgtagcctaattggtatgcagcttaat

SEQ ID NO: 841485 - DNA, 33 bp, Homo sapien
ttccctttgtggataagtggtcctagttgaaat

SEQ ID NO: 841486 - DNA, 33 bp, Homo sapien
ttccctttgtggataattggtcctagttgaaat

SEQ ID NO: 841487 - DNA, 33 bp, Homo sapien
atgttcatgcctaatgaagatgttaagcagcag

SEQ ID NO: 841488 - DNA, 33 bp, Homo sapien
atgttcatgcctaatgtagatgttaagcagcag

SEQ ID NO: 841489 - DNA, 33 bp, Homo sapien
aaccctagctcctagacgcttttggtcttcctg

SEQ ID NO: 841490 - DNA, 33 bp, Homo sapien
aaccctagctcctagatgcttttggtcttcctg

SEQ ID NO: 841491 - DNA, 33 bp, Homo sapien
tgataataaatggtaacaaacttggagaaaaaa

SEQ ID NO: 841492 - DNA, 33 bp, Homo sapien
tgataataaatggtaagaaacttggagaaaaaa

SEQ ID NO: 841493 - DNA, 33 bp, Homo sapien
aatctaggacactttcacttatggtaagaagtt

SEQ ID NO: 841494 - DNA, 33 bp, Homo sapien
aatctaggacactttcgcttatggtaagaagtt

SEQ ID NO: 841495 - DNA, 33 bp, Homo sapien
catgtagttaagtgcaactggattgaggcccaa

SEQ ID NO: 841496 - DNA, 33 bp, Homo sapien
catgtagttaagtgcagctggattgaggcccaa

SEQ ID NO: 841497 - DNA, 33 bp, Homo sapien
ttcctactccagaagacgtaccaagaattcacc

SEQ ID NO: 841498 - DNA, 33 bp, Homo sapien
ttcctactccagaagatgtaccaagaattcacc

SEQ ID NO: 841499 - DNA, 33 bp, Homo sapien
tgatttctatggtaacccttgaaaatccactct

SEQ ID NO: 841500 - DNA, 33 bp, Homo sapien
tgatttctatggtaactcttgaaaatccactct

SEQ ID NO: 841501 - DNA, 33 bp, Homo sapien
gttctttatgtgaatgaaaccaccaggagttgt

SEQ ID NO: 841502 - DNA, 33 bp, Homo sapien
gttctttatgtgaatggaaccaccaggagttgt

SEQ ID NO: 841503 - DNA, 33 bp, Homo sapien
agtgtaaaaatcatgaaggagtaaagaactaaa

SEQ ID NO: 841504 - DNA, 33 bp, Homo sapien
agtgtaaaaatcatgagggagtaaagaactaaa

SEQ ID NO: 841505 - DNA, 33 bp, Homo sapien
ctaggtgggttggtggaagactttatttagtgt

SEQ ID NO: 841506 - DNA, 33 bp, Homo sapien
ctaggtgggttggtgggagactttatttagtgt

SEQ ID NO: 841507 - DNA, 33 bp, Homo sapien
gttaaattactcaagaacttaaatattatcaac

SEQ ID NO: 841508 - DNA, 33 bp, Homo sapien
gttaaattactcaagagcttaaatattatcaac

SEQ ID NO: 841509 - DNA, 33 bp, Homo sapien
agaaaagagtatatagcacaatgcctgtgcaaa

SEQ ID NO: 841510 - DNA, 33 bp, Homo sapien
agaaaagagtatatagtacaatgcctgtgcaaa

SEQ ID NO: 841511 - DNA, 33 bp, Homo sapien
agctgaatgatgaatacgtggagtttattatgt

SEQ ID NO: 841512 - DNA, 33 bp, Homo sapien
agctgaatgatgaatatgtggagtttattatgt

SEQ ID NO: 841513 - DNA, 33 bp, Homo sapien
ccatccagctttcagacgaaacccaagttataa

SEQ ID NO: 841514 - DNA, 33 bp, Homo sapien
ccatccagctttcagaggaaacccaagttataa

SEQ ID NO: 841515 - DNA, 33 bp, Homo sapien
catgtagagtctaaaaatcaaattcatagaagc

SEQ ID NO: 841516 - DNA, 33 bp, Homo sapien
catgtagagtctaaaagtcaaattcatagaagc

SEQ ID NO: 841517 - DNA, 33 bp, Homo sapien
agaatagaatagtggacactagagtctgggatt

SEQ ID NO: 841518 - DNA, 33 bp, Homo sapien
agaatagaatagtggatactagagtctgggatt

SEQ ID NO: 841519 - DNA, 33 bp, Homo sapien
atataggtagattggccctgattaccacctgcc

SEQ ID NO: 841520 - DNA, 33 bp, Homo sapien
atataggtagattggctctgattaccacctgcc

SEQ ID NO: 841521 - DNA, 33 bp, Homo sapien
aaatggtaaataaacaaaattggactggcctac

SEQ ID NO: 841522 - DNA, 33 bp, Homo sapien
aaatggtaaataaacagaattggactggcctac

SEQ ID NO: 841523 - DNA, 33 bp, Homo sapien
tgtttctgtaggtgaaacttgattagagtcagg

SEQ ID NO: 841524 - DNA, 33 bp, Homo sapien
tgtttctgtaggtgaagcttgattagagtcagg

SEQ ID NO: 841525 - DNA, 33 bp, Homo sapien
ttgtttacatctttaccgcaagttagctttcat

SEQ ID NO: 841526 - DNA, 33 bp, Homo sapien
ttgtttacatctttactgcaagttagctttcat

SEQ ID NO: 841527 - DNA, 33 bp, Homo sapien
gtaaaaatgtgtttcaaataagatgtgagggat

SEQ ID NO: 841528 - DNA, 33 bp, Homo sapien
gtaaaaatgtgtttcagataagatgtgagggat

SEQ ID NO: 841529 - DNA, 33 bp, Homo sapien
caggagtgagtatccactaatcatctgtccagt

SEQ ID NO: 841530 - DNA, 33 bp, Homo sapien
caggagtgagtatccattaatcatctgtccagt

SEQ ID NO: 841531 - DNA, 33 bp, Homo sapien
aaaatattaaaaagccacttcagaaaggaagat

SEQ ID NO: 841532 - DNA, 33 bp, Homo sapien
aaaatattaaaaagccgcttcagaaaggaagat

SEQ ID NO: 841533 - DNA, 33 bp, Homo sapien
catttatttcttttcgcccactttatgcactat

SEQ ID NO: 841534 - DNA, 33 bp, Homo sapien
catttatttcttttcgtccactttatgcactat

SEQ ID NO: 841535 - DNA, 33 bp, Homo sapien
tttctaacaatgtctacgaataactaatgtaat

SEQ ID NO: 841536 - DNA, 33 bp, Homo sapien
tttctaacaatgtctatgaataactaatgtaat

SEQ ID NO: 841537 - DNA, 33 bp, Homo sapien
cgtctactagaagagacagcaaacgagtagctg

SEQ ID NO: 841538 - DNA, 33 bp, Homo sapien
cgtctactagaagagatagcaaacgagtagctg

SEQ ID NO: 841539 - DNA, 33 bp, Homo sapien
caaagatcaagcaaaactgagtcaacaatgatt

SEQ ID NO: 841540 - DNA, 33 bp, Homo sapien
caaagatcaagcaaaattgagtcaacaatgatt

SEQ ID NO: 841541 - DNA, 33 bp, Homo sapien
ctaaggttaacgtgaaagagcaaatcctaaaag

SEQ ID NO: 841542 - DNA, 33 bp, Homo sapien
ctaaggttaacgtgaaggagcaaatcctaaaag

SEQ ID NO: 841543 - DNA, 33 bp, Homo sapien
atgcctgattgtggtgaaaataggagtcccctt

SEQ ID NO: 841544 - DNA, 33 bp, Homo sapien
atgcctgattgtggtggaaataggagtcccctt

SEQ ID NO: 841545 - DNA, 33 bp, Homo sapien
gagaagctggaattctaaaaccaaagcaaagaa

SEQ ID NO: 841546 - DNA, 33 bp, Homo sapien
gagaagctggaattctcaaaccaaagcaaagaa

SEQ ID NO: 841547 - DNA, 33 bp, Homo sapien
ctacaagatgtcaacaatgcttagagtatgatt

SEQ ID NO: 841548 - DNA, 33 bp, Homo sapien
ctacaagatgtcaacagtgcttagagtatgatt

SEQ ID NO: 841549 - DNA, 33 bp, Homo sapien
ggtctgcatggctcgcacttcttgcttcctttc

SEQ ID NO: 841550 - DNA, 33 bp, Homo sapien
ggtctgcatggctcgcgcttcttgcttcctttc

SEQ ID NO: 841551 - DNA, 33 bp, Homo sapien
gtggaagtccactgagaacaaatttatcatttc

SEQ ID NO: 841552 - DNA, 33 bp, Homo sapien
gtggaagtccactgaggacaaatttatcatttc

SEQ ID NO: 841553 - DNA, 33 bp, Homo sapien
aagcatatcagtgtatcagtgtagatatctttt

SEQ ID NO: 841554 - DNA, 33 bp, Homo sapien
aagcatatcagtgtatgagtgtagatatctttt

SEQ ID NO: 841555 - DNA, 33 bp, Homo sapien
tatttcacttcattagacatttagttatgtatc

SEQ ID NO: 841556 - DNA, 33 bp, Homo sapien
tatttcacttcattagtcatttagttatgtatc

SEQ ID NO: 841557 - DNA, 33 bp, Homo sapien
atataaatggtacaaacacgttggataatcttc

SEQ ID NO: 841558 - DNA, 33 bp, Homo sapien
atataaatggtacaaatacgttggataatcttc

SEQ ID NO: 841559 - DNA, 33 bp, Homo sapien
aaaagaatctgtgtcaaccaagtaatccatcta

SEQ ID NO: 841560 - DNA, 33 bp, Homo sapien
aaaagaatctgtgtcacccaagtaatccatcta

SEQ ID NO: 841561 - DNA, 33 bp, Homo sapien
aacagagcaggtagaacgttgggataggtggga

SEQ ID NO: 841562 - DNA, 33 bp, Homo sapien
aacagagcaggtagaatgttgggataggtggga

SEQ ID NO: 841563 - DNA, 33 bp, Homo sapien
tattcaaattcattcccagaactgaaattgtcg

SEQ ID NO: 841564 - DNA, 33 bp, Homo sapien
tattcaaattcattcctagaactgaaattgtcg

SEQ ID NO: 841565 - DNA, 33 bp, Homo sapien
aaagtgccatcattcactaactgcagacaaaat

SEQ ID NO: 841566 - DNA, 33 bp, Homo sapien
aaagtgccatcattcattaactgcagacaaaat

SEQ ID NO: 841567 - DNA, 33 bp, Homo sapien
tagtgcagcaagacaacgttcagccaaagcttg

SEQ ID NO: 841568 - DNA, 33 bp, Homo sapien
tagtgcagcaagacaatgttcagccaaagcttg

SEQ ID NO: 841569 - DNA, 33 bp, Homo sapien
aatgaactgagatatcagaaatttgagttctag

SEQ ID NO: 841570 - DNA, 33 bp, Homo sapien
aatgaactgagatatcggaaatttgagttctag

SEQ ID NO: 841571 - DNA, 33 bp, Homo sapien
gtgtacctaaagagaaacttactggtaccatcc

SEQ ID NO: 841572 - DNA, 33 bp, Homo sapien
gtgtacctaaagagaagcttactggtaccatcc

SEQ ID NO: 841573 - DNA, 33 bp, Homo sapien
tcaacaagctggtaagaaaaacaagacaaccta

SEQ ID NO: 841574 - DNA, 33 bp, Homo sapien
tcaacaagctggtaaggaaaacaagacaaccta

SEQ ID NO: 841575 - DNA, 33 bp, Homo sapien
ttaaggagtagtaggaaagaagtatgaaaaggt

SEQ ID NO: 841576 - DNA, 33 bp, Homo sapien
ttaaggagtagtaggagagaagtatgaaaaggt

SEQ ID NO: 841577 - DNA, 33 bp, Homo sapien
cactaacctaaaacacagaaagacagcagccag

SEQ ID NO: 841578 - DNA, 33 bp, Homo sapien
cactaacctaaaacacggaaagacagcagccag

SEQ ID NO: 841579 - DNA, 33 bp, Homo sapien
gcaaacaaaactattcaccattacaattctaaa

SEQ ID NO: 841580 - DNA, 33 bp, Homo sapien
gcaaacaaaactattcgccattacaattctaaa

SEQ ID NO: 841581 - DNA, 33 bp, Homo sapien
gtcccaaacctatcagaacagatattaaatatt

SEQ ID NO: 841582 - DNA, 33 bp, Homo sapien
gtcccaaacctatcaggacagatattaaatatt

SEQ ID NO: 841583 - DNA, 33 bp, Homo sapien
caggaactcctttagaaagtaagtgcaatatcc

SEQ ID NO: 841584 - DNA, 33 bp, Homo sapien
caggaactcctttagacagtaagtgcaatatcc

SEQ ID NO: 841585 - DNA, 33 bp, Homo sapien
tatacctactcttggacctaaggagcctatata

SEQ ID NO: 841586 - DNA, 33 bp, Homo sapien
tatacctactcttggatctaaggagcctatata

SEQ ID NO: 841587 - DNA, 33 bp, Homo sapien
ctgatactggagaaaacgttgaagagttgcttt

SEQ ID NO: 841588 - DNA, 33 bp, Homo sapien
ctgatactggagaaaatgttgaagagttgcttt

SEQ ID NO: 841589 - DNA, 33 bp, Homo sapien
gttgctttcctgaatcactcaaggtaccataaa

SEQ ID NO: 841590 - DNA, 33 bp, Homo sapien
gttgctttcctgaatctctcaaggtaccataaa

SEQ ID NO: 841591 - DNA, 33 bp, Homo sapien
ggcttgtttcttccccactggtaaggctcttca

SEQ ID NO: 841592 - DNA, 33 bp, Homo sapien
ggcttgtttcttcccctctggtaaggctcttca

SEQ ID NO: 841593 - DNA, 33 bp, Homo sapien
ctaggagaaattactgcatgagaacaaatgatt

SEQ ID NO: 841594 - DNA, 33 bp, Homo sapien
ctaggagaaattactgtatgagaacaaatgatt

SEQ ID NO: 841595 - DNA, 33 bp, Homo sapien
ttaagcagcgcattaaactgtttggaaattagt

SEQ ID NO: 841596 - DNA, 33 bp, Homo sapien
ttaagcagcgcattaatctgtttggaaattagt

SEQ ID NO: 841597 - DNA, 33 bp, Homo sapien
ttctccttgtgtagttaaaaaaaatctcctctg

SEQ ID NO: 841598 - DNA, 33 bp, Homo sapien
ttctccttgtgtagttcaaaaaaatctcctctg

SEQ ID NO: 841599 - DNA, 33 bp, Homo sapien
tgtgaagtgtaatcaccgaaaacaaacaaacaa

SEQ ID NO: 841600 - DNA, 33 bp, Homo sapien
tgtgaagtgtaatcactgaaaacaaacaaacaa

SEQ ID NO: 841601 - DNA, 33 bp, Homo sapien
agctagagaaaaactacgagacaatgttaaaag

SEQ ID NO: 841602 - DNA, 33 bp, Homo sapien
agctagagaaaaactatgagacaatgttaaaag

SEQ ID NO: 841603 - DNA, 33 bp, Homo sapien
gtaccttgtgtcttcaatccttatatataaata

SEQ ID NO: 841604 - DNA, 33 bp, Homo sapien
gtaccttgtgtcttcattccttatatataaata

SEQ ID NO: 841605 - DNA, 33 bp, Homo sapien
attgccattttggtgacgtccatgatctcagga

SEQ ID NO: 841606 - DNA, 33 bp, Homo sapien
attgccattttggtgatgtccatgatctcagga

SEQ ID NO: 841607 - DNA, 33 bp, Homo sapien
tgctgtagtggaaacaaccttactgccatcctc

SEQ ID NO: 841608 - DNA, 33 bp, Homo sapien
tgctgtagtggaaacatccttactgccatcctc

SEQ ID NO: 841609 - DNA, 33 bp, Homo sapien
gtggaaggggtcatgaaagatttgagggctgga

SEQ ID NO: 841610 - DNA, 33 bp, Homo sapien
gtggaaggggtcatgatagatttgagggctgga

SEQ ID NO: 841611 - DNA, 33 bp, Homo sapien
cactctggctagggcacagagcgcgaactaggt

SEQ ID NO: 841612 - DNA, 33 bp, Homo sapien
cactctggctagggcatagagcgcgaactaggt

SEQ ID NO: 841613 - DNA, 33 bp, Homo sapien
gcccaacagtgtttaacgtgtgcccagaagaga

SEQ ID NO: 841614 - DNA, 33 bp, Homo sapien
gcccaacagtgtttaatgtgtgcccagaagaga

SEQ ID NO: 841615 - DNA, 33 bp, Homo sapien
gtcctcaatccagtgacatttgcaaaaactatt

SEQ ID NO: 841616 - DNA, 33 bp, Homo sapien
gtcctcaatccagtgatatttgcaaaaactatt

SEQ ID NO: 841617 - DNA, 33 bp, Homo sapien
ggtcaaattgtacttacagacagtaagatgaca

SEQ ID NO: 841618 - DNA, 33 bp, Homo sapien
ggtcaaattgtacttatagacagtaagatgaca

SEQ ID NO: 841619 - DNA, 33 bp, Homo sapien
tgtgcctatcttgaaacgctcacatatttgcag

SEQ ID NO: 841620 - DNA, 33 bp, Homo sapien
tgtgcctatcttgaaatgctcacatatttgcag

SEQ ID NO: 841621 - DNA, 33 bp, Homo sapien
tattgtgtacttcccactagatcacatgaggaa

SEQ ID NO: 841622 - DNA, 33 bp, Homo sapien
tattgtgtacttcccattagatcacatgaggaa

SEQ ID NO: 841623 - DNA, 33 bp, Homo sapien
atgcctttgaattggaaagttttgcctacttaa

SEQ ID NO: 841624 - DNA, 33 bp, Homo sapien
atgcctttgaattggacagttttgcctacttaa

SEQ ID NO: 841625 - DNA, 33 bp, Homo sapien
atggatgtgagaactaaaacataaatagggttt

SEQ ID NO: 841626 - DNA, 33 bp, Homo sapien
atggatgtgagaactagaacataaatagggttt

SEQ ID NO: 841627 - DNA, 33 bp, Homo sapien
gcgttcctacaaggagaagtgtttttcataatc

SEQ ID NO: 841628 - DNA, 33 bp, Homo sapien
gcgttcctacaaggaggagtgtttttcataatc

SEQ ID NO: 841629 - DNA, 33 bp, Homo sapien
tcaaattctaattccaacgtttactagcactgt

SEQ ID NO: 841630 - DNA, 33 bp, Homo sapien
tcaaattctaattccagcgtttactagcactgt

SEQ ID NO: 841631 - DNA, 33 bp, Homo sapien
taaaaatcacaggtaaatgttcagaaaaggatt

SEQ ID NO: 841632 - DNA, 33 bp, Homo sapien
taaaaatcacaggtaactgttcagaaaaggatt

SEQ ID NO: 841633 - DNA, 33 bp, Homo sapien
gccaaacctatttgtcactagataatctataca

SEQ ID NO: 841634 - DNA, 33 bp, Homo sapien
gccaaacctatttgtcgctagataatctataca

SEQ ID NO: 841635 - DNA, 33 bp, Homo sapien
ttctaaactgaaggaacggagtgacaccagcag

SEQ ID NO: 841636 - DNA, 33 bp, Homo sapien
ttctaaactgaaggaatggagtgacaccagcag

SEQ ID NO: 841637 - DNA, 33 bp, Homo sapien
tgggacattatgatatcagagtttttaaagtgg

SEQ ID NO: 841638 - DNA, 33 bp, Homo sapien
tgggacattatgatattagagtttttaaagtgg

SEQ ID NO: 841639 - DNA, 33 bp, Homo sapien
catacaacttttcaaaacaatattctctgtgcc

SEQ ID NO: 841640 - DNA, 33 bp, Homo sapien
catacaacttttcaaaccaatattctctgtgcc

SEQ ID NO: 841641 - DNA, 33 bp, Homo sapien
taaaatactcagatagacgagtgcccacaattc

SEQ ID NO: 841642 - DNA, 33 bp, Homo sapien
taaaatactcagataggcgagtgcccacaattc

SEQ ID NO: 841643 - DNA, 33 bp, Homo sapien
tgttgaaaacaccctaccttggatcaccaaagt

SEQ ID NO: 841644 - DNA, 33 bp, Homo sapien
tgttgaaaacaccctatcttggatcaccaaagt

SEQ ID NO: 841645 - DNA, 33 bp, Homo sapien
tttttctgacttcgtacgactaaaaagtcccaa

SEQ ID NO: 841646 - DNA, 33 bp, Homo sapien
tttttctgacttcgtatgactaaaaagtcccaa

SEQ ID NO: 841647 - DNA, 33 bp, Homo sapien
cttttatgtaagctcccaattaactacatagat

SEQ ID NO: 841648 - DNA, 33 bp, Homo sapien
cttttatgtaagctcctaattaactacatagat

SEQ ID NO: 841649 - DNA, 33 bp, Homo sapien
ggtatcctttggctcacagagactttttgcatg

SEQ ID NO: 841650 - DNA, 33 bp, Homo sapien
ggtatcctttggctcatagagactttttgcatg

SEQ ID NO: 841651 - DNA, 33 bp, Homo sapien
aaaacagccgacctaacgagtattataatgcca

SEQ ID NO: 841652 - DNA, 33 bp, Homo sapien
aaaacagccgacctaatgagtattataatgcca

SEQ ID NO: 841653 - DNA, 33 bp, Homo sapien
aatgtgtttattgtatcagaggtgttacataca

SEQ ID NO: 841654 - DNA, 33 bp, Homo sapien
aatgtgtttattgtattagaggtgttacataca

SEQ ID NO: 841655 - DNA, 33 bp, Homo sapien
actggctgcaagtttagcatacgtatcaagcat

SEQ ID NO: 841656 - DNA, 33 bp, Homo sapien
actggctgcaagtttatcatacgtatcaagcat

SEQ ID NO: 841657 - DNA, 33 bp, Homo sapien
actatggtcacgagaacattgaaagaaatggtc

SEQ ID NO: 841658 - DNA, 33 bp, Homo sapien
actatggtcacgagaagattgaaagaaatggtc

SEQ ID NO: 841659 - DNA, 33 bp, Homo sapien
cataatggcttttcaccgtatgtccaaagatta

SEQ ID NO: 841660 - DNA, 33 bp, Homo sapien
cataatggcttttcactgtatgtccaaagatta

SEQ ID NO: 841661 - DNA, 33 bp, Homo sapien
tggacacttaaggtcagattgaagtcagtctgt

SEQ ID NO: 841662 - DNA, 33 bp, Homo sapien
tggacacttaaggtcatattgaagtcagtctgt

SEQ ID NO: 841663 - DNA, 33 bp, Homo sapien
tgctctttcacagcctgaactattaatacctct

SEQ ID NO: 841664 - DNA, 33 bp, Homo sapien
tgctctttcacagccttaactattaatacctct

SEQ ID NO: 841665 - DNA, 33 bp, Homo sapien
atcctagaaaaacccaagttgaatcatcataag

SEQ ID NO: 841666 - DNA, 33 bp, Homo sapien
atcctagaaaaacccaggttgaatcatcataag

SEQ ID NO: 841667 - DNA, 33 bp, Homo sapien
tatttgcttttaggagcagtgcattaatatatc

SEQ ID NO: 841668 - DNA, 33 bp, Homo sapien
tatttgcttttaggagtagtgcattaatatatc

SEQ ID NO: 841669 - DNA, 33 bp, Homo sapien
gctttgtcatgtaatcacaaattcatttaaggt

SEQ ID NO: 841670 - DNA, 33 bp, Homo sapien
gctttgtcatgtaatcgcaaattcatttaaggt

SEQ ID NO: 841671 - DNA, 33 bp, Homo sapien
cattatcctaacatgcacaaattcagaaagtgt

SEQ ID NO: 841672 - DNA, 33 bp, Homo sapien
cattatcctaacatgcccaaattcagaaagtgt

SEQ ID NO: 841673 - DNA, 33 bp, Homo sapien
attgttatgtgttttgaatgtcaaaattaataa

SEQ ID NO: 841674 - DNA, 33 bp, Homo sapien
attgttatgtgttttggatgtcaaaattaataa

SEQ ID NO: 841675 - DNA, 33 bp, Homo sapien
gctccacagacacaaacggacaaaaatcattct

SEQ ID NO: 841676 - DNA, 33 bp, Homo sapien
gctccacagacacaaatggacaaaaatcattct

SEQ ID NO: 841677 - DNA, 33 bp, Homo sapien
aaagctgtgataaacaacagtctttagtttcac

SEQ ID NO: 841678 - DNA, 33 bp, Homo sapien
aaagctgtgataaacaccagtctttagtttcac

SEQ ID NO: 841679 - DNA, 33 bp, Homo sapien
caataatgttctataactgagtcatcatgggcc

SEQ ID NO: 841680 - DNA, 33 bp, Homo sapien
caataatgttctataattgagtcatcatgggcc

SEQ ID NO: 841681 - DNA, 33 bp, Homo sapien
ctactgtgcagggaaaagggaattcagagaaaa

SEQ ID NO: 841682 - DNA, 33 bp, Homo sapien
ctactgtgcagggaaaggggaattcagagaaaa

SEQ ID NO: 841683 - DNA, 33 bp, Homo sapien
gatgaagacctgtaaaatagattctagttctca

SEQ ID NO: 841684 - DNA, 33 bp, Homo sapien
gatgaagacctgtaaagtagattctagttctca

SEQ ID NO: 841685 - DNA, 33 bp, Homo sapien
tcattagaagctcaaaactcaatatcatgcaat

SEQ ID NO: 841686 - DNA, 33 bp, Homo sapien
tcattagaagctcaaacctcaatatcatgcaat

SEQ ID NO: 841687 - DNA, 33 bp, Homo sapien
gcccatcaaagacaaacaatatgtggtacatat

SEQ ID NO: 841688 - DNA, 33 bp, Homo sapien
gcccatcaaagacaaagaatatgtggtacatat

SEQ ID NO: 841689 - DNA, 33 bp, Homo sapien
cattcagcataattctaaatacctgaatatagt

SEQ ID NO: 841690 - DNA, 33 bp, Homo sapien
cattcagcataattctgaatacctgaatatagt

SEQ ID NO: 841691 - DNA, 33 bp, Homo sapien
ccacctgacaacctaaacagatttttgttctga

SEQ ID NO: 841692 - DNA, 33 bp, Homo sapien
ccacctgacaacctaatcagatttttgttctga

SEQ ID NO: 841693 - DNA, 33 bp, Homo sapien
atgaaagtcaggatgaactgtgaagcaaaggta

SEQ ID NO: 841694 - DNA, 33 bp, Homo sapien
atgaaagtcaggatgatctgtgaagcaaaggta

SEQ ID NO: 841695 - DNA, 33 bp, Homo sapien
tgccagagtgactgaaaaccattgatttaacct

SEQ ID NO: 841696 - DNA, 33 bp, Homo sapien
tgccagagtgactgaagaccattgatttaacct

SEQ ID NO: 841697 - DNA, 33 bp, Homo sapien
aaagaaaagtacaaaacatggagatctatgatg

SEQ ID NO: 841698 - DNA, 33 bp, Homo sapien
aaagaaaagtacaaaatatggagatctatgatg

SEQ ID NO: 841699 - DNA, 33 bp, Homo sapien
ccaaacaatctgcaataataaagagttgtttta

SEQ ID NO: 841700 - DNA, 33 bp, Homo sapien
ccaaacaatctgcaatgataaagagttgtttta

SEQ ID NO: 841701 - DNA, 33 bp, Homo sapien
ttttctctaaggcctaaaacaagacaacattgc

SEQ ID NO: 841702 - DNA, 33 bp, Homo sapien
ttttctctaaggcctataacaagacaacattgc

SEQ ID NO: 841703 - DNA, 33 bp, Homo sapien
ctatggctgattgaaagttatcatttaaattta

SEQ ID NO: 841704 - DNA, 33 bp, Homo sapien
ctatggctgattgaaatttatcatttaaattta

SEQ ID NO: 841705 - DNA, 33 bp, Homo sapien
ttaaaagacaaagtgcactggacaattcaggag

SEQ ID NO: 841706 - DNA, 33 bp, Homo sapien
ttaaaagacaaagtgcgctggacaattcaggag

SEQ ID NO: 841707 - DNA, 33 bp, Homo sapien
gtttacatttaattcaaaatcctttggctgcct

SEQ ID NO: 841708 - DNA, 33 bp, Homo sapien
gtttacatttaattcagaatcctttggctgcct

SEQ ID NO: 841709 - DNA, 33 bp, Homo sapien
agagagtaaactgacactacgtgcttcttgatg

SEQ ID NO: 841710 - DNA, 33 bp, Homo sapien
agagagtaaactgacattacgtgcttcttgatg

SEQ ID NO: 841711 - DNA, 33 bp, Homo sapien
gggtctcttcctgacaatgaatgtgactttgtt

SEQ ID NO: 841712 - DNA, 33 bp, Homo sapien
gggtctcttcctgacactgaatgtgactttgtt

SEQ ID NO: 841713 - DNA, 33 bp, Homo sapien
gattgcctcttctgtcaaggagaagatatagca

SEQ ID NO: 841714 - DNA, 33 bp, Homo sapien
gattgcctcttctgtcgaggagaagatatagca

SEQ ID NO: 841715 - DNA, 33 bp, Homo sapien
gtgaatccagttgtgccaagggtaatgtcatgg

SEQ ID NO: 841716 - DNA, 33 bp, Homo sapien
gtgaatccagttgtgctaagggtaatgtcatgg

SEQ ID NO: 841717 - DNA, 33 bp, Homo sapien
aatttactggagtaagaagtgaataacaggcta

SEQ ID NO: 841718 - DNA, 33 bp, Homo sapien
aatttactggagtaagcagtgaataacaggcta

SEQ ID NO: 841719 - DNA, 33 bp, Homo sapien
atccctgaaattaccaagaaggatgacccagtt

SEQ ID NO: 841720 - DNA, 33 bp, Homo sapien
atccctgaaattaccaggaaggatgacccagtt

SEQ ID NO: 841721 - DNA, 33 bp, Homo sapien
gtaagttggatatttgcataaagttcaagagaa

SEQ ID NO: 841722 - DNA, 33 bp, Homo sapien
gtaagttggatatttgtataaagttcaagagaa

SEQ ID NO: 841723 - DNA, 33 bp, Homo sapien
acttccagaagcattgaataatagtttcagaca

SEQ ID NO: 841724 - DNA, 33 bp, Homo sapien
acttccagaagcattgcataatagtttcagaca

SEQ ID NO: 841725 - DNA, 33 bp, Homo sapien
tagagtagtttattgcacaagaatataaatcag

SEQ ID NO: 841726 - DNA, 33 bp, Homo sapien
tagagtagtttattgcgcaagaatataaatcag

SEQ ID NO: 841727 - DNA, 33 bp, Homo sapien
atttaaagtatccaccaaatgtatttcttactt

SEQ ID NO: 841728 - DNA, 33 bp, Homo sapien
atttaaagtatccaccgaatgtatttcttactt

SEQ ID NO: 841729 - DNA, 33 bp, Homo sapien
tttagtggcacgcagaaacacccatttgctaac

SEQ ID NO: 841730 - DNA, 33 bp, Homo sapien
tttagtggcacgcagacacacccatttgctaac

SEQ ID NO: 841731 - DNA, 33 bp, Homo sapien
aaaaattgacttggaaaagatcacataaccaat

SEQ ID NO: 841732 - DNA, 33 bp, Homo sapien
aaaaattgacttggaatagatcacataaccaat

SEQ ID NO: 841733 - DNA, 33 bp, Homo sapien
ttttaaattcttgctgaaaaatttgtgggtaat

SEQ ID NO: 841734 - DNA, 33 bp, Homo sapien
ttttaaattcttgctgcaaaatttgtgggtaat

SEQ ID NO: 841735 - DNA, 33 bp, Homo sapien
aacaccgatttgctcaatattatactagacact

SEQ ID NO: 841736 - DNA, 33 bp, Homo sapien
aacaccgatttgctcagtattatactagacact

SEQ ID NO: 841737 - DNA, 33 bp, Homo sapien
atagaagtaagaaaaaaaaaggagatggaatgg

SEQ ID NO: 841738 - DNA, 33 bp, Homo sapien
atagaagtaagaaaaagaaaggagatggaatgg

SEQ ID NO: 841739 - DNA, 33 bp, Homo sapien
aacagcctaataatgacaccatctcaactagga

SEQ ID NO: 841740 - DNA, 33 bp, Homo sapien
aacagcctaataatgataccatctcaactagga

SEQ ID NO: 841741 - DNA, 33 bp, Homo sapien
ctatttaatttgcaaagaccttcaatacatggg

SEQ ID NO: 841742 - DNA, 33 bp, Homo sapien
ctatttaatttgcaaataccttcaatacatggg

SEQ ID NO: 841743 - DNA, 33 bp, Homo sapien
tttcactttgttattccacctctctcagtttgg

SEQ ID NO: 841744 - DNA, 33 bp, Homo sapien
tttcactttgttattctacctctctcagtttgg

SEQ ID NO: 841745 - DNA, 33 bp, Homo sapien
aattctgcacaatttacgaacatagtataacaa

SEQ ID NO: 841746 - DNA, 33 bp, Homo sapien
aattctgcacaatttatgaacatagtataacaa

SEQ ID NO: 841747 - DNA, 33 bp, Homo sapien
aattacattattaaagacctaatgagctccaaa

SEQ ID NO: 841748 - DNA, 33 bp, Homo sapien
aattacattattaaagccctaatgagctccaaa

SEQ ID NO: 841749 - DNA, 33 bp, Homo sapien
aatcagattctcattcacagcaattcaaactgt

SEQ ID NO: 841750 - DNA, 33 bp, Homo sapien
aatcagattctcattctcagcaattcaaactgt

SEQ ID NO: 841751 - DNA, 33 bp, Homo sapien
gaataagctatagttcaagagctagcatcaaag

SEQ ID NO: 841752 - DNA, 33 bp, Homo sapien
gaataagctatagttcgagagctagcatcaaag

SEQ ID NO: 841753 - DNA, 33 bp, Homo sapien
actgtttccttgtggcagaatcctaaaaatggc

SEQ ID NO: 841754 - DNA, 33 bp, Homo sapien
actgtttccttgtggctgaatcctaaaaatggc

SEQ ID NO: 841755 - DNA, 33 bp, Homo sapien
cacacctctgcaaaggacagatcgagaggagat

SEQ ID NO: 841756 - DNA, 33 bp, Homo sapien
cacacctctgcaaagggcagatcgagaggagat

SEQ ID NO: 841757 - DNA, 33 bp, Homo sapien
ctgacagatctcaccacggacctctgattagcc

SEQ ID NO: 841758 - DNA, 33 bp, Homo sapien
ctgacagatctcaccatggacctctgattagcc

SEQ ID NO: 841759 - DNA, 33 bp, Homo sapien
atgaacccctcaccaacggcaaaaagcagagga

SEQ ID NO: 841760 - DNA, 33 bp, Homo sapien
atgaacccctcaccaatggcaaaaagcagagga

SEQ ID NO: 841761 - DNA, 33 bp, Homo sapien
tctaaactagtttgtaagagaatataatgttac

SEQ ID NO: 841762 - DNA, 33 bp, Homo sapien
tctaaactagtttgtaggagaatataatgttac

SEQ ID NO: 841763 - DNA, 33 bp, Homo sapien
gagatgagaatctagaaatttattaaactcgtt

SEQ ID NO: 841764 - DNA, 33 bp, Homo sapien
gagatgagaatctagacatttattaaactcgtt

SEQ ID NO: 841765 - DNA, 33 bp, Homo sapien
tgctgtacttccattcacagaagagctgtattc

SEQ ID NO: 841766 - DNA, 33 bp, Homo sapien
tgctgtacttccattcgcagaagagctgtattc

SEQ ID NO: 841767 - DNA, 33 bp, Homo sapien
cacaatatttcattgacgaccaaataatttcca

SEQ ID NO: 841768 - DNA, 33 bp, Homo sapien
cacaatatttcattgaggaccaaataatttcca

SEQ ID NO: 841769 - DNA, 33 bp, Homo sapien
tacatggtaatgaataccaagtcaagcctacat

SEQ ID NO: 841770 - DNA, 33 bp, Homo sapien
tacatggtaatgaatatcaagtcaagcctacat

SEQ ID NO: 841771 - DNA, 33 bp, Homo sapien
tagtttagacaaaatgaaaaccactgatattat

SEQ ID NO: 841772 - DNA, 33 bp, Homo sapien
tagtttagacaaaatggaaaccactgatattat

SEQ ID NO: 841773 - DNA, 33 bp, Homo sapien
aatttctggggcattacgattcttctacctcca

SEQ ID NO: 841774 - DNA, 33 bp, Homo sapien
aatttctggggcattatgattcttctacctcca

SEQ ID NO: 841775 - DNA, 33 bp, Homo sapien
catgaaaaactgtaaaagaccttatagagaatg

SEQ ID NO: 841776 - DNA, 33 bp, Homo sapien
catgaaaaactgtaaaggaccttatagagaatg

SEQ ID NO: 841777 - DNA, 33 bp, Homo sapien
ctttcagaaggtttataagcaagcagaattgac

SEQ ID NO: 841778 - DNA, 33 bp, Homo sapien
ctttcagaaggtttatgagcaagcagaattgac

SEQ ID NO: 841779 - DNA, 33 bp, Homo sapien
caggcctccctaatgtcaaagcagttctggccc

SEQ ID NO: 841780 - DNA, 33 bp, Homo sapien
caggcctccctaatgtgaaagcagttctggccc

SEQ ID NO: 841781 - DNA, 33 bp, Homo sapien
agaggatggcaggtacaaaatattggaaataag

SEQ ID NO: 841782 - DNA, 33 bp, Homo sapien
agaggatggcaggtaccaaatattggaaataag

SEQ ID NO: 841783 - DNA, 33 bp, Homo sapien
aataaatacatttgacggtagtaaggaatacta

SEQ ID NO: 841784 - DNA, 33 bp, Homo sapien
aataaatacatttgactgtagtaaggaatacta

SEQ ID NO: 841785 - DNA, 33 bp, Homo sapien
gcaattttccagtgacacaaaatgcttggacta

SEQ ID NO: 841786 - DNA, 33 bp, Homo sapien
gcaattttccagtgacgcaaaatgcttggacta

SEQ ID NO: 841787 - DNA, 33 bp, Homo sapien
tataacaagaagagagaaagcactaaatgggat

SEQ ID NO: 841788 - DNA, 33 bp, Homo sapien
tataacaagaagagaggaagcactaaatgggat

SEQ ID NO: 841789 - DNA, 33 bp, Homo sapien
ctcctaacctccatccccactgatacggtttgg

SEQ ID NO: 841790 - DNA, 33 bp, Homo sapien
ctcctaacctccatcctcactgatacggtttgg

SEQ ID NO: 841791 - DNA, 33 bp, Homo sapien
caaggagatgactacccaaaattctttagctga

SEQ ID NO: 841792 - DNA, 33 bp, Homo sapien
caaggagatgactaccgaaaattctttagctga

SEQ ID NO: 841793 - DNA, 33 bp, Homo sapien
atagatgtaatgtgccacccagatctcctttct

SEQ ID NO: 841794 - DNA, 33 bp, Homo sapien
atagatgtaatgtgccgcccagatctcctttct

SEQ ID NO: 841795 - DNA, 33 bp, Homo sapien
ttcttcttctgtttggaaattgatactctccca

SEQ ID NO: 841796 - DNA, 33 bp, Homo sapien
ttcttcttctgtttgggaattgatactctccca

SEQ ID NO: 841797 - DNA, 33 bp, Homo sapien
aagcttaaaatgaaaaactctcaacagtagaag

SEQ ID NO: 841798 - DNA, 33 bp, Homo sapien
aagcttaaaatgaaaacctctcaacagtagaag

SEQ ID NO: 841799 - DNA, 33 bp, Homo sapien
tatgtcaaaaaatttcacccatataaaatagaa

SEQ ID NO: 841800 - DNA, 33 bp, Homo sapien
tatgtcaaaaaatttcgcccatataaaatagaa

SEQ ID NO: 841801 - DNA, 33 bp, Homo sapien
tctagtttctctaagaagcatacaccaaacagg

SEQ ID NO: 841802 - DNA, 33 bp, Homo sapien
tctagtttctctaagaggcatacaccaaacagg

SEQ ID NO: 841803 - DNA, 33 bp, Homo sapien
tcagtcaaagaaacaacgagaaacaattacgac

SEQ ID NO: 841804 - DNA, 33 bp, Homo sapien
tcagtcaaagaaacaatgagaaacaattacgac

SEQ ID NO: 841805 - DNA, 33 bp, Homo sapien
acaaacacatgatgaaatataactttttgattt

SEQ ID NO: 841806 - DNA, 33 bp, Homo sapien
acaaacacatgatgaagtataactttttgattt

SEQ ID NO: 841807 - DNA, 33 bp, Homo sapien
ttaaaaaatccttaaaattgcagcacaaaatag

SEQ ID NO: 841808 - DNA, 33 bp, Homo sapien
ttaaaaaatccttaaagttgcagcacaaaatag

SEQ ID NO: 841809 - DNA, 33 bp, Homo sapien
cttatgtggctaaatgcatttatgttctttcct

SEQ ID NO: 841810 - DNA, 33 bp, Homo sapien
cttatgtggctaaatgtatttatgttctttcct

SEQ ID NO: 841811 - DNA, 33 bp, Homo sapien
agccacataagctccaatatgtttcccttattg

SEQ ID NO: 841812 - DNA, 33 bp, Homo sapien
agccacataagctccagtatgtttcccttattg

SEQ ID NO: 841813 - DNA, 33 bp, Homo sapien
atgtccaaactactgaaattcctttcttcctca

SEQ ID NO: 841814 - DNA, 33 bp, Homo sapien
atgtccaaactactgagattcctttcttcctca

SEQ ID NO: 841815 - DNA, 33 bp, Homo sapien
gagttacacgtgataaaactgaacagattctgt

SEQ ID NO: 841816 - DNA, 33 bp, Homo sapien
gagttacacgtgataagactgaacagattctgt

SEQ ID NO: 841817 - DNA, 33 bp, Homo sapien
ccctgtgaaaatggacaaaatatactaatgcct

SEQ ID NO: 841818 - DNA, 33 bp, Homo sapien
ccctgtgaaaatggacgaaatatactaatgcct

SEQ ID NO: 841819 - DNA, 33 bp, Homo sapien
ttcaattgtagggagagcgtttttacaataaca

SEQ ID NO: 841820 - DNA, 33 bp, Homo sapien
ttcaattgtagggagatcgtttttacaataaca

SEQ ID NO: 841821 - DNA, 33 bp, Homo sapien
ggactaagacagtagactattatgagatctttg

SEQ ID NO: 841822 - DNA, 33 bp, Homo sapien
ggactaagacagtagattattatgagatctttg

SEQ ID NO: 841823 - DNA, 33 bp, Homo sapien
agctactgatgtctgcaaatggtatagacagac

SEQ ID NO: 841824 - DNA, 33 bp, Homo sapien
agctactgatgtctgcgaatggtatagacagac

SEQ ID NO: 841825 - DNA, 33 bp, Homo sapien
gagagtggtagagtgcaaggataaggaagagcc

SEQ ID NO: 841826 - DNA, 33 bp, Homo sapien
gagagtggtagagtgcgaggataaggaagagcc

SEQ ID NO: 841827 - DNA, 33 bp, Homo sapien
gaaaccctgacttaaaatgccattgtgtgctta

SEQ ID NO: 841828 - DNA, 33 bp, Homo sapien
gaaaccctgacttaaagtgccattgtgtgctta

SEQ ID NO: 841829 - DNA, 33 bp, Homo sapien
aacattgcactagataaaacttaagtgacaaga

SEQ ID NO: 841830 - DNA, 33 bp, Homo sapien
aacattgcactagatacaacttaagtgacaaga

SEQ ID NO: 841831 - DNA, 33 bp, Homo sapien
tgatatgaagttgaaaaaaattgcgaacttgtt

SEQ ID NO: 841832 - DNA, 33 bp, Homo sapien
tgatatgaagttgaaagaaattgcgaacttgtt

SEQ ID NO: 841833 - DNA, 33 bp, Homo sapien
gtcccttcttcctataagcctgtaaaatcaaaa

SEQ ID NO: 841834 - DNA, 33 bp, Homo sapien
gtcccttcttcctatatgcctgtaaaatcaaaa

SEQ ID NO: 841835 - DNA, 33 bp, Homo sapien
gttaatcagacaaaaactgttgatgaaatagag

SEQ ID NO: 841836 - DNA, 33 bp, Homo sapien
gttaatcagacaaaaattgttgatgaaatagag

SEQ ID NO: 841837 - DNA, 33 bp, Homo sapien
tgtgtctcgttcctaactaactttatccgttta

SEQ ID NO: 841838 - DNA, 33 bp, Homo sapien
tgtgtctcgttcctaattaactttatccgttta

SEQ ID NO: 841839 - DNA, 33 bp, Homo sapien
ccccaattaaatatgaaatcatcatgtttatct

SEQ ID NO: 841840 - DNA, 33 bp, Homo sapien
ccccaattaaatatgagatcatcatgtttatct

SEQ ID NO: 841841 - DNA, 33 bp, Homo sapien
gaaagcttgcaacacaagagtagattaatcaga

SEQ ID NO: 841842 - DNA, 33 bp, Homo sapien
gaaagcttgcaacacatgagtagattaatcaga

SEQ ID NO: 841843 - DNA, 33 bp, Homo sapien
tttacgaggcagaaaactaggaagaacagatga

SEQ ID NO: 841844 - DNA, 33 bp, Homo sapien
tttacgaggcagaaaagtaggaagaacagatga

SEQ ID NO: 841845 - DNA, 33 bp, Homo sapien
tcattagtaaaactcaatcagatttccacatga

SEQ ID NO: 841846 - DNA, 33 bp, Homo sapien
tcattagtaaaactcagtcagatttccacatga

SEQ ID NO: 841847 - DNA, 33 bp, Homo sapien
cccagattctgatgataactttctctctttatt

SEQ ID NO: 841848 - DNA, 33 bp, Homo sapien
cccagattctgatgatcactttctctctttatt

SEQ ID NO: 841849 - DNA, 33 bp, Homo sapien
tgatgttattctcatccatcgtatttttatatc

SEQ ID NO: 841850 - DNA, 33 bp, Homo sapien
tgatgttattctcatctatcgtatttttatatc

SEQ ID NO: 841851 - DNA, 33 bp, Homo sapien
tttagctaaacacataactataacctcacgagt

SEQ ID NO: 841852 - DNA, 33 bp, Homo sapien
tttagctaaacacatagctataacctcacgagt

SEQ ID NO: 841853 - DNA, 33 bp, Homo sapien
ttagaattaccaagcccaataatgagatgtcat

SEQ ID NO: 841854 - DNA, 33 bp, Homo sapien
ttagaattaccaagcctaataatgagatgtcat

SEQ ID NO: 841855 - DNA, 33 bp, Homo sapien
ttcctgggaaaacacacaggggagtcacaagag

SEQ ID NO: 841856 - DNA, 33 bp, Homo sapien
ttcctgggaaaacacataggggagtcacaagag

SEQ ID NO: 841857 - DNA, 33 bp, Homo sapien
ctcaatcaatgttgaaatctcctggttttacaa

SEQ ID NO: 841858 - DNA, 33 bp, Homo sapien
ctcaatcaatgttgaactctcctggttttacaa

SEQ ID NO: 841859 - DNA, 33 bp, Homo sapien
gctagattaattcaaaagacctgtctctaagtt

SEQ ID NO: 841860 - DNA, 33 bp, Homo sapien
gctagattaattcaaatgacctgtctctaagtt

SEQ ID NO: 841861 - DNA, 33 bp, Homo sapien
gttgtcacctgtactactaaacaaccgggtata

SEQ ID NO: 841862 - DNA, 33 bp, Homo sapien
gttgtcacctgtactattaaacaaccgggtata

SEQ ID NO: 841863 - DNA, 33 bp, Homo sapien
acttttactgtgtcagacattgaagctatttag

SEQ ID NO: 841864 - DNA, 33 bp, Homo sapien
acttttactgtgtcaggcattgaagctatttag

SEQ ID NO: 841865 - DNA, 33 bp, Homo sapien
atggtaatgtttttaactattgctgtttatttg

SEQ ID NO: 841866 - DNA, 33 bp, Homo sapien
atggtaatgtttttaattattgctgtttatttg

SEQ ID NO: 841867 - DNA, 33 bp, Homo sapien
ggaatgttatttaaagaaatgcttcaagtggaa

SEQ ID NO: 841868 - DNA, 33 bp, Homo sapien
ggaatgttatttaaagcaatgcttcaagtggaa

SEQ ID NO: 841869 - DNA, 33 bp, Homo sapien
gttttccaaagtggccaaagtggctatacctta

SEQ ID NO: 841870 - DNA, 33 bp, Homo sapien
gttttccaaagtggccgaagtggctatacctta

SEQ ID NO: 841871 - DNA, 33 bp, Homo sapien
aaatggtgactctctcaagaaaaaaaaaatagt

SEQ ID NO: 841872 - DNA, 33 bp, Homo sapien
aaatggtgactctctcgagaaaaaaaaaatagt

SEQ ID NO: 841873 - DNA, 33 bp, Homo sapien
aatgcaaagacaaaaggaatcagagaaaagtct

SEQ ID NO: 841874 - DNA, 33 bp, Homo sapien
aatgcaaagacaaaagtaatcagagaaaagtct

SEQ ID NO: 841875 - DNA, 33 bp, Homo sapien
cactcttcttggtacacaattaaggctcaattt

SEQ ID NO: 841876 - DNA, 33 bp, Homo sapien
cactcttcttggtacataattaaggctcaattt

SEQ ID NO: 841877 - DNA, 33 bp, Homo sapien
agagtcctttttcttacagctcttacatgtagc

SEQ ID NO: 841878 - DNA, 33 bp, Homo sapien
agagtcctttttcttatagctcttacatgtagc

SEQ ID NO: 841879 - DNA, 33 bp, Homo sapien
gatagtggaaaattgccaaatactttacactgc

SEQ ID NO: 841880 - DNA, 33 bp, Homo sapien
gatagtggaaaattgcgaaatactttacactgc

SEQ ID NO: 841881 - DNA, 33 bp, Homo sapien
acaacactgaacaataagatctaatcaatagtt

SEQ ID NO: 841882 - DNA, 33 bp, Homo sapien
acaacactgaacaataggatctaatcaatagtt

SEQ ID NO: 841883 - DNA, 33 bp, Homo sapien
actgaatacaatgctacagtcaaactgacagca

SEQ ID NO: 841884 - DNA, 33 bp, Homo sapien
actgaatacaatgctatagtcaaactgacagca

SEQ ID NO: 841885 - DNA, 33 bp, Homo sapien
ctgatcatggaccccacgatggcatattgtagc

SEQ ID NO: 841886 - DNA, 33 bp, Homo sapien
ctgatcatggaccccaggatggcatattgtagc

SEQ ID NO: 841887 - DNA, 33 bp, Homo sapien
acacagtcaattctcaatattagtggttatgct

SEQ ID NO: 841888 - DNA, 33 bp, Homo sapien
acacagtcaattctcagtattagtggttatgct

SEQ ID NO: 841889 - DNA, 33 bp, Homo sapien
gtcggtgatagtttaccgggatcctaaatgcta

SEQ ID NO: 841890 - DNA, 33 bp, Homo sapien
gtcggtgatagtttactgggatcctaaatgcta

SEQ ID NO: 841891 - DNA, 33 bp, Homo sapien
tttgtagcattttagaaccacacacaatttttg

SEQ ID NO: 841892 - DNA, 33 bp, Homo sapien
tttgtagcattttagagccacacacaatttttg

SEQ ID NO: 841893 - DNA, 33 bp, Homo sapien
gagcacaagccagctaaagacaagtaactccaa

SEQ ID NO: 841894 - DNA, 33 bp, Homo sapien
gagcacaagccagctagagacaagtaactccaa

SEQ ID NO: 841895 - DNA, 33 bp, Homo sapien
actctgaattacccatcatgctttaactgttta

SEQ ID NO: 841896 - DNA, 33 bp, Homo sapien
actctgaattacccatgatgctttaactgttta

SEQ ID NO: 841897 - DNA, 33 bp, Homo sapien
ctctttctgcatatacagtagcaacatatatgc

SEQ ID NO: 841898 - DNA, 33 bp, Homo sapien
ctctttctgcatatacggtagcaacatatatgc

SEQ ID NO: 841899 - DNA, 33 bp, Homo sapien
tagcaaggacttgatacatttaagctcttatta

SEQ ID NO: 841900 - DNA, 33 bp, Homo sapien
tagcaaggacttgatatatttaagctcttatta

SEQ ID NO: 841901 - DNA, 33 bp, Homo sapien
ggaaagaagagggggcaaatatgctactttgat

SEQ ID NO: 841902 - DNA, 33 bp, Homo sapien
ggaaagaagagggggccaatatgctactttgat

SEQ ID NO: 841903 - DNA, 33 bp, Homo sapien
ggaaaacagaggagggaaaaccttgtaattcag

SEQ ID NO: 841904 - DNA, 33 bp, Homo sapien
ggaaaacagaggaggggaaaccttgtaattcag

SEQ ID NO: 841905 - DNA, 33 bp, Homo sapien
agaatctctaacctaactgtgttttagcaggat

SEQ ID NO: 841906 - DNA, 33 bp, Homo sapien
agaatctctaacctaattgtgttttagcaggat

SEQ ID NO: 841907 - DNA, 33 bp, Homo sapien
agtgctgcgtctccaacagaacagagttaagat

SEQ ID NO: 841908 - DNA, 33 bp, Homo sapien
agtgctgcgtctccaatagaacagagttaagat

SEQ ID NO: 841909 - DNA, 33 bp, Homo sapien
tttagcatgattaaaacacgaaataaatgtata

SEQ ID NO: 841910 - DNA, 33 bp, Homo sapien
tttagcatgattaaaatacgaaataaatgtata

SEQ ID NO: 841911 - DNA, 33 bp, Homo sapien
ctaacatcataatgacaggacgaaatacacaca

SEQ ID NO: 841912 - DNA, 33 bp, Homo sapien
ctaacatcataatgactggacgaaatacacaca

SEQ ID NO: 841913 - DNA, 33 bp, Homo sapien
tgcagtgaaaaaggtgcatactgtacaggaaca

SEQ ID NO: 841914 - DNA, 33 bp, Homo sapien
tgcagtgaaaaaggtggatactgtacaggaaca

SEQ ID NO: 841915 - DNA, 33 bp, Homo sapien
aatcaaaaagaggtcaatgaaatttgctcaaac

SEQ ID NO: 841916 - DNA, 33 bp, Homo sapien
aatcaaaaagaggtcagtgaaatttgctcaaac

SEQ ID NO: 841917 - DNA, 33 bp, Homo sapien
aacaacaacagaaagaagaagttcagagaacat

SEQ ID NO: 841918 - DNA, 33 bp, Homo sapien
aacaacaacagaaagacgaagttcagagaacat

SEQ ID NO: 841919 - DNA, 33 bp, Homo sapien
aatatttttttaatctcacctttgctcttagct

SEQ ID NO: 841920 - DNA, 33 bp, Homo sapien
aatatttttttaatcttacctttgctcttagct

SEQ ID NO: 841921 - DNA, 33 bp, Homo sapien
tctttctacgttgtaaactttgcaagtatagca

SEQ ID NO: 841922 - DNA, 33 bp, Homo sapien
tctttctacgttgtaacctttgcaagtatagca

SEQ ID NO: 841923 - DNA, 33 bp, Homo sapien
tggttaacatgaagtaactatgaccatcactga

SEQ ID NO: 841924 - DNA, 33 bp, Homo sapien
tggttaacatgaagtacctatgaccatcactga

SEQ ID NO: 841925 - DNA, 33 bp, Homo sapien
tattcattgcctttcacaaagtttttcttctgt

SEQ ID NO: 841926 - DNA, 33 bp, Homo sapien
tattcattgcctttcataaagtttttcttctgt

SEQ ID NO: 841927 - DNA, 33 bp, Homo sapien
ttatataaattacaaaacttaatacttctcaca

SEQ ID NO: 841928 - DNA, 33 bp, Homo sapien
ttatataaattacaaaccttaatacttctcaca

SEQ ID NO: 841929 - DNA, 33 bp, Homo sapien
tctagtggctacattaaaaaagaacaggcaaat

SEQ ID NO: 841930 - DNA, 33 bp, Homo sapien
tctagtggctacattagaaaagaacaggcaaat

SEQ ID NO: 841931 - DNA, 33 bp, Homo sapien
aatgaaaatatccttaataaagatgctagcact

SEQ ID NO: 841932 - DNA, 33 bp, Homo sapien
aatgaaaatatccttagtaaagatgctagcact

SEQ ID NO: 841933 - DNA, 33 bp, Homo sapien
caatttggctatatgaaaaatgtcactttattt

SEQ ID NO: 841934 - DNA, 33 bp, Homo sapien
caatttggctatatgagaaatgtcactttattt

SEQ ID NO: 841935 - DNA, 33 bp, Homo sapien
attggctatctgataggcatattcactaggtcc

SEQ ID NO: 841936 - DNA, 33 bp, Homo sapien
attggctatctgatagtcatattcactaggtcc

SEQ ID NO: 841937 - DNA, 33 bp, Homo sapien
atccaggaaacttgacaataggctctcctttta

SEQ ID NO: 841938 - DNA, 33 bp, Homo sapien
atccaggaaacttgaccataggctctcctttta

SEQ ID NO: 841939 - DNA, 33 bp, Homo sapien
gctctcatagactttacagtccagaagggctca

SEQ ID NO: 841940 - DNA, 33 bp, Homo sapien
gctctcatagactttatagtccagaagggctca

SEQ ID NO: 841941 - DNA, 33 bp, Homo sapien
aacaggaagagaaatacctgggaaaaaagaaga

SEQ ID NO: 841942 - DNA, 33 bp, Homo sapien
aacaggaagagaaatagctgggaaaaaagaaga

SEQ ID NO: 841943 - DNA, 33 bp, Homo sapien
cattgtacaccagttacgtatcaattcccatcg

SEQ ID NO: 841944 - DNA, 33 bp, Homo sapien
cattgtacaccagttatgtatcaattcccatcg

SEQ ID NO: 841945 - DNA, 33 bp, Homo sapien
gctaccaaatatgccacgagaaaaattgcaaca

SEQ ID NO: 841946 - DNA, 33 bp, Homo sapien
gctaccaaatatgccatgagaaaaattgcaaca

SEQ ID NO: 841947 - DNA, 33 bp, Homo sapien
cagcgtccggactctcaatcagatgccctagag

SEQ ID NO: 841948 - DNA, 33 bp, Homo sapien
cagcgtccggactctcgatcagatgccctagag

SEQ ID NO: 841949 - DNA, 33 bp, Homo sapien
tgtgactaatgcttcaatgaacatacaggggca

SEQ ID NO: 841950 - DNA, 33 bp, Homo sapien
tgtgactaatgcttcattgaacatacaggggca

SEQ ID NO: 841951 - DNA, 33 bp, Homo sapien
caagtctggcattcataagtttagcagagataa

SEQ ID NO: 841952 - DNA, 33 bp, Homo sapien
caagtctggcattcatcagtttagcagagataa

SEQ ID NO: 841953 - DNA, 33 bp, Homo sapien
gtttcaacaagtaccacgtgcctcctcatgtga

SEQ ID NO: 841954 - DNA, 33 bp, Homo sapien
gtttcaacaagtaccatgtgcctcctcatgtga

SEQ ID NO: 841955 - DNA, 33 bp, Homo sapien
cacagtccaaatgcacaattcaattttcctctc

SEQ ID NO: 841956 - DNA, 33 bp, Homo sapien
cacagtccaaatgcacgattcaattttcctctc

SEQ ID NO: 841957 - DNA, 33 bp, Homo sapien
taggcctagcccattgcagagtatcttgcatta

SEQ ID NO: 841958 - DNA, 33 bp, Homo sapien
taggcctagcccattgtagagtatcttgcatta

SEQ ID NO: 841959 - DNA, 33 bp, Homo sapien
cttacagtggtccataaaggccttgtcacactt

SEQ ID NO: 841960 - DNA, 33 bp, Homo sapien
cttacagtggtccatagaggccttgtcacactt

SEQ ID NO: 841961 - DNA, 33 bp, Homo sapien
caactaaggattgtccaattgtccaagcctcca

SEQ ID NO: 841962 - DNA, 33 bp, Homo sapien
caactaaggattgtccgattgtccaagcctcca

SEQ ID NO: 841963 - DNA, 33 bp, Homo sapien
ctaatggctatgttctcaccgatgctgctacag

SEQ ID NO: 841964 - DNA, 33 bp, Homo sapien
ctaatggctatgttctgaccgatgctgctacag

SEQ ID NO: 841965 - DNA, 33 bp, Homo sapien
ttgatcagttccataacgcacattttgattgct

SEQ ID NO: 841966 - DNA, 33 bp, Homo sapien
ttgatcagttccataatgcacattttgattgct

SEQ ID NO: 841967 - DNA, 33 bp, Homo sapien
aggcactgtcttaataccaatgatccaattaga

SEQ ID NO: 841968 - DNA, 33 bp, Homo sapien
aggcactgtcttaatagcaatgatccaattaga

SEQ ID NO: 841969 - DNA, 33 bp, Homo sapien
cctcttttacaactcaataatgcagaatcccat

SEQ ID NO: 841970 - DNA, 33 bp, Homo sapien
cctcttttacaactcagtaatgcagaatcccat

SEQ ID NO: 841971 - DNA, 33 bp, Homo sapien
ctgctcttgctacatacagaaaatggtcatgta

SEQ ID NO: 841972 - DNA, 33 bp, Homo sapien
ctgctcttgctacatatagaaaatggtcatgta

SEQ ID NO: 841973 - DNA, 33 bp, Homo sapien
acagcattacacccagacaacaggtaatatttt

SEQ ID NO: 841974 - DNA, 33 bp, Homo sapien
acagcattacacccagccaacaggtaatatttt

SEQ ID NO: 841975 - DNA, 33 bp, Homo sapien
cagacatcttggacaacgttgcagcactgtacc

SEQ ID NO: 841976 - DNA, 33 bp, Homo sapien
cagacatcttggacaatgttgcagcactgtacc

SEQ ID NO: 841977 - DNA, 33 bp, Homo sapien
aatcaattttaaccaacatccaggttacagagt

SEQ ID NO: 841978 - DNA, 33 bp, Homo sapien
aatcaattttaaccaatatccaggttacagagt

SEQ ID NO: 841979 - DNA, 33 bp, Homo sapien
gtttgaatagtcctaacggtcaggaagtctgaa

SEQ ID NO: 841980 - DNA, 33 bp, Homo sapien
gtttgaatagtcctaatggtcaggaagtctgaa

SEQ ID NO: 841981 - DNA, 33 bp, Homo sapien
aaacaggttgtaataaatccacgcaagggaaca

SEQ ID NO: 841982 - DNA, 33 bp, Homo sapien
aaacaggttgtaataagtccacgcaagggaaca

SEQ ID NO: 841983 - DNA, 33 bp, Homo sapien
gaacactactcagcaacatgaaaaaatgagcaa

SEQ ID NO: 841984 - DNA, 33 bp, Homo sapien
gaacactactcagcaatatgaaaaaatgagcaa

SEQ ID NO: 841985 - DNA, 33 bp, Homo sapien
cctctcgacatggtgccccgtctaattacagga

SEQ ID NO: 841986 - DNA, 33 bp, Homo sapien
cctctcgacatggtgcgccgtctaattacagga

SEQ ID NO: 841987 - DNA, 33 bp, Homo sapien
tctccagataaaaaaaagtagttctgagcttgg

SEQ ID NO: 841988 - DNA, 33 bp, Homo sapien
tctccagataaaaaaatgtagttctgagcttgg

SEQ ID NO: 841989 - DNA, 33 bp, Homo sapien
catgtgtcatgttgaagtatactgtatccagca

SEQ ID NO: 841990 - DNA, 33 bp, Homo sapien
catgtgtcatgttgaattatactgtatccagca

SEQ ID NO: 841991 - DNA, 33 bp, Homo sapien
agtatccagaggtttacagtaagaggaatttgg

SEQ ID NO: 841992 - DNA, 33 bp, Homo sapien
agtatccagaggtttatagtaagaggaatttgg

SEQ ID NO: 841993 - DNA, 33 bp, Homo sapien
tcatcgttgttcacagacctaagatttcgtctc

SEQ ID NO: 841994 - DNA, 33 bp, Homo sapien
tcatcgttgttcacagccctaagatttcgtctc

SEQ ID NO: 841995 - DNA, 33 bp, Homo sapien
attgatgtgtgaattacagactattgagaataa

SEQ ID NO: 841996 - DNA, 33 bp, Homo sapien
attgatgtgtgaattatagactattgagaataa

SEQ ID NO: 841997 - DNA, 33 bp, Homo sapien
tagttatgttacacaaacattgcaccaggtaac

SEQ ID NO: 841998 - DNA, 33 bp, Homo sapien
tagttatgttacacaagcattgcaccaggtaac

SEQ ID NO: 841999 - DNA, 33 bp, Homo sapien
gtgcctcgtagtttcaagtactcagtaagtgtc

SEQ ID NO: 842000 - DNA, 33 bp, Homo sapien
gtgcctcgtagtttcaggtactcagtaagtgtc

SEQ ID NO: 842001 - DNA, 33 bp, Homo sapien
tttagtggaaaaatagacaaatatttgcaatgc

SEQ ID NO: 842002 - DNA, 33 bp, Homo sapien
tttagtggaaaaatagccaaatatttgcaatgc

SEQ ID NO: 842003 - DNA, 33 bp, Homo sapien
atttcctatagttatcaatactgtgtacttcat

SEQ ID NO: 842004 - DNA, 33 bp, Homo sapien
atttcctatagttatcgatactgtgtacttcat

SEQ ID NO: 842005 - DNA, 33 bp, Homo sapien
tgctcgttggtttgaacagctctcaagcatcac

SEQ ID NO: 842006 - DNA, 33 bp, Homo sapien
tgctcgttggtttgaatagctctcaagcatcac

SEQ ID NO: 842007 - DNA, 33 bp, Homo sapien
gtcatgtagctatttacctgacgaagcttagtc

SEQ ID NO: 842008 - DNA, 33 bp, Homo sapien
gtcatgtagctatttatctgacgaagcttagtc

SEQ ID NO: 842009 - DNA, 33 bp, Homo sapien
gtaaggatgctaaaagacatctagttggcaaat

SEQ ID NO: 842010 - DNA, 33 bp, Homo sapien
gtaaggatgctaaaaggcatctagttggcaaat

SEQ ID NO: 842011 - DNA, 33 bp, Homo sapien
ggggcctaagagcttcaagaggagaaaaattca

SEQ ID NO: 842012 - DNA, 33 bp, Homo sapien
ggggcctaagagcttcgagaggagaaaaattca

SEQ ID NO: 842013 - DNA, 33 bp, Homo sapien
ctcattttctcaaacaactaaaatggggagaat

SEQ ID NO: 842014 - DNA, 33 bp, Homo sapien
ctcattttctcaaacatctaaaatggggagaat

SEQ ID NO: 842015 - DNA, 33 bp, Homo sapien
ggatctcttttccaagccatttctcaacattaa

SEQ ID NO: 842016 - DNA, 33 bp, Homo sapien
ggatctcttttccaagtcatttctcaacattaa

SEQ ID NO: 842017 - DNA, 33 bp, Homo sapien
aattatcctgcctttgaaaaaattatgtgtctc

SEQ ID NO: 842018 - DNA, 33 bp, Homo sapien
aattatcctgcctttggaaaaattatgtgtctc

SEQ ID NO: 842019 - DNA, 33 bp, Homo sapien
aataacatcagaactacccccagacacctttct

SEQ ID NO: 842020 - DNA, 33 bp, Homo sapien
aataacatcagaactatccccagacacctttct

SEQ ID NO: 842021 - DNA, 33 bp, Homo sapien
cccagctgtttagaaggctagtgtggaaggcca

SEQ ID NO: 842022 - DNA, 33 bp, Homo sapien
cccagctgtttagaagtctagtgtggaaggcca

SEQ ID NO: 842023 - DNA, 33 bp, Homo sapien
tcttgaatgtcatggaccttaaatctgaaatgt

SEQ ID NO: 842024 - DNA, 33 bp, Homo sapien
tcttgaatgtcatggagcttaaatctgaaatgt

SEQ ID NO: 842025 - DNA, 33 bp, Homo sapien
ttcaatgtggaaaaataaaccattgtagtttat

SEQ ID NO: 842026 - DNA, 33 bp, Homo sapien
ttcaatgtggaaaaatcaaccattgtagtttat

SEQ ID NO: 842027 - DNA, 33 bp, Homo sapien
tacctcactaaccccacatttgagtcaagtatg

SEQ ID NO: 842028 - DNA, 33 bp, Homo sapien
tacctcactaaccccatatttgagtcaagtatg

SEQ ID NO: 842029 - DNA, 33 bp, Homo sapien
tcaaagtaagacactacaactgtattatataca

SEQ ID NO: 842030 - DNA, 33 bp, Homo sapien
tcaaagtaagacactataactgtattatataca

SEQ ID NO: 842031 - DNA, 33 bp, Homo sapien
ataaaattagtttgaactggccctaaacaggta

SEQ ID NO: 842032 - DNA, 33 bp, Homo sapien
ataaaattagtttgaagtggccctaaacaggta

SEQ ID NO: 842033 - DNA, 33 bp, Homo sapien
tggggggataatggccacaatacctaacaccaa

SEQ ID NO: 842034 - DNA, 33 bp, Homo sapien
tggggggataatggccgcaatacctaacaccaa

SEQ ID NO: 842035 - DNA, 33 bp, Homo sapien
ttttcttcttacttcactgagttgatataaaaa

SEQ ID NO: 842036 - DNA, 33 bp, Homo sapien
ttttcttcttacttcattgagttgatataaaaa

SEQ ID NO: 842037 - DNA, 33 bp, Homo sapien
ttgatgtaatttttgccgaaatagtatacaatg

SEQ ID NO: 842038 - DNA, 33 bp, Homo sapien
ttgatgtaatttttgctgaaatagtatacaatg

SEQ ID NO: 842039 - DNA, 33 bp, Homo sapien
ccgactgatctatcaactcatgagctagatata

SEQ ID NO: 842040 - DNA, 33 bp, Homo sapien
ccgactgatctatcaattcatgagctagatata

SEQ ID NO: 842041 - DNA, 33 bp, Homo sapien
gttggtaggcctagagccaaggaagaatttttc

SEQ ID NO: 842042 - DNA, 33 bp, Homo sapien
gttggtaggcctagagtcaaggaagaatttttc

SEQ ID NO: 842043 - DNA, 33 bp, Homo sapien
gagttttcagttgaaagtgcatcctatctataa

SEQ ID NO: 842044 - DNA, 33 bp, Homo sapien
gagttttcagttgaaattgcatcctatctataa

SEQ ID NO: 842045 - DNA, 33 bp, Homo sapien
aacgctttctgcactaaggtaagattcagggat

SEQ ID NO: 842046 - DNA, 33 bp, Homo sapien
aacgctttctgcactacggtaagattcagggat

SEQ ID NO: 842047 - DNA, 33 bp, Homo sapien
ttatctggattttgaactaccaaataagttttt

SEQ ID NO: 842048 - DNA, 33 bp, Homo sapien
ttatctggattttgaattaccaaataagttttt

SEQ ID NO: 842049 - DNA, 33 bp, Homo sapien
atttctttatcttgtgcaggaagattccatagt

SEQ ID NO: 842050 - DNA, 33 bp, Homo sapien
atttctttatcttgtgtaggaagattccatagt

SEQ ID NO: 842051 - DNA, 33 bp, Homo sapien
cctcctcatattctcacgttcaggtccctccac

SEQ ID NO: 842052 - DNA, 33 bp, Homo sapien
cctcctcatattctcatgttcaggtccctccac

SEQ ID NO: 842053 - DNA, 33 bp, Homo sapien
tatcacagaggaagaaactagccctgtcgtatt

SEQ ID NO: 842054 - DNA, 33 bp, Homo sapien
tatcacagaggaagaatctagccctgtcgtatt

SEQ ID NO: 842055 - DNA, 33 bp, Homo sapien
taatatttaaatgaacagtacttagtcactatg

SEQ ID NO: 842056 - DNA, 33 bp, Homo sapien
taatatttaaatgaacggtacttagtcactatg

SEQ ID NO: 842057 - DNA, 33 bp, Homo sapien
tgatggaaatacacccaggaagtcatgttgctc

SEQ ID NO: 842058 - DNA, 33 bp, Homo sapien
tgatggaaatacacccgggaagtcatgttgctc

SEQ ID NO: 842059 - DNA, 33 bp, Homo sapien
gtgctggatttgttgccatctcaagcctctgaa

SEQ ID NO: 842060 - DNA, 33 bp, Homo sapien
gtgctggatttgttgctatctcaagcctctgaa

SEQ ID NO: 842061 - DNA, 33 bp, Homo sapien
cacccagatcttcaccggactggcttcctcttt

SEQ ID NO: 842062 - DNA, 33 bp, Homo sapien
cacccagatcttcacctgactggcttcctcttt

SEQ ID NO: 842063 - DNA, 33 bp, Homo sapien
tttggtacttaccagacggaagaaaaagaggga

SEQ ID NO: 842064 - DNA, 33 bp, Homo sapien
tttggtacttaccagatggaagaaaaagaggga

SEQ ID NO: 842065 - DNA, 33 bp, Homo sapien
atcttgtctaagccaacatttttatagaaaagg

SEQ ID NO: 842066 - DNA, 33 bp, Homo sapien
atcttgtctaagccaagatttttatagaaaagg

SEQ ID NO: 842067 - DNA, 33 bp, Homo sapien
ctgggacagacatttgaactgaaaaactaggag

SEQ ID NO: 842068 - DNA, 33 bp, Homo sapien
ctgggacagacatttgcactgaaaaactaggag

SEQ ID NO: 842069 - DNA, 33 bp, Homo sapien
taaagggtttttagccaagatgttttgagcctg

SEQ ID NO: 842070 - DNA, 33 bp, Homo sapien
taaagggtttttagccgagatgttttgagcctg

SEQ ID NO: 842071 - DNA, 33 bp, Homo sapien
aaatatatggtaaatacgtgatcaaaaattata

SEQ ID NO: 842072 - DNA, 33 bp, Homo sapien
aaatatatggtaaatatgtgatcaaaaattata

SEQ ID NO: 842073 - DNA, 33 bp, Homo sapien
tactggtttggaagtgaaagttctaaaattact

SEQ ID NO: 842074 - DNA, 33 bp, Homo sapien
tactggtttggaagtgcaagttctaaaattact

SEQ ID NO: 842075 - DNA, 33 bp, Homo sapien
ctgaattaatggctaaaaagatttgagtcataa

SEQ ID NO: 842076 - DNA, 33 bp, Homo sapien
ctgaattaatggctaagaagatttgagtcataa

SEQ ID NO: 842077 - DNA, 33 bp, Homo sapien
caaaaggttatgttaacgattgagcagaggaac

SEQ ID NO: 842078 - DNA, 33 bp, Homo sapien
caaaaggttatgttaatgattgagcagaggaac

SEQ ID NO: 842079 - DNA, 33 bp, Homo sapien
agaaagagccatagaaaaatggagatgtgaatt

SEQ ID NO: 842080 - DNA, 33 bp, Homo sapien
agaaagagccatagaagaatggagatgtgaatt

SEQ ID NO: 842081 - DNA, 33 bp, Homo sapien
attgaccaactagccaacatcagtaataacagc

SEQ ID NO: 842082 - DNA, 33 bp, Homo sapien
attgaccaactagccatcatcagtaataacagc

SEQ ID NO: 842083 - DNA, 33 bp, Homo sapien
aattatgtggctttcactcagctcttgtaattc

SEQ ID NO: 842084 - DNA, 33 bp, Homo sapien
aattatgtggctttcattcagctcttgtaattc

SEQ ID NO: 842085 - DNA, 33 bp, Homo sapien
gtcctttcatttcacaaacaatattgtgcctga

SEQ ID NO: 842086 - DNA, 33 bp, Homo sapien
gtcctttcatttcacagacaatattgtgcctga

SEQ ID NO: 842087 - DNA, 33 bp, Homo sapien
acctgaattttcacatcaagggctaaaaaaacc

SEQ ID NO: 842088 - DNA, 33 bp, Homo sapien
acctgaattttcacatgaagggctaaaaaaacc

SEQ ID NO: 842089 - DNA, 33 bp, Homo sapien
cccagctgatgatggaagtgaagtgaaatgaat

SEQ ID NO: 842090 - DNA, 33 bp, Homo sapien
cccagctgatgatggaggtgaagtgaaatgaat

SEQ ID NO: 842091 - DNA, 33 bp, Homo sapien
atggatagatagatgaagtagacaaataaagag

SEQ ID NO: 842092 - DNA, 33 bp, Homo sapien
atggatagatagatgaggtagacaaataaagag

SEQ ID NO: 842093 - DNA, 33 bp, Homo sapien
gaggaaagcacaagacaaaaagactatgcttat

SEQ ID NO: 842094 - DNA, 33 bp, Homo sapien
gaggaaagcacaagaccaaaagactatgcttat

SEQ ID NO: 842095 - DNA, 33 bp, Homo sapien
ctatgttgtgctacaccctttctgtctttacaa

SEQ ID NO: 842096 - DNA, 33 bp, Homo sapien
ctatgttgtgctacacgctttctgtctttacaa

SEQ ID NO: 842097 - DNA, 33 bp, Homo sapien
ctaaagaaagcacttacagcctgtgaccacatg

SEQ ID NO: 842098 - DNA, 33 bp, Homo sapien
ctaaagaaagcacttatagcctgtgaccacatg

SEQ ID NO: 842099 - DNA, 33 bp, Homo sapien
aacatatccgattgcactacccatttacgtttt

SEQ ID NO: 842100 - DNA, 33 bp, Homo sapien
aacatatccgattgcattacccatttacgtttt

SEQ ID NO: 842101 - DNA, 33 bp, Homo sapien
aaatccgtcaatatcaaacaacatataccatat

SEQ ID NO: 842102 - DNA, 33 bp, Homo sapien
aaatccgtcaatatcagacaacatataccatat

SEQ ID NO: 842103 - DNA, 33 bp, Homo sapien
atacagcaaagttttacggtaatcagttatcaa

SEQ ID NO: 842104 - DNA, 33 bp, Homo sapien
atacagcaaagttttatggtaatcagttatcaa

SEQ ID NO: 842105 - DNA, 33 bp, Homo sapien
tatcatttgcaggaggaaacaatccatggactt

SEQ ID NO: 842106 - DNA, 33 bp, Homo sapien
tatcatttgcaggagggaacaatccatggactt

SEQ ID NO: 842107 - DNA, 33 bp, Homo sapien
tctgtattagaagcaaacctatgtatgaagcaa

SEQ ID NO: 842108 - DNA, 33 bp, Homo sapien
tctgtattagaagcaagcctatgtatgaagcaa

SEQ ID NO: 842109 - DNA, 33 bp, Homo sapien
agggttaagaactctaaattagacagcaatatg

SEQ ID NO: 842110 - DNA, 33 bp, Homo sapien
agggttaagaactctagattagacagcaatatg

SEQ ID NO: 842111 - DNA, 33 bp, Homo sapien
aacttggcatcatggccagagaaatgttgactc

SEQ ID NO: 842112 - DNA, 33 bp, Homo sapien
aacttggcatcatggctagagaaatgttgactc

SEQ ID NO: 842113 - DNA, 33 bp, Homo sapien
tgtgtctctccccatccactggtcccaaggagg

SEQ ID NO: 842114 - DNA, 33 bp, Homo sapien
tgtgtctctccccatctactggtcccaaggagg

SEQ ID NO: 842115 - DNA, 33 bp, Homo sapien
taggtctccaggatagaaatgagttgtgatgaa

SEQ ID NO: 842116 - DNA, 33 bp, Homo sapien
taggtctccaggataggaatgagttgtgatgaa

SEQ ID NO: 842117 - DNA, 33 bp, Homo sapien
ataaatcattatactgacacagaacgttagtta

SEQ ID NO: 842118 - DNA, 33 bp, Homo sapien
ataaatcattatactgccacagaacgttagtta

SEQ ID NO: 842119 - DNA, 33 bp, Homo sapien
atgcacaccctatagaatatataagaatgtcag

SEQ ID NO: 842120 - DNA, 33 bp, Homo sapien
atgcacaccctatagagtatataagaatgtcag

SEQ ID NO: 842121 - DNA, 33 bp, Homo sapien
agaagttatcgaaatgcacagatatctctttcc

SEQ ID NO: 842122 - DNA, 33 bp, Homo sapien
agaagttatcgaaatgtacagatatctctttcc

SEQ ID NO: 842123 - DNA, 33 bp, Homo sapien
atttaaaagtgagaaaagcttttggtattatgc

SEQ ID NO: 842124 - DNA, 33 bp, Homo sapien
atttaaaagtgagaaacgcttttggtattatgc

SEQ ID NO: 842125 - DNA, 33 bp, Homo sapien
tgtcactagttgtccaaacatattaataatata

SEQ ID NO: 842126 - DNA, 33 bp, Homo sapien
tgtcactagttgtccatacatattaataatata

SEQ ID NO: 842127 - DNA, 33 bp, Homo sapien
taggaagcacacaaaggctatgaagcaaactgt

SEQ ID NO: 842128 - DNA, 33 bp, Homo sapien
taggaagcacacaaagtctatgaagcaaactgt

SEQ ID NO: 842129 - DNA, 33 bp, Homo sapien
ataaaattgattttgaaaagagatataacagaa

SEQ ID NO: 842130 - DNA, 33 bp, Homo sapien
ataaaattgattttgataagagatataacagaa

SEQ ID NO: 842131 - DNA, 33 bp, Homo sapien
ttcagagcttgggtaactgaactactgaataat

SEQ ID NO: 842132 - DNA, 33 bp, Homo sapien
ttcagagcttgggtaattgaactactgaataat

SEQ ID NO: 842133 - DNA, 33 bp, Homo sapien
tcctcaggcagagaacagaacattttaatgaaa

SEQ ID NO: 842134 - DNA, 33 bp, Homo sapien
tcctcaggcagagaacggaacattttaatgaaa

SEQ ID NO: 842135 - DNA, 33 bp, Homo sapien
aagagtcagataatcaacaacagtttataataa

SEQ ID NO: 842136 - DNA, 33 bp, Homo sapien
aagagtcagataatcaccaacagtttataataa

SEQ ID NO: 842137 - DNA, 33 bp, Homo sapien
tgactgcaatgacttacgacctttttataactc

SEQ ID NO: 842138 - DNA, 33 bp, Homo sapien
tgactgcaatgacttatgacctttttataactc

SEQ ID NO: 842139 - DNA, 33 bp, Homo sapien
ctgttttgtatatcacagtccattcatgtatgc

SEQ ID NO: 842140 - DNA, 33 bp, Homo sapien
ctgttttgtatatcactgtccattcatgtatgc

SEQ ID NO: 842141 - DNA, 33 bp, Homo sapien
aggacattagcatccccggatctcacccactaa

SEQ ID NO: 842142 - DNA, 33 bp, Homo sapien
aggacattagcatccctggatctcacccactaa

SEQ ID NO: 842143 - DNA, 33 bp, Homo sapien
cattgtgaagtatctacagctgccagtactaaa

SEQ ID NO: 842144 - DNA, 33 bp, Homo sapien
cattgtgaagtatctatagctgccagtactaaa

SEQ ID NO: 842145 - DNA, 33 bp, Homo sapien
tttcaacattatgaacaaaggttaaccgtgaca

SEQ ID NO: 842146 - DNA, 33 bp, Homo sapien
tttcaacattatgaacgaaggttaaccgtgaca

SEQ ID NO: 842147 - DNA, 33 bp, Homo sapien
gttttgtgggtcttgaaacgagttggtgactaa

SEQ ID NO: 842148 - DNA, 33 bp, Homo sapien
gttttgtgggtcttgacacgagttggtgactaa

SEQ ID NO: 842149 - DNA, 33 bp, Homo sapien
gccctcaactgtaggacagcgtgggtggatgaa

SEQ ID NO: 842150 - DNA, 33 bp, Homo sapien
gccctcaactgtaggagagcgtgggtggatgaa

SEQ ID NO: 842151 - DNA, 33 bp, Homo sapien
taggctgcaaacattaggaatcattggaaacaa

SEQ ID NO: 842152 - DNA, 33 bp, Homo sapien
taggctgcaaacattatgaatcattggaaacaa

SEQ ID NO: 842153 - DNA, 33 bp, Homo sapien
agcatctagaaataccaatttttccaacctctc

SEQ ID NO: 842154 - DNA, 33 bp, Homo sapien
agcatctagaaatacccatttttccaacctctc

SEQ ID NO: 842155 - DNA, 33 bp, Homo sapien
aatgtactatttcagcacatagcacacaatcaa

SEQ ID NO: 842156 - DNA, 33 bp, Homo sapien
aatgtactatttcagcgcatagcacacaatcaa

SEQ ID NO: 842157 - DNA, 33 bp, Homo sapien
acaaggaaagcaattaaaactttcaattctatc

SEQ ID NO: 842158 - DNA, 33 bp, Homo sapien
acaaggaaagcaattagaactttcaattctatc

SEQ ID NO: 842159 - DNA, 33 bp, Homo sapien
aactcgataagatcgagtccaagttacagagcc

SEQ ID NO: 842160 - DNA, 33 bp, Homo sapien
aactcgataagatcgattccaagttacagagcc

SEQ ID NO: 842161 - DNA, 33 bp, Homo sapien
aagccttcatctcacacacatatgcgtacataa

SEQ ID NO: 842162 - DNA, 33 bp, Homo sapien
aagccttcatctcacatacatatgcgtacataa

SEQ ID NO: 842163 - DNA, 33 bp, Homo sapien
gattagttcatggagacagaggccttgtgaatg

SEQ ID NO: 842164 - DNA, 33 bp, Homo sapien
gattagttcatggagagagaggccttgtgaatg

SEQ ID NO: 842165 - DNA, 33 bp, Homo sapien
tctcatttgtagataaatagaaaacactccagc

SEQ ID NO: 842166 - DNA, 33 bp, Homo sapien
tctcatttgtagataagtagaaaacactccagc

SEQ ID NO: 842167 - DNA, 33 bp, Homo sapien
tcactatgctagttcacgtcttttccccatatg

SEQ ID NO: 842168 - DNA, 33 bp, Homo sapien
tcactatgctagttcaggtcttttccccatatg

SEQ ID NO: 842169 - DNA, 33 bp, Homo sapien
aaatgacttacttcaaagtagattagagcatgg

SEQ ID NO: 842170 - DNA, 33 bp, Homo sapien
aaatgacttacttcaaggtagattagagcatgg

SEQ ID NO: 842171 - DNA, 33 bp, Homo sapien
gacctcaatgctagagaaaaatgggcacaagac

SEQ ID NO: 842172 - DNA, 33 bp, Homo sapien
gacctcaatgctagaggaaaatgggcacaagac

SEQ ID NO: 842173 - DNA, 33 bp, Homo sapien
tatgaattaaacctcacggcattgcggaataca

SEQ ID NO: 842174 - DNA, 33 bp, Homo sapien
tatgaattaaacctcatggcattgcggaataca

SEQ ID NO: 842175 - DNA, 33 bp, Homo sapien
gaatagataatacctccaccctctgatttctta

SEQ ID NO: 842176 - DNA, 33 bp, Homo sapien
gaatagataatacctcgaccctctgatttctta

SEQ ID NO: 842177 - DNA, 33 bp, Homo sapien
gtatggaatacaaacaaaagaatttcagtctat

SEQ ID NO: 842178 - DNA, 33 bp, Homo sapien
gtatggaatacaaacagaagaatttcagtctat

SEQ ID NO: 842179 - DNA, 33 bp, Homo sapien
caaatttaggttcataacaggttagtggaagct

SEQ ID NO: 842180 - DNA, 33 bp, Homo sapien
caaatttaggttcatatcaggttagtggaagct

SEQ ID NO: 842181 - DNA, 33 bp, Homo sapien
gaaacaatcatcttcaaccctctagaatgtcca

SEQ ID NO: 842182 - DNA, 33 bp, Homo sapien
gaaacaatcatcttcacccctctagaatgtcca

SEQ ID NO: 842183 - DNA, 33 bp, Homo sapien
agagactcctaagaaaagtatccagctgtgccc

SEQ ID NO: 842184 - DNA, 33 bp, Homo sapien
agagactcctaagaaatgtatccagctgtgccc

SEQ ID NO: 842185 - DNA, 33 bp, Homo sapien
ttatacaaggtggccacgaatagccccacaagt

SEQ ID NO: 842186 - DNA, 33 bp, Homo sapien
ttatacaaggtggccatgaatagccccacaagt

SEQ ID NO: 842187 - DNA, 33 bp, Homo sapien
attttcacaaacatataaagtccctaagaatcc

SEQ ID NO: 842188 - DNA, 33 bp, Homo sapien
attttcacaaacatatgaagtccctaagaatcc

SEQ ID NO: 842189 - DNA, 33 bp, Homo sapien
gttacataaagggaaacgccttggagagtcacc

SEQ ID NO: 842190 - DNA, 33 bp, Homo sapien
gttacataaagggaaatgccttggagagtcacc

SEQ ID NO: 842191 - DNA, 33 bp, Homo sapien
tatatatgcacggcaccatgcaggttgcaaagg

SEQ ID NO: 842192 - DNA, 33 bp, Homo sapien
tatatatgcacggcacgatgcaggttgcaaagg

SEQ ID NO: 842193 - DNA, 33 bp, Homo sapien
cctctttccaggcttccccctctttcagatttg

SEQ ID NO: 842194 - DNA, 33 bp, Homo sapien
cctctttccaggcttcgccctctttcagatttg

SEQ ID NO: 842195 - DNA, 33 bp, Homo sapien
gaggcaagggatgttccctgtcagctttagaga

SEQ ID NO: 842196 - DNA, 33 bp, Homo sapien
gaggcaagggatgttctctgtcagctttagaga

SEQ ID NO: 842197 - DNA, 33 bp, Homo sapien
catcccttgcctcagacaagatcatcctaatta

SEQ ID NO: 842198 - DNA, 33 bp, Homo sapien
catcccttgcctcagataagatcatcctaatta

SEQ ID NO: 842199 - DNA, 33 bp, Homo sapien
cgtttgaaccagagacaagtacttagggtcagg

SEQ ID NO: 842200 - DNA, 33 bp, Homo sapien
cgtttgaaccagagactagtacttagggtcagg

SEQ ID NO: 842201 - DNA, 33 bp, Homo sapien
caatttctacatttgagccccaggcctttcccc

SEQ ID NO: 842202 - DNA, 33 bp, Homo sapien
caatttctacatttgatccccaggcctttcccc

SEQ ID NO: 842203 - DNA, 33 bp, Homo sapien
ttaacacaaatgcttccgaaagcctaaatatat

SEQ ID NO: 842204 - DNA, 33 bp, Homo sapien
ttaacacaaatgcttctgaaagcctaaatatat

SEQ ID NO: 842205 - DNA, 33 bp, Homo sapien
cttgactttgaaagtaccttccacttctgaaag

SEQ ID NO: 842206 - DNA, 33 bp, Homo sapien
cttgactttgaaagtatcttccacttctgaaag

SEQ ID NO: 842207 - DNA, 33 bp, Homo sapien
atctgccactcatcaacttcgtttccagtcagt

SEQ ID NO: 842208 - DNA, 33 bp, Homo sapien
atctgccactcatcaatttcgtttccagtcagt

SEQ ID NO: 842209 - DNA, 33 bp, Homo sapien
cattaacaataagcaaaggaagcaccctgcaag

SEQ ID NO: 842210 - DNA, 33 bp, Homo sapien
cattaacaataagcaagggaagcaccctgcaag

SEQ ID NO: 842211 - DNA, 33 bp, Homo sapien
tcacccgcagtaattacatttattcatttccat

SEQ ID NO: 842212 - DNA, 33 bp, Homo sapien
tcacccgcagtaattatatttattcatttccat

SEQ ID NO: 842213 - DNA, 33 bp, Homo sapien
gagatataaaacacagaatggtgacaaggagga

SEQ ID NO: 842214 - DNA, 33 bp, Homo sapien
gagatataaaacacaggatggtgacaaggagga

SEQ ID NO: 842215 - DNA, 33 bp, Homo sapien
atacatccgcagctcaacttaaggagtaaaagt

SEQ ID NO: 842216 - DNA, 33 bp, Homo sapien
atacatccgcagctcagcttaaggagtaaaagt

SEQ ID NO: 842217 - DNA, 33 bp, Homo sapien
atggatgtatcttagactcaatttgaaatttca

SEQ ID NO: 842218 - DNA, 33 bp, Homo sapien
atggatgtatcttagattcaatttgaaatttca

SEQ ID NO: 842219 - DNA, 33 bp, Homo sapien
tatactaataaagtggaaataccaataaagcat

SEQ ID NO: 842220 - DNA, 33 bp, Homo sapien
tatactaataaagtggcaataccaataaagcat

SEQ ID NO: 842221 - DNA, 33 bp, Homo sapien
aatatccacagtaaaacctattcaagttcattg

SEQ ID NO: 842222 - DNA, 33 bp, Homo sapien
aatatccacagtaaaatctattcaagttcattg

SEQ ID NO: 842223 - DNA, 33 bp, Homo sapien
ctatgccaaggtcagacacttgattaggaagag

SEQ ID NO: 842224 - DNA, 33 bp, Homo sapien
ctatgccaaggtcagatacttgattaggaagag

SEQ ID NO: 842225 - DNA, 33 bp, Homo sapien
tcatcagcaaattctcgaacattttgtaattgc

SEQ ID NO: 842226 - DNA, 33 bp, Homo sapien
tcatcagcaaattctctaacattttgtaattgc

SEQ ID NO: 842227 - DNA, 33 bp, Homo sapien
atgaatgagtcaattcaacaaatattctttctt

SEQ ID NO: 842228 - DNA, 33 bp, Homo sapien
atgaatgagtcaattcgacaaatattctttctt

SEQ ID NO: 842229 - DNA, 33 bp, Homo sapien
atatctaatagatcaaactaccttcctctttag

SEQ ID NO: 842230 - DNA, 33 bp, Homo sapien
atatctaatagatcaatctaccttcctctttag

SEQ ID NO: 842231 - DNA, 33 bp, Homo sapien
atctcccaatcactccacactaagtcaggtaga

SEQ ID NO: 842232 - DNA, 33 bp, Homo sapien
atctcccaatcactccgcactaagtcaggtaga

SEQ ID NO: 842233 - DNA, 33 bp, Homo sapien
ctgcttcctctgcactgaactaggggaaatagc

SEQ ID NO: 842234 - DNA, 33 bp, Homo sapien
ctgcttcctctgcacttaactaggggaaatagc

SEQ ID NO: 842235 - DNA, 33 bp, Homo sapien
tcactatacaaaacaccatcattccacaccctt

SEQ ID NO: 842236 - DNA, 33 bp, Homo sapien
tcactatacaaaacactatcattccacaccctt

SEQ ID NO: 842237 - DNA, 33 bp, Homo sapien
aaaattctgctttcaaataataatttcataaaa

SEQ ID NO: 842238 - DNA, 33 bp, Homo sapien
aaaattctgctttcaagtaataatttcataaaa

SEQ ID NO: 842239 - DNA, 33 bp, Homo sapien
tactcatcaccttgtacaattgcaaaggcagca

SEQ ID NO: 842240 - DNA, 33 bp, Homo sapien
tactcatcaccttgtataattgcaaaggcagca

SEQ ID NO: 842241 - DNA, 33 bp, Homo sapien
ttctatttcgcccttcacaaagagttagctgcc

SEQ ID NO: 842242 - DNA, 33 bp, Homo sapien
ttctatttcgcccttcgcaaagagttagctgcc

SEQ ID NO: 842243 - DNA, 33 bp, Homo sapien
gaactgagcatgactactagattcagattataa

SEQ ID NO: 842244 - DNA, 33 bp, Homo sapien
gaactgagcatgactagtagattcagattataa

SEQ ID NO: 842245 - DNA, 33 bp, Homo sapien
tatctcttcagccaggaatagactgaagatata

SEQ ID NO: 842246 - DNA, 33 bp, Homo sapien
tatctcttcagccagggatagactgaagatata

SEQ ID NO: 842247 - DNA, 33 bp, Homo sapien
ataagctcaatcaggcacagagatgggggaata

SEQ ID NO: 842248 - DNA, 33 bp, Homo sapien
ataagctcaatcaggcgcagagatgggggaata

SEQ ID NO: 842249 - DNA, 33 bp, Homo sapien
ctggagagtctatgggcagattctgacaaaata

SEQ ID NO: 842250 - DNA, 33 bp, Homo sapien
ctggagagtctatggggagattctgacaaaata

SEQ ID NO: 842251 - DNA, 33 bp, Homo sapien
aaagagggtagacaaacataaggagaaaaacta

SEQ ID NO: 842252 - DNA, 33 bp, Homo sapien
aaagagggtagacaaagataaggagaaaaacta

SEQ ID NO: 842253 - DNA, 33 bp, Homo sapien
cttcagtaatttgggaagaaactccttcatccc

SEQ ID NO: 842254 - DNA, 33 bp, Homo sapien
cttcagtaatttgggaggaaactccttcatccc

SEQ ID NO: 842255 - DNA, 33 bp, Homo sapien
catttagtacaaacacactcggaaaatataaat

SEQ ID NO: 842256 - DNA, 33 bp, Homo sapien
catttagtacaaacacgctcggaaaatataaat

SEQ ID NO: 842257 - DNA, 33 bp, Homo sapien
gtgccccagaatgtgaagttgaaggcaaagatg

SEQ ID NO: 842258 - DNA, 33 bp, Homo sapien
gtgccccagaatgtgacgttgaaggcaaagatg

SEQ ID NO: 842259 - DNA, 33 bp, Homo sapien
agcctttatgacagaccggcttctgggtggaat

SEQ ID NO: 842260 - DNA, 33 bp, Homo sapien
agcctttatgacagactggcttctgggtggaat

SEQ ID NO: 842261 - DNA, 33 bp, Homo sapien
cctactaagcccaaatcaaatgcatgtccaact

SEQ ID NO: 842262 - DNA, 33 bp, Homo sapien
cctactaagcccaaattaaatgcatgtccaact

SEQ ID NO: 842263 - DNA, 33 bp, Homo sapien
aaactaaaccttccccaagtgacagaagcagga

SEQ ID NO: 842264 - DNA, 33 bp, Homo sapien
aaactaaaccttccccgagtgacagaagcagga

SEQ ID NO: 842265 - DNA, 33 bp, Homo sapien
aagttgctgaaggaaacgaaattagcattttct

SEQ ID NO: 842266 - DNA, 33 bp, Homo sapien
aagttgctgaaggaaaggaaattagcattttct

SEQ ID NO: 842267 - DNA, 33 bp, Homo sapien
cagactcattgcagagcagaaaatcaaatcctt

SEQ ID NO: 842268 - DNA, 33 bp, Homo sapien
cagactcattgcagagtagaaaatcaaatcctt

SEQ ID NO: 842269 - DNA, 33 bp, Homo sapien
ctgataagtttgttgacattaagtatgctgggg

SEQ ID NO: 842270 - DNA, 33 bp, Homo sapien
ctgataagtttgttgatattaagtatgctgggg

SEQ ID NO: 842271 - DNA, 33 bp, Homo sapien
attgataatcttgatacaagcagtttcagagaa

SEQ ID NO: 842272 - DNA, 33 bp, Homo sapien
attgataatcttgatataagcagtttcagagaa

SEQ ID NO: 842273 - DNA, 33 bp, Homo sapien
atctatttttttgttcccagatcttctcagatc

SEQ ID NO: 842274 - DNA, 33 bp, Homo sapien
atctatttttttgttctcagatcttctcagatc

SEQ ID NO: 842275 - DNA, 33 bp, Homo sapien
ccacaagtataaaggacactagctttggtagag

SEQ ID NO: 842276 - DNA, 33 bp, Homo sapien
ccacaagtataaaggagactagctttggtagag

SEQ ID NO: 842277 - DNA, 33 bp, Homo sapien
gaaagcttatataaacaaaagtttgcacattaa

SEQ ID NO: 842278 - DNA, 33 bp, Homo sapien
gaaagcttatataaacgaaagtttgcacattaa

SEQ ID NO: 842279 - DNA, 33 bp, Homo sapien
tgttcagtcctgtttaaaaaagatccagaggcc

SEQ ID NO: 842280 - DNA, 33 bp, Homo sapien
tgttcagtcctgtttagaaaagatccagaggcc

SEQ ID NO: 842281 - DNA, 33 bp, Homo sapien
gaaatagttgcatttcaaatgagacctgaatgg

SEQ ID NO: 842282 - DNA, 33 bp, Homo sapien
gaaatagttgcatttccaatgagacctgaatgg

SEQ ID NO: 842283 - DNA, 33 bp, Homo sapien
ttatgaagtacttggcaattcttcaaaccctaa

SEQ ID NO: 842284 - DNA, 33 bp, Homo sapien
ttatgaagtacttggcgattcttcaaaccctaa

SEQ ID NO: 842285 - DNA, 33 bp, Homo sapien
tctaatagaagatgaactgcaccagtcgtgtca

SEQ ID NO: 842286 - DNA, 33 bp, Homo sapien
tctaatagaagatgaattgcaccagtcgtgtca

SEQ ID NO: 842287 - DNA, 33 bp, Homo sapien
tccttaaagcagtctgaaatatggaaatcattt

SEQ ID NO: 842288 - DNA, 33 bp, Homo sapien
tccttaaagcagtctggaatatggaaatcattt

SEQ ID NO: 842289 - DNA, 33 bp, Homo sapien
acctagactcatgctacgtggccttatctctat

SEQ ID NO: 842290 - DNA, 33 bp, Homo sapien
acctagactcatgctatgtggccttatctctat

SEQ ID NO: 842291 - DNA, 33 bp, Homo sapien
attaactccagagcaaaaaaaggaaatccactg

SEQ ID NO: 842292 - DNA, 33 bp, Homo sapien
attaactccagagcaagaaaaggaaatccactg

SEQ ID NO: 842293 - DNA, 33 bp, Homo sapien
attttcaagccagaaaactgactccattagcta

SEQ ID NO: 842294 - DNA, 33 bp, Homo sapien
attttcaagccagaaagctgactccattagcta

SEQ ID NO: 842295 - DNA, 33 bp, Homo sapien
acatactgagggacaccaaaatatgataaatca

SEQ ID NO: 842296 - DNA, 33 bp, Homo sapien
acatactgagggacactaaaatatgataaatca

SEQ ID NO: 842297 - DNA, 33 bp, Homo sapien
ggcagtaaagaacagaatcattgcttcctcaaa

SEQ ID NO: 842298 - DNA, 33 bp, Homo sapien
ggcagtaaagaacagagtcattgcttcctcaaa

SEQ ID NO: 842299 - DNA, 33 bp, Homo sapien
gcttttgataatatggaaccttcatatagagat

SEQ ID NO: 842300 - DNA, 33 bp, Homo sapien
gcttttgataatatgggaccttcatatagagat

SEQ ID NO: 842301 - DNA, 33 bp, Homo sapien
atgtgcttgatacagcccagttttattttttca

SEQ ID NO: 842302 - DNA, 33 bp, Homo sapien
atgtgcttgatacagctcagttttattttttca

SEQ ID NO: 842303 - DNA, 33 bp, Homo sapien
ataaatgctttggttgaaaatctctttaaatta

SEQ ID NO: 842304 - DNA, 33 bp, Homo sapien
ataaatgctttggttggaaatctctttaaatta

SEQ ID NO: 842305 - DNA, 33 bp, Homo sapien
gaagatgctcaggatacgcagctcatccttggt

SEQ ID NO: 842306 - DNA, 33 bp, Homo sapien
gaagatgctcaggatatgcagctcatccttggt

SEQ ID NO: 842307 - DNA, 33 bp, Homo sapien
tctaaggcccaacttcaccatttaacagctgtg

SEQ ID NO: 842308 - DNA, 33 bp, Homo sapien
tctaaggcccaacttcgccatttaacagctgtg

SEQ ID NO: 842309 - DNA, 33 bp, Homo sapien
tttaagcttatcttaactgttttatcagactaa

SEQ ID NO: 842310 - DNA, 33 bp, Homo sapien
tttaagcttatcttaagtgttttatcagactaa

SEQ ID NO: 842311 - DNA, 33 bp, Homo sapien
tagttggcaggactaacggcatgacctggctgg

SEQ ID NO: 842312 - DNA, 33 bp, Homo sapien
tagttggcaggactaatggcatgacctggctgg

SEQ ID NO: 842313 - DNA, 33 bp, Homo sapien
aaatatttccaagtgcaaatataaccacaatta

SEQ ID NO: 842314 - DNA, 33 bp, Homo sapien
aaatatttccaagtgcgaatataaccacaatta

SEQ ID NO: 842315 - DNA, 33 bp, Homo sapien
cctgaaatgttatggggagactatatacttaga

SEQ ID NO: 842316 - DNA, 33 bp, Homo sapien
cctgaaatgttatgggtagactatatacttaga

SEQ ID NO: 842317 - DNA, 33 bp, Homo sapien
tattagaaccaccataccttgggacaatatgga

SEQ ID NO: 842318 - DNA, 33 bp, Homo sapien
tattagaaccaccatatcttgggacaatatgga

SEQ ID NO: 842319 - DNA, 33 bp, Homo sapien
gcattttgtccatgaacgtggtatgttaagcaa

SEQ ID NO: 842320 - DNA, 33 bp, Homo sapien
gcattttgtccatgaatgtggtatgttaagcaa

SEQ ID NO: 842321 - DNA, 33 bp, Homo sapien
ccctgaaactagagccaaaagtgaagagacagg

SEQ ID NO: 842322 - DNA, 33 bp, Homo sapien
ccctgaaactagagccgaaagtgaagagacagg

SEQ ID NO: 842323 - DNA, 33 bp, Homo sapien
tgacattggcctctgaaggaagactatttggat

SEQ ID NO: 842324 - DNA, 33 bp, Homo sapien
tgacattggcctctgagggaagactatttggat

SEQ ID NO: 842325 - DNA, 33 bp, Homo sapien
ggtaagacagtttctactacaaccctgctattg

SEQ ID NO: 842326 - DNA, 33 bp, Homo sapien
ggtaagacagtttctattacaaccctgctattg

SEQ ID NO: 842327 - DNA, 33 bp, Homo sapien
gtgattcactcctgaaaggtgctgtttaggcaa

SEQ ID NO: 842328 - DNA, 33 bp, Homo sapien
gtgattcactcctgaacggtgctgtttaggcaa

SEQ ID NO: 842329 - DNA, 33 bp, Homo sapien
tatggagctctttcccacttctgacttttcatc

SEQ ID NO: 842330 - DNA, 33 bp, Homo sapien
tatggagctctttcccgcttctgacttttcatc

SEQ ID NO: 842331 - DNA, 33 bp, Homo sapien
caaaagactgaaaagcaagaaatgcaaatcaaa

SEQ ID NO: 842332 - DNA, 33 bp, Homo sapien
caaaagactgaaaagcgagaaatgcaaatcaaa

SEQ ID NO: 842333 - DNA, 33 bp, Homo sapien
ttcaacttttcatttagattcagatggtacatg

SEQ ID NO: 842334 - DNA, 33 bp, Homo sapien
ttcaacttttcatttatattcagatggtacatg

SEQ ID NO: 842335 - DNA, 33 bp, Homo sapien
cagagcactctgaaaaatatgagttggctgtgt

SEQ ID NO: 842336 - DNA, 33 bp, Homo sapien
cagagcactctgaaaagtatgagttggctgtgt

SEQ ID NO: 842337 - DNA, 33 bp, Homo sapien
ggataaagtgtcaagaacaaccctgagcaattg

SEQ ID NO: 842338 - DNA, 33 bp, Homo sapien
ggataaagtgtcaagagcaaccctgagcaattg

SEQ ID NO: 842339 - DNA, 33 bp, Homo sapien
agataactgtacatcaacccagtgcagatttca

SEQ ID NO: 842340 - DNA, 33 bp, Homo sapien
agataactgtacatcatcccagtgcagatttca

SEQ ID NO: 842341 - DNA, 33 bp, Homo sapien
ttcaagtggacaattacacatataggtctgatc

SEQ ID NO: 842342 - DNA, 33 bp, Homo sapien
ttcaagtggacaattagacatataggtctgatc

SEQ ID NO: 842343 - DNA, 33 bp, Homo sapien
gaaatgcaaattaaaaaagaatctctcacacac

SEQ ID NO: 842344 - DNA, 33 bp, Homo sapien
gaaatgcaaattaaaagagaatctctcacacac

SEQ ID NO: 842345 - DNA, 33 bp, Homo sapien
agacccatggatataaaagaatgtacttagtaa

SEQ ID NO: 842346 - DNA, 33 bp, Homo sapien
agacccatggatataagagaatgtacttagtaa

SEQ ID NO: 842347 - DNA, 33 bp, Homo sapien
taggtggaatgctgtaaaaatacaggaagacac

SEQ ID NO: 842348 - DNA, 33 bp, Homo sapien
taggtggaatgctgtacaaatacaggaagacac

SEQ ID NO: 842349 - DNA, 33 bp, Homo sapien
tctaagcagacatttaaaacaagatttttgaag

SEQ ID NO: 842350 - DNA, 33 bp, Homo sapien
tctaagcagacatttagaacaagatttttgaag

SEQ ID NO: 842351 - DNA, 33 bp, Homo sapien
agtttgacctttttatcaacagaactgctctca

SEQ ID NO: 842352 - DNA, 33 bp, Homo sapien
agtttgacctttttattaacagaactgctctca

SEQ ID NO: 842353 - DNA, 33 bp, Homo sapien
ggagaattaaatcaaaggaggattcggggacac

SEQ ID NO: 842354 - DNA, 33 bp, Homo sapien
ggagaattaaatcaaatgaggattcggggacac

SEQ ID NO: 842355 - DNA, 33 bp, Homo sapien
tctacttatctactcactcttcttggatggaat

SEQ ID NO: 842356 - DNA, 33 bp, Homo sapien
tctacttatctactcattcttcttggatggaat

SEQ ID NO: 842357 - DNA, 33 bp, Homo sapien
gaaacccaattttcaaaatcagcaggctttaat

SEQ ID NO: 842358 - DNA, 33 bp, Homo sapien
gaaacccaattttcaatatcagcaggctttaat

SEQ ID NO: 842359 - DNA, 33 bp, Homo sapien
aacaaaaaatgtggccaaggccattagctgctt

SEQ ID NO: 842360 - DNA, 33 bp, Homo sapien
aacaaaaaatgtggccgaggccattagctgctt

SEQ ID NO: 842361 - DNA, 33 bp, Homo sapien
cagaagtgtcatgtgagaaataaaagaagaatc

SEQ ID NO: 842362 - DNA, 33 bp, Homo sapien
cagaagtgtcatgtgataaataaaagaagaatc

SEQ ID NO: 842363 - DNA, 33 bp, Homo sapien
tcttaatacctggacaacaaaactcccagaatg

SEQ ID NO: 842364 - DNA, 33 bp, Homo sapien
tcttaatacctggacaccaaaactcccagaatg

SEQ ID NO: 842365 - DNA, 33 bp, Homo sapien
caattcatatttgaaggctaaaagcaacaattt

SEQ ID NO: 842366 - DNA, 33 bp, Homo sapien
caattcatatttgaagtctaaaagcaacaattt

SEQ ID NO: 842367 - DNA, 33 bp, Homo sapien
atgatatctcttcctgaaacttaaattagcatt

SEQ ID NO: 842368 - DNA, 33 bp, Homo sapien
atgatatctcttcctgcaacttaaattagcatt

SEQ ID NO: 842369 - DNA, 33 bp, Homo sapien
tgtaaagatttgaccacaagttgcagttcaaca

SEQ ID NO: 842370 - DNA, 33 bp, Homo sapien
tgtaaagatttgaccagaagttgcagttcaaca

SEQ ID NO: 842371 - DNA, 33 bp, Homo sapien
ttctctgatttcctgcaaagcttctttacttac

SEQ ID NO: 842372 - DNA, 33 bp, Homo sapien
ttctctgatttcctgccaagcttctttacttac

SEQ ID NO: 842373 - DNA, 33 bp, Homo sapien
atttatgttgtaaaataagcaaatcatggacat

SEQ ID NO: 842374 - DNA, 33 bp, Homo sapien
atttatgttgtaaaattagcaaatcatggacat

SEQ ID NO: 842375 - DNA, 33 bp, Homo sapien
ttaagggcagttctaacagagaaggtgctcact

SEQ ID NO: 842376 - DNA, 33 bp, Homo sapien
ttaagggcagttctaatagagaaggtgctcact

SEQ ID NO: 842377 - DNA, 33 bp, Homo sapien
tgagccgaggcaaaaaatgggaagtcaagtgga

SEQ ID NO: 842378 - DNA, 33 bp, Homo sapien
tgagccgaggcaaaaattgggaagtcaagtgga

SEQ ID NO: 842379 - DNA, 33 bp, Homo sapien
cctgatatcagaaacacgaggaacacttagtta

SEQ ID NO: 842380 - DNA, 33 bp, Homo sapien
cctgatatcagaaacatgaggaacacttagtta

SEQ ID NO: 842381 - DNA, 33 bp, Homo sapien
ttaatgagtagctctacgtaaaacagtaaaatt

SEQ ID NO: 842382 - DNA, 33 bp, Homo sapien
ttaatgagtagctctatgtaaaacagtaaaatt

SEQ ID NO: 842383 - DNA, 33 bp, Homo sapien
ttaagttagaaagatgcatgaaataagcaacag

SEQ ID NO: 842384 - DNA, 33 bp, Homo sapien
ttaagttagaaagatgtatgaaataagcaacag

SEQ ID NO: 842385 - DNA, 33 bp, Homo sapien
cgtaaaacagacacagcccacccctagtgctca

SEQ ID NO: 842386 - DNA, 33 bp, Homo sapien
cgtaaaacagacacagtccacccctagtgctca

SEQ ID NO: 842387 - DNA, 33 bp, Homo sapien
ttccgtcttaattcagcctctctctgcattggt

SEQ ID NO: 842388 - DNA, 33 bp, Homo sapien
ttccgtcttaattcagtctctctctgcattggt

SEQ ID NO: 842389 - DNA, 33 bp, Homo sapien
agacatatgaattgacacgtctcaggtcaaaca

SEQ ID NO: 842390 - DNA, 33 bp, Homo sapien
agacatatgaattgactcgtctcaggtcaaaca

SEQ ID NO: 842391 - DNA, 33 bp, Homo sapien
tcctgctcctcatgccaccaaactgggtgagat

SEQ ID NO: 842392 - DNA, 33 bp, Homo sapien
tcctgctcctcatgccgccaaactgggtgagat

SEQ ID NO: 842393 - DNA, 33 bp, Homo sapien
aggagtattcgctctaaggtgattttaaaagga

SEQ ID NO: 842394 - DNA, 33 bp, Homo sapien
aggagtattcgctctagggtgattttaaaagga

SEQ ID NO: 842395 - DNA, 33 bp, Homo sapien
agcaattaagtccagtcaaggtgaccaggggaa

SEQ ID NO: 842396 - DNA, 33 bp, Homo sapien
agcaattaagtccagttaaggtgaccaggggaa

SEQ ID NO: 842397 - DNA, 33 bp, Homo sapien
ggtatatttctttgcacaagttactttaccgct

SEQ ID NO: 842398 - DNA, 33 bp, Homo sapien
ggtatatttctttgcataagttactttaccgct

SEQ ID NO: 842399 - DNA, 33 bp, Homo sapien
tatctcaatgagtctacgacaagtgaagaagtt

SEQ ID NO: 842400 - DNA, 33 bp, Homo sapien
tatctcaatgagtctatgacaagtgaagaagtt

SEQ ID NO: 842401 - DNA, 33 bp, Homo sapien
gatagagaggatgtaaactcaacccttataatt

SEQ ID NO: 842402 - DNA, 33 bp, Homo sapien
gatagagaggatgtaagctcaacccttataatt

SEQ ID NO: 842403 - DNA, 33 bp, Homo sapien
catttataaggacagacggacaatttagaaagc

SEQ ID NO: 842404 - DNA, 33 bp, Homo sapien
catttataaggacagatggacaatttagaaagc

SEQ ID NO: 842405 - DNA, 33 bp, Homo sapien
aggtagagcagagtgccgagagataatgctgga

SEQ ID NO: 842406 - DNA, 33 bp, Homo sapien
aggtagagcagagtgctgagagataatgctgga

SEQ ID NO: 842407 - DNA, 33 bp, Homo sapien
gatctcaaagagcaaacgctcaaacaagtttca

SEQ ID NO: 842408 - DNA, 33 bp, Homo sapien
gatctcaaagagcaaatgctcaaacaagtttca

SEQ ID NO: 842409 - DNA, 33 bp, Homo sapien
cccttctataagcctcaacagccagaataacag

SEQ ID NO: 842410 - DNA, 33 bp, Homo sapien
cccttctataagcctcgacagccagaataacag

SEQ ID NO: 842411 - DNA, 33 bp, Homo sapien
ttgtggtttgaatcaccaatttagataattgtt

SEQ ID NO: 842412 - DNA, 33 bp, Homo sapien
ttgtggtttgaatcactaatttagataattgtt

SEQ ID NO: 842413 - DNA, 33 bp, Homo sapien
gatgataaataaggccaatattcaagtcagtat

SEQ ID NO: 842414 - DNA, 33 bp, Homo sapien
gatgataaataaggcccatattcaagtcagtat

SEQ ID NO: 842415 - DNA, 33 bp, Homo sapien
ggtattttttaaagtaacatcatctgctcaaat

SEQ ID NO: 842416 - DNA, 33 bp, Homo sapien
ggtattttttaaagtagcatcatctgctcaaat

SEQ ID NO: 842417 - DNA, 33 bp, Homo sapien
gagaaattgagaaaggcatcctaacagtattac

SEQ ID NO: 842418 - DNA, 33 bp, Homo sapien
gagaaattgagaaaggtatcctaacagtattac

SEQ ID NO: 842419 - DNA, 33 bp, Homo sapien
ttaccttagaaacaacagaaagccactgaagag

SEQ ID NO: 842420 - DNA, 33 bp, Homo sapien
ttaccttagaaacaacggaaagccactgaagag

SEQ ID NO: 842421 - DNA, 33 bp, Homo sapien
ttagagatctgttgaacgtcatagctgatctgt

SEQ ID NO: 842422 - DNA, 33 bp, Homo sapien
ttagagatctgttgaaggtcatagctgatctgt

SEQ ID NO: 842423 - DNA, 33 bp, Homo sapien
aaacatttgaaaaccacggctgacgtgggaata

SEQ ID NO: 842424 - DNA, 33 bp, Homo sapien
aaacatttgaaaaccatggctgacgtgggaata

SEQ ID NO: 842425 - DNA, 33 bp, Homo sapien
ttacagtttaactttggaacgcccttgcctaag

SEQ ID NO: 842426 - DNA, 33 bp, Homo sapien
ttacagtttaactttgtaacgcccttgcctaag

SEQ ID NO: 842427 - DNA, 33 bp, Homo sapien
gatctttaccctgagccaggagagtgctaacta

SEQ ID NO: 842428 - DNA, 33 bp, Homo sapien
gatctttaccctgagctaggagagtgctaacta

SEQ ID NO: 842429 - DNA, 33 bp, Homo sapien
gtctctgcactaagacagaggtaaacaattaaa

SEQ ID NO: 842430 - DNA, 33 bp, Homo sapien
gtctctgcactaagacggaggtaaacaattaaa

SEQ ID NO: 842431 - DNA, 33 bp, Homo sapien
gctgaggaaagctgaaaagaagttagggaagaa

SEQ ID NO: 842432 - DNA, 33 bp, Homo sapien
gctgaggaaagctgaagagaagttagggaagaa

SEQ ID NO: 842433 - DNA, 33 bp, Homo sapien
tagaatgacacaccccacataggtatccagttt

SEQ ID NO: 842434 - DNA, 33 bp, Homo sapien
tagaatgacacaccccgcataggtatccagttt

SEQ ID NO: 842435 - DNA, 33 bp, Homo sapien
cacactcaccatcttcacttcctccattattgc

SEQ ID NO: 842436 - DNA, 33 bp, Homo sapien
cacactcaccatcttcgcttcctccattattgc

SEQ ID NO: 842437 - DNA, 33 bp, Homo sapien
tgcaaggatggtttcacagcaataatggaggaa

SEQ ID NO: 842438 - DNA, 33 bp, Homo sapien
tgcaaggatggtttcatagcaataatggaggaa

SEQ ID NO: 842439 - DNA, 33 bp, Homo sapien
ccaaaatctgtagatacattgtctaaaatgacc

SEQ ID NO: 842440 - DNA, 33 bp, Homo sapien
ccaaaatctgtagatatattgtctaaaatgacc

SEQ ID NO: 842441 - DNA, 33 bp, Homo sapien
caagattcttgagagcagatcaaagaattaggt

SEQ ID NO: 842442 - DNA, 33 bp, Homo sapien
caagattcttgagagcggatcaaagaattaggt

SEQ ID NO: 842443 - DNA, 33 bp, Homo sapien
accaccccatcagtgaaccccgtcggctggatc

SEQ ID NO: 842444 - DNA, 33 bp, Homo sapien
accaccccatcagtgatccccgtcggctggatc

SEQ ID NO: 842445 - DNA, 33 bp, Homo sapien
attaacaggaaagccaaaagttctgagagaggg

SEQ ID NO: 842446 - DNA, 33 bp, Homo sapien
attaacaggaaagccagaagttctgagagaggg

SEQ ID NO: 842447 - DNA, 33 bp, Homo sapien
ctttttacgtgtcctcaaaggcagaaaactcag

SEQ ID NO: 842448 - DNA, 33 bp, Homo sapien
ctttttacgtgtcctcgaaggcagaaaactcag

SEQ ID NO: 842449 - DNA, 33 bp, Homo sapien
tccccaaagaccctcacgaaacaagacttcaag

SEQ ID NO: 842450 - DNA, 33 bp, Homo sapien
tccccaaagaccctcatgaaacaagacttcaag

SEQ ID NO: 842451 - DNA, 33 bp, Homo sapien
tggtagcacctgatgtcaaaacggcctcatctc

SEQ ID NO: 842452 - DNA, 33 bp, Homo sapien
tggtagcacctgatgtgaaaacggcctcatctc

SEQ ID NO: 842453 - DNA, 33 bp, Homo sapien
atgaggaagaagaggacgtatgcctgggactta

SEQ ID NO: 842454 - DNA, 33 bp, Homo sapien
atgaggaagaagaggatgtatgcctgggactta

SEQ ID NO: 842455 - DNA, 33 bp, Homo sapien
ataaatgttaaatggacgaccattgattgcaac

SEQ ID NO: 842456 - DNA, 33 bp, Homo sapien
ataaatgttaaatggatgaccattgattgcaac

SEQ ID NO: 842457 - DNA, 33 bp, Homo sapien
gatgccattacatgacaggcagtgcttccacga

SEQ ID NO: 842458 - DNA, 33 bp, Homo sapien
gatgccattacatgacgggcagtgcttccacga

SEQ ID NO: 842459 - DNA, 33 bp, Homo sapien
tactggaaggcttccaaatcactcagccgtcct

SEQ ID NO: 842460 - DNA, 33 bp, Homo sapien
tactggaaggcttccacatcactcagccgtcct

SEQ ID NO: 842461 - DNA, 33 bp, Homo sapien
tcgtttcagccctaaagtggaaagagatgaagt

SEQ ID NO: 842462 - DNA, 33 bp, Homo sapien
tcgtttcagccctaaattggaaagagatgaagt

SEQ ID NO: 842463 - DNA, 33 bp, Homo sapien
cagactaaggagattcaatatatgtgccagtta

SEQ ID NO: 842464 - DNA, 33 bp, Homo sapien
cagactaaggagattcgatatatgtgccagtta

SEQ ID NO: 842465 - DNA, 33 bp, Homo sapien
gtcattatctgtaacccggaatgtgaaacatca

SEQ ID NO: 842466 - DNA, 33 bp, Homo sapien
gtcattatctgtaacctggaatgtgaaacatca

SEQ ID NO: 842467 - DNA, 33 bp, Homo sapien
agctggaacagtgggaacgcccgcatcgggtat

SEQ ID NO: 842468 - DNA, 33 bp, Homo sapien
agctggaacagtgggagcgcccgcatcgggtat

SEQ ID NO: 842469 - DNA, 33 bp, Homo sapien
agcaaattcaccagcaagattcaatgactttta

SEQ ID NO: 842470 - DNA, 33 bp, Homo sapien
agcaaattcaccagcatgattcaatgactttta

SEQ ID NO: 842471 - DNA, 33 bp, Homo sapien
aattagatgaagaggaaaaagaggttgcttgaa

SEQ ID NO: 842472 - DNA, 33 bp, Homo sapien
aattagatgaagaggagaaagaggttgcttgaa

SEQ ID NO: 842473 - DNA, 33 bp, Homo sapien
tgaatttgatgtgcagaaccattagtgttggtt

SEQ ID NO: 842474 - DNA, 33 bp, Homo sapien
tgaatttgatgtgcaggaccattagtgttggtt

SEQ ID NO: 842475 - DNA, 33 bp, Homo sapien
attcccaaaaggctacgacacttcgtggatttt

SEQ ID NO: 842476 - DNA, 33 bp, Homo sapien
attcccaaaaggctactacacttcgtggatttt

SEQ ID NO: 842477 - DNA, 33 bp, Homo sapien
tagtctaaactttcaaatgagaatggcaagata

SEQ ID NO: 842478 - DNA, 33 bp, Homo sapien
tagtctaaactttcaattgagaatggcaagata

SEQ ID NO: 842479 - DNA, 33 bp, Homo sapien
agaagtgataatgatacgttacttatttggtag

SEQ ID NO: 842480 - DNA, 33 bp, Homo sapien
agaagtgataatgatatgttacttatttggtag

SEQ ID NO: 842481 - DNA, 33 bp, Homo sapien
ttgtatgaccttttggaaagcttcagtgtagtt

SEQ ID NO: 842482 - DNA, 33 bp, Homo sapien
ttgtatgaccttttggcaagcttcagtgtagtt

SEQ ID NO: 842483 - DNA, 33 bp, Homo sapien
aactaaacctgacatgaatacaagcaatttaat

SEQ ID NO: 842484 - DNA, 33 bp, Homo sapien
aactaaacctgacatggatacaagcaatttaat

SEQ ID NO: 842485 - DNA, 33 bp, Homo sapien
ttttagcaaatgcccacaggaaagtctcatgaa

SEQ ID NO: 842486 - DNA, 33 bp, Homo sapien
ttttagcaaatgcccagaggaaagtctcatgaa

SEQ ID NO: 842487 - DNA, 33 bp, Homo sapien
tatgaatcaaaaaccacgaattcccaaagctag

SEQ ID NO: 842488 - DNA, 33 bp, Homo sapien
tatgaatcaaaaaccatgaattcccaaagctag

SEQ ID NO: 842489 - DNA, 33 bp, Homo sapien
tttgtctacgtctggcaatacctgaccagaaga

SEQ ID NO: 842490 - DNA, 33 bp, Homo sapien
tttgtctacgtctggcgatacctgaccagaaga

SEQ ID NO: 842491 - DNA, 33 bp, Homo sapien
agcatcatttgaaccaaatttgtgtgcctggca

SEQ ID NO: 842492 - DNA, 33 bp, Homo sapien
agcatcatttgaaccacatttgtgtgcctggca

SEQ ID NO: 842493 - DNA, 33 bp, Homo sapien
ctctacttgtcgtagcaaggaactacctgtatt

SEQ ID NO: 842494 - DNA, 33 bp, Homo sapien
ctctacttgtcgtagcgaggaactacctgtatt

SEQ ID NO: 842495 - DNA, 33 bp, Homo sapien
aaagggccaagaaaaaataactgagaagatgca

SEQ ID NO: 842496 - DNA, 33 bp, Homo sapien
aaagggccaagaaaaagtaactgagaagatgca

SEQ ID NO: 842497 - DNA, 33 bp, Homo sapien
aatagtggtcagattacgttttgtatagcccct

SEQ ID NO: 842498 - DNA, 33 bp, Homo sapien
aatagtggtcagattatgttttgtatagcccct

SEQ ID NO: 842499 - DNA, 33 bp, Homo sapien
cttagcaggctgtccccgatgtgagtagagcca

SEQ ID NO: 842500 - DNA, 33 bp, Homo sapien
cttagcaggctgtccctgatgtgagtagagcca

SEQ ID NO: 842501 - DNA, 33 bp, Homo sapien
tctgcacattcctgccactatgtctttgctcaa

SEQ ID NO: 842502 - DNA, 33 bp, Homo sapien
tctgcacattcctgcctctatgtctttgctcaa

SEQ ID NO: 842503 - DNA, 33 bp, Homo sapien
tcagatcaagtcagaagaatctgcatagaaact

SEQ ID NO: 842504 - DNA, 33 bp, Homo sapien
tcagatcaagtcagaataatctgcatagaaact

SEQ ID NO: 842505 - DNA, 33 bp, Homo sapien
tctatgaaccaaactgaatcataatctctttca

SEQ ID NO: 842506 - DNA, 33 bp, Homo sapien
tctatgaaccaaactggatcataatctctttca

SEQ ID NO: 842507 - DNA, 33 bp, Homo sapien
gttagttgagttaatcactattttagcatctca

SEQ ID NO: 842508 - DNA, 33 bp, Homo sapien
gttagttgagttaatcgctattttagcatctca

SEQ ID NO: 842509 - DNA, 33 bp, Homo sapien
cgtatattttccaaaaaactagttgcatgttgg

SEQ ID NO: 842510 - DNA, 33 bp, Homo sapien
cgtatattttccaaaacactagttgcatgttgg

SEQ ID NO: 842511 - DNA, 33 bp, Homo sapien
aagatgatgagctggcaaaatcaaatgctacaa

SEQ ID NO: 842512 - DNA, 33 bp, Homo sapien
aagatgatgagctggccaaatcaaatgctacaa

SEQ ID NO: 842513 - DNA, 33 bp, Homo sapien
catgtactatttctaacgaccaggaatgtgcca

SEQ ID NO: 842514 - DNA, 33 bp, Homo sapien
catgtactatttctaatgaccaggaatgtgcca

SEQ ID NO: 842515 - DNA, 33 bp, Homo sapien
ctaaaaactgaattccagaaaggactaatctcc

SEQ ID NO: 842516 - DNA, 33 bp, Homo sapien
ctaaaaactgaattccggaaaggactaatctcc

SEQ ID NO: 842517 - DNA, 33 bp, Homo sapien
gatggacagcaaggacaagggtctagaaaccag

SEQ ID NO: 842518 - DNA, 33 bp, Homo sapien
gatggacagcaaggacgagggtctagaaaccag

SEQ ID NO: 842519 - DNA, 33 bp, Homo sapien
agaaggaactattctcaaggacctgagtccaag

SEQ ID NO: 842520 - DNA, 33 bp, Homo sapien
agaaggaactattctcgaggacctgagtccaag

SEQ ID NO: 842521 - DNA, 33 bp, Homo sapien
caaggaatctgtgaggaaaagaaagatcaaatg

SEQ ID NO: 842522 - DNA, 33 bp, Homo sapien
caaggaatctgtgagggaaagaaagatcaaatg

SEQ ID NO: 842523 - DNA, 33 bp, Homo sapien
tgaagtcaaacattcaaattggaagaaagagct

SEQ ID NO: 842524 - DNA, 33 bp, Homo sapien
tgaagtcaaacattcacattggaagaaagagct

SEQ ID NO: 842525 - DNA, 33 bp, Homo sapien
ttgcttgacaccagaaaatctaggctgtaatgg

SEQ ID NO: 842526 - DNA, 33 bp, Homo sapien
ttgcttgacaccagaagatctaggctgtaatgg

SEQ ID NO: 842527 - DNA, 33 bp, Homo sapien
gtttctttattggttaactatttggaagagaga

SEQ ID NO: 842528 - DNA, 33 bp, Homo sapien
gtttctttattggttagctatttggaagagaga

SEQ ID NO: 842529 - DNA, 33 bp, Homo sapien
ttaaaggatgtttgagaaatacccctgaagcca

SEQ ID NO: 842530 - DNA, 33 bp, Homo sapien
ttaaaggatgtttgagcaatacccctgaagcca

SEQ ID NO: 842531 - DNA, 33 bp, Homo sapien
ctcagattcacaaaaccattccatggcttcagg

SEQ ID NO: 842532 - DNA, 33 bp, Homo sapien
ctcagattcacaaaactattccatggcttcagg

SEQ ID NO: 842533 - DNA, 33 bp, Homo sapien
tttagcctaccttaaccgaaaatgcaggttctt

SEQ ID NO: 842534 - DNA, 33 bp, Homo sapien
tttagcctaccttaactgaaaatgcaggttctt

SEQ ID NO: 842535 - DNA, 33 bp, Homo sapien
gaataaatgggtaaacagcagaagtagacaatt

SEQ ID NO: 842536 - DNA, 33 bp, Homo sapien
gaataaatgggtaaacggcagaagtagacaatt

SEQ ID NO: 842537 - DNA, 33 bp, Homo sapien
taggtttggggccaataagagtagtggattacc

SEQ ID NO: 842538 - DNA, 33 bp, Homo sapien
taggtttggggccaatgagagtagtggattacc

SEQ ID NO: 842539 - DNA, 33 bp, Homo sapien
acggggatcaaaagcacagaaaggtgtccactt

SEQ ID NO: 842540 - DNA, 33 bp, Homo sapien
acggggatcaaaagcagagaaaggtgtccactt

SEQ ID NO: 842541 - DNA, 33 bp, Homo sapien
aattttctcatatgtacaatgggcctatttaat

SEQ ID NO: 842542 - DNA, 33 bp, Homo sapien
aattttctcatatgtataatgggcctatttaat

SEQ ID NO: 842543 - DNA, 33 bp, Homo sapien
aggcagcagcattgccaacgtgctctgagttag

SEQ ID NO: 842544 - DNA, 33 bp, Homo sapien
aggcagcagcattgccgacgtgctctgagttag

SEQ ID NO: 842545 - DNA, 33 bp, Homo sapien
taacacatggcccttccatatgcatttcttact

SEQ ID NO: 842546 - DNA, 33 bp, Homo sapien
taacacatggcccttcgatatgcatttcttact

SEQ ID NO: 842547 - DNA, 33 bp, Homo sapien
cacctcttactgcacacggtggatgacaggggt

SEQ ID NO: 842548 - DNA, 33 bp, Homo sapien
cacctcttactgcacatggtggatgacaggggt

SEQ ID NO: 842549 - DNA, 33 bp, Homo sapien
aggggttaggaaatcccgcatcatattattggc

SEQ ID NO: 842550 - DNA, 33 bp, Homo sapien
aggggttaggaaatcctgcatcatattattggc

SEQ ID NO: 842551 - DNA, 33 bp, Homo sapien
catatggtccgtgacaagggtgttggcaatttg

SEQ ID NO: 842552 - DNA, 33 bp, Homo sapien
catatggtccgtgacaggggtgttggcaatttg

SEQ ID NO: 842553 - DNA, 33 bp, Homo sapien
gggagagagtcaaaggccccagagtacatggga

SEQ ID NO: 842554 - DNA, 33 bp, Homo sapien
gggagagagtcaaaggtcccagagtacatggga

SEQ ID NO: 842555 - DNA, 33 bp, Homo sapien
gttccagctagcggaacgtatttcatgacaaat

SEQ ID NO: 842556 - DNA, 33 bp, Homo sapien
gttccagctagcggaatgtatttcatgacaaat

SEQ ID NO: 842557 - DNA, 33 bp, Homo sapien
caaggacaacaaactccactgacaaccaacaga

SEQ ID NO: 842558 - DNA, 33 bp, Homo sapien
caaggacaacaaactctactgacaaccaacaga

SEQ ID NO: 842559 - DNA, 33 bp, Homo sapien
ggggctggagagcagacggttttggggtgaaac

SEQ ID NO: 842560 - DNA, 33 bp, Homo sapien
ggggctggagagcagatggttttggggtgaaac

SEQ ID NO: 842561 - DNA, 33 bp, Homo sapien
aaaacctgaggtgaaacgttggtggaatattgc

SEQ ID NO: 842562 - DNA, 33 bp, Homo sapien
aaaacctgaggtgaaatgttggtggaatattgc

SEQ ID NO: 842563 - DNA, 33 bp, Homo sapien
ctgtcatcccatccacaagattcactcatagat

SEQ ID NO: 842564 - DNA, 33 bp, Homo sapien
ctgtcatcccatccacgagattcactcatagat

SEQ ID NO: 842565 - DNA, 33 bp, Homo sapien
gccagaatccaagacacatcactaaggcgccag

SEQ ID NO: 842566 - DNA, 33 bp, Homo sapien
gccagaatccaagacatatcactaaggcgccag

SEQ ID NO: 842567 - DNA, 33 bp, Homo sapien
gactgggagttcttgaagcagttcccctgcatc

SEQ ID NO: 842568 - DNA, 33 bp, Homo sapien
gactgggagttcttgatgcagttcccctgcatc

SEQ ID NO: 842569 - DNA, 33 bp, Homo sapien
gccaatgggacatttgaagagactaccaagagg

SEQ ID NO: 842570 - DNA, 33 bp, Homo sapien
gccaatgggacatttggagagactaccaagagg

SEQ ID NO: 842571 - DNA, 33 bp, Homo sapien
gtaatctgaggacaaaaacgtaacttcagtaaa

SEQ ID NO: 842572 - DNA, 33 bp, Homo sapien
gtaatctgaggacaaatacgtaacttcagtaaa

SEQ ID NO: 842573 - DNA, 33 bp, Homo sapien
acctatattaggttaccagaaattgctttgaat

SEQ ID NO: 842574 - DNA, 33 bp, Homo sapien
acctatattaggttactagaaattgctttgaat

SEQ ID NO: 842575 - DNA, 33 bp, Homo sapien; identical to SEQ ID NO: 842573

SEQ ID NO: 842576 - DNA, 33 bp, Homo sapien; identical to SEQ ID NO: 842574

SEQ ID NO: 842577 - DNA, 33 bp, Homo sapien
cccaagttaggagaaaagagagtaataaagagt

SEQ ID NO: 842578 - DNA, 33 bp, Homo sapien
cccaagttaggagaaaggagagtaataaagagt

SEQ ID NO: 842579 - DNA, 33 bp, Homo sapien
attgcttcttctatagcacaagaaggggagaca

SEQ ID NO: 842580 - DNA, 33 bp, Homo sapien
attgcttcttctataggacaagaaggggagaca

SEQ ID NO: 842581 - DNA, 33 bp, Homo sapien
tcttcaacatcaacccagacactgaaacaccta

SEQ ID NO: 842582 - DNA, 33 bp, Homo sapien
tcttcaacatcaacccggacactgaaacaccta

SEQ ID NO: 842583 - DNA, 33 bp, Homo sapien
gagaatctatgaaggaaatttgtgagaagctag

SEQ ID NO: 842584 - DNA, 33 bp, Homo sapien
gagaatctatgaaggagatttgtgagaagctag

SEQ ID NO: 842585 - DNA, 33 bp, Homo sapien
aagacttaatcctttaaatcgaaaacattcctg

SEQ ID NO: 842586 - DNA, 33 bp, Homo sapien
aagacttaatcctttatatcgaaaacattcctg

SEQ ID NO: 842587 - DNA, 33 bp, Homo sapien
tgacacaacagagtcacacagtaagtggatttt

SEQ ID NO: 842588 - DNA, 33 bp, Homo sapien
tgacacaacagagtcatacagtaagtggatttt

SEQ ID NO: 842589 - DNA, 33 bp, Homo sapien
gtacattggcatggtaagggaaaaaagaaataa

SEQ ID NO: 842590 - DNA, 33 bp, Homo sapien
gtacattggcatggtaggggaaaaaagaaataa

SEQ ID NO: 842591 - DNA, 33 bp, Homo sapien
aggcctatctattccacgcttcaaagctgagac

SEQ ID NO: 842592 - DNA, 33 bp, Homo sapien
aggcctatctattccatgcttcaaagctgagac

SEQ ID NO: 842593 - DNA, 33 bp, Homo sapien
ttcagtttgacctgcacggtctgggccagggaa

SEQ ID NO: 842594 - DNA, 33 bp, Homo sapien
ttcagtttgacctgcatggtctgggccagggaa

SEQ ID NO: 842595 - DNA, 33 bp, Homo sapien
ctgctgatccgataaccaacatgagatttagta

SEQ ID NO: 842596 - DNA, 33 bp, Homo sapien
ctgctgatccgataacgaacatgagatttagta

SEQ ID NO: 842597 - DNA, 33 bp, Homo sapien
gttgtgagcccgatgaagaggcggtattgctaa

SEQ ID NO: 842598 - DNA, 33 bp, Homo sapien
gttgtgagcccgatgaggaggcggtattgctaa

SEQ ID NO: 842599 - DNA, 33 bp, Homo sapien
gggtatcatttttggaccttagatacctgggct

SEQ ID NO: 842600 - DNA, 33 bp, Homo sapien
gggtatcatttttggatcttagatacctgggct

SEQ ID NO: 842601 - DNA, 33 bp, Homo sapien
aactcagtgaatttgaagaactgaaagaagcga

SEQ ID NO: 842602 - DNA, 33 bp, Homo sapien
aactcagtgaatttgaggaactgaaagaagcga

SEQ ID NO: 842603 - DNA, 33 bp, Homo sapien
aattgtgcctttgctcaaccaggatgtttagtt

SEQ ID NO: 842604 - DNA, 33 bp, Homo sapien
aattgtgcctttgctccaccaggatgtttagtt

SEQ ID NO: 842605 - DNA, 33 bp, Homo sapien
cctcccctcacccttcactttctccaaggctcc

SEQ ID NO: 842606 - DNA, 33 bp, Homo sapien
cctcccctcacccttcgctttctccaaggctcc

SEQ ID NO: 842607 - DNA, 33 bp, Homo sapien
caaagacaagctggaacgtgagttatatgtgct

SEQ ID NO: 842608 - DNA, 33 bp, Homo sapien
caaagacaagctggaatgtgagttatatgtgct

SEQ ID NO: 842609 - DNA, 33 bp, Homo sapien
ttggtactgtgaggatgagccatgaattaaaac

SEQ ID NO: 842610 - DNA, 33 bp, Homo sapien
ttggtactgtgaggattagccatgaattaaaac

SEQ ID NO: 842611 - DNA, 33 bp, Homo sapien
gcctgagtcactatatgaacctcataacttctt

SEQ ID NO: 842612 - DNA, 33 bp, Homo sapien
gcctgagtcactatattaacctcataacttctt

SEQ ID NO: 842613 - DNA, 33 bp, Homo sapien
aggcaaagaatcggaaagaagaagagctatttg

SEQ ID NO: 842614 - DNA, 33 bp, Homo sapien
aggcaaagaatcggaaggaagaagagctatttg

SEQ ID NO: 842615 - DNA, 33 bp, Homo sapien
tcttctgaataaagtacggatgcaccctacaaa

SEQ ID NO: 842616 - DNA, 33 bp, Homo sapien
tcttctgaataaagtatggatgcaccctacaaa

SEQ ID NO: 842617 - DNA, 33 bp, Homo sapien
agattgccattttcaccgtcccatcctatttaa

SEQ ID NO: 842618 - DNA, 33 bp, Homo sapien
agattgccattttcactgtcccatcctatttaa

SEQ ID NO: 842619 - DNA, 33 bp, Homo sapien
agttaggctaatgagcaaaggcacagaccctcc

SEQ ID NO: 842620 - DNA, 33 bp, Homo sapien
agttaggctaatgagcgaaggcacagaccctcc

SEQ ID NO: 842621 - DNA, 33 bp, Homo sapien
taggtgacaaactgaaatgagctatagggagtt

SEQ ID NO: 842622 - DNA, 33 bp, Homo sapien
taggtgacaaactgaagtgagctatagggagtt

SEQ ID NO: 842623 - DNA, 33 bp, Homo sapien
gtcttgatgcttcatacgcattatcttaatact

SEQ ID NO: 842624 - DNA, 33 bp, Homo sapien
gtcttgatgcttcatatgcattatcttaatact

SEQ ID NO: 842625 - DNA, 33 bp, Homo sapien
caataatcaagctgtgcatatcttttaaagtac

SEQ ID NO: 842626 - DNA, 33 bp, Homo sapien
caataatcaagctgtgtatatcttttaaagtac

SEQ ID NO: 842627 - DNA, 33 bp, Homo sapien
cagctcccaaggcaccacaacttctcaggacaa

SEQ ID NO: 842628 - DNA, 33 bp, Homo sapien
cagctcccaaggcaccgcaacttctcaggacaa

SEQ ID NO: 842629 - DNA, 33 bp, Homo sapien
acagtgaattgaataaagaaattgtggtatgta

SEQ ID NO: 842630 - DNA, 33 bp, Homo sapien
acagtgaattgaataaggaaattgtggtatgta

SEQ ID NO: 842631 - DNA, 33 bp, Homo sapien
tgattggaatgtctcactacaccagttctgtaa

SEQ ID NO: 842632 - DNA, 33 bp, Homo sapien
tgattggaatgtctcattacaccagttctgtaa

SEQ ID NO: 842633 - DNA, 33 bp, Homo sapien
ggtttagtcatagaggccattttttgaggcata

SEQ ID NO: 842634 - DNA, 33 bp, Homo sapien
ggtttagtcatagagggcattttttgaggcata

SEQ ID NO: 842635 - DNA, 33 bp, Homo sapien
tcataaaatatttcataaaactgctgcaaaatt

SEQ ID NO: 842636 - DNA, 33 bp, Homo sapien
tcataaaatatttcatgaaactgctgcaaaatt

SEQ ID NO: 842637 - DNA, 33 bp, Homo sapien
aagcctgaaattcaccaagtgcagttttaatta

SEQ ID NO: 842638 - DNA, 33 bp, Homo sapien
aagcctgaaattcaccgagtgcagttttaatta

SEQ ID NO: 842639 - DNA, 33 bp, Homo sapien
agttaggttggtaaagaacaatgcacattctag

SEQ ID NO: 842640 - DNA, 33 bp, Homo sapien
agttaggttggtaaaggacaatgcacattctag

SEQ ID NO: 842641 - DNA, 33 bp, Homo sapien
ttaccaacctaactgacgagtcaatttgcctgt

SEQ ID NO: 842642 - DNA, 33 bp, Homo sapien
ttaccaacctaactgatgagtcaatttgcctgt

SEQ ID NO: 842643 - DNA, 33 bp, Homo sapien
aatcttaaactatccactaatttcactggtact

SEQ ID NO: 842644 - DNA, 33 bp, Homo sapien
aatcttaaactatccattaatttcactggtact

SEQ ID NO: 842645 - DNA, 33 bp, Homo sapien
gaccttctactaacaacgtatttgcacaattcc

SEQ ID NO: 842646 - DNA, 33 bp, Homo sapien
gaccttctactaacaatgtatttgcacaattcc

SEQ ID NO: 842647 - DNA, 33 bp, Homo sapien
ttttccacagagcagccaggcttattttttgaa

SEQ ID NO: 842648 - DNA, 33 bp, Homo sapien
ttttccacagagcagcgaggcttattttttgaa

SEQ ID NO: 842649 - DNA, 33 bp, Homo sapien
gctagccaagaatgaccggggtgaccattacca

SEQ ID NO: 842650 - DNA, 33 bp, Homo sapien
gctagccaagaatgactggggtgaccattacca

SEQ ID NO: 842651 - DNA, 33 bp, Homo sapien
tatggcaaaactttccacgttgttgactgtgac

SEQ ID NO: 842652 - DNA, 33 bp, Homo sapien
tatggcaaaactttccgcgttgttgactgtgac

SEQ ID NO: 842653 - DNA, 33 bp, Homo sapien
aacagagtaaaaagacaatctaaagaatgggaa

SEQ ID NO: 842654 - DNA, 33 bp, Homo sapien
aacagagtaaaaagactatctaaagaatgggaa

SEQ ID NO: 842655 - DNA, 33 bp, Homo sapien
catgggtaaatacatacgtcaagcaacatcaaa

SEQ ID NO: 842656 - DNA, 33 bp, Homo sapien
catgggtaaatacatatgtcaagcaacatcaaa

SEQ ID NO: 842657 - DNA, 33 bp, Homo sapien
tgtctgtctccccaaacagaatattttctccat

SEQ ID NO: 842658 - DNA, 33 bp, Homo sapien
tgtctgtctccccaaagagaatattttctccat

SEQ ID NO: 842659 - DNA, 33 bp, Homo sapien
tttccatctgttgatacgacacgtacataatac

SEQ ID NO: 842660 - DNA, 33 bp, Homo sapien
tttccatctgttgatatgacacgtacataatac

SEQ ID NO: 842661 - DNA, 33 bp, Homo sapien
agtcttttgctctggtaaagagtcagggtctcc

SEQ ID NO: 842662 - DNA, 33 bp, Homo sapien
agtcttttgctctggtcaagagtcagggtctcc

SEQ ID NO: 842663 - DNA, 33 bp, Homo sapien
gggcatcactatgttgcaatctctcactactct

SEQ ID NO: 842664 - DNA, 33 bp, Homo sapien
gggcatcactatgttgtaatctctcactactct

SEQ ID NO: 842665 - DNA, 33 bp, Homo sapien
gaaaaacacatggagacgatacaaatccactgt

SEQ ID NO: 842666 - DNA, 33 bp, Homo sapien
gaaaaacacatggagatgatacaaatccactgt

SEQ ID NO: 842667 - DNA, 33 bp, Homo sapien
ttcctcctgactgctccagaatctttttgactt

SEQ ID NO: 842668 - DNA, 33 bp, Homo sapien
ttcctcctgactgctctagaatctttttgactt

SEQ ID NO: 842669 - DNA, 33 bp, Homo sapien
acacaattgcctttagaaaagaatgatcagtgc

SEQ ID NO: 842670 - DNA, 33 bp, Homo sapien
acacaattgcctttaggaaagaatgatcagtgc

SEQ ID NO: 842671 - DNA, 33 bp, Homo sapien
tctcagccaaaatggaaatttaggaaagtctca

SEQ ID NO: 842672 - DNA, 33 bp, Homo sapien
tctcagccaaaatggagatttaggaaagtctca

SEQ ID NO: 842673 - DNA, 33 bp, Homo sapien
tagggtctagctgtgacagtaaatataataccg

SEQ ID NO: 842674 - DNA, 33 bp, Homo sapien
tagggtctagctgtgatagtaaatataataccg

SEQ ID NO: 842675 - DNA, 33 bp, Homo sapien
ctagagctacttgttcacgtggagaggaaggat

SEQ ID NO: 842676 - DNA, 33 bp, Homo sapien
ctagagctacttgttctcgtggagaggaaggat

SEQ ID NO: 842677 - DNA, 33 bp, Homo sapien
tttagaacatgtagcaacatcttagaggtctat

SEQ ID NO: 842678 - DNA, 33 bp, Homo sapien
tttagaacatgtagcatcatcttagaggtctat

SEQ ID NO: 842679 - DNA, 33 bp, Homo sapien
acttgcgtgccagagacgccacaacttcatgtc

SEQ ID NO: 842680 - DNA, 33 bp, Homo sapien
acttgcgtgccagagatgccacaacttcatgtc

SEQ ID NO: 842681 - DNA, 33 bp, Homo sapien
tcagggctgtttgactaaagtggctaagggatc

SEQ ID NO: 842682 - DNA, 33 bp, Homo sapien
tcagggctgtttgactgaagtggctaagggatc

SEQ ID NO: 842683 - DNA, 33 bp, Homo sapien
tgaaaatatgtatttcccccatttctccctctc

SEQ ID NO: 842684 - DNA, 33 bp, Homo sapien
tgaaaatatgtatttctcccatttctccctctc

SEQ ID NO: 842685 - DNA, 33 bp, Homo sapien
cagactgtagtccaaacaggaatcccttacatt

SEQ ID NO: 842686 - DNA, 33 bp, Homo sapien
cagactgtagtccaaataggaatcccttacatt

SEQ ID NO: 842687 - DNA, 33 bp, Homo sapien
gactttccattatccaagtcttcacagctccga

SEQ ID NO: 842688 - DNA, 33 bp, Homo sapien
gactttccattatccacgtcttcacagctccga

SEQ ID NO: 842689 - DNA, 33 bp, Homo sapien
gctcaggaaatgcctccataatgaataagcaaa

SEQ ID NO: 842690 - DNA, 33 bp, Homo sapien
gctcaggaaatgcctctataatgaataagcaaa

SEQ ID NO: 842691 - DNA, 33 bp, Homo sapien
gcttcttagaactgaaactatgtttgcatcctc

SEQ ID NO: 842692 - DNA, 33 bp, Homo sapien
gcttcttagaactgaagctatgtttgcatcctc

SEQ ID NO: 842693 - DNA, 33 bp, Homo sapien
tcaattaccccaacacccagaagtggaattact

SEQ ID NO: 842694 - DNA, 33 bp, Homo sapien
tcaattaccccaacactcagaagtggaattact

SEQ ID NO: 842695 - DNA, 33 bp, Homo sapien
gggagatcaggaagcaacccttagaggtcaggg

SEQ ID NO: 842696 - DNA, 33 bp, Homo sapien
gggagatcaggaagcaccccttagaggtcaggg

SEQ ID NO: 842697 - DNA, 33 bp, Homo sapien
agtattccatcttttacgtaagaaagggcagga

SEQ ID NO: 842698 - DNA, 33 bp, Homo sapien
agtattccatcttttatgtaagaaagggcagga

SEQ ID NO: 842699 - DNA, 33 bp, Homo sapien
caaggttttttgtaccaattgaacctagaccaa

SEQ ID NO: 842700 - DNA, 33 bp, Homo sapien
caaggttttttgtaccgattgaacctagaccaa

SEQ ID NO: 842701 - DNA, 33 bp, Homo sapien
aacagaaacaatcagacgctaaaggaacagaag

SEQ ID NO: 842702 - DNA, 33 bp, Homo sapien
aacagaaacaatcagatgctaaaggaacagaag

SEQ ID NO: 842703 - DNA, 33 bp, Homo sapien
caagtatatgatacaaacaggagacaacactaa

SEQ ID NO: 842704 - DNA, 33 bp, Homo sapien
caagtatatgatacaagcaggagacaacactaa

SEQ ID NO: 842705 - DNA, 33 bp, Homo sapien
cccccacattttgactcaagagctaggcacgtg

SEQ ID NO: 842706 - DNA, 33 bp, Homo sapien
cccccacattttgactgaagagctaggcacgtg

SEQ ID NO: 842707 - DNA, 33 bp, Homo sapien
tcgctgtgtgaactcacggttcattttcttagc

SEQ ID NO: 842708 - DNA, 33 bp, Homo sapien
tcgctgtgtgaactcatggttcattttcttagc

SEQ ID NO: 842709 - DNA, 33 bp, Homo sapien
aaaggcaagagttcccaggaaaatgtgctacag

SEQ ID NO: 842710 - DNA, 33 bp, Homo sapien
aaaggcaagagttcccgggaaaatgtgctacag

SEQ ID NO: 842711 - DNA, 33 bp, Homo sapien
tcaggtcttgttcaggaaacagacacacaaatg

SEQ ID NO: 842712 - DNA, 33 bp, Homo sapien
tcaggtcttgttcaggtaacagacacacaaatg

SEQ ID NO: 842713 - DNA, 33 bp, Homo sapien
ttctgatgggtcccaactgcctacaacagcgct

SEQ ID NO: 842714 - DNA, 33 bp, Homo sapien
ttctgatgggtcccaagtgcctacaacagcgct

SEQ ID NO: 842715 - DNA, 33 bp, Homo sapien
cccaccaatgaagtcaataccaatagtcatccg

SEQ ID NO: 842716 - DNA, 33 bp, Homo sapien
cccaccaatgaagtcagtaccaatagtcatccg

SEQ ID NO: 842717 - DNA, 33 bp, Homo sapien
tttggatatcctttaccactccgtgaactgtcc

SEQ ID NO: 842718 - DNA, 33 bp, Homo sapien
tttggatatcctttactactccgtgaactgtcc

SEQ ID NO: 842719 - DNA, 33 bp, Homo sapien
gtaatgaggggtaaaaatcatagacaaacacac

SEQ ID NO: 842720 - DNA, 33 bp, Homo sapien
gtaatgaggggtaaaattcatagacaaacacac

SEQ ID NO: 842721 - DNA, 33 bp, Homo sapien
caagtcccttgtccaacggccgctagtgactca

SEQ ID NO: 842722 - DNA, 33 bp, Homo sapien
caagtcccttgtccaatggccgctagtgactca

SEQ ID NO: 842723 - DNA, 33 bp, Homo sapien
ccctttccagctctcaatcagctagagacagat

SEQ ID NO: 842724 - DNA, 33 bp, Homo sapien
ccctttccagctctcattcagctagagacagat

SEQ ID NO: 842725 - DNA, 33 bp, Homo sapien
ccaaggcaaacttctaccaaatctaaacataac

SEQ ID NO: 842726 - DNA, 33 bp, Homo sapien
ccaaggcaaacttctagcaaatctaaacataac

SEQ ID NO: 842727 - DNA, 33 bp, Homo sapien
catggcttaattcacacagaaatgttgcccact

SEQ ID NO: 842728 - DNA, 33 bp, Homo sapien
catggcttaattcacagagaaatgttgcccact

SEQ ID NO: 842729 - DNA, 33 bp, Homo sapien
aacctgagctccttaccaaaataaagctgtctt

SEQ ID NO: 842730 - DNA, 33 bp, Homo sapien
aacctgagctccttactaaaataaagctgtctt

SEQ ID NO: 842731 - DNA, 33 bp, Homo sapien
atgactccatctcataccaaagcataaacagtc

SEQ ID NO: 842732 - DNA, 33 bp, Homo sapien
atgactccatctcatatcaaagcataaacagtc

SEQ ID NO: 842733 - DNA, 33 bp, Homo sapien
catggtcacaacctcaagactagcagtcagtcc

SEQ ID NO: 842734 - DNA, 33 bp, Homo sapien
catggtcacaacctcaggactagcagtcagtcc

SEQ ID NO: 842735 - DNA, 33 bp, Homo sapien
agtgggcacaggaagacgtcacaagcagagaag

SEQ ID NO: 842736 - DNA, 33 bp, Homo sapien
agtgggcacaggaagatgtcacaagcagagaag

SEQ ID NO: 842737 - DNA, 33 bp, Homo sapien
atggttctgtgccccaaattgtctttcttcact

SEQ ID NO: 842738 - DNA, 33 bp, Homo sapien
atggttctgtgccccagattgtctttcttcact

SEQ ID NO: 842739 - DNA, 33 bp, Homo sapien
ctcatctgtgcagagccctggtaggcaggaaat

SEQ ID NO: 842740 - DNA, 33 bp, Homo sapien
ctcatctgtgcagagctctggtaggcaggaaat

SEQ ID NO: 842741 - DNA, 33 bp, Homo sapien
tgccagagcccaaaaacagcttacaatctactc

SEQ ID NO: 842742 - DNA, 33 bp, Homo sapien
tgccagagcccaaaaagagcttacaatctactc

SEQ ID NO: 842743 - DNA, 33 bp, Homo sapien
aagtatttttgaatgacaaataagatcaaacac

SEQ ID NO: 842744 - DNA, 33 bp, Homo sapien
aagtatttttgaatgataaataagatcaaacac

SEQ ID NO: 842745 - DNA, 33 bp, Homo sapien
aatgaaaacatctggaaacagagaagacttgta

SEQ ID NO: 842746 - DNA, 33 bp, Homo sapien
aatgaaaacatctggacacagagaagacttgta

SEQ ID NO: 842747 - DNA, 33 bp, Homo sapien
ataagcacatagctaacgtaaacctcttaaatc

SEQ ID NO: 842748 - DNA, 33 bp, Homo sapien
ataagcacatagctaatgtaaacctcttaaatc

SEQ ID NO: 842749 - DNA, 33 bp, Homo sapien
aaaatgtggtgatgcacggtatctaagacgtta

SEQ ID NO: 842750 - DNA, 33 bp, Homo sapien
aaaatgtggtgatgcatggtatctaagacgtta

SEQ ID NO: 842751 - DNA, 33 bp, Homo sapien
gcatttctagaacttaggaagtcactggagtaa

SEQ ID NO: 842752 - DNA, 33 bp, Homo sapien
gcatttctagaacttatgaagtcactggagtaa

SEQ ID NO: 842753 - DNA, 33 bp, Homo sapien
tttccagtaactctaacgcacactgaagtttga

SEQ ID NO: 842754 - DNA, 33 bp, Homo sapien
tttccagtaactctaatgcacactgaagtttga

SEQ ID NO: 842755 - DNA, 33 bp, Homo sapien
caactcaggaaccttcgaaaatcctctcaacaa

SEQ ID NO: 842756 - DNA, 33 bp, Homo sapien
caactcaggaaccttctaaaatcctctcaacaa

SEQ ID NO: 842757 - DNA, 33 bp, Homo sapien
gggctgtcgtctcttcgatccctgtcttccccg

SEQ ID NO: 842758 - DNA, 33 bp, Homo sapien
gggctgtcgtctcttctatccctgtcttccccg

SEQ ID NO: 842759 - DNA, 33 bp, Homo sapien
tttagactaacttccacctgtgacgagtgcatg

SEQ ID NO: 842760 - DNA, 33 bp, Homo sapien
tttagactaacttccagctgtgacgagtgcatg

SEQ ID NO: 842761 - DNA, 33 bp, Homo sapien
gtaaggatgcaggaaaacctattcccctcaact

SEQ ID NO: 842762 - DNA, 33 bp, Homo sapien
gtaaggatgcaggaaagcctattcccctcaact

SEQ ID NO: 842763 - DNA, 33 bp, Homo sapien
tggtgagctgggcaggaaaacaaccgcttgcaa

SEQ ID NO: 842764 - DNA, 33 bp, Homo sapien
tggtgagctgggcaggcaaacaaccgcttgcaa

SEQ ID NO: 842765 - DNA, 33 bp, Homo sapien
ttccctaagtcagagaactttgttttgctgtat

SEQ ID NO: 842766 - DNA, 33 bp, Homo sapien
ttccctaagtcagagatctttgttttgctgtat

SEQ ID NO: 842767 - DNA, 33 bp, Homo sapien
actgccctgccagtggaaggtctgtgagccatg

SEQ ID NO: 842768 - DNA, 33 bp, Homo sapien
actgccctgccagtgggaggtctgtgagccatg

SEQ ID NO: 842769 - DNA, 33 bp, Homo sapien
catcatctacctcgccaaaaaggtttctgggta

SEQ ID NO: 842770 - DNA, 33 bp, Homo sapien
catcatctacctcgccgaaaaggtttctgggta

SEQ ID NO: 842771 - DNA, 33 bp, Homo sapien
ttacaactattatggaaaggtactgagttgcca

SEQ ID NO: 842772 - DNA, 33 bp, Homo sapien
ttacaactattatggataggtactgagttgcca

SEQ ID NO: 842773 - DNA, 33 bp, Homo sapien
actgtatcacactgtcactctgtcaaactctct

SEQ ID NO: 842774 - DNA, 33 bp, Homo sapien
actgtatcacactgtcgctctgtcaaactctct

SEQ ID NO: 842775 - DNA, 33 bp, Homo sapien
aaaccaagcatacagaacggtaacttcaatata

SEQ ID NO: 842776 - DNA, 33 bp, Homo sapien
aaaccaagcatacagaccggtaacttcaatata

SEQ ID NO: 842777 - DNA, 33 bp, Homo sapien
ttaagatcttttaccacacaaatactgacaaca

SEQ ID NO: 842778 - DNA, 33 bp, Homo sapien
ttaagatcttttaccatacaaatactgacaaca

SEQ ID NO: 842779 - DNA, 33 bp, Homo sapien
ggtttagaatattcacaatttgatccagttgga

SEQ ID NO: 842780 - DNA, 33 bp, Homo sapien
ggtttagaatattcaccatttgatccagttgga

SEQ ID NO: 842781 - DNA, 33 bp, Homo sapien
aaactgaaatcacaaacgtatgcatttttcatc

SEQ ID NO: 842782 - DNA, 33 bp, Homo sapien
aaactgaaatcacaaatgtatgcatttttcatc

SEQ ID NO: 842783 - DNA, 33 bp, Homo sapien
cgaaactcaatcaaaacgtagcagaaaattctt

SEQ ID NO: 842784 - DNA, 33 bp, Homo sapien
cgaaactcaatcaaaatgtagcagaaaattctt

SEQ ID NO: 842785 - DNA, 33 bp, Homo sapien
atggaggtgatggttccattaaattttagactt

SEQ ID NO: 842786 - DNA, 33 bp, Homo sapien
atggaggtgatggttctattaaattttagactt

SEQ ID NO: 842787 - DNA, 33 bp, Homo sapien
gacttagaatgccttacagccaaaaatgccagg

SEQ ID NO: 842788 - DNA, 33 bp, Homo sapien
gacttagaatgccttagagccaaaaatgccagg

SEQ ID NO: 842789 - DNA, 33 bp, Homo sapien
ctcaaaatgtgcaaaacatattccatgttctga

SEQ ID NO: 842790 - DNA, 33 bp, Homo sapien
ctcaaaatgtgcaaaatatattccatgttctga

SEQ ID NO: 842791 - DNA, 33 bp, Homo sapien
atccattgattcagcaaataatttttttagttc

SEQ ID NO: 842792 - DNA, 33 bp, Homo sapien
atccattgattcagcagataatttttttagttc

SEQ ID NO: 842793 - DNA, 33 bp, Homo sapien
cagtctctctcttttacaccattaaccgtgctg

SEQ ID NO: 842794 - DNA, 33 bp, Homo sapien
cagtctctctcttttataccattaaccgtgctg

SEQ ID NO: 842795 - DNA, 33 bp, Homo sapien
ctgctgcagtactgtaagttcccctagtaaatg

SEQ ID NO: 842796 - DNA, 33 bp, Homo sapien
ctgctgcagtactgtacgttcccctagtaaatg

SEQ ID NO: 842797 - DNA, 33 bp, Homo sapien
tctttaggatgcatacacaacattcagttttta

SEQ ID NO: 842798 - DNA, 33 bp, Homo sapien
tctttaggatgcatacgcaacattcagttttta

SEQ ID NO: 842799 - DNA, 33 bp, Homo sapien
attagaaactaggtccactcaaacatggcaatt

SEQ ID NO: 842800 - DNA, 33 bp, Homo sapien
attagaaactaggtccgctcaaacatggcaatt

SEQ ID NO: 842801 - DNA, 33 bp, Homo sapien
gcagaactttagaaaactggtcttgcatgtgct

SEQ ID NO: 842802 - DNA, 33 bp, Homo sapien
gcagaactttagaaaattggtcttgcatgtgct

SEQ ID NO: 842803 - DNA, 33 bp, Homo sapien
aaaaatactcctgaaaaggcatctgtccagcaa

SEQ ID NO: 842804 - DNA, 33 bp, Homo sapien
aaaaatactcctgaaagggcatctgtccagcaa

SEQ ID NO: 842805 - DNA, 33 bp, Homo sapien
ctaatgtggttgataaactacacgttcatttca

SEQ ID NO: 842806 - DNA, 33 bp, Homo sapien
ctaatgtggttgataacctacacgttcatttca

SEQ ID NO: 842807 - DNA, 33 bp, Homo sapien; identical to SEQ ID NO: 842805

SEQ ID NO: 842808 - DNA, 33 bp, Homo sapien; identical to SEQ ID NO: 842806

SEQ ID NO: 842809 - DNA, 33 bp, Homo sapien
ctctaataacacctgaaggccactgtgtttgct

SEQ ID NO: 842810 - DNA, 33 bp, Homo sapien
ctctaataacacctgagggccactgtgtttgct

SEQ ID NO: 842811 - DNA, 33 bp, Homo sapien
tttaactaagtgggtgaataggagttgtattat

SEQ ID NO: 842812 - DNA, 33 bp, Homo sapien
tttaactaagtgggtgtataggagttgtattat

SEQ ID NO: 842813 - DNA, 33 bp, Homo sapien
agtcactctccttttaaaaaatactgatccctg

SEQ ID NO: 842814 - DNA, 33 bp, Homo sapien
agtcactctccttttagaaaatactgatccctg

SEQ ID NO: 842815 - DNA, 33 bp, Homo sapien; identical to SEQ ID NO: 842813

SEQ ID NO: 842816 - DNA, 33 bp, Homo sapien; identical to SEQ ID NO: 842814

SEQ ID NO: 842817 - DNA, 33 bp, Homo sapien
ataaggagaatcattacgcttttctgtttatat

SEQ ID NO: 842818 - DNA, 33 bp, Homo sapien
ataaggagaatcattatgcttttctgtttatat

SEQ ID NO: 842819 - DNA, 33 bp, Homo sapien
agaaatggatacaagacagataatagatgatga

SEQ ID NO: 842820 - DNA, 33 bp, Homo sapien
agaaatggatacaagatagataatagatgatga

SEQ ID NO: 842821 - DNA, 33 bp, Homo sapien
tcctactagagttctacggacaaaatatagaga

SEQ ID NO: 842822 - DNA, 33 bp, Homo sapien
tcctactagagttctatggacaaaatatagaga

SEQ ID NO: 842823 - DNA, 33 bp, Homo sapien; identical to SEQ ID NO: 842821

SEQ ID NO: 842824 - DNA, 33 bp, Homo sapien; identical to SEQ ID NO: 842822

SEQ ID NO: 842825 - DNA, 33 bp, Homo sapien
cctctctgcagatataacaacccaaaatgtctc

SEQ ID NO: 842826 - DNA, 33 bp, Homo sapien
cctctctgcagatatagcaacccaaaatgtctc

SEQ ID NO: 842827 - DNA, 33 bp, Homo sapien
agcttgttgccaatgaagtagtcttgttcatgg

SEQ ID NO: 842828 - DNA, 33 bp, Homo sapien
agcttgttgccaatgaggtagtcttgttcatgg

SEQ ID NO: 842829 - DNA, 33 bp, Homo sapien; identical to SEQ ID NO: 842827

SEQ ID NO: 842830 - DNA, 33 bp, Homo sapien; identical to SEQ ID NO: 842828

SEQ ID NO: 842831 - DNA, 33 bp, Homo sapien
ctgcacagctctccagaacactggccccccaca

SEQ ID NO: 842832 - DNA, 33 bp, Homo sapien
ctgcacagctctccaggacactggccccccaca

SEQ ID NO: 842833 - DNA, 33 bp, Homo sapien
cccatatgtgcccacaatgagccggtctgagca

SEQ ID NO: 842834 - DNA, 33 bp, Homo sapien
cccatatgtgcccacagtgagccggtctgagca

SEQ ID NO: 842835 - DNA, 33 bp, Homo sapien
gccccagtcttctccaagccttcagtgccccaa

SEQ ID NO: 842836 - DNA, 33 bp, Homo sapien
gccccagtcttctccaggccttcagtgccccaa

SEQ ID NO: 842837 - DNA, 33 bp, Homo sapien
aggaacaatctcccaccgctgagaaagcccttt

SEQ ID NO: 842838 - DNA, 33 bp, Homo sapien
aggaacaatctcccactgctgagaaagcccttt

SEQ ID NO: 842839 - DNA, 33 bp, Homo sapien; identical to SEQ ID NO: 842837

SEQ ID NO: 842840 - DNA, 33 bp, Homo sapien; identical to SEQ ID NO: 842838

SEQ ID NO: 842841 - DNA, 33 bp, Homo sapien
gggagagtgaagttcacatgaaagcatggggta

SEQ ID NO: 842842 - DNA, 33 bp, Homo sapien
gggagagtgaagttcagatgaaagcatggggta

SEQ ID NO: 842843 - DNA, 33 bp, Homo sapien
gtgaactctagtcgataacaattaaacaagcat

SEQ ID NO: 842844 - DNA, 33 bp, Homo sapien
gtgaactctagtcgatgacaattaaacaagcat

SEQ ID NO: 842845 - DNA, 33 bp, Homo sapien
acaacactcctgctgacaactagcatatcactt

SEQ ID NO: 842846 - DNA, 33 bp, Homo sapien
acaacactcctgctgataactagcatatcactt

SEQ ID NO: 842847 - DNA, 33 bp, Homo sapien
ttgttgcttcttctaaacctttcgcatttatgg

SEQ ID NO: 842848 - DNA, 33 bp, Homo sapien
ttgttgcttcttctaatcctttcgcatttatgg

SEQ ID NO: 842849 - DNA, 33 bp, Homo sapien
aaaacatatggcaacactgatttaagataatag

SEQ ID NO: 842850 - DNA, 33 bp, Homo sapien
aaaacatatggcaacattgatttaagataatag

SEQ ID NO: 842851 - DNA, 33 bp, Homo sapien
ctgtgtttaatgtcttcaacagcatgagactta

SEQ ID NO: 842852 - DNA, 33 bp, Homo sapien
ctgtgtttaatgtctttaacagcatgagactta

SEQ ID NO: 842853 - DNA, 33 bp, Homo sapien
tgcagattccaaaccacaaaatattttgctccc

SEQ ID NO: 842854 - DNA, 33 bp, Homo sapien
tgcagattccaaaccagaaaatattttgctccc

SEQ ID NO: 842855 - DNA, 33 bp, Homo sapien
ttgacatgaagtattcaatatcacatttctccc

SEQ ID NO: 842856 - DNA, 33 bp, Homo sapien
ttgacatgaagtattctatatcacatttctccc

SEQ ID NO: 842857 - DNA, 33 bp, Homo sapien
aagggtggggtcaaaacatggtcagtcccgggg

SEQ ID NO: 842858 - DNA, 33 bp, Homo sapien
aagggtggggtcaaaatatggtcagtcccgggg

SEQ ID NO: 842859 - DNA, 33 bp, Homo sapien; identical to SEQ ID NO: 842857

SEQ ID NO: 842860 - DNA, 33 bp, Homo sapien; identical to SEQ ID NO: 842858

SEQ ID NO: 842861 - DNA, 33 bp, Homo sapien
tgtttcttacagcatcaactctggttcctaacc

SEQ ID NO: 842862 - DNA, 33 bp, Homo sapien
tgtttcttacagcatcgactctggttcctaacc

SEQ ID NO: 842863 - DNA, 33 bp, Homo sapien
gctgtctcaatctgaccagaagctatgagtggt

SEQ ID NO: 842864 - DNA, 33 bp, Homo sapien
gctgtctcaatctgactagaagctatgagtggt

SEQ ID NO: 842865 - DNA, 33 bp, Homo sapien
tctcaccctctccttccaacatttagttggcta

SEQ ID NO: 842866 - DNA, 33 bp, Homo sapien
tctcaccctctccttctaacatttagttggcta

SEQ ID NO: 842867 - DNA, 33 bp, Homo sapien
gtgtttcagggatgggcatttattaaaaggaga

SEQ ID NO: 842868 - DNA, 33 bp, Homo sapien
gtgtttcagggatgggtatttattaaaaggaga

SEQ ID NO: 842869 - DNA, 33 bp, Homo sapien; identical to SEQ ID NO: 842867

SEQ ID NO: 842870 - DNA, 33 bp, Homo sapien; identical to SEQ ID NO: 842868

SEQ ID NO: 842871 - DNA, 33 bp, Homo sapien
gaaatgggtaaacttacggaacttatggtatag

SEQ ID NO: 842872 - DNA, 33 bp, Homo sapien
gaaatgggtaaacttatggaacttatggtatag

SEQ ID NO: 842873 - DNA, 33 bp, Homo sapien
tacatttttgattctacggcttaaattattcat

SEQ ID NO: 842874 - DNA, 33 bp, Homo sapien
tacatttttgattctatggcttaaattattcat

SEQ ID NO: 842875 - DNA, 33 bp, Homo sapien
tgtttatcttacataacgttttatcacaacact

SEQ ID NO: 842876 - DNA, 33 bp, Homo sapien
tgtttatcttacataatgttttatcacaacact

SEQ ID NO: 842877 - DNA, 33 bp, Homo sapien; identical to SEQ ID NO: 842875

SEQ ID NO: 842878 - DNA, 33 bp, Homo sapien; identical to SEQ ID NO: 842876

SEQ ID NO: 842879 - DNA, 33 bp, Homo sapien
aatcagtaagcgccaacgttgcaagaaagggga

SEQ ID NO: 842880 - DNA, 33 bp, Homo sapien
aatcagtaagcgccaatgttgcaagaaagggga

SEQ ID NO: 842881 - DNA, 33 bp, Homo sapien
gtccctggaacagccacctcgaacatttctgtc

SEQ ID NO: 842882 - DNA, 33 bp, Homo sapien
gtccctggaacagccatctcgaacatttctgtc

SEQ ID NO: 842883 - DNA, 33 bp, Homo sapien
tgtctcagtatcctaacctgtgaaatggatata

SEQ ID NO: 842884 - DNA, 33 bp, Homo sapien
tgtctcagtatcctaatctgtgaaatggatata

SEQ ID NO: 842885 - DNA, 33 bp, Homo sapien
ttgaacaaatgatagcactttcggttccctgca

SEQ ID NO: 842886 - DNA, 33 bp, Homo sapien
ttgaacaaatgatagctctttcggttccctgca

SEQ ID NO: 842887 - DNA, 33 bp, Homo sapien
ggtgatatgttacttacaagagagagcattatg

SEQ ID NO: 842888 - DNA, 33 bp, Homo sapien
ggtgatatgttacttataagagagagcattatg

SEQ ID NO: 842889 - DNA, 33 bp, Homo sapien; identical to SEQ ID NO: 842887

SEQ ID NO: 842890 - DNA, 33 bp, Homo sapien; identical to SEQ ID NO: 842888

SEQ ID NO: 842891 - DNA, 33 bp, Homo sapien
atgtatgtgtgactcacggcaaatctttgagct

SEQ ID NO: 842892 - DNA, 33 bp, Homo sapien
atgtatgtgtgactcatggcaaatctttgagct

SEQ ID NO: 842893 - DNA, 33 bp, Homo sapien
gataagaggaagaacacgtagctcactttattt

SEQ ID NO: 842894 - DNA, 33 bp, Homo sapien
gataagaggaagaacatgtagctcactttattt

SEQ ID NO: 842895 - DNA, 33 bp, Homo sapien
ccatgtgctattgcccaactctagccatgtgtg

SEQ ID NO: 842896 - DNA, 33 bp, Homo sapien
ccatgtgctattgcccgactctagccatgtgtg

SEQ ID NO: 842897 - DNA, 33 bp, Homo sapien
atttctatgaatcccactatttcaggaagaaaa

SEQ ID NO: 842898 - DNA, 33 bp, Homo sapien
atttctatgaatcccagtatttcaggaagaaaa

SEQ ID NO: 842899 - DNA, 33 bp, Homo sapien; identical to SEQ ID NO: 842897

SEQ ID NO: 842900 - DNA, 33 bp, Homo sapien; identical to SEQ ID NO: 842898

SEQ ID NO: 842901 - DNA, 33 bp, Homo sapien
acgttccctccctaatcatggacatttgtgaga

SEQ ID NO: 842902 - DNA, 33 bp, Homo sapien
acgttccctccctaatgatggacatttgtgaga

SEQ ID NO: 842903 - DNA, 33 bp, Homo sapien
gcttatccttatcccaaaacactaaagcaacta

SEQ ID NO: 842904 - DNA, 33 bp, Homo sapien
gcttatccttatcccagaacactaaagcaacta

SEQ ID NO: 842905 - DNA, 33 bp, Homo sapien
taggtacagctggttacagagggacaacagact

SEQ ID NO: 842906 - DNA, 33 bp, Homo sapien
taggtacagctggttatagagggacaacagact

SEQ ID NO: 842907 - DNA, 33 bp, Homo sapien
actagatcagaccagacggaccagacacattct

SEQ ID NO: 842908 - DNA, 33 bp, Homo sapien
actagatcagaccagatggaccagacacattct

SEQ ID NO: 842909 - DNA, 33 bp, Homo sapien
tattactagtaatagacgcttgctgctcccctg

SEQ ID NO: 842910 - DNA, 33 bp, Homo sapien
tattactagtaatagatgcttgctgctcccctg

SEQ ID NO: 842911 - DNA, 33 bp, Homo sapien
agtcccagtaccaaccactaatgctgcacatac

SEQ ID NO: 842912 - DNA, 33 bp, Homo sapien
agtcccagtaccaaccgctaatgctgcacatac

SEQ ID NO: 842913 - DNA, 33 bp, Homo sapien
tacagcagtgtgccacaaaaaggggctaaaggg

SEQ ID NO: 842914 - DNA, 33 bp, Homo sapien
tacagcagtgtgccacgaaaaggggctaaaggg

SEQ ID NO: 842915 - DNA, 33 bp, Homo sapien
aaacaggatttaatgcaaaagtaagctatactt

SEQ ID NO: 842916 - DNA, 33 bp, Homo sapien
aaacaggatttaatgctaaagtaagctatactt

SEQ ID NO: 842917 - DNA, 33 bp, Homo sapien
agtagcactggcttgaacccacaatgccaagac

SEQ ID NO: 842918 - DNA, 33 bp, Homo sapien
agtagcactggcttgagcccacaatgccaagac

SEQ ID NO: 842919 - DNA, 33 bp, Homo sapien
tattaatacacacatacggaaagatgagtgtga

SEQ ID NO: 842920 - DNA, 33 bp, Homo sapien
tattaatacacacatatggaaagatgagtgtga

SEQ ID NO: 842921 - DNA, 33 bp, Homo sapien
aagaaactcatgcagcaatcacacatttaaagc

SEQ ID NO: 842922 - DNA, 33 bp, Homo sapien
aagaaactcatgcagcgatcacacatttaaagc

SEQ ID NO: 842923 - DNA, 33 bp, Homo sapien
ataattcaaacctaagaagtggcccccataatg

SEQ ID NO: 842924 - DNA, 33 bp, Homo sapien
ataattcaaacctaagcagtggcccccataatg

SEQ ID NO: 842925 - DNA, 33 bp, Homo sapien
aatctggcttacgagcacgtccagtcatagtac

SEQ ID NO: 842926 - DNA, 33 bp, Homo sapien
aatctggcttacgagcgcgtccagtcatagtac

SEQ ID NO: 842927 - DNA, 33 bp, Homo sapien
ggccatagatgtaccactaagcctggctccatt

SEQ ID NO: 842928 - DNA, 33 bp, Homo sapien
ggccatagatgtaccattaagcctggctccatt

SEQ ID NO: 842929 - DNA, 33 bp, Homo sapien
ttttggaattgctataaatggggaagaaatacc

SEQ ID NO: 842930 - DNA, 33 bp, Homo sapien
ttttggaattgctatacatggggaagaaatacc

SEQ ID NO: 842931 - DNA, 33 bp, Homo sapien
atcctgtctagcaaaagtggggctgaatgaatg

SEQ ID NO: 842932 - DNA, 33 bp, Homo sapien
atcctgtctagcaaaattggggctgaatgaatg

SEQ ID NO: 842933 - DNA, 33 bp, Homo sapien
tctttcttttaacacaccttttattgcaatact

SEQ ID NO: 842934 - DNA, 33 bp, Homo sapien
tctttcttttaacacatcttttattgcaatact

SEQ ID NO: 842935 - DNA, 33 bp, Homo sapien
tatagtgctctctggaaaagatgctttttatac

SEQ ID NO: 842936 - DNA, 33 bp, Homo sapien
tatagtgctctctggagaagatgctttttatac

SEQ ID NO: 842937 - DNA, 33 bp, Homo sapien
tttccaaaactcacaacagattgacttatacct

SEQ ID NO: 842938 - DNA, 33 bp, Homo sapien
tttccaaaactcacaagagattgacttatacct

SEQ ID NO: 842939 - DNA, 33 bp, Homo sapien
tctgccaaaacctctccgaaagtgtggctttat

SEQ ID NO: 842940 - DNA, 33 bp, Homo sapien
tctgccaaaacctctctgaaagtgtggctttat

SEQ ID NO: 842941 - DNA, 33 bp, Homo sapien
cccctaccctatgctgaattcttctaaagcagg

SEQ ID NO: 842942 - DNA, 33 bp, Homo sapien
cccctaccctatgctgcattcttctaaagcagg

SEQ ID NO: 842943 - DNA, 33 bp, Homo sapien
tataaacctgaaggaaatctcaactttacactt

SEQ ID NO: 842944 - DNA, 33 bp, Homo sapien
tataaacctgaaggaagtctcaactttacactt

SEQ ID NO: 842945 - DNA, 33 bp, Homo sapien
acatccgaggtacccaagcggcgcacaagctat

SEQ ID NO: 842946 - DNA, 33 bp, Homo sapien
acatccgaggtacccaggcggcgcacaagctat

SEQ ID NO: 842947 - DNA, 33 bp, Homo sapien
ctgtataaattaaataagcgttgacagtgcttt

SEQ ID NO: 842948 - DNA, 33 bp, Homo sapien
ctgtataaattaaatacgcgttgacagtgcttt

SEQ ID NO: 842949 - DNA, 33 bp, Homo sapien
agtaatactcttaagcgcaggatttatattgga

SEQ ID NO: 842950 - DNA, 33 bp, Homo sapien
agtaatactcttaagctcaggatttatattgga

SEQ ID NO: 842951 - DNA, 33 bp, Homo sapien
tggagggtgctctgaagaacagagggtccaaac

SEQ ID NO: 842952 - DNA, 33 bp, Homo sapien
tggagggtgctctgaataacagagggtccaaac

SEQ ID NO: 842953 - DNA, 33 bp, Homo sapien
gtatggagcctcttggacacattttttgtggca

SEQ ID NO: 842954 - DNA, 33 bp, Homo sapien
gtatggagcctcttgggcacattttttgtggca

SEQ ID NO: 842955 - DNA, 33 bp, Homo sapien
acaccctagcaaatgacgacacaggaaaaacgc

SEQ ID NO: 842956 - DNA, 33 bp, Homo sapien
acaccctagcaaatgaggacacaggaaaaacgc

SEQ ID NO: 842957 - DNA, 33 bp, Homo sapien
gacaatgggaagtcaactaaagttttgtaacta

SEQ ID NO: 842958 - DNA, 33 bp, Homo sapien
gacaatgggaagtcaattaaagttttgtaacta

SEQ ID NO: 842959 - DNA, 33 bp, Homo sapien
ggtacttctgcagaaacttaacaagtaacaaag

SEQ ID NO: 842960 - DNA, 33 bp, Homo sapien
ggtacttctgcagaaatttaacaagtaacaaag

SEQ ID NO: 842961 - DNA, 33 bp, Homo sapien
tgaggagaaactaatgcacaaggcaaaggccct

SEQ ID NO: 842962 - DNA, 33 bp, Homo sapien
tgaggagaaactaatggacaaggcaaaggccct

SEQ ID NO: 842963 - DNA, 33 bp, Homo sapien
gtaggtattaatattaacctcagcacaatacca

SEQ ID NO: 842964 - DNA, 33 bp, Homo sapien
gtaggtattaatattagcctcagcacaatacca

SEQ ID NO: 842965 - DNA, 33 bp, Homo sapien
gcaaacaaaatgggaaaatggatattactacag

SEQ ID NO: 842966 - DNA, 33 bp, Homo sapien
gcaaacaaaatgggaacatggatattactacag

SEQ ID NO: 842967 - DNA, 33 bp, Homo sapien
aaactctgtgccaagtaaaagaacaaaaacaaa

SEQ ID NO: 842968 - DNA, 33 bp, Homo sapien
aaactctgtgccaagtcaaagaacaaaaacaaa

SEQ ID NO: 842969 - DNA, 33 bp, Homo sapien
gacggttctagaaggtcaaaatagaagattcta

SEQ ID NO: 842970 - DNA, 33 bp, Homo sapien
gacggttctagaaggtgaaaatagaagattcta

SEQ ID NO: 842971 - DNA, 33 bp, Homo sapien
cacttgaattattccaatataaaacacagttgt

SEQ ID NO: 842972 - DNA, 33 bp, Homo sapien
cacttgaattattccagtataaaacacagttgt

SEQ ID NO: 842973 - DNA, 33 bp, Homo sapien
ggtaccagcagatgcaataatgctcctatctgt

SEQ ID NO: 842974 - DNA, 33 bp, Homo sapien
ggtaccagcagatgcagtaatgctcctatctgt

SEQ ID NO: 842975 - DNA, 33 bp, Homo sapien
ctaaccttacacaaacgcttctggccttgctcc

SEQ ID NO: 842976 - DNA, 33 bp, Homo sapien
ctaaccttacacaaactcttctggccttgctcc

SEQ ID NO: 842977 - DNA, 33 bp, Homo sapien
gagatggcaagacctacgatttgagtgtgtctt

SEQ ID NO: 842978 - DNA, 33 bp, Homo sapien
gagatggcaagacctatgatttgagtgtgtctt

SEQ ID NO: 842979 - DNA, 33 bp, Homo sapien
acaactaaaggcaatagcacgtaaaataggatt

SEQ ID NO: 842980 - DNA, 33 bp, Homo sapien
acaactaaaggcaatatcacgtaaaataggatt

SEQ ID NO: 842981 - DNA, 33 bp, Homo sapien
tgtttggaaaaatgccagatacataataaatga

SEQ ID NO: 842982 - DNA, 33 bp, Homo sapien
tgtttggaaaaatgccggatacataataaatga

SEQ ID NO: 842983 - DNA, 33 bp, Homo sapien
gacaagagatgagcgacggaaaaaggaaggaag

SEQ ID NO: 842984 - DNA, 33 bp, Homo sapien
gacaagagatgagcgatggaaaaaggaaggaag

SEQ ID NO: 842985 - DNA, 33 bp, Homo sapien
taaaagccgtttgaggcccacatgaatttttaa

SEQ ID NO: 842986 - DNA, 33 bp, Homo sapien
taaaagccgtttgaggtccacatgaatttttaa

SEQ ID NO: 842987 - DNA, 33 bp, Homo sapien
ggcctgatctcacataaacataccttcatattc

SEQ ID NO: 842988 - DNA, 33 bp, Homo sapien
ggcctgatctcacatagacataccttcatattc

SEQ ID NO: 842989 - DNA, 33 bp, Homo sapien
aaaacactcatattcacatatgccaaatgagat

SEQ ID NO: 842990 - DNA, 33 bp, Homo sapien
aaaacactcatattcagatatgccaaatgagat

SEQ ID NO: 842991 - DNA, 33 bp, Homo sapien
gaattccttacctccaatgatcttgtccaccac

SEQ ID NO: 842992 - DNA, 33 bp, Homo sapien
gaattccttacctccagtgatcttgtccaccac

SEQ ID NO: 842993 - DNA, 33 bp, Homo sapien
caaagtcaagcgttcaatccatgcctcccacct

SEQ ID NO: 842994 - DNA, 33 bp, Homo sapien
caaagtcaagcgttcagtccatgcctcccacct

SEQ ID NO: 842995 - DNA, 33 bp, Homo sapien
aaacaatattctagtccaacactgaagtccagc

SEQ ID NO: 842996 - DNA, 33 bp, Homo sapien
aaacaatattctagtcgaacactgaagtccagc

SEQ ID NO: 842997 - DNA, 33 bp, Homo sapien
caaagtatacttgttaaagacttaaagttgatt

SEQ ID NO: 842998 - DNA, 33 bp, Homo sapien
caaagtatacttgttagagacttaaagttgatt

SEQ ID NO: 842999 - DNA, 33 bp, Homo sapien
ttagctttagagcacgccctttttctccagtta

SEQ ID NO: 843000 - DNA, 33 bp, Homo sapien
ttagctttagagcacggcctttttctccagtta

SEQ ID NO: 843001 - DNA, 33 bp, Homo sapien
tggctttgcctatcaaaaaatcaaaatatggct

SEQ ID NO: 843002 - DNA, 33 bp, Homo sapien
tggctttgcctatcaacaaatcaaaatatggct

SEQ ID NO: 843003 - DNA, 33 bp, Homo sapien
tatctattattttgtaaccattaatcatcccca

SEQ ID NO: 843004 - DNA, 33 bp, Homo sapien
tatctattattttgtacccattaatcatcccca

SEQ ID NO: 843005 - DNA, 33 bp, Homo sapien
ccttaaacctgactcacatacctcataaacatc

SEQ ID NO: 843006 - DNA, 33 bp, Homo sapien
ccttaaacctgactcagatacctcataaacatc

SEQ ID NO: 843007 - DNA, 33 bp, Homo sapien
accccctgtgggctccaagactatcaaggtagt

SEQ ID NO: 843008 - DNA, 33 bp, Homo sapien
accccctgtgggctccgagactatcaaggtagt

SEQ ID NO: 843009 - DNA, 33 bp, Homo sapien
aagaggctaatgaaaaaggaagttgctcatgaa

SEQ ID NO: 843010 - DNA, 33 bp, Homo sapien
aagaggctaatgaaaagggaagttgctcatgaa

SEQ ID NO: 843011 - DNA, 33 bp, Homo sapien
ctggggagaacttacaatggtagcatcttagtc

SEQ ID NO: 843012 - DNA, 33 bp, Homo sapien
ctggggagaacttacagtggtagcatcttagtc

SEQ ID NO: 843013 - DNA, 33 bp, Homo sapien
attgatcctgagtataagttagcactcatcttc

SEQ ID NO: 843014 - DNA, 33 bp, Homo sapien
attgatcctgagtataggttagcactcatcttc

SEQ ID NO: 843015 - DNA, 33 bp, Homo sapien
gcctggcctcaagaacaatttcaaaggtttggt

SEQ ID NO: 843016 - DNA, 33 bp, Homo sapien
gcctggcctcaagaacgatttcaaaggtttggt

SEQ ID NO: 843017 - DNA, 33 bp, Homo sapien
agaaagtaagtctccaatgcttgggtaaataaa

SEQ ID NO: 843018 - DNA, 33 bp, Homo sapien
agaaagtaagtctccattgcttgggtaaataaa

SEQ ID NO: 843019 - DNA, 33 bp, Homo sapien
atacaatctgatattccctggtttcgtgtcacc

SEQ ID NO: 843020 - DNA, 33 bp, Homo sapien
atacaatctgatattctctggtttcgtgtcacc

SEQ ID NO: 843021 - DNA, 33 bp, Homo sapien
gacactctgtcgtatcgaaatggaagaatgtcc

SEQ ID NO: 843022 - DNA, 33 bp, Homo sapien
gacactctgtcgtatctaaatggaagaatgtcc

SEQ ID NO: 843023 - DNA, 33 bp, Homo sapien
catttgtgacagcgacacagctcatattggaag

SEQ ID NO: 843024 - DNA, 33 bp, Homo sapien
catttgtgacagcgacgcagctcatattggaag

SEQ ID NO: 843025 - DNA, 33 bp, Homo sapien
aattattctcagtcaaatgaagacggaaactgt

SEQ ID NO: 843026 - DNA, 33 bp, Homo sapien
aattattctcagtcaagtgaagacggaaactgt

SEQ ID NO: 843027 - DNA, 33 bp, Homo sapien
catgtgaccttataaactgtacacaaggaccct

SEQ ID NO: 843028 - DNA, 33 bp, Homo sapien
catgtgaccttataaattgtacacaaggaccct

SEQ ID NO: 843029 - DNA, 33 bp, Homo sapien
tcagaagcccaaggtagcttgctatttttcaca

SEQ ID NO: 843030 - DNA, 33 bp, Homo sapien
tcagaagcccaaggtatcttgctatttttcaca

SEQ ID NO: 843031 - DNA, 33 bp, Homo sapien
tttgcaaatgtgcataggagtgaagacaaggta

SEQ ID NO: 843032 - DNA, 33 bp, Homo sapien
tttgcaaatgtgcatatgagtgaagacaaggta

SEQ ID NO: 843033 - DNA, 33 bp, Homo sapien
gaatttgtaaacccacaaaaggtcactttgaat

SEQ ID NO: 843034 - DNA, 33 bp, Homo sapien
gaatttgtaaacccacgaaaggtcactttgaat

SEQ ID NO: 843035 - DNA, 33 bp, Homo sapien
agatgtgtccacgttacagttggagaccttgaa

SEQ ID NO: 843036 - DNA, 33 bp, Homo sapien
agatgtgtccacgttatagttggagaccttgaa

SEQ ID NO: 843037 - DNA, 33 bp, Homo sapien
ttcagtcatataaaaaacgtaaatttcactttt

SEQ ID NO: 843038 - DNA, 33 bp, Homo sapien
ttcagtcatataaaaaccgtaaatttcactttt

SEQ ID NO: 843039 - DNA, 33 bp, Homo sapien
ttggtcctgctccatccgaagagctgattcatt

SEQ ID NO: 843040 - DNA, 33 bp, Homo sapien
ttggtcctgctccatctgaagagctgattcatt

SEQ ID NO: 843041 - DNA, 33 bp, Homo sapien
gcctacgcttggccctaacaattctgtgagcac

SEQ ID NO: 843042 - DNA, 33 bp, Homo sapien
gcctacgcttggccctgacaattctgtgagcac

SEQ ID NO: 843043 - DNA, 33 bp, Homo sapien
tcaggaataatatagacggtgaacatttgactc

SEQ ID NO: 843044 - DNA, 33 bp, Homo sapien
tcaggaataatatagatggtgaacatttgactc

SEQ ID NO: 843045 - DNA, 33 bp, Homo sapien
ctgaagttatcacttacactttactctgagcta

SEQ ID NO: 843046 - DNA, 33 bp, Homo sapien
ctgaagttatcacttatactttactctgagcta

SEQ ID NO: 843047 - DNA, 33 bp, Homo sapien
gctgggacaaaaaagcagatctccatatctgag

SEQ ID NO: 843048 - DNA, 33 bp, Homo sapien
gctgggacaaaaaagcggatctccatatctgag

SEQ ID NO: 843049 - DNA, 33 bp, Homo sapien
agagatgacttccaacagagctgacaaacactg

SEQ ID NO: 843050 - DNA, 33 bp, Homo sapien
agagatgacttccaacggagctgacaaacactg

SEQ ID NO: 843051 - DNA, 33 bp, Homo sapien
gaaaagcagacctttaactgcatctttttcttc

SEQ ID NO: 843052 - DNA, 33 bp, Homo sapien
gaaaagcagacctttagctgcatctttttcttc

SEQ ID NO: 843053 - DNA, 33 bp, Homo sapien
gcattcaatggagtagaaatgctaagtataaaa

SEQ ID NO: 843054 - DNA, 33 bp, Homo sapien
gcattcaatggagtagtaatgctaagtataaaa

SEQ ID NO: 843055 - DNA, 33 bp, Homo sapien
atttacagaacctctcccctactgacaggcatc

SEQ ID NO: 843056 - DNA, 33 bp, Homo sapien
atttacagaacctctctcctactgacaggcatc

SEQ ID NO: 843057 - DNA, 33 bp, Homo sapien
tacagcattgtttttcaaggaatcatctggatg

SEQ ID NO: 843058 - DNA, 33 bp, Homo sapien
tacagcattgtttttcgaggaatcatctggatg

SEQ ID NO: 843059 - DNA, 33 bp, Homo sapien
tattcctaagaaaggcaattttggtcctaagcc

SEQ ID NO: 843060 - DNA, 33 bp, Homo sapien
tattcctaagaaaggccattttggtcctaagcc

SEQ ID NO: 843061 - DNA, 33 bp, Homo sapien
ctaatggattgaataactgatggacaagctgct

SEQ ID NO: 843062 - DNA, 33 bp, Homo sapien
ctaatggattgaataagtgatggacaagctgct

SEQ ID NO: 843063 - DNA, 33 bp, Homo sapien
gaaaaggatccagatacagtaaagcaaaaacaa

SEQ ID NO: 843064 - DNA, 33 bp, Homo sapien
gaaaaggatccagatatagtaaagcaaaaacaa

SEQ ID NO: 843065 - DNA, 33 bp, Homo sapien
attttaagaatgataggcaatagagttggagat

SEQ ID NO: 843066 - DNA, 33 bp, Homo sapien
attttaagaatgatagtcaatagagttggagat

SEQ ID NO: 843067 - DNA, 33 bp, Homo sapien
agcaaaagggatggtacgtcgcttctgggatta

SEQ ID NO: 843068 - DNA, 33 bp, Homo sapien
agcaaaagggatggtatgtcgcttctgggatta

SEQ ID NO: 843069 - DNA, 33 bp, Homo sapien
gttacttctaggttacagaaggtttcatctaga

SEQ ID NO: 843070 - DNA, 33 bp, Homo sapien
gttacttctaggttacggaaggtttcatctaga

SEQ ID NO: 843071 - DNA, 33 bp, Homo sapien
ggaaggtttatgttggaaaggaatagtctgaac

SEQ ID NO: 843072 - DNA, 33 bp, Homo sapien
ggaaggtttatgttggcaaggaatagtctgaac

SEQ ID NO: 843073 - DNA, 33 bp, Homo sapien
gttcatccttaagctacgacctaacccacacat

SEQ ID NO: 843074 - DNA, 33 bp, Homo sapien
gttcatccttaagctaggacctaacccacacat

SEQ ID NO: 843075 - DNA, 33 bp, Homo sapien
gaactccagatgaaccaaatgaacaggcatgtt

SEQ ID NO: 843076 - DNA, 33 bp, Homo sapien
gaactccagatgaaccgaatgaacaggcatgtt

SEQ ID NO: 843077 - DNA, 33 bp, Homo sapien
tgaaaatttgtgtaaacagccatttcggctaac

SEQ ID NO: 843078 - DNA, 33 bp, Homo sapien
tgaaaatttgtgtaaagagccatttcggctaac

SEQ ID NO: 843079 - DNA, 33 bp, Homo sapien
gttacattaattacaaagtttatgtgacactta

SEQ ID NO: 843080 - DNA, 33 bp, Homo sapien
gttacattaattacaacgtttatgtgacactta

SEQ ID NO: 843081 - DNA, 33 bp, Homo sapien
tcagatatttggcttacgacacagtaatgggta

SEQ ID NO: 843082 - DNA, 33 bp, Homo sapien
tcagatatttggcttatgacacagtaatgggta

SEQ ID NO: 843083 - DNA, 33 bp, Homo sapien
gccactcttgcctgaacctttttgtcaccttgc

SEQ ID NO: 843084 - DNA, 33 bp, Homo sapien
gccactcttgcctgaagctttttgtcaccttgc

SEQ ID NO: 843085 - DNA, 33 bp, Homo sapien
ctcaggctggaagctacagtcacaaatactcct

SEQ ID NO: 843086 - DNA, 33 bp, Homo sapien
ctcaggctggaagctatagtcacaaatactcct

SEQ ID NO: 843087 - DNA, 33 bp, Homo sapien
aggatctgacatgctacggaaggctggggcaat

SEQ ID NO: 843088 - DNA, 33 bp, Homo sapien
aggatctgacatgctatggaaggctggggcaat

SEQ ID NO: 843089 - DNA, 33 bp, Homo sapien
tgatgctgatgataaacaactatgtcattggtt

SEQ ID NO: 843090 - DNA, 33 bp, Homo sapien
tgatgctgatgataaagaactatgtcattggtt

SEQ ID NO: 843091 - DNA, 33 bp, Homo sapien
tcatgtgtgttactgcccctacagacctttcag

SEQ ID NO: 843092 - DNA, 33 bp, Homo sapien
tcatgtgtgttactgctcctacagacctttcag

SEQ ID NO: 843093 - DNA, 33 bp, Homo sapien
atacttcaatatttacagaagtcgttgacgcct

SEQ ID NO: 843094 - DNA, 33 bp, Homo sapien
atacttcaatatttactgaagtcgttgacgcct

SEQ ID NO: 843095 - DNA, 33 bp, Homo sapien
tgttaagggcctagcactcctgaattggtcagg

SEQ ID NO: 843096 - DNA, 33 bp, Homo sapien
tgttaagggcctagcattcctgaattggtcagg

SEQ ID NO: 843097 - DNA, 33 bp, Homo sapien
aggggctggatacaaaaatgaattacaacagtt

SEQ ID NO: 843098 - DNA, 33 bp, Homo sapien
aggggctggatacaaagatgaattacaacagtt

SEQ ID NO: 843099 - DNA, 33 bp, Homo sapien
attccacttacatgaaaaacctagataagcaaa

SEQ ID NO: 843100 - DNA, 33 bp, Homo sapien
attccacttacatgaagaacctagataagcaaa

SEQ ID NO: 843101 - DNA, 33 bp, Homo sapien
tgtctgcgtcagtggaacctagacctggaatct

SEQ ID NO: 843102 - DNA, 33 bp, Homo sapien
tgtctgcgtcagtggagcctagacctggaatct

SEQ ID NO: 843103 - DNA, 33 bp, Homo sapien
cagatacagacacccacgtgacgcatactttca

SEQ ID NO: 843104 - DNA, 33 bp, Homo sapien
cagatacagacacccatgtgacgcatactttca

SEQ ID NO: 843105 - DNA, 33 bp, Homo sapien
ctattctgtcctattgaatgtactgtttatccc

SEQ ID NO: 843106 - DNA, 33 bp, Homo sapien
ctattctgtcctattggatgtactgtttatccc

SEQ ID NO: 843107 - DNA, 33 bp, Homo sapien
ggaattatgtacagtaggcttgtgagtatattg

SEQ ID NO: 843108 - DNA, 33 bp, Homo sapien
ggaattatgtacagtatgcttgtgagtatattg

SEQ ID NO: 843109 - DNA, 33 bp, Homo sapien
tgctgaggccttctgaatcacaccattgctacc

SEQ ID NO: 843110 - DNA, 33 bp, Homo sapien
tgctgaggccttctgagtcacaccattgctacc

SEQ ID NO: 843111 - DNA, 33 bp, Homo sapien
ccgccagaatttctcaacactcttatgaatcct

SEQ ID NO: 843112 - DNA, 33 bp, Homo sapien
ccgccagaatttctcatcactcttatgaatcct

SEQ ID NO: 843113 - DNA, 33 bp, Homo sapien
ccttctgactacatacagcaccaggtgtaggaa

SEQ ID NO: 843114 - DNA, 33 bp, Homo sapien
ccttctgactacataccgcaccaggtgtaggaa

SEQ ID NO: 843115 - DNA, 33 bp, Homo sapien
atctccatcaaatgccagaaaccaaaagaacac

SEQ ID NO: 843116 - DNA, 33 bp, Homo sapien
atctccatcaaatgccggaaaccaaaagaacac

SEQ ID NO: 843117 - DNA, 33 bp, Homo sapien
cattgatctgtttctacatttgttcctctagct

SEQ ID NO: 843118 - DNA, 33 bp, Homo sapien
cattgatctgtttctagatttgttcctctagct

SEQ ID NO: 843119 - DNA, 33 bp, Homo sapien
ttgtttctgccaagacagcattaataatcagca

SEQ ID NO: 843120 - DNA, 33 bp, Homo sapien
ttgtttctgccaagactgcattaataatcagca

SEQ ID NO: 843121 - DNA, 33 bp, Homo sapien
ataccaagggacaggaatcagagacagatgata

SEQ ID NO: 843122 - DNA, 33 bp, Homo sapien
ataccaagggacaggagtcagagacagatgata

SEQ ID NO: 843123 - DNA, 33 bp, Homo sapien
gagttctctaaggtaaaatgctatcatctgtct

SEQ ID NO: 843124 - DNA, 33 bp, Homo sapien
gagttctctaaggtaacatgctatcatctgtct

SEQ ID NO: 843125 - DNA, 33 bp, Homo sapien
atacaatgacctctacccaatctgtccctctcc

SEQ ID NO: 843126 - DNA, 33 bp, Homo sapien
atacaatgacctctactcaatctgtccctctcc

SEQ ID NO: 843127 - DNA, 33 bp, Homo sapien
taggcaattcaaatgacacaattaaaatggccc

SEQ ID NO: 843128 - DNA, 33 bp, Homo sapien
taggcaattcaaatgagacaattaaaatggccc

SEQ ID NO: 843129 - DNA, 33 bp, Homo sapien
ttgaatgccttctcataatcatttagaagtgaa

SEQ ID NO: 843130 - DNA, 33 bp, Homo sapien
ttgaatgccttctcatgatcatttagaagtgaa

SEQ ID NO: 843131 - DNA, 33 bp, Homo sapien
tcctctatatgaccaacttcaggtgcccagcca

SEQ ID NO: 843132 - DNA, 33 bp, Homo sapien
tcctctatatgaccaatttcaggtgcccagcca

SEQ ID NO: 843133 - DNA, 33 bp, Homo sapien
tgtacacacagatgggaaagttatacaaatgat

SEQ ID NO: 843134 - DNA, 33 bp, Homo sapien
tgtacacacagatgggcaagttatacaaatgat

SEQ ID NO: 843135 - DNA, 33 bp, Homo sapien
cttctgagcccaggaaagagaatataatggctg

SEQ ID NO: 843136 - DNA, 33 bp, Homo sapien
cttctgagcccaggaaggagaatataatggctg

SEQ ID NO: 843137 - DNA, 33 bp, Homo sapien
gtgggagttagtaaacagcagcctcaactgttg

SEQ ID NO: 843138 - DNA, 33 bp, Homo sapien
gtgggagttagtaaacggcagcctcaactgttg

SEQ ID NO: 843139 - DNA, 33 bp, Homo sapien
ttcagaattagcccccagaagttttgcttttgc

SEQ ID NO: 843140 - DNA, 33 bp, Homo sapien
ttcagaattagcccccggaagttttgcttttgc

SEQ ID NO: 843141 - DNA, 33 bp, Homo sapien
tctgcttaccaggaaaacacaatagtgaggaat

SEQ ID NO: 843142 - DNA, 33 bp, Homo sapien
tctgcttaccaggaaagcacaatagtgaggaat

SEQ ID NO: 843143 - DNA, 33 bp, Homo sapien
ttctcagaactgtaaaaaagctgctcagttgca

SEQ ID NO: 843144 - DNA, 33 bp, Homo sapien
ttctcagaactgtaaataagctgctcagttgca

SEQ ID NO: 843145 - DNA, 33 bp, Homo sapien
atttgggattttaggaacagaactgtaaatctt

SEQ ID NO: 843146 - DNA, 33 bp, Homo sapien
atttgggattttaggagcagaactgtaaatctt

SEQ ID NO: 843147 - DNA, 33 bp, Homo sapien
taagtctaatgtgataggtctacattttctctt

SEQ ID NO: 843148 - DNA, 33 bp, Homo sapien
taagtctaatgtgatatgtctacattttctctt

SEQ ID NO: 843149 - DNA, 33 bp, Homo sapien
aaattatactttccacagcagaaagcaccatat

SEQ ID NO: 843150 - DNA, 33 bp, Homo sapien
aaattatactttccacggcagaaagcaccatat

SEQ ID NO: 843151 - DNA, 33 bp, Homo sapien
aaatatagaaaaatcgcactactaattttaaat

SEQ ID NO: 843152 - DNA, 33 bp, Homo sapien
aaatatagaaaaatcggactactaattttaaat

SEQ ID NO: 843153 - DNA, 33 bp, Homo sapien
agccccaaaacagtcaataatttgaatgtggtt

SEQ ID NO: 843154 - DNA, 33 bp, Homo sapien
agccccaaaacagtcactaatttgaatgtggtt

SEQ ID NO: 843155 - DNA, 33 bp, Homo sapien
agacttactgtataaaacaaaaaggattttaac

SEQ ID NO: 843156 - DNA, 33 bp, Homo sapien
agacttactgtataaagcaaaaaggattttaac

SEQ ID NO: 843157 - DNA, 33 bp, Homo sapien
gttgagttgtcttagagaactaatttgaggtat

SEQ ID NO: 843158 - DNA, 33 bp, Homo sapien
gttgagttgtcttagataactaatttgaggtat

SEQ ID NO: 843159 - DNA, 33 bp, Homo sapien
aagcactatcgataccaatgctctatgaacaac

SEQ ID NO: 843160 - DNA, 33 bp, Homo sapien
aagcactatcgataccgatgctctatgaacaac

SEQ ID NO: 843161 - DNA, 33 bp, Homo sapien
atcctggtctttcccactgagcccccactgagt

SEQ ID NO: 843162 - DNA, 33 bp, Homo sapien
atcctggtctttcccattgagcccccactgagt

SEQ ID NO: 843163 - DNA, 33 bp, Homo sapien
gataaaccatctgtaacgtatgaggattgtaag

SEQ ID NO: 843164 - DNA, 33 bp, Homo sapien
gataaaccatctgtaatgtatgaggattgtaag

SEQ ID NO: 843165 - DNA, 33 bp, Homo sapien
ctatgatgtaaatgtaacaaatatgacttgatt

SEQ ID NO: 843166 - DNA, 33 bp, Homo sapien
ctatgatgtaaatgtagcaaatatgacttgatt

SEQ ID NO: 843167 - DNA, 33 bp, Homo sapien
ctattatgatcagaaaagcttatatttattccg

SEQ ID NO: 843168 - DNA, 33 bp, Homo sapien
ctattatgatcagaaaggcttatatttattccg

SEQ ID NO: 843169 - DNA, 33 bp, Homo sapien
cctaacaagtccccaactcatagtgacactact

SEQ ID NO: 843170 - DNA, 33 bp, Homo sapien
cctaacaagtccccaagtcatagtgacactact

SEQ ID NO: 843171 - DNA, 33 bp, Homo sapien
gctttaatggaaggtgaaacagaaactacatga

SEQ ID NO: 843172 - DNA, 33 bp, Homo sapien
gctttaatggaaggtggaacagaaactacatga

SEQ ID NO: 843173 - DNA, 33 bp, Homo sapien
caccagccaccaaacccaagtcggaggctctct

SEQ ID NO: 843174 - DNA, 33 bp, Homo sapien
caccagccaccaaacctaagtcggaggctctct

SEQ ID NO: 843175 - DNA, 33 bp, Homo sapien
cccaacttcaacttcacgctgtgcaccagagat

SEQ ID NO: 843176 - DNA, 33 bp, Homo sapien
cccaacttcaacttcatgctgtgcaccagagat

SEQ ID NO: 843177 - DNA, 33 bp, Homo sapien
gactagaaagactctacagtcacaatctgactt

SEQ ID NO: 843178 - DNA, 33 bp, Homo sapien
gactagaaagactctatagtcacaatctgactt

SEQ ID NO: 843179 - DNA, 33 bp, Homo sapien
attaaacttaaacacaagcccattattctaagt

SEQ ID NO: 843180 - DNA, 33 bp, Homo sapien
attaaacttaaacacaggcccattattctaagt

SEQ ID NO: 843181 - DNA, 33 bp, Homo sapien
gttgagaccagaactaaaatcaaggtttttctg

SEQ ID NO: 843182 - DNA, 33 bp, Homo sapien
gttgagaccagaactagaatcaaggtttttctg

SEQ ID NO: 843183 - DNA, 33 bp, Homo sapien
ggtagtttatttcttgacaacctatctctaacc

SEQ ID NO: 843184 - DNA, 33 bp, Homo sapien
ggtagtttatttcttggcaacctatctctaacc

SEQ ID NO: 843185 - DNA, 33 bp, Homo sapien
cctcctttattttgccaatggtacatttgtaaa

SEQ ID NO: 843186 - DNA, 33 bp, Homo sapien
cctcctttattttgcctatggtacatttgtaaa

SEQ ID NO: 843187 - DNA, 33 bp, Homo sapien
tccccttaggctgctaagctatctacagtcagc

SEQ ID NO: 843188 - DNA, 33 bp, Homo sapien
tccccttaggctgctacgctatctacagtcagc

SEQ ID NO: 843189 - DNA, 33 bp, Homo sapien
agattggccacaaatcccctctgcattgacatt

SEQ ID NO: 843190 - DNA, 33 bp, Homo sapien
agattggccacaaatctcctctgcattgacatt

SEQ ID NO: 843191 - DNA, 33 bp, Homo sapien
gaaagaactgctaaaagtgagagacatcctgtt

SEQ ID NO: 843192 - DNA, 33 bp, Homo sapien
gaaagaactgctaaaattgagagacatcctgtt

SEQ ID NO: 843193 - DNA, 33 bp, Homo sapien
aagaacagaaggctcccacggtgtgcagaccat

SEQ ID NO: 843194 - DNA, 33 bp, Homo sapien
aagaacagaaggctcctacggtgtgcagaccat

SEQ ID NO: 843195 - DNA, 33 bp, Homo sapien
cctctcgaattttgccgagaaatttagcaagtg

SEQ ID NO: 843196 - DNA, 33 bp, Homo sapien
cctctcgaattttgcctagaaatttagcaagtg

SEQ ID NO: 843197 - DNA, 33 bp, Homo sapien
gaatcacctgaacctacgaagccaagactacag

SEQ ID NO: 843198 - DNA, 33 bp, Homo sapien
gaatcacctgaacctatgaagccaagactacag

SEQ ID NO: 843199 - DNA, 33 bp, Homo sapien
tgcatatccaccaccacagatttgcctgtgttc

SEQ ID NO: 843200 - DNA, 33 bp, Homo sapien
tgcatatccaccaccagagatttgcctgtgttc

SEQ ID NO: 843201 - DNA, 33 bp, Homo sapien
tctatttaggagagtaaatggatgacagcaact

SEQ ID NO: 843202 - DNA, 33 bp, Homo sapien
tctatttaggagagtacatggatgacagcaact

SEQ ID NO: 843203 - DNA, 33 bp, Homo sapien
accttaaaggcgtctcagaagaatgtagaacaa

SEQ ID NO: 843204 - DNA, 33 bp, Homo sapien
accttaaaggcgtctctgaagaatgtagaacaa

SEQ ID NO: 843205 - DNA, 33 bp, Homo sapien
gcacttgatgagaatccgagtaagtccatctct

SEQ ID NO: 843206 - DNA, 33 bp, Homo sapien
gcacttgatgagaatctgagtaagtccatctct

SEQ ID NO: 843207 - DNA, 33 bp, Homo sapien
ggcagagctgcagtacccattaaaaccgtggag

SEQ ID NO: 843208 - DNA, 33 bp, Homo sapien
ggcagagctgcagtactcattaaaaccgtggag

SEQ ID NO: 843209 - DNA, 33 bp, Homo sapien
aatcagcaaatacttagtaagcatctactgcat

SEQ ID NO: 843210 - DNA, 33 bp, Homo sapien
aatcagcaaatacttattaagcatctactgcat

SEQ ID NO: 843211 - DNA, 33 bp, Homo sapien
cccttgttcaaatctcaccatgcttacgtgcca

SEQ ID NO: 843212 - DNA, 33 bp, Homo sapien
cccttgttcaaatctcgccatgcttacgtgcca

SEQ ID NO: 843213 - DNA, 33 bp, Homo sapien
aatagaaggtcagtgacggtacagattcgtata

SEQ ID NO: 843214 - DNA, 33 bp, Homo sapien
aatagaaggtcagtgatggtacagattcgtata

SEQ ID NO: 843215 - DNA, 33 bp, Homo sapien
attccatactcctcgccaatgtgttatgtcaga

SEQ ID NO: 843216 - DNA, 33 bp, Homo sapien
attccatactcctcgctaatgtgttatgtcaga

SEQ ID NO: 843217 - DNA, 33 bp, Homo sapien
caaacatataggaaaaatgctatcaagtgggta

SEQ ID NO: 843218 - DNA, 33 bp, Homo sapien
caaacatataggaaaagtgctatcaagtgggta

SEQ ID NO: 843219 - DNA, 33 bp, Homo sapien
acccagggaccctaaagttgataacctttgtgt

SEQ ID NO: 843220 - DNA, 33 bp, Homo sapien
acccagggaccctaaatttgataacctttgtgt

SEQ ID NO: 843221 - DNA, 33 bp, Homo sapien
tcagggtctctatacaagatgtctctgctaagg

SEQ ID NO: 843222 - DNA, 33 bp, Homo sapien
tcagggtctctatacaggatgtctctgctaagg

SEQ ID NO: 843223 - DNA, 33 bp, Homo sapien
atttatcaggttcaagccttcctggcatccaac

SEQ ID NO: 843224 - DNA, 33 bp, Homo sapien
atttatcaggttcaagtcttcctggcatccaac

SEQ ID NO: 843225 - DNA, 33 bp, Homo sapien
agagtagatctgcccactaactggttagctcgg

SEQ ID NO: 843226 - DNA, 33 bp, Homo sapien
agagtagatctgcccattaactggttagctcgg

SEQ ID NO: 843227 - DNA, 33 bp, Homo sapien
gccacttgaccaaccaggagttttccacaatca

SEQ ID NO: 843228 - DNA, 33 bp, Homo sapien
gccacttgaccaaccatgagttttccacaatca

SEQ ID NO: 843229 - DNA, 33 bp, Homo sapien
aggaaaaatggagaaacggccttcacactctcc

SEQ ID NO: 843230 - DNA, 33 bp, Homo sapien
aggaaaaatggagaaatggccttcacactctcc

SEQ ID NO: 843231 - DNA, 33 bp, Homo sapien
caggaattttatctggcaaagatgctgcaagaa

SEQ ID NO: 843232 - DNA, 33 bp, Homo sapien
caggaattttatctggtaaagatgctgcaagaa

SEQ ID NO: 843233 - DNA, 33 bp, Homo sapien
tgaaacagaatgcaaacggcggaaaatgaatca

SEQ ID NO: 843234 - DNA, 33 bp, Homo sapien
tgaaacagaatgcaaatggcggaaaatgaatca

SEQ ID NO: 843235 - DNA, 33 bp, Homo sapien
caataactgtgttacccaagtccatagagagct

SEQ ID NO: 843236 - DNA, 33 bp, Homo sapien
caataactgtgttacctaagtccatagagagct

SEQ ID NO: 843237 - DNA, 33 bp, Homo sapien
cattgctttctgaaaacctatgtaaaagctctg

SEQ ID NO: 843238 - DNA, 33 bp, Homo sapien
cattgctttctgaaaatctatgtaaaagctctg

SEQ ID NO: 843239 - DNA, 33 bp, Homo sapien
aaaatgtgttgtaaaactatagcacagtgtcac

SEQ ID NO: 843240 - DNA, 33 bp, Homo sapien
aaaatgtgttgtaaaattatagcacagtgtcac

SEQ ID NO: 843241 - DNA, 33 bp, Homo sapien
cccacccttttgctaacgaacaatgctccagtg

SEQ ID NO: 843242 - DNA, 33 bp, Homo sapien
cccacccttttgctaatgaacaatgctccagtg

SEQ ID NO: 843243 - DNA, 33 bp, Homo sapien
caacactgagcctttaactgtgaggatcctgtg

SEQ ID NO: 843244 - DNA, 33 bp, Homo sapien
caacactgagcctttatctgtgaggatcctgtg

SEQ ID NO: 843245 - DNA, 33 bp, Homo sapien
ccctcccaggacaaccacaggcttcctgtctct

SEQ ID NO: 843246 - DNA, 33 bp, Homo sapien
ccctcccaggacaaccgcaggcttcctgtctct

SEQ ID NO: 843247 - DNA, 33 bp, Homo sapien
gaagtaacagttgagccgaaccctaaatcatga

SEQ ID NO: 843248 - DNA, 33 bp, Homo sapien
gaagtaacagttgagctgaaccctaaatcatga

SEQ ID NO: 843249 - DNA, 33 bp, Homo sapien
ggaagcagcacctagaaggaaaggcaatgtgat

SEQ ID NO: 843250 - DNA, 33 bp, Homo sapien
ggaagcagcacctagacggaaaggcaatgtgat

SEQ ID NO: 843251 - DNA, 33 bp, Homo sapien
cctctgcaattaatgaaattatctaggagttct

SEQ ID NO: 843252 - DNA, 33 bp, Homo sapien
cctctgcaattaatgagattatctaggagttct

SEQ ID NO: 843253 - DNA, 33 bp, Homo sapien
tttctataggaagccaaagtcttgtgaacacta

SEQ ID NO: 843254 - DNA, 33 bp, Homo sapien
tttctataggaagccagagtcttgtgaacacta

SEQ ID NO: 843255 - DNA, 33 bp, Homo sapien
gtgtagaggtcttacaaattttttagattgatt

SEQ ID NO: 843256 - DNA, 33 bp, Homo sapien
gtgtagaggtcttacacattttttagattgatt

SEQ ID NO: 843257 - DNA, 33 bp, Homo sapien
tttgaagacagtagcaagaggaatgaattagtg

SEQ ID NO: 843258 - DNA, 33 bp, Homo sapien
tttgaagacagtagcacgaggaatgaattagtg

SEQ ID NO: 843259 - DNA, 33 bp, Homo sapien
aagtttcaggaaagatcaagctagagagacatg

SEQ ID NO: 843260 - DNA, 33 bp, Homo sapien
aagtttcaggaaagatgaagctagagagacatg

SEQ ID NO: 843261 - DNA, 33 bp, Homo sapien
ctacctcagaactgatcaagcaacaagataagt

SEQ ID NO: 843262 - DNA, 33 bp, Homo sapien
ctacctcagaactgatgaagcaacaagataagt

SEQ ID NO: 843263 - DNA, 33 bp, Homo sapien
cagacctgtgctcagcaaaatactgtgcttttt

SEQ ID NO: 843264 - DNA, 33 bp, Homo sapien
cagacctgtgctcagcgaaatactgtgcttttt

SEQ ID NO: 843265 - DNA, 33 bp, Homo sapien
cctattaaacaatcataacatagcttctatggc

SEQ ID NO: 843266 - DNA, 33 bp, Homo sapien
cctattaaacaatcatgacatagcttctatggc

SEQ ID NO: 843267 - DNA, 33 bp, Homo sapien
tgaacccgtaagcttcaaaaagttgtcgcaggg

SEQ ID NO: 843268 - DNA, 33 bp, Homo sapien
tgaacccgtaagcttcgaaaagttgtcgcaggg

SEQ ID NO: 843269 - DNA, 33 bp, Homo sapien
gttagaagtaataccaagttgcggttcttataa

SEQ ID NO: 843270 - DNA, 33 bp, Homo sapien
gttagaagtaataccaggttgcggttcttataa

SEQ ID NO: 843271 - DNA, 33 bp, Homo sapien
tagccctctgtgagaacgcaggaatcaaatcag

SEQ ID NO: 843272 - DNA, 33 bp, Homo sapien
tagccctctgtgagaatgcaggaatcaaatcag

SEQ ID NO: 843273 - DNA, 33 bp, Homo sapien
gatatgcttaagggaaaagaaagaagcagaggg

SEQ ID NO: 843274 - DNA, 33 bp, Homo sapien
gatatgcttaagggaagagaaagaagcagaggg

SEQ ID NO: 843275 - DNA, 33 bp, Homo sapien
cctaactaaaacataacctccatgagtgcagag

SEQ ID NO: 843276 - DNA, 33 bp, Homo sapien
cctaactaaaacataagctccatgagtgcagag

SEQ ID NO: 843277 - DNA, 33 bp, Homo sapien
attctttcaaagataacgcaatcaaaggtgtcc

SEQ ID NO: 843278 - DNA, 33 bp, Homo sapien
attctttcaaagataaggcaatcaaaggtgtcc

SEQ ID NO: 843279 - DNA, 33 bp, Homo sapien
acaagggcccatagcacagcaactcttggcatg

SEQ ID NO: 843280 - DNA, 33 bp, Homo sapien
acaagggcccatagcatagcaactcttggcatg

SEQ ID NO: 843281 - DNA, 33 bp, Homo sapien
tcctgctggcagagggacaacagtagcacagaa

SEQ ID NO: 843282 - DNA, 33 bp, Homo sapien
tcctgctggcagagggtcaacagtagcacagaa

SEQ ID NO: 843283 - DNA, 33 bp, Homo sapien
ctgggtggatcagctccatgagggaccaaaaaa

SEQ ID NO: 843284 - DNA, 33 bp, Homo sapien
ctgggtggatcagctctatgagggaccaaaaaa

SEQ ID NO: 843285 - DNA, 33 bp, Homo sapien
atgaggataattcccaaagaggttcaatggtgt

SEQ ID NO: 843286 - DNA, 33 bp, Homo sapien
atgaggataattcccagagaggttcaatggtgt

SEQ ID NO: 843287 - DNA, 33 bp, Homo sapien
tattaagctaacgttaaattttcttattttcag

SEQ ID NO: 843288 - DNA, 33 bp, Homo sapien
tattaagctaacgttagattttcttattttcag

SEQ ID NO: 843289 - DNA, 33 bp, Homo sapien
tttgtttttaatgctaacactgaaaaataatac

SEQ ID NO: 843290 - DNA, 33 bp, Homo sapien
tttgtttttaatgctagcactgaaaaataatac

SEQ ID NO: 843291 - DNA, 33 bp, Homo sapien
aattcacaagttaaaacattgaacagtgtgaag

SEQ ID NO: 843292 - DNA, 33 bp, Homo sapien
aattcacaagttaaaatattgaacagtgtgaag

SEQ ID NO: 843293 - DNA, 33 bp, Homo sapien
tcatgagcccactaatcagcattctgtgaatcg

SEQ ID NO: 843294 - DNA, 33 bp, Homo sapien
tcatgagcccactaattagcattctgtgaatcg

SEQ ID NO: 843295 - DNA, 33 bp, Homo sapien
caaccctttccaggacacgggagggcttacacc

SEQ ID NO: 843296 - DNA, 33 bp, Homo sapien
caaccctttccaggacgcgggagggcttacacc

SEQ ID NO: 843297 - DNA, 33 bp, Homo sapien
tactttgtagatcaacaatccagtttttcagtt

SEQ ID NO: 843298 - DNA, 33 bp, Homo sapien
tactttgtagatcaaccatccagtttttcagtt

SEQ ID NO: 843299 - DNA, 33 bp, Homo sapien
ctctgacctagaaatgaatgtttggaatagaac

SEQ ID NO: 843300 - DNA, 33 bp, Homo sapien
ctctgacctagaaatggatgtttggaatagaac

SEQ ID NO: 843301 - DNA, 33 bp, Homo sapien
aaactgtgcacaaaagcaacacagggtgagaga

SEQ ID NO: 843302 - DNA, 33 bp, Homo sapien
aaactgtgcacaaaaggaacacagggtgagaga

SEQ ID NO: 843303 - DNA, 33 bp, Homo sapien
catactgggactttgaacatgagtctgaatcct

SEQ ID NO: 843304 - DNA, 33 bp, Homo sapien
catactgggactttgaccatgagtctgaatcct

SEQ ID NO: 843305 - DNA, 33 bp, Homo sapien
taggccaggtgatagacaataaatatgaaataa

SEQ ID NO: 843306 - DNA, 33 bp, Homo sapien
taggccaggtgatagataataaatatgaaataa

SEQ ID NO: 843307 - DNA, 33 bp, Homo sapien
aaatcctcacatccaacagaagtcataacagca

SEQ ID NO: 843308 - DNA, 33 bp, Homo sapien
aaatcctcacatccaatagaagtcataacagca

SEQ ID NO: 843309 - DNA, 33 bp, Homo sapien
aactgtcaagactctgaacaattggcataagct

SEQ ID NO: 843310 - DNA, 33 bp, Homo sapien
aactgtcaagactctgtacaattggcataagct

SEQ ID NO: 843311 - DNA, 33 bp, Homo sapien
gcacaaaagccattcaatagagtcacgtatttg

SEQ ID NO: 843312 - DNA, 33 bp, Homo sapien
gcacaaaagccattcagtagagtcacgtatttg

SEQ ID NO: 843313 - DNA, 33 bp, Homo sapien
aatggaccggttcacaaggtactacaaagtaat

SEQ ID NO: 843314 - DNA, 33 bp, Homo sapien
aatggaccggttcacagggtactacaaagtaat

SEQ ID NO: 843315 - DNA, 33 bp, Homo sapien
agtacaaaaagcgaaccagatatgcaacaaaat

SEQ ID NO: 843316 - DNA, 33 bp, Homo sapien
agtacaaaaagcgaactagatatgcaacaaaat

SEQ ID NO: 843317 - DNA, 33 bp, Homo sapien
tttattttttttctgaaggacaagtagagagcc

SEQ ID NO: 843318 - DNA, 33 bp, Homo sapien
tttattttttttctgagggacaagtagagagcc

SEQ ID NO: 843319 - DNA, 33 bp, Homo sapien
ccaccattgttttagaaaagtcaagatctaaca

SEQ ID NO: 843320 - DNA, 33 bp, Homo sapien
ccaccattgttttagagaagtcaagatctaaca

SEQ ID NO: 843321 - DNA, 33 bp, Homo sapien
gcatatgggtgcacagcatctagaagttgtctt

SEQ ID NO: 843322 - DNA, 33 bp, Homo sapien
gcatatgggtgcacagtatctagaagttgtctt

SEQ ID NO: 843323 - DNA, 33 bp, Homo sapien
cagggagcatgaagtcaattaaggacagcctgg

SEQ ID NO: 843324 - DNA, 33 bp, Homo sapien
cagggagcatgaagtcgattaaggacagcctgg

SEQ ID NO: 843325 - DNA, 33 bp, Homo sapien
tgatcaggtctgaggggaaaagatgagtttatc

SEQ ID NO: 843326 - DNA, 33 bp, Homo sapien
tgatcaggtctgagggtaaaagatgagtttatc

SEQ ID NO: 843327 - DNA, 33 bp, Homo sapien
caaatgccagatccaacggaaacttttcagtgc

SEQ ID NO: 843328 - DNA, 33 bp, Homo sapien
caaatgccagatccaatggaaacttttcagtgc

SEQ ID NO: 843329 - DNA, 33 bp, Homo sapien
cctgaaatggccagagaccaccctggtcctaac

SEQ ID NO: 843330 - DNA, 33 bp, Homo sapien
cctgaaatggccagagcccaccctggtcctaac

SEQ ID NO: 843331 - DNA, 33 bp, Homo sapien
agcatacacaggctgaacggcatgggtctcctg

SEQ ID NO: 843332 - DNA, 33 bp, Homo sapien
agcatacacaggctgagcggcatgggtctcctg

SEQ ID NO: 843333 - DNA, 33 bp, Homo sapien
ccatatggacactttacattttttaagcacaat

SEQ ID NO: 843334 - DNA, 33 bp, Homo sapien
ccatatggacactttatattttttaagcacaat

SEQ ID NO: 843335 - DNA, 33 bp, Homo sapien
cttaatgtagcactaacaaaaaggcaacatagt

SEQ ID NO: 843336 - DNA, 33 bp, Homo sapien
cttaatgtagcactaataaaaaggcaacatagt

SEQ ID NO: 843337 - DNA, 33 bp, Homo sapien
aaagggtcaagctaagaacatggatgtgatgga

SEQ ID NO: 843338 - DNA, 33 bp, Homo sapien
aaagggtcaagctaaggacatggatgtgatgga

SEQ ID NO: 843339 - DNA, 33 bp, Homo sapien
ccattaaaaacgaaaactatgtgcccctaaaga

SEQ ID NO: 843340 - DNA, 33 bp, Homo sapien
ccattaaaaacgaaaagtatgtgcccctaaaga

SEQ ID NO: 843341 - DNA, 33 bp, Homo sapien
aaatcttgaacactgaaaaaagcaggtacagat

SEQ ID NO: 843342 - DNA, 33 bp, Homo sapien
aaatcttgaacactgacaaaagcaggtacagat

SEQ ID NO: 843343 - DNA, 33 bp, Homo sapien
tttaatttcacaaagtgacctaataagaatcag

SEQ ID NO: 843344 - DNA, 33 bp, Homo sapien
tttaatttcacaaagttacctaataagaatcag

SEQ ID NO: 843345 - DNA, 33 bp, Homo sapien
tcatgtcatctgaagactaactcatttttaaaa

SEQ ID NO: 843346 - DNA, 33 bp, Homo sapien
tcatgtcatctgaagagtaactcatttttaaaa

SEQ ID NO: 843347 - DNA, 33 bp, Homo sapien
gcagctgcgctaaggaagtaactttcatttaaa

SEQ ID NO: 843348 - DNA, 33 bp, Homo sapien
gcagctgcgctaaggatgtaactttcatttaaa

SEQ ID NO: 843349 - DNA, 33 bp, Homo sapien
attagagtctctgataaatttagacaatcctga

SEQ ID NO: 843350 - DNA, 33 bp, Homo sapien
attagagtctctgatacatttagacaatcctga

SEQ ID NO: 843351 - DNA, 33 bp, Homo sapien
accattgctagacctaccattaagtaagcacac

SEQ ID NO: 843352 - DNA, 33 bp, Homo sapien
accattgctagacctatcattaagtaagcacac

SEQ ID NO: 843353 - DNA, 33 bp, Homo sapien
ataagttatagactaaaactggcatggaactga

SEQ ID NO: 843354 - DNA, 33 bp, Homo sapien
ataagttatagactaagactggcatggaactga

SEQ ID NO: 843355 - DNA, 33 bp, Homo sapien
cagcaaatccatgtagcagttaggttgttagaa

SEQ ID NO: 843356 - DNA, 33 bp, Homo sapien
cagcaaatccatgtagtagttaggttgttagaa

SEQ ID NO: 843357 - DNA, 33 bp, Homo sapien
aagtagctatgataccagaaaagaaccatatca

SEQ ID NO: 843358 - DNA, 33 bp, Homo sapien
aagtagctatgataccggaaaagaaccatatca

SEQ ID NO: 843359 - DNA, 33 bp, Homo sapien
tctaaatgagcaaaaaaccttgatcacctaggt

SEQ ID NO: 843360 - DNA, 33 bp, Homo sapien
tctaaatgagcaaaaagccttgatcacctaggt

SEQ ID NO: 843361 - DNA, 33 bp, Homo sapien
actggagtgactaacacatctgtagtgcacatt

SEQ ID NO: 843362 - DNA, 33 bp, Homo sapien
actggagtgactaacatatctgtagtgcacatt

SEQ ID NO: 843363 - DNA, 33 bp, Homo sapien
gcaaataaaaaccacaatgggatagcatttcac

SEQ ID NO: 843364 - DNA, 33 bp, Homo sapien
gcaaataaaaaccacagtgggatagcatttcac

SEQ ID NO: 843365 - DNA, 33 bp, Homo sapien
gaagtgaaggaaaggaaagagaaacttggagaa

SEQ ID NO: 843366 - DNA, 33 bp, Homo sapien
gaagtgaaggaaaggacagagaaacttggagaa

SEQ ID NO: 843367 - DNA, 33 bp, Homo sapien
tgacttttagggggcagattatatttgaggtat

SEQ ID NO: 843368 - DNA, 33 bp, Homo sapien
tgacttttagggggcatattatatttgaggtat

SEQ ID NO: 843369 - DNA, 33 bp, Homo sapien
tctcagctcggactgaagttgtgtttttccaga

SEQ ID NO: 843370 - DNA, 33 bp, Homo sapien
tctcagctcggactgacgttgtgtttttccaga

SEQ ID NO: 843371 - DNA, 33 bp, Homo sapien
atctctctggaccttaaaagagtgaatggcatt

SEQ ID NO: 843372 - DNA, 33 bp, Homo sapien
atctctctggaccttagaagagtgaatggcatt

SEQ ID NO: 843373 - DNA, 33 bp, Homo sapien
gtgttggaaagttcaaaccacacttaaaatata

SEQ ID NO: 843374 - DNA, 33 bp, Homo sapien
gtgttggaaagttcaagccacacttaaaatata

SEQ ID NO: 843375 - DNA, 33 bp, Homo sapien
tctgtgaccaacaagaaaaggacagtttctctg

SEQ ID NO: 843376 - DNA, 33 bp, Homo sapien
tctgtgaccaacaagagaaggacagtttctctg

SEQ ID NO: 843377 - DNA, 33 bp, Homo sapien
tgggagaagagggagaatatttgctgctgcaat

SEQ ID NO: 843378 - DNA, 33 bp, Homo sapien
tgggagaagagggagagtatttgctgctgcaat

SEQ ID NO: 843379 - DNA, 33 bp, Homo sapien
atcattatgatactcacgtaaccagtttttgtt

SEQ ID NO: 843380 - DNA, 33 bp, Homo sapien
atcattatgatactcatgtaaccagtttttgtt

SEQ ID NO: 843381 - DNA, 33 bp, Homo sapien
acaagctccataggcccctctcaaacatcgctg

SEQ ID NO: 843382 - DNA, 33 bp, Homo sapien
acaagctccataggcctctctcaaacatcgctg

SEQ ID NO: 843383 - DNA, 33 bp, Homo sapien
gtgacagatttgaagacagagtccccatacttt

SEQ ID NO: 843384 - DNA, 33 bp, Homo sapien
gtgacagatttgaagatagagtccccatacttt

SEQ ID NO: 843385 - DNA, 33 bp, Homo sapien
taaatttatgtagttccatgtcctgcacagatg

SEQ ID NO: 843386 - DNA, 33 bp, Homo sapien
taaatttatgtagttctatgtcctgcacagatg

SEQ ID NO: 843387 - DNA, 33 bp, Homo sapien
agatgtagatacaaaactgaaaagcatctagca

SEQ ID NO: 843388 - DNA, 33 bp, Homo sapien
agatgtagatacaaaattgaaaagcatctagca

SEQ ID NO: 843389 - DNA, 33 bp, Homo sapien
aaccacactgtccataaggaatgctatgttttg

SEQ ID NO: 843390 - DNA, 33 bp, Homo sapien
aaccacactgtccatagggaatgctatgttttg

SEQ ID NO: 843391 - DNA, 33 bp, Homo sapien
tagtgcaaatcatgaaagagagtagtggtgtga

SEQ ID NO: 843392 - DNA, 33 bp, Homo sapien
tagtgcaaatcatgaatgagagtagtggtgtga

SEQ ID NO: 843393 - DNA, 33 bp, Homo sapien
caaatgcaagagcaaaacctgttcaaccaagta

SEQ ID NO: 843394 - DNA, 33 bp, Homo sapien
caaatgcaagagcaaatcctgttcaaccaagta

SEQ ID NO: 843395 - DNA, 33 bp, Homo sapien
cgaattactattgctacgtagaaattgtcacca

SEQ ID NO: 843396 - DNA, 33 bp, Homo sapien
cgaattactattgctatgtagaaattgtcacca

SEQ ID NO: 843397 - DNA, 33 bp, Homo sapien
cagccactttagacaacagtgtggcaattcctc

SEQ ID NO: 843398 - DNA, 33 bp, Homo sapien
cagccactttagacaagagtgtggcaattcctc

SEQ ID NO: 843399 - DNA, 33 bp, Homo sapien
gttcttggtcagttaacgttggccccaatcctt

SEQ ID NO: 843400 - DNA, 33 bp, Homo sapien
gttcttggtcagttaatgttggccccaatcctt

SEQ ID NO: 843401 - DNA, 33 bp, Homo sapien
gactcaggagcatataaaactctttaatcctat

SEQ ID NO: 843402 - DNA, 33 bp, Homo sapien
gactcaggagcatatagaactctttaatcctat

SEQ ID NO: 843403 - DNA, 33 bp, Homo sapien
tgtgacaaaaatccacaatcaaagaattcatta

SEQ ID NO: 843404 - DNA, 33 bp, Homo sapien
tgtgacaaaaatccacgatcaaagaattcatta

SEQ ID NO: 843405 - DNA, 33 bp, Homo sapien
taagcttcttttttcacgcttttcaagttccat

SEQ ID NO: 843406 - DNA, 33 bp, Homo sapien
taagcttcttttttcatgcttttcaagttccat

SEQ ID NO: 843407 - DNA, 33 bp, Homo sapien
cagtttttaaaatgacaataaaccacatcattt

SEQ ID NO: 843408 - DNA, 33 bp, Homo sapien
cagtttttaaaatgacgataaaccacatcattt

SEQ ID NO: 843409 - DNA, 33 bp, Homo sapien
acactcgctaagcttcacatacgtaaataaaac

SEQ ID NO: 843410 - DNA, 33 bp, Homo sapien
acactcgctaagcttcgcatacgtaaataaaac

SEQ ID NO: 843411 - DNA, 33 bp, Homo sapien
caatgttaactctataaccacagtaaatttaca

SEQ ID NO: 843412 - DNA, 33 bp, Homo sapien
caatgttaactctatagccacagtaaatttaca

SEQ ID NO: 843413 - DNA, 33 bp, Homo sapien
aacattcaagccatacggaaagtaatatctaga

SEQ ID NO: 843414 - DNA, 33 bp, Homo sapien
aacattcaagccatactgaaagtaatatctaga

SEQ ID NO: 843415 - DNA, 33 bp, Homo sapien
tatttcacaatatttacccatgatccaattcct

SEQ ID NO: 843416 - DNA, 33 bp, Homo sapien
tatttcacaatatttatccatgatccaattcct

SEQ ID NO: 843417 - DNA, 33 bp, Homo sapien
taagtggtatggtagccattagagaaatgagaa

SEQ ID NO: 843418 - DNA, 33 bp, Homo sapien
taagtggtatggtagctattagagaaatgagaa

SEQ ID NO: 843419 - DNA, 33 bp, Homo sapien
aaacactaatccaaaccatttttgacatcagcc

SEQ ID NO: 843420 - DNA, 33 bp, Homo sapien
aaacactaatccaaactatttttgacatcagcc

SEQ ID NO: 843421 - DNA, 33 bp, Homo sapien
tcagaaatttttgatacggtgctcatctgtgaa

SEQ ID NO: 843422 - DNA, 33 bp, Homo sapien
tcagaaatttttgatatggtgctcatctgtgaa

SEQ ID NO: 843423 - DNA, 33 bp, Homo sapien
gatacaacagtgagctaaacacaaaaaaatccc

SEQ ID NO: 843424 - DNA, 33 bp, Homo sapien
gatacaacagtgagctgaacacaaaaaaatccc

SEQ ID NO: 843425 - DNA, 33 bp, Homo sapien
gaagtctattctaatacggcatcaaagccaaaa

SEQ ID NO: 843426 - DNA, 33 bp, Homo sapien
gaagtctattctaatatggcatcaaagccaaaa

SEQ ID NO: 843427 - DNA, 33 bp, Homo sapien
gaatgtttctaaagtacagcctgaactgctgcc

SEQ ID NO: 843428 - DNA, 33 bp, Homo sapien
gaatgtttctaaagtatagcctgaactgctgcc

SEQ ID NO: 843429 - DNA, 33 bp, Homo sapien
aggaccctactgctataagaaagctcaattcag

SEQ ID NO: 843430 - DNA, 33 bp, Homo sapien
aggaccctactgctatgagaaagctcaattcag

SEQ ID NO: 843431 - DNA, 33 bp, Homo sapien
gtaggcgatgtatgaaataaagtaaaaaaggca

SEQ ID NO: 843432 - DNA, 33 bp, Homo sapien
gtaggcgatgtatgaagtaaagtaaaaaaggca

SEQ ID NO: 843433 - DNA, 33 bp, Homo sapien
taaatttttttttcagccgaatatgataaaagc

SEQ ID NO: 843434 - DNA, 33 bp, Homo sapien
taaatttttttttcagtcgaatatgataaaagc

SEQ ID NO: 843435 - DNA, 33 bp, Homo sapien
tgctatttctgtagcaactagagtagtatgtgg

SEQ ID NO: 843436 - DNA, 33 bp, Homo sapien
tgctatttctgtagcacctagagtagtatgtgg

SEQ ID NO: 843437 - DNA, 33 bp, Homo sapien
ctgacatctcatcaacaatatgtgaaattccat

SEQ ID NO: 843438 - DNA, 33 bp, Homo sapien
ctgacatctcatcaacgatatgtgaaattccat

SEQ ID NO: 843439 - DNA, 33 bp, Homo sapien
agagatcactcttatcacaaagttctagtgtgg

SEQ ID NO: 843440 - DNA, 33 bp, Homo sapien
agagatcactcttatcgcaaagttctagtgtgg

SEQ ID NO: 843441 - DNA, 33 bp, Homo sapien
ttaagaatctgcctggaacagagctaagaatct

SEQ ID NO: 843442 - DNA, 33 bp, Homo sapien
ttaagaatctgcctggcacagagctaagaatct

SEQ ID NO: 843443 - DNA, 33 bp, Homo sapien
taaaagcgaataccaaatgattgccctttttgt

SEQ ID NO: 843444 - DNA, 33 bp, Homo sapien
taaaagcgaataccaagtgattgccctttttgt

SEQ ID NO: 843445 - DNA, 33 bp, Homo sapien
tattttagttgaaccaatacatgatgtgattcc

SEQ ID NO: 843446 - DNA, 33 bp, Homo sapien
tattttagttgaaccagtacatgatgtgattcc

SEQ ID NO: 843447 - DNA, 33 bp, Homo sapien
tcctggtcttgtaaaccatgtattcacagaaaa

SEQ ID NO: 843448 - DNA, 33 bp, Homo sapien
tcctggtcttgtaaactatgtattcacagaaaa

SEQ ID NO: 843449 - DNA, 33 bp, Homo sapien
tatatctatgactccaagggtattatttttcct

SEQ ID NO: 843450 - DNA, 33 bp, Homo sapien
tatatctatgactccaggggtattatttttcct

SEQ ID NO: 843451 - DNA, 33 bp, Homo sapien
tatgcaggcactttaactgttttgttttattga

SEQ ID NO: 843452 - DNA, 33 bp, Homo sapien
tatgcaggcactttaattgttttgttttattga

SEQ ID NO: 843453 - DNA, 33 bp, Homo sapien
ggctagcagtgaggaacaggatgttgaggttgt

SEQ ID NO: 843454 - DNA, 33 bp, Homo sapien
ggctagcagtgaggaagaggatgttgaggttgt

SEQ ID NO: 843455 - DNA, 33 bp, Homo sapien
agcctggaaagtcaaggattctcaagaactttg

SEQ ID NO: 843456 - DNA, 33 bp, Homo sapien
agcctggaaagtcaagtattctcaagaactttg

SEQ ID NO: 843457 - DNA, 33 bp, Homo sapien
atacgttagttgaacaaccataaatagatttac

SEQ ID NO: 843458 - DNA, 33 bp, Homo sapien
atacgttagttgaacatccataaatagatttac

SEQ ID NO: 843459 - DNA, 33 bp, Homo sapien
ctcccaacttggtggacattaactgatcctgta

SEQ ID NO: 843460 - DNA, 33 bp, Homo sapien
ctcccaacttggtggatattaactgatcctgta

SEQ ID NO: 843461 - DNA, 33 bp, Homo sapien
gagacttgcagaaagccacgtagcttcttccta

SEQ ID NO: 843462 - DNA, 33 bp, Homo sapien
gagacttgcagaaagcgacgtagcttcttccta

SEQ ID NO: 843463 - DNA, 33 bp, Homo sapien
aaatacctataatcgaggatcaatttaaaaatg

SEQ ID NO: 843464 - DNA, 33 bp, Homo sapien
aaatacctataatcgatgatcaatttaaaaatg

SEQ ID NO: 843465 - DNA, 33 bp, Homo sapien
aatctatttctgtgggaccagttcaaaacagtt

SEQ ID NO: 843466 - DNA, 33 bp, Homo sapien
aatctatttctgtgggtccagttcaaaacagtt

SEQ ID NO: 843467 - DNA, 33 bp, Homo sapien
tccaagttgttctttacagtggtcgtactaatt

SEQ ID NO: 843468 - DNA, 33 bp, Homo sapien
tccaagttgttctttatagtggtcgtactaatt

SEQ ID NO: 843469 - DNA, 33 bp, Homo sapien
agaaaatcacattcacaaaaagaaagacaggaa

SEQ ID NO: 843470 - DNA, 33 bp, Homo sapien
agaaaatcacattcacgaaaagaaagacaggaa

SEQ ID NO: 843471 - DNA, 33 bp, Homo sapien
ggtccctgaatccaggaataggctcttagacat

SEQ ID NO: 843472 - DNA, 33 bp, Homo sapien
ggtccctgaatccaggcataggctcttagacat

SEQ ID NO: 843473 - DNA, 33 bp, Homo sapien
gaaatccattgaaagacaaattcctacacaagg

SEQ ID NO: 843474 - DNA, 33 bp, Homo sapien
gaaatccattgaaagataaattcctacacaagg

SEQ ID NO: 843475 - DNA, 33 bp, Homo sapien
atacacactatatgtagaaacaccagtataccc

SEQ ID NO: 843476 - DNA, 33 bp, Homo sapien
atacacactatatgtataaacaccagtataccc

SEQ ID NO: 843477 - DNA, 33 bp, Homo sapien
agatgagtcatgcaccactaaagctggatgcat

SEQ ID NO: 843478 - DNA, 33 bp, Homo sapien
agatgagtcatgcaccgctaaagctggatgcat

SEQ ID NO: 843479 - DNA, 33 bp, Homo sapien
gttgtataaaaataaaggcacataagacctcaa

SEQ ID NO: 843480 - DNA, 33 bp, Homo sapien
gttgtataaaaataaatgcacataagacctcaa

SEQ ID NO: 843481 - DNA, 33 bp, Homo sapien
cagaaagtcaaggaaaaaggccacttctttagg

SEQ ID NO: 843482 - DNA, 33 bp, Homo sapien
cagaaagtcaaggaaagaggccacttctttagg

SEQ ID NO: 843483 - DNA, 33 bp, Homo sapien
attgcagctaataacactgtcattgtctcatag

SEQ ID NO: 843484 - DNA, 33 bp, Homo sapien
attgcagctaataacattgtcattgtctcatag

SEQ ID NO: 843485 - DNA, 33 bp, Homo sapien
aagtaaatagaatgagaaagactcagagacttc

SEQ ID NO: 843486 - DNA, 33 bp, Homo sapien
aagtaaatagaatgaggaagactcagagacttc

SEQ ID NO: 843487 - DNA, 33 bp, Homo sapien
aagatagaaccttgggaccactgaacacctggg

SEQ ID NO: 843488 - DNA, 33 bp, Homo sapien
aagatagaaccttggggccactgaacacctggg

SEQ ID NO: 843489 - DNA, 33 bp, Homo sapien
ctcagaagaaaagcggaaatgaaatactataac

SEQ ID NO: 843490 - DNA, 33 bp, Homo sapien
ctcagaagaaaagcgggaatgaaatactataac

SEQ ID NO: 843491 - DNA, 33 bp, Homo sapien
gtttcacaaatgcacaaagtagaggtgattaac

SEQ ID NO: 843492 - DNA, 33 bp, Homo sapien
gtttcacaaatgcacagagtagaggtgattaac

SEQ ID NO: 843493 - DNA, 33 bp, Homo sapien
cattcctgatattggaccttattgtcttcaccc

SEQ ID NO: 843494 - DNA, 33 bp, Homo sapien
cattcctgatattggatcttattgtcttcaccc

SEQ ID NO: 843495 - DNA, 33 bp, Homo sapien
ggactcctactgcaacagaagtgacacgtctgg

SEQ ID NO: 843496 - DNA, 33 bp, Homo sapien
ggactcctactgcaacggaagtgacacgtctgg

SEQ ID NO: 843497 - DNA, 33 bp, Homo sapien
gacacagaacattgtaaagaggatattatcttt

SEQ ID NO: 843498 - DNA, 33 bp, Homo sapien
gacacagaacattgtagagaggatattatcttt

SEQ ID NO: 843499 - DNA, 33 bp, Homo sapien
ctttaagggcttcttaacgatcagtaaatacct

SEQ ID NO: 843500 - DNA, 33 bp, Homo sapien
ctttaagggcttcttagcgatcagtaaatacct

SEQ ID NO: 843501 - DNA, 33 bp, Homo sapien
cttacacaactttgaaatgtagtttgaaataat

SEQ ID NO: 843502 - DNA, 33 bp, Homo sapien
cttacacaactttgaagtgtagtttgaaataat

SEQ ID NO: 843503 - DNA, 33 bp, Homo sapien
ctaaagcccagacacaaagtgattttccccagg

SEQ ID NO: 843504 - DNA, 33 bp, Homo sapien
ctaaagcccagacacagagtgattttccccagg

SEQ ID NO: 843505 - DNA, 33 bp, Homo sapien
gctcctctcgatagaaatatgcctctcatatca

SEQ ID NO: 843506 - DNA, 33 bp, Homo sapien
gctcctctcgatagaactatgcctctcatatca

SEQ ID NO: 843507 - DNA, 33 bp, Homo sapien
cacaactgctaggatacgatgagacctattctc

SEQ ID NO: 843508 - DNA, 33 bp, Homo sapien
cacaactgctaggatatgatgagacctattctc

SEQ ID NO: 843509 - DNA, 33 bp, Homo sapien
agtgtggtttatattaacttggaagaggcagtg

SEQ ID NO: 843510 - DNA, 33 bp, Homo sapien
agtgtggtttatattaccttggaagaggcagtg

SEQ ID NO: 843511 - DNA, 33 bp, Homo sapien
atgccagtttaggaaaagtagatagtatgccct

SEQ ID NO: 843512 - DNA, 33 bp, Homo sapien
atgccagtttaggaaatgtagatagtatgccct

SEQ ID NO: 843513 - DNA, 33 bp, Homo sapien
agatttttactgttcacaccaatgcagtaattt

SEQ ID NO: 843514 - DNA, 33 bp, Homo sapien
agatttttactgttcataccaatgcagtaattt

SEQ ID NO: 843515 - DNA, 33 bp, Homo sapien
cacactgggttttctcaattattcagggaatag

SEQ ID NO: 843516 - DNA, 33 bp, Homo sapien
cacactgggttttctcgattattcagggaatag

SEQ ID NO: 843517 - DNA, 33 bp, Homo sapien
ttcagatattcgtaacaaagagagcttcttttg

SEQ ID NO: 843518 - DNA, 33 bp, Homo sapien
ttcagatattcgtaacgaagagagcttcttttg

SEQ ID NO: 843519 - DNA, 33 bp, Homo sapien
tgctgaagacttacaacggcatttagactattc

SEQ ID NO: 843520 - DNA, 33 bp, Homo sapien
tgctgaagacttacaatggcatttagactattc

SEQ ID NO: 843521 - DNA, 33 bp, Homo sapien
atctctgctatccacaactacatagtctatgtt

SEQ ID NO: 843522 - DNA, 33 bp, Homo sapien
atctctgctatccacatctacatagtctatgtt

SEQ ID NO: 843523 - DNA, 33 bp, Homo sapien
gtgacaagacaaccaaaggattgggcaaacata

SEQ ID NO: 843524 - DNA, 33 bp, Homo sapien
gtgacaagacaaccaatggattgggcaaacata

SEQ ID NO: 843525 - DNA, 33 bp, Homo sapien
catacaagtcacacgaggcttcttaattgtttc

SEQ ID NO: 843526 - DNA, 33 bp, Homo sapien
catacaagtcacacgatgcttcttaattgtttc

SEQ ID NO: 843527 - DNA, 33 bp, Homo sapien
tcgtggctaatgacaaagtgaatccaggcaaaa

SEQ ID NO: 843528 - DNA, 33 bp, Homo sapien
tcgtggctaatgacaaggtgaatccaggcaaaa

SEQ ID NO: 843529 - DNA, 33 bp, Homo sapien
acctctcaagcaaaaacggatattgaagaagta

SEQ ID NO: 843530 - DNA, 33 bp, Homo sapien
acctctcaagcaaaaatggatattgaagaagta

SEQ ID NO: 843531 - DNA, 33 bp, Homo sapien
actatattacaatgaaagtaaatcacagtccat

SEQ ID NO: 843532 - DNA, 33 bp, Homo sapien
actatattacaatgaaggtaaatcacagtccat

SEQ ID NO: 843533 - DNA, 33 bp, Homo sapien
tatacagtggctatcaaagaatgacaattcctc

SEQ ID NO: 843534 - DNA, 33 bp, Homo sapien
tatacagtggctatcagagaatgacaattcctc

SEQ ID NO: 843535 - DNA, 33 bp, Homo sapien
caggctttggagaaacggctgcaagtgcttcca

SEQ ID NO: 843536 - DNA, 33 bp, Homo sapien
caggctttggagaaactgctgcaagtgcttcca

SEQ ID NO: 843537 - DNA, 33 bp, Homo sapien
agaaagtaaagctaccagacaggaattctttca

SEQ ID NO: 843538 - DNA, 33 bp, Homo sapien
agaaagtaaagctaccggacaggaattctttca

SEQ ID NO: 843539 - DNA, 33 bp, Homo sapien
gaagcatgaaggattaacataatagtagtgagg

SEQ ID NO: 843540 - DNA, 33 bp, Homo sapien
gaagcatgaaggattagcataatagtagtgagg

SEQ ID NO: 843541 - DNA, 33 bp, Homo sapien
gtacatttaatgaagaactgttgtatgatgaag

SEQ ID NO: 843542 - DNA, 33 bp, Homo sapien
gtacatttaatgaagacctgttgtatgatgaag

SEQ ID NO: 843543 - DNA, 33 bp, Homo sapien
ttgttaattgcctggactagaggattacagcat

SEQ ID NO: 843544 - DNA, 33 bp, Homo sapien
ttgttaattgcctggagtagaggattacagcat

SEQ ID NO: 843545 - DNA, 33 bp, Homo sapien
tgttcaattaattctgaacgaacaaggcataca

SEQ ID NO: 843546 - DNA, 33 bp, Homo sapien
tgttcaattaattctggacgaacaaggcataca

SEQ ID NO: 843547 - DNA, 33 bp, Homo sapien
aaaccaatgtggtacaactaagaatacacactt

SEQ ID NO: 843548 - DNA, 33 bp, Homo sapien
aaaccaatgtggtacacctaagaatacacactt

SEQ ID NO: 843549 - DNA, 33 bp, Homo sapien
ctggcaagatggccgaacaagaacagctctggt

SEQ ID NO: 843550 - DNA, 33 bp, Homo sapien
ctggcaagatggccgatcaagaacagctctggt

SEQ ID NO: 843551 - DNA, 33 bp, Homo sapien
acattaacttgcctcaaaaccctgctattctcc

SEQ ID NO: 843552 - DNA, 33 bp, Homo sapien
acattaacttgcctcagaaccctgctattctcc

SEQ ID NO: 843553 - DNA, 33 bp, Homo sapien
atatatattggatgaccgagaaaggatgctgtt

SEQ ID NO: 843554 - DNA, 33 bp, Homo sapien
atatatattggatgactgagaaaggatgctgtt

SEQ ID NO: 843555 - DNA, 33 bp, Homo sapien
ttgatgatggaagaaagtgccaaaaacatcaag

SEQ ID NO: 843556 - DNA, 33 bp, Homo sapien
ttgatgatggaagaaattgccaaaaacatcaag

SEQ ID NO: 843557 - DNA, 33 bp, Homo sapien
atatggctaatttgccacagaagtaaaatgtta

SEQ ID NO: 843558 - DNA, 33 bp, Homo sapien
atatggctaatttgccgcagaagtaaaatgtta

SEQ ID NO: 843559 - DNA, 33 bp, Homo sapien
tttcaaagatcagtaaagagaagacaacaattt

SEQ ID NO: 843560 - DNA, 33 bp, Homo sapien
tttcaaagatcagtaaggagaagacaacaattt

SEQ ID NO: 843561 - DNA, 33 bp, Homo sapien
tgattcatagaagttcaacatatcaacattcac

SEQ ID NO: 843562 - DNA, 33 bp, Homo sapien
tgattcatagaagttcgacatatcaacattcac

SEQ ID NO: 843563 - DNA, 33 bp, Homo sapien
cttttacttgcaatacagaaatttgcctctata

SEQ ID NO: 843564 - DNA, 33 bp, Homo sapien
cttttacttgcaatactgaaatttgcctctata

SEQ ID NO: 843565 - DNA, 33 bp, Homo sapien
tgtctccactattagaatatgtgcacttcaagg

SEQ ID NO: 843566 - DNA, 33 bp, Homo sapien
tgtctccactattagactatgtgcacttcaagg

SEQ ID NO: 843567 - DNA, 33 bp, Homo sapien
tgaaatagcatttttcacatgaaaatattaata

SEQ ID NO: 843568 - DNA, 33 bp, Homo sapien
tgaaatagcatttttcgcatgaaaatattaata

SEQ ID NO: 843569 - DNA, 33 bp, Homo sapien
tcttagatatattgaaacctagcttgattaata

SEQ ID NO: 843570 - DNA, 33 bp, Homo sapien
tcttagatatattgaaccctagcttgattaata

SEQ ID NO: 843571 - DNA, 33 bp, Homo sapien
caaagatggatagaaacagactccacaggaaag

SEQ ID NO: 843572 - DNA, 33 bp, Homo sapien
caaagatggatagaaatagactccacaggaaag

SEQ ID NO: 843573 - DNA, 33 bp, Homo sapien
taaaagaaccgtattacgtggatttccttgagg

SEQ ID NO: 843574 - DNA, 33 bp, Homo sapien
taaaagaaccgtattatgtggatttccttgagg

SEQ ID NO: 843575 - DNA, 33 bp, Homo sapien
tgtatgatattggacaagtctccattatctcag

SEQ ID NO: 843576 - DNA, 33 bp, Homo sapien
tgtatgatattggacaggtctccattatctcag

SEQ ID NO: 843577 - DNA, 33 bp, Homo sapien
ctggatttaatcatgaagaaaaatgaaatcgtg

SEQ ID NO: 843578 - DNA, 33 bp, Homo sapien
ctggatttaatcatgaggaaaaatgaaatcgtg

SEQ ID NO: 843579 - DNA, 33 bp, Homo sapien
agtgaatatgaacgaaagtgcagaggaaaatgt

SEQ ID NO: 843580 - DNA, 33 bp, Homo sapien
agtgaatatgaacgaatgtgcagaggaaaatgt

SEQ ID NO: 843581 - DNA, 33 bp, Homo sapien
taacagatactcataaatagatcgacaaccaga

SEQ ID NO: 843582 - DNA, 33 bp, Homo sapien
taacagatactcataactagatcgacaaccaga

SEQ ID NO: 843583 - DNA, 33 bp, Homo sapien
agcaataaaattgttacagttagatcacgagac

SEQ ID NO: 843584 - DNA, 33 bp, Homo sapien
agcaataaaattgttatagttagatcacgagac

SEQ ID NO: 843585 - DNA, 33 bp, Homo sapien
tcaacaatgtcttcgccgaaccatccaagtaaa

SEQ ID NO: 843586 - DNA, 33 bp, Homo sapien
tcaacaatgtcttcgctgaaccatccaagtaaa

SEQ ID NO: 843587 - DNA, 33 bp, Homo sapien
tccgccatcactagcccatatcactcctcactg

SEQ ID NO: 843588 - DNA, 33 bp, Homo sapien
tccgccatcactagcctatatcactcctcactg

SEQ ID NO: 843589 - DNA, 33 bp, Homo sapien
aaaacttagaaaataaaggtgtatggcctcctc

SEQ ID NO: 843590 - DNA, 33 bp, Homo sapien
aaaacttagaaaataagggtgtatggcctcctc

SEQ ID NO: 843591 - DNA, 33 bp, Homo sapien
gtgatttacagataagcataaatgcacactgct

SEQ ID NO: 843592 - DNA, 33 bp, Homo sapien
gtgatttacagataaggataaatgcacactgct

SEQ ID NO: 843593 - DNA, 33 bp, Homo sapien
aacttcttccatcataatagccctcaaaattta

SEQ ID NO: 843594 - DNA, 33 bp, Homo sapien
aacttcttccatcatagtagccctcaaaattta

SEQ ID NO: 843595 - DNA, 33 bp, Homo sapien
cacaaaatatgaaacaatcctttgcaacctaac

SEQ ID NO: 843596 - DNA, 33 bp, Homo sapien
cacaaaatatgaaacagtcctttgcaacctaac

SEQ ID NO: 843597 - DNA, 33 bp, Homo sapien
taaaaaaagaatttaaatagtttgcaatgagaa

SEQ ID NO: 843598 - DNA, 33 bp, Homo sapien
taaaaaaagaatttaattagtttgcaatgagaa

SEQ ID NO: 843599 - DNA, 33 bp, Homo sapien
tctgtgttttcataccaattaacaattcctgcc

SEQ ID NO: 843600 - DNA, 33 bp, Homo sapien
tctgtgttttcataccgattaacaattcctgcc

SEQ ID NO: 843601 - DNA, 33 bp, Homo sapien
ctatagccattttcacaacacagaagtagagct

SEQ ID NO: 843602 - DNA, 33 bp, Homo sapien
ctatagccattttcacgacacagaagtagagct

SEQ ID NO: 843603 - DNA, 33 bp, Homo sapien
taggaacatcatgaccaaatatgtaagtatgtc

SEQ ID NO: 843604 - DNA, 33 bp, Homo sapien
taggaacatcatgaccgaatatgtaagtatgtc

SEQ ID NO: 843605 - DNA, 33 bp, Homo sapien
accaacagtgtaaaaaatgtttctatgtctcca

SEQ ID NO: 843606 - DNA, 33 bp, Homo sapien
accaacagtgtaaaaagtgtttctatgtctcca

SEQ ID NO: 843607 - DNA, 33 bp, Homo sapien
ccttttgttcaaagcaaaaattgacatcaccat

SEQ ID NO: 843608 - DNA, 33 bp, Homo sapien
ccttttgttcaaagcagaaattgacatcaccat

SEQ ID NO: 843609 - DNA, 33 bp, Homo sapien
gtaaaaccactgtttagctgtcatacaaatatt

SEQ ID NO: 843610 - DNA, 33 bp, Homo sapien
gtaaaaccactgtttatctgtcatacaaatatt

SEQ ID NO: 843611 - DNA, 33 bp, Homo sapien
gacctcagtaacaaaaagacaccaatacctaac

SEQ ID NO: 843612 - DNA, 33 bp, Homo sapien
gacctcagtaacaaaacgacaccaatacctaac

SEQ ID NO: 843613 - DNA, 33 bp, Homo sapien
catgcactagaatcacaagaagggcttattaga

SEQ ID NO: 843614 - DNA, 33 bp, Homo sapien
catgcactagaatcaccagaagggcttattaga

SEQ ID NO: 843615 - DNA, 33 bp, Homo sapien
tattttttatggaccacaaataactggcatttc

SEQ ID NO: 843616 - DNA, 33 bp, Homo sapien
tattttttatggaccagaaataactggcatttc

SEQ ID NO: 843617 - DNA, 33 bp, Homo sapien
atataatgaaattacactgagctacacccctcc

SEQ ID NO: 843618 - DNA, 33 bp, Homo sapien
atataatgaaattacagtgagctacacccctcc

SEQ ID NO: 843619 - DNA, 33 bp, Homo sapien
cagctgcatttcagtgaaacaaaatggagacac

SEQ ID NO: 843620 - DNA, 33 bp, Homo sapien
cagctgcatttcagtggaacaaaatggagacac

SEQ ID NO: 843621 - DNA, 33 bp, Homo sapien
aacaccttaaatgtaacgtaatgcactggatta

SEQ ID NO: 843622 - DNA, 33 bp, Homo sapien
aacaccttaaatgtaatgtaatgcactggatta

SEQ ID NO: 843623 - DNA, 33 bp, Homo sapien
gaggtatggctatatacgaaaaggtgctcaata

SEQ ID NO: 843624 - DNA, 33 bp, Homo sapien
gaggtatggctatatatgaaaaggtgctcaata

SEQ ID NO: 843625 - DNA, 33 bp, Homo sapien
tgttttccataatgaccggaccattttatattc

SEQ ID NO: 843626 - DNA, 33 bp, Homo sapien
tgttttccataatgactggaccattttatattc

SEQ ID NO: 843627 - DNA, 33 bp, Homo sapien
catctccccatttcctcaatcccctagctcctg

SEQ ID NO: 843628 - DNA, 33 bp, Homo sapien
catctccccatttcctgaatcccctagctcctg

SEQ ID NO: 843629 - DNA, 33 bp, Homo sapien
aaatctagcagcacaacataaaggagaaagagg

SEQ ID NO: 843630 - DNA, 33 bp, Homo sapien
aaatctagcagcacaatataaaggagaaagagg

SEQ ID NO: 843631 - DNA, 33 bp, Homo sapien
tcataatttgagatacaataaacttggtgttta

SEQ ID NO: 843632 - DNA, 33 bp, Homo sapien
tcataatttgagatacgataaacttggtgttta

SEQ ID NO: 843633 - DNA, 33 bp, Homo sapien
ttgaaacacattaaataactgctgaagtgttca

SEQ ID NO: 843634 - DNA, 33 bp, Homo sapien
ttgaaacacattaaatgactgctgaagtgttca

SEQ ID NO: 843635 - DNA, 33 bp, Homo sapien
ctggatagcctaaaccagagaactttgttgttt

SEQ ID NO: 843636 - DNA, 33 bp, Homo sapien
ctggatagcctaaaccggagaactttgttgttt

SEQ ID NO: 843637 - DNA, 33 bp, Homo sapien
aggccttctagagcagacattatctaggttgag

SEQ ID NO: 843638 - DNA, 33 bp, Homo sapien
aggccttctagagcaggcattatctaggttgag

SEQ ID NO: 843639 - DNA, 33 bp, Homo sapien
gataggcttttttccaagttagtttctgaaaag

SEQ ID NO: 843640 - DNA, 33 bp, Homo sapien
gataggcttttttccacgttagtttctgaaaag

SEQ ID NO: 843641 - DNA, 33 bp, Homo sapien
acatatgaaagtgtctacctaagataggctttt

SEQ ID NO: 843642 - DNA, 33 bp, Homo sapien
acatatgaaagtgtctgcctaagataggctttt

SEQ ID NO: 843643 - DNA, 33 bp, Homo sapien
tttctaccatttccaacgctgctactctaatct

SEQ ID NO: 843644 - DNA, 33 bp, Homo sapien
tttctaccatttccaatgctgctactctaatct

SEQ ID NO: 843645 - DNA, 33 bp, Homo sapien
aaaatgggaagcattgcaggatattgagtagaa

SEQ ID NO: 843646 - DNA, 33 bp, Homo sapien
aaaatgggaagcattggaggatattgagtagaa

SEQ ID NO: 843647 - DNA, 33 bp, Homo sapien
ctgtgccttgtctgaactcctaacactcagaaa

SEQ ID NO: 843648 - DNA, 33 bp, Homo sapien
ctgtgccttgtctgaattcctaacactcagaaa

SEQ ID NO: 843649 - DNA, 33 bp, Homo sapien
attggcaacagatggagaagcaataaatgtaag

SEQ ID NO: 843650 - DNA, 33 bp, Homo sapien
attggcaacagatggataagcaataaatgtaag

SEQ ID NO: 843651 - DNA, 33 bp, Homo sapien
ataaaagtctgtgagcactagaaaaaggaactt

SEQ ID NO: 843652 - DNA, 33 bp, Homo sapien
ataaaagtctgtgagcgctagaaaaaggaactt

SEQ ID NO: 843653 - DNA, 33 bp, Homo sapien
gctccagatgggtatgaaagatgcctttggaaa

SEQ ID NO: 843654 - DNA, 33 bp, Homo sapien
gctccagatgggtatggaagatgcctttggaaa

SEQ ID NO: 843655 - DNA, 33 bp, Homo sapien
cctaatgtttgatgtgcactaccctataagatc

SEQ ID NO: 843656 - DNA, 33 bp, Homo sapien
cctaatgtttgatgtgtactaccctataagatc

SEQ ID NO: 843657 - DNA, 33 bp, Homo sapien
ttctacttcccaaagccagtaatctttcttatc

SEQ ID NO: 843658 - DNA, 33 bp, Homo sapien
ttctacttcccaaagcgagtaatctttcttatc

SEQ ID NO: 843659 - DNA, 33 bp, Homo sapien
tacttgtccatagaacacagctttgcagcatat

SEQ ID NO: 843660 - DNA, 33 bp, Homo sapien
tacttgtccatagaacgcagctttgcagcatat

SEQ ID NO: 843661 - DNA, 33 bp, Homo sapien
tcaattttctcatctgcagaataaaagtaacca

SEQ ID NO: 843662 - DNA, 33 bp, Homo sapien
tcaattttctcatctgtagaataaaagtaacca

SEQ ID NO: 843663 - DNA, 33 bp, Homo sapien
ataagataagaactagaattcctgtgcaggggt

SEQ ID NO: 843664 - DNA, 33 bp, Homo sapien
ataagataagaactaggattcctgtgcaggggt

SEQ ID NO: 843665 - DNA, 33 bp, Homo sapien
tttgaaaacctgggaaacattgtgctacagtat

SEQ ID NO: 843666 - DNA, 33 bp, Homo sapien
tttgaaaacctgggaagcattgtgctacagtat

SEQ ID NO: 843667 - DNA, 33 bp, Homo sapien
catttcacagatgagacgacactgagaagttag

SEQ ID NO: 843668 - DNA, 33 bp, Homo sapien
catttcacagatgagaggacactgagaagttag

SEQ ID NO: 843669 - DNA, 33 bp, Homo sapien
ttatgtcctgcatcctaacactataaagcaaga

SEQ ID NO: 843670 - DNA, 33 bp, Homo sapien
ttatgtcctgcatcctcacactataaagcaaga

SEQ ID NO: 843671 - DNA, 33 bp, Homo sapien
tgagtccgcagcactacgaatccttgtgagtta

SEQ ID NO: 843672 - DNA, 33 bp, Homo sapien
tgagtccgcagcactatgaatccttgtgagtta

SEQ ID NO: 843673 - DNA, 33 bp, Homo sapien
tacaaatggcatgaaaaaaaccataaatagtat

SEQ ID NO: 843674 - DNA, 33 bp, Homo sapien
tacaaatggcatgaaagaaaccataaatagtat

SEQ ID NO: 843675 - DNA, 33 bp, Homo sapien
ggcctagctgcttctgacagaaccaacattttg

SEQ ID NO: 843676 - DNA, 33 bp, Homo sapien
ggcctagctgcttctgtcagaaccaacattttg

SEQ ID NO: 843677 - DNA, 33 bp, Homo sapien
cactcagatacactcaatcaaaatgttggttct

SEQ ID NO: 843678 - DNA, 33 bp, Homo sapien
cactcagatacactcattcaaaatgttggttct

SEQ ID NO: 843679 - DNA, 33 bp, Homo sapien
aaaggagagactaagacgtagtaaagcagtggg

SEQ ID NO: 843680 - DNA, 33 bp, Homo sapien
aaaggagagactaagatgtagtaaagcagtggg

SEQ ID NO: 843681 - DNA, 33 bp, Homo sapien
ctttagtggttgaaggaaagtcgtgattcaaag

SEQ ID NO: 843682 - DNA, 33 bp, Homo sapien
ctttagtggttgaaggcaagtcgtgattcaaag

SEQ ID NO: 843683 - DNA, 33 bp, Homo sapien
atctgaccacaaaataccaaagtgcatttaata

SEQ ID NO: 843684 - DNA, 33 bp, Homo sapien
atctgaccacaaaatatcaaagtgcatttaata

SEQ ID NO: 843685 - DNA, 33 bp, Homo sapien
taaaataccatcttacacctttttttagggatt

SEQ ID NO: 843686 - DNA, 33 bp, Homo sapien
taaaataccatcttacgcctttttttagggatt

SEQ ID NO: 843687 - DNA, 33 bp, Homo sapien
agaagatttaccccgaaactagcctggagacct

SEQ ID NO: 843688 - DNA, 33 bp, Homo sapien
agaagatttaccccgagactagcctggagacct

SEQ ID NO: 843689 - DNA, 33 bp, Homo sapien
ttagtacacagttatacactctaggcaagaagt

SEQ ID NO: 843690 - DNA, 33 bp, Homo sapien
ttagtacacagttatatactctaggcaagaagt

SEQ ID NO: 843691 - DNA, 33 bp, Homo sapien
caagcttgaaatttcacagtcatttttgaaaca

SEQ ID NO: 843692 - DNA, 33 bp, Homo sapien
caagcttgaaatttcagagtcatttttgaaaca

SEQ ID NO: 843693 - DNA, 33 bp, Homo sapien
atatttgagcaaataactcagtggcctggtgcg

SEQ ID NO: 843694 - DNA, 33 bp, Homo sapien
atatttgagcaaataattcagtggcctggtgcg

SEQ ID NO: 843695 - DNA, 33 bp, Homo sapien
atgcatgctctatggactaaatatgagaaagta

SEQ ID NO: 843696 - DNA, 33 bp, Homo sapien
atgcatgctctatggattaaatatgagaaagta

SEQ ID NO: 843697 - DNA, 33 bp, Homo sapien
gtatatctggtgtgagactcaacaatttgcatc

SEQ ID NO: 843698 - DNA, 33 bp, Homo sapien
gtatatctggtgtgaggctcaacaatttgcatc

SEQ ID NO: 843699 - DNA, 33 bp, Homo sapien
caataatgaatggtggaaaaactgtcattcacc

SEQ ID NO: 843700 - DNA, 33 bp, Homo sapien
caataatgaatggtgggaaaactgtcattcacc

SEQ ID NO: 843701 - DNA, 33 bp, Homo sapien
taacagcaatatctaccccaaagtttagcattt

SEQ ID NO: 843702 - DNA, 33 bp, Homo sapien
taacagcaatatctactccaaagtttagcattt

SEQ ID NO: 843703 - DNA, 33 bp, Homo sapien
attgagttttctgttacgagagcatttgctttt

SEQ ID NO: 843704 - DNA, 33 bp, Homo sapien
attgagttttctgttatgagagcatttgctttt

SEQ ID NO: 843705 - DNA, 33 bp, Homo sapien
atttgcttaaccttacaaaattatgaaggatat

SEQ ID NO: 843706 - DNA, 33 bp, Homo sapien
atttgcttaaccttaccaaattatgaaggatat

SEQ ID NO: 843707 - DNA, 33 bp, Homo sapien
aaccctacaatgtcagaaaaattgttacctgtt

SEQ ID NO: 843708 - DNA, 33 bp, Homo sapien
aaccctacaatgtcaggaaaattgttacctgtt

SEQ ID NO: 843709 - DNA, 33 bp, Homo sapien
tatgaacctgacataggagcacccagattcata

SEQ ID NO: 843710 - DNA, 33 bp, Homo sapien
tatgaacctgacatagtagcacccagattcata

SEQ ID NO: 843711 - DNA, 33 bp, Homo sapien
agagtagctagctctcgcatacatttcttgtgt

SEQ ID NO: 843712 - DNA, 33 bp, Homo sapien
agagtagctagctctctcatacatttcttgtgt

SEQ ID NO: 843713 - DNA, 33 bp, Homo sapien
tgacagcacaaaataccggggatgcagagtagc

SEQ ID NO: 843714 - DNA, 33 bp, Homo sapien
tgacagcacaaaatactggggatgcagagtagc

SEQ ID NO: 843715 - DNA, 33 bp, Homo sapien
caaaataatctgtttcaccatcccagtggctat

SEQ ID NO: 843716 - DNA, 33 bp, Homo sapien
caaaataatctgtttcgccatcccagtggctat

SEQ ID NO: 843717 - DNA, 33 bp, Homo sapien
aaaacgaccaaaacaacgagtaggctaccacat

SEQ ID NO: 843718 - DNA, 33 bp, Homo sapien
aaaacgaccaaaacaatgagtaggctaccacat

SEQ ID NO: 843719 - DNA, 33 bp, Homo sapien
actccatcattactatgaaacctcaggcaaatt

SEQ ID NO: 843720 - DNA, 33 bp, Homo sapien
actccatcattactattaaacctcaggcaaatt

SEQ ID NO: 843721 - DNA, 33 bp, Homo sapien
aatgttggtgtcattacagattctccttcattt

SEQ ID NO: 843722 - DNA, 33 bp, Homo sapien
aatgttggtgtcattatagattctccttcattt

SEQ ID NO: 843723 - DNA, 33 bp, Homo sapien
ataataatggagagaaacatcaggtcaattaca

SEQ ID NO: 843724 - DNA, 33 bp, Homo sapien
ataataatggagagaaccatcaggtcaattaca

SEQ ID NO: 843725 - DNA, 33 bp, Homo sapien
taaactaatttttgacactacttcaaaacacaa

SEQ ID NO: 843726 - DNA, 33 bp, Homo sapien
taaactaatttttgacgctacttcaaaacacaa

SEQ ID NO: 843727 - DNA, 33 bp, Homo sapien
tgtattatttcttgcacagaacatctactgagt

SEQ ID NO: 843728 - DNA, 33 bp, Homo sapien
tgtattatttcttgcatagaacatctactgagt

SEQ ID NO: 843729 - DNA, 33 bp, Homo sapien
aagggagatcatatcaagggagatttgtttatt

SEQ ID NO: 843730 - DNA, 33 bp, Homo sapien
aagggagatcatatcacgggagatttgtttatt

SEQ ID NO: 843731 - DNA, 33 bp, Homo sapien
ttggatttattgagtcagaaatgatggcagaat

SEQ ID NO: 843732 - DNA, 33 bp, Homo sapien
ttggatttattgagtcggaaatgatggcagaat

SEQ ID NO: 843733 - DNA, 33 bp, Homo sapien
agttacagtaaaaaaaattgagaattctgattc

SEQ ID NO: 843734 - DNA, 33 bp, Homo sapien
agttacagtaaaaaaatttgagaattctgattc

SEQ ID NO: 843735 - DNA, 33 bp, Homo sapien
gagattacaagccaagacatacgttaatacatg

SEQ ID NO: 843736 - DNA, 33 bp, Homo sapien
gagattacaagccaaggcatacgttaatacatg

SEQ ID NO: 843737 - DNA, 33 bp, Homo sapien
ttgctggataggttcaatagtaggtcatagata

SEQ ID NO: 843738 - DNA, 33 bp, Homo sapien
ttgctggataggttcagtagtaggtcatagata

SEQ ID NO: 843739 - DNA, 33 bp, Homo sapien
aaaatgacttccgcaactaagagtcatttcagc

SEQ ID NO: 843740 - DNA, 33 bp, Homo sapien
aaaatgacttccgcaattaagagtcatttcagc

SEQ ID NO: 843741 - DNA, 33 bp, Homo sapien
aacttatgacgttgtgaaacgataaaactatgg

SEQ ID NO: 843742 - DNA, 33 bp, Homo sapien
aacttatgacgttgtggaacgataaaactatgg

SEQ ID NO: 843743 - DNA, 33 bp, Homo sapien
tataccacacgtctaaatcaagttctcacttct

SEQ ID NO: 843744 - DNA, 33 bp, Homo sapien
tataccacacgtctaagtcaagttctcacttct

SEQ ID NO: 843745 - DNA, 33 bp, Homo sapien
ggtcataacaaatctcaaaaaactcagaattta

SEQ ID NO: 843746 - DNA, 33 bp, Homo sapien
ggtcataacaaatctcgaaaaactcagaattta

SEQ ID NO: 843747 - DNA, 33 bp, Homo sapien
gccccaaggaagaagacggcctggtgaaataca

SEQ ID NO: 843748 - DNA, 33 bp, Homo sapien
gccccaaggaagaagatggcctggtgaaataca

SEQ ID NO: 843749 - DNA, 33 bp, Homo sapien
atagataacaatgaaacagacaggagttataga

SEQ ID NO: 843750 - DNA, 33 bp, Homo sapien
atagataacaatgaaagagacaggagttataga

SEQ ID NO: 843751 - DNA, 33 bp, Homo sapien
tatttttcagcttgcaatcagagttcttcccaa

SEQ ID NO: 843752 - DNA, 33 bp, Homo sapien
tatttttcagcttgcagtcagagttcttcccaa

SEQ ID NO: 843753 - DNA, 33 bp, Homo sapien
ggtcccgactgatgagaaaacttgtcaggagaa

SEQ ID NO: 843754 - DNA, 33 bp, Homo sapien
ggtcccgactgatgagcaaacttgtcaggagaa

SEQ ID NO: 843755 - DNA, 33 bp, Homo sapien
atgggatggaaaaatacataaaattgatctcac

SEQ ID NO: 843756 - DNA, 33 bp, Homo sapien
atgggatggaaaaatagataaaattgatctcac

SEQ ID NO: 843757 - DNA, 33 bp, Homo sapien
gtggagagggagaatccattaaaggtattatgc

SEQ ID NO: 843758 - DNA, 33 bp, Homo sapien
gtggagagggagaatctattaaaggtattatgc

SEQ ID NO: 843759 - DNA, 33 bp, Homo sapien
cttgatatttttaacaataggataagtgcatct

SEQ ID NO: 843760 - DNA, 33 bp, Homo sapien
cttgatatttttaacattaggataagtgcatct

SEQ ID NO: 843761 - DNA, 33 bp, Homo sapien
taaagccaagaatggaaggacacaaagttttgt

SEQ ID NO: 843762 - DNA, 33 bp, Homo sapien
taaagccaagaatggacggacacaaagttttgt

SEQ ID NO: 843763 - DNA, 33 bp, Homo sapien
ttgtcatttggctaaacatcaatccaatatacg

SEQ ID NO: 843764 - DNA, 33 bp, Homo sapien
ttgtcatttggctaaatatcaatccaatatacg

SEQ ID NO: 843765 - DNA, 33 bp, Homo sapien
aaagaacaggtataaaatgacaataatggctag

SEQ ID NO: 843766 - DNA, 33 bp, Homo sapien
aaagaacaggtataaagtgacaataatggctag

SEQ ID NO: 843767 - DNA, 33 bp, Homo sapien
ctgcactcagctgcaaatatttctttgatagaa

SEQ ID NO: 843768 - DNA, 33 bp, Homo sapien
ctgcactcagctgcaagtatttctttgatagaa

SEQ ID NO: 843769 - DNA, 33 bp, Homo sapien
agggaagcaagcaactcactctagaggactgtc

SEQ ID NO: 843770 - DNA, 33 bp, Homo sapien
agggaagcaagcaacttactctagaggactgtc

SEQ ID NO: 843771 - DNA, 33 bp, Homo sapien
gatgatgcctttaacaaagagagaggatgagaa

SEQ ID NO: 843772 - DNA, 33 bp, Homo sapien
gatgatgcctttaacagagagagaggatgagaa

SEQ ID NO: 843773 - DNA, 33 bp, Homo sapien
aacagcctctatataacctgctgagtcatctca

SEQ ID NO: 843774 - DNA, 33 bp, Homo sapien
aacagcctctatataagctgctgagtcatctca

SEQ ID NO: 843775 - DNA, 33 bp, Homo sapien
attactcattggaggccccttttatatttctct

SEQ ID NO: 843776 - DNA, 33 bp, Homo sapien
attactcattggaggctccttttatatttctct

SEQ ID NO: 843777 - DNA, 33 bp, Homo sapien
ttaaatcaatggacaccacaatccctgaaggcc

SEQ ID NO: 843778 - DNA, 33 bp, Homo sapien
ttaaatcaatggacactacaatccctgaaggcc

SEQ ID NO: 843779 - DNA, 33 bp, Homo sapien
agcaatgggcaggttcaagtatgtcaggcaccc

SEQ ID NO: 843780 - DNA, 33 bp, Homo sapien
agcaatgggcaggttccagtatgtcaggcaccc

SEQ ID NO: 843781 - DNA, 33 bp, Homo sapien
atgttctttacagtgaataggtgaccaagccat

SEQ ID NO: 843782 - DNA, 33 bp, Homo sapien
atgttctttacagtgagtaggtgaccaagccat

SEQ ID NO: 843783 - DNA, 33 bp, Homo sapien
actgcaaattaaactaccatgttttgcctgtca

SEQ ID NO: 843784 - DNA, 33 bp, Homo sapien
actgcaaattaaactatcatgttttgcctgtca

SEQ ID NO: 843785 - DNA, 33 bp, Homo sapien
tcattatgctcacaagcaaggaataaatttagt

SEQ ID NO: 843786 - DNA, 33 bp, Homo sapien
tcattatgctcacaagtaaggaataaatttagt

SEQ ID NO: 843787 - DNA, 33 bp, Homo sapien
tctatgccattaactacgaagtccgaagtccgt

SEQ ID NO: 843788 - DNA, 33 bp, Homo sapien
tctatgccattaactatgaagtccgaagtccgt

SEQ ID NO: 843789 - DNA, 33 bp, Homo sapien
aaaaagagacactctccacattgaagcatctta

SEQ ID NO: 843790 - DNA, 33 bp, Homo sapien
aaaaagagacactctctacattgaagcatctta

SEQ ID NO: 843791 - DNA, 33 bp, Homo sapien
ctggcatggtttctgaagcctgcatttactaat

SEQ ID NO: 843792 - DNA, 33 bp, Homo sapien
ctggcatggtttctgaggcctgcatttactaat

SEQ ID NO: 843793 - DNA, 33 bp, Homo sapien
gtttactcaataagtgcaatttaggatgccaag

SEQ ID NO: 843794 - DNA, 33 bp, Homo sapien
gtttactcaataagtgtaatttaggatgccaag

SEQ ID NO: 843795 - DNA, 33 bp, Homo sapien
gataacagtctgaaaacttaccgactcttaaaa

SEQ ID NO: 843796 - DNA, 33 bp, Homo sapien
gataacagtctgaaaatttaccgactcttaaaa

SEQ ID NO: 843797 - DNA, 33 bp, Homo sapien
gtgaagcccaagctcacgtgtctacaattcagc

SEQ ID NO: 843798 - DNA, 33 bp, Homo sapien
gtgaagcccaagctcatgtgtctacaattcagc

SEQ ID NO: 843799 - DNA, 33 bp, Homo sapien
attaatgcagttgttaaccctgaaagaagacct

SEQ ID NO: 843800 - DNA, 33 bp, Homo sapien
attaatgcagttgttacccctgaaagaagacct

SEQ ID NO: 843801 - DNA, 33 bp, Homo sapien
aatatgtggatcttgaataaagctgaattcatc

SEQ ID NO: 843802 - DNA, 33 bp, Homo sapien
aatatgtggatcttgagtaaagctgaattcatc

SEQ ID NO: 843803 - DNA, 33 bp, Homo sapien
aattcatcctgaaggaaaaaagagtagagctta

SEQ ID NO: 843804 - DNA, 33 bp, Homo sapien
aattcatcctgaaggagaaaagagtagagctta

SEQ ID NO: 843805 - DNA, 33 bp, Homo sapien
gctcctctaaaatctccatagtgaaaactcctg

SEQ ID NO: 843806 - DNA, 33 bp, Homo sapien
gctcctctaaaatctctatagtgaaaactcctg

SEQ ID NO: 843807 - DNA, 33 bp, Homo sapien
gctgctgttcaaagcaataggtcgagtgttctg

SEQ ID NO: 843808 - DNA, 33 bp, Homo sapien
gctgctgttcaaagcagtaggtcgagtgttctg

SEQ ID NO: 843809 - DNA, 33 bp, Homo sapien
gttccacttttgctataaattcaagctcaattt

SEQ ID NO: 843810 - DNA, 33 bp, Homo sapien
gttccacttttgctatgaattcaagctcaattt

SEQ ID NO: 843811 - DNA, 33 bp, Homo sapien
gttagaaaatgcaaaactccaggtgagtctgaa

SEQ ID NO: 843812 - DNA, 33 bp, Homo sapien
gttagaaaatgcaaaattccaggtgagtctgaa

SEQ ID NO: 843813 - DNA, 33 bp, Homo sapien
ggaccactttagtaccacacatcactctttcat

SEQ ID NO: 843814 - DNA, 33 bp, Homo sapien
ggaccactttagtaccgcacatcactctttcat

SEQ ID NO: 843815 - DNA, 33 bp, Homo sapien
aatgttaaactggcaggcaaggcaattaaaaaa

SEQ ID NO: 843816 - DNA, 33 bp, Homo sapien
aatgttaaactggcagtcaaggcaattaaaaaa

SEQ ID NO: 843817 - DNA, 33 bp, Homo sapien
ttctgaaatagctgaaaccatggtcaaaataaa

SEQ ID NO: 843818 - DNA, 33 bp, Homo sapien
ttctgaaatagctgaagccatggtcaaaataaa

SEQ ID NO: 843819 - DNA, 33 bp, Homo sapien
gctctgcctttcaacacgtgtgggtgagtgtca

SEQ ID NO: 843820 - DNA, 33 bp, Homo sapien
gctctgcctttcaacatgtgtgggtgagtgtca

SEQ ID NO: 843821 - DNA, 33 bp, Homo sapien
gactttggggtggatacatctttgtggctcact

SEQ ID NO: 843822 - DNA, 33 bp, Homo sapien
gactttggggtggatatatctttgtggctcact

SEQ ID NO: 843823 - DNA, 33 bp, Homo sapien
ttttgtaatggagaaaaataagtagaattatct

SEQ ID NO: 843824 - DNA, 33 bp, Homo sapien
ttttgtaatggagaaacataagtagaattatct

SEQ ID NO: 843825 - DNA, 33 bp, Homo sapien
tagttgagtacaaagacctgactaagaaagtta

SEQ ID NO: 843826 - DNA, 33 bp, Homo sapien
tagttgagtacaaagatctgactaagaaagtta

SEQ ID NO: 843827 - DNA, 33 bp, Homo sapien
accccactctgctatacaacattataacttatt

SEQ ID NO: 843828 - DNA, 33 bp, Homo sapien
accccactctgctatagaacattataacttatt

SEQ ID NO: 843829 - DNA, 33 bp, Homo sapien
attggactatctgggaaggcaactaatgataat

SEQ ID NO: 843830 - DNA, 33 bp, Homo sapien
attggactatctgggagggcaactaatgataat

SEQ ID NO: 843831 - DNA, 33 bp, Homo sapien
gagctagcacatccggcattgtcttccagaagt

SEQ ID NO: 843832 - DNA, 33 bp, Homo sapien
gagctagcacatccggtattgtcttccagaagt

SEQ ID NO: 843833 - DNA, 33 bp, Homo sapien
taagtcaaaaagatgacataagaagtgagggga

SEQ ID NO: 843834 - DNA, 33 bp, Homo sapien
taagtcaaaaagatgatataagaagtgagggga

SEQ ID NO: 843835 - DNA, 33 bp, Homo sapien
gcttttcctttgacaacaataaggctgatacat

SEQ ID NO: 843836 - DNA, 33 bp, Homo sapien
gcttttcctttgacaagaataaggctgatacat

SEQ ID NO: 843837 - DNA, 33 bp, Homo sapien
cttggacaccattcaaatagtgtctggaatatg

SEQ ID NO: 843838 - DNA, 33 bp, Homo sapien
cttggacaccattcaattagtgtctggaatatg

SEQ ID NO: 843839 - DNA, 33 bp, Homo sapien
tatgtaaaaccactcaactgatccctaaagatg

SEQ ID NO: 843840 - DNA, 33 bp, Homo sapien
tatgtaaaaccactcagctgatccctaaagatg

SEQ ID NO: 843841 - DNA, 33 bp, Homo sapien
aagagtaaataattgactaagtggataagatgt

SEQ ID NO: 843842 - DNA, 33 bp, Homo sapien
aagagtaaataattgattaagtggataagatgt

SEQ ID NO: 843843 - DNA, 33 bp, Homo sapien
caattagcctcaagaacagagaaacagatggaa

SEQ ID NO: 843844 - DNA, 33 bp, Homo sapien
caattagcctcaagaatagagaaacagatggaa

SEQ ID NO: 843845 - DNA, 33 bp, Homo sapien
tttaactttaatgcacaacattccatctgtttc

SEQ ID NO: 843846 - DNA, 33 bp, Homo sapien
tttaactttaatgcaccacattccatctgtttc

SEQ ID NO: 843847 - DNA, 33 bp, Homo sapien
atattctcacttgctgaataagaaaaactgttt

SEQ ID NO: 843848 - DNA, 33 bp, Homo sapien
atattctcacttgctgtataagaaaaactgttt

SEQ ID NO: 843849 - DNA, 33 bp, Homo sapien
ccagtaatatgctacacgtttgttggctaggag

SEQ ID NO: 843850 - DNA, 33 bp, Homo sapien
ccagtaatatgctacatgtttgttggctaggag

SEQ ID NO: 843851 - DNA, 33 bp, Homo sapien
gagttaatgtatgtaacgtacttggcacagagc

SEQ ID NO: 843852 - DNA, 33 bp, Homo sapien
gagttaatgtatgtaatgtacttggcacagagc

SEQ ID NO: 843853 - DNA, 33 bp, Homo sapien
tgctaacttactcaaaagtttagtcaggcagta

SEQ ID NO: 843854 - DNA, 33 bp, Homo sapien
tgctaacttactcaaacgtttagtcaggcagta

SEQ ID NO: 843855 - DNA, 33 bp, Homo sapien
tcagaggcatcagtaacagataacttgcatctc

SEQ ID NO: 843856 - DNA, 33 bp, Homo sapien
tcagaggcatcagtaatagataacttgcatctc

SEQ ID NO: 843857 - DNA, 33 bp, Homo sapien
gaacaaattcctgtgcaaagattgagaatgaaa

SEQ ID NO: 843858 - DNA, 33 bp, Homo sapien
gaacaaattcctgtgcgaagattgagaatgaaa

SEQ ID NO: 843859 - DNA, 33 bp, Homo sapien
atagtcctatgaaaacacattaagccattagcc

SEQ ID NO: 843860 - DNA, 33 bp, Homo sapien
atagtcctatgaaaacccattaagccattagcc

SEQ ID NO: 843861 - DNA, 33 bp, Homo sapien
aatggtccccaagcaactctttaacacagcagg

SEQ ID NO: 843862 - DNA, 33 bp, Homo sapien
aatggtccccaagcaagtctttaacacagcagg

SEQ ID NO: 843863 - DNA, 33 bp, Homo sapien
ccataaaagcattaccaaaaaataattttaaaa

SEQ ID NO: 843864 - DNA, 33 bp, Homo sapien
ccataaaagcattaccgaaaaataattttaaaa

SEQ ID NO: 843865 - DNA, 33 bp, Homo sapien
agttgggtatttgtataacacactaatggagac

SEQ ID NO: 843866 - DNA, 33 bp, Homo sapien
agttgggtatttgtatgacacactaatggagac

SEQ ID NO: 843867 - DNA, 33 bp, Homo sapien
acttaaaaggagttgacggaaattatactttta

SEQ ID NO: 843868 - DNA, 33 bp, Homo sapien
acttaaaaggagttgatggaaattatactttta

SEQ ID NO: 843869 - DNA, 33 bp, Homo sapien
aatacatgattttggaagtttttatgcttacct

SEQ ID NO: 843870 - DNA, 33 bp, Homo sapien
aatacatgattttggatgtttttatgcttacct

SEQ ID NO: 843871 - DNA, 33 bp, Homo sapien
aaatgtgtttaggaaaatgggttaggacacatc

SEQ ID NO: 843872 - DNA, 33 bp, Homo sapien
aaatgtgtttaggaaagtgggttaggacacatc

SEQ ID NO: 843873 - DNA, 33 bp, Homo sapien
ttttgtatatgttccaataagtcaacaaaaata

SEQ ID NO: 843874 - DNA, 33 bp, Homo sapien
ttttgtatatgttccagtaagtcaacaaaaata

SEQ ID NO: 843875 - DNA, 33 bp, Homo sapien
ctaaaagtttcaaatcactatcttctttatact

SEQ ID NO: 843876 - DNA, 33 bp, Homo sapien
ctaaaagtttcaaatccctatcttctttatact

SEQ ID NO: 843877 - DNA, 33 bp, Homo sapien
aaatcctcagtgcttgacaacatgaaacttatt

SEQ ID NO: 843878 - DNA, 33 bp, Homo sapien
aaatcctcagtgcttggcaacatgaaacttatt

SEQ ID NO: 843879 - DNA, 33 bp, Homo sapien
gatatgctatatgatcgagactcagctttatag

SEQ ID NO: 843880 - DNA, 33 bp, Homo sapien
gatatgctatatgatctagactcagctttatag

SEQ ID NO: 843881 - DNA, 33 bp, Homo sapien
gtgcaattctacctgagcatcttgctttcctct

SEQ ID NO: 843882 - DNA, 33 bp, Homo sapien
gtgcaattctacctgatcatcttgctttcctct

SEQ ID NO: 843883 - DNA, 33 bp, Homo sapien
agtgataagcatgaaagaatctcctacaagaat

SEQ ID NO: 843884 - DNA, 33 bp, Homo sapien
agtgataagcatgaaataatctcctacaagaat

SEQ ID NO: 843885 - DNA, 33 bp, Homo sapien
ataaagagaagccagacagaattagcacataca

SEQ ID NO: 843886 - DNA, 33 bp, Homo sapien
ataaagagaagccagatagaattagcacataca

SEQ ID NO: 843887 - DNA, 33 bp, Homo sapien
atcaatcaatggaatacgatagaaagcccagaa

SEQ ID NO: 843888 - DNA, 33 bp, Homo sapien
atcaatcaatggaatatgatagaaagcccagaa

SEQ ID NO: 843889 - DNA, 33 bp, Homo sapien
gatgaaagatgattccaataagtctacgattta

SEQ ID NO: 843890 - DNA, 33 bp, Homo sapien
gatgaaagatgattccgataagtctacgattta

SEQ ID NO: 843891 - DNA, 33 bp, Homo sapien
agtttctgtatgtacaactttgtgtttactttt

SEQ ID NO: 843892 - DNA, 33 bp, Homo sapien
agtttctgtatgtacagctttgtgtttactttt

SEQ ID NO: 843893 - DNA, 33 bp, Homo sapien
actgagagaggagatactaagcaaactgaccag

SEQ ID NO: 843894 - DNA, 33 bp, Homo sapien
actgagagaggagatattaagcaaactgaccag

SEQ ID NO: 843895 - DNA, 33 bp, Homo sapien
atatcctataagttgaagaaatatgtcaatgct

SEQ ID NO: 843896 - DNA, 33 bp, Homo sapien
atatcctataagttgacgaaatatgtcaatgct

SEQ ID NO: 843897 - DNA, 33 bp, Homo sapien
acaataacaacaaaaaacacctgctggaactta

SEQ ID NO: 843898 - DNA, 33 bp, Homo sapien
acaataacaacaaaaagcacctgctggaactta

SEQ ID NO: 843899 - DNA, 33 bp, Homo sapien
attaatgttcttcaggaaaattgtcctgtagtt

SEQ ID NO: 843900 - DNA, 33 bp, Homo sapien
attaatgttcttcagggaaattgtcctgtagtt

SEQ ID NO: 843901 - DNA, 33 bp, Homo sapien
atagtcatacattggaataaaattagtaataaa

SEQ ID NO: 843902 - DNA, 33 bp, Homo sapien
atagtcatacattggagtaaaattagtaataaa

SEQ ID NO: 843903 - DNA, 33 bp, Homo sapien
ggacaataattcacaagattactctacaatttc

SEQ ID NO: 843904 - DNA, 33 bp, Homo sapien
ggacaataattcacaatattactctacaatttc

SEQ ID NO: 843905 - DNA, 33 bp, Homo sapien
attcacaatttaaaaacggtctccatctttcca

SEQ ID NO: 843906 - DNA, 33 bp, Homo sapien
attcacaatttaaaaagggtctccatctttcca

SEQ ID NO: 843907 - DNA, 33 bp, Homo sapien
tacacttaatctcattcaagctctcaggttggt

SEQ ID NO: 843908 - DNA, 33 bp, Homo sapien
tacacttaatctcattgaagctctcaggttggt

SEQ ID NO: 843909 - DNA, 33 bp, Homo sapien
cattgatgatggcaacagttcgtcttccattag

SEQ ID NO: 843910 - DNA, 33 bp, Homo sapien
cattgatgatggcaacggttcgtcttccattag

SEQ ID NO: 843911 - DNA, 33 bp, Homo sapien
aaatataatctatcgcaataccctttttatata

SEQ ID NO: 843912 - DNA, 33 bp, Homo sapien
aaatataatctatcgcgataccctttttatata

SEQ ID NO: 843913 - DNA, 33 bp, Homo sapien
tctctgttaagacatactaaatcaagttttatg

SEQ ID NO: 843914 - DNA, 33 bp, Homo sapien
tctctgttaagacatattaaatcaagttttatg

SEQ ID NO: 843915 - DNA, 33 bp, Homo sapien
atgcatatgtgcttataaaatgcaacataaaaa

SEQ ID NO: 843916 - DNA, 33 bp, Homo sapien
atgcatatgtgcttatgaaatgcaacataaaaa

SEQ ID NO: 843917 - DNA, 33 bp, Homo sapien
agcaagagatccttcaccgatccaaatacctgg

SEQ ID NO: 843918 - DNA, 33 bp, Homo sapien
agcaagagatccttcatcgatccaaatacctgg

SEQ ID NO: 843919 - DNA, 33 bp, Homo sapien
tttcgaccattttgaaatcagtcattaacgtat

SEQ ID NO: 843920 - DNA, 33 bp, Homo sapien
tttcgaccattttgaagtcagtcattaacgtat

SEQ ID NO: 843921 - DNA, 33 bp, Homo sapien
tttttaatttcaggtaaaagtattccacctcat

SEQ ID NO: 843922 - DNA, 33 bp, Homo sapien
tttttaatttcaggtagaagtattccacctcat

SEQ ID NO: 843923 - DNA, 33 bp, Homo sapien
actgttagcagtggaagagattcgagttaccac

SEQ ID NO: 843924 - DNA, 33 bp, Homo sapien
actgttagcagtggaatagattcgagttaccac

SEQ ID NO: 843925 - DNA, 33 bp, Homo sapien
aagagctaagaggtcacagtatgtgtggaaata

SEQ ID NO: 843926 - DNA, 33 bp, Homo sapien
aagagctaagaggtcatagtatgtgtggaaata

SEQ ID NO: 843927 - DNA, 33 bp, Homo sapien
atcgatgatgctttaagaccatgacacatcaat

SEQ ID NO: 843928 - DNA, 33 bp, Homo sapien
atcgatgatgctttaataccatgacacatcaat

SEQ ID NO: 843929 - DNA, 33 bp, Homo sapien
agtatcatgtggaagacgttaaaaatgcaaatt

SEQ ID NO: 843930 - DNA, 33 bp, Homo sapien
agtatcatgtggaagatgttaaaaatgcaaatt

SEQ ID NO: 843931 - DNA, 33 bp, Homo sapien
ctgaatgatgcatgggaattaacttgtggaaga

SEQ ID NO: 843932 - DNA, 33 bp, Homo sapien
ctgaatgatgcatggggattaacttgtggaaga

SEQ ID NO: 843933 - DNA, 33 bp, Homo sapien
acacatgaaaacagaactgtagtcattagatta

SEQ ID NO: 843934 - DNA, 33 bp, Homo sapien
acacatgaaaacagaattgtagtcattagatta

SEQ ID NO: 843935 - DNA, 33 bp, Homo sapien
aaagaggttgttaagaaatgttggataaaccaa

SEQ ID NO: 843936 - DNA, 33 bp, Homo sapien
aaagaggttgttaagagatgttggataaaccaa

SEQ ID NO: 843937 - DNA, 33 bp, Homo sapien
cgtatccagttgtacacgctaattgcaggtgtc

SEQ ID NO: 843938 - DNA, 33 bp, Homo sapien
cgtatccagttgtacatgctaattgcaggtgtc

SEQ ID NO: 843939 - DNA, 33 bp, Homo sapien
ggttttgtcgtggtaacggctttacgtggagta

SEQ ID NO: 843940 - DNA, 33 bp, Homo sapien
ggttttgtcgtggtaatggctttacgtggagta

SEQ ID NO: 843941 - DNA, 33 bp, Homo sapien
aatttataagtgaaaggcacctgaagttaattg

SEQ ID NO: 843942 - DNA, 33 bp, Homo sapien
aatttataagtgaaagtcacctgaagttaattg

SEQ ID NO: 843943 - DNA, 33 bp, Homo sapien
tacgtctgcttgagcaaggatcagtggattcta

SEQ ID NO: 843944 - DNA, 33 bp, Homo sapien
tacgtctgcttgagcacggatcagtggattcta

SEQ ID NO: 843945 - DNA, 33 bp, Homo sapien
aacctgtgattgagaaacatgatatagttggtt

SEQ ID NO: 843946 - DNA, 33 bp, Homo sapien
aacctgtgattgagaaccatgatatagttggtt

SEQ ID NO: 843947 - DNA, 33 bp, Homo sapien
ggagaagttttagaaacctgactgaagtttggc

SEQ ID NO: 843948 - DNA, 33 bp, Homo sapien
ggagaagttttagaaatctgactgaagtttggc

SEQ ID NO: 843949 - DNA, 33 bp, Homo sapien
ttaacaaaatactgacgatatgccggacatatt

SEQ ID NO: 843950 - DNA, 33 bp, Homo sapien
ttaacaaaatactgactatatgccggacatatt

SEQ ID NO: 843951 - DNA, 33 bp, Homo sapien
aatatcttctctgccaagtcattaacttaatga

SEQ ID NO: 843952 - DNA, 33 bp, Homo sapien
aatatcttctctgccaggtcattaacttaatga

SEQ ID NO: 843953 - DNA, 33 bp, Homo sapien
aagggaggactaagaacgtttgcagaccaggta

SEQ ID NO: 843954 - DNA, 33 bp, Homo sapien
aagggaggactaagaatgtttgcagaccaggta

SEQ ID NO: 843955 - DNA, 33 bp, Homo sapien
gtttaatgaattctgaagtttaccccccaaata

SEQ ID NO: 843956 - DNA, 33 bp, Homo sapien
gtttaatgaattctgacgtttaccccccaaata

SEQ ID NO: 843957 - DNA, 33 bp, Homo sapien
atattatgtatgctataaagtacaaaaaatatt

SEQ ID NO: 843958 - DNA, 33 bp, Homo sapien
atattatgtatgctattaagtacaaaaaatatt

SEQ ID NO: 843959 - DNA, 33 bp, Homo sapien
atttggagaaaactcgcatgtctagaaaacata

SEQ ID NO: 843960 - DNA, 33 bp, Homo sapien
atttggagaaaactcgtatgtctagaaaacata

SEQ ID NO: 843961 - DNA, 33 bp, Homo sapien
atcctatggctttctacgaatacgtactgaagt

SEQ ID NO: 843962 - DNA, 33 bp, Homo sapien
atcctatggctttctatgaatacgtactgaagt

SEQ ID NO: 843963 - DNA, 33 bp, Homo sapien
gtaagctgccatagaaaggtctaataattattt

SEQ ID NO: 843964 - DNA, 33 bp, Homo sapien
gtaagctgccatagaatggtctaataattattt

SEQ ID NO: 843965 - DNA, 33 bp, Homo sapien
aaagccagacagtatccaatgttggtaaagatg

SEQ ID NO: 843966 - DNA, 33 bp, Homo sapien
aaagccagacagtatctaatgttggtaaagatg

SEQ ID NO: 843967 - DNA, 33 bp, Homo sapien
tggaagacgaactcataaaatatggattattat

SEQ ID NO: 843968 - DNA, 33 bp, Homo sapien
tggaagacgaactcattaaatatggattattat

SEQ ID NO: 843969 - DNA, 33 bp, Homo sapien
tactggaggtttttaaacagggatcatttgatt

SEQ ID NO: 843970 - DNA, 33 bp, Homo sapien
tactggaggtttttaatcagggatcatttgatt

SEQ ID NO: 843971 - DNA, 33 bp, Homo sapien
gtaattccaaaaattaaagatatggatgtttct

SEQ ID NO: 843972 - DNA, 33 bp, Homo sapien
gtaattccaaaaattacagatatggatgtttct

SEQ ID NO: 843973 - DNA, 33 bp, Homo sapien
atccctaaagacaaaaactaattgatcacctat

SEQ ID NO: 843974 - DNA, 33 bp, Homo sapien
atccctaaagacaaaatctaattgatcacctat

SEQ ID NO: 843975 - DNA, 33 bp, Homo sapien
tgaattccatacaacaatctctggtcccataaa

SEQ ID NO: 843976 - DNA, 33 bp, Homo sapien
tgaattccatacaacagtctctggtcccataaa

SEQ ID NO: 843977 - DNA, 33 bp, Homo sapien
gaaaaacacataagaactgcaagagatcacttt

SEQ ID NO: 843978 - DNA, 33 bp, Homo sapien
gaaaaacacataagaagtgcaagagatcacttt

SEQ ID NO: 843979 - DNA, 33 bp, Homo sapien
taacattattcagcttaaagagatcttgcaatt

SEQ ID NO: 843980 - DNA, 33 bp, Homo sapien
taacattattcagcttgaagagatcttgcaatt

SEQ ID NO: 843981 - DNA, 33 bp, Homo sapien
aatgtgatggttctcaactatgttcccttaact

SEQ ID NO: 843982 - DNA, 33 bp, Homo sapien
aatgtgatggttctcagctatgttcccttaact

SEQ ID NO: 843983 - DNA, 33 bp, Homo sapien
ttggccgcttgtcaaagaagagaattcagttca

SEQ ID NO: 843984 - DNA, 33 bp, Homo sapien
ttggccgcttgtcaaataagagaattcagttca

SEQ ID NO: 843985 - DNA, 33 bp, Homo sapien
gacttctgctcttctccaacaatctattacagt

SEQ ID NO: 843986 - DNA, 33 bp, Homo sapien
gacttctgctcttctctaacaatctattacagt

SEQ ID NO: 843987 - DNA, 33 bp, Homo sapien
gtgaaagaaatagggacgatgaccacttcagac

SEQ ID NO: 843988 - DNA, 33 bp, Homo sapien
gtgaaagaaatagggatgatgaccacttcagac

SEQ ID NO: 843989 - DNA, 33 bp, Homo sapien
aatcctgtagccagaaataatagcacatatttg

SEQ ID NO: 843990 - DNA, 33 bp, Homo sapien
aatcctgtagccagaagtaatagcacatatttg

SEQ ID NO: 843991 - DNA, 33 bp, Homo sapien
aaaacatgatataaaacaagacgtgaagtgttt

SEQ ID NO: 843992 - DNA, 33 bp, Homo sapien
aaaacatgatataaaagaagacgtgaagtgttt

SEQ ID NO: 843993 - DNA, 33 bp, Homo sapien
tgtgttgcttacagaaaggtgtattccacatga

SEQ ID NO: 843994 - DNA, 33 bp, Homo sapien
tgtgttgcttacagaatggtgtattccacatga

SEQ ID NO: 843995 - DNA, 33 bp, Homo sapien
ttggcaacttggatacaccaaaaagaatctgca

SEQ ID NO: 843996 - DNA, 33 bp, Homo sapien
ttggcaacttggatacgccaaaaagaatctgca

SEQ ID NO: 843997 - DNA, 33 bp, Homo sapien
aaatattgtatgatgaagttgctaacatctatg

SEQ ID NO: 843998 - DNA, 33 bp, Homo sapien
aaatattgtatgatgacgttgctaacatctatg

SEQ ID NO: 843999 - DNA, 33 bp, Homo sapien
cctttacctgcagtaacggcttggggtcaccag

SEQ ID NO: 844000 - DNA, 33 bp, Homo sapien
cctttacctgcagtaatggcttggggtcaccag

SEQ ID NO: 844001 - DNA, 33 bp, Homo sapien
attacctgaagtgtccagcccagatcattggga

SEQ ID NO: 844002 - DNA, 33 bp, Homo sapien
attacctgaagtgtccggcccagatcattggga

SEQ ID NO: 844003 - DNA, 33 bp, Homo sapien
ctgagaaaagtctctgaaactacattggtttaa

SEQ ID NO: 844004 - DNA, 33 bp, Homo sapien
ctgagaaaagtctctggaactacattggtttaa

SEQ ID NO: 844005 - DNA, 33 bp, Homo sapien
tttgtggacacctggactaaacatggttatcct

SEQ ID NO: 844006 - DNA, 33 bp, Homo sapien
tttgtggacacctggattaaacatggttatcct

SEQ ID NO: 844007 - DNA, 33 bp, Homo sapien
catatgaaattagaacacagaatacctggaaga

SEQ ID NO: 844008 - DNA, 33 bp, Homo sapien
catatgaaattagaacgcagaatacctggaaga

SEQ ID NO: 844009 - DNA, 33 bp, Homo sapien
agatcatccaatggaaaggatttgatgctgtca

SEQ ID NO: 844010 - DNA, 33 bp, Homo sapien
agatcatccaatggaagggatttgatgctgtca

SEQ ID NO: 844011 - DNA, 33 bp, Homo sapien
gtgtacacatttttaacacacgctcagaactgt

SEQ ID NO: 844012 - DNA, 33 bp, Homo sapien
gtgtacacatttttaatacacgctcagaactgt

SEQ ID NO: 844013 - DNA, 33 bp, Homo sapien
gttcctctgatttcaactgcatgacacattcca

SEQ ID NO: 844014 - DNA, 33 bp, Homo sapien
gttcctctgatttcaattgcatgacacattcca

SEQ ID NO: 844015 - DNA, 33 bp, Homo sapien
caactcttgtcaaaaaatgaataggaactctca

SEQ ID NO: 844016 - DNA, 33 bp, Homo sapien
caactcttgtcaaaaattgaataggaactctca

SEQ ID NO: 844017 - DNA, 33 bp, Homo sapien
tggagtagctttgtaactgcatttgttcagggc

SEQ ID NO: 844018 - DNA, 33 bp, Homo sapien
tggagtagctttgtaattgcatttgttcagggc

SEQ ID NO: 844019 - DNA, 33 bp, Homo sapien
agaaataagcattttaaaagtcgtcccagatca

SEQ ID NO: 844020 - DNA, 33 bp, Homo sapien
agaaataagcattttagaagtcgtcccagatca

SEQ ID NO: 844021 - DNA, 33 bp, Homo sapien
tgtaaagcacagcaaaaaaaatctgttttgtag

SEQ ID NO: 844022 - DNA, 33 bp, Homo sapien
tgtaaagcacagcaaagaaaatctgttttgtag

SEQ ID NO: 844023 - DNA, 33 bp, Homo sapien
ctcagtagtaagaagacgataacgaagttccag

SEQ ID NO: 844024 - DNA, 33 bp, Homo sapien
ctcagtagtaagaagatgataacgaagttccag

SEQ ID NO: 844025 - DNA, 33 bp, Homo sapien
acttgggtccctgcccagcttttgcactcacta

SEQ ID NO: 844026 - DNA, 33 bp, Homo sapien
acttgggtccctgcccggcttttgcactcacta

SEQ ID NO: 844027 - DNA, 33 bp, Homo sapien
ataagtactgctagaaaatactcaaaactgggc

SEQ ID NO: 844028 - DNA, 33 bp, Homo sapien
ataagtactgctagaacatactcaaaactgggc

SEQ ID NO: 844029 - DNA, 33 bp, Homo sapien
agtgatgtttcaaagaacagagtcaagtttcag

SEQ ID NO: 844030 - DNA, 33 bp, Homo sapien
agtgatgtttcaaagatcagagtcaagtttcag

SEQ ID NO: 844031 - DNA, 33 bp, Homo sapien
gtgttagctaaaagaaagttcaattttacttgt

SEQ ID NO: 844032 - DNA, 33 bp, Homo sapien
gtgttagctaaaagaatgttcaattttacttgt

SEQ ID NO: 844033 - DNA, 33 bp, Homo sapien
ttatttcatattcttcaaagtaggtgggatatt

SEQ ID NO: 844034 - DNA, 33 bp, Homo sapien
ttatttcatattcttcgaagtaggtgggatatt

SEQ ID NO: 844035 - DNA, 33 bp, Homo sapien
gaggcgattaaatgaaagtgttaggatgtgagg

SEQ ID NO: 844036 - DNA, 33 bp, Homo sapien
gaggcgattaaatgaaggtgttaggatgtgagg

SEQ ID NO: 844037 - DNA, 33 bp, Homo sapien
aaaaaactgcacgtgccgaatgttgaggtagcc

SEQ ID NO: 844038 - DNA, 33 bp, Homo sapien
aaaaaactgcacgtgctgaatgttgaggtagcc

SEQ ID NO: 844039 - DNA, 33 bp, Homo sapien
ttatccaaacggaaaaatctatacaagttctta

SEQ ID NO: 844040 - DNA, 33 bp, Homo sapien
ttatccaaacggaaaattctatacaagttctta

SEQ ID NO: 844041 - DNA, 33 bp, Homo sapien
gttttcagtcctgataacatcataagtactatc

SEQ ID NO: 844042 - DNA, 33 bp, Homo sapien
gttttcagtcctgataccatcataagtactatc

SEQ ID NO: 844043 - DNA, 33 bp, Homo sapien
tttctacctctccatccgaactgcgtgtgggag

SEQ ID NO: 844044 - DNA, 33 bp, Homo sapien
tttctacctctccatctgaactgcgtgtgggag

SEQ ID NO: 844045 - DNA, 33 bp, Homo sapien
agttgataagagggaactgaagtacaaaacata

SEQ ID NO: 844046 - DNA, 33 bp, Homo sapien
agttgataagagggaattgaagtacaaaacata

SEQ ID NO: 844047 - DNA, 33 bp, Homo sapien
tgactttctttaaagacgatatatgtaactgta

SEQ ID NO: 844048 - DNA, 33 bp, Homo sapien
tgactttctttaaagatgatatatgtaactgta

SEQ ID NO: 844049 - DNA, 33 bp, Homo sapien
gtggaaccagaaaagaacctgtatagaaaagac

SEQ ID NO: 844050 - DNA, 33 bp, Homo sapien
gtggaaccagaaaagagcctgtatagaaaagac

SEQ ID NO: 844051 - DNA, 33 bp, Homo sapien
aacactgaaaatatcaatctcatgatcaagtat

SEQ ID NO: 844052 - DNA, 33 bp, Homo sapien
aacactgaaaatatcagtctcatgatcaagtat

SEQ ID NO: 844053 - DNA, 33 bp, Homo sapien
agggaagagcaaggaaaactttgtatagtggtt

SEQ ID NO: 844054 - DNA, 33 bp, Homo sapien
agggaagagcaaggaagactttgtatagtggtt

SEQ ID NO: 844055 - DNA, 33 bp, Homo sapien
tatggaatttagaaatcaagttggatatggatt

SEQ ID NO: 844056 - DNA, 33 bp, Homo sapien
tatggaatttagaaatgaagttggatatggatt

SEQ ID NO: 844057 - DNA, 33 bp, Homo sapien
tgtaatgaataagatacctacatcataaagggg

SEQ ID NO: 844058 - DNA, 33 bp, Homo sapien
tgtaatgaataagatagctacatcataaagggg

SEQ ID NO: 844059 - DNA, 33 bp, Homo sapien
atagtaaacaacaaaactgaccataacattagg

SEQ ID NO: 844060 - DNA, 33 bp, Homo sapien
atagtaaacaacaaaattgaccataacattagg

SEQ ID NO: 844061 - DNA, 33 bp, Homo sapien
gggtaatatgttgagaagttattttgtggttca

SEQ ID NO: 844062 - DNA, 33 bp, Homo sapien
gggtaatatgttgagaggttattttgtggttca

SEQ ID NO: 844063 - DNA, 33 bp, Homo sapien
aggagactggatgagaccatgcagggagtcagt

SEQ ID NO: 844064 - DNA, 33 bp, Homo sapien
aggagactggatgagatcatgcagggagtcagt

SEQ ID NO: 844065 - DNA, 33 bp, Homo sapien
ctttaaaacataaaaaatctcaaaagagccctt

SEQ ID NO: 844066 - DNA, 33 bp, Homo sapien
ctttaaaacataaaaagtctcaaaagagccctt

SEQ ID NO: 844067 - DNA, 33 bp, Homo sapien
tctgctaacaaaaaaaactgctatggcatttat

SEQ ID NO: 844068 - DNA, 33 bp, Homo sapien
tctgctaacaaaaaaacctgctatggcatttat

SEQ ID NO: 844069 - DNA, 33 bp, Homo sapien
acagtatgaatgcaataaccgaagagcaaagaa

SEQ ID NO: 844070 - DNA, 33 bp, Homo sapien
acagtatgaatgcaatgaccgaagagcaaagaa

SEQ ID NO: 844071 - DNA, 33 bp, Homo sapien
aaaatgaggtgatgtaataaagccgaaaatgta

SEQ ID NO: 844072 - DNA, 33 bp, Homo sapien
aaaatgaggtgatgtagtaaagccgaaaatgta

SEQ ID NO: 844073 - DNA, 33 bp, Homo sapien
catgtattttcagttacctaccttcttgcatac

SEQ ID NO: 844074 - DNA, 33 bp, Homo sapien
catgtattttcagttatctaccttcttgcatac

SEQ ID NO: 844075 - DNA, 33 bp, Homo sapien
caaggccattgaaacaacaggattatcaatcat

SEQ ID NO: 844076 - DNA, 33 bp, Homo sapien
caaggccattgaaacagcaggattatcaatcat

SEQ ID NO: 844077 - DNA, 33 bp, Homo sapien
tctagtttgggtacaaaatttacttcactcact

SEQ ID NO: 844078 - DNA, 33 bp, Homo sapien
tctagtttgggtacaacatttacttcactcact

SEQ ID NO: 844079 - DNA, 33 bp, Homo sapien
ttgcccttcctcctacagcttattctgccaagc

SEQ ID NO: 844080 - DNA, 33 bp, Homo sapien
ttgcccttcctcctacggcttattctgccaagc

SEQ ID NO: 844081 - DNA, 33 bp, Homo sapien
tgagaccgtgtcgtataaggttgtgcagctgtt

SEQ ID NO: 844082 - DNA, 33 bp, Homo sapien
tgagaccgtgtcgtattaggttgtgcagctgtt

SEQ ID NO: 844083 - DNA, 33 bp, Homo sapien
tttctgcagtcatcaaagtatacaagttaaaat

SEQ ID NO: 844084 - DNA, 33 bp, Homo sapien
tttctgcagtcatcaatgtatacaagttaaaat

SEQ ID NO: 844085 - DNA, 33 bp, Homo sapien
tgatcctttcagacacacttcttattactctca

SEQ ID NO: 844086 - DNA, 33 bp, Homo sapien
tgatcctttcagacacgcttcttattactctca

SEQ ID NO: 844087 - DNA, 33 bp, Homo sapien
aaacaacccaatgttgaagaaaaagatgaatcc

SEQ ID NO: 844088 - DNA, 33 bp, Homo sapien
aaacaacccaatgttggagaaaaagatgaatcc

SEQ ID NO: 844089 - DNA, 33 bp, Homo sapien
tgtaacagttgtcaatcactgggaatgaacaac

SEQ ID NO: 844090 - DNA, 33 bp, Homo sapien
tgtaacagttgtcaattactgggaatgaacaac

SEQ ID NO: 844091 - DNA, 33 bp, Homo sapien
ggtcccaagaagtatccctcacagccaaacaca

SEQ ID NO: 844092 - DNA, 33 bp, Homo sapien
ggtcccaagaagtatctctcacagccaaacaca

SEQ ID NO: 844093 - DNA, 33 bp, Homo sapien
gcatttagtgcgtagacatgctggagtagtaat

SEQ ID NO: 844094 - DNA, 33 bp, Homo sapien
gcatttagtgcgtagatatgctggagtagtaat

SEQ ID NO: 844095 - DNA, 33 bp, Homo sapien
ttctccattctgaaggacaatattcataattct

SEQ ID NO: 844096 - DNA, 33 bp, Homo sapien
ttctccattctgaaggtcaatattcataattct

SEQ ID NO: 844097 - DNA, 33 bp, Homo sapien
gttttctccggtagaacatgaactctataagga

SEQ ID NO: 844098 - DNA, 33 bp, Homo sapien
gttttctccggtagaatatgaactctataagga

SEQ ID NO: 844099 - DNA, 33 bp, Homo sapien
catgttcataggaggtaaatgcagggtgtgagg

SEQ ID NO: 844100 - DNA, 33 bp, Homo sapien
catgttcataggaggtgaatgcagggtgtgagg

SEQ ID NO: 844101 - DNA, 33 bp, Homo sapien
agaatttctaataaaagacagacatggcttatg

SEQ ID NO: 844102 - DNA, 33 bp, Homo sapien
agaatttctaataaaatacagacatggcttatg

SEQ ID NO: 844103 - DNA, 33 bp, Homo sapien
atgtagaatgctttaaatgatgaaatgtttgta

SEQ ID NO: 844104 - DNA, 33 bp, Homo sapien
atgtagaatgctttaagtgatgaaatgtttgta

SEQ ID NO: 844105 - DNA, 33 bp, Homo sapien
aatacttgattgtaaacacggcataatctgcct

SEQ ID NO: 844106 - DNA, 33 bp, Homo sapien
aatacttgattgtaaatacggcataatctgcct

SEQ ID NO: 844107 - DNA, 33 bp, Homo sapien
gcagaccaactaaaacacgtataaattgctggt

SEQ ID NO: 844108 - DNA, 33 bp, Homo sapien
gcagaccaactaaaacgcgtataaattgctggt

SEQ ID NO: 844109 - DNA, 33 bp, Homo sapien
tatggcatacaattgacaataaacagggatttg

SEQ ID NO: 844110 - DNA, 33 bp, Homo sapien
tatggcatacaattgagaataaacagggatttg

SEQ ID NO: 844111 - DNA, 33 bp, Homo sapien
gtttcttcaaaataaacgagtcactaaaataaa

SEQ ID NO: 844112 - DNA, 33 bp, Homo sapien
gtttcttcaaaataaatgagtcactaaaataaa

SEQ ID NO: 844113 - DNA, 33 bp, Homo sapien
gtcttctataaataaaactggagtgaacatgat

SEQ ID NO: 844114 - DNA, 33 bp, Homo sapien
gtcttctataaataaagctggagtgaacatgat

SEQ ID NO: 844115 - DNA, 33 bp, Homo sapien
agtttctctgcatttacaaaacatcctagataa

SEQ ID NO: 844116 - DNA, 33 bp, Homo sapien
agtttctctgcatttataaaacatcctagataa

SEQ ID NO: 844117 - DNA, 33 bp, Homo sapien
acacatatggaagataataagagttgtttcttc

SEQ ID NO: 844118 - DNA, 33 bp, Homo sapien
acacatatggaagatagtaagagttgtttcttc

SEQ ID NO: 844119 - DNA, 33 bp, Homo sapien
gctgtccttgtaatgagagaccgaggtattttg

SEQ ID NO: 844120 - DNA, 33 bp, Homo sapien
gctgtccttgtaatgatagaccgaggtattttg

SEQ ID NO: 844121 - DNA, 33 bp, Homo sapien
tgtgtcttctaaaaagccttctaagatttgtgt

SEQ ID NO: 844122 - DNA, 33 bp, Homo sapien
tgtgtcttctaaaaagtcttctaagatttgtgt

SEQ ID NO: 844123 - DNA, 33 bp, Homo sapien
gtgcttttttactacaatcaggttgtaagaact

SEQ ID NO: 844124 - DNA, 33 bp, Homo sapien
gtgcttttttactacagtcaggttgtaagaact

SEQ ID NO: 844125 - DNA, 33 bp, Homo sapien
ctacgctgtgtcttgtcaatgccaatataaaag

SEQ ID NO: 844126 - DNA, 33 bp, Homo sapien
ctacgctgtgtcttgttaatgccaatataaaag

SEQ ID NO: 844127 - DNA, 33 bp, Homo sapien
gaggcagaaaaattgacgatagcctgagattat

SEQ ID NO: 844128 - DNA, 33 bp, Homo sapien
gaggcagaaaaattgatgatagcctgagattat

SEQ ID NO: 844129 - DNA, 33 bp, Homo sapien
ggctatggcctagtgcacaggaagagccaggtc

SEQ ID NO: 844130 - DNA, 33 bp, Homo sapien
ggctatggcctagtgcgcaggaagagccaggtc

SEQ ID NO: 844131 - DNA, 33 bp, Homo sapien
aaataacgtaagtccaccataaagtaactccta

SEQ ID NO: 844132 - DNA, 33 bp, Homo sapien
aaataacgtaagtccatcataaagtaactccta

SEQ ID NO: 844133 - DNA, 33 bp, Homo sapien
taattatcatcatcctcaaatatctatcatttc

SEQ ID NO: 844134 - DNA, 33 bp, Homo sapien
taattatcatcatcctgaaatatctatcatttc

SEQ ID NO: 844135 - DNA, 33 bp, Homo sapien
ggtcggaaaattcttcacaaatcctagctaacc

SEQ ID NO: 844136 - DNA, 33 bp, Homo sapien
ggtcggaaaattcttcgcaaatcctagctaacc

SEQ ID NO: 844137 - DNA, 33 bp, Homo sapien
gtttaggcttgagtcccattctaagacagtgat

SEQ ID NO: 844138 - DNA, 33 bp, Homo sapien
gtttaggcttgagtcctattctaagacagtgat

SEQ ID NO: 844139 - DNA, 33 bp, Homo sapien
aattgtgcaacttaagaaattagattaaagaac

SEQ ID NO: 844140 - DNA, 33 bp, Homo sapien
aattgtgcaacttaaggaattagattaaagaac

SEQ ID NO: 844141 - DNA, 33 bp, Homo sapien
aactgtaaaaaacagagagcagaacatgaatat

SEQ ID NO: 844142 - DNA, 33 bp, Homo sapien
aactgtaaaaaacagatagcagaacatgaatat

SEQ ID NO: 844143 - DNA, 33 bp, Homo sapien
gtaatatttgagctgacatttaagagaattgag

SEQ ID NO: 844144 - DNA, 33 bp, Homo sapien
gtaatatttgagctgatatttaagagaattgag

SEQ ID NO: 844145 - DNA, 33 bp, Homo sapien
catacacaaaccctgcaaacattgtaaatcaaa

SEQ ID NO: 844146 - DNA, 33 bp, Homo sapien
catacacaaaccctgcgaacattgtaaatcaaa

SEQ ID NO: 844147 - DNA, 33 bp, Homo sapien
gatttcattctttggtcaaaagcttgagaattt

SEQ ID NO: 844148 - DNA, 33 bp, Homo sapien
gatttcattctttggttaaaagcttgagaattt

SEQ ID NO: 844149 - DNA, 33 bp, Homo sapien
caatatataaacattcaattactttaggcctct

SEQ ID NO: 844150 - DNA, 33 bp, Homo sapien
caatatataaacattccattactttaggcctct

SEQ ID NO: 844151 - DNA, 33 bp, Homo sapien
gcattaaggatatttgaaagtagagctttacaa

SEQ ID NO: 844152 - DNA, 33 bp, Homo sapien
gcattaaggatatttgcaagtagagctttacaa

SEQ ID NO: 844153 - DNA, 33 bp, Homo sapien
gcagcccctgccttggcatttttctagcacaag

SEQ ID NO: 844154 - DNA, 33 bp, Homo sapien
gcagcccctgccttggtatttttctagcacaag

SEQ ID NO: 844155 - DNA, 33 bp, Homo sapien
ctttgtgctagcatcagctgctaaagtctactg

SEQ ID NO: 844156 - DNA, 33 bp, Homo sapien
ctttgtgctagcatcatctgctaaagtctactg

SEQ ID NO: 844157 - DNA, 33 bp, Homo sapien
ggaaaatattgttaagacagagtatatgtgtgt

SEQ ID NO: 844158 - DNA, 33 bp, Homo sapien
ggaaaatattgttaaggcagagtatatgtgtgt

SEQ ID NO: 844159 - DNA, 33 bp, Homo sapien
aaagtttctgaaaaaagttcaagctccttagca

SEQ ID NO: 844160 - DNA, 33 bp, Homo sapien
aaagtttctgaaaaaatttcaagctccttagca

SEQ ID NO: 844161 - DNA, 33 bp, Homo sapien
aaattagaccaacattaaaacattcgtactgta

SEQ ID NO: 844162 - DNA, 33 bp, Homo sapien
aaattagaccaacattcaaacattcgtactgta

SEQ ID NO: 844163 - DNA, 33 bp, Homo sapien
atcctctgcctttaagcctgctcttctctgcac

SEQ ID NO: 844164 - DNA, 33 bp, Homo sapien
atcctctgcctttaagtctgctcttctctgcac

SEQ ID NO: 844165 - DNA, 33 bp, Homo sapien
cctaagacatatttacaatacattcatccaatg

SEQ ID NO: 844166 - DNA, 33 bp, Homo sapien
cctaagacatatttactatacattcatccaatg

SEQ ID NO: 844167 - DNA, 33 bp, Homo sapien
atttgaccaattgttcaaccccaagaggtcaaa

SEQ ID NO: 844168 - DNA, 33 bp, Homo sapien
atttgaccaattgttcgaccccaagaggtcaaa

SEQ ID NO: 844169 - DNA, 33 bp, Homo sapien
taaataaaataagtgaacccatctggagtcaga

SEQ ID NO: 844170 - DNA, 33 bp, Homo sapien
taaataaaataagtgaccccatctggagtcaga

SEQ ID NO: 844171 - DNA, 33 bp, Homo sapien
tgggtgaactctaaagaagaaacaaggacttag

SEQ ID NO: 844172 - DNA, 33 bp, Homo sapien
tgggtgaactctaaagcagaaacaaggacttag

SEQ ID NO: 844173 - DNA, 33 bp, Homo sapien
ccatgaagctgtgggacgtagaggaaatatttt

SEQ ID NO: 844174 - DNA, 33 bp, Homo sapien
ccatgaagctgtgggatgtagaggaaatatttt

SEQ ID NO: 844175 - DNA, 33 bp, Homo sapien
tggaaagccttcatatgagaaaagatttacagt

SEQ ID NO: 844176 - DNA, 33 bp, Homo sapien
tggaaagccttcatattagaaaagatttacagt

SEQ ID NO: 844177 - DNA, 33 bp, Homo sapien
tatatttaaacctagagaagttcttcacacaga

SEQ ID NO: 844178 - DNA, 33 bp, Homo sapien
tatatttaaacctagataagttcttcacacaga

SEQ ID NO: 844179 - DNA, 33 bp, Homo sapien
ttgacttgatgatgccaactgcaattgtgcctt

SEQ ID NO: 844180 - DNA, 33 bp, Homo sapien
ttgacttgatgatgcctactgcaattgtgcctt

SEQ ID NO: 844181 - DNA, 33 bp, Homo sapien
aaattaaaacctgcagcatgtttcagtgacatc

SEQ ID NO: 844182 - DNA, 33 bp, Homo sapien
aaattaaaacctgcaggatgtttcagtgacatc

SEQ ID NO: 844183 - DNA, 33 bp, Homo sapien
atacctaacagcaagcaaaacttgaaaatacat

SEQ ID NO: 844184 - DNA, 33 bp, Homo sapien
atacctaacagcaagcgaaacttgaaaatacat

SEQ ID NO: 844185 - DNA, 33 bp, Homo sapien
agcaaaagtggaagaaaatatgaatgccagata

SEQ ID NO: 844186 - DNA, 33 bp, Homo sapien
agcaaaagtggaagaatatatgaatgccagata

SEQ ID NO: 844187 - DNA, 33 bp, Homo sapien
gtgtgtgtttgtaagacagagaccacagtcaca

SEQ ID NO: 844188 - DNA, 33 bp, Homo sapien
gtgtgtgtttgtaagagagagaccacagtcaca

SEQ ID NO: 844189 - DNA, 33 bp, Homo sapien
atagatcactctggtcacagaaaaaatacagta

SEQ ID NO: 844190 - DNA, 33 bp, Homo sapien
atagatcactctggtcgcagaaaaaatacagta

SEQ ID NO: 844191 - DNA, 33 bp, Homo sapien
gtctcagccttgataaagggcagtggattgcct

SEQ ID NO: 844192 - DNA, 33 bp, Homo sapien
gtctcagccttgataaggggcagtggattgcct

SEQ ID NO: 844193 - DNA, 33 bp, Homo sapien
tcagagccaaagtggacggacaaaggcataaag

SEQ ID NO: 844194 - DNA, 33 bp, Homo sapien
tcagagccaaagtggatggacaaaggcataaag

SEQ ID NO: 844195 - DNA, 33 bp, Homo sapien
ctttgccctgtcaactcagccttgtactccaag

SEQ ID NO: 844196 - DNA, 33 bp, Homo sapien
ctttgccctgtcaacttagccttgtactccaag

SEQ ID NO: 844197 - DNA, 33 bp, Homo sapien
atgcagccataaaaaacaacgaggtcatgtcct

SEQ ID NO: 844198 - DNA, 33 bp, Homo sapien
atgcagccataaaaaagaacgaggtcatgtcct

SEQ ID NO: 844199 - DNA, 33 bp, Homo sapien
tagggtgagacaaaaacgtattcagtagggcag

SEQ ID NO: 844200 - DNA, 33 bp, Homo sapien
tagggtgagacaaaaatgtattcagtagggcag

SEQ ID NO: 844201 - DNA, 33 bp, Homo sapien
caaaaccacagcgaaacagaaaatagtctcctt

SEQ ID NO: 844202 - DNA, 33 bp, Homo sapien
caaaaccacagcgaaatagaaaatagtctcctt

SEQ ID NO: 844203 - DNA, 33 bp, Homo sapien
ttgaaacaagtagatcaaaaagaggaatatgaa

SEQ ID NO: 844204 - DNA, 33 bp, Homo sapien
ttgaaacaagtagatcgaaaagaggaatatgaa

SEQ ID NO: 844205 - DNA, 33 bp, Homo sapien
acaaatctgtacaaaacactgaaacatcttacc

SEQ ID NO: 844206 - DNA, 33 bp, Homo sapien
acaaatctgtacaaaagactgaaacatcttacc

SEQ ID NO: 844207 - DNA, 33 bp, Homo sapien
atttaaacatactttaagatcacttgcactagc

SEQ ID NO: 844208 - DNA, 33 bp, Homo sapien
atttaaacatactttaggatcacttgcactagc

SEQ ID NO: 844209 - DNA, 33 bp, Homo sapien
ggaatgaagtactaccaatacaagccaaagcat

SEQ ID NO: 844210 - DNA, 33 bp, Homo sapien
ggaatgaagtactaccgatacaagccaaagcat

SEQ ID NO: 844211 - DNA, 33 bp, Homo sapien
aaactgtcttcttaaccccggcttctttatcag

SEQ ID NO: 844212 - DNA, 33 bp, Homo sapien
aaactgtcttcttaactccggcttctttatcag

SEQ ID NO: 844213 - DNA, 33 bp, Homo sapien
tgaacttcttcaataaacccttcagattggttt

SEQ ID NO: 844214 - DNA, 33 bp, Homo sapien
tgaacttcttcaataagcccttcagattggttt

SEQ ID NO: 844215 - DNA, 33 bp, Homo sapien
catccactcatgttggaacagaaaaaaatacga

SEQ ID NO: 844216 - DNA, 33 bp, Homo sapien
catccactcatgttgggacagaaaaaaatacga

SEQ ID NO: 844217 - DNA, 33 bp, Homo sapien
ttattagtgagttgggcaaggtatcttgacatg

SEQ ID NO: 844218 - DNA, 33 bp, Homo sapien
ttattagtgagttgggtaaggtatcttgacatg

SEQ ID NO: 844219 - DNA, 33 bp, Homo sapien
catttctaaactatacaggtgaaaattagaatt

SEQ ID NO: 844220 - DNA, 33 bp, Homo sapien
catttctaaactatactggtgaaaattagaatt

SEQ ID NO: 844221 - DNA, 33 bp, Homo sapien
tgaaatccagtagtcactatttttcaattattt

SEQ ID NO: 844222 - DNA, 33 bp, Homo sapien
tgaaatccagtagtcagtatttttcaattattt

SEQ ID NO: 844223 - DNA, 33 bp, Homo sapien
taaattttcccaatagcctaaaggatgatccat

SEQ ID NO: 844224 - DNA, 33 bp, Homo sapien
taaattttcccaatagtctaaaggatgatccat

SEQ ID NO: 844225 - DNA, 33 bp, Homo sapien
tatcatcaccaatttacagcatttaatttaggc

SEQ ID NO: 844226 - DNA, 33 bp, Homo sapien
tatcatcaccaatttatagcatttaatttaggc

SEQ ID NO: 844227 - DNA, 33 bp, Homo sapien
taaaaggaagggcaaaaattcagtgcaagttct

SEQ ID NO: 844228 - DNA, 33 bp, Homo sapien
taaaaggaagggcaaacattcagtgcaagttct

SEQ ID NO: 844229 - DNA, 33 bp, Homo sapien
atggatattactctataactctgactaagttat

SEQ ID NO: 844230 - DNA, 33 bp, Homo sapien
atggatattactctatgactctgactaagttat

SEQ ID NO: 844231 - DNA, 33 bp, Homo sapien
tattatatcaggctaacaataattcacctccag

SEQ ID NO: 844232 - DNA, 33 bp, Homo sapien
tattatatcaggctaagaataattcacctccag

SEQ ID NO: 844233 - DNA, 33 bp, Homo sapien
tttcctcccatctcaccgataagtccttcccaa

SEQ ID NO: 844234 - DNA, 33 bp, Homo sapien
tttcctcccatctcactgataagtccttcccaa

SEQ ID NO: 844235 - DNA, 33 bp, Homo sapien
tagacgacggggaaaaacattactgacagggcg

SEQ ID NO: 844236 - DNA, 33 bp, Homo sapien
tagacgacggggaaaagcattactgacagggcg

SEQ ID NO: 844237 - DNA, 33 bp, Homo sapien
ctatcaacaggacaataaatatacaagttgtgt

SEQ ID NO: 844238 - DNA, 33 bp, Homo sapien
ctatcaacaggacaatcaatatacaagttgtgt

SEQ ID NO: 844239 - DNA, 33 bp, Homo sapien
atcattctactgtagggacatatgcacacgtat

SEQ ID NO: 844240 - DNA, 33 bp, Homo sapien
atcattctactgtaggtacatatgcacacgtat

SEQ ID NO: 844241 - DNA, 33 bp, Homo sapien
ccatagttattccaaaatcatatcaagacaaat

SEQ ID NO: 844242 - DNA, 33 bp, Homo sapien
ccatagttattccaaattcatatcaagacaaat

SEQ ID NO: 844243 - DNA, 33 bp, Homo sapien
atgaataaaatcatcaataagtaactctagcac

SEQ ID NO: 844244 - DNA, 33 bp, Homo sapien
atgaataaaatcatcagtaagtaactctagcac

SEQ ID NO: 844245 - DNA, 33 bp, Homo sapien
ttttattggcaaaagcaattcacagaagagggt

SEQ ID NO: 844246 - DNA, 33 bp, Homo sapien
ttttattggcaaaagccattcacagaagagggt

SEQ ID NO: 844247 - DNA, 33 bp, Homo sapien
gataaatcaatttgcacgtattcctttggttgt

SEQ ID NO: 844248 - DNA, 33 bp, Homo sapien
gataaatcaatttgcatgtattcctttggttgt

SEQ ID NO: 844249 - DNA, 33 bp, Homo sapien
aataggaaagattttacgctatagccattgtct

SEQ ID NO: 844250 - DNA, 33 bp, Homo sapien
aataggaaagattttatgctatagccattgtct

SEQ ID NO: 844251 - DNA, 33 bp, Homo sapien
gtcaatcctgggttaacaatgaagtgcttaaat

SEQ ID NO: 844252 - DNA, 33 bp, Homo sapien
gtcaatcctgggttaataatgaagtgcttaaat

SEQ ID NO: 844253 - DNA, 33 bp, Homo sapien
tcacctggcagtgcaactatggatcaagatgga

SEQ ID NO: 844254 - DNA, 33 bp, Homo sapien
tcacctggcagtgcaattatggatcaagatgga

SEQ ID NO: 844255 - DNA, 33 bp, Homo sapien
cttttgcatttccctgaacatactactagaaac

SEQ ID NO: 844256 - DNA, 33 bp, Homo sapien
cttttgcatttccctgcacatactactagaaac

SEQ ID NO: 844257 - DNA, 33 bp, Homo sapien
taatgttggaagaacaaggtttatcccagaagt

SEQ ID NO: 844258 - DNA, 33 bp, Homo sapien
taatgttggaagaacacggtttatcccagaagt

SEQ ID NO: 844259 - DNA, 33 bp, Homo sapien
gaaaagcaaataaataagtgtttcagtaagtca

SEQ ID NO: 844260 - DNA, 33 bp, Homo sapien
gaaaagcaaataaataggtgtttcagtaagtca

SEQ ID NO: 844261 - DNA, 33 bp, Homo sapien
atacagatgtgtcacaatgtaaaatttatttct

SEQ ID NO: 844262 - DNA, 33 bp, Homo sapien
atacagatgtgtcacagtgtaaaatttatttct

SEQ ID NO: 844263 - DNA, 33 bp, Homo sapien
tttactattaaggtcaatcttgaaactgttgtg

SEQ ID NO: 844264 - DNA, 33 bp, Homo sapien
tttactattaaggtcagtcttgaaactgttgtg

SEQ ID NO: 844265 - DNA, 33 bp, Homo sapien
ttcacatactgtaaaactgaccattctaaagtc

SEQ ID NO: 844266 - DNA, 33 bp, Homo sapien
ttcacatactgtaaaattgaccattctaaagtc

SEQ ID NO: 844267 - DNA, 33 bp, Homo sapien
ctctctaggtttgcagcaagggttatcccaaga

SEQ ID NO: 844268 - DNA, 33 bp, Homo sapien
ctctctaggtttgcaggaagggttatcccaaga

SEQ ID NO: 844269 - DNA, 33 bp, Homo sapien
tcttagctagttagaaataaggtagtttcttat

SEQ ID NO: 844270 - DNA, 33 bp, Homo sapien
tcttagctagttagaagtaaggtagtttcttat

SEQ ID NO: 844271 - DNA, 33 bp, Homo sapien
tttagttgagacgttagcccattaaatagttgc

SEQ ID NO: 844272 - DNA, 33 bp, Homo sapien
tttagttgagacgttatcccattaaatagttgc

SEQ ID NO: 844273 - DNA, 33 bp, Homo sapien
tatccataatcaatcacacaaaatacaagtaaa

SEQ ID NO: 844274 - DNA, 33 bp, Homo sapien
tatccataatcaatcatacaaaatacaagtaaa

SEQ ID NO: 844275 - DNA, 33 bp, Homo sapien
gctctcaaaatattccaaatacagatctggttt

SEQ ID NO: 844276 - DNA, 33 bp, Homo sapien
gctctcaaaatattccgaatacagatctggttt

SEQ ID NO: 844277 - DNA, 33 bp, Homo sapien
cctaaaagagacccaaaagacctgttcttcctt

SEQ ID NO: 844278 - DNA, 33 bp, Homo sapien
cctaaaagagacccaagagacctgttcttcctt

SEQ ID NO: 844279 - DNA, 33 bp, Homo sapien
gactatgtcaggcaaaagaaacatatttgaaag

SEQ ID NO: 844280 - DNA, 33 bp, Homo sapien
gactatgtcaggcaaaggaaacatatttgaaag

SEQ ID NO: 844281 - DNA, 33 bp, Homo sapien
ctttctacagggctagcattatgcttttggctt

SEQ ID NO: 844282 - DNA, 33 bp, Homo sapien
ctttctacagggctagtattatgcttttggctt

SEQ ID NO: 844283 - DNA, 33 bp, Homo sapien
agaacaaacctacaacaattgacactcatgaga

SEQ ID NO: 844284 - DNA, 33 bp, Homo sapien
agaacaaacctacaactattgacactcatgaga

SEQ ID NO: 844285 - DNA, 33 bp, Homo sapien
atacaaaggaccctcagaggctactatagacaa

SEQ ID NO: 844286 - DNA, 33 bp, Homo sapien
atacaaaggaccctcataggctactatagacaa

SEQ ID NO: 844287 - DNA, 33 bp, Homo sapien
caaagaagaactggtaccaatcatactgaaact

SEQ ID NO: 844288 - DNA, 33 bp, Homo sapien
caaagaagaactggtatcaatcatactgaaact

SEQ ID NO: 844289 - DNA, 33 bp, Homo sapien
ttatgacttaaatgtgaaatggcattgtaaact

SEQ ID NO: 844290 - DNA, 33 bp, Homo sapien
ttatgacttaaatgtgtaatggcattgtaaact

SEQ ID NO: 844291 - DNA, 33 bp, Homo sapien
gatgctcaattaatacaaggatcaggtatttct

SEQ ID NO: 844292 - DNA, 33 bp, Homo sapien
gatgctcaattaatacgaggatcaggtatttct

SEQ ID NO: 844293 - DNA, 33 bp, Homo sapien
ctcatcaccacaagaaaaagttgtgtcataaga

SEQ ID NO: 844294 - DNA, 33 bp, Homo sapien
ctcatcaccacaagaagaagttgtgtcataaga

SEQ ID NO: 844295 - DNA, 33 bp, Homo sapien
tatcttcagcattaggaaacgaattgtgattat

SEQ ID NO: 844296 - DNA, 33 bp, Homo sapien
tatcttcagcattagggaacgaattgtgattat

SEQ ID NO: 844297 - DNA, 33 bp, Homo sapien
gtaagatgataaaccacggtgaagtagtggttt

SEQ ID NO: 844298 - DNA, 33 bp, Homo sapien
gtaagatgataaaccatggtgaagtagtggttt

SEQ ID NO: 844299 - DNA, 33 bp, Homo sapien
gtatataaaaaagtcaaagtcacttaagagttt

SEQ ID NO: 844300 - DNA, 33 bp, Homo sapien
gtatataaaaaagtcagagtcacttaagagttt

SEQ ID NO: 844301 - DNA, 33 bp, Homo sapien
aatttgagttaaatggaatgcagttaagtcagg

SEQ ID NO: 844302 - DNA, 33 bp, Homo sapien
aatttgagttaaatgggatgcagttaagtcagg

SEQ ID NO: 844303 - DNA, 33 bp, Homo sapien
aaaccattattctgctaaccaaaccattgtagc

SEQ ID NO: 844304 - DNA, 33 bp, Homo sapien
aaaccattattctgcttaccaaaccattgtagc

SEQ ID NO: 844305 - DNA, 33 bp, Homo sapien
tcatgaacattctacacgagaagtgccatctca

SEQ ID NO: 844306 - DNA, 33 bp, Homo sapien
tcatgaacattctacatgagaagtgccatctca

SEQ ID NO: 844307 - DNA, 33 bp, Homo sapien
tgcccccctgggagtacctcacatccaacaata

SEQ ID NO: 844308 - DNA, 33 bp, Homo sapien
tgcccccctgggagtatctcacatccaacaata

SEQ ID NO: 844309 - DNA, 33 bp, Homo sapien
tctactgacagtactcccaacagttgagtcaaa

SEQ ID NO: 844310 - DNA, 33 bp, Homo sapien
tctactgacagtactcgcaacagttgagtcaaa

SEQ ID NO: 844311 - DNA, 33 bp, Homo sapien
tatgctatttactcaccatctttgtgtattcat

SEQ ID NO: 844312 - DNA, 33 bp, Homo sapien
tatgctatttactcactatctttgtgtattcat

SEQ ID NO: 844313 - DNA, 33 bp, Homo sapien
gacttactaccgcaaaccttcagtcctcatcct

SEQ ID NO: 844314 - DNA, 33 bp, Homo sapien
gacttactaccgcaaatcttcagtcctcatcct

SEQ ID NO: 844315 - DNA, 33 bp, Homo sapien
gcatttagaatgagaacaatggactgataccat

SEQ ID NO: 844316 - DNA, 33 bp, Homo sapien
gcatttagaatgagaataatggactgataccat

SEQ ID NO: 844317 - DNA, 33 bp, Homo sapien
cagttttcatagctccaactttggatttcctat

SEQ ID NO: 844318 - DNA, 33 bp, Homo sapien
cagttttcatagctccgactttggatttcctat

SEQ ID NO: 844319 - DNA, 33 bp, Homo sapien
atcaagttacttaatacatgtgttgcctcacat

SEQ ID NO: 844320 - DNA, 33 bp, Homo sapien
atcaagttacttaatatatgtgttgcctcacat

SEQ ID NO: 844321 - DNA, 33 bp, Homo sapien
gttattttgcatgcagaagttttcacacctgtc

SEQ ID NO: 844322 - DNA, 33 bp, Homo sapien
gttattttgcatgcaggagttttcacacctgtc

SEQ ID NO: 844323 - DNA, 33 bp, Homo sapien
attttaaaaatgtttcactcagctcatgagaca

SEQ ID NO: 844324 - DNA, 33 bp, Homo sapien
attttaaaaatgtttcgctcagctcatgagaca

SEQ ID NO: 844325 - DNA, 33 bp, Homo sapien
ggtaataaactaggagaaacttggcaagatctg

SEQ ID NO: 844326 - DNA, 33 bp, Homo sapien
ggtaataaactaggagcaacttggcaagatctg

SEQ ID NO: 844327 - DNA, 33 bp, Homo sapien
tatcctgtttctccatgactcttcattcttcat

SEQ ID NO: 844328 - DNA, 33 bp, Homo sapien
tatcctgtttctccattactcttcattcttcat

SEQ ID NO: 844329 - DNA, 33 bp, Homo sapien
tccaaaggaagagtcggatagttcagagccttc

SEQ ID NO: 844330 - DNA, 33 bp, Homo sapien
tccaaaggaagagtcgtatagttcagagccttc

SEQ ID NO: 844331 - DNA, 33 bp, Homo sapien
gtggcagccttatttaaacctgtgaccggagtt

SEQ ID NO: 844332 - DNA, 33 bp, Homo sapien
gtggcagccttatttatacctgtgaccggagtt

SEQ ID NO: 844333 - DNA, 33 bp, Homo sapien
ctttatatcagaggagaaaaggaatgtttctct

SEQ ID NO: 844334 - DNA, 33 bp, Homo sapien
ctttatatcagaggagtaaaggaatgtttctct

SEQ ID NO: 844335 - DNA, 33 bp, Homo sapien
taacactgcccttgcaaccctaaatccataaaa

SEQ ID NO: 844336 - DNA, 33 bp, Homo sapien
taacactgcccttgcacccctaaatccataaaa

SEQ ID NO: 844337 - DNA, 33 bp, Homo sapien
ttgtatgtcagttatacctcaatagaactgttt

SEQ ID NO: 844338 - DNA, 33 bp, Homo sapien
ttgtatgtcagttatagctcaatagaactgttt

SEQ ID NO: 844339 - DNA, 33 bp, Homo sapien
tgaagtgtgtgctacccggagtttttccttcac

SEQ ID NO: 844340 - DNA, 33 bp, Homo sapien
tgaagtgtgtgctacctggagtttttccttcac

SEQ ID NO: 844341 - DNA, 33 bp, Homo sapien
attgtattactaaagactcaagaatgtcagctc

SEQ ID NO: 844342 - DNA, 33 bp, Homo sapien
attgtattactaaagattcaagaatgtcagctc

SEQ ID NO: 844343 - DNA, 33 bp, Homo sapien
tgaccaaaaaaatgaaagatgttaagagctatc

SEQ ID NO: 844344 - DNA, 33 bp, Homo sapien
tgaccaaaaaaatgaaggatgttaagagctatc

SEQ ID NO: 844345 - DNA, 33 bp, Homo sapien
acctgggagctagagactattgctgaaatctca

SEQ ID NO: 844346 - DNA, 33 bp, Homo sapien
acctgggagctagagagtattgctgaaatctca

SEQ ID NO: 844347 - DNA, 33 bp, Homo sapien
tctccattcttctcccacttgtccacaagaccg

SEQ ID NO: 844348 - DNA, 33 bp, Homo sapien
tctccattcttctcccgcttgtccacaagaccg

SEQ ID NO: 844349 - DNA, 33 bp, Homo sapien
gctccacgcagcaaaacaccagagctcccaggg

SEQ ID NO: 844350 - DNA, 33 bp, Homo sapien
gctccacgcagcaaaagaccagagctcccaggg

SEQ ID NO: 844351 - DNA, 33 bp, Homo sapien
tatgcctgaagaaccccaccacttccagcttcc

SEQ ID NO: 844352 - DNA, 33 bp, Homo sapien
tatgcctgaagaaccctaccacttccagcttcc

SEQ ID NO: 844353 - DNA, 33 bp, Homo sapien
tgagtttaatttaatgcactacttggtcaagac

SEQ ID NO: 844354 - DNA, 33 bp, Homo sapien
tgagtttaatttaatggactacttggtcaagac

SEQ ID NO: 844355 - DNA, 33 bp, Homo sapien
taaaaagctccatacacatgatacttattacgt

SEQ ID NO: 844356 - DNA, 33 bp, Homo sapien
taaaaagctccatacatatgatacttattacgt

SEQ ID NO: 844357 - DNA, 33 bp, Homo sapien
gatggtatcatagggaacagctttgccatataa

SEQ ID NO: 844358 - DNA, 33 bp, Homo sapien
gatggtatcatagggagcagctttgccatataa

SEQ ID NO: 844359 - DNA, 33 bp, Homo sapien
tagaagaaactgaaagaaggcacccaaacacta

SEQ ID NO: 844360 - DNA, 33 bp, Homo sapien
tagaagaaactgaaaggaggcacccaaacacta

SEQ ID NO: 844361 - DNA, 33 bp, Homo sapien
agcactggatccaaaccgagatgaaatctttga

SEQ ID NO: 844362 - DNA, 33 bp, Homo sapien
agcactggatccaaactgagatgaaatctttga

SEQ ID NO: 844363 - DNA, 33 bp, Homo sapien
gaccaacatcacccaactagttgtgactgagcc

SEQ ID NO: 844364 - DNA, 33 bp, Homo sapien
gaccaacatcacccaattagttgtgactgagcc

SEQ ID NO: 844365 - DNA, 33 bp, Homo sapien
atacattattttttcaatccagcattaaactga

SEQ ID NO: 844366 - DNA, 33 bp, Homo sapien
atacattattttttcagtccagcattaaactga

SEQ ID NO: 844367 - DNA, 33 bp, Homo sapien
cttgcagagttccaacaacagtctcagactgtg

SEQ ID NO: 844368 - DNA, 33 bp, Homo sapien
cttgcagagttccaacgacagtctcagactgtg

SEQ ID NO: 844369 - DNA, 33 bp, Homo sapien
tttgaacgagtttttgcagtataggtgatataa

SEQ ID NO: 844370 - DNA, 33 bp, Homo sapien
tttgaacgagtttttggagtataggtgatataa

SEQ ID NO: 844371 - DNA, 33 bp, Homo sapien
cttaaaatggtttttgaacagtctattaaggct

SEQ ID NO: 844372 - DNA, 33 bp, Homo sapien
cttaaaatggtttttggacagtctattaaggct

SEQ ID NO: 844373 - DNA, 33 bp, Homo sapien
aggtaaagtgctggtacggagtggctttgaacc

SEQ ID NO: 844374 - DNA, 33 bp, Homo sapien
aggtaaagtgctggtatggagtggctttgaacc

SEQ ID NO: 844375 - DNA, 33 bp, Homo sapien
atctttatggaattacgctaagcagagctacaa

SEQ ID NO: 844376 - DNA, 33 bp, Homo sapien
atctttatggaattactctaagcagagctacaa

SEQ ID NO: 844377 - DNA, 33 bp, Homo sapien
gttcaggttcaaattacgctctgctacctgcta

SEQ ID NO: 844378 - DNA, 33 bp, Homo sapien
gttcaggttcaaattatgctctgctacctgcta

SEQ ID NO: 844379 - DNA, 33 bp, Homo sapien
gtacttacaggagtcaaactgatagagatagaa

SEQ ID NO: 844380 - DNA, 33 bp, Homo sapien
gtacttacaggagtcagactgatagagatagaa

SEQ ID NO: 844381 - DNA, 33 bp, Homo sapien
gtctgggtgccggaacagaacacaggctgccca

SEQ ID NO: 844382 - DNA, 33 bp, Homo sapien
gtctgggtgccggaacggaacacaggctgccca

SEQ ID NO: 844383 - DNA, 33 bp, Homo sapien
atgacagcttctgcaagatcctccaactcacac

SEQ ID NO: 844384 - DNA, 33 bp, Homo sapien
atgacagcttctgcaatatcctccaactcacac

SEQ ID NO: 844385 - DNA, 33 bp, Homo sapien
agcccagctctggactcaaaggagacagccatg

SEQ ID NO: 844386 - DNA, 33 bp, Homo sapien
agcccagctctggacttaaaggagacagccatg

SEQ ID NO: 844387 - DNA, 33 bp, Homo sapien
gccagagaactatttgcaggaaatgcattgaaa

SEQ ID NO: 844388 - DNA, 33 bp, Homo sapien
gccagagaactatttggaggaaatgcattgaaa

SEQ ID NO: 844389 - DNA, 33 bp, Homo sapien
atgtgtgctaaaggccagatgtgagcacccttt

SEQ ID NO: 844390 - DNA, 33 bp, Homo sapien
atgtgtgctaaaggccggatgtgagcacccttt

SEQ ID NO: 844391 - DNA, 33 bp, Homo sapien
tgcattacaatctctgaaattcacttttcttta

SEQ ID NO: 844392 - DNA, 33 bp, Homo sapien
tgcattacaatctctgcaattcacttttcttta

SEQ ID NO: 844393 - DNA, 33 bp, Homo sapien
ctatttgatgctatgccaaaaatgtggctattc

SEQ ID NO: 844394 - DNA, 33 bp, Homo sapien
ctatttgatgctatgctaaaaatgtggctattc

SEQ ID NO: 844395 - DNA, 33 bp, Homo sapien
ggcagctgtggataacagagaagtgtttttcta

SEQ ID NO: 844396 - DNA, 33 bp, Homo sapien
ggcagctgtggataacggagaagtgtttttcta

SEQ ID NO: 844397 - DNA, 33 bp, Homo sapien
ttcaggcctttctacccgagtgtaaatactgca

SEQ ID NO: 844398 - DNA, 33 bp, Homo sapien
ttcaggcctttctacctgagtgtaaatactgca

SEQ ID NO: 844399 - DNA, 33 bp, Homo sapien
cagatagtccaaaatacgtggctaatgtccagg

SEQ ID NO: 844400 - DNA, 33 bp, Homo sapien
cagatagtccaaaatatgtggctaatgtccagg

SEQ ID NO: 844401 - DNA, 33 bp, Homo sapien
gaaaggcacattaaacaaaactgtcaattatgt

SEQ ID NO: 844402 - DNA, 33 bp, Homo sapien
gaaaggcacattaaacgaaactgtcaattatgt

SEQ ID NO: 844403 - DNA, 33 bp, Homo sapien
agcatcacataaagggaacagatcaaagctcat

SEQ ID NO: 844404 - DNA, 33 bp, Homo sapien
agcatcacataaaggggacagatcaaagctcat

SEQ ID NO: 844405 - DNA, 33 bp, Homo sapien
tcagtaatataccaccaccatcgtttttcttat

SEQ ID NO: 844406 - DNA, 33 bp, Homo sapien
tcagtaatataccaccgccatcgtttttcttat

SEQ ID NO: 844407 - DNA, 33 bp, Homo sapien
catataggctatttgaaagggaacacagtaaac

SEQ ID NO: 844408 - DNA, 33 bp, Homo sapien
catataggctatttgacagggaacacagtaaac

SEQ ID NO: 844409 - DNA, 33 bp, Homo sapien
ggaagtcaagatacacaatgtgactcctaaaca

SEQ ID NO: 844410 - DNA, 33 bp, Homo sapien
ggaagtcaagatacacgatgtgactcctaaaca

SEQ ID NO: 844411 - DNA, 33 bp, Homo sapien
cacgtgcaaatcaatcaacaattttacctgctt

SEQ ID NO: 844412 - DNA, 33 bp, Homo sapien
cacgtgcaaatcaatcgacaattttacctgctt

SEQ ID NO: 844413 - DNA, 33 bp, Homo sapien
acttaacaccaccccaaagattagcgcaagtct

SEQ ID NO: 844414 - DNA, 33 bp, Homo sapien
acttaacaccaccccagagattagcgcaagtct

SEQ ID NO: 844415 - DNA, 33 bp, Homo sapien
tctaagggtgtcaaaaccttcaccagttccatt

SEQ ID NO: 844416 - DNA, 33 bp, Homo sapien
tctaagggtgtcaaaagcttcaccagttccatt

SEQ ID NO: 844417 - DNA, 33 bp, Homo sapien
agcaagaacatgacaaacagaaagcagaagaac

SEQ ID NO: 844418 - DNA, 33 bp, Homo sapien
agcaagaacatgacaagcagaaagcagaagaac

SEQ ID NO: 844419 - DNA, 33 bp, Homo sapien
aaatgagaactctcctcaaactaaaatgactga

SEQ ID NO: 844420 - DNA, 33 bp, Homo sapien
aaatgagaactctcctgaaactaaaatgactga

SEQ ID NO: 844421 - DNA, 33 bp, Homo sapien
tggaccacaatgaaccaagagaagattttcatt

SEQ ID NO: 844422 - DNA, 33 bp, Homo sapien
tggaccacaatgaaccgagagaagattttcatt

SEQ ID NO: 844423 - DNA, 33 bp, Homo sapien
gacaaaatgacagagaactagtgatgatttcat

SEQ ID NO: 844424 - DNA, 33 bp, Homo sapien
gacaaaatgacagagagctagtgatgatttcat

SEQ ID NO: 844425 - DNA, 33 bp, Homo sapien
aacattggtataggacacattgatgagttctgt

SEQ ID NO: 844426 - DNA, 33 bp, Homo sapien
aacattggtataggacgcattgatgagttctgt

SEQ ID NO: 844427 - DNA, 33 bp, Homo sapien
tttttaactgtaaagacagcacaaacattttta

SEQ ID NO: 844428 - DNA, 33 bp, Homo sapien
tttttaactgtaaagatagcacaaacattttta

SEQ ID NO: 844429 - DNA, 33 bp, Homo sapien
gtggtggctaatgatacaggattactgtaatga

SEQ ID NO: 844430 - DNA, 33 bp, Homo sapien
gtggtggctaatgatataggattactgtaatga

SEQ ID NO: 844431 - DNA, 33 bp, Homo sapien
tttttttagtatgacaataacttgagataagaa

SEQ ID NO: 844432 - DNA, 33 bp, Homo sapien
tttttttagtatgacagtaacttgagataagaa

SEQ ID NO: 844433 - DNA, 33 bp, Homo sapien
aacttctgagattttacagattccaatagtaac

SEQ ID NO: 844434 - DNA, 33 bp, Homo sapien
aacttctgagattttatagattccaatagtaac

SEQ ID NO: 844435 - DNA, 33 bp, Homo sapien
aagagtgagtaaatgaaggaagtacagaatctg

SEQ ID NO: 844436 - DNA, 33 bp, Homo sapien
aagagtgagtaaatgagggaagtacagaatctg

SEQ ID NO: 844437 - DNA, 33 bp, Homo sapien
tctccactaaaaagaaactctgacttaatcatt

SEQ ID NO: 844438 - DNA, 33 bp, Homo sapien
tctccactaaaaagaatctctgacttaatcatt

SEQ ID NO: 844439 - DNA, 33 bp, Homo sapien
ggctgcattttggaaccatggacatttcactgg

SEQ ID NO: 844440 - DNA, 33 bp, Homo sapien
ggctgcattttggaactatggacatttcactgg

SEQ ID NO: 844441 - DNA, 33 bp, Homo sapien
cccaccccaacccgccaaatatgtaacttcatc

SEQ ID NO: 844442 - DNA, 33 bp, Homo sapien
cccaccccaacccgccgaatatgtaacttcatc

SEQ ID NO: 844443 - DNA, 33 bp, Homo sapien
catgctatccatgttacagaactgtgaagaatt

SEQ ID NO: 844444 - DNA, 33 bp, Homo sapien
catgctatccatgttatagaactgtgaagaatt

SEQ ID NO: 844445 - DNA, 33 bp, Homo sapien
tataaatttgagatacacttttcagaaaaacat

SEQ ID NO: 844446 - DNA, 33 bp, Homo sapien
tataaatttgagatacgcttttcagaaaaacat

SEQ ID NO: 844447 - DNA, 33 bp, Homo sapien
tggattccaaagaacaacatcataatgaaactc

SEQ ID NO: 844448 - DNA, 33 bp, Homo sapien
tggattccaaagaacagcatcataatgaaactc

SEQ ID NO: 844449 - DNA, 33 bp, Homo sapien
ccaggagtgcaactaaagttaaacaagcacagc

SEQ ID NO: 844450 - DNA, 33 bp, Homo sapien
ccaggagtgcaactaaggttaaacaagcacagc

SEQ ID NO: 844451 - DNA, 33 bp, Homo sapien
cttaattatccagctacgacccaactttaatat

SEQ ID NO: 844452 - DNA, 33 bp, Homo sapien
cttaattatccagctatgacccaactttaatat

SEQ ID NO: 844453 - DNA, 33 bp, Homo sapien
aaaccatgtaactttacaggtagtttatgactg

SEQ ID NO: 844454 - DNA, 33 bp, Homo sapien
aaaccatgtaactttataggtagtttatgactg

SEQ ID NO: 844455 - DNA, 33 bp, Homo sapien
atccctcttcagtccacgagtcacacagctata

SEQ ID NO: 844456 - DNA, 33 bp, Homo sapien
atccctcttcagtccatgagtcacacagctata

SEQ ID NO: 844457 - DNA, 33 bp, Homo sapien
taggtatgattattcacgtttagaatacgagca

SEQ ID NO: 844458 - DNA, 33 bp, Homo sapien
taggtatgattattcatgtttagaatacgagca

SEQ ID NO: 844459 - DNA, 33 bp, Homo sapien
agaaccacgattggaaacaagacctcatagttg

SEQ ID NO: 844460 - DNA, 33 bp, Homo sapien
agaaccacgattggaagcaagacctcatagttg

SEQ ID NO: 844461 - DNA, 33 bp, Homo sapien
tccttagggtccatgaactcttcaaaggctttt

SEQ ID NO: 844462 - DNA, 33 bp, Homo sapien
tccttagggtccatgagctcttcaaaggctttt

SEQ ID NO: 844463 - DNA, 33 bp, Homo sapien
accccaaattatcagcaccttttggataatcat

SEQ ID NO: 844464 - DNA, 33 bp, Homo sapien
accccaaattatcagccccttttggataatcat

SEQ ID NO: 844465 - DNA, 33 bp, Homo sapien
tctgctcattccatcactagaacagtggtccag

SEQ ID NO: 844466 - DNA, 33 bp, Homo sapien
tctgctcattccatcattagaacagtggtccag

SEQ ID NO: 844467 - DNA, 33 bp, Homo sapien
gtttaagcatattaaaactgtcctcaggctatc

SEQ ID NO: 844468 - DNA, 33 bp, Homo sapien
gtttaagcatattaaacctgtcctcaggctatc

SEQ ID NO: 844469 - DNA, 33 bp, Homo sapien
gtgaagcataagcgtaccagtttgaggagagca

SEQ ID NO: 844470 - DNA, 33 bp, Homo sapien
gtgaagcataagcgtagcagtttgaggagagca

SEQ ID NO: 844471 - DNA, 33 bp, Homo sapien
ctccatctcactctgggactggatgagggcacc

SEQ ID NO: 844472 - DNA, 33 bp, Homo sapien
ctccatctcactctggtactggatgagggcacc

SEQ ID NO: 844473 - DNA, 33 bp, Homo sapien
gaccatcttctacatacgtggtatcaaactctc

SEQ ID NO: 844474 - DNA, 33 bp, Homo sapien
gaccatcttctacatatgtggtatcaaactctc

SEQ ID NO: 844475 - DNA, 33 bp, Homo sapien
cccatgaatctaggaacagaaagaaaagtacat

SEQ ID NO: 844476 - DNA, 33 bp, Homo sapien
cccatgaatctaggaagagaaagaaaagtacat

SEQ ID NO: 844477 - DNA, 33 bp, Homo sapien
ctatttacaaatgatgcagcatgttaagtctta

SEQ ID NO: 844478 - DNA, 33 bp, Homo sapien
ctatttacaaatgatgtagcatgttaagtctta

SEQ ID NO: 844479 - DNA, 33 bp, Homo sapien
agatttcataagaaccaaagactaaaatattcc

SEQ ID NO: 844480 - DNA, 33 bp, Homo sapien
agatttcataagaaccgaagactaaaatattcc

SEQ ID NO: 844481 - DNA, 33 bp, Homo sapien
aatttcatcagcatcacaaataatttcatattt

SEQ ID NO: 844482 - DNA, 33 bp, Homo sapien
aatttcatcagcatcataaataatttcatattt

SEQ ID NO: 844483 - DNA, 33 bp, Homo sapien
cccttatctattttgccacacaactaagaccag

SEQ ID NO: 844484 - DNA, 33 bp, Homo sapien
cccttatctattttgctacacaactaagaccag

SEQ ID NO: 844485 - DNA, 33 bp, Homo sapien
taaacttggaaaagagaatgctacagtagtttc

SEQ ID NO: 844486 - DNA, 33 bp, Homo sapien
taaacttggaaaagaggatgctacagtagtttc

SEQ ID NO: 844487 - DNA, 33 bp, Homo sapien
cctgcattgcgggtaaacctagcggtatgccct

SEQ ID NO: 844488 - DNA, 33 bp, Homo sapien
cctgcattgcgggtaagcctagcggtatgccct

SEQ ID NO: 844489 - DNA, 33 bp, Homo sapien
aaaatggaagtattgaagactggatttactctc

SEQ ID NO: 844490 - DNA, 33 bp, Homo sapien
aaaatggaagtattgaggactggatttactctc

SEQ ID NO: 844491 - DNA, 33 bp, Homo sapien
tggtattcaggctgtaaaatttttctttaatgg

SEQ ID NO: 844492 - DNA, 33 bp, Homo sapien
tggtattcaggctgtagaatttttctttaatgg

SEQ ID NO: 844493 - DNA, 33 bp, Homo sapien
gttacttttgaagttacagtcattcaggaaagc

SEQ ID NO: 844494 - DNA, 33 bp, Homo sapien
gttacttttgaagttatagtcattcaggaaagc

SEQ ID NO: 844495 - DNA, 33 bp, Homo sapien
tataatgcattgtaaaatgaatcttgagcatct

SEQ ID NO: 844496 - DNA, 33 bp, Homo sapien
tataatgcattgtaaattgaatcttgagcatct

SEQ ID NO: 844497 - DNA, 33 bp, Homo sapien
cagtactcagctgttacaattcagttctttcat

SEQ ID NO: 844498 - DNA, 33 bp, Homo sapien
cagtactcagctgttataattcagttctttcat

SEQ ID NO: 844499 - DNA, 33 bp, Homo sapien
aaatcagataactaagcctgaacatactatgat

SEQ ID NO: 844500 - DNA, 33 bp, Homo sapien
aaatcagataactaaggctgaacatactatgat

SEQ ID NO: 844501 - DNA, 33 bp, Homo sapien
tatatgtatcacctcaagtcttttagcaaataa

SEQ ID NO: 844502 - DNA, 33 bp, Homo sapien
tatatgtatcacctcaggtcttttagcaaataa

SEQ ID NO: 844503 - DNA, 33 bp, Homo sapien
tatatgagttagggaaaagagactgtgaaggga

SEQ ID NO: 844504 - DNA, 33 bp, Homo sapien
tatatgagttagggaagagagactgtgaaggga

SEQ ID NO: 844505 - DNA, 33 bp, Homo sapien
tagagaattgagatacagcaaaacatactctat

SEQ ID NO: 844506 - DNA, 33 bp, Homo sapien
tagagaattgagatacggcaaaacatactctat

SEQ ID NO: 844507 - DNA, 33 bp, Homo sapien
taaataatgcttttgtaaatttgaatggaaaac

SEQ ID NO: 844508 - DNA, 33 bp, Homo sapien
taaataatgcttttgtgaatttgaatggaaaac

SEQ ID NO: 844509 - DNA, 33 bp, Homo sapien
tacacatacagtgaaaacaatagaatgggcact

SEQ ID NO: 844510 - DNA, 33 bp, Homo sapien
tacacatacagtgaaagcaatagaatgggcact

SEQ ID NO: 844511 - DNA, 33 bp, Homo sapien
ccacatatctacaaatcatatatctcaacactg

SEQ ID NO: 844512 - DNA, 33 bp, Homo sapien
ccacatatctacaaattatatatctcaacactg

SEQ ID NO: 844513 - DNA, 33 bp, Homo sapien
ttcaaggattggaaaacaacagagctgcagtga

SEQ ID NO: 844514 - DNA, 33 bp, Homo sapien
ttcaaggattggaaaagaacagagctgcagtga

SEQ ID NO: 844515 - DNA, 33 bp, Homo sapien
atcttaacggtagcacaccactcccgattgtta

SEQ ID NO: 844516 - DNA, 33 bp, Homo sapien
atcttaacggtagcacgccactcccgattgtta

SEQ ID NO: 844517 - DNA, 33 bp, Homo sapien
ttgttatgcattgataccaagtcaatacaatag

SEQ ID NO: 844518 - DNA, 33 bp, Homo sapien
ttgttatgcattgatagcaagtcaatacaatag

SEQ ID NO: 844519 - DNA, 33 bp, Homo sapien
ttgtgtgaacttcctaactaggcattcagggaa

SEQ ID NO: 844520 - DNA, 33 bp, Homo sapien
ttgtgtgaacttcctagctaggcattcagggaa

SEQ ID NO: 844521 - DNA, 33 bp, Homo sapien
ttctaattcacaaatagagaagaagtgacggaa

SEQ ID NO: 844522 - DNA, 33 bp, Homo sapien
ttctaattcacaaatatagaagaagtgacggaa

SEQ ID NO: 844523 - DNA, 33 bp, Homo sapien
ccagacaaaggagactaagaaaccatgacgact

SEQ ID NO: 844524 - DNA, 33 bp, Homo sapien
ccagacaaaggagactgagaaaccatgacgact

SEQ ID NO: 844525 - DNA, 33 bp, Homo sapien
aaagtgagaagtaacaccaaaaattacctatcg

SEQ ID NO: 844526 - DNA, 33 bp, Homo sapien
aaagtgagaagtaacatcaaaaattacctatcg

SEQ ID NO: 844527 - DNA, 33 bp, Homo sapien
aaaaaaacatcaattcacagactggtacactgt

SEQ ID NO: 844528 - DNA, 33 bp, Homo sapien
aaaaaaacatcaattcgcagactggtacactgt

SEQ ID NO: 844529 - DNA, 33 bp, Homo sapien
gagacagatgagccagcatattcatacttggat

SEQ ID NO: 844530 - DNA, 33 bp, Homo sapien
gagacagatgagccaggatattcatacttggat

SEQ ID NO: 844531 - DNA, 33 bp, Homo sapien
aagagaaaagaagtggaaaatagattctcagct

SEQ ID NO: 844532 - DNA, 33 bp, Homo sapien
aagagaaaagaagtggtaaatagattctcagct

SEQ ID NO: 844533 - DNA, 33 bp, Homo sapien
aaatgcagcacttaaaaagtcaacagttaaata

SEQ ID NO: 844534 - DNA, 33 bp, Homo sapien
aaatgcagcacttaaagagtcaacagttaaata

SEQ ID NO: 844535 - DNA, 33 bp, Homo sapien
ttttgtgctttctccaatggaatggcaggagca

SEQ ID NO: 844536 - DNA, 33 bp, Homo sapien
ttttgtgctttctccagtggaatggcaggagca

SEQ ID NO: 844537 - DNA, 33 bp, Homo sapien
taagtgatagattatacgttgttgctcaaagag

SEQ ID NO: 844538 - DNA, 33 bp, Homo sapien
taagtgatagattatatgttgttgctcaaagag

SEQ ID NO: 844539 - DNA, 33 bp, Homo sapien
atgtcttaacttccaccgtcatctcttctcact

SEQ ID NO: 844540 - DNA, 33 bp, Homo sapien
atgtcttaacttccactgtcatctcttctcact

SEQ ID NO: 844541 - DNA, 33 bp, Homo sapien
aacaaaatctggtacaaagcaaacatactatta

SEQ ID NO: 844542 - DNA, 33 bp, Homo sapien
aacaaaatctggtacatagcaaacatactatta

SEQ ID NO: 844543 - DNA, 33 bp, Homo sapien
catccaaatgtccctcaaatgctgaacaggtaa

SEQ ID NO: 844544 - DNA, 33 bp, Homo sapien
catccaaatgtccctcgaatgctgaacaggtaa

SEQ ID NO: 844545 - DNA, 33 bp, Homo sapien
gattgcagactatcacaggaatggttattctgt

SEQ ID NO: 844546 - DNA, 33 bp, Homo sapien
gattgcagactatcacgggaatggttattctgt

SEQ ID NO: 844547 - DNA, 33 bp, Homo sapien; identical to SEQ ID NO: 844545

SEQ ID NO: 844548 - DNA, 33 bp, Homo sapien; identical to SEQ ID NO: 844546

SEQ ID NO: 844549 - DNA, 33 bp, Homo sapien
aacaaacagaagcaagcagagaataaatggaga

SEQ ID NO: 844550 - DNA, 33 bp, Homo sapien
aacaaacagaagcaagtagagaataaatggaga

SEQ ID NO: 844551 - DNA, 33 bp, Homo sapien
taagtaggattagaaccgtgacttaggataggg

SEQ ID NO: 844552 - DNA, 33 bp, Homo sapien
taagtaggattagaactgtgacttaggataggg

SEQ ID NO: 844553 - DNA, 33 bp, Homo sapien
cccttgtagaccatatgaaatattctgacacca

SEQ ID NO: 844554 - DNA, 33 bp, Homo sapien
cccttgtagaccatattaaatattctgacacca

SEQ ID NO: 844555 - DNA, 33 bp, Homo sapien
agttgctgaattaacccattctggaaccaccaa

SEQ ID NO: 844556 - DNA, 33 bp, Homo sapien
agttgctgaattaacctattctggaaccaccaa

SEQ ID NO: 844557 - DNA, 33 bp, Homo sapien
aactatgctgtaaacgcatgtgctattatttag

SEQ ID NO: 844558 - DNA, 33 bp, Homo sapien
aactatgctgtaaacgtatgtgctattatttag

SEQ ID NO: 844559 - DNA, 33 bp, Homo sapien
gttaacacataaatgacatgaaagtgaaggcca

SEQ ID NO: 844560 - DNA, 33 bp, Homo sapien
gttaacacataaatgatatgaaagtgaaggcca

SEQ ID NO: 844561 - DNA, 33 bp, Homo sapien
tgattacaagtatcaacacatgtggtaaaggtt

SEQ ID NO: 844562 - DNA, 33 bp, Homo sapien
tgattacaagtatcaatacatgtggtaaaggtt

SEQ ID NO: 844563 - DNA, 33 bp, Homo sapien
caccatctgaagaaggaaacctctgtgtgagga

SEQ ID NO: 844564 - DNA, 33 bp, Homo sapien
caccatctgaagaagggaacctctgtgtgagga

SEQ ID NO: 844565 - DNA, 33 bp, Homo sapien
taaccacacaaacaaacgtgacattattacatg

SEQ ID NO: 844566 - DNA, 33 bp, Homo sapien
taaccacacaaacaaatgtgacattattacatg

SEQ ID NO: 844567 - DNA, 33 bp, Homo sapien
cttgttgaatctaatacgcagtcaagactgaaa

SEQ ID NO: 844568 - DNA, 33 bp, Homo sapien
cttgttgaatctaatatgcagtcaagactgaaa

SEQ ID NO: 844569 - DNA, 33 bp, Homo sapien
gagagaatgtctggatcaagaaagcaaagaagg

SEQ ID NO: 844570 - DNA, 33 bp, Homo sapien
gagagaatgtctggatgaagaaagcaaagaagg

SEQ ID NO: 844571 - DNA, 33 bp, Homo sapien
gacaatttaattgtgacgtagaaggagtaaaaa

SEQ ID NO: 844572 - DNA, 33 bp, Homo sapien
gacaatttaattgtgatgtagaaggagtaaaaa

SEQ ID NO: 844573 - DNA, 33 bp, Homo sapien
aaaaaggctttatgcaatcatccaagtgaaaag

SEQ ID NO: 844574 - DNA, 33 bp, Homo sapien
aaaaaggctttatgcagtcatccaagtgaaaag

SEQ ID NO: 844575 - DNA, 33 bp, Homo sapien
taatgtgaaatatgacgggctgagctataaaga

SEQ ID NO: 844576 - DNA, 33 bp, Homo sapien
taatgtgaaatatgactggctgagctataaaga

SEQ ID NO: 844577 - DNA, 33 bp, Homo sapien
cacaaaacacaatgacagcacatcaggtagaaa

SEQ ID NO: 844578 - DNA, 33 bp, Homo sapien
cacaaaacacaatgacggcacatcaggtagaaa

SEQ ID NO: 844579 - DNA, 33 bp, Homo sapien
ctcagtaacagcaaaaaattctagacatctgtt

SEQ ID NO: 844580 - DNA, 33 bp, Homo sapien
ctcagtaacagcaaaatattctagacatctgtt

SEQ ID NO: 844581 - DNA, 33 bp, Homo sapien
aggataccaaacctcaaagcaagtaatggagcc

SEQ ID NO: 844582 - DNA, 33 bp, Homo sapien
aggataccaaacctcagagcaagtaatggagcc

SEQ ID NO: 844583 - DNA, 33 bp, Homo sapien
tctgaagggtgacccaagtgatttctgcaataa

SEQ ID NO: 844584 - DNA, 33 bp, Homo sapien
tctgaagggtgacccaggtgatttctgcaataa

SEQ ID NO: 844585 - DNA, 33 bp, Homo sapien
gtgcatataaaactcaaatgtatactacactgc

SEQ ID NO: 844586 - DNA, 33 bp, Homo sapien
gtgcatataaaactcatatgtatactacactgc

SEQ ID NO: 844587 - DNA, 33 bp, Homo sapien
caacttgcaaattatagaactagttgattttaa

SEQ ID NO: 844588 - DNA, 33 bp, Homo sapien
caacttgcaaattatataactagttgattttaa

SEQ ID NO: 844589 - DNA, 33 bp, Homo sapien
catacgttttttctaactcttgatacagttttt

SEQ ID NO: 844590 - DNA, 33 bp, Homo sapien
catacgttttttctaattcttgatacagttttt

SEQ ID NO: 844591 - DNA, 33 bp, Homo sapien
ggtgatcaaccgctagaccttgtggttttaaac

SEQ ID NO: 844592 - DNA, 33 bp, Homo sapien
ggtgatcaaccgctagtccttgtggttttaaac

SEQ ID NO: 844593 - DNA, 33 bp, Homo sapien
ttggctgcagacattaacccaataatatgaaaa

SEQ ID NO: 844594 - DNA, 33 bp, Homo sapien
ttggctgcagacattagcccaataatatgaaaa

SEQ ID NO: 844595 - DNA, 33 bp, Homo sapien
aagaaaaatgtggaaagccagagaaatgggata

SEQ ID NO: 844596 - DNA, 33 bp, Homo sapien
aagaaaaatgtggaaatccagagaaatgggata

SEQ ID NO: 844597 - DNA, 33 bp, Homo sapien
atgctatgaagataaacaggaaaatgccaatta

SEQ ID NO: 844598 - DNA, 33 bp, Homo sapien
atgctatgaagataaataggaaaatgccaatta

SEQ ID NO: 844599 - DNA, 33 bp, Homo sapien
tctcatcattctaagcaaagtggtctcaactaa

SEQ ID NO: 844600 - DNA, 33 bp, Homo sapien
tctcatcattctaagcgaagtggtctcaactaa

SEQ ID NO: 844601 - DNA, 33 bp, Homo sapien
gggagctgaatggcaacagatggaactggagag

SEQ ID NO: 844602 - DNA, 33 bp, Homo sapien
gggagctgaatggcaatagatggaactggagag

SEQ ID NO: 844603 - DNA, 33 bp, Homo sapien
ttacatatagtgtataggtaaaacaatgagatt

SEQ ID NO: 844604 - DNA, 33 bp, Homo sapien
ttacatatagtgtatatgtaaaacaatgagatt

SEQ ID NO: 844605 - DNA, 33 bp, Homo sapien
catcagagaatcctaacgaaatgtgtctcagga

SEQ ID NO: 844606 - DNA, 33 bp, Homo sapien
catcagagaatcctaatgaaatgtgtctcagga

SEQ ID NO: 844607 - DNA, 33 bp, Homo sapien
ctgaacccaaagtgtgcaggtcagttttaggag

SEQ ID NO: 844608 - DNA, 33 bp, Homo sapien
ctgaacccaaagtgtgtaggtcagttttaggag

SEQ ID NO: 844609 - DNA, 33 bp, Homo sapien
aagggtcctgccttaaaattggagctaaattaa

SEQ ID NO: 844610 - DNA, 33 bp, Homo sapien
aagggtcctgccttaatattggagctaaattaa

SEQ ID NO: 844611 - DNA, 33 bp, Homo sapien
cagtcttcctcctaccactctggtgacttctgc

SEQ ID NO: 844612 - DNA, 33 bp, Homo sapien
cagtcttcctcctacctctctggtgacttctgc

SEQ ID NO: 844613 - DNA, 33 bp, Homo sapien
ctggtggtctctgtcaaggagaggtcagaaagt

SEQ ID NO: 844614 - DNA, 33 bp, Homo sapien
ctggtggtctctgtcatggagaggtcagaaagt

SEQ ID NO: 844615 - DNA, 33 bp, Homo sapien
tgtgaaatggtctctggcaaagtcattatgttt

SEQ ID NO: 844616 - DNA, 33 bp, Homo sapien
tgtgaaatggtctctgtcaaagtcattatgttt

SEQ ID NO: 844617 - DNA, 33 bp, Homo sapien
atggcacctctccaaaacattgattgctcatga

SEQ ID NO: 844618 - DNA, 33 bp, Homo sapien
atggcacctctccaaagcattgattgctcatga

SEQ ID NO: 844619 - DNA, 33 bp, Homo sapien
ccaatgctactgtgcacggcctaataaaccaaa

SEQ ID NO: 844620 - DNA, 33 bp, Homo sapien
ccaatgctactgtgcatggcctaataaaccaaa

SEQ ID NO: 844621 - DNA, 33 bp, Homo sapien
taacaatttatctgtccaattattctcatatat

SEQ ID NO: 844622 - DNA, 33 bp, Homo sapien
taacaatttatctgtcgaattattctcatatat

SEQ ID NO: 844623 - DNA, 33 bp, Homo sapien
gaatacaggatcttgacatatggagagaaggaa

SEQ ID NO: 844624 - DNA, 33 bp, Homo sapien
gaatacaggatcttgagatatggagagaaggaa

SEQ ID NO: 844625 - DNA, 33 bp, Homo sapien
gtgataggtctagtaaacaattttgaagtagtg

SEQ ID NO: 844626 - DNA, 33 bp, Homo sapien
gtgataggtctagtaaccaattttgaagtagtg

SEQ ID NO: 844627 - DNA, 33 bp, Homo sapien
gccagagtccttcttaccacttttatcaccctc

SEQ ID NO: 844628 - DNA, 33 bp, Homo sapien
gccagagtccttcttatcacttttatcaccctc

SEQ ID NO: 844629 - DNA, 33 bp, Homo sapien
gaagaacaaggtagaacgaataagctctggaat

SEQ ID NO: 844630 - DNA, 33 bp, Homo sapien
gaagaacaaggtagaaggaataagctctggaat

SEQ ID NO: 844631 - DNA, 33 bp, Homo sapien
ttggcacatactaagcaattcattaattaccag

SEQ ID NO: 844632 - DNA, 33 bp, Homo sapien
ttggcacatactaagccattcattaattaccag

SEQ ID NO: 844633 - DNA, 33 bp, Homo sapien
gtagaagggaagaatgcaatatgggcaagcact

SEQ ID NO: 844634 - DNA, 33 bp, Homo sapien
gtagaagggaagaatgtaatatgggcaagcact

SEQ ID NO: 844635 - DNA, 33 bp, Homo sapien
gacaacccagccaatcagagaagagctgagaat

SEQ ID NO: 844636 - DNA, 33 bp, Homo sapien
gacaacccagccaatcggagaagagctgagaat

SEQ ID NO: 844637 - DNA, 33 bp, Homo sapien
taattctgatgactacaacacaaaaaaatttta

SEQ ID NO: 844638 - DNA, 33 bp, Homo sapien
taattctgatgactaccacacaaaaaaatttta

SEQ ID NO: 844639 - DNA, 33 bp, Homo sapien
cagagtcagcacacaactctggactctttccct

SEQ ID NO: 844640 - DNA, 33 bp, Homo sapien
cagagtcagcacacaattctggactctttccct

SEQ ID NO: 844641 - DNA, 33 bp, Homo sapien
tactactcaagcacagacattaaattctgccta

SEQ ID NO: 844642 - DNA, 33 bp, Homo sapien
tactactcaagcacaggcattaaattctgccta

SEQ ID NO: 844643 - DNA, 33 bp, Homo sapien
catcctggtttttctagcagtgctatgttctac

SEQ ID NO: 844644 - DNA, 33 bp, Homo sapien
catcctggtttttctatcagtgctatgttctac

SEQ ID NO: 844645 - DNA, 33 bp, Homo sapien
caaatttccgcatccaatctgagtggcttttgg

SEQ ID NO: 844646 - DNA, 33 bp, Homo sapien
caaatttccgcatccattctgagtggcttttgg

SEQ ID NO: 844647 - DNA, 33 bp, Homo sapien
agatattacttagctacgaatgaatcttattta

SEQ ID NO: 844648 - DNA, 33 bp, Homo sapien
agatattacttagctatgaatgaatcttattta

SEQ ID NO: 844649 - DNA, 33 bp, Homo sapien
taacttctttgaaaatcacgtttgtgtcttgtt

SEQ ID NO: 844650 - DNA, 33 bp, Homo sapien
taacttctttgaaaattacgtttgtgtcttgtt

SEQ ID NO: 844651 - DNA, 33 bp, Homo sapien
atcacaaaaatgaggccgacattatttgtatag

SEQ ID NO: 844652 - DNA, 33 bp, Homo sapien
atcacaaaaatgaggctgacattatttgtatag

SEQ ID NO: 844653 - DNA, 33 bp, Homo sapien
gcctgcaatgcaaagagcttgggctaggctgta

SEQ ID NO: 844654 - DNA, 33 bp, Homo sapien
gcctgcaatgcaaagatcttgggctaggctgta

SEQ ID NO: 844655 - DNA, 33 bp, Homo sapien
aaatacctaggaatccaacgtacaagggatgtg

SEQ ID NO: 844656 - DNA, 33 bp, Homo sapien
aaatacctaggaatccgacgtacaagggatgtg

SEQ ID NO: 844657 - DNA, 33 bp, Homo sapien
aaaacttgcctttaaaattaagcatctctgcta

SEQ ID NO: 844658 - DNA, 33 bp, Homo sapien
aaaacttgcctttaaagttaagcatctctgcta

SEQ ID NO: 844659 - DNA, 33 bp, Homo sapien
gggtatcttgaccacaatgactctgctgggccc

SEQ ID NO: 844660 - DNA, 33 bp, Homo sapien
gggtatcttgaccacagtgactctgctgggccc

SEQ ID NO: 844661 - DNA, 33 bp, Homo sapien
cacagaccttctcagtgaagcagctggactttt

SEQ ID NO: 844662 - DNA, 33 bp, Homo sapien
cacagaccttctcagttaagcagctggactttt

SEQ ID NO: 844663 - DNA, 33 bp, Homo sapien
tctgaatctcaactccaaattcctggaaacaag

SEQ ID NO: 844664 - DNA, 33 bp, Homo sapien
tctgaatctcaactcctaattcctggaaacaag

SEQ ID NO: 844665 - DNA, 33 bp, Homo sapien
aaatttgtgttactcaactaagacaactgaata

SEQ ID NO: 844666 - DNA, 33 bp, Homo sapien
aaatttgtgttactcagctaagacaactgaata

SEQ ID NO: 844667 - DNA, 33 bp, Homo sapien
aggtatgaatgtagaaatagattgatgattcat

SEQ ID NO: 844668 - DNA, 33 bp, Homo sapien
aggtatgaatgtagaagtagattgatgattcat

SEQ ID NO: 844669 - DNA, 33 bp, Homo sapien
gagcaaaagaagctggaagcagagaaaaatgat

SEQ ID NO: 844670 - DNA, 33 bp, Homo sapien
gagcaaaagaagctgggagcagagaaaaatgat

SEQ ID NO: 844671 - DNA, 33 bp, Homo sapien
caggtgaagactgagcaaggctggttcaccaag

SEQ ID NO: 844672 - DNA, 33 bp, Homo sapien
caggtgaagactgagcgaggctggttcaccaag

SEQ ID NO: 844673 - DNA, 33 bp, Homo sapien
agtgaattgtgaatggcatatatcacggccaac

SEQ ID NO: 844674 - DNA, 33 bp, Homo sapien
agtgaattgtgaatggtatatatcacggccaac

SEQ ID NO: 844675 - DNA, 33 bp, Homo sapien
tttgttaaaaaatggcacttcataatgcctcac

SEQ ID NO: 844676 - DNA, 33 bp, Homo sapien
tttgttaaaaaatggcgcttcataatgcctcac

SEQ ID NO: 844677 - DNA, 33 bp, Homo sapien
ccaaaatagaaatacaaagtttgcaagtagaag

SEQ ID NO: 844678 - DNA, 33 bp, Homo sapien
ccaaaatagaaatacagagtttgcaagtagaag

SEQ ID NO: 844679 - DNA, 33 bp, Homo sapien
catacttccaactcagaaagatctcttttccac

SEQ ID NO: 844680 - DNA, 33 bp, Homo sapien
catacttccaactcaggaagatctcttttccac

SEQ ID NO: 844681 - DNA, 33 bp, Homo sapien
atctggggagtaataacaaggctcagccactct

SEQ ID NO: 844682 - DNA, 33 bp, Homo sapien
atctggggagtaataataaggctcagccactct

SEQ ID NO: 844683 - DNA, 33 bp, Homo sapien
gtttctttcaaaataccatgggggtgtcaaatg

SEQ ID NO: 844684 - DNA, 33 bp, Homo sapien
gtttctttcaaaatacgatgggggtgtcaaatg

SEQ ID NO: 844685 - DNA, 33 bp, Homo sapien
gagctggaaaagagaacgtccaataaggaattg

SEQ ID NO: 844686 - DNA, 33 bp, Homo sapien
gagctggaaaagagaaggtccaataaggaattg

SEQ ID NO: 844687 - DNA, 33 bp, Homo sapien
gtaggtaaaactcataactgattgtaaggcaga

SEQ ID NO: 844688 - DNA, 33 bp, Homo sapien
gtaggtaaaactcatatctgattgtaaggcaga

SEQ ID NO: 844689 - DNA, 33 bp, Homo sapien
caacttgactctctgaaatggagcaactgaggt

SEQ ID NO: 844690 - DNA, 33 bp, Homo sapien
caacttgactctctgacatggagcaactgaggt

SEQ ID NO: 844691 - DNA, 33 bp, Homo sapien
cctgtttggtgttctaccctactgtggccaaac

SEQ ID NO: 844692 - DNA, 33 bp, Homo sapien
cctgtttggtgttctatcctactgtggccaaac

SEQ ID NO: 844693 - DNA, 33 bp, Homo sapien
atagaatgggagtagaatcatcagcagatttga

SEQ ID NO: 844694 - DNA, 33 bp, Homo sapien
atagaatgggagtagagtcatcagcagatttga

SEQ ID NO: 844695 - DNA, 33 bp, Homo sapien
aaagtttggcacattacgttatctatccattct

SEQ ID NO: 844696 - DNA, 33 bp, Homo sapien
aaagtttggcacattatgttatctatccattct

SEQ ID NO: 844697 - DNA, 33 bp, Homo sapien
tcaaccaggaaagttgaacccttatcacatgat

SEQ ID NO: 844698 - DNA, 33 bp, Homo sapien
tcaaccaggaaagttgtacccttatcacatgat

SEQ ID NO: 844699 - DNA, 33 bp, Homo sapien
aataaatcggccctaagaatagatgattgttta

SEQ ID NO: 844700 - DNA, 33 bp, Homo sapien
aataaatcggccctaataatagatgattgttta

SEQ ID NO: 844701 - DNA, 33 bp, Homo sapien
tccaaaggtctcccaggctgctggaacacactc

SEQ ID NO: 844702 - DNA, 33 bp, Homo sapien
tccaaaggtctcccagtctgctggaacacactc

SEQ ID NO: 844703 - DNA, 33 bp, Homo sapien
cccgaatattatgaaccatatgacagggggttg

SEQ ID NO: 844704 - DNA, 33 bp, Homo sapien
cccgaatattatgaactatatgacagggggttg

SEQ ID NO: 844705 - DNA, 33 bp, Homo sapien
gaggaagagaccttagcagtagctgtggccaag

SEQ ID NO: 844706 - DNA, 33 bp, Homo sapien
gaggaagagaccttagtagtagctgtggccaag

SEQ ID NO: 844707 - DNA, 33 bp, Homo sapien
atcttatttctccatcacatatgaagcttagtt

SEQ ID NO: 844708 - DNA, 33 bp, Homo sapien
atcttatttctccatcgcatatgaagcttagtt

SEQ ID NO: 844709 - DNA, 33 bp, Homo sapien
cataggtattaaataaagtgcctttgaagagaa

SEQ ID NO: 844710 - DNA, 33 bp, Homo sapien
cataggtattaaataaggtgcctttgaagagaa

SEQ ID NO: 844711 - DNA, 33 bp, Homo sapien
cagagtctattgtcctaagaagtatgtggtaag

SEQ ID NO: 844712 - DNA, 33 bp, Homo sapien
cagagtctattgtcctgagaagtatgtggtaag

SEQ ID NO: 844713 - DNA, 33 bp, Homo sapien
tattgaaatgataaaacaagtatgcagaaataa

SEQ ID NO: 844714 - DNA, 33 bp, Homo sapien
tattgaaatgataaaataagtatgcagaaataa

SEQ ID NO: 844715 - DNA, 33 bp, Homo sapien
gtccttgtggtaatgagcaagttattgctcatt

SEQ ID NO: 844716 - DNA, 33 bp, Homo sapien
gtccttgtggtaatgatcaagttattgctcatt

SEQ ID NO: 844717 - DNA, 33 bp, Homo sapien
cagctctcacaagaaccaaatgagcaataactt

SEQ ID NO: 844718 - DNA, 33 bp, Homo sapien
cagctctcacaagaactaaatgagcaataactt

SEQ ID NO: 844719 - DNA, 33 bp, Homo sapien
tgtttacaggagagaaagtcaagtgtgctaagg

SEQ ID NO: 844720 - DNA, 33 bp, Homo sapien
tgtttacaggagagaacgtcaagtgtgctaagg

SEQ ID NO: 844721 - DNA, 33 bp, Homo sapien
attaagttggagtataaatacaagtcaggagtt

SEQ ID NO: 844722 - DNA, 33 bp, Homo sapien
attaagttggagtatatatacaagtcaggagtt

SEQ ID NO: 844723 - DNA, 33 bp, Homo sapien
tgcatttttgtcatataacactacttctattct

SEQ ID NO: 844724 - DNA, 33 bp, Homo sapien
tgcatttttgtcatatgacactacttctattct

SEQ ID NO: 844725 - DNA, 33 bp, Homo sapien
aagaagaaatccaagacgtagtagtgttggatt

SEQ ID NO: 844726 - DNA, 33 bp, Homo sapien
aagaagaaatccaagatgtagtagtgttggatt

SEQ ID NO: 844727 - DNA, 33 bp, Homo sapien
tttatgaataaatagacatttgcactccatcat

SEQ ID NO: 844728 - DNA, 33 bp, Homo sapien
tttatgaataaatagatatttgcactccatcat

SEQ ID NO: 844729 - DNA, 33 bp, Homo sapien
ggctctatatgccccccaggattggatagtggt

SEQ ID NO: 844730 - DNA, 33 bp, Homo sapien
ggctctatatgcccccgaggattggatagtggt

SEQ ID NO: 844731 - DNA, 33 bp, Homo sapien
gatatagattacagaaaaaactgcaagctatat

SEQ ID NO: 844732 - DNA, 33 bp, Homo sapien
gatatagattacagaagaaactgcaagctatat

SEQ ID NO: 844733 - DNA, 33 bp, Homo sapien
agtatacgtagaatcaatattttaccattcaag

SEQ ID NO: 844734 - DNA, 33 bp, Homo sapien
agtatacgtagaatcagtattttaccattcaag

SEQ ID NO: 844735 - DNA, 33 bp, Homo sapien; identical to SEQ ID NO: 844733

SEQ ID NO: 844736 - DNA, 33 bp, Homo sapien; identical to SEQ ID NO: 844734

SEQ ID NO: 844737 - DNA, 33 bp, Homo sapien
tagtgtagatctaccacgtaattaattctctgt

SEQ ID NO: 844738 - DNA, 33 bp, Homo sapien
tagtgtagatctaccatgtaattaattctctgt

SEQ ID NO: 844739 - DNA, 33 bp, Homo sapien
tgatatatatttgccaaatttctgtccaagtat

SEQ ID NO: 844740 - DNA, 33 bp, Homo sapien
tgatatatatttgccacatttctgtccaagtat

SEQ ID NO: 844741 - DNA, 33 bp, Homo sapien; identical to SEQ ID NO: 844739

SEQ ID NO: 844742 - DNA, 33 bp, Homo sapien; identical to SEQ ID NO: 844740

SEQ ID NO: 844743 - DNA, 33 bp, Homo sapien
aatactgtaataggtaataaaatgtatgtattt

SEQ ID NO: 844744 - DNA, 33 bp, Homo sapien
aatactgtaataggtagtaaaatgtatgtattt

SEQ ID NO: 844745 - DNA, 33 bp, Homo sapien
catgcaagtgttacaagtcatcatgtttgtggt

SEQ ID NO: 844746 - DNA, 33 bp, Homo sapien
catgcaagtgttacaattcatcatgtttgtggt

SEQ ID NO: 844747 - DNA, 33 bp, Homo sapien
tgagcaaattagccaacgtgcagtttgatttta

SEQ ID NO: 844748 - DNA, 33 bp, Homo sapien
tgagcaaattagccaatgtgcagtttgatttta

SEQ ID NO: 844749 - DNA, 33 bp, Homo sapien
tcccccattgacttccaaattaatccacctgtc

SEQ ID NO: 844750 - DNA, 33 bp, Homo sapien
tcccccattgacttcctaattaatccacctgtc

SEQ ID NO: 844751 - DNA, 33 bp, Homo sapien; identical to SEQ ID NO: 844749

SEQ ID NO: 844752 - DNA, 33 bp, Homo sapien; identical to SEQ ID NO: 844750

SEQ ID NO: 844753 - DNA, 33 bp, Homo sapien
ttactatatcgcaaaaagccattactacttcaa

SEQ ID NO: 844754 - DNA, 33 bp, Homo sapien
ttactatatcgcaaaaggccattactacttcaa

SEQ ID NO: 844755 - DNA, 33 bp, Homo sapien
tgtaggtgtcattgggaacaattattagaaggc

SEQ ID NO: 844756 - DNA, 33 bp, Homo sapien
tgtaggtgtcattgggtacaattattagaaggc

SEQ ID NO: 844757 - DNA, 33 bp, Homo sapien
aagggattctgctttacgtaaggtagcaaggag

SEQ ID NO: 844758 - DNA, 33 bp, Homo sapien
aagggattctgctttatgtaaggtagcaaggag

SEQ ID NO: 844759 - DNA, 33 bp, Homo sapien
gaaaaagaattgatcacctgttccagatatgaa

SEQ ID NO: 844760 - DNA, 33 bp, Homo sapien
gaaaaagaattgatcatctgttccagatatgaa

SEQ ID NO: 844761 - DNA, 33 bp, Homo sapien
tgcaatactttccaaacatttcagtgacaaact

SEQ ID NO: 844762 - DNA, 33 bp, Homo sapien
tgcaatactttccaaagatttcagtgacaaact

SEQ ID NO: 844763 - DNA, 33 bp, Homo sapien
ccctattgtctaacagaatcaaaatgcccttta

SEQ ID NO: 844764 - DNA, 33 bp, Homo sapien
ccctattgtctaacaggatcaaaatgcccttta

SEQ ID NO: 844765 - DNA, 33 bp, Homo sapien
acaacacttctgcttgaatcctactgctcaaag

SEQ ID NO: 844766 - DNA, 33 bp, Homo sapien
acaacacttctgcttgcatcctactgctcaaag

SEQ ID NO: 844767 - DNA, 33 bp, Homo sapien
cttttcccagcatcccggaaactgtgacaggct

SEQ ID NO: 844768 - DNA, 33 bp, Homo sapien
cttttcccagcatccctgaaactgtgacaggct

SEQ ID NO: 844769 - DNA, 33 bp, Homo sapien
ttccaattaaagtagacgaacaatgtcattagt

SEQ ID NO: 844770 - DNA, 33 bp, Homo sapien
ttccaattaaagtagatgaacaatgtcattagt

SEQ ID NO: 844771 - DNA, 33 bp, Homo sapien
aaaatctaggaagtaaacagttttaattatgtg

SEQ ID NO: 844772 - DNA, 33 bp, Homo sapien
aaaatctaggaagtaagcagttttaattatgtg

SEQ ID NO: 844773 - DNA, 33 bp, Homo sapien
aggagacaaaggagacacaggagaagtagacta

SEQ ID NO: 844774 - DNA, 33 bp, Homo sapien
aggagacaaaggagacccaggagaagtagacta

SEQ ID NO: 844775 - DNA, 33 bp, Homo sapien
gagctgggctctggagcatgggcaaatataagg

SEQ ID NO: 844776 - DNA, 33 bp, Homo sapien
gagctgggctctggaggatgggcaaatataagg

SEQ ID NO: 844777 - DNA, 33 bp, Homo sapien
aagctgtatggggtcacgccttctaggctaaaa

SEQ ID NO: 844778 - DNA, 33 bp, Homo sapien
aagctgtatggggtcatgccttctaggctaaaa

SEQ ID NO: 844779 - DNA, 33 bp, Homo sapien; identical to SEQ ID NO: 844777

SEQ ID NO: 844780 - DNA, 33 bp, Homo sapien; identical to SEQ ID NO: 844778

SEQ ID NO: 844781 - DNA, 33 bp, Homo sapien
agcaatggggtgggtaaagtatggatgaatgca

SEQ ID NO: 844782 - DNA, 33 bp, Homo sapien
agcaatggggtgggtagagtatggatgaatgca

SEQ ID NO: 844783 - DNA, 33 bp, Homo sapien
acaactgatttcataaagcacacttcaggccat

SEQ ID NO: 844784 - DNA, 33 bp, Homo sapien
acaactgatttcataatgcacacttcaggccat

SEQ ID NO: 844785 - DNA, 33 bp, Homo sapien
ttatgtacaggagcacaattagccttgtatgtt

SEQ ID NO: 844786 - DNA, 33 bp, Homo sapien
ttatgtacaggagcacgattagccttgtatgtt

SEQ ID NO: 844787 - DNA, 33 bp, Homo sapien
tagatgtatgaaatcaactgacagttttatgaa

SEQ ID NO: 844788 - DNA, 33 bp, Homo sapien
tagatgtatgaaatcagctgacagttttatgaa

SEQ ID NO: 844789 - DNA, 33 bp, Homo sapien
ctcattcagtcacccacgaaactcttattctcc

SEQ ID NO: 844790 - DNA, 33 bp, Homo sapien
ctcattcagtcacccatgaaactcttattctcc

SEQ ID NO: 844791 - DNA, 33 bp, Homo sapien
gtttgaattgagataacattttcatgtctcttg

SEQ ID NO: 844792 - DNA, 33 bp, Homo sapien
gtttgaattgagataatattttcatgtctcttg

SEQ ID NO: 844793 - DNA, 33 bp, Homo sapien
ttgcttttcacatccccatttcaaactataaaa

SEQ ID NO: 844794 - DNA, 33 bp, Homo sapien
ttgcttttcacatccctatttcaaactataaaa

SEQ ID NO: 844795 - DNA, 33 bp, Homo sapien
ttcttagagaggaaagaaagttggaaaaccctc

SEQ ID NO: 844796 - DNA, 33 bp, Homo sapien
ttcttagagaggaaaggaagttggaaaaccctc

SEQ ID NO: 844797 - DNA, 33 bp, Homo sapien
aggaatatttcagatgaatagcttaatgctcaa

SEQ ID NO: 844798 - DNA, 33 bp, Homo sapien
aggaatatttcagatggatagcttaatgctcaa

SEQ ID NO: 844799 - DNA, 33 bp, Homo sapien
aaaatgaccaataaataatgagctttgaataca

SEQ ID NO: 844800 - DNA, 33 bp, Homo sapien
aaaatgaccaataaattatgagctttgaataca

SEQ ID NO: 844801 - DNA, 33 bp, Homo sapien
cacctaaagtccttaccgggagcagatactagt

SEQ ID NO: 844802 - DNA, 33 bp, Homo sapien
cacctaaagtccttactgggagcagatactagt

SEQ ID NO: 844803 - DNA, 33 bp, Homo sapien
ctgaaacagcagaaagaaaaaccatgcataaga

SEQ ID NO: 844804 - DNA, 33 bp, Homo sapien
ctgaaacagcagaaagcaaaaccatgcataaga

SEQ ID NO: 844805 - DNA, 33 bp, Homo sapien
gttaaggacaagtccaactggttacattttgat

SEQ ID NO: 844806 - DNA, 33 bp, Homo sapien
gttaaggacaagtccatctggttacattttgat

SEQ ID NO: 844807 - DNA, 33 bp, Homo sapien
taataaaatatgataggattggcaaacactcta

SEQ ID NO: 844808 - DNA, 33 bp, Homo sapien
taataaaatatgatagtattggcaaacactcta

SEQ ID NO: 844809 - DNA, 33 bp, Homo sapien
ctacataattgaagcaactacgctatgatgcca

SEQ ID NO: 844810 - DNA, 33 bp, Homo sapien
ctacataattgaagcagctacgctatgatgcca

SEQ ID NO: 844811 - DNA, 33 bp, Homo sapien
ctagtaagtgacagagaatttggctacataatt

SEQ ID NO: 844812 - DNA, 33 bp, Homo sapien
ctagtaagtgacagagcatttggctacataatt

SEQ ID NO: 844813 - DNA, 33 bp, Homo sapien
aatttcaattttcacccaggaattattcagtat

SEQ ID NO: 844814 - DNA, 33 bp, Homo sapien
aatttcaattttcaccgaggaattattcagtat

SEQ ID NO: 844815 - DNA, 33 bp, Homo sapien
ttcatattaacaaaaaatcacaggaggaggtgt

SEQ ID NO: 844816 - DNA, 33 bp, Homo sapien
ttcatattaacaaaaagtcacaggaggaggtgt

SEQ ID NO: 844817 - DNA, 33 bp, Homo sapien
catggtggtgaatgcacggaattttaattcctt

SEQ ID NO: 844818 - DNA, 33 bp, Homo sapien
catggtggtgaatgcatggaattttaattcctt

SEQ ID NO: 844819 - DNA, 33 bp, Homo sapien
gaacaggttaaagtgacatggaatagtaaaggt

SEQ ID NO: 844820 - DNA, 33 bp, Homo sapien
gaacaggttaaagtgagatggaatagtaaaggt

SEQ ID NO: 844821 - DNA, 33 bp, Homo sapien
ctacaaggtgtgaaaactgcaggaactcaccat

SEQ ID NO: 844822 - DNA, 33 bp, Homo sapien
ctacaaggtgtgaaaattgcaggaactcaccat

SEQ ID NO: 844823 - DNA, 33 bp, Homo sapien
caataaagtgtctgcactcattaggaggctact

SEQ ID NO: 844824 - DNA, 33 bp, Homo sapien
caataaagtgtctgcattcattaggaggctact

SEQ ID NO: 844825 - DNA, 33 bp, Homo sapien
atttggaccacaactaaaacgaataaagtcagc

SEQ ID NO: 844826 - DNA, 33 bp, Homo sapien
atttggaccacaactacaacgaataaagtcagc

SEQ ID NO: 844827 - DNA, 33 bp, Homo sapien
tggtacacaggtcaaaactggagacaaggctgg

SEQ ID NO: 844828 - DNA, 33 bp, Homo sapien
tggtacacaggtcaaagctggagacaaggctgg

SEQ ID NO: 844829 - DNA, 33 bp, Homo sapien
cagcttgaaatattgacataaagttaaccatta

SEQ ID NO: 844830 - DNA, 33 bp, Homo sapien
cagcttgaaatattgagataaagttaaccatta

SEQ ID NO: 844831 - DNA, 33 bp, Homo sapien
cagatatattttaaagccgagtcaccatcctaa

SEQ ID NO: 844832 - DNA, 33 bp, Homo sapien
cagatatattttaaagtcgagtcaccatcctaa

SEQ ID NO: 844833 - DNA, 33 bp, Homo sapien
tagcttattggattgacatagtagccagcaata

SEQ ID NO: 844834 - DNA, 33 bp, Homo sapien
tagcttattggattgatatagtagccagcaata

SEQ ID NO: 844835 - DNA, 33 bp, Homo sapien
ggtgactgtctattaacgtcacatatgtgatct

SEQ ID NO: 844836 - DNA, 33 bp, Homo sapien
ggtgactgtctattaatgtcacatatgtgatct

SEQ ID NO: 844837 - DNA, 33 bp, Homo sapien
taaataaggcagactacacttttgtctcataca

SEQ ID NO: 844838 - DNA, 33 bp, Homo sapien
taaataaggcagactatacttttgtctcataca

SEQ ID NO: 844839 - DNA, 33 bp, Homo sapien
acatgaaccatgttaaaaattttatctaaagag

SEQ ID NO: 844840 - DNA, 33 bp, Homo sapien
acatgaaccatgttaagaattttatctaaagag

SEQ ID NO: 844841 - DNA, 33 bp, Homo sapien
aagtgcaagactgtgacagaagtttgtggtgat

SEQ ID NO: 844842 - DNA, 33 bp, Homo sapien
aagtgcaagactgtgagagaagtttgtggtgat

SEQ ID NO: 844843 - DNA, 33 bp, Homo sapien
aagaaaatgaaatatacaggttctaacaggcaa

SEQ ID NO: 844844 - DNA, 33 bp, Homo sapien
aagaaaatgaaatatataggttctaacaggcaa

SEQ ID NO: 844845 - DNA, 33 bp, Homo sapien
ctcccttttatctatgccaatctctctagtaaa

SEQ ID NO: 844846 - DNA, 33 bp, Homo sapien
ctcccttttatctatgtcaatctctctagtaaa

SEQ ID NO: 844847 - DNA, 33 bp, Homo sapien
gatttggagaagacaaacatccaaccatagcac

SEQ ID NO: 844848 - DNA, 33 bp, Homo sapien
gatttggagaagacaagcatccaaccatagcac

SEQ ID NO: 844849 - DNA, 33 bp, Homo sapien
taatttttagagtccacgtgacccatagttaac

SEQ ID NO: 844850 - DNA, 33 bp, Homo sapien
taatttttagagtccatgtgacccatagttaac

SEQ ID NO: 844851 - DNA, 33 bp, Homo sapien
ttccaagggttacaaacgtgtctctatgtacct

SEQ ID NO: 844852 - DNA, 33 bp, Homo sapien
ttccaagggttacaaatgtgtctctatgtacct

SEQ ID NO: 844853 - DNA, 33 bp, Homo sapien
tttgatgctcttaccacggaacaagtaacaaag

SEQ ID NO: 844854 - DNA, 33 bp, Homo sapien
tttgatgctcttaccatggaacaagtaacaaag

SEQ ID NO: 844855 - DNA, 33 bp, Homo sapien
attgaggccaatggtgaaaaagggaatatacca

SEQ ID NO: 844856 - DNA, 33 bp, Homo sapien
attgaggccaatggtgcaaaagggaatatacca

SEQ ID NO: 844857 - DNA, 33 bp, Homo sapien
tgtcacatggcgaatgcagtagcaggaaagtga

SEQ ID NO: 844858 - DNA, 33 bp, Homo sapien
tgtcacatggcgaatgtagtagcaggaaagtga

SEQ ID NO: 844859 - DNA, 33 bp, Homo sapien
aggccaagcaggaacacatatgtcacatggcga

SEQ ID NO: 844860 - DNA, 33 bp, Homo sapien
aggccaagcaggaacagatatgtcacatggcga

SEQ ID NO: 844861 - DNA, 33 bp, Homo sapien
taggtcagtggaaagaccatttaatcatggaac

SEQ ID NO: 844862 - DNA, 33 bp, Homo sapien
taggtcagtggaaagagcatttaatcatggaac

SEQ ID NO: 844863 - DNA, 33 bp, Homo sapien
gatacatctctggtcactctggtggctctatca

SEQ ID NO: 844864 - DNA, 33 bp, Homo sapien
gatacatctctggtcattctggtggctctatca

SEQ ID NO: 844865 - DNA, 33 bp, Homo sapien
cttaaccttgagtggacagagaacaaaggcaca

SEQ ID NO: 844866 - DNA, 33 bp, Homo sapien
cttaaccttgagtggatagagaacaaaggcaca

SEQ ID NO: 844867 - DNA, 33 bp, Homo sapien
caacactataaagcaactacaaaatcaaatgtg

SEQ ID NO: 844868 - DNA, 33 bp, Homo sapien
caacactataaagcaagtacaaaatcaaatgtg

SEQ ID NO: 844869 - DNA, 33 bp, Homo sapien
cagggcatattttatcccttatcttcaactgca

SEQ ID NO: 844870 - DNA, 33 bp, Homo sapien
cagggcatattttatctcttatcttcaactgca

SEQ ID NO: 844871 - DNA, 33 bp, Homo sapien
tttcttctgctagatcaatcctattaaaagact

SEQ ID NO: 844872 - DNA, 33 bp, Homo sapien
tttcttctgctagatccatcctattaaaagact

SEQ ID NO: 844873 - DNA, 33 bp, Homo sapien
gtttttgcatagaggaagctaaaggtatttaat

SEQ ID NO: 844874 - DNA, 33 bp, Homo sapien
gtttttgcatagaggaggctaaaggtatttaat

SEQ ID NO: 844875 - DNA, 33 bp, Homo sapien
gtcatagtcccacaaacattaaagttccctaga

SEQ ID NO: 844876 - DNA, 33 bp, Homo sapien
gtcatagtcccacaaatattaaagttccctaga

SEQ ID NO: 844877 - DNA, 33 bp, Homo sapien
tgaaagacttatgacacagatggaatgtctaac

SEQ ID NO: 844878 - DNA, 33 bp, Homo sapien
tgaaagacttatgacagagatggaatgtctaac

SEQ ID NO: 844879 - DNA, 33 bp, Homo sapien
ctcaagttattgatgacggcttctagtcctttt

SEQ ID NO: 844880 - DNA, 33 bp, Homo sapien
ctcaagttattgatgatggcttctagtcctttt

SEQ ID NO: 844881 - DNA, 33 bp, Homo sapien
ttctccccaccagaacacaaagaatgggaagct

SEQ ID NO: 844882 - DNA, 33 bp, Homo sapien
ttctccccaccagaacccaaagaatgggaagct

SEQ ID NO: 844883 - DNA, 33 bp, Homo sapien
aagcatttacatgttgaacagagaaagcctctg

SEQ ID NO: 844884 - DNA, 33 bp, Homo sapien
aagcatttacatgttgcacagagaaagcctctg

SEQ ID NO: 844885 - DNA, 33 bp, Homo sapien
gaatgaggtactcagagaagtggagagtgagaa

SEQ ID NO: 844886 - DNA, 33 bp, Homo sapien
gaatgaggtactcagataagtggagagtgagaa

SEQ ID NO: 844887 - DNA, 33 bp, Homo sapien
ataagatacaatgcacaaccttttaagcatcaa

SEQ ID NO: 844888 - DNA, 33 bp, Homo sapien
ataagatacaatgcactaccttttaagcatcaa

SEQ ID NO: 844889 - DNA, 33 bp, Homo sapien
ataggtacagatgagaagaagaaggaaaagtct

SEQ ID NO: 844890 - DNA, 33 bp, Homo sapien
ataggtacagatgagaggaagaaggaaaagtct

SEQ ID NO: 844891 - DNA, 33 bp, Homo sapien
tgatttggaccacaacaacaatgaataaagtca

SEQ ID NO: 844892 - DNA, 33 bp, Homo sapien
tgatttggaccacaactacaatgaataaagtca

SEQ ID NO: 844893 - DNA, 33 bp, Homo sapien
aaattttattcattagcatgaactttgccaccc

SEQ ID NO: 844894 - DNA, 33 bp, Homo sapien
aaattttattcattagtatgaactttgccaccc

SEQ ID NO: 844895 - DNA, 33 bp, Homo sapien
aatcttgttataattcccattggcaaaattgat

SEQ ID NO: 844896 - DNA, 33 bp, Homo sapien
aatcttgttataattctcattggcaaaattgat

SEQ ID NO: 844897 - DNA, 33 bp, Homo sapien
ttggctacagatgagaccaaaatatgaaacaat

SEQ ID NO: 844898 - DNA, 33 bp, Homo sapien
ttggctacagatgagagcaaaatatgaaacaat

SEQ ID NO: 844899 - DNA, 33 bp, Homo sapien
gcaggattggtgataacttatagtgatagaaga

SEQ ID NO: 844900 - DNA, 33 bp, Homo sapien
gcaggattggtgataatttatagtgatagaaga

SEQ ID NO: 844901 - DNA, 33 bp, Homo sapien
cccgttgcagctaagcaaagcaactggagccag

SEQ ID NO: 844902 - DNA, 33 bp, Homo sapien
cccgttgcagctaagcgaagcaactggagccag

SEQ ID NO: 844903 - DNA, 33 bp, Homo sapien
ccataaaatatttgaaaattccaacagcaatac

SEQ ID NO: 844904 - DNA, 33 bp, Homo sapien
ccataaaatatttgaacattccaacagcaatac

SEQ ID NO: 844905 - DNA, 33 bp, Homo sapien
tttataccatgttctaccctaatcagcttatag

SEQ ID NO: 844906 - DNA, 33 bp, Homo sapien
tttataccatgttctatcctaatcagcttatag

SEQ ID NO: 844907 - DNA, 33 bp, Homo sapien
accaaatgtgtttgaaacagtaccacagacaac

SEQ ID NO: 844908 - DNA, 33 bp, Homo sapien
accaaatgtgtttgaaccagtaccacagacaac

SEQ ID NO: 844909 - DNA, 33 bp, Homo sapien
aatgattcatcttaaacacctagaaaagcaaga

SEQ ID NO: 844910 - DNA, 33 bp, Homo sapien
aatgattcatcttaaagacctagaaaagcaaga

SEQ ID NO: 844911 - DNA, 33 bp, Homo sapien
ttagtgagcttaagaacaggatatttgaaaata

SEQ ID NO: 844912 - DNA, 33 bp, Homo sapien
ttagtgagcttaagaagaggatatttgaaaata

SEQ ID NO: 844913 - DNA, 33 bp, Homo sapien
tttcttagggacctcaaagtcaattatttgaaa

SEQ ID NO: 844914 - DNA, 33 bp, Homo sapien
tttcttagggacctcagagtcaattatttgaaa

SEQ ID NO: 844915 - DNA, 33 bp, Homo sapien
tcctgtaatgaaagtacgtgaagtttgtttttc

SEQ ID NO: 844916 - DNA, 33 bp, Homo sapien
tcctgtaatgaaagtatgtgaagtttgtttttc

SEQ ID NO: 844917 - DNA, 33 bp, Homo sapien
tatttgcatactagtaacagggaaattgacatg

SEQ ID NO: 844918 - DNA, 33 bp, Homo sapien
tatttgcatactagtagcagggaaattgacatg

SEQ ID NO: 844919 - DNA, 33 bp, Homo sapien
ctctctcaggctctaacgtcgctgtataatgta

SEQ ID NO: 844920 - DNA, 33 bp, Homo sapien
ctctctcaggctctaatgtcgctgtataatgta

SEQ ID NO: 844921 - DNA, 33 bp, Homo sapien
taaactttagatctagaaccttcttgaatatag

SEQ ID NO: 844922 - DNA, 33 bp, Homo sapien
taaactttagatctaggaccttcttgaatatag

SEQ ID NO: 844923 - DNA, 33 bp, Homo sapien
aaagagagcctgagcaaccaaagaaatcttaaa

SEQ ID NO: 844924 - DNA, 33 bp, Homo sapien
aaagagagcctgagcagccaaagaaatcttaaa

SEQ ID NO: 844925 - DNA, 33 bp, Homo sapien
tttcctgttgaactaaaccttttatcattatat

SEQ ID NO: 844926 - DNA, 33 bp, Homo sapien
tttcctgttgaactaatccttttatcattatat

SEQ ID NO: 844927 - DNA, 33 bp, Homo sapien
aaatggacttaacagacgtttacagaacacttg

SEQ ID NO: 844928 - DNA, 33 bp, Homo sapien
aaatggacttaacagaggtttacagaacacttg

SEQ ID NO: 844929 - DNA, 33 bp, Homo sapien
gaagagaagtttagccaaggtcagagttctgtg

SEQ ID NO: 844930 - DNA, 33 bp, Homo sapien
gaagagaagtttagccgaggtcagagttctgtg

SEQ ID NO: 844931 - DNA, 33 bp, Homo sapien
cagacacggagtccaaatagtttattcttcatt

SEQ ID NO: 844932 - DNA, 33 bp, Homo sapien
cagacacggagtccaagtagtttattcttcatt

SEQ ID NO: 844933 - DNA, 33 bp, Homo sapien
cctcaagctatttgagaatccatgaaaaactta

SEQ ID NO: 844934 - DNA, 33 bp, Homo sapien
cctcaagctatttgagcatccatgaaaaactta

SEQ ID NO: 844935 - DNA, 33 bp, Homo sapien
agaggcttagaaaatacgatttgcaagatcttt

SEQ ID NO: 844936 - DNA, 33 bp, Homo sapien
agaggcttagaaaatatgatttgcaagatcttt

SEQ ID NO: 844937 - DNA, 33 bp, Homo sapien
cctgagttaacacaaaagtcttggacactgtca

SEQ ID NO: 844938 - DNA, 33 bp, Homo sapien
cctgagttaacacaaacgtcttggacactgtca

SEQ ID NO: 844939 - DNA, 33 bp, Homo sapien
cttttcctcatttagaacataactattctgatg

SEQ ID NO: 844940 - DNA, 33 bp, Homo sapien
cttttcctcatttagaccataactattctgatg

SEQ ID NO: 844941 - DNA, 33 bp, Homo sapien
aaaattttctcaaaaaatcactccaagaaataa

SEQ ID NO: 844942 - DNA, 33 bp, Homo sapien
aaaattttctcaaaaattcactccaagaaataa

SEQ ID NO: 844943 - DNA, 33 bp, Homo sapien
aaaaacttcaggatacacatgattaattttttt

SEQ ID NO: 844944 - DNA, 33 bp, Homo sapien
aaaaacttcaggatacgcatgattaattttttt

SEQ ID NO: 844945 - DNA, 33 bp, Homo sapien
agtcatagagctcttacgttgcagggccaagag

SEQ ID NO: 844946 - DNA, 33 bp, Homo sapien
agtcatagagctcttatgttgcagggccaagag

SEQ ID NO: 844947 - DNA, 33 bp, Homo sapien
acgtcatgttggcactaaaaatgtttcaaattc

SEQ ID NO: 844948 - DNA, 33 bp, Homo sapien
acgtcatgttggcactcaaaatgtttcaaattc

SEQ ID NO: 844949 - DNA, 33 bp, Homo sapien
ctcaactccacacatacagtcattgaggacaag

SEQ ID NO: 844950 - DNA, 33 bp, Homo sapien
ctcaactccacacatatagtcattgaggacaag

SEQ ID NO: 844951 - DNA, 33 bp, Homo sapien
ttaagtattttcaccacacgtaattggactatt

SEQ ID NO: 844952 - DNA, 33 bp, Homo sapien
ttaagtattttcaccagacgtaattggactatt

SEQ ID NO: 844953 - DNA, 33 bp, Homo sapien
actaggacaatgagaccgataatctagatcaaa

SEQ ID NO: 844954 - DNA, 33 bp, Homo sapien
actaggacaatgagactgataatctagatcaaa

SEQ ID NO: 844955 - DNA, 33 bp, Homo sapien
gtgatgggtgtgaagacggagaggaacaagaaa

SEQ ID NO: 844956 - DNA, 33 bp, Homo sapien
gtgatgggtgtgaagagggagaggaacaagaaa

SEQ ID NO: 844957 - DNA, 33 bp, Homo sapien
ctggggtagaagtagcagaaagacatatgggag

SEQ ID NO: 844958 - DNA, 33 bp, Homo sapien
ctggggtagaagtagcggaaagacatatgggag

SEQ ID NO: 844959 - DNA, 33 bp, Homo sapien
aaaagtatgattacctcaggctgacctatcagg

SEQ ID NO: 844960 - DNA, 33 bp, Homo sapien
aaaagtatgattaccttaggctgacctatcagg

SEQ ID NO: 844961 - DNA, 33 bp, Homo sapien
aggttgaagaggtacgcaggagacaattgcagg

SEQ ID NO: 844962 - DNA, 33 bp, Homo sapien
aggttgaagaggtacgtaggagacaattgcagg

SEQ ID NO: 844963 - DNA, 33 bp, Homo sapien
cacaaagctttagaagaatttctgccatattgt

SEQ ID NO: 844964 - DNA, 33 bp, Homo sapien
cacaaagctttagaaggatttctgccatattgt

SEQ ID NO: 844965 - DNA, 33 bp, Homo sapien
tagaaggatttaaaaaagctttcaaatgcagtt

SEQ ID NO: 844966 - DNA, 33 bp, Homo sapien
tagaaggatttaaaaaggctttcaaatgcagtt

SEQ ID NO: 844967 - DNA, 33 bp, Homo sapien
gctggtatatgcatggacactcaaaaatattaa

SEQ ID NO: 844968 - DNA, 33 bp, Homo sapien
gctggtatatgcatgggcactcaaaaatattaa

SEQ ID NO: 844969 - DNA, 33 bp, Homo sapien
attttccaattctaaaccaatatcataactatc

SEQ ID NO: 844970 - DNA, 33 bp, Homo sapien
attttccaattctaaagcaatatcataactatc

SEQ ID NO: 844971 - DNA, 33 bp, Homo sapien
atgatgaaatgaagaactggaggataccttgag

SEQ ID NO: 844972 - DNA, 33 bp, Homo sapien
atgatgaaatgaagaattggaggataccttgag

SEQ ID NO: 844973 - DNA, 33 bp, Homo sapien
ctaaaaactgccagaaagaaagattgccattat

SEQ ID NO: 844974 - DNA, 33 bp, Homo sapien
ctaaaaactgccagaaggaaagattgccattat

SEQ ID NO: 844975 - DNA, 33 bp, Homo sapien
gttcatctctaaattccaggaatctagcacagc

SEQ ID NO: 844976 - DNA, 33 bp, Homo sapien
gttcatctctaaattcgaggaatctagcacagc

SEQ ID NO: 844977 - DNA, 33 bp, Homo sapien
ggatggttagaatgaccgccttgttttctgttt

SEQ ID NO: 844978 - DNA, 33 bp, Homo sapien
ggatggttagaatgactgccttgttttctgttt

SEQ ID NO: 844979 - DNA, 33 bp, Homo sapien
ctcacctcaccactacagatccaagcctgacac

SEQ ID NO: 844980 - DNA, 33 bp, Homo sapien
ctcacctcaccactacggatccaagcctgacac

SEQ ID NO: 844981 - DNA, 33 bp, Homo sapien
gtgtatatagttacaaattatcacaagtgctat

SEQ ID NO: 844982 - DNA, 33 bp, Homo sapien
gtgtatatagttacaagttatcacaagtgctat

SEQ ID NO: 844983 - DNA, 33 bp, Homo sapien
ctatgaaggaaatgaacaggttatttgacagat

SEQ ID NO: 844984 - DNA, 33 bp, Homo sapien
ctatgaaggaaatgaagaggttatttgacagat

SEQ ID NO: 844985 - DNA, 33 bp, Homo sapien
aattgggtagaataaacagatgcatgagaaatg

SEQ ID NO: 844986 - DNA, 33 bp, Homo sapien
aattgggtagaataaatagatgcatgagaaatg

SEQ ID NO: 844987 - DNA, 33 bp, Homo sapien
catttatttcagaccaacgtattttgtcttttt

SEQ ID NO: 844988 - DNA, 33 bp, Homo sapien
catttatttcagaccagcgtattttgtcttttt

SEQ ID NO: 844989 - DNA, 33 bp, Homo sapien
gagcagtgcaccactacatcaatgcttgtattg

SEQ ID NO: 844990 - DNA, 33 bp, Homo sapien
gagcagtgcaccactatatcaatgcttgtattg

SEQ ID NO: 844991 - DNA, 33 bp, Homo sapien
taacacaaggccaagcccagaaataggaggaga

SEQ ID NO: 844992 - DNA, 33 bp, Homo sapien
taacacaaggccaagctcagaaataggaggaga

SEQ ID NO: 844993 - DNA, 33 bp, Homo sapien
atcaaaagtacttaaaataatgagacctatgga

SEQ ID NO: 844994 - DNA, 33 bp, Homo sapien
atcaaaagtacttaaagtaatgagacctatgga

SEQ ID NO: 844995 - DNA, 33 bp, Homo sapien
gaagataaggatgaccaaagttctctctgcccc

SEQ ID NO: 844996 - DNA, 33 bp, Homo sapien
gaagataaggatgacccaagttctctctgcccc

SEQ ID NO: 844997 - DNA, 33 bp, Homo sapien
gataaatggacttatccatggccgtatcttaat

SEQ ID NO: 844998 - DNA, 33 bp, Homo sapien
gataaatggacttatctatggccgtatcttaat

SEQ ID NO: 844999 - DNA, 33 bp, Homo sapien
tgttactaattttttacgacttgtttatcctct

SEQ ID NO: 845000 - DNA, 33 bp, Homo sapien
tgttactaattttttatgacttgtttatcctct

SEQ ID NO: 845001 - DNA, 33 bp, Homo sapien
tatatgatggtaagaccacgtgaaaatgaagaa

SEQ ID NO: 845002 - DNA, 33 bp, Homo sapien
tatatgatggtaagacgacgtgaaaatgaagaa

SEQ ID NO: 845003 - DNA, 33 bp, Homo sapien
gaaatccctatgtttcccccatttccatctgtt

SEQ ID NO: 845004 - DNA, 33 bp, Homo sapien
gaaatccctatgtttctcccatttccatctgtt

SEQ ID NO: 845005 - DNA, 33 bp, Homo sapien
aaggatataccaatgaataacttacggtctgtt

SEQ ID NO: 845006 - DNA, 33 bp, Homo sapien
aaggatataccaatgattaacttacggtctgtt

SEQ ID NO: 845007 - DNA, 33 bp, Homo sapien
ctcaagacacttaaaaatcaaactcccaaagat

SEQ ID NO: 845008 - DNA, 33 bp, Homo sapien
ctcaagacacttaaaactcaaactcccaaagat

SEQ ID NO: 845009 - DNA, 33 bp, Homo sapien
gatttgatgttgcaacaaggaactccgatcatt

SEQ ID NO: 845010 - DNA, 33 bp, Homo sapien
gatttgatgttgcaacgaggaactccgatcatt

SEQ ID NO: 845011 - DNA, 33 bp, Homo sapien
gaattttcaagtgacaaaacaatggaagcctcc

SEQ ID NO: 845012 - DNA, 33 bp, Homo sapien
gaattttcaagtgacacaacaatggaagcctcc

SEQ ID NO: 845013 - DNA, 33 bp, Homo sapien
tgtagacaactccatgacataaataagatctat

SEQ ID NO: 845014 - DNA, 33 bp, Homo sapien
tgtagacaactccatgccataaataagatctat

SEQ ID NO: 845015 - DNA, 33 bp, Homo sapien
aaattctattctgaaagaaagcactcttactca

SEQ ID NO: 845016 - DNA, 33 bp, Homo sapien
aaattctattctgaaataaagcactcttactca

SEQ ID NO: 845017 - DNA, 33 bp, Homo sapien
ttgtccaccactaaaacgtacaaatgcttcagt

SEQ ID NO: 845018 - DNA, 33 bp, Homo sapien
ttgtccaccactaaaatgtacaaatgcttcagt

SEQ ID NO: 845019 - DNA, 33 bp, Homo sapien
cattagaatgccattaggcaaaggtgggaaatc

SEQ ID NO: 845020 - DNA, 33 bp, Homo sapien
cattagaatgccattatgcaaaggtgggaaatc

SEQ ID NO: 845021 - DNA, 33 bp, Homo sapien
acttagcaagtaccagacctctgcaaaatatgt

SEQ ID NO: 845022 - DNA, 33 bp, Homo sapien
acttagcaagtaccaggcctctgcaaaatatgt

SEQ ID NO: 845023 - DNA, 33 bp, Homo sapien
ccagaatactgagagcaaggtcaggttactaac

SEQ ID NO: 845024 - DNA, 33 bp, Homo sapien
ccagaatactgagagcgaggtcaggttactaac

SEQ ID NO: 845025 - DNA, 33 bp, Homo sapien
aaatgcaatgttgcaaaccctaatctacacttc

SEQ ID NO: 845026 - DNA, 33 bp, Homo sapien
aaatgcaatgttgcaacccctaatctacacttc

SEQ ID NO: 845027 - DNA, 33 bp, Homo sapien
tgtgccaagtgagcaaattcagaaatagaatat

SEQ ID NO: 845028 - DNA, 33 bp, Homo sapien
tgtgccaagtgagcaagttcagaaatagaatat

SEQ ID NO: 845029 - DNA, 33 bp, Homo sapien
ttttagggcaaagtagaatcctgcactttcaac

SEQ ID NO: 845030 - DNA, 33 bp, Homo sapien
ttttagggcaaagtagtatcctgcactttcaac

SEQ ID NO: 845031 - DNA, 33 bp, Homo sapien
ccaagtgttggcatccaaatctagcactgcttc

SEQ ID NO: 845032 - DNA, 33 bp, Homo sapien
ccaagtgttggcatccgaatctagcactgcttc

SEQ ID NO: 845033 - DNA, 33 bp, Homo sapien
taaatcttagctcaaaagttctttcctctgtat

SEQ ID NO: 845034 - DNA, 33 bp, Homo sapien
taaatcttagctcaaaggttctttcctctgtat

SEQ ID NO: 845035 - DNA, 33 bp, Homo sapien
ggctgctgagaggtaactatttctgcatttcag

SEQ ID NO: 845036 - DNA, 33 bp, Homo sapien
ggctgctgagaggtaattatttctgcatttcag

SEQ ID NO: 845037 - DNA, 33 bp, Homo sapien
ccagagagaacacatcagagtgagagaacaaaa

SEQ ID NO: 845038 - DNA, 33 bp, Homo sapien
ccagagagaacacatcggagtgagagaacaaaa

SEQ ID NO: 845039 - DNA, 33 bp, Homo sapien
ctcttctagttgacaacgaggctggcagtccaa

SEQ ID NO: 845040 - DNA, 33 bp, Homo sapien
ctcttctagttgacaatgaggctggcagtccaa

SEQ ID NO: 845041 - DNA, 33 bp, Homo sapien
tggcatcttggttgtgaaggattttaagcttca

SEQ ID NO: 845042 - DNA, 33 bp, Homo sapien
tggcatcttggttgtggaggattttaagcttca

SEQ ID NO: 845043 - DNA, 33 bp, Homo sapien
cctagagcttgaaatacctgtagaaaagtgctt

SEQ ID NO: 845044 - DNA, 33 bp, Homo sapien
cctagagcttgaaatatctgtagaaaagtgctt

SEQ ID NO: 845045 - DNA, 33 bp, Homo sapien
tcttaaccttgtggtagaaacagaaaatagcat

SEQ ID NO: 845046 - DNA, 33 bp, Homo sapien
tcttaaccttgtggtataaacagaaaatagcat

SEQ ID NO: 845047 - DNA, 33 bp, Homo sapien
gaaaaatcaaggtggacggtttttgggctgatg

SEQ ID NO: 845048 - DNA, 33 bp, Homo sapien
gaaaaatcaaggtggatggtttttgggctgatg

SEQ ID NO: 845049 - DNA, 33 bp, Homo sapien
aaacattcttaagacaatatgaaaggttatctc

SEQ ID NO: 845050 - DNA, 33 bp, Homo sapien
aaacattcttaagacagtatgaaaggttatctc

SEQ ID NO: 845051 - DNA, 33 bp, Homo sapien
tgatagtaagtttcacaagatctcatggcttta

SEQ ID NO: 845052 - DNA, 33 bp, Homo sapien
tgatagtaagtttcacgagatctcatggcttta

SEQ ID NO: 845053 - DNA, 33 bp, Homo sapien
agttttatcagtgcaacgtatttagtctattct

SEQ ID NO: 845054 - DNA, 33 bp, Homo sapien
agttttatcagtgcaatgtatttagtctattct

SEQ ID NO: 845055 - DNA, 33 bp, Homo sapien
ccagaaacagaaatcacattctactctgcaaac

SEQ ID NO: 845056 - DNA, 33 bp, Homo sapien
ccagaaacagaaatcatattctactctgcaaac

SEQ ID NO: 845057 - DNA, 33 bp, Homo sapien
aatccacttctacttgaacaggtgaaatgtgtt

SEQ ID NO: 845058 - DNA, 33 bp, Homo sapien
aatccacttctacttgtacaggtgaaatgtgtt

SEQ ID NO: 845059 - DNA, 33 bp, Homo sapien
agatagcaacataaaacgagaacttggaatgtg

SEQ ID NO: 845060 - DNA, 33 bp, Homo sapien
agatagcaacataaaatgagaacttggaatgtg

SEQ ID NO: 845061 - DNA, 33 bp, Homo sapien
gattcagtcctaaaaaagtgcagtcagagtacg

SEQ ID NO: 845062 - DNA, 33 bp, Homo sapien
gattcagtcctaaaaaggtgcagtcagagtacg

SEQ ID NO: 845063 - DNA, 33 bp, Homo sapien
tccactggatctctcacagttccaaaggtaaat

SEQ ID NO: 845064 - DNA, 33 bp, Homo sapien
tccactggatctctcatagttccaaaggtaaat

SEQ ID NO: 845065 - DNA, 33 bp, Homo sapien
gttccagagactacaactactaagcaagcataa

SEQ ID NO: 845066 - DNA, 33 bp, Homo sapien
gttccagagactacaattactaagcaagcataa

SEQ ID NO: 845067 - DNA, 33 bp, Homo sapien
aatatgcagaaaaatgcattgtgagtagagtca

SEQ ID NO: 845068 - DNA, 33 bp, Homo sapien
aatatgcagaaaaatgtattgtgagtagagtca

SEQ ID NO: 845069 - DNA, 33 bp, Homo sapien
tcatctgtctatgtacccagaaacaagaaacca

SEQ ID NO: 845070 - DNA, 33 bp, Homo sapien
tcatctgtctatgtactcagaaacaagaaacca

SEQ ID NO: 845071 - DNA, 33 bp, Homo sapien
aatttaaactgaaaaaattgtaactacagaacc

SEQ ID NO: 845072 - DNA, 33 bp, Homo sapien
aatttaaactgaaaaagttgtaactacagaacc

SEQ ID NO: 845073 - DNA, 33 bp, Homo sapien
ctctgttactatttgacagaccttgattttgtg

SEQ ID NO: 845074 - DNA, 33 bp, Homo sapien
ctctgttactatttgagagaccttgattttgtg

SEQ ID NO: 845075 - DNA, 33 bp, Homo sapien
cttggttttttctacagtctgataactcagtca

SEQ ID NO: 845076 - DNA, 33 bp, Homo sapien
cttggttttttctacattctgataactcagtca

SEQ ID NO: 845077 - DNA, 33 bp, Homo sapien
ttgtggacacaatttccattttcttaactgaag

SEQ ID NO: 845078 - DNA, 33 bp, Homo sapien
ttgtggacacaatttctattttcttaactgaag

SEQ ID NO: 845079 - DNA, 33 bp, Homo sapien
cagtagaaagaaacataacttctcttgatcagc

SEQ ID NO: 845080 - DNA, 33 bp, Homo sapien
cagtagaaagaaacatgacttctcttgatcagc

SEQ ID NO: 845081 - DNA, 33 bp, Homo sapien
aggaaagttgtattcacggtcctaggtagtact

SEQ ID NO: 845082 - DNA, 33 bp, Homo sapien
aggaaagttgtattcatggtcctaggtagtact

SEQ ID NO: 845083 - DNA, 33 bp, Homo sapien
tcctgtttctcgttacccatcaaaaaatttatt

SEQ ID NO: 845084 - DNA, 33 bp, Homo sapien
tcctgtttctcgttactcatcaaaaaatttatt

SEQ ID NO: 845085 - DNA, 33 bp, Homo sapien
atccagaatttactcaacctgctgtatgtccaa

SEQ ID NO: 845086 - DNA, 33 bp, Homo sapien
atccagaatttactcagcctgctgtatgtccaa

SEQ ID NO: 845087 - DNA, 33 bp, Homo sapien
taaggtataatggaacaatgaattataatgtta

SEQ ID NO: 845088 - DNA, 33 bp, Homo sapien
taaggtataatggaaccatgaattataatgtta

SEQ ID NO: 845089 - DNA, 33 bp, Homo sapien
agagaagtgaagaatggatttccaggctgcaag

SEQ ID NO: 845090 - DNA, 33 bp, Homo sapien
agagaagtgaagaatgtatttccaggctgcaag

SEQ ID NO: 845091 - DNA, 33 bp, Homo sapien
aacaagatgtcctcccagaaactgatattccac

SEQ ID NO: 845092 - DNA, 33 bp, Homo sapien
aacaagatgtcctcccggaaactgatattccac

SEQ ID NO: 845093 - DNA, 33 bp, Homo sapien
tttcagacttttaaaacttgacactggtttagc

SEQ ID NO: 845094 - DNA, 33 bp, Homo sapien
tttcagacttttaaaatttgacactggtttagc

SEQ ID NO: 845095 - DNA, 33 bp, Homo sapien
ggcagaagatggaacaagtaagctaaaccagtg

SEQ ID NO: 845096 - DNA, 33 bp, Homo sapien
ggcagaagatggaacaggtaagctaaaccagtg

SEQ ID NO: 845097 - DNA, 33 bp, Homo sapien
ctgagtatctaaccataaaactagaggtggagt

SEQ ID NO: 845098 - DNA, 33 bp, Homo sapien
ctgagtatctaaccatgaaactagaggtggagt

SEQ ID NO: 845099 - DNA, 33 bp, Homo sapien
tagaatgctttgtagacctttgggtatataccc

SEQ ID NO: 845100 - DNA, 33 bp, Homo sapien
tagaatgctttgtagatctttgggtatataccc

SEQ ID NO: 845101 - DNA, 33 bp, Homo sapien
aaagacgtgtctttgaatacatttaaggactct

SEQ ID NO: 845102 - DNA, 33 bp, Homo sapien
aaagacgtgtctttgagtacatttaaggactct

SEQ ID NO: 845103 - DNA, 33 bp, Homo sapien
gagaacatttagctcaagtctaatagcagttat

SEQ ID NO: 845104 - DNA, 33 bp, Homo sapien
gagaacatttagctcaggtctaatagcagttat

SEQ ID NO: 845105 - DNA, 33 bp, Homo sapien
aaactaaagccattaaagtgcgtataaaattga

SEQ ID NO: 845106 - DNA, 33 bp, Homo sapien
aaactaaagccattaaggtgcgtataaaattga

SEQ ID NO: 845107 - DNA, 33 bp, Homo sapien
ttacacaaaaggagaactcatctcatcttaaca

SEQ ID NO: 845108 - DNA, 33 bp, Homo sapien
ttacacaaaaggagaagtcatctcatcttaaca

SEQ ID NO: 845109 - DNA, 33 bp, Homo sapien
ttatctactgatttacacaatttacagagccac

SEQ ID NO: 845110 - DNA, 33 bp, Homo sapien
ttatctactgatttacccaatttacagagccac

SEQ ID NO: 845111 - DNA, 33 bp, Homo sapien
atgataatcaaggtagcaaagcccactagaaaa

SEQ ID NO: 845112 - DNA, 33 bp, Homo sapien
atgataatcaaggtaggaaagcccactagaaaa

SEQ ID NO: 845113 - DNA, 33 bp, Homo sapien
tacttagttcttaagacagcctatgatgcacaa

SEQ ID NO: 845114 - DNA, 33 bp, Homo sapien
tacttagttcttaagatagcctatgatgcacaa

SEQ ID NO: 845115 - DNA, 33 bp, Homo sapien
caagaaagtaaaaggagctctacaatgaacaat

SEQ ID NO: 845116 - DNA, 33 bp, Homo sapien
caagaaagtaaaaggatctctacaatgaacaat

SEQ ID NO: 845117 - DNA, 33 bp, Homo sapien
atttctgcctcccatcacttagatcataatata

SEQ ID NO: 845118 - DNA, 33 bp, Homo sapien
atttctgcctcccatcgcttagatcataatata

SEQ ID NO: 845119 - DNA, 33 bp, Homo sapien
gagataaaactcttacccaggacaatgttagat

SEQ ID NO: 845120 - DNA, 33 bp, Homo sapien
gagataaaactcttactcaggacaatgttagat

SEQ ID NO: 845121 - DNA, 33 bp, Homo sapien
ggcaggcccccatagaagaattacagcaaaggt

SEQ ID NO: 845122 - DNA, 33 bp, Homo sapien
ggcaggcccccatagatgaattacagcaaaggt

SEQ ID NO: 845123 - DNA, 33 bp, Homo sapien
gagtggtttttggaaacaggatcacacaaggac

SEQ ID NO: 845124 - DNA, 33 bp, Homo sapien
gagtggtttttggaaataggatcacacaaggac

SEQ ID NO: 845125 - DNA, 33 bp, Homo sapien
aaagtcacagttttgaaagaacaataatttata

SEQ ID NO: 845126 - DNA, 33 bp, Homo sapien
aaagtcacagttttgagagaacaataatttata

SEQ ID NO: 845127 - DNA, 33 bp, Homo sapien
aacatcttcacttttacactgccattagtcatc

SEQ ID NO: 845128 - DNA, 33 bp, Homo sapien
aacatcttcacttttatactgccattagtcatc

SEQ ID NO: 845129 - DNA, 33 bp, Homo sapien
aatctcgttttagagaaggcattgttttagtta

SEQ ID NO: 845130 - DNA, 33 bp, Homo sapien
aatctcgttttagagagggcattgttttagtta

SEQ ID NO: 845131 - DNA, 33 bp, Homo sapien
aataaacaaattaataccttgagcctgttacag

SEQ ID NO: 845132 - DNA, 33 bp, Homo sapien
aataaacaaattaatatcttgagcctgttacag

SEQ ID NO: 845133 - DNA, 33 bp, Homo sapien
tttttaaaatgaacagcagaagctattcccata

SEQ ID NO: 845134 - DNA, 33 bp, Homo sapien
tttttaaaatgaacagtagaagctattcccata

SEQ ID NO: 845135 - DNA, 33 bp, Homo sapien
ctaattaaaattaagcaccaatgaataaataaa

SEQ ID NO: 845136 - DNA, 33 bp, Homo sapien
ctaattaaaattaagcgccaatgaataaataaa

SEQ ID NO: 845137 - DNA, 33 bp, Homo sapien
ataccaaaagaataaaaacatagcttagggtat

SEQ ID NO: 845138 - DNA, 33 bp, Homo sapien
ataccaaaagaataaacacatagcttagggtat

SEQ ID NO: 845139 - DNA, 33 bp, Homo sapien
catcagtttgacccaaattccaattatttcttg

SEQ ID NO: 845140 - DNA, 33 bp, Homo sapien
catcagtttgacccaatttccaattatttcttg

SEQ ID NO: 845141 - DNA, 33 bp, Homo sapien
cccagtgactcttgtacgttctatctttgttct

SEQ ID NO: 845142 - DNA, 33 bp, Homo sapien
cccagtgactcttgtatgttctatctttgttct

SEQ ID NO: 845143 - DNA, 33 bp, Homo sapien
agtaacatcatgagacagaacttttattttctt

SEQ ID NO: 845144 - DNA, 33 bp, Homo sapien
agtaacatcatgagacggaacttttattttctt

SEQ ID NO: 845145 - DNA, 33 bp, Homo sapien
taatttcttacctgtacatttcaagaagccaaa

SEQ ID NO: 845146 - DNA, 33 bp, Homo sapien
taatttcttacctgtatatttcaagaagccaaa

SEQ ID NO: 845147 - DNA, 33 bp, Homo sapien
ggtaaatgctgcttcaatctctatatctgtata

SEQ ID NO: 845148 - DNA, 33 bp, Homo sapien
ggtaaatgctgcttcattctctatatctgtata

SEQ ID NO: 845149 - DNA, 33 bp, Homo sapien
gattaacaaaagcacaaatattttcaatttttc

SEQ ID NO: 845150 - DNA, 33 bp, Homo sapien
gattaacaaaagcacagatattttcaatttttc

SEQ ID NO: 845151 - DNA, 33 bp, Homo sapien
ggaaatagtattattgcagttgtagttagtaaa

SEQ ID NO: 845152 - DNA, 33 bp, Homo sapien
ggaaatagtattattggagttgtagttagtaaa

SEQ ID NO: 845153 - DNA, 33 bp, Homo sapien
ggggagaagatgccaaagtgttttttatgtccc

SEQ ID NO: 845154 - DNA, 33 bp, Homo sapien
ggggagaagatgccaacgtgttttttatgtccc

SEQ ID NO: 845155 - DNA, 33 bp, Homo sapien
taccagtgatcagcccaattatgaaatacaatc

SEQ ID NO: 845156 - DNA, 33 bp, Homo sapien
taccagtgatcagcccgattatgaaatacaatc

SEQ ID NO: 845157 - DNA, 33 bp, Homo sapien
gtaactaaaaaacataccaataatccacagcat

SEQ ID NO: 845158 - DNA, 33 bp, Homo sapien
gtaactaaaaaacatagcaataatccacagcat

SEQ ID NO: 845159 - DNA, 33 bp, Homo sapien
aggcttcagtaggggaaaagtgtgacctggagc

SEQ ID NO: 845160 - DNA, 33 bp, Homo sapien
aggcttcagtaggggagaagtgtgacctggagc

SEQ ID NO: 845161 - DNA, 33 bp, Homo sapien
aataatatgatgctaaatacctgtttttctttt

SEQ ID NO: 845162 - DNA, 33 bp, Homo sapien
aataatatgatgctaattacctgtttttctttt

SEQ ID NO: 845163 - DNA, 33 bp, Homo sapien
agcaaaatagtctttacgcatggccaaatgccc

SEQ ID NO: 845164 - DNA, 33 bp, Homo sapien
agcaaaatagtctttatgcatggccaaatgccc

SEQ ID NO: 845165 - DNA, 33 bp, Homo sapien
aaactttcaaaagtcaatcctaaggaatacaaa

SEQ ID NO: 845166 - DNA, 33 bp, Homo sapien
aaactttcaaaagtcagtcctaaggaatacaaa

SEQ ID NO: 845167 - DNA, 33 bp, Homo sapien
ttgttatacatagcaaaggaatctgaggaattt

SEQ ID NO: 845168 - DNA, 33 bp, Homo sapien
ttgttatacatagcaacggaatctgaggaattt

SEQ ID NO: 845169 - DNA, 33 bp, Homo sapien
cagaccagaatacctacgttagcagttaaacag

SEQ ID NO: 845170 - DNA, 33 bp, Homo sapien
cagaccagaatacctatgttagcagttaaacag

SEQ ID NO: 845171 - DNA, 33 bp, Homo sapien
tcaaaattaaaaacacggctaatgatactgata

SEQ ID NO: 845172 - DNA, 33 bp, Homo sapien
tcaaaattaaaaacactgctaatgatactgata

SEQ ID NO: 845173 - DNA, 33 bp, Homo sapien
agaatgctgagaaaaaattttaattggattgtg

SEQ ID NO: 845174 - DNA, 33 bp, Homo sapien
agaatgctgagaaaaatttttaattggattgtg

SEQ ID NO: 845175 - DNA, 33 bp, Homo sapien
atataaaacctatgcacccttttgcataactct

SEQ ID NO: 845176 - DNA, 33 bp, Homo sapien
atataaaacctatgcatccttttgcataactct

SEQ ID NO: 845177 - DNA, 33 bp, Homo sapien
tgtttgaaatgatttaaaaggcaagtcttacca

SEQ ID NO: 845178 - DNA, 33 bp, Homo sapien
tgtttgaaatgatttagaaggcaagtcttacca

SEQ ID NO: 845179 - DNA, 33 bp, Homo sapien
aaatgtccctgtagaccgcgttacatacacttt

SEQ ID NO: 845180 - DNA, 33 bp, Homo sapien
aaatgtccctgtagacggcgttacatacacttt

SEQ ID NO: 845181 - DNA, 33 bp, Homo sapien
ttaactttatggataccacattagctactcttg

SEQ ID NO: 845182 - DNA, 33 bp, Homo sapien
ttaactttatggatactacattagctactcttg

SEQ ID NO: 845183 - DNA, 33 bp, Homo sapien
aagtttcattcacttaaaaaagtcttaaataca

SEQ ID NO: 845184 - DNA, 33 bp, Homo sapien
aagtttcattcacttagaaaagtcttaaataca

SEQ ID NO: 845185 - DNA, 33 bp, Homo sapien
taaaacctatgtgagaagtaccattcaaaagaa

SEQ ID NO: 845186 - DNA, 33 bp, Homo sapien
taaaacctatgtgagaggtaccattcaaaagaa

SEQ ID NO: 845187 - DNA, 33 bp, Homo sapien
ctaaaatatagaaatgcatctgtggaagtggtc

SEQ ID NO: 845188 - DNA, 33 bp, Homo sapien
ctaaaatatagaaatgtatctgtggaagtggtc

SEQ ID NO: 845189 - DNA, 33 bp, Homo sapien
aaactagcaacatgcaaaccagctgggaaacta

SEQ ID NO: 845190 - DNA, 33 bp, Homo sapien
aaactagcaacatgcagaccagctgggaaacta

SEQ ID NO: 845191 - DNA, 33 bp, Homo sapien
ccagcttattcccagaagattttgtatctacca

SEQ ID NO: 845192 - DNA, 33 bp, Homo sapien
ccagcttattcccagaggattttgtatctacca

SEQ ID NO: 845193 - DNA, 33 bp, Homo sapien
aaagggaggccacataccataggtttaaatgta

SEQ ID NO: 845194 - DNA, 33 bp, Homo sapien
aaagggaggccacatatcataggtttaaatgta

SEQ ID NO: 845195 - DNA, 33 bp, Homo sapien
ctatgtacaaaacccaatgctcaaaacacttaa

SEQ ID NO: 845196 - DNA, 33 bp, Homo sapien
ctatgtacaaaacccagtgctcaaaacacttaa

SEQ ID NO: 845197 - DNA, 33 bp, Homo sapien
aggtgggggatagcagaatagggaactgatagt

SEQ ID NO: 845198 - DNA, 33 bp, Homo sapien
aggtgggggatagcaggatagggaactgatagt

SEQ ID NO: 845199 - DNA, 33 bp, Homo sapien
attgcagatgctataactaaaaagtcagataac

SEQ ID NO: 845200 - DNA, 33 bp, Homo sapien
attgcagatgctataattaaaaagtcagataac

SEQ ID NO: 845201 - DNA, 33 bp, Homo sapien
atttaagatgctccaacgaaagtgccttaagat

SEQ ID NO: 845202 - DNA, 33 bp, Homo sapien
atttaagatgctccaatgaaagtgccttaagat

SEQ ID NO: 845203 - DNA, 33 bp, Homo sapien
ctaagaagtcaatattaaaaaggcaacccaatt

SEQ ID NO: 845204 - DNA, 33 bp, Homo sapien
ctaagaagtcaatattgaaaaggcaacccaatt

SEQ ID NO: 845205 - DNA, 33 bp, Homo sapien
ttgtgcttaagggacaccatcaaacaagtgaaa

SEQ ID NO: 845206 - DNA, 33 bp, Homo sapien
ttgtgcttaagggacagcatcaaacaagtgaaa

SEQ ID NO: 845207 - DNA, 33 bp, Homo sapien
gtttatttgctctctcacctctagttccccctc

SEQ ID NO: 845208 - DNA, 33 bp, Homo sapien
gtttatttgctctctcgcctctagttccccctc

SEQ ID NO: 845209 - DNA, 33 bp, Homo sapien
gaaggattccatgcaaaaagtatagaggagaca

SEQ ID NO: 845210 - DNA, 33 bp, Homo sapien
gaaggattccatgcaagaagtatagaggagaca

SEQ ID NO: 845211 - DNA, 33 bp, Homo sapien
tttaatcctttgtgcacctctcatataagatct

SEQ ID NO: 845212 - DNA, 33 bp, Homo sapien
tttaatcctttgtgcagctctcatataagatct

SEQ ID NO: 845213 - DNA, 33 bp, Homo sapien
actgcgatgtttcagaaaattgtcagcatttca

SEQ ID NO: 845214 - DNA, 33 bp, Homo sapien
actgcgatgtttcagagaattgtcagcatttca

SEQ ID NO: 845215 - DNA, 33 bp, Homo sapien
aactgtaattcaacagaccatgggatttaccaa

SEQ ID NO: 845216 - DNA, 33 bp, Homo sapien
aactgtaattcaacagtccatgggatttaccaa

SEQ ID NO: 845217 - DNA, 33 bp, Homo sapien
tcccttgcgcctgcacactttctgccccagtgt

SEQ ID NO: 845218 - DNA, 33 bp, Homo sapien
tcccttgcgcctgcacgctttctgccccagtgt

SEQ ID NO: 845219 - DNA, 33 bp, Homo sapien
ctatttggcactcatgcagaagtgtggggtttt

SEQ ID NO: 845220 - DNA, 33 bp, Homo sapien
ctatttggcactcatgtagaagtgtggggtttt

SEQ ID NO: 845221 - DNA, 33 bp, Homo sapien
gcctatccaccaaccactactcttaagaaccat

SEQ ID NO: 845222 - DNA, 33 bp, Homo sapien
gcctatccaccaaccattactcttaagaaccat

SEQ ID NO: 845223 - DNA, 33 bp, Homo sapien
tggcgagtgaatctgcaacctgagaacccgtgc

SEQ ID NO: 845224 - DNA, 33 bp, Homo sapien
tggcgagtgaatctgcgacctgagaacccgtgc

SEQ ID NO: 845225 - DNA, 33 bp, Homo sapien
agtttgtcttgcatcaaagaaaaatgttacatt

SEQ ID NO: 845226 - DNA, 33 bp, Homo sapien
agtttgtcttgcatcagagaaaaatgttacatt

SEQ ID NO: 845227 - DNA, 33 bp, Homo sapien
ctataaatttcaggaaaaaataatgcagaagtt

SEQ ID NO: 845228 - DNA, 33 bp, Homo sapien
ctataaatttcaggaataaataatgcagaagtt

SEQ ID NO: 845229 - DNA, 33 bp, Homo sapien
gaatgagaacatctgaaagccggaagagagcaa

SEQ ID NO: 845230 - DNA, 33 bp, Homo sapien
gaatgagaacatctgagagccggaagagagcaa

SEQ ID NO: 845231 - DNA, 33 bp, Homo sapien
tgactacaaaattgcacaaatctcgatctcggc

SEQ ID NO: 845232 - DNA, 33 bp, Homo sapien
tgactacaaaattgcataaatctcgatctcggc

SEQ ID NO: 845233 - DNA, 33 bp, Homo sapien
aaggaaatgcaaataaagagagtgagataccac

SEQ ID NO: 845234 - DNA, 33 bp, Homo sapien
aaggaaatgcaaataaggagagtgagataccac

SEQ ID NO: 845235 - DNA, 33 bp, Homo sapien
agtactgaatcaaaaacaaagaggtgaatctta

SEQ ID NO: 845236 - DNA, 33 bp, Homo sapien
agtactgaatcaaaaagaaagaggtgaatctta

SEQ ID NO: 845237 - DNA, 33 bp, Homo sapien
tgttaatggtggacccaaaacgtgtaatatctc

SEQ ID NO: 845238 - DNA, 33 bp, Homo sapien
tgttaatggtggacccgaaacgtgtaatatctc

SEQ ID NO: 845239 - DNA, 33 bp, Homo sapien
cgatttggttggcacaagatttatgggggtttg

SEQ ID NO: 845240 - DNA, 33 bp, Homo sapien
cgatttggttggcacaggatttatgggggtttg

SEQ ID NO: 845241 - DNA, 33 bp, Homo sapien
tattcaacctgaagcacaaagagaggagagaga

SEQ ID NO: 845242 - DNA, 33 bp, Homo sapien
tattcaacctgaagcataaagagaggagagaga

SEQ ID NO: 845243 - DNA, 33 bp, Homo sapien
acccttggaagagagacaagacatagtcctaaa

SEQ ID NO: 845244 - DNA, 33 bp, Homo sapien
acccttggaagagagataagacatagtcctaaa

SEQ ID NO: 845245 - DNA, 33 bp, Homo sapien
tgctaagcttttataaatgatgtcctcttatca

SEQ ID NO: 845246 - DNA, 33 bp, Homo sapien
tgctaagcttttataagtgatgtcctcttatca

SEQ ID NO: 845247 - DNA, 33 bp, Homo sapien
tattcaatatagtaccagaagtcctcgctagag

SEQ ID NO: 845248 - DNA, 33 bp, Homo sapien
tattcaatatagtaccggaagtcctcgctagag

SEQ ID NO: 845249 - DNA, 33 bp, Homo sapien; identical to SEQ ID NO: 845247

SEQ ID NO: 845250 - DNA, 33 bp, Homo sapien; identical to SEQ ID NO: 845248

SEQ ID NO: 845251 - DNA, 33 bp, Homo sapien
tctcactctttcctccacaaacagaggagtctc

SEQ ID NO: 845252 - DNA, 33 bp, Homo sapien
tctcactctttcctccgcaaacagaggagtctc

SEQ ID NO: 845253 - DNA, 33 bp, Homo sapien
ggtagattaagtgtgcaaaaagttaaatttaaa

SEQ ID NO: 845254 - DNA, 33 bp, Homo sapien
ggtagattaagtgtgccaaaagttaaatttaaa

SEQ ID NO: 845255 - DNA, 33 bp, Homo sapien
ttgaattgtacaactgcaatatccactggttta

SEQ ID NO: 845256 - DNA, 33 bp, Homo sapien
ttgaattgtacaactgtaatatccactggttta

SEQ ID NO: 845257 - DNA, 33 bp, Homo sapien
atttataggatacagaacaatatttcaatacat

SEQ ID NO: 845258 - DNA, 33 bp, Homo sapien
atttataggatacagagcaatatttcaatacat

SEQ ID NO: 845259 - DNA, 33 bp, Homo sapien
tttaggcctagtttaaccagatctttaagagac

SEQ ID NO: 845260 - DNA, 33 bp, Homo sapien
tttaggcctagtttaagcagatctttaagagac

SEQ ID NO: 845261 - DNA, 33 bp, Homo sapien
tgtttattttgcataacctacatatcattaatc

SEQ ID NO: 845262 - DNA, 33 bp, Homo sapien
tgtttattttgcataatctacatatcattaatc

SEQ ID NO: 845263 - DNA, 33 bp, Homo sapien
tggttttgtactttcacgttcaattccattgac

SEQ ID NO: 845264 - DNA, 33 bp, Homo sapien
tggttttgtactttcatgttcaattccattgac

SEQ ID NO: 845265 - DNA, 33 bp, Homo sapien
ttcagctatttgtttacattccacttgcatttc

SEQ ID NO: 845266 - DNA, 33 bp, Homo sapien
ttcagctatttgtttagattccacttgcatttc

SEQ ID NO: 845267 - DNA, 33 bp, Homo sapien
ctaatcccagcacgaggactgcacttaaagccc

SEQ ID NO: 845268 - DNA, 33 bp, Homo sapien
ctaatcccagcacgagtactgcacttaaagccc

SEQ ID NO: 845269 - DNA, 33 bp, Homo sapien
aaggaacacttacgcacggttgatgggaatgta

SEQ ID NO: 845270 - DNA, 33 bp, Homo sapien
aaggaacacttacgcatggttgatgggaatgta

SEQ ID NO: 845271 - DNA, 33 bp, Homo sapien
tcagcctctttaatgacgatagggctattttca

SEQ ID NO: 845272 - DNA, 33 bp, Homo sapien
tcagcctctttaatgatgatagggctattttca

SEQ ID NO: 845273 - DNA, 33 bp, Homo sapien
tacatatgatcacgatcacagaaatgtaaaact

SEQ ID NO: 845274 - DNA, 33 bp, Homo sapien
tacatatgatcacgattacagaaatgtaaaact

SEQ ID NO: 845275 - DNA, 33 bp, Homo sapien
gcaagacaattccatacatttaggagtggaaag

SEQ ID NO: 845276 - DNA, 33 bp, Homo sapien
gcaagacaattccatatatttaggagtggaaag

SEQ ID NO: 845277 - DNA, 33 bp, Homo sapien
cacccacaagatgaggacctaacttttttgcat

SEQ ID NO: 845278 - DNA, 33 bp, Homo sapien
cacccacaagatgaggtcctaacttttttgcat

SEQ ID NO: 845279 - DNA, 33 bp, Homo sapien
aaagacatggaaggaaactgaatattaaaagtt

SEQ ID NO: 845280 - DNA, 33 bp, Homo sapien
aaagacatggaaggaagctgaatattaaaagtt

SEQ ID NO: 845281 - DNA, 33 bp, Homo sapien
agagaccagcaactaacatataattttgacaat

SEQ ID NO: 845282 - DNA, 33 bp, Homo sapien
agagaccagcaactaatatataattttgacaat

SEQ ID NO: 845283 - DNA, 33 bp, Homo sapien
aactatgtcaggaaaaatgctactatagtgaga

SEQ ID NO: 845284 - DNA, 33 bp, Homo sapien
aactatgtcaggaaaagtgctactatagtgaga

SEQ ID NO: 845285 - DNA, 33 bp, Homo sapien
ccctgatacacagtccacattttcagaatacat

SEQ ID NO: 845286 - DNA, 33 bp, Homo sapien
ccctgatacacagtcctcattttcagaatacat

SEQ ID NO: 845287 - DNA, 33 bp, Homo sapien
cttcccttcattctgacggccagttgatcatca

SEQ ID NO: 845288 - DNA, 33 bp, Homo sapien
cttcccttcattctgatggccagttgatcatca

SEQ ID NO: 845289 - DNA, 33 bp, Homo sapien
agaaacagaaatggcaaataaaaatgaaaatta

SEQ ID NO: 845290 - DNA, 33 bp, Homo sapien
agaaacagaaatggcagataaaaatgaaaatta

SEQ ID NO: 845291 - DNA, 33 bp, Homo sapien
cttcaagaagagctcccccatattttaagtggg

SEQ ID NO: 845292 - DNA, 33 bp, Homo sapien
cttcaagaagagctcctccatattttaagtggg

SEQ ID NO: 845293 - DNA, 33 bp, Homo sapien
gtgaaagcagctactcaaaatgtagtataaatg

SEQ ID NO: 845294 - DNA, 33 bp, Homo sapien
gtgaaagcagctactcgaaatgtagtataaatg

SEQ ID NO: 845295 - DNA, 33 bp, Homo sapien
cagcattggaagaagaagttgagagttgggttt

SEQ ID NO: 845296 - DNA, 33 bp, Homo sapien
cagcattggaagaagaggttgagagttgggttt

SEQ ID NO: 845297 - DNA, 33 bp, Homo sapien
cttgaatgaaaacctgcagtaataggagataaa

SEQ ID NO: 845298 - DNA, 33 bp, Homo sapien
cttgaatgaaaacctgtagtaataggagataaa

SEQ ID NO: 845299 - DNA, 33 bp, Homo sapien
ccagttctctaagctccattcacggtaagctcc

SEQ ID NO: 845300 - DNA, 33 bp, Homo sapien
ccagttctctaagctctattcacggtaagctcc

SEQ ID NO: 845301 - DNA, 33 bp, Homo sapien
atgtgaaggagtacacaaaataaaatgataaaa

SEQ ID NO: 845302 - DNA, 33 bp, Homo sapien
atgtgaaggagtacaccaaataaaatgataaaa

SEQ ID NO: 845303 - DNA, 33 bp, Homo sapien
gagcatcctagcaatgacatggcttcccattct

SEQ ID NO: 845304 - DNA, 33 bp, Homo sapien
gagcatcctagcaatggcatggcttcccattct

SEQ ID NO: 845305 - DNA, 33 bp, Homo sapien
gcatttcacaatgagacgaaacaggcgattgac

SEQ ID NO: 845306 - DNA, 33 bp, Homo sapien
gcatttcacaatgagatgaaacaggcgattgac

SEQ ID NO: 845307 - DNA, 33 bp, Homo sapien
cctaggcaaatgctgacctgttttctactaaca

SEQ ID NO: 845308 - DNA, 33 bp, Homo sapien
cctaggcaaatgctgatctgttttctactaaca

SEQ ID NO: 845309 - DNA, 33 bp, Homo sapien
ctctcccagttattgccatgaaaaaaataaact

SEQ ID NO: 845310 - DNA, 33 bp, Homo sapien
ctctcccagttattgctatgaaaaaaataaact

SEQ ID NO: 845311 - DNA, 33 bp, Homo sapien
acagctgagcaggtcagtctcgtttaaaaagct

SEQ ID NO: 845312 - DNA, 33 bp, Homo sapien
acagctgagcaggtcattctcgtttaaaaagct

SEQ ID NO: 845313 - DNA, 33 bp, Homo sapien
atactcagcactgttcaaggtgttttggaaaca

SEQ ID NO: 845314 - DNA, 33 bp, Homo sapien
atactcagcactgttcgaggtgttttggaaaca

SEQ ID NO: 845315 - DNA, 33 bp, Homo sapien
ttgtctctggcacataaagataattgtttcatt

SEQ ID NO: 845316 - DNA, 33 bp, Homo sapien
ttgtctctggcacatagagataattgtttcatt

SEQ ID NO: 845317 - DNA, 33 bp, Homo sapien
tttctatttttggttaagataccaacaaagaaa

SEQ ID NO: 845318 - DNA, 33 bp, Homo sapien
tttctatttttggttaggataccaacaaagaaa

SEQ ID NO: 845319 - DNA, 33 bp, Homo sapien
gaattttacttgcttacgaaaaactttggaaaa

SEQ ID NO: 845320 - DNA, 33 bp, Homo sapien
gaattttacttgcttatgaaaaactttggaaaa

SEQ ID NO: 845321 - DNA, 33 bp, Homo sapien
tgagacatgaaggcaacggagatcatttcgaag

SEQ ID NO: 845322 - DNA, 33 bp, Homo sapien
tgagacatgaaggcaatggagatcatttcgaag

SEQ ID NO: 845323 - DNA, 33 bp, Homo sapien
ccatagataaaccctaaatgctggtcccctaca

SEQ ID NO: 845324 - DNA, 33 bp, Homo sapien
ccatagataaaccctagatgctggtcccctaca

SEQ ID NO: 845325 - DNA, 33 bp, Homo sapien
ttttacaatctttccacaacttgcttaaagcct

SEQ ID NO: 845326 - DNA, 33 bp, Homo sapien
ttttacaatctttccataacttgcttaaagcct

SEQ ID NO: 845327 - DNA, 33 bp, Homo sapien
atgcattaagtgtggcaaaacaaaatggagaaa

SEQ ID NO: 845328 - DNA, 33 bp, Homo sapien
atgcattaagtgtggctaaacaaaatggagaaa

SEQ ID NO: 845329 - DNA, 33 bp, Homo sapien
agaagctgcagaaacaagctataggaccagatg

SEQ ID NO: 845330 - DNA, 33 bp, Homo sapien
agaagctgcagaaacaggctataggaccagatg

SEQ ID NO: 845331 - DNA, 33 bp, Homo sapien
gggtttaatccttgaaagtctctatacatgagt

SEQ ID NO: 845332 - DNA, 33 bp, Homo sapien
gggtttaatccttgaaggtctctatacatgagt

SEQ ID NO: 845333 - DNA, 33 bp, Homo sapien
gggcagaaatctagggcattgcataggtaagca

SEQ ID NO: 845334 - DNA, 33 bp, Homo sapien
gggcagaaatctagggtattgcataggtaagca

SEQ ID NO: 845335 - DNA, 33 bp, Homo sapien
tggactaactccagcccccaacagttcatcaat

SEQ ID NO: 845336 - DNA, 33 bp, Homo sapien
tggactaactccagcctccaacagttcatcaat

SEQ ID NO: 845337 - DNA, 33 bp, Homo sapien
tgattcctccaagcaactatattagaaggttag

SEQ ID NO: 845338 - DNA, 33 bp, Homo sapien
tgattcctccaagcaagtatattagaaggttag

SEQ ID NO: 845339 - DNA, 33 bp, Homo sapien
cagttgggatccagagaattttactttgtttgc

SEQ ID NO: 845340 - DNA, 33 bp, Homo sapien
cagttgggatccagaggattttactttgtttgc

SEQ ID NO: 845341 - DNA, 33 bp, Homo sapien
caacttttgctattagaaacctcctcatattgg

SEQ ID NO: 845342 - DNA, 33 bp, Homo sapien
caacttttgctattaggaacctcctcatattgg

SEQ ID NO: 845343 - DNA, 33 bp, Homo sapien
actagtatacgagctcaattagaacaaacccgg

SEQ ID NO: 845344 - DNA, 33 bp, Homo sapien
actagtatacgagctcgattagaacaaacccgg

SEQ ID NO: 845345 - DNA, 33 bp, Homo sapien; identical to SEQ ID NO: 845343

SEQ ID NO: 845346 - DNA, 33 bp, Homo sapien; identical to SEQ ID NO: 845344

SEQ ID NO: 845347 - DNA, 33 bp, Homo sapien
catgcttagattcttgcatctaccatcacaatc

SEQ ID NO: 845348 - DNA, 33 bp, Homo sapien
catgcttagattcttgtatctaccatcacaatc

SEQ ID NO: 845349 - DNA, 33 bp, Homo sapien
actaggcaaattaataactgtgctggctgcagg

SEQ ID NO: 845350 - DNA, 33 bp, Homo sapien
actaggcaaattaatagctgtgctggctgcagg

SEQ ID NO: 845351 - DNA, 33 bp, Homo sapien
acctctctcagtgataggacgttaaaacctggt

SEQ ID NO: 845352 - DNA, 33 bp, Homo sapien
acctctctcagtgatatgacgttaaaacctggt

SEQ ID NO: 845353 - DNA, 33 bp, Homo sapien
atctatctaaaaagcagcattgtaaaaatgaaa

SEQ ID NO: 845354 - DNA, 33 bp, Homo sapien
atctatctaaaaagcatcattgtaaaaatgaaa

SEQ ID NO: 845355 - DNA, 33 bp, Homo sapien
agtatataaggtattcaaataatgcaacaaggg

SEQ ID NO: 845356 - DNA, 33 bp, Homo sapien
agtatataaggtattcgaataatgcaacaaggg

SEQ ID NO: 845357 - DNA, 33 bp, Homo sapien
tgtgacaaacacataactgtaggtgtctttctt

SEQ ID NO: 845358 - DNA, 33 bp, Homo sapien
tgtgacaaacacataagtgtaggtgtctttctt

SEQ ID NO: 845359 - DNA, 33 bp, Homo sapien
tatcaatgtgtcaatgcacatcaatcttttttc

SEQ ID NO: 845360 - DNA, 33 bp, Homo sapien
tatcaatgtgtcaatgtacatcaatcttttttc

SEQ ID NO: 845361 - DNA, 33 bp, Homo sapien
aataaggcaataataaacctgcctcacagatgt

SEQ ID NO: 845362 - DNA, 33 bp, Homo sapien
aataaggcaataataaccctgcctcacagatgt

SEQ ID NO: 845363 - DNA, 33 bp, Homo sapien
atttatggttgttgtgaatatcctctttttttc

SEQ ID NO: 845364 - DNA, 33 bp, Homo sapien
atttatggttgttgtgtatatcctctttttttc

SEQ ID NO: 845365 - DNA, 33 bp, Homo sapien
agataaatttatgctaacaaaagtattacactt

SEQ ID NO: 845366 - DNA, 33 bp, Homo sapien
agataaatttatgctatcaaaagtattacactt

SEQ ID NO: 845367 - DNA, 33 bp, Homo sapien
agctttgtcctcattaataaaggataaaggaca

SEQ ID NO: 845368 - DNA, 33 bp, Homo sapien
agctttgtcctcattagtaaaggataaaggaca

SEQ ID NO: 845369 - DNA, 33 bp, Homo sapien
ctttgacttgattgtaacatcttactagttcac

SEQ ID NO: 845370 - DNA, 33 bp, Homo sapien
ctttgacttgattgtagcatcttactagttcac

SEQ ID NO: 845371 - DNA, 33 bp, Homo sapien
aagggatttgaaaagacggtgagaaaaaactca

SEQ ID NO: 845372 - DNA, 33 bp, Homo sapien
aagggatttgaaaagatggtgagaaaaaactca

SEQ ID NO: 845373 - DNA, 33 bp, Homo sapien
ttctggtaacccaatcaatggggtgacattcta

SEQ ID NO: 845374 - DNA, 33 bp, Homo sapien
ttctggtaacccaatcgatggggtgacattcta

SEQ ID NO: 845375 - DNA, 33 bp, Homo sapien
atacataaagcaagcagctaaattgcaactcag

SEQ ID NO: 845376 - DNA, 33 bp, Homo sapien
atacataaagcaagcatctaaattgcaactcag

SEQ ID NO: 845377 - DNA, 33 bp, Homo sapien
ctgggtctcaggtatacgaaattcacaagtacc

SEQ ID NO: 845378 - DNA, 33 bp, Homo sapien
ctgggtctcaggtatatgaaattcacaagtacc

SEQ ID NO: 845379 - DNA, 33 bp, Homo sapien
gatcctagtatggaatcatgctctagtgctatg

SEQ ID NO: 845380 - DNA, 33 bp, Homo sapien
gatcctagtatggaattatgctctagtgctatg

SEQ ID NO: 845381 - DNA, 33 bp, Homo sapien
gttatttttgtctttcactctttgtcttttatg

SEQ ID NO: 845382 - DNA, 33 bp, Homo sapien
gttatttttgtctttcgctctttgtcttttatg

SEQ ID NO: 845383 - DNA, 33 bp, Homo sapien
acaaacaaaacgcgtcgccatctctaccagaaa

SEQ ID NO: 845384 - DNA, 33 bp, Homo sapien
acaaacaaaacgcgtctccatctctaccagaaa

SEQ ID NO: 845385 - DNA, 33 bp, Homo sapien
aaaatctgcaaattagcaatgtgccacttaaaa

SEQ ID NO: 845386 - DNA, 33 bp, Homo sapien
aaaatctgcaaattagtaatgtgccacttaaaa

SEQ ID NO: 845387 - DNA, 33 bp, Homo sapien
aagggtttattttgacgcaaagcacactgagaa

SEQ ID NO: 845388 - DNA, 33 bp, Homo sapien
aagggtttattttgactcaaagcacactgagaa

SEQ ID NO: 845389 - DNA, 33 bp, Homo sapien
ttgaaatttcttcccgaatgtcctaatcctaac

SEQ ID NO: 845390 - DNA, 33 bp, Homo sapien
ttgaaatttcttcccgtatgtcctaatcctaac

SEQ ID NO: 845391 - DNA, 33 bp, Homo sapien
acaaagaagtttacacagcctgcaataatggaa

SEQ ID NO: 845392 - DNA, 33 bp, Homo sapien
acaaagaagtttacaccgcctgcaataatggaa

SEQ ID NO: 845393 - DNA, 33 bp, Homo sapien
aatatcatcattttcacgcctcggtattaaaac

SEQ ID NO: 845394 - DNA, 33 bp, Homo sapien
aatatcatcattttcatgcctcggtattaaaac

SEQ ID NO: 845395 - DNA, 33 bp, Homo sapien
gagggaaatggaaggaataagtctgtcagaaag

SEQ ID NO: 845396 - DNA, 33 bp, Homo sapien
gagggaaatggaaggagtaagtctgtcagaaag

SEQ ID NO: 845397 - DNA, 33 bp, Homo sapien
ttatcttgaaagtttcaaaattcaatcaatcaa

SEQ ID NO: 845398 - DNA, 33 bp, Homo sapien
ttatcttgaaagtttcgaaattcaatcaatcaa

SEQ ID NO: 845399 - DNA, 33 bp, Homo sapien
cctacagttacagcaacattacaaagattaaga

SEQ ID NO: 845400 - DNA, 33 bp, Homo sapien
cctacagttacagcaatattacaaagattaaga

SEQ ID NO: 845401 - DNA, 33 bp, Homo sapien
actcaaataattggaacgtgatcaggtaatatt

SEQ ID NO: 845402 - DNA, 33 bp, Homo sapien
actcaaataattggaatgtgatcaggtaatatt

SEQ ID NO: 845403 - DNA, 33 bp, Homo sapien
ttgctggtgcacagaactataaaacacaaagtg

SEQ ID NO: 845404 - DNA, 33 bp, Homo sapien
ttgctggtgcacagaagtataaaacacaaagtg

SEQ ID NO: 845405 - DNA, 33 bp, Homo sapien
ctggcaagattcatcaactgttgactaaagagc

SEQ ID NO: 845406 - DNA, 33 bp, Homo sapien
ctggcaagattcatcacctgttgactaaagagc

SEQ ID NO: 845407 - DNA, 33 bp, Homo sapien
aaaatctgtggctagacggttgcttgcctggta

SEQ ID NO: 845408 - DNA, 33 bp, Homo sapien
aaaatctgtggctagatggttgcttgcctggta

SEQ ID NO: 845409 - DNA, 33 bp, Homo sapien
ggcccacggtgtgtacaacctggatactgctgc

SEQ ID NO: 845410 - DNA, 33 bp, Homo sapien
ggcccacggtgtgtactacctggatactgctgc

SEQ ID NO: 845411 - DNA, 33 bp, Homo sapien
tattgagatcaagaaactaatatacagaaaaag

SEQ ID NO: 845412 - DNA, 33 bp, Homo sapien
tattgagatcaagaaagtaatatacagaaaaag

SEQ ID NO: 845413 - DNA, 33 bp, Homo sapien
ttgctcaagaacaaagccaaagtcaataccaaa

SEQ ID NO: 845414 - DNA, 33 bp, Homo sapien
ttgctcaagaacaaagtcaaagtcaataccaaa

SEQ ID NO: 845415 - DNA, 33 bp, Homo sapien
tctgcctccagcttacaaatgactgtaaatcat

SEQ ID NO: 845416 - DNA, 33 bp, Homo sapien
tctgcctccagcttactaatgactgtaaatcat

SEQ ID NO: 845417 - DNA, 33 bp, Homo sapien
acattgtcctcattgacaccagtcagatatttt

SEQ ID NO: 845418 - DNA, 33 bp, Homo sapien
acattgtcctcattgataccagtcagatatttt

SEQ ID NO: 845419 - DNA, 33 bp, Homo sapien
aacaagtatattttcaggcttaactgtttcaga

SEQ ID NO: 845420 - DNA, 33 bp, Homo sapien
aacaagtatattttcatgcttaactgtttcaga

SEQ ID NO: 845421 - DNA, 33 bp, Homo sapien
cagagaaactcaaaaactgatttctaaggattt

SEQ ID NO: 845422 - DNA, 33 bp, Homo sapien
cagagaaactcaaaaagtgatttctaaggattt

SEQ ID NO: 845423 - DNA, 33 bp, Homo sapien
caaaagctctgtcactaaatagaaagttttcaa

SEQ ID NO: 845424 - DNA, 33 bp, Homo sapien
caaaagctctgtcacttaatagaaagttttcaa

SEQ ID NO: 845425 - DNA, 33 bp, Homo sapien
atttaggcaaaaatcaaccatcacataaatgtg

SEQ ID NO: 845426 - DNA, 33 bp, Homo sapien
atttaggcaaaaatcatccatcacataaatgtg

SEQ ID NO: 845427 - DNA, 33 bp, Homo sapien
caacatctgtagaccaacaatgagttttactat

SEQ ID NO: 845428 - DNA, 33 bp, Homo sapien
caacatctgtagaccagcaatgagttttactat

SEQ ID NO: 845429 - DNA, 33 bp, Homo sapien
ccgagttctccaatcactctgtaaattctctga

SEQ ID NO: 845430 - DNA, 33 bp, Homo sapien
ccgagttctccaatcattctgtaaattctctga

SEQ ID NO: 845431 - DNA, 33 bp, Homo sapien
ttgcaatggtctgaggcagccacaagagatata

SEQ ID NO: 845432 - DNA, 33 bp, Homo sapien
ttgcaatggtctgaggtagccacaagagatata

SEQ ID NO: 845433 - DNA, 33 bp, Homo sapien
agagagtgctggttaaaacacaaaattgattaa

SEQ ID NO: 845434 - DNA, 33 bp, Homo sapien
agagagtgctggttaagacacaaaattgattaa

SEQ ID NO: 845435 - DNA, 33 bp, Homo sapien
ggatctcaagaggtaaatggaaatgagaagcaa

SEQ ID NO: 845436 - DNA, 33 bp, Homo sapien
ggatctcaagaggtaagtggaaatgagaagcaa

SEQ ID NO: 845437 - DNA, 33 bp, Homo sapien
ttgagtctaagttcagcagctaaacctctgtca

SEQ ID NO: 845438 - DNA, 33 bp, Homo sapien
ttgagtctaagttcagtagctaaacctctgtca

SEQ ID NO: 845439 - DNA, 33 bp, Homo sapien
tttgatttagaaaaggccattaaactcatttct

SEQ ID NO: 845440 - DNA, 33 bp, Homo sapien
tttgatttagaaaaggtcattaaactcatttct

SEQ ID NO: 845441 - DNA, 33 bp, Homo sapien
tttatattttgggcaactgtcgaacaataacaa

SEQ ID NO: 845442 - DNA, 33 bp, Homo sapien
tttatattttgggcaattgtcgaacaataacaa

SEQ ID NO: 845443 - DNA, 33 bp, Homo sapien
aaactgatgagatctacggatatgactattttg

SEQ ID NO: 845444 - DNA, 33 bp, Homo sapien
aaactgatgagatctatggatatgactattttg

SEQ ID NO: 845445 - DNA, 33 bp, Homo sapien
ggaatgtaccatcacaactggctgtgttttatt

SEQ ID NO: 845446 - DNA, 33 bp, Homo sapien
ggaatgtaccatcacatctggctgtgttttatt

SEQ ID NO: 845447 - DNA, 33 bp, Homo sapien
tgagggtaactgctcccatgactcagttacctc

SEQ ID NO: 845448 - DNA, 33 bp, Homo sapien
tgagggtaactgctcctatgactcagttacctc

SEQ ID NO: 845449 - DNA, 33 bp, Homo sapien
ccagataagtgaactacgtttatgtctatgtat

SEQ ID NO: 845450 - DNA, 33 bp, Homo sapien
ccagataagtgaactatgtttatgtctatgtat

SEQ ID NO: 845451 - DNA, 33 bp, Homo sapien
ccttgtaaacagataaaagttgtaagacccacg

SEQ ID NO: 845452 - DNA, 33 bp, Homo sapien
ccttgtaaacagataagagttgtaagacccacg

SEQ ID NO: 845453 - DNA, 33 bp, Homo sapien
tcaggtttactagaaaacatttgctaagtaaaa

SEQ ID NO: 845454 - DNA, 33 bp, Homo sapien
tcaggtttactagaaatcatttgctaagtaaaa

SEQ ID NO: 845455 - DNA, 33 bp, Homo sapien
aagaaggttgatgtgactaggattttaatccca

SEQ ID NO: 845456 - DNA, 33 bp, Homo sapien
aagaaggttgatgtgattaggattttaatccca

SEQ ID NO: 845457 - DNA, 33 bp, Homo sapien
aggaaactgcgggatcaacagctcaggggtccc

SEQ ID NO: 845458 - DNA, 33 bp, Homo sapien
aggaaactgcgggatcgacagctcaggggtccc

SEQ ID NO: 845459 - DNA, 33 bp, Homo sapien
gggggtgtccaaacttcaacttgggtgtggtga

SEQ ID NO: 845460 - DNA, 33 bp, Homo sapien
gggggtgtccaaactttaacttgggtgtggtga

SEQ ID NO: 845461 - DNA, 33 bp, Homo sapien
tgtacatatcaatcagacataccttattgatca

SEQ ID NO: 845462 - DNA, 33 bp, Homo sapien
tgtacatatcaatcagtcataccttattgatca

SEQ ID NO: 845463 - DNA, 33 bp, Homo sapien
caacaaatgggagagaaccgatttctagtgggt

SEQ ID NO: 845464 - DNA, 33 bp, Homo sapien
caacaaatgggagagagccgatttctagtgggt

SEQ ID NO: 845465 - DNA, 33 bp, Homo sapien
gggacaaaaaatgaaacgttaatgtaagcaata

SEQ ID NO: 845466 - DNA, 33 bp, Homo sapien
gggacaaaaaatgaaatgttaatgtaagcaata

SEQ ID NO: 845467 - DNA, 33 bp, Homo sapien
gtaggacaggggcatacgaaggcactgccaatc

SEQ ID NO: 845468 - DNA, 33 bp, Homo sapien
gtaggacaggggcatatgaaggcactgccaatc

SEQ ID NO: 845469 - DNA, 33 bp, Homo sapien
cagtctttgtggcctacagtaatttcaggatta

SEQ ID NO: 845470 - DNA, 33 bp, Homo sapien
cagtctttgtggcctagagtaatttcaggatta

SEQ ID NO: 845471 - DNA, 33 bp, Homo sapien
gatattagaactaggaagagcaaagatgaaaaa

SEQ ID NO: 845472 - DNA, 33 bp, Homo sapien
gatattagaactaggatgagcaaagatgaaaaa

SEQ ID NO: 845473 - DNA, 33 bp, Homo sapien
cttcttaatcacttctaacattttccctctttc

SEQ ID NO: 845474 - DNA, 33 bp, Homo sapien
cttcttaatcacttctgacattttccctctttc

SEQ ID NO: 845475 - DNA, 33 bp, Homo sapien
cagaagtacaattatgaaggagattgaacaggg

SEQ ID NO: 845476 - DNA, 33 bp, Homo sapien
cagaagtacaattatgcaggagattgaacaggg

SEQ ID NO: 845477 - DNA, 33 bp, Homo sapien
aattgtacttctggataaggagactaacaatat

SEQ ID NO: 845478 - DNA, 33 bp, Homo sapien
aattgtacttctggatgaggagactaacaatat

SEQ ID NO: 845479 - DNA, 33 bp, Homo sapien
catgtaaaatacgggaagttttctaatagaaat

SEQ ID NO: 845480 - DNA, 33 bp, Homo sapien
catgtaaaatacgggacgttttctaatagaaat

SEQ ID NO: 845481 - DNA, 33 bp, Homo sapien
caacctaagctatgtacggagatatgcaaagat

SEQ ID NO: 845482 - DNA, 33 bp, Homo sapien
caacctaagctatgtatggagatatgcaaagat

SEQ ID NO: 845483 - DNA, 33 bp, Homo sapien
aaggtgagctatttctcaattgtcatcatgaag

SEQ ID NO: 845484 - DNA, 33 bp, Homo sapien
aaggtgagctatttcttaattgtcatcatgaag

SEQ ID NO: 845485 - DNA, 33 bp, Homo sapien
tttagtaaaactggaactagaagctgtggtgta

SEQ ID NO: 845486 - DNA, 33 bp, Homo sapien
tttagtaaaactggaagtagaagctgtggtgta

SEQ ID NO: 845487 - DNA, 33 bp, Homo sapien
acatcagttggtaaagactaagccataatatta

SEQ ID NO: 845488 - DNA, 33 bp, Homo sapien
acatcagttggtaaagcctaagccataatatta

SEQ ID NO: 845489 - DNA, 33 bp, Homo sapien
tcagtaattagcaaaacgttctcatgtcatatc

SEQ ID NO: 845490 - DNA, 33 bp, Homo sapien
tcagtaattagcaaaatgttctcatgtcatatc

SEQ ID NO: 845491 - DNA, 33 bp, Homo sapien
gaggttttttttggcaaccactgtataattcag

SEQ ID NO: 845492 - DNA, 33 bp, Homo sapien
gaggttttttttggcagccactgtataattcag

SEQ ID NO: 845493 - DNA, 33 bp, Homo sapien
tctccacagctataaaaaaagagaaatgctgaa

SEQ ID NO: 845494 - DNA, 33 bp, Homo sapien
tctccacagctataaagaaagagaaatgctgaa

SEQ ID NO: 845495 - DNA, 33 bp, Homo sapien
ctttcttccaaatttgaactggtttaaggctct

SEQ ID NO: 845496 - DNA, 33 bp, Homo sapien
ctttcttccaaatttggactggtttaaggctct

SEQ ID NO: 845497 - DNA, 33 bp, Homo sapien
ccacaaggcaagatgacgataaactagacaaat

SEQ ID NO: 845498 - DNA, 33 bp, Homo sapien
ccacaaggcaagatgatgataaactagacaaat

SEQ ID NO: 845499 - DNA, 33 bp, Homo sapien
aatgtcccccactccaatatgttccaaaggact

SEQ ID NO: 845500 - DNA, 33 bp, Homo sapien
aatgtcccccactccagtatgttccaaaggact

SEQ ID NO: 845501 - DNA, 33 bp, Homo sapien
ctgcgagttattaaaacgactataccttaatcc

SEQ ID NO: 845502 - DNA, 33 bp, Homo sapien
ctgcgagttattaaaatgactataccttaatcc

SEQ ID NO: 845503 - DNA, 33 bp, Homo sapien
gggccagcagtataacaagggccatggtcaacc

SEQ ID NO: 845504 - DNA, 33 bp, Homo sapien
gggccagcagtataaccagggccatggtcaacc

SEQ ID NO: 845505 - DNA, 33 bp, Homo sapien
gacttatttgaaataccagtgagaaggattata

SEQ ID NO: 845506 - DNA, 33 bp, Homo sapien
gacttatttgaaatactagtgagaaggattata

SEQ ID NO: 845507 - DNA, 33 bp, Homo sapien
atgagaatgctaataaatgtaacttgaaaatat

SEQ ID NO: 845508 - DNA, 33 bp, Homo sapien
atgagaatgctaataagtgtaacttgaaaatat

SEQ ID NO: 845509 - DNA, 33 bp, Homo sapien
acaaattcaaaaatacacagtaaccaaaaatcc

SEQ ID NO: 845510 - DNA, 33 bp, Homo sapien
acaaattcaaaaatactcagtaaccaaaaatcc

SEQ ID NO: 845511 - DNA, 33 bp, Homo sapien
tatagacatctgccccaactgaatgtgttctgt

SEQ ID NO: 845512 - DNA, 33 bp, Homo sapien
tatagacatctgccccgactgaatgtgttctgt

SEQ ID NO: 845513 - DNA, 33 bp, Homo sapien
aactatatgccataaacgtcaagttattcattt

SEQ ID NO: 845514 - DNA, 33 bp, Homo sapien
aactatatgccataaatgtcaagttattcattt

SEQ ID NO: 845515 - DNA, 33 bp, Homo sapien
aaggaagtaagggctcagaactctcaggaataa

SEQ ID NO: 845516 - DNA, 33 bp, Homo sapien
aaggaagtaagggctcggaactctcaggaataa

SEQ ID NO: 845517 - DNA, 33 bp, Homo sapien
ctattgcagctgttaagtaccacaaatttggtg

SEQ ID NO: 845518 - DNA, 33 bp, Homo sapien
ctattgcagctgttaattaccacaaatttggtg

SEQ ID NO: 845519 - DNA, 33 bp, Homo sapien
catccagataattcagcatgctctcactatctc

SEQ ID NO: 845520 - DNA, 33 bp, Homo sapien
catccagataattcagtatgctctcactatctc

SEQ ID NO: 845521 - DNA, 33 bp, Homo sapien
aaatccctaaccaaataacatttcaaagtccct

SEQ ID NO: 845522 - DNA, 33 bp, Homo sapien
aaatccctaaccaaattacatttcaaagtccct

SEQ ID NO: 845523 - DNA, 33 bp, Homo sapien
aaacttcgaaagtcaacgtgaggattaaatcag

SEQ ID NO: 845524 - DNA, 33 bp, Homo sapien
aaacttcgaaagtcaatgtgaggattaaatcag

SEQ ID NO: 845525 - DNA, 33 bp, Homo sapien
tatttcttttaggaagaagagagattccataca

SEQ ID NO: 845526 - DNA, 33 bp, Homo sapien
tatttcttttaggaaggagagagattccataca

SEQ ID NO: 845527 - DNA, 33 bp, Homo sapien
attcatgttttatgacgagtaaacagaatttga

SEQ ID NO: 845528 - DNA, 33 bp, Homo sapien
attcatgttttatgactagtaaacagaatttga

SEQ ID NO: 845529 - DNA, 33 bp, Homo sapien
gggtgggatcctgccaacaatgagaggcacccc

SEQ ID NO: 845530 - DNA, 33 bp, Homo sapien
gggtgggatcctgccagcaatgagaggcacccc

SEQ ID NO: 845531 - DNA, 33 bp, Homo sapien
aagtggaaccttctgaaatccctttaaaactag

SEQ ID NO: 845532 - DNA, 33 bp, Homo sapien
aagtggaaccttctgagatccctttaaaactag

SEQ ID NO: 845533 - DNA, 33 bp, Homo sapien
ttggctagatcagatacagaaaaagcctacatt

SEQ ID NO: 845534 - DNA, 33 bp, Homo sapien
ttggctagatcagatatagaaaaagcctacatt

SEQ ID NO: 845535 - DNA, 33 bp, Homo sapien
accagctcagtggaaagtccgggtaacggcctt

SEQ ID NO: 845536 - DNA, 33 bp, Homo sapien
accagctcagtggaaattccgggtaacggcctt

SEQ ID NO: 845537 - DNA, 33 bp, Homo sapien
gacccaactccactgaataagctcttttatact

SEQ ID NO: 845538 - DNA, 33 bp, Homo sapien
gacccaactccactgagtaagctcttttatact

SEQ ID NO: 845539 - DNA, 33 bp, Homo sapien
ttattatctttataaactcactgtgtagtacag

SEQ ID NO: 845540 - DNA, 33 bp, Homo sapien
ttattatctttataaattcactgtgtagtacag

SEQ ID NO: 845541 - DNA, 33 bp, Homo sapien
atgactcctaccaaacacagattactgtaggcc

SEQ ID NO: 845542 - DNA, 33 bp, Homo sapien
atgactcctaccaaacgcagattactgtaggcc

SEQ ID NO: 845543 - DNA, 33 bp, Homo sapien
cagagactaaagtgcaccttacaacaaccagga

SEQ ID NO: 845544 - DNA, 33 bp, Homo sapien
cagagactaaagtgcatcttacaacaaccagga

SEQ ID NO: 845545 - DNA, 33 bp, Homo sapien
gggatgttacctggcacgaatagttcaaaagtc

SEQ ID NO: 845546 - DNA, 33 bp, Homo sapien
gggatgttacctggcatgaatagttcaaaagtc

SEQ ID NO: 845547 - DNA, 33 bp, Homo sapien
tggcctgtaatcttaaaaaatgttaggtcataa

SEQ ID NO: 845548 - DNA, 33 bp, Homo sapien
tggcctgtaatcttaagaaatgttaggtcataa

SEQ ID NO: 845549 - DNA, 33 bp, Homo sapien
ccaaaaagaagggtaacgccactacagcacctt

SEQ ID NO: 845550 - DNA, 33 bp, Homo sapien
ccaaaaagaagggtaatgccactacagcacctt

SEQ ID NO: 845551 - DNA, 33 bp, Homo sapien
aaatattgctgtgcaaatacagtcttgtaataa

SEQ ID NO: 845552 - DNA, 33 bp, Homo sapien
aaatattgctgtgcaagtacagtcttgtaataa

SEQ ID NO: 845553 - DNA, 33 bp, Homo sapien
attgccccggaaaatcaacaatgacatcaataa

SEQ ID NO: 845554 - DNA, 33 bp, Homo sapien
attgccccggaaaatccacaatgacatcaataa

SEQ ID NO: 845555 - DNA, 33 bp, Homo sapien
actatctcatatttgtaaacagcatcatttcca

SEQ ID NO: 845556 - DNA, 33 bp, Homo sapien
actatctcatatttgttaacagcatcatttcca

SEQ ID NO: 845557 - DNA, 33 bp, Homo sapien
catggtttgtgccaaggataagaatgtcttcta

SEQ ID NO: 845558 - DNA, 33 bp, Homo sapien
catggtttgtgccaagtataagaatgtcttcta

SEQ ID NO: 845559 - DNA, 33 bp, Homo sapien
ggttgacgcacagagcaacttggtctcctctcc

SEQ ID NO: 845560 - DNA, 33 bp, Homo sapien
ggttgacgcacagagcgacttggtctcctctcc

SEQ ID NO: 845561 - DNA, 33 bp, Homo sapien
gaccagaaatctgagacaggtcaaagacgccca

SEQ ID NO: 845562 - DNA, 33 bp, Homo sapien
gaccagaaatctgagagaggtcaaagacgccca

SEQ ID NO: 845563 - DNA, 33 bp, Homo sapien
acagtagtgtatagcaatatcgtagactttcac

SEQ ID NO: 845564 - DNA, 33 bp, Homo sapien
acagtagtgtatagcagtatcgtagactttcac

SEQ ID NO: 845565 - DNA, 33 bp, Homo sapien
ctaggtccttcgcttaaggtctcataggctgca

SEQ ID NO: 845566 - DNA, 33 bp, Homo sapien
ctaggtccttcgcttagggtctcataggctgca

SEQ ID NO: 845567 - DNA, 33 bp, Homo sapien
ataccacttcctcagggcaaaaccagttttttt

SEQ ID NO: 845568 - DNA, 33 bp, Homo sapien
ataccacttcctcaggtcaaaaccagttttttt

SEQ ID NO: 845569 - DNA, 33 bp, Homo sapien
aggagaaagtaggcaaaggcatcagagataagt

SEQ ID NO: 845570 - DNA, 33 bp, Homo sapien
aggagaaagtaggcaagggcatcagagataagt

SEQ ID NO: 845571 - DNA, 33 bp, Homo sapien
cactatatgtattgcacaaaggttgtgacatga

SEQ ID NO: 845572 - DNA, 33 bp, Homo sapien
cactatatgtattgcataaaggttgtgacatga

SEQ ID NO: 845573 - DNA, 33 bp, Homo sapien
tatggatgaacagttccctttattcctcctttc

SEQ ID NO: 845574 - DNA, 33 bp, Homo sapien
tatggatgaacagttctctttattcctcctttc

SEQ ID NO: 845575 - DNA, 33 bp, Homo sapien
cacatctcttgtttgacctgaccagaagccata

SEQ ID NO: 845576 - DNA, 33 bp, Homo sapien
cacatctcttgtttgatctgaccagaagccata

SEQ ID NO: 845577 - DNA, 33 bp, Homo sapien
tagttttattcctagcaccgccccttctgagtc

SEQ ID NO: 845578 - DNA, 33 bp, Homo sapien
tagttttattcctagcgccgccccttctgagtc

SEQ ID NO: 845579 - DNA, 33 bp, Homo sapien
agagaagctgaactaaaggttgcctttctctaa

SEQ ID NO: 845580 - DNA, 33 bp, Homo sapien
agagaagctgaactaagggttgcctttctctaa

SEQ ID NO: 845581 - DNA, 33 bp, Homo sapien
tcagtatgttagaaccaaagtgctaagttaatg

SEQ ID NO: 845582 - DNA, 33 bp, Homo sapien
tcagtatgttagaaccgaagtgctaagttaatg

SEQ ID NO: 845583 - DNA, 33 bp, Homo sapien
atctaaatctttctttcaaaacttgcaggtttc

SEQ ID NO: 845584 - DNA, 33 bp, Homo sapien
atctaaatctttcttttaaaacttgcaggtttc

SEQ ID NO: 845585 - DNA, 33 bp, Homo sapien
gatgggagagccaatacgaggatgccttacccc

SEQ ID NO: 845586 - DNA, 33 bp, Homo sapien
gatgggagagccaatatgaggatgccttacccc

SEQ ID NO: 845587 - DNA, 33 bp, Homo sapien
tgattgtggaacaccacgtgactatgcaactag

SEQ ID NO: 845588 - DNA, 33 bp, Homo sapien
tgattgtggaacaccaggtgactatgcaactag

SEQ ID NO: 845589 - DNA, 33 bp, Homo sapien
cattttgtgatgtaaaacttctccattttattt

SEQ ID NO: 845590 - DNA, 33 bp, Homo sapien
cattttgtgatgtaaatcttctccattttattt

SEQ ID NO: 845591 - DNA, 33 bp, Homo sapien
ctcttaatcatggcaacgggtcgggtactcatt

SEQ ID NO: 845592 - DNA, 33 bp, Homo sapien
ctcttaatcatggcaatgggtcgggtactcatt

SEQ ID NO: 845593 - DNA, 33 bp, Homo sapien
tttccatttgtgagccaccattactaggtacgt

SEQ ID NO: 845594 - DNA, 33 bp, Homo sapien
tttccatttgtgagccgccattactaggtacgt

SEQ ID NO: 845595 - DNA, 33 bp, Homo sapien
gcaagcatttctcatacggaacctagcattaag

SEQ ID NO: 845596 - DNA, 33 bp, Homo sapien
gcaagcatttctcatatggaacctagcattaag

SEQ ID NO: 845597 - DNA, 33 bp, Homo sapien
tgtcctggactcagacaaatctaatgtttcaga

SEQ ID NO: 845598 - DNA, 33 bp, Homo sapien
tgtcctggactcagacgaatctaatgtttcaga

SEQ ID NO: 845599 - DNA, 33 bp, Homo sapien
gaaagatagacgcatccccactcaaaccagggt

SEQ ID NO: 845600 - DNA, 33 bp, Homo sapien
gaaagatagacgcatctccactcaaaccagggt

SEQ ID NO: 845601 - DNA, 33 bp, Homo sapien
attggaagaattaaccactatgagcagaaagtc

SEQ ID NO: 845602 - DNA, 33 bp, Homo sapien
attggaagaattaacccctatgagcagaaagtc

SEQ ID NO: 845603 - DNA, 33 bp, Homo sapien
tcagcccttaataagcactgtgaagtaattgtt

SEQ ID NO: 845604 - DNA, 33 bp, Homo sapien
tcagcccttaataagcgctgtgaagtaattgtt

SEQ ID NO: 845605 - DNA, 33 bp, Homo sapien
tctcatggttgaggtacggggtctaattcttat

SEQ ID NO: 845606 - DNA, 33 bp, Homo sapien
tctcatggttgaggtatggggtctaattcttat

SEQ ID NO: 845607 - DNA, 33 bp, Homo sapien
atgcacttatccatagaccaaaaggcaaataat

SEQ ID NO: 845608 - DNA, 33 bp, Homo sapien
atgcacttatccatagtccaaaaggcaaataat

SEQ ID NO: 845609 - DNA, 33 bp, Homo sapien
catccacttcttcacccagactaaatccttgct

SEQ ID NO: 845610 - DNA, 33 bp, Homo sapien
catccacttcttcacctagactaaatccttgct

SEQ ID NO: 845611 - DNA, 33 bp, Homo sapien
atgctctctcctttcacgtaggggaagcaaatt

SEQ ID NO: 845612 - DNA, 33 bp, Homo sapien
atgctctctcctttcatgtaggggaagcaaatt

SEQ ID NO: 845613 - DNA, 33 bp, Homo sapien
ggcaggcactgttccaagtgcttaggatgcagc

SEQ ID NO: 845614 - DNA, 33 bp, Homo sapien
ggcaggcactgttccacgtgcttaggatgcagc

SEQ ID NO: 845615 - DNA, 33 bp, Homo sapien
ataaatgaaagagagacgagattgtgggatgct

SEQ ID NO: 845616 - DNA, 33 bp, Homo sapien
ataaatgaaagagagatgagattgtgggatgct

SEQ ID NO: 845617 - DNA, 33 bp, Homo sapien
atttagggacatgataactctataaagcagctt

SEQ ID NO: 845618 - DNA, 33 bp, Homo sapien
atttagggacatgatacctctataaagcagctt

SEQ ID NO: 845619 - DNA, 33 bp, Homo sapien
attacatatcaagaaactaaatcataaacaata

SEQ ID NO: 845620 - DNA, 33 bp, Homo sapien
attacatatcaagaaattaaatcataaacaata

SEQ ID NO: 845621 - DNA, 33 bp, Homo sapien
cacattctcacacatacctcatttaatgtattt

SEQ ID NO: 845622 - DNA, 33 bp, Homo sapien
cacattctcacacatatctcatttaatgtattt

SEQ ID NO: 845623 - DNA, 33 bp, Homo sapien
atttagaagcaagaacacctctaaatttcttgc

SEQ ID NO: 845624 - DNA, 33 bp, Homo sapien
atttagaagcaagaactcctctaaatttcttgc

SEQ ID NO: 845625 - DNA, 33 bp, Homo sapien
atttaagcctaaaaagaattctgccacaccatg

SEQ ID NO: 845626 - DNA, 33 bp, Homo sapien
atttaagcctaaaaaggattctgccacaccatg

SEQ ID NO: 845627 - DNA, 33 bp, Homo sapien
aggttctaggccaagcacaaaggaactaaatgg

SEQ ID NO: 845628 - DNA, 33 bp, Homo sapien
aggttctaggccaagctcaaaggaactaaatgg

SEQ ID NO: 845629 - DNA, 33 bp, Homo sapien
tcttggctttcctgtcaaaagaagtagtaagga

SEQ ID NO: 845630 - DNA, 33 bp, Homo sapien
tcttggctttcctgtcgaaagaagtagtaagga

SEQ ID NO: 845631 - DNA, 33 bp, Homo sapien
aacatttgtgtttcaaagatgccatcaagaaaa

SEQ ID NO: 845632 - DNA, 33 bp, Homo sapien
aacatttgtgtttcaaggatgccatcaagaaaa

SEQ ID NO: 845633 - DNA, 33 bp, Homo sapien
atccctacttttctgcggaaacaaactgaggct

SEQ ID NO: 845634 - DNA, 33 bp, Homo sapien
atccctacttttctgctgaaacaaactgaggct

SEQ ID NO: 845635 - DNA, 33 bp, Homo sapien
ttaacatttctgctgacctggaaaaaatgtcac

SEQ ID NO: 845636 - DNA, 33 bp, Homo sapien
ttaacatttctgctgatctggaaaaaatgtcac

SEQ ID NO: 845637 - DNA, 33 bp, Homo sapien
tgtaagccactctagcagactgatcaaacccaa

SEQ ID NO: 845638 - DNA, 33 bp, Homo sapien
tgtaagccactctagctgactgatcaaacccaa

SEQ ID NO: 845639 - DNA, 33 bp, Homo sapien
aatgactttaggagaaatatactggccaggagt

SEQ ID NO: 845640 - DNA, 33 bp, Homo sapien
aatgactttaggagaactatactggccaggagt

SEQ ID NO: 845641 - DNA, 33 bp, Homo sapien
gtgaaactgtggataaatgtggactactgtgta

SEQ ID NO: 845642 - DNA, 33 bp, Homo sapien
gtgaaactgtggataattgtggactactgtgta

SEQ ID NO: 845643 - DNA, 33 bp, Homo sapien
attccccctctacacaaatgatgaaagtgaggt

SEQ ID NO: 845644 - DNA, 33 bp, Homo sapien
attccccctctacacacatgatgaaagtgaggt

SEQ ID NO: 845645 - DNA, 33 bp, Homo sapien
tagtaactatttttagcagtgggacttacacat

SEQ ID NO: 845646 - DNA, 33 bp, Homo sapien
tagtaactatttttaggagtgggacttacacat

SEQ ID NO: 845647 - DNA, 33 bp, Homo sapien
gtgttaagcagtgtaaagatcgtgggattcata

SEQ ID NO: 845648 - DNA, 33 bp, Homo sapien
gtgttaagcagtgtaatgatcgtgggattcata

SEQ ID NO: 845649 - DNA, 33 bp, Homo sapien
tactatccacctaggcgatacagtatggtctat

SEQ ID NO: 845650 - DNA, 33 bp, Homo sapien
tactatccacctaggctatacagtatggtctat

SEQ ID NO: 845651 - DNA, 33 bp, Homo sapien
gactgagcttttatagacactgaaaggatgcta

SEQ ID NO: 845652 - DNA, 33 bp, Homo sapien
gactgagcttttataggcactgaaaggatgcta

SEQ ID NO: 845653 - DNA, 33 bp, Homo sapien
ggaggagattatcagaataagaatgctgtcttt

SEQ ID NO: 845654 - DNA, 33 bp, Homo sapien
ggaggagattatcagagtaagaatgctgtcttt

SEQ ID NO: 845655 - DNA, 33 bp, Homo sapien
gtacataaaatgcagaccttctctgtaagaatt

SEQ ID NO: 845656 - DNA, 33 bp, Homo sapien
gtacataaaatgcagatcttctctgtaagaatt

SEQ ID NO: 845657 - DNA, 33 bp, Homo sapien
ggggccatttttctaccatatgctagacatcag

SEQ ID NO: 845658 - DNA, 33 bp, Homo sapien
ggggccatttttctactatatgctagacatcag

SEQ ID NO: 845659 - DNA, 33 bp, Homo sapien
gtctatttctcatccaaagactaaaattccttg

SEQ ID NO: 845660 - DNA, 33 bp, Homo sapien
gtctatttctcatccagagactaaaattccttg

SEQ ID NO: 845661 - DNA, 33 bp, Homo sapien
ataaacttttctaaaactgcttccataataaca

SEQ ID NO: 845662 - DNA, 33 bp, Homo sapien
ataaacttttctaaaattgcttccataataaca

SEQ ID NO: 845663 - DNA, 33 bp, Homo sapien
tgtaaacagtcatgtacctacctagatcctaca

SEQ ID NO: 845664 - DNA, 33 bp, Homo sapien
tgtaaacagtcatgtatctacctagatcctaca

SEQ ID NO: 845665 - DNA, 33 bp, Homo sapien
aataaaatgctcatacaagaaattagaaaattg

SEQ ID NO: 845666 - DNA, 33 bp, Homo sapien
aataaaatgctcatacgagaaattagaaaattg

SEQ ID NO: 845667 - DNA, 33 bp, Homo sapien
atttgtaaattagtaaaagtaggacattaacac

SEQ ID NO: 845668 - DNA, 33 bp, Homo sapien
atttgtaaattagtaacagtaggacattaacac

SEQ ID NO: 845669 - DNA, 33 bp, Homo sapien
ctcctgcaaagcaacacggaagtcattttttag

SEQ ID NO: 845670 - DNA, 33 bp, Homo sapien
ctcctgcaaagcaacatggaagtcattttttag

SEQ ID NO: 845671 - DNA, 33 bp, Homo sapien
tggagtaactgcaataagctagagtcacagaaa

SEQ ID NO: 845672 - DNA, 33 bp, Homo sapien
tggagtaactgcaatatgctagagtcacagaaa

SEQ ID NO: 845673 - DNA, 33 bp, Homo sapien
ctgtttcctactgggaacctgactcaggcaaaa

SEQ ID NO: 845674 - DNA, 33 bp, Homo sapien
ctgtttcctactgggaccctgactcaggcaaaa

SEQ ID NO: 845675 - DNA, 33 bp, Homo sapien
gtggatctacaatgacacttagaaataaaagtg

SEQ ID NO: 845676 - DNA, 33 bp, Homo sapien
gtggatctacaatgacccttagaaataaaagtg

SEQ ID NO: 845677 - DNA, 33 bp, Homo sapien
tattattcagcattaccattcctcctaccttta

SEQ ID NO: 845678 - DNA, 33 bp, Homo sapien
tattattcagcattactattcctcctaccttta

SEQ ID NO: 845679 - DNA, 33 bp, Homo sapien
agtggatctaagaaaaccagattatccaaagat

SEQ ID NO: 845680 - DNA, 33 bp, Homo sapien
agtggatctaagaaaagcagattatccaaagat

SEQ ID NO: 845681 - DNA, 33 bp, Homo sapien
ttcatactatttctgaacagtaaactatgaagt

SEQ ID NO: 845682 - DNA, 33 bp, Homo sapien
ttcatactatttctgagcagtaaactatgaagt

SEQ ID NO: 845683 - DNA, 33 bp, Homo sapien
cctattagcctataaaaagttttctagcagaga

SEQ ID NO: 845684 - DNA, 33 bp, Homo sapien
cctattagcctataaatagttttctagcagaga

SEQ ID NO: 845685 - DNA, 33 bp, Homo sapien
cctgctgctcaccatacctagtacctgggacat

SEQ ID NO: 845686 - DNA, 33 bp, Homo sapien
cctgctgctcaccatagctagtacctgggacat

SEQ ID NO: 845687 - DNA, 33 bp, Homo sapien
gagggaagatagtagtaaagaaggaaaggagag

SEQ ID NO: 845688 - DNA, 33 bp, Homo sapien
gagggaagatagtagtgaagaaggaaaggagag

SEQ ID NO: 845689 - DNA, 33 bp, Homo sapien
tcagttggttcatctacagaccagattttcttt

SEQ ID NO: 845690 - DNA, 33 bp, Homo sapien
tcagttggttcatctatagaccagattttcttt

SEQ ID NO: 845691 - DNA, 33 bp, Homo sapien
agaaaatcaattctcaagttgcaaatatgacaa

SEQ ID NO: 845692 - DNA, 33 bp, Homo sapien
agaaaatcaattctcaggttgcaaatatgacaa

SEQ ID NO: 845693 - DNA, 33 bp, Homo sapien
gtacaacaaactcccacgacgcaaatatatgta

SEQ ID NO: 845694 - DNA, 33 bp, Homo sapien
gtacaacaaactcccatgacgcaaatatatgta

SEQ ID NO: 845695 - DNA, 33 bp, Homo sapien
cccagatgctatgctacatgccagggaaagaaa

SEQ ID NO: 845696 - DNA, 33 bp, Homo sapien
cccagatgctatgctagatgccagggaaagaaa

SEQ ID NO: 845697 - DNA, 33 bp, Homo sapien
cagcatcttttatcccaaaatcctttgtttctc

SEQ ID NO: 845698 - DNA, 33 bp, Homo sapien
cagcatcttttatccccaaatcctttgtttctc

SEQ ID NO: 845699 - DNA, 33 bp, Homo sapien
tagacaaaagggcagaaaaacaatgaaagagaa

SEQ ID NO: 845700 - DNA, 33 bp, Homo sapien
tagacaaaagggcagacaaacaatgaaagagaa

SEQ ID NO: 845701 - DNA, 33 bp, Homo sapien
cttcataacagtcacaactgatggcttcaccac

SEQ ID NO: 845702 - DNA, 33 bp, Homo sapien
cttcataacagtcacagctgatggcttcaccac

SEQ ID NO: 845703 - DNA, 33 bp, Homo sapien
atttgataccagtttgaagatggtggcgtgaga

SEQ ID NO: 845704 - DNA, 33 bp, Homo sapien
atttgataccagtttgcagatggtggcgtgaga

SEQ ID NO: 845705 - DNA, 33 bp, Homo sapien
tagcaacatctcaataaatgccaaaacaatgta

SEQ ID NO: 845706 - DNA, 33 bp, Homo sapien
tagcaacatctcaatatatgccaaaacaatgta

SEQ ID NO: 845707 - DNA, 33 bp, Homo sapien
tatgcaaaataaagaagtcgatcagaaaataga

SEQ ID NO: 845708 - DNA, 33 bp, Homo sapien
tatgcaaaataaagaattcgatcagaaaataga

SEQ ID NO: 845709 - DNA, 33 bp, Homo sapien
tattaataggtgacagccatggtcatagaatga

SEQ ID NO: 845710 - DNA, 33 bp, Homo sapien
tattaataggtgacaggcatggtcatagaatga

SEQ ID NO: 845711 - DNA, 33 bp, Homo sapien
aacacattcctctaaccaataggcagtatgaca

SEQ ID NO: 845712 - DNA, 33 bp, Homo sapien
aacacattcctctaacgaataggcagtatgaca

SEQ ID NO: 845713 - DNA, 33 bp, Homo sapien
aaacacttagcaggaactctgatacaaattttt

SEQ ID NO: 845714 - DNA, 33 bp, Homo sapien
aaacacttagcaggaattctgatacaaattttt

SEQ ID NO: 845715 - DNA, 33 bp, Homo sapien
tatacctcaggcacaaaaattttattatcacat

SEQ ID NO: 845716 - DNA, 33 bp, Homo sapien
tatacctcaggcacaagaattttattatcacat

SEQ ID NO: 845717 - DNA, 33 bp, Homo sapien
ttgtgcctgaggtatacgctacctaattattaa

SEQ ID NO: 845718 - DNA, 33 bp, Homo sapien
ttgtgcctgaggtatatgctacctaattattaa

SEQ ID NO: 845719 - DNA, 33 bp, Homo sapien
tagcaacttagtgacaaaacaactatataaata

SEQ ID NO: 845720 - DNA, 33 bp, Homo sapien
tagcaacttagtgacagaacaactatataaata

SEQ ID NO: 845721 - DNA, 33 bp, Homo sapien
taattcaccatgatgaagtaggctttatttttg

SEQ ID NO: 845722 - DNA, 33 bp, Homo sapien
taattcaccatgatgaggtaggctttatttttg

SEQ ID NO: 845723 - DNA, 33 bp, Homo sapien
aaagcaaaaatcaaataatcattgtgacagatg

SEQ ID NO: 845724 - DNA, 33 bp, Homo sapien
aaagcaaaaatcaaatcatcattgtgacagatg

SEQ ID NO: 845725 - DNA, 33 bp, Homo sapien
ggcgaattcctgctgacggtgcttggtttacat

SEQ ID NO: 845726 - DNA, 33 bp, Homo sapien
ggcgaattcctgctgatggtgcttggtttacat

SEQ ID NO: 845727 - DNA, 33 bp, Homo sapien
tttttgctgtgataaaattaaatgtaagaaatg

SEQ ID NO: 845728 - DNA, 33 bp, Homo sapien
tttttgctgtgataaagttaaatgtaagaaatg

SEQ ID NO: 845729 - DNA, 33 bp, Homo sapien
agggtagagagatgaaagaagctctgggccagc

SEQ ID NO: 845730 - DNA, 33 bp, Homo sapien
agggtagagagatgaacgaagctctgggccagc

SEQ ID NO: 845731 - DNA, 33 bp, Homo sapien
agaagaaccaaagtcaaccatggccaagatact

SEQ ID NO: 845732 - DNA, 33 bp, Homo sapien
agaagaaccaaagtcagccatggccaagatact

SEQ ID NO: 845733 - DNA, 33 bp, Homo sapien
tcttcagctgtcttcaagttttttgtaagcacc

SEQ ID NO: 845734 - DNA, 33 bp, Homo sapien
tcttcagctgtcttcaggttttttgtaagcacc

SEQ ID NO: 845735 - DNA, 33 bp, Homo sapien
atatttattgcctcacaaaattataaaaccaaa

SEQ ID NO: 845736 - DNA, 33 bp, Homo sapien
atatttattgcctcaccaaattataaaaccaaa

SEQ ID NO: 845737 - DNA, 33 bp, Homo sapien
tacttgagaccctatagacctatcaacataaat

SEQ ID NO: 845738 - DNA, 33 bp, Homo sapien
tacttgagaccctatatacctatcaacataaat

SEQ ID NO: 845739 - DNA, 33 bp, Homo sapien
aaatcacatcataaaagaaatggtagcccaaat

SEQ ID NO: 845740 - DNA, 33 bp, Homo sapien
aaatcacatcataaaataaatggtagcccaaat

SEQ ID NO: 845741 - DNA, 33 bp, Homo sapien
ttaagttgcataaaaactcattagaaattaatg

SEQ ID NO: 845742 - DNA, 33 bp, Homo sapien
ttaagttgcataaaaagtcattagaaattaatg

SEQ ID NO: 845743 - DNA, 33 bp, Homo sapien
cagaaattattgcaccaattatttttgatagtt

SEQ ID NO: 845744 - DNA, 33 bp, Homo sapien
cagaaattattgcacctattatttttgatagtt

SEQ ID NO: 845745 - DNA, 33 bp, Homo sapien
tagaaaaacaatcaggaaaacagttgataatct

SEQ ID NO: 845746 - DNA, 33 bp, Homo sapien
tagaaaaacaatcagggaaacagttgataatct

SEQ ID NO: 845747 - DNA, 33 bp, Homo sapien
cttccctaaacaacatcaagtcgatgagaaact

SEQ ID NO: 845748 - DNA, 33 bp, Homo sapien
cttccctaaacaacatgaagtcgatgagaaact

SEQ ID NO: 845749 - DNA, 33 bp, Homo sapien
cactgaagagaaacgacgtgtagaacccttgaa

SEQ ID NO: 845750 - DNA, 33 bp, Homo sapien
cactgaagagaaacgatgtgtagaacccttgaa

SEQ ID NO: 845751 - DNA, 33 bp, Homo sapien
tattggtattagcaaaatagaggatgcaagtgc

SEQ ID NO: 845752 - DNA, 33 bp, Homo sapien
tattggtattagcaaagtagaggatgcaagtgc

SEQ ID NO: 845753 - DNA, 33 bp, Homo sapien
aaaactgagatggaaaaactatggattgtttga

SEQ ID NO: 845754 - DNA, 33 bp, Homo sapien
aaaactgagatggaaagactatggattgtttga

SEQ ID NO: 845755 - DNA, 33 bp, Homo sapien
tcgtaaaaagcctctgaaaaattgtaatctatg

SEQ ID NO: 845756 - DNA, 33 bp, Homo sapien
tcgtaaaaagcctctgcaaaattgtaatctatg

SEQ ID NO: 845757 - DNA, 33 bp, Homo sapien
aatatgtgaaaagccaagagacataaaataaca

SEQ ID NO: 845758 - DNA, 33 bp, Homo sapien
aatatgtgaaaagccaggagacataaaataaca

SEQ ID NO: 845759 - DNA, 33 bp, Homo sapien
gaattagtggaagatgcataaacattttaaatt

SEQ ID NO: 845760 - DNA, 33 bp, Homo sapien
gaattagtggaagatgtataaacattttaaatt

SEQ ID NO: 845761 - DNA, 33 bp, Homo sapien
agaatggccttgactccgaaccatcaaaaactc

SEQ ID NO: 845762 - DNA, 33 bp, Homo sapien
agaatggccttgactctgaaccatcaaaaactc

SEQ ID NO: 845763 - DNA, 33 bp, Homo sapien
taatctagccatttcagtaacagaagcaaagat

SEQ ID NO: 845764 - DNA, 33 bp, Homo sapien
taatctagccatttcattaacagaagcaaagat

SEQ ID NO: 845765 - DNA, 33 bp, Homo sapien
ccaaaattcagatttaaaatggtggtaagattc

SEQ ID NO: 845766 - DNA, 33 bp, Homo sapien
ccaaaattcagatttagaatggtggtaagattc

SEQ ID NO: 845767 - DNA, 33 bp, Homo sapien
gtatagatggtagtctaaaatataacctgttgg

SEQ ID NO: 845768 - DNA, 33 bp, Homo sapien
gtatagatggtagtctgaaatataacctgttgg

SEQ ID NO: 845769 - DNA, 33 bp, Homo sapien
tccttttctgttacaaactcttattacatagtc

SEQ ID NO: 845770 - DNA, 33 bp, Homo sapien
tccttttctgttacaatctcttattacatagtc

SEQ ID NO: 845771 - DNA, 33 bp, Homo sapien
tccattgctgcagtctcaaataggtggacataa

SEQ ID NO: 845772 - DNA, 33 bp, Homo sapien
tccattgctgcagtcttaaataggtggacataa

SEQ ID NO: 845773 - DNA, 33 bp, Homo sapien
aaatgccaactcacataaaggttgggaaggcaa

SEQ ID NO: 845774 - DNA, 33 bp, Homo sapien
aaatgccaactcacatcaaggttgggaaggcaa

SEQ ID NO: 845775 - DNA, 33 bp, Homo sapien
gaaatcataaatgaacaaatctcattatgtcaa

SEQ ID NO: 845776 - DNA, 33 bp, Homo sapien
gaaatcataaatgaacgaatctcattatgtcaa

SEQ ID NO: 845777 - DNA, 33 bp, Homo sapien
gagaaaaatatctatacccttgcatggcagagg

SEQ ID NO: 845778 - DNA, 33 bp, Homo sapien
gagaaaaatatctatagccttgcatggcagagg

SEQ ID NO: 845779 - DNA, 33 bp, Homo sapien
ctccggaaaatcattcaacttgtcagtgaagct

SEQ ID NO: 845780 - DNA, 33 bp, Homo sapien
ctccggaaaatcattccacttgtcagtgaagct

SEQ ID NO: 845781 - DNA, 33 bp, Homo sapien
attctttgacaaataactatagcagtaccattg

SEQ ID NO: 845782 - DNA, 33 bp, Homo sapien
attctttgacaaataattatagcagtaccattg

SEQ ID NO: 845783 - DNA, 33 bp, Homo sapien
aggagaagtttatcccagaatataacaatgtgt

SEQ ID NO: 845784 - DNA, 33 bp, Homo sapien
aggagaagtttatcccggaatataacaatgtgt

SEQ ID NO: 845785 - DNA, 33 bp, Homo sapien
tgttattcaaaattgacgagaactgaaactaaa

SEQ ID NO: 845786 - DNA, 33 bp, Homo sapien
tgttattcaaaattgatgagaactgaaactaaa

SEQ ID NO: 845787 - DNA, 33 bp, Homo sapien
aaaacaccaagcattcaaagtacaaattagtgc

SEQ ID NO: 845788 - DNA, 33 bp, Homo sapien
aaaacaccaagcattccaagtacaaattagtgc

SEQ ID NO: 845789 - DNA, 33 bp, Homo sapien
ttgtagtaagaaatgcaaattaagtgcccattc

SEQ ID NO: 845790 - DNA, 33 bp, Homo sapien
ttgtagtaagaaatgcgaattaagtgcccattc

SEQ ID NO: 845791 - DNA, 33 bp, Homo sapien
tgtgttcttccataataaccatgtttcactagc

SEQ ID NO: 845792 - DNA, 33 bp, Homo sapien
tgtgttcttccataatgaccatgtttcactagc

SEQ ID NO: 845793 - DNA, 33 bp, Homo sapien
actgtggctccaccaaaagtcaagtccttctga

SEQ ID NO: 845794 - DNA, 33 bp, Homo sapien
actgtggctccaccaagagtcaagtccttctga

SEQ ID NO: 845795 - DNA, 33 bp, Homo sapien
tttgttgtcattgtacaaaattagtcatagata

SEQ ID NO: 845796 - DNA, 33 bp, Homo sapien
tttgttgtcattgtacgaaattagtcatagata

SEQ ID NO: 845797 - DNA, 33 bp, Homo sapien
tatagagaatacagtaaagtgattgtgatagtt

SEQ ID NO: 845798 - DNA, 33 bp, Homo sapien
tatagagaatacagtagagtgattgtgatagtt

SEQ ID NO: 845799 - DNA, 33 bp, Homo sapien
gtccttggcagcaataaggatacagattgaggc

SEQ ID NO: 845800 - DNA, 33 bp, Homo sapien
gtccttggcagcaatagggatacagattgaggc

SEQ ID NO: 845801 - DNA, 33 bp, Homo sapien
gaaaactcgttctctacgtttcaggccaaaata

SEQ ID NO: 845802 - DNA, 33 bp, Homo sapien
gaaaactcgttctctatgtttcaggccaaaata

SEQ ID NO: 845803 - DNA, 33 bp, Homo sapien
ggaaagctacttactccaagaactgattgtcac

SEQ ID NO: 845804 - DNA, 33 bp, Homo sapien
ggaaagctacttactcgaagaactgattgtcac

SEQ ID NO: 845805 - DNA, 33 bp, Homo sapien
gtgtgctaattcttaacgttgccaaaccagtgg

SEQ ID NO: 845806 - DNA, 33 bp, Homo sapien
gtgtgctaattcttaatgttgccaaaccagtgg

SEQ ID NO: 845807 - DNA, 33 bp, Homo sapien
caaggcccttttaaaacaaaatgtgctgggatt

SEQ ID NO: 845808 - DNA, 33 bp, Homo sapien
caaggcccttttaaaagaaaatgtgctgggatt

SEQ ID NO: 845809 - DNA, 33 bp, Homo sapien
taggtaataaagctaaaacaatcttgtactctg

SEQ ID NO: 845810 - DNA, 33 bp, Homo sapien
taggtaataaagctaagacaatcttgtactctg

SEQ ID NO: 845811 - DNA, 33 bp, Homo sapien
actgactcacctccacagaaccagtttgaatga

SEQ ID NO: 845812 - DNA, 33 bp, Homo sapien
actgactcacctccacggaaccagtttgaatga

SEQ ID NO: 845813 - DNA, 33 bp, Homo sapien
tacttgccagttctcaaaaatcagttgagtatt

SEQ ID NO: 845814 - DNA, 33 bp, Homo sapien
tacttgccagttctcagaaatcagttgagtatt

SEQ ID NO: 845815 - DNA, 33 bp, Homo sapien
gatattagcttatggaatacttagcaatgttgg

SEQ ID NO: 845816 - DNA, 33 bp, Homo sapien
gatattagcttatggagtacttagcaatgttgg

SEQ ID NO: 845817 - DNA, 33 bp, Homo sapien
ggcctttgttttttaacgattggtcaattcaat

SEQ ID NO: 845818 - DNA, 33 bp, Homo sapien
ggcctttgttttttaatgattggtcaattcaat

SEQ ID NO: 845819 - DNA, 33 bp, Homo sapien
tatttagacaatagcaacaattattccttgaag

SEQ ID NO: 845820 - DNA, 33 bp, Homo sapien
tatttagacaatagcagcaattattccttgaag

SEQ ID NO: 845821 - DNA, 33 bp, Homo sapien
gctgaaagaaatctggaatcaccaactcttaag

SEQ ID NO: 845822 - DNA, 33 bp, Homo sapien
gctgaaagaaatctgggatcaccaactcttaag

SEQ ID NO: 845823 - DNA, 33 bp, Homo sapien
gcaattccatctacataaacatagaggtatcta

SEQ ID NO: 845824 - DNA, 33 bp, Homo sapien
gcaattccatctacatgaacatagaggtatcta

SEQ ID NO: 845825 - DNA, 33 bp, Homo sapien
gtcaactaaccctacaaccttgactgattgatg

SEQ ID NO: 845826 - DNA, 33 bp, Homo sapien
gtcaactaaccctacagccttgactgattgatg

SEQ ID NO: 845827 - DNA, 33 bp, Homo sapien
attcctgtcttggaaaagttctcaagacctacc

SEQ ID NO: 845828 - DNA, 33 bp, Homo sapien
attcctgtcttggaaaggttctcaagacctacc

SEQ ID NO: 845829 - DNA, 33 bp, Homo sapien
taatattatacttatccagactattcatgataa

SEQ ID NO: 845830 - DNA, 33 bp, Homo sapien
taatattatacttatcgagactattcatgataa

SEQ ID NO: 845831 - DNA, 33 bp, Homo sapien
agttttaacgcttgaaaacttttgccaaacttt

SEQ ID NO: 845832 - DNA, 33 bp, Homo sapien
agttttaacgcttgaagacttttgccaaacttt

SEQ ID NO: 845833 - DNA, 33 bp, Homo sapien
attttaaaaagtgaggccagaaacgtagataat

SEQ ID NO: 845834 - DNA, 33 bp, Homo sapien
attttaaaaagtgaggtcagaaacgtagataat

SEQ ID NO: 845835 - DNA, 33 bp, Homo sapien
agaaggaagcagtagccgcaaggctgagagagc

SEQ ID NO: 845836 - DNA, 33 bp, Homo sapien
agaaggaagcagtagctgcaaggctgagagagc

SEQ ID NO: 845837 - DNA, 33 bp, Homo sapien
tcttgggtgagttagaagtgcattgtgtaattt

SEQ ID NO: 845838 - DNA, 33 bp, Homo sapien
tcttgggtgagttagacgtgcattgtgtaattt

SEQ ID NO: 845839 - DNA, 33 bp, Homo sapien
tttttatatgcaacagaaacagtttggaaaata

SEQ ID NO: 845840 - DNA, 33 bp, Homo sapien
tttttatatgcaacaggaacagtttggaaaata

SEQ ID NO: 845841 - DNA, 33 bp, Homo sapien
gcacttcctagtatcaatcctcctcacagtctc

SEQ ID NO: 845842 - DNA, 33 bp, Homo sapien
gcacttcctagtatcattcctcctcacagtctc

SEQ ID NO: 845843 - DNA, 33 bp, Homo sapien
taagttattcaggtaacgggtacagtaaaagcc

SEQ ID NO: 845844 - DNA, 33 bp, Homo sapien
taagttattcaggtaatgggtacagtaaaagcc

SEQ ID NO: 845845 - DNA, 33 bp, Homo sapien
cctcgtcctttaacataaccaggatcctcacaa

SEQ ID NO: 845846 - DNA, 33 bp, Homo sapien
cctcgtcctttaacatcaccaggatcctcacaa

SEQ ID NO: 845847 - DNA, 33 bp, Homo sapien
agagagccaaattctcaaaggcaatggagtgta

SEQ ID NO: 845848 - DNA, 33 bp, Homo sapien
agagagccaaattctccaaggcaatggagtgta

SEQ ID NO: 845849 - DNA, 33 bp, Homo sapien
ttacctataacactggcattttaggacataaag

SEQ ID NO: 845850 - DNA, 33 bp, Homo sapien
ttacctataacactgggattttaggacataaag

SEQ ID NO: 845851 - DNA, 33 bp, Homo sapien
aatatgatttccaaaactgcagcagggaaaata

SEQ ID NO: 845852 - DNA, 33 bp, Homo sapien
aatatgatttccaaaattgcagcagggaaaata

SEQ ID NO: 845853 - DNA, 33 bp, Homo sapien
gcagcttgcatcaggcaccctagggagtatagg

SEQ ID NO: 845854 - DNA, 33 bp, Homo sapien
gcagcttgcatcaggcgccctagggagtatagg

SEQ ID NO: 845855 - DNA, 33 bp, Homo sapien
tgttacataggtctcagagagtcactgagaaat

SEQ ID NO: 845856 - DNA, 33 bp, Homo sapien
tgttacataggtctcatagagtcactgagaaat

SEQ ID NO: 845857 - DNA, 33 bp, Homo sapien
atttcttattccactgaattcctggaaggggac

SEQ ID NO: 845858 - DNA, 33 bp, Homo sapien
atttcttattccactggattcctggaaggggac

SEQ ID NO: 845859 - DNA, 33 bp, Homo sapien
aatttgaagaagtaaactgtagagatctttgag

SEQ ID NO: 845860 - DNA, 33 bp, Homo sapien
aatttgaagaagtaaattgtagagatctttgag

SEQ ID NO: 845861 - DNA, 33 bp, Homo sapien
cacaagcatatagcaactcattctgcaggacca

SEQ ID NO: 845862 - DNA, 33 bp, Homo sapien
cacaagcatatagcaattcattctgcaggacca

SEQ ID NO: 845863 - DNA, 33 bp, Homo sapien
ctctttagaagaagccactcataagactgagga

SEQ ID NO: 845864 - DNA, 33 bp, Homo sapien
ctctttagaagaagccgctcataagactgagga

SEQ ID NO: 845865 - DNA, 33 bp, Homo sapien
gcgaccaggtaaaaacactatgacaggaacaga

SEQ ID NO: 845866 - DNA, 33 bp, Homo sapien
gcgaccaggtaaaaaccctatgacaggaacaga

SEQ ID NO: 845867 - DNA, 33 bp, Homo sapien
caatggataagacctacgtcctcacaagctttt

SEQ ID NO: 845868 - DNA, 33 bp, Homo sapien
caatggataagacctatgtcctcacaagctttt

SEQ ID NO: 845869 - DNA, 33 bp, Homo sapien
catgagagtgatgtaacaggaaattggggctta

SEQ ID NO: 845870 - DNA, 33 bp, Homo sapien
catgagagtgatgtaataggaaattggggctta

SEQ ID NO: 845871 - DNA, 33 bp, Homo sapien
ctgctgaaaaccttacaactgtttaaagacatt

SEQ ID NO: 845872 - DNA, 33 bp, Homo sapien
ctgctgaaaaccttacgactgtttaaagacatt

SEQ ID NO: 845873 - DNA, 33 bp, Homo sapien
atatctctcagatgccagaagaacttggacagg

SEQ ID NO: 845874 - DNA, 33 bp, Homo sapien
atatctctcagatgccggaagaacttggacagg

SEQ ID NO: 845875 - DNA, 33 bp, Homo sapien
agttatacctattgaacgtacaacacaacaaat

SEQ ID NO: 845876 - DNA, 33 bp, Homo sapien
agttatacctattgaatgtacaacacaacaaat

SEQ ID NO: 845877 - DNA, 33 bp, Homo sapien
attacttaagatcctcaacattagggcattcct

SEQ ID NO: 845878 - DNA, 33 bp, Homo sapien
attacttaagatcctcgacattagggcattcct

SEQ ID NO: 845879 - DNA, 33 bp, Homo sapien
ggtgtgtaaggtattacattcaaaatcagttcc

SEQ ID NO: 845880 - DNA, 33 bp, Homo sapien
ggtgtgtaaggtattatattcaaaatcagttcc

SEQ ID NO: 845881 - DNA, 33 bp, Homo sapien
ttcaactggcacactgcagcaaggggacactga

SEQ ID NO: 845882 - DNA, 33 bp, Homo sapien
ttcaactggcacactggagcaaggggacactga

SEQ ID NO: 845883 - DNA, 33 bp, Homo sapien
ttccacatcaagaataactttcactatccagaa

SEQ ID NO: 845884 - DNA, 33 bp, Homo sapien
ttccacatcaagaatagctttcactatccagaa

SEQ ID NO: 845885 - DNA, 33 bp, Homo sapien
ttgtctcttgttgttacaaaattccacgattct

SEQ ID NO: 845886 - DNA, 33 bp, Homo sapien
ttgtctcttgttgttagaaaattccacgattct

SEQ ID NO: 845887 - DNA, 33 bp, Homo sapien
tgaatgaaataaaaaaatttagaaccacaagct

SEQ ID NO: 845888 - DNA, 33 bp, Homo sapien
tgaatgaaataaaaaactttagaaccacaagct

SEQ ID NO: 845889 - DNA, 33 bp, Homo sapien
gaagaggcattaaataaccataaagaaataact

SEQ ID NO: 845890 - DNA, 33 bp, Homo sapien
gaagaggcattaaatagccataaagaaataact

SEQ ID NO: 845891 - DNA, 33 bp, Homo sapien
caaaagctttcatctccgaactggcacctcagt

SEQ ID NO: 845892 - DNA, 33 bp, Homo sapien
caaaagctttcatctctgaactggcacctcagt

SEQ ID NO: 845893 - DNA, 33 bp, Homo sapien
atatagagtgcataccacattctataatttagt

SEQ ID NO: 845894 - DNA, 33 bp, Homo sapien
atatagagtgcataccgcattctataatttagt

SEQ ID NO: 845895 - DNA, 33 bp, Homo sapien
tgcaatgagtgaaggcaactcagtatgggtcaa

SEQ ID NO: 845896 - DNA, 33 bp, Homo sapien
tgcaatgagtgaaggcgactcagtatgggtcaa

SEQ ID NO: 845897 - DNA, 33 bp, Homo sapien
aaaaaacttgtggcaagattttaataccaagat

SEQ ID NO: 845898 - DNA, 33 bp, Homo sapien
aaaaaacttgtggcaatattttaataccaagat

SEQ ID NO: 845899 - DNA, 33 bp, Homo sapien
ctgcactcattgtctcgagccttggcacatagt

SEQ ID NO: 845900 - DNA, 33 bp, Homo sapien
ctgcactcattgtctctagccttggcacatagt

SEQ ID NO: 845901 - DNA, 33 bp, Homo sapien
gttgtgaatcagtaagacctaaattaagatgat

SEQ ID NO: 845902 - DNA, 33 bp, Homo sapien
gttgtgaatcagtaaggcctaaattaagatgat

SEQ ID NO: 845903 - DNA, 33 bp, Homo sapien
attttaaacaccatgacaatcttatagcaataa

SEQ ID NO: 845904 - DNA, 33 bp, Homo sapien
attttaaacaccatgataatcttatagcaataa

SEQ ID NO: 845905 - DNA, 33 bp, Homo sapien
ttgaaatggctagtctaactaaataactgaatt

SEQ ID NO: 845906 - DNA, 33 bp, Homo sapien
ttgaaatggctagtctgactaaataactgaatt

SEQ ID NO: 845907 - DNA, 33 bp, Homo sapien
tacccatcataacagaaagttgtattagacagc

SEQ ID NO: 845908 - DNA, 33 bp, Homo sapien
tacccatcataacagacagttgtattagacagc

SEQ ID NO: 845909 - DNA, 33 bp, Homo sapien
attagacagcattgatcaagaccattgctcttc

SEQ ID NO: 845910 - DNA, 33 bp, Homo sapien
attagacagcattgattaagaccattgctcttc

SEQ ID NO: 845911 - DNA, 33 bp, Homo sapien
tcttcatcacagacaaaaccctttgattcttgt

SEQ ID NO: 845912 - DNA, 33 bp, Homo sapien
tcttcatcacagacaagaccctttgattcttgt

SEQ ID NO: 845913 - DNA, 33 bp, Homo sapien
aaaatgattttgattacgacagctttcaataga

SEQ ID NO: 845914 - DNA, 33 bp, Homo sapien
aaaatgattttgattatgacagctttcaataga

SEQ ID NO: 845915 - DNA, 33 bp, Homo sapien
tgccataggaagaattaaacattagatggactc

SEQ ID NO: 845916 - DNA, 33 bp, Homo sapien
tgccataggaagaatttaacattagatggactc

SEQ ID NO: 845917 - DNA, 33 bp, Homo sapien
atactgaaataagatcactcataagtccattga

SEQ ID NO: 845918 - DNA, 33 bp, Homo sapien
atactgaaataagatcgctcataagtccattga

SEQ ID NO: 845919 - DNA, 33 bp, Homo sapien
aaggctgttgtaaccacgtaccagaaactgggt

SEQ ID NO: 845920 - DNA, 33 bp, Homo sapien
aaggctgttgtaaccatgtaccagaaactgggt

SEQ ID NO: 845921 - DNA, 33 bp, Homo sapien
aaactggagaactaaacgaaataggccaggcac

SEQ ID NO: 845922 - DNA, 33 bp, Homo sapien
aaactggagaactaaatgaaataggccaggcac

SEQ ID NO: 845923 - DNA, 33 bp, Homo sapien
acatatttatgcttaagcgattttttacacagg

SEQ ID NO: 845924 - DNA, 33 bp, Homo sapien
acatatttatgcttaatcgattttttacacagg

SEQ ID NO: 845925 - DNA, 33 bp, Homo sapien
ctctttaatttttgaaagataattttgctagac

SEQ ID NO: 845926 - DNA, 33 bp, Homo sapien
ctctttaatttttgaacgataattttgctagac

SEQ ID NO: 845927 - DNA, 33 bp, Homo sapien
ctcttgtaggtactgcaataaaataatgaacaa

SEQ ID NO: 845928 - DNA, 33 bp, Homo sapien
ctcttgtaggtactgcgataaaataatgaacaa

SEQ ID NO: 845929 - DNA, 33 bp, Homo sapien
ttcctgtgttcaaggacatttaattcaagtagt

SEQ ID NO: 845930 - DNA, 33 bp, Homo sapien
ttcctgtgttcaaggagatttaattcaagtagt

SEQ ID NO: 845931 - DNA, 33 bp, Homo sapien
taaccaatcacttttaaatttgtaacagtgaag

SEQ ID NO: 845932 - DNA, 33 bp, Homo sapien
taaccaatcacttttatatttgtaacagtgaag

SEQ ID NO: 845933 - DNA, 33 bp, Homo sapien
attatatctcagcaaactcatctttaaatcatg

SEQ ID NO: 845934 - DNA, 33 bp, Homo sapien
attatatctcagcaaattcatctttaaatcatg

SEQ ID NO: 845935 - DNA, 33 bp, Homo sapien
aatatttcagcaacatgaaacaatactaagatg

SEQ ID NO: 845936 - DNA, 33 bp, Homo sapien
aatatttcagcaacattaaacaatactaagatg

SEQ ID NO: 845937 - DNA, 33 bp, Homo sapien
ttgtgtagagtctcccaaaattgttgttgaaca

SEQ ID NO: 845938 - DNA, 33 bp, Homo sapien
ttgtgtagagtctcccgaaattgttgttgaaca

SEQ ID NO: 845939 - DNA, 33 bp, Homo sapien
cagctagcaacatatgccaatgggttgaggaaa

SEQ ID NO: 845940 - DNA, 33 bp, Homo sapien
cagctagcaacatatgtcaatgggttgaggaaa

SEQ ID NO: 845941 - DNA, 33 bp, Homo sapien
atgaagtaggtcacaaaggttatagcgttggtg

SEQ ID NO: 845942 - DNA, 33 bp, Homo sapien
atgaagtaggtcacaagggttatagcgttggtg

SEQ ID NO: 845943 - DNA, 33 bp, Homo sapien
atcttatttcagccaaggtggtaagttttatgg

SEQ ID NO: 845944 - DNA, 33 bp, Homo sapien
atcttatttcagccaatgtggtaagttttatgg

SEQ ID NO: 845945 - DNA, 33 bp, Homo sapien
cataaatacttgtgcaataccctcaggacctgt

SEQ ID NO: 845946 - DNA, 33 bp, Homo sapien
cataaatacttgtgcagtaccctcaggacctgt

SEQ ID NO: 845947 - DNA, 33 bp, Homo sapien
ttatcctttctttccacgagtttgaagttctgg

SEQ ID NO: 845948 - DNA, 33 bp, Homo sapien
ttatcctttctttccatgagtttgaagttctgg

SEQ ID NO: 845949 - DNA, 33 bp, Homo sapien
gagagatcatctagacaaggtgagaacatctta

SEQ ID NO: 845950 - DNA, 33 bp, Homo sapien
gagagatcatctagaccaggtgagaacatctta

SEQ ID NO: 845951 - DNA, 33 bp, Homo sapien
tcaatctctttcttcactctacgtacattttag

SEQ ID NO: 845952 - DNA, 33 bp, Homo sapien
tcaatctctttcttcattctacgtacattttag

SEQ ID NO: 845953 - DNA, 33 bp, Homo sapien
agatattactcctggccattttgatatctctgt

SEQ ID NO: 845954 - DNA, 33 bp, Homo sapien
agatattactcctggctattttgatatctctgt

SEQ ID NO: 845955 - DNA, 33 bp, Homo sapien
atttaaactgttgtaaactaaatgcacatacat

SEQ ID NO: 845956 - DNA, 33 bp, Homo sapien
atttaaactgttgtaacctaaatgcacatacat

SEQ ID NO: 845957 - DNA, 33 bp, Homo sapien
actagtatatgtgtcaagaataaagcacaatgt

SEQ ID NO: 845958 - DNA, 33 bp, Homo sapien
actagtatatgtgtcaggaataaagcacaatgt

SEQ ID NO: 845959 - DNA, 33 bp, Homo sapien
ttatctttatctctgaccaacactcaatacttt

SEQ ID NO: 845960 - DNA, 33 bp, Homo sapien
ttatctttatctctgatcaacactcaatacttt

SEQ ID NO: 845961 - DNA, 33 bp, Homo sapien
ttccttcatctgtaaaaacaacagtgtaacatg

SEQ ID NO: 845962 - DNA, 33 bp, Homo sapien
ttccttcatctgtaaagacaacagtgtaacatg

SEQ ID NO: 845963 - DNA, 33 bp, Homo sapien
gtgaggattgaagcaaccatgttacactgttgt

SEQ ID NO: 845964 - DNA, 33 bp, Homo sapien
gtgaggattgaagcaagcatgttacactgttgt

SEQ ID NO: 845965 - DNA, 33 bp, Homo sapien
tagaagaaaaaggctaagtgaggattgaagcaa

SEQ ID NO: 845966 - DNA, 33 bp, Homo sapien
tagaagaaaaaggctatgtgaggattgaagcaa

SEQ ID NO: 845967 - DNA, 33 bp, Homo sapien
ttgcaaatgcagtatcacacacatttgtgagga

SEQ ID NO: 845968 - DNA, 33 bp, Homo sapien
ttgcaaatgcagtatcgcacacatttgtgagga

SEQ ID NO: 845969 - DNA, 33 bp, Homo sapien
tcagaggtacagcataggtaggacagaaaggga

SEQ ID NO: 845970 - DNA, 33 bp, Homo sapien
tcagaggtacagcatatgtaggacagaaaggga

SEQ ID NO: 845971 - DNA, 33 bp, Homo sapien
ctggacattgagaggcacacatcagcagaggaa

SEQ ID NO: 845972 - DNA, 33 bp, Homo sapien
ctggacattgagaggcgcacatcagcagaggaa

SEQ ID NO: 845973 - DNA, 33 bp, Homo sapien
cgctggagctccagaacaacatggagttttgcc

SEQ ID NO: 845974 - DNA, 33 bp, Homo sapien
cgctggagctccagaagaacatggagttttgcc

SEQ ID NO: 845975 - DNA, 33 bp, Homo sapien
tagggttgatccactggcaataaatttgatcag

SEQ ID NO: 845976 - DNA, 33 bp, Homo sapien
tagggttgatccactgtcaataaatttgatcag

SEQ ID NO: 845977 - DNA, 33 bp, Homo sapien
tgaaataaactctcataagacagttacttgaat

SEQ ID NO: 845978 - DNA, 33 bp, Homo sapien
tgaaataaactctcattagacagttacttgaat

SEQ ID NO: 845979 - DNA, 33 bp, Homo sapien
atagccagagcaatggaaaacatgcctcgaagg

SEQ ID NO: 845980 - DNA, 33 bp, Homo sapien
atagccagagcaatgggaaacatgcctcgaagg

SEQ ID NO: 845981 - DNA, 33 bp, Homo sapien
tagattagatgggtttaaaaaatgcatacagtt

SEQ ID NO: 845982 - DNA, 33 bp, Homo sapien
tagattagatgggttttaaaaatgcatacagtt

SEQ ID NO: 845983 - DNA, 33 bp, Homo sapien
attatgaattcaatgcaaacaacccttctctgt

SEQ ID NO: 845984 - DNA, 33 bp, Homo sapien
attatgaattcaatgcgaacaacccttctctgt

SEQ ID NO: 845985 - DNA, 33 bp, Homo sapien
caagctacaatggggagctacagatgctgtaat

SEQ ID NO: 845986 - DNA, 33 bp, Homo sapien
caagctacaatggggatctacagatgctgtaat

SEQ ID NO: 845987 - DNA, 33 bp, Homo sapien
atcaagcaataatttaggacaaagccttatctt

SEQ ID NO: 845988 - DNA, 33 bp, Homo sapien
atcaagcaataatttatgacaaagccttatctt

SEQ ID NO: 845989 - DNA, 33 bp, Homo sapien
tatttgaagtgaggcaaacaatcttacattttt

SEQ ID NO: 845990 - DNA, 33 bp, Homo sapien
tatttgaagtgaggcatacaatcttacattttt

SEQ ID NO: 845991 - DNA, 33 bp, Homo sapien
aactgaagttgaagaaataccatcaaagttgaa

SEQ ID NO: 845992 - DNA, 33 bp, Homo sapien
aactgaagttgaagaattaccatcaaagttgaa

SEQ ID NO: 845993 - DNA, 33 bp, Homo sapien
atttgaaaggtcaccaatgaaaccaaaagatac

SEQ ID NO: 845994 - DNA, 33 bp, Homo sapien
atttgaaaggtcaccagtgaaaccaaaagatac

SEQ ID NO: 845995 - DNA, 33 bp, Homo sapien
tagaagctgactttaaaaaaatgaaggactaat

SEQ ID NO: 845996 - DNA, 33 bp, Homo sapien
tagaagctgactttaagaaaatgaaggactaat

SEQ ID NO: 845997 - DNA, 33 bp, Homo sapien
ttgaactaattaaaccaagatgtttgaacaaaa

SEQ ID NO: 845998 - DNA, 33 bp, Homo sapien
ttgaactaattaaaccgagatgtttgaacaaaa

SEQ ID NO: 845999 - DNA, 33 bp, Homo sapien
tgaaatctaagatgccacagattgctcaattca

SEQ ID NO: 846000 - DNA, 33 bp, Homo sapien
tgaaatctaagatgccgcagattgctcaattca

SEQ ID NO: 846001 - DNA, 33 bp, Homo sapien
ttcttcacatcatatccaaaaccagagagccaa

SEQ ID NO: 846002 - DNA, 33 bp, Homo sapien
ttcttcacatcatatctaaaaccagagagccaa

SEQ ID NO: 846003 - DNA, 33 bp, Homo sapien
tgatcggcatttaaaactattctagccttttct

SEQ ID NO: 846004 - DNA, 33 bp, Homo sapien
tgatcggcatttaaaattattctagccttttct

SEQ ID NO: 846005 - DNA, 33 bp, Homo sapien
gtagctgagaggagtgaacttaagagacatcaa

SEQ ID NO: 846006 - DNA, 33 bp, Homo sapien
gtagctgagaggagtgcacttaagagacatcaa

SEQ ID NO: 846007 - DNA, 33 bp, Homo sapien
attaaatggtcaatagcagggaaaactgttctg

SEQ ID NO: 846008 - DNA, 33 bp, Homo sapien
attaaatggtcaatagtagggaaaactgttctg

SEQ ID NO: 846009 - DNA, 33 bp, Homo sapien
caaattttctgatatcaaataggctgaaagtta

SEQ ID NO: 846010 - DNA, 33 bp, Homo sapien
caaattttctgatatcgaataggctgaaagtta

SEQ ID NO: 846011 - DNA, 33 bp, Homo sapien
acaaaatggactaagacaaatagtaagctccga

SEQ ID NO: 846012 - DNA, 33 bp, Homo sapien
acaaaatggactaagagaaatagtaagctccga

SEQ ID NO: 846013 - DNA, 33 bp, Homo sapien
ttctgaactaaaagacagatacaatactattta

SEQ ID NO: 846014 - DNA, 33 bp, Homo sapien
ttctgaactaaaagactgatacaatactattta

SEQ ID NO: 846015 - DNA, 33 bp, Homo sapien
tcatacatattgacaaagacatggcaaaataat

SEQ ID NO: 846016 - DNA, 33 bp, Homo sapien
tcatacatattgacaatgacatggcaaaataat

SEQ ID NO: 846017 - DNA, 33 bp, Homo sapien
tgattatactaggatcaatgcatcaggaaaaca

SEQ ID NO: 846018 - DNA, 33 bp, Homo sapien
tgattatactaggatcgatgcatcaggaaaaca

SEQ ID NO: 846019 - DNA, 33 bp, Homo sapien
aaagcatgctatgatgcaaagcaagttaatatg

SEQ ID NO: 846020 - DNA, 33 bp, Homo sapien
aaagcatgctatgatggaaagcaagttaatatg

SEQ ID NO: 846021 - DNA, 33 bp, Homo sapien
agacaacaaaaaagaaggggcaactgaaagaat

SEQ ID NO: 846022 - DNA, 33 bp, Homo sapien
agacaacaaaaaagaatgggcaactgaaagaat

SEQ ID NO: 846023 - DNA, 33 bp, Homo sapien
cctatagctctgtctcggaacctgtgattgctg

SEQ ID NO: 846024 - DNA, 33 bp, Homo sapien
cctatagctctgtctctgaacctgtgattgctg

SEQ ID NO: 846025 - DNA, 33 bp, Homo sapien
gtcagaatagctattgaaaagtccaaagataac

SEQ ID NO: 846026 - DNA, 33 bp, Homo sapien
gtcagaatagctattggaaagtccaaagataac

SEQ ID NO: 846027 - DNA, 33 bp, Homo sapien
atgtcaccattgtagaacacagaaaaaagacac

SEQ ID NO: 846028 - DNA, 33 bp, Homo sapien
atgtcaccattgtagatcacagaaaaaagacac

SEQ ID NO: 846029 - DNA, 33 bp, Homo sapien
cagttaagcctttgagaactgttgagaatgcat

SEQ ID NO: 846030 - DNA, 33 bp, Homo sapien
cagttaagcctttgaggactgttgagaatgcat

SEQ ID NO: 846031 - DNA, 33 bp, Homo sapien
gcaattctgaaatccaatagaacagacattaaa

SEQ ID NO: 846032 - DNA, 33 bp, Homo sapien
gcaattctgaaatccagtagaacagacattaaa

SEQ ID NO: 846033 - DNA, 33 bp, Homo sapien
tctacaaatcaatatacggcagatgaagaacaa

SEQ ID NO: 846034 - DNA, 33 bp, Homo sapien
tctacaaatcaatatatggcagatgaagaacaa

SEQ ID NO: 846035 - DNA, 33 bp, Homo sapien
ctaaatatctgaaccaataatataagttaaata

SEQ ID NO: 846036 - DNA, 33 bp, Homo sapien
ctaaatatctgaaccagtaatataagttaaata

SEQ ID NO: 846037 - DNA, 33 bp, Homo sapien
atggagagaaatgaaaaagttcctgcctagaag

SEQ ID NO: 846038 - DNA, 33 bp, Homo sapien
atggagagaaatgaaacagttcctgcctagaag

SEQ ID NO: 846039 - DNA, 33 bp, Homo sapien
ggagtcatttccatgaagagtaattagtgagtt

SEQ ID NO: 846040 - DNA, 33 bp, Homo sapien
ggagtcatttccatgaggagtaattagtgagtt

SEQ ID NO: 846041 - DNA, 33 bp, Homo sapien
catcatttctagtatacgctgctgtcattgtaa

SEQ ID NO: 846042 - DNA, 33 bp, Homo sapien
catcatttctagtatatgctgctgtcattgtaa

SEQ ID NO: 846043 - DNA, 33 bp, Homo sapien
tgagcttgagtacatgaaaagtataatgtattc

SEQ ID NO: 846044 - DNA, 33 bp, Homo sapien
tgagcttgagtacatggaaagtataatgtattc

SEQ ID NO: 846045 - DNA, 33 bp, Homo sapien
agtaaataagtgaatcaaacaatcccaaagggg

SEQ ID NO: 846046 - DNA, 33 bp, Homo sapien
agtaaataagtgaatcgaacaatcccaaagggg

SEQ ID NO: 846047 - DNA, 33 bp, Homo sapien
aatggaaaacgttcgcaattattactcccttgt

SEQ ID NO: 846048 - DNA, 33 bp, Homo sapien
aatggaaaacgttcgcgattattactcccttgt

SEQ ID NO: 846049 - DNA, 33 bp, Homo sapien
aggatggacataaaacagattggtgtgattaga

SEQ ID NO: 846050 - DNA, 33 bp, Homo sapien
aggatggacataaaacggattggtgtgattaga

SEQ ID NO: 846051 - DNA, 33 bp, Homo sapien
gtgatgcaggtgtaaaaaaaaatccctgctgca

SEQ ID NO: 846052 - DNA, 33 bp, Homo sapien
gtgatgcaggtgtaaataaaaatccctgctgca

SEQ ID NO: 846053 - DNA, 33 bp, Homo sapien
caatcgaaatacataaatcagattatgttgctc

SEQ ID NO: 846054 - DNA, 33 bp, Homo sapien
caatcgaaatacataagtcagattatgttgctc

SEQ ID NO: 846055 - DNA, 33 bp, Homo sapien
tgtgcatctggtaaaaatcagctctgaatctgt

SEQ ID NO: 846056 - DNA, 33 bp, Homo sapien
tgtgcatctggtaaaagtcagctctgaatctgt

SEQ ID NO: 846057 - DNA, 33 bp, Homo sapien
agtagaaaagtgtagacaacctaaaagtaaagc

SEQ ID NO: 846058 - DNA, 33 bp, Homo sapien
agtagaaaagtgtagagaacctaaaagtaaagc

SEQ ID NO: 846059 - DNA, 33 bp, Homo sapien
cattgttatacgtagactagccaatttttccat

SEQ ID NO: 846060 - DNA, 33 bp, Homo sapien
cattgttatacgtagattagccaatttttccat

SEQ ID NO: 846061 - DNA, 33 bp, Homo sapien
attacttaggtctctgaaattgttagctcctta

SEQ ID NO: 846062 - DNA, 33 bp, Homo sapien
attacttaggtctctggaattgttagctcctta

SEQ ID NO: 846063 - DNA, 33 bp, Homo sapien
tgtgtttatgtcttcacgttttggacatttcat

SEQ ID NO: 846064 - DNA, 33 bp, Homo sapien
tgtgtttatgtcttcatgttttggacatttcat

SEQ ID NO: 846065 - DNA, 33 bp, Homo sapien
aaattgattttggccaatgatgacgtttaataa

SEQ ID NO: 846066 - DNA, 33 bp, Homo sapien
aaattgattttggccagtgatgacgtttaataa

SEQ ID NO: 846067 - DNA, 33 bp, Homo sapien
caaggggctgagaagtaacagttaattgggtat

SEQ ID NO: 846068 - DNA, 33 bp, Homo sapien
caaggggctgagaagttacagttaattgggtat

SEQ ID NO: 846069 - DNA, 33 bp, Homo sapien
aaaacgataaagccaccgtagaaaatgatatgg

SEQ ID NO: 846070 - DNA, 33 bp, Homo sapien
aaaacgataaagccactgtagaaaatgatatgg

SEQ ID NO: 846071 - DNA, 33 bp, Homo sapien
aaaagctataacaaaaatagttggtatgaaggt

SEQ ID NO: 846072 - DNA, 33 bp, Homo sapien
aaaagctataacaaaagtagttggtatgaaggt

SEQ ID NO: 846073 - DNA, 33 bp, Homo sapien
tgtgtgtgtgtttagaagggagagatagtgaga

SEQ ID NO: 846074 - DNA, 33 bp, Homo sapien
tgtgtgtgtgtttagaggggagagatagtgaga

SEQ ID NO: 846075 - DNA, 33 bp, Homo sapien
cctgtggaggcaattgaataagggggatgtcat

SEQ ID NO: 846076 - DNA, 33 bp, Homo sapien
cctgtggaggcaattgtataagggggatgtcat

SEQ ID NO: 846077 - DNA, 33 bp, Homo sapien
ctcatggcaaaagatcaatgtctcagctcacac

SEQ ID NO: 846078 - DNA, 33 bp, Homo sapien
ctcatggcaaaagatcgatgtctcagctcacac

SEQ ID NO: 846079 - DNA, 33 bp, Homo sapien
tgttcattcttttcccaacatgatttcaattct

SEQ ID NO: 846080 - DNA, 33 bp, Homo sapien
tgttcattcttttcccgacatgatttcaattct

SEQ ID NO: 846081 - DNA, 33 bp, Homo sapien
gaatgacatgtaatggaagctttcaaagtgatt

SEQ ID NO: 846082 - DNA, 33 bp, Homo sapien
gaatgacatgtaatggcagctttcaaagtgatt

SEQ ID NO: 846083 - DNA, 33 bp, Homo sapien
catttcagaggcctgcaaactttccccttctaa

SEQ ID NO: 846084 - DNA, 33 bp, Homo sapien
catttcagaggcctgccaactttccccttctaa

SEQ ID NO: 846085 - DNA, 33 bp, Homo sapien; identical to SEQ ID NO: 846083

SEQ ID NO: 846086 - DNA, 33 bp, Homo sapien; identical to SEQ ID NO: 846084

SEQ ID NO: 846087 - DNA, 33 bp, Homo sapien
tagttgatacaggactcaagttttaccctgata

SEQ ID NO: 846088 - DNA, 33 bp, Homo sapien
tagttgatacaggactgaagttttaccctgata

SEQ ID NO: 846089 - DNA, 33 bp, Homo sapien
tggaaaagagacacaactgaactccagtgttag

SEQ ID NO: 846090 - DNA, 33 bp, Homo sapien
tggaaaagagacacaattgaactccagtgttag

SEQ ID NO: 846091 - DNA, 33 bp, Homo sapien; identical to SEQ ID NO: 846089

SEQ ID NO: 846092 - DNA, 33 bp, Homo sapien; identical to SEQ ID NO: 846090

SEQ ID NO: 846093 - DNA, 33 bp, Homo sapien
ggatgtactttaaaaaatttgcagttgtaaatt

SEQ ID NO: 846094 - DNA, 33 bp, Homo sapien
ggatgtactttaaaaattttgcagttgtaaatt

SEQ ID NO: 846095 - DNA, 33 bp, Homo sapien
ccatgagaaaatgaccactgaagagagatatag

SEQ ID NO: 846096 - DNA, 33 bp, Homo sapien
ccatgagaaaatgacccctgaagagagatatag

SEQ ID NO: 846097 - DNA, 33 bp, Homo sapien
tttgatgtctcagtataaaagtaatgggttaaa

SEQ ID NO: 846098 - DNA, 33 bp, Homo sapien
tttgatgtctcagtatgaaagtaatgggttaaa

SEQ ID NO: 846099 - DNA, 33 bp, Homo sapien
ggaagggtgagagggacatgacagataaaaact

SEQ ID NO: 846100 - DNA, 33 bp, Homo sapien
ggaagggtgagagggagatgacagataaaaact

SEQ ID NO: 846101 - DNA, 33 bp, Homo sapien
gaaaagggtgatttcactctctaaagatttccc

SEQ ID NO: 846102 - DNA, 33 bp, Homo sapien
gaaaagggtgatttcattctctaaagatttccc

SEQ ID NO: 846103 - DNA, 33 bp, Homo sapien
caaaggtgtaatgtcacggcaaaggcattttta

SEQ ID NO: 846104 - DNA, 33 bp, Homo sapien
caaaggtgtaatgtcatggcaaaggcattttta

SEQ ID NO: 846105 - DNA, 33 bp, Homo sapien
aatccttttgacagtacgcagatgaccagacct

SEQ ID NO: 846106 - DNA, 33 bp, Homo sapien
aatccttttgacagtatgcagatgaccagacct

SEQ ID NO: 846107 - DNA, 33 bp, Homo sapien
aaatctgaactttcagaaattgatgttaggttt

SEQ ID NO: 846108 - DNA, 33 bp, Homo sapien
aaatctgaactttcagcaattgatgttaggttt

SEQ ID NO: 846109 - DNA, 33 bp, Homo sapien
ttttaatgtttccatcaaaccaaatcaaatatg

SEQ ID NO: 846110 - DNA, 33 bp, Homo sapien
ttttaatgtttccatcgaaccaaatcaaatatg

SEQ ID NO: 846111 - DNA, 33 bp, Homo sapien
tgaaggttattaatcacattgaaaatgctcaag

SEQ ID NO: 846112 - DNA, 33 bp, Homo sapien
tgaaggttattaatcatattgaaaatgctcaag

SEQ ID NO: 846113 - DNA, 33 bp, Homo sapien
gaagggtcaggggaaactctcctactcaagcct

SEQ ID NO: 846114 - DNA, 33 bp, Homo sapien
gaagggtcaggggaaagtctcctactcaagcct

SEQ ID NO: 846115 - DNA, 33 bp, Homo sapien
tcagagctgacaggcaagaatgcttaagtccac

SEQ ID NO: 846116 - DNA, 33 bp, Homo sapien
tcagagctgacaggcaggaatgcttaagtccac

SEQ ID NO: 846117 - DNA, 33 bp, Homo sapien
ctaagtacaatggcaaatattgcagtgttgctg

SEQ ID NO: 846118 - DNA, 33 bp, Homo sapien
ctaagtacaatggcaagtattgcagtgttgctg

SEQ ID NO: 846119 - DNA, 33 bp, Homo sapien
ggaagagtgttcatggaagagggagtacctatt

SEQ ID NO: 846120 - DNA, 33 bp, Homo sapien
ggaagagtgttcatggcagagggagtacctatt

SEQ ID NO: 846121 - DNA, 33 bp, Homo sapien
acaggacacagctccactgatgcttcctagggt

SEQ ID NO: 846122 - DNA, 33 bp, Homo sapien
acaggacacagctccagtgatgcttcctagggt

SEQ ID NO: 846123 - DNA, 33 bp, Homo sapien
taaattcttttggtcaatcctctgatgaagtgt

SEQ ID NO: 846124 - DNA, 33 bp, Homo sapien
taaattcttttggtcagtcctctgatgaagtgt

SEQ ID NO: 846125 - DNA, 33 bp, Homo sapien
aacaaaaagtaatacacagaagacctgtcaaat

SEQ ID NO: 846126 - DNA, 33 bp, Homo sapien
aacaaaaagtaatacagagaagacctgtcaaat

SEQ ID NO: 846127 - DNA, 33 bp, Homo sapien
aactttatgagaaaaacagaaggcacagaaaaa

SEQ ID NO: 846128 - DNA, 33 bp, Homo sapien
aactttatgagaaaaagagaaggcacagaaaaa

SEQ ID NO: 846129 - DNA, 33 bp, Homo sapien
aacattggggaagacaaatgattaagcaaatga

SEQ ID NO: 846130 - DNA, 33 bp, Homo sapien
aacattggggaagacagatgattaagcaaatga

SEQ ID NO: 846131 - DNA, 33 bp, Homo sapien
tccctagtatttgcaaaaagctgatacaaacac

SEQ ID NO: 846132 - DNA, 33 bp, Homo sapien
tccctagtatttgcaacaagctgatacaaacac

SEQ ID NO: 846133 - DNA, 33 bp, Homo sapien
agaatcatacattgtgaacacagccttcttgaa

SEQ ID NO: 846134 - DNA, 33 bp, Homo sapien
agaatcatacattgtggacacagccttcttgaa

SEQ ID NO: 846135 - DNA, 33 bp, Homo sapien
cctattcatttcttcaaatacaacacagttatc

SEQ ID NO: 846136 - DNA, 33 bp, Homo sapien
cctattcatttcttcagatacaacacagttatc

SEQ ID NO: 846137 - DNA, 33 bp, Homo sapien
aatggtaagtagcactaacgtcttcaacagttt

SEQ ID NO: 846138 - DNA, 33 bp, Homo sapien
aatggtaagtagcactgacgtcttcaacagttt

SEQ ID NO: 846139 - DNA, 33 bp, Homo sapien
acttaccattatctcccgagcacatgagggtca

SEQ ID NO: 846140 - DNA, 33 bp, Homo sapien
acttaccattatctcctgagcacatgagggtca

SEQ ID NO: 846141 - DNA, 33 bp, Homo sapien
gcttccatctttaagtaacacatggcatatgtt

SEQ ID NO: 846142 - DNA, 33 bp, Homo sapien
gcttccatctttaagtgacacatggcatatgtt

SEQ ID NO: 846143 - DNA, 33 bp, Homo sapien
gtcctcaagcaagtcacaggttggtggagaatg

SEQ ID NO: 846144 - DNA, 33 bp, Homo sapien
gtcctcaagcaagtcataggttggtggagaatg

SEQ ID NO: 846145 - DNA, 33 bp, Homo sapien
gtccttgatgcagtctgaccaatctaaatatac

SEQ ID NO: 846146 - DNA, 33 bp, Homo sapien
gtccttgatgcagtcttaccaatctaaatatac

SEQ ID NO: 846147 - DNA, 33 bp, Homo sapien
taacaaataaagtccaacttaaattcagtagtt

SEQ ID NO: 846148 - DNA, 33 bp, Homo sapien
taacaaataaagtccagcttaaattcagtagtt

SEQ ID NO: 846149 - DNA, 33 bp, Homo sapien
aaagaaatcttcagtacctcaagtaatttcaga

SEQ ID NO: 846150 - DNA, 33 bp, Homo sapien
aaagaaatcttcagtagctcaagtaatttcaga

SEQ ID NO: 846151 - DNA, 33 bp, Homo sapien
tgctgcctcttttatgacagaagtgtctcatgt

SEQ ID NO: 846152 - DNA, 33 bp, Homo sapien
tgctgcctcttttatgtcagaagtgtctcatgt

SEQ ID NO: 846153 - DNA, 33 bp, Homo sapien
aatatttgttttcactcagatgcttggtaaaca

SEQ ID NO: 846154 - DNA, 33 bp, Homo sapien
aatatttgttttcactgagatgcttggtaaaca

SEQ ID NO: 846155 - DNA, 33 bp, Homo sapien
cctagttatcttccaaaggcatcaaatctgatt

SEQ ID NO: 846156 - DNA, 33 bp, Homo sapien
cctagttatcttccaatggcatcaaatctgatt

SEQ ID NO: 846157 - DNA, 33 bp, Homo sapien
ggttaaccccaagtaactctagaaagcattata

SEQ ID NO: 846158 - DNA, 33 bp, Homo sapien
ggttaaccccaagtaagtctagaaagcattata

SEQ ID NO: 846159 - DNA, 33 bp, Homo sapien
ttatggtagcactattcaaaactgcacatcttc

SEQ ID NO: 846160 - DNA, 33 bp, Homo sapien
ttatggtagcactattgaaaactgcacatcttc

SEQ ID NO: 846161 - DNA, 33 bp, Homo sapien
cactggggtgacctgaagagaaactggatgact

SEQ ID NO: 846162 - DNA, 33 bp, Homo sapien
cactggggtgacctgaggagaaactggatgact

SEQ ID NO: 846163 - DNA, 33 bp, Homo sapien
attcttaaactcatacagcaacgctaataacta

SEQ ID NO: 846164 - DNA, 33 bp, Homo sapien
attcttaaactcatacggcaacgctaataacta

SEQ ID NO: 846165 - DNA, 33 bp, Homo sapien
gcaaactgcagcctgaacccatatatgcctgcc

SEQ ID NO: 846166 - DNA, 33 bp, Homo sapien
gcaaactgcagcctgagcccatatatgcctgcc

SEQ ID NO: 846167 - DNA, 33 bp, Homo sapien
taaaattttatgagaccacacctctgctcatta

SEQ ID NO: 846168 - DNA, 33 bp, Homo sapien
taaaattttatgagactacacctctgctcatta

SEQ ID NO: 846169 - DNA, 33 bp, Homo sapien
gtgtaagcctctatgacccaggcactagctcag

SEQ ID NO: 846170 - DNA, 33 bp, Homo sapien
gtgtaagcctctatgatccaggcactagctcag

SEQ ID NO: 846171 - DNA, 33 bp, Homo sapien
ggactcatctttcacacatttaatttaatcttg

SEQ ID NO: 846172 - DNA, 33 bp, Homo sapien
ggactcatctttcacatatttaatttaatcttg

SEQ ID NO: 846173 - DNA, 33 bp, Homo sapien
aaatgaggtggatagaagtttatgacacagagg

SEQ ID NO: 846174 - DNA, 33 bp, Homo sapien
aaatgaggtggatagaggtttatgacacagagg

SEQ ID NO: 846175 - DNA, 33 bp, Homo sapien
tctactcatctgataaactgatattttttaaga

SEQ ID NO: 846176 - DNA, 33 bp, Homo sapien
tctactcatctgataagctgatattttttaaga

SEQ ID NO: 846177 - DNA, 33 bp, Homo sapien
tttatttaaactcgtgacacaaacaatccatat

SEQ ID NO: 846178 - DNA, 33 bp, Homo sapien
tttatttaaactcgtggcacaaacaatccatat

SEQ ID NO: 846179 - DNA, 33 bp, Homo sapien
ggcatggtcggccatacgtttagtcccaactat

SEQ ID NO: 846180 - DNA, 33 bp, Homo sapien
ggcatggtcggccatatgtttagtcccaactat

SEQ ID NO: 846181 - DNA, 33 bp, Homo sapien
gcaattcaaacctttcaaatgtgagataatgca

SEQ ID NO: 846182 - DNA, 33 bp, Homo sapien
gcaattcaaacctttccaatgtgagataatgca

SEQ ID NO: 846183 - DNA, 33 bp, Homo sapien
gtaacttgtctgcaagaaggttaattgaattcg

SEQ ID NO: 846184 - DNA, 33 bp, Homo sapien
gtaacttgtctgcaagtaggttaattgaattcg

SEQ ID NO: 846185 - DNA, 33 bp, Homo sapien
aaaattgaagcgataaaaggttagcctggattt

SEQ ID NO: 846186 - DNA, 33 bp, Homo sapien
aaaattgaagcgataataggttagcctggattt

SEQ ID NO: 846187 - DNA, 33 bp, Homo sapien
attttgtgaattaaaactaatgtatgtacattt

SEQ ID NO: 846188 - DNA, 33 bp, Homo sapien
attttgtgaattaaaagtaatgtatgtacattt

SEQ ID NO: 846189 - DNA, 33 bp, Homo sapien
atgcagtagacgtccaatgagtcacaaatggtg

SEQ ID NO: 846190 - DNA, 33 bp, Homo sapien
atgcagtagacgtccagtgagtcacaaatggtg

SEQ ID NO: 846191 - DNA, 33 bp, Homo sapien
aaagtgagacagaagacaattggtattttctct

SEQ ID NO: 846192 - DNA, 33 bp, Homo sapien
aaagtgagacagaagagaattggtattttctct

SEQ ID NO: 846193 - DNA, 33 bp, Homo sapien
cactcttgcgtaatacaaattgcctttcttaca

SEQ ID NO: 846194 - DNA, 33 bp, Homo sapien
cactcttgcgtaataccaattgcctttcttaca

SEQ ID NO: 846195 - DNA, 33 bp, Homo sapien
tgtctgccacattgtaaatattcagtgacttta

SEQ ID NO: 846196 - DNA, 33 bp, Homo sapien
tgtctgccacattgtacatattcagtgacttta

SEQ ID NO: 846197 - DNA, 33 bp, Homo sapien
agctatcctcttaagcggagttgcttccatgtg

SEQ ID NO: 846198 - DNA, 33 bp, Homo sapien
agctatcctcttaagctgagttgcttccatgtg

SEQ ID NO: 846199 - DNA, 33 bp, Homo sapien
gcacccctttccacccaagggcctgtctgcttc

SEQ ID NO: 846200 - DNA, 33 bp, Homo sapien
gcacccctttccacccgagggcctgtctgcttc

SEQ ID NO: 846201 - DNA, 33 bp, Homo sapien
ggcaagggatatgtgaaaaagtgagcgtggggt

SEQ ID NO: 846202 - DNA, 33 bp, Homo sapien
ggcaagggatatgtgagaaagtgagcgtggggt

SEQ ID NO: 846203 - DNA, 33 bp, Homo sapien
ttgtctttgattgttccctcaggtatgttttcc

SEQ ID NO: 846204 - DNA, 33 bp, Homo sapien
ttgtctttgattgttctctcaggtatgttttcc

SEQ ID NO: 846205 - DNA, 33 bp, Homo sapien
tcagtctcacaattaaactaaaatctaggcttg

SEQ ID NO: 846206 - DNA, 33 bp, Homo sapien
tcagtctcacaattaagctaaaatctaggcttg

SEQ ID NO: 846207 - DNA, 33 bp, Homo sapien
aatttgcacaaggctaggctacaatgttaaaat

SEQ ID NO: 846208 - DNA, 33 bp, Homo sapien
aatttgcacaaggctatgctacaatgttaaaat

SEQ ID NO: 846209 - DNA, 33 bp, Homo sapien
gcaataatgttgaataaagtttgcttgcctgtt

SEQ ID NO: 846210 - DNA, 33 bp, Homo sapien
gcaataatgttgaatacagtttgcttgcctgtt

SEQ ID NO: 846211 - DNA, 33 bp, Homo sapien
acactgaggaaatggtaaatagacaaatctaag

SEQ ID NO: 846212 - DNA, 33 bp, Homo sapien
acactgaggaaatggtcaatagacaaatctaag

SEQ ID NO: 846213 - DNA, 33 bp, Homo sapien
ccatagaaaccagcaacgtactgtgcaagctga

SEQ ID NO: 846214 - DNA, 33 bp, Homo sapien
ccatagaaaccagcaatgtactgtgcaagctga

SEQ ID NO: 846215 - DNA, 33 bp, Homo sapien
gtgtttactacttttaagaatgtcctgattttg

SEQ ID NO: 846216 - DNA, 33 bp, Homo sapien
gtgtttactacttttaggaatgtcctgattttg

SEQ ID NO: 846217 - DNA, 33 bp, Homo sapien
acagaaaagtcaacaaggatttaattagacaat

SEQ ID NO: 846218 - DNA, 33 bp, Homo sapien
acagaaaagtcaacaatgatttaattagacaat

SEQ ID NO: 846219 - DNA, 33 bp, Homo sapien
ataatactgagaaaatgattaagcatcttaagt

SEQ ID NO: 846220 - DNA, 33 bp, Homo sapien
ataatactgagaaaattattaagcatcttaagt

SEQ ID NO: 846221 - DNA, 33 bp, Homo sapien
ccaattttactatttgaagagctttatgacctc

SEQ ID NO: 846222 - DNA, 33 bp, Homo sapien
ccaattttactatttgtagagctttatgacctc

SEQ ID NO: 846223 - DNA, 33 bp, Homo sapien
tcatctgttcttatcaacctttgtgtaaattaa

SEQ ID NO: 846224 - DNA, 33 bp, Homo sapien
tcatctgttcttatcatcctttgtgtaaattaa

SEQ ID NO: 846225 - DNA, 33 bp, Homo sapien
taaaataaaaatggaacgagattacagatggct

SEQ ID NO: 846226 - DNA, 33 bp, Homo sapien
taaaataaaaatggaatgagattacagatggct

SEQ ID NO: 846227 - DNA, 33 bp, Homo sapien
agaaacttgtagcaagccttgaagcagtatata

SEQ ID NO: 846228 - DNA, 33 bp, Homo sapien
agaaacttgtagcaagtcttgaagcagtatata

SEQ ID NO: 846229 - DNA, 33 bp, Homo sapien
agggatcccccagtacagcacaacttctctacc

SEQ ID NO: 846230 - DNA, 33 bp, Homo sapien
agggatcccccagtacggcacaacttctctacc

SEQ ID NO: 846231 - DNA, 33 bp, Homo sapien
atctatacctccaacaagctgcggtcaacccaa

SEQ ID NO: 846232 - DNA, 33 bp, Homo sapien
atctatacctccaacacgctgcggtcaacccaa

SEQ ID NO: 846233 - DNA, 33 bp, Homo sapien
cctcccacaccccaaccgatcactcctggttgc

SEQ ID NO: 846234 - DNA, 33 bp, Homo sapien
cctcccacaccccaactgatcactcctggttgc

SEQ ID NO: 846235 - DNA, 33 bp, Homo sapien
ataaagttctcctcataaacgtgttgattgata

SEQ ID NO: 846236 - DNA, 33 bp, Homo sapien
ataaagttctcctcatgaacgtgttgattgata

SEQ ID NO: 846237 - DNA, 33 bp, Homo sapien
acagcctcctcccttcactttgacagcatgcat

SEQ ID NO: 846238 - DNA, 33 bp, Homo sapien
acagcctcctcccttcgctttgacagcatgcat

SEQ ID NO: 846239 - DNA, 33 bp, Homo sapien
aaccagtgttagttcaacatgattggcttcact

SEQ ID NO: 846240 - DNA, 33 bp, Homo sapien
aaccagtgttagttcagcatgattggcttcact

SEQ ID NO: 846241 - DNA, 33 bp, Homo sapien
gttcagattaattagacgtatcacaaagtgaca

SEQ ID NO: 846242 - DNA, 33 bp, Homo sapien
gttcagattaattagatgtatcacaaagtgaca

SEQ ID NO: 846243 - DNA, 33 bp, Homo sapien
aggaggttctttattcgcaagttctctactcat

SEQ ID NO: 846244 - DNA, 33 bp, Homo sapien
aggaggttctttattctcaagttctctactcat

SEQ ID NO: 846245 - DNA, 33 bp, Homo sapien
agtagacagcctacaaacttaaggctgtcatgg

SEQ ID NO: 846246 - DNA, 33 bp, Homo sapien
agtagacagcctacaatcttaaggctgtcatgg

SEQ ID NO: 846247 - DNA, 33 bp, Homo sapien
atatgttgatgaattgaaccattgaccactgtc

SEQ ID NO: 846248 - DNA, 33 bp, Homo sapien
atatgttgatgaattggaccattgaccactgtc

SEQ ID NO: 846249 - DNA, 33 bp, Homo sapien
tgatagctgtttctgaagaaattaaccttagga

SEQ ID NO: 846250 - DNA, 33 bp, Homo sapien
tgatagctgtttctgaggaaattaaccttagga

SEQ ID NO: 846251 - DNA, 33 bp, Homo sapien
ctgtatttgcattttaaactatccttctgagtg

SEQ ID NO: 846252 - DNA, 33 bp, Homo sapien
ctgtatttgcattttacactatccttctgagtg

SEQ ID NO: 846253 - DNA, 33 bp, Homo sapien
tattcatgttgaaaacacctgtaaatcaaagta

SEQ ID NO: 846254 - DNA, 33 bp, Homo sapien
tattcatgttgaaaactcctgtaaatcaaagta

SEQ ID NO: 846255 - DNA, 33 bp, Homo sapien
tacaaaaatctgacaagtagccttctgaatcta

SEQ ID NO: 846256 - DNA, 33 bp, Homo sapien
tacaaaaatctgacaattagccttctgaatcta

SEQ ID NO: 846257 - DNA, 33 bp, Homo sapien
ggcctgatagaacaaaatgttgagtaatagaga

SEQ ID NO: 846258 - DNA, 33 bp, Homo sapien
ggcctgatagaacaaattgttgagtaatagaga

SEQ ID NO: 846259 - DNA, 33 bp, Homo sapien
ttgtctttgttgtaccgcaagcagagctcagtc

SEQ ID NO: 846260 - DNA, 33 bp, Homo sapien
ttgtctttgttgtacctcaagcagagctcagtc

SEQ ID NO: 846261 - DNA, 33 bp, Homo sapien
tgctggattcagaataagtatctttcatataga

SEQ ID NO: 846262 - DNA, 33 bp, Homo sapien
tgctggattcagaataggtatctttcatataga

SEQ ID NO: 846263 - DNA, 33 bp, Homo sapien
aaaaatccaagtcataaaactctaatataaaaa

SEQ ID NO: 846264 - DNA, 33 bp, Homo sapien
aaaaatccaagtcatagaactctaatataaaaa

SEQ ID NO: 846265 - DNA, 33 bp, Homo sapien
aggagagagatgcaagcagaattacggaagact

SEQ ID NO: 846266 - DNA, 33 bp, Homo sapien
aggagagagatgcaagtagaattacggaagact

SEQ ID NO: 846267 - DNA, 33 bp, Homo sapien
tgtttcaatattttgccgagaaatagccttaac

SEQ ID NO: 846268 - DNA, 33 bp, Homo sapien
tgtttcaatattttgctgagaaatagccttaac

SEQ ID NO: 846269 - DNA, 33 bp, Homo sapien
aaggtctgcaagttaaaccccactaaatctttc

SEQ ID NO: 846270 - DNA, 33 bp, Homo sapien
aaggtctgcaagttaacccccactaaatctttc

SEQ ID NO: 846271 - DNA, 33 bp, Homo sapien
tatttggctgtctcagaatataaagtacccata

SEQ ID NO: 846272 - DNA, 33 bp, Homo sapien
tatttggctgtctcagcatataaagtacccata

SEQ ID NO: 846273 - DNA, 33 bp, Homo sapien
gcataatagcatagagacgtaaacagagaagct

SEQ ID NO: 846274 - DNA, 33 bp, Homo sapien
gcataatagcatagaggcgtaaacagagaagct

SEQ ID NO: 846275 - DNA, 33 bp, Homo sapien
ctttgttacgcagagaaggaaagattgagagtt

SEQ ID NO: 846276 - DNA, 33 bp, Homo sapien
ctttgttacgcagagagggaaagattgagagtt

SEQ ID NO: 846277 - DNA, 33 bp, Homo sapien
actaagagattttaagactccttgcaggtaacg

SEQ ID NO: 846278 - DNA, 33 bp, Homo sapien
actaagagattttaaggctccttgcaggtaacg

SEQ ID NO: 846279 - DNA, 33 bp, Homo sapien
ttgcaggtaacggccacggtaaacaaagctaga

SEQ ID NO: 846280 - DNA, 33 bp, Homo sapien
ttgcaggtaacggccatggtaaacaaagctaga

SEQ ID NO: 846281 - DNA, 33 bp, Homo sapien
tatatacccaataatacgatcgttgggtcaaat

SEQ ID NO: 846282 - DNA, 33 bp, Homo sapien
tatatacccaataataggatcgttgggtcaaat

SEQ ID NO: 846283 - DNA, 33 bp, Homo sapien
ttgacagaggagtagactaggaaccagaacagg

SEQ ID NO: 846284 - DNA, 33 bp, Homo sapien
ttgacagaggagtagagtaggaaccagaacagg

SEQ ID NO: 846285 - DNA, 33 bp, Homo sapien
tttctcaccaattgaaatagtcttgaacaaagt

SEQ ID NO: 846286 - DNA, 33 bp, Homo sapien
tttctcaccaattgaagtagtcttgaacaaagt

SEQ ID NO: 846287 - DNA, 33 bp, Homo sapien
tttcagtttatatgtcaaggtgaaagcctaact

SEQ ID NO: 846288 - DNA, 33 bp, Homo sapien
tttcagtttatatgtcgaggtgaaagcctaact

SEQ ID NO: 846289 - DNA, 33 bp, Homo sapien
atattgtgcaatttgaactgaactttggtgtat

SEQ ID NO: 846290 - DNA, 33 bp, Homo sapien
atattgtgcaatttgagctgaactttggtgtat

SEQ ID NO: 846291 - DNA, 33 bp, Homo sapien
aaaggcatggtgtatacggtcattttgttcatc

SEQ ID NO: 846292 - DNA, 33 bp, Homo sapien
aaaggcatggtgtatatggtcattttgttcatc

SEQ ID NO: 846293 - DNA, 33 bp, Homo sapien
tatttcaggttatggaccatctcactcgttttg

SEQ ID NO: 846294 - DNA, 33 bp, Homo sapien
tatttcaggttatggatcatctcactcgttttg

SEQ ID NO: 846295 - DNA, 33 bp, Homo sapien
aatcagtctgacacaaattactaatctctccat

SEQ ID NO: 846296 - DNA, 33 bp, Homo sapien
aatcagtctgacacaagttactaatctctccat

SEQ ID NO: 846297 - DNA, 33 bp, Homo sapien
atgaccctaatatcccagaaacttagagcaaat

SEQ ID NO: 846298 - DNA, 33 bp, Homo sapien
atgaccctaatatcccggaaacttagagcaaat

SEQ ID NO: 846299 - DNA, 33 bp, Homo sapien
ccaatgtagagtgagaaacagtatgtaggataa

SEQ ID NO: 846300 - DNA, 33 bp, Homo sapien
ccaatgtagagtgagagacagtatgtaggataa

SEQ ID NO: 846301 - DNA, 33 bp, Homo sapien
tctcttcaaaatcataacaatctggttccagga

SEQ ID NO: 846302 - DNA, 33 bp, Homo sapien
tctcttcaaaatcataccaatctggttccagga

SEQ ID NO: 846303 - DNA, 33 bp, Homo sapien
ttaactcgcaattctacaagctcaacttacaga

SEQ ID NO: 846304 - DNA, 33 bp, Homo sapien
ttaactcgcaattctagaagctcaacttacaga

SEQ ID NO: 846305 - DNA, 33 bp, Homo sapien
aataatctatggaaaaacttacatggcaaagaa

SEQ ID NO: 846306 - DNA, 33 bp, Homo sapien
aataatctatggaaaagcttacatggcaaagaa

SEQ ID NO: 846307 - DNA, 33 bp, Homo sapien
gagccaattattttaaagtaaagttagctgcag

SEQ ID NO: 846308 - DNA, 33 bp, Homo sapien
gagccaattattttaacgtaaagttagctgcag

SEQ ID NO: 846309 - DNA, 33 bp, Homo sapien
ttctcattcactttgaacaataaaattatgtgg

SEQ ID NO: 846310 - DNA, 33 bp, Homo sapien
ttctcattcactttgatcaataaaattatgtgg

SEQ ID NO: 846311 - DNA, 33 bp, Homo sapien
tctcctttaacacttgaaacaattcaacatgag

SEQ ID NO: 846312 - DNA, 33 bp, Homo sapien
tctcctttaacacttggaacaattcaacatgag

SEQ ID NO: 846313 - DNA, 33 bp, Homo sapien
gaaccagcaaatactccctggaaaaaaagctgc

SEQ ID NO: 846314 - DNA, 33 bp, Homo sapien
gaaccagcaaatactctctggaaaaaaagctgc

SEQ ID NO: 846315 - DNA, 33 bp, Homo sapien
tcaacttgctaacttacgccctattgttgtcat

SEQ ID NO: 846316 - DNA, 33 bp, Homo sapien
tcaacttgctaacttatgccctattgttgtcat

SEQ ID NO: 846317 - DNA, 33 bp, Homo sapien
ctgcggtctctagaaacgaaaggtagaattttg

SEQ ID NO: 846318 - DNA, 33 bp, Homo sapien
ctgcggtctctagaaatgaaaggtagaattttg

SEQ ID NO: 846319 - DNA, 33 bp, Homo sapien
aatagtagaatcaaaaatcagtgtactgggtaa

SEQ ID NO: 846320 - DNA, 33 bp, Homo sapien
aatagtagaatcaaaactcagtgtactgggtaa

SEQ ID NO: 846321 - DNA, 33 bp, Homo sapien
aatgtagctaatcacccacaacagtatctggac

SEQ ID NO: 846322 - DNA, 33 bp, Homo sapien
aatgtagctaatcacctacaacagtatctggac

SEQ ID NO: 846323 - DNA, 33 bp, Homo sapien
acttggaactatagaaatactgcattattgcaa

SEQ ID NO: 846324 - DNA, 33 bp, Homo sapien
acttggaactatagaagtactgcattattgcaa

SEQ ID NO: 846325 - DNA, 33 bp, Homo sapien
cttatattttttgtgacaggagatagatttgca

SEQ ID NO: 846326 - DNA, 33 bp, Homo sapien
cttatattttttgtgagaggagatagatttgca

SEQ ID NO: 846327 - DNA, 33 bp, Homo sapien
aaaatataagcttcaccggcggcagagatttgt

SEQ ID NO: 846328 - DNA, 33 bp, Homo sapien
aaaatataagcttcactggcggcagagatttgt

SEQ ID NO: 846329 - DNA, 33 bp, Homo sapien
gtatgatttgaatcaagaccttacatctgtgtg

SEQ ID NO: 846330 - DNA, 33 bp, Homo sapien
gtatgatttgaatcaataccttacatctgtgtg

SEQ ID NO: 846331 - DNA, 33 bp, Homo sapien
cacatacctggttaaaaaagaattatgtgacct

SEQ ID NO: 846332 - DNA, 33 bp, Homo sapien
cacatacctggttaaacaagaattatgtgacct

SEQ ID NO: 846333 - DNA, 33 bp, Homo sapien
agctccgtaaatctcacgaataggaatatgttc

SEQ ID NO: 846334 - DNA, 33 bp, Homo sapien
agctccgtaaatctcatgaataggaatatgttc

SEQ ID NO: 846335 - DNA, 33 bp, Homo sapien
catggcctgaaactcaaagtttttgtctccact

SEQ ID NO: 846336 - DNA, 33 bp, Homo sapien
catggcctgaaactcacagtttttgtctccact

SEQ ID NO: 846337 - DNA, 33 bp, Homo sapien
aactgcacaggagacaatgaacttgctttcaca

SEQ ID NO: 846338 - DNA, 33 bp, Homo sapien
aactgcacaggagacagtgaacttgctttcaca

SEQ ID NO: 846339 - DNA, 33 bp, Homo sapien
tctcaaagtcctatgaacatttctccaaataac

SEQ ID NO: 846340 - DNA, 33 bp, Homo sapien
tctcaaagtcctatgagcatttctccaaataac

SEQ ID NO: 846341 - DNA, 33 bp, Homo sapien
cgtcatgtcaaatctgaagagaagaatgcaatg

SEQ ID NO: 846342 - DNA, 33 bp, Homo sapien
cgtcatgtcaaatctgtagagaagaatgcaatg

SEQ ID NO: 846343 - DNA, 33 bp, Homo sapien
taaaaaacacataatacctatcagttatcacca

SEQ ID NO: 846344 - DNA, 33 bp, Homo sapien
taaaaaacacataatatctatcagttatcacca

SEQ ID NO: 846345 - DNA, 33 bp, Homo sapien
gtcctaactccagggcactactgaacattgctg

SEQ ID NO: 846346 - DNA, 33 bp, Homo sapien
gtcctaactccagggctctactgaacattgctg

SEQ ID NO: 846347 - DNA, 33 bp, Homo sapien
gggtattatgatccaaactatgaatttgggggt

SEQ ID NO: 846348 - DNA, 33 bp, Homo sapien
gggtattatgatccaacctatgaatttgggggt

SEQ ID NO: 846349 - DNA, 33 bp, Homo sapien
tagaatctaatgatagaaatgctttgtagatat

SEQ ID NO: 846350 - DNA, 33 bp, Homo sapien
tagaatctaatgataggaatgctttgtagatat

SEQ ID NO: 846351 - DNA, 33 bp, Homo sapien
ctggcagtatgaggaggaggcagtaagttgaga

SEQ ID NO: 846352 - DNA, 33 bp, Homo sapien
ctggcagtatgaggagtaggcagtaagttgaga

SEQ ID NO: 846353 - DNA, 33 bp, Homo sapien
ttttaataagcttccaacaagttctcatattta

SEQ ID NO: 846354 - DNA, 33 bp, Homo sapien
ttttaataagcttccatcaagttctcatattta

SEQ ID NO: 846355 - DNA, 33 bp, Homo sapien
ctggggattttttccaccaatgttcatcaagga

SEQ ID NO: 846356 - DNA, 33 bp, Homo sapien
ctggggattttttccatcaatgttcatcaagga

SEQ ID NO: 846357 - DNA, 33 bp, Homo sapien
actggcagagacataaaaacaacatgaaaaact

SEQ ID NO: 846358 - DNA, 33 bp, Homo sapien
actggcagagacataacaacaacatgaaaaact

SEQ ID NO: 846359 - DNA, 33 bp, Homo sapien
cccacagaaatacaataaaactttcaaagacta

SEQ ID NO: 846360 - DNA, 33 bp, Homo sapien
cccacagaaatacaatgaaactttcaaagacta

SEQ ID NO: 846361 - DNA, 33 bp, Homo sapien
gttttatgtttagatacaattgaagtacttaat

SEQ ID NO: 846362 - DNA, 33 bp, Homo sapien
gttttatgtttagatataattgaagtacttaat

SEQ ID NO: 846363 - DNA, 33 bp, Homo sapien
ataggatttaggagaacgactagagtttggtca

SEQ ID NO: 846364 - DNA, 33 bp, Homo sapien
ataggatttaggagaatgactagagtttggtca

SEQ ID NO: 846365 - DNA, 33 bp, Homo sapien
tttgtagtgctctggggagatgggaatgagtag

SEQ ID NO: 846366 - DNA, 33 bp, Homo sapien
tttgtagtgctctgggtagatgggaatgagtag

SEQ ID NO: 846367 - DNA, 33 bp, Homo sapien
aactgtagatggaaacaaatatgtatataatat

SEQ ID NO: 846368 - DNA, 33 bp, Homo sapien
aactgtagatggaaaccaatatgtatataatat

SEQ ID NO: 846369 - DNA, 33 bp, Homo sapien
caggcagactggtgaaagaagctaaaatttgaa

SEQ ID NO: 846370 - DNA, 33 bp, Homo sapien
caggcagactggtgaaggaagctaaaatttgaa

SEQ ID NO: 846371 - DNA, 33 bp, Homo sapien
gactaattgtatctctaaaaatcattagccaaa

SEQ ID NO: 846372 - DNA, 33 bp, Homo sapien
gactaattgtatctctgaaaatcattagccaaa

SEQ ID NO: 846373 - DNA, 33 bp, Homo sapien
ttacatttaatcggaaactatcaccaaagaaat

SEQ ID NO: 846374 - DNA, 33 bp, Homo sapien
ttacatttaatcggaagctatcaccaaagaaat

SEQ ID NO: 846375 - DNA, 33 bp, Homo sapien
tagaacccacgaatatcaaagggcgattgtgtg

SEQ ID NO: 846376 - DNA, 33 bp, Homo sapien
tagaacccacgaatattaaagggcgattgtgtg

SEQ ID NO: 846377 - DNA, 33 bp, Homo sapien
aactcaccatatttaaaggtttttcatgacaca

SEQ ID NO: 846378 - DNA, 33 bp, Homo sapien
aactcaccatatttaagggtttttcatgacaca

SEQ ID NO: 846379 - DNA, 33 bp, Homo sapien
gagttaaataattacacagatgacaggttgtga

SEQ ID NO: 846380 - DNA, 33 bp, Homo sapien
gagttaaataattacatagatgacaggttgtga

SEQ ID NO: 846381 - DNA, 33 bp, Homo sapien
cagtgataaaaataaacgagatattcatccatg

SEQ ID NO: 846382 - DNA, 33 bp, Homo sapien
cagtgataaaaataaatgagatattcatccatg

SEQ ID NO: 846383 - DNA, 33 bp, Homo sapien
ggaatcaaaagataaccgatatagccaaagcaa

SEQ ID NO: 846384 - DNA, 33 bp, Homo sapien
ggaatcaaaagataactgatatagccaaagcaa

SEQ ID NO: 846385 - DNA, 33 bp, Homo sapien
acaggtgcctgggtaaactctcattgaaatgca

SEQ ID NO: 846386 - DNA, 33 bp, Homo sapien
acaggtgcctgggtaagctctcattgaaatgca

SEQ ID NO: 846387 - DNA, 33 bp, Homo sapien
cctgattgttggggtacagctgcagactcctca

SEQ ID NO: 846388 - DNA, 33 bp, Homo sapien
cctgattgttggggtagagctgcagactcctca

SEQ ID NO: 846389 - DNA, 33 bp, Homo sapien
agccagctctgtgtgaataattctgtattgcaa

SEQ ID NO: 846390 - DNA, 33 bp, Homo sapien
agccagctctgtgtgagtaattctgtattgcaa

SEQ ID NO: 846391 - DNA, 33 bp, Homo sapien
tttgtttcttcttgtcaagaggccattaaactc

SEQ ID NO: 846392 - DNA, 33 bp, Homo sapien
tttgtttcttcttgtctagaggccattaaactc

SEQ ID NO: 846393 - DNA, 33 bp, Homo sapien
tcaggtaaaaacctgacacaagtggttaaatag

SEQ ID NO: 846394 - DNA, 33 bp, Homo sapien
tcaggtaaaaacctgatacaagtggttaaatag

SEQ ID NO: 846395 - DNA, 33 bp, Homo sapien
ttggctattttatccaatcactttttggtggca

SEQ ID NO: 846396 - DNA, 33 bp, Homo sapien
ttggctattttatccagtcactttttggtggca

SEQ ID NO: 846397 - DNA, 33 bp, Homo sapien
ttagattttctgaaacaaatccttagtgacttt

SEQ ID NO: 846398 - DNA, 33 bp, Homo sapien
ttagattttctgaaaccaatccttagtgacttt

SEQ ID NO: 846399 - DNA, 33 bp, Homo sapien
aatatttaaaaaataacgaaactgtgacacaga

SEQ ID NO: 846400 - DNA, 33 bp, Homo sapien
aatatttaaaaaataatgaaactgtgacacaga

SEQ ID NO: 846401 - DNA, 33 bp, Homo sapien
tcctttgaagctttaaagccaaacattgacttc

SEQ ID NO: 846402 - DNA, 33 bp, Homo sapien
tcctttgaagctttaaggccaaacattgacttc

SEQ ID NO: 846403 - DNA, 33 bp, Homo sapien
tgtgaaggtcacagcccagggatacaggctcac

SEQ ID NO: 846404 - DNA, 33 bp, Homo sapien
tgtgaaggtcacagccgagggatacaggctcac

SEQ ID NO: 846405 - DNA, 33 bp, Homo sapien
aagtacttcaggtgaccaattgggggcatttta

SEQ ID NO: 846406 - DNA, 33 bp, Homo sapien
aagtacttcaggtgactaattgggggcatttta

SEQ ID NO: 846407 - DNA, 33 bp, Homo sapien
cccagtgggacaataaagcagctcaacagaaaa

SEQ ID NO: 846408 - DNA, 33 bp, Homo sapien
cccagtgggacaataacgcagctcaacagaaaa

SEQ ID NO: 846409 - DNA, 33 bp, Homo sapien
ggatgcccaggatggacattaactcggcccaaa

SEQ ID NO: 846410 - DNA, 33 bp, Homo sapien
ggatgcccaggatggatattaactcggcccaaa

SEQ ID NO: 846411 - DNA, 33 bp, Homo sapien
ggagtgaaaatactggccaaaaagggagaaatt

SEQ ID NO: 846412 - DNA, 33 bp, Homo sapien
ggagtgaaaatactggtcaaaaagggagaaatt

SEQ ID NO: 846413 - DNA, 33 bp, Homo sapien
agattaaaagatcacacagagggagtgaaaata

SEQ ID NO: 846414 - DNA, 33 bp, Homo sapien
agattaaaagatcacatagagggagtgaaaata

SEQ ID NO: 846415 - DNA, 33 bp, Homo sapien
actgtcagtccacagaactattatatcaccata

SEQ ID NO: 846416 - DNA, 33 bp, Homo sapien
actgtcagtccacagacctattatatcaccata

SEQ ID NO: 846417 - DNA, 33 bp, Homo sapien
cttcactgaatttttacgctacattcatatatg

SEQ ID NO: 846418 - DNA, 33 bp, Homo sapien
cttcactgaatttttatgctacattcatatatg

SEQ ID NO: 846419 - DNA, 33 bp, Homo sapien
gttacagttttgtggacgcttccagtgctatta

SEQ ID NO: 846420 - DNA, 33 bp, Homo sapien
gttacagttttgtggatgcttccagtgctatta

SEQ ID NO: 846421 - DNA, 33 bp, Homo sapien
ctctgattaccctttcactgaatacacaattta

SEQ ID NO: 846422 - DNA, 33 bp, Homo sapien
ctctgattaccctttcgctgaatacacaattta

SEQ ID NO: 846423 - DNA, 33 bp, Homo sapien
ttccttcttcctgatggaaatatctgtttctta

SEQ ID NO: 846424 - DNA, 33 bp, Homo sapien
ttccttcttcctgatgtaaatatctgtttctta

SEQ ID NO: 846425 - DNA, 33 bp, Homo sapien
atatgggccaagatgcagaggagctggaattta

SEQ ID NO: 846426 - DNA, 33 bp, Homo sapien
atatgggccaagatgcggaggagctggaattta

SEQ ID NO: 846427 - DNA, 33 bp, Homo sapien
taccaattatttatccaagattttctgaatata

SEQ ID NO: 846428 - DNA, 33 bp, Homo sapien
taccaattatttatcccagattttctgaatata

SEQ ID NO: 846429 - DNA, 33 bp, Homo sapien
gagtgagaatttcctcaatgtcttttagcccat

SEQ ID NO: 846430 - DNA, 33 bp, Homo sapien
gagtgagaatttcctcgatgtcttttagcccat

SEQ ID NO: 846431 - DNA, 33 bp, Homo sapien
tttgggccccctgtcacacagaagactacccgc

SEQ ID NO: 846432 - DNA, 33 bp, Homo sapien
tttgggccccctgtcatacagaagactacccgc

SEQ ID NO: 846433 - DNA, 33 bp, Homo sapien
attttagactagccacacttattcctgtgaacc

SEQ ID NO: 846434 - DNA, 33 bp, Homo sapien
attttagactagccacgcttattcctgtgaacc

SEQ ID NO: 846435 - DNA, 33 bp, Homo sapien
gatgggtaaccattgaacttcaatctgtaccca

SEQ ID NO: 846436 - DNA, 33 bp, Homo sapien
gatgggtaaccattgaccttcaatctgtaccca

SEQ ID NO: 846437 - DNA, 33 bp, Homo sapien
gtctatctgagacacaatattttagaaactggc

SEQ ID NO: 846438 - DNA, 33 bp, Homo sapien
gtctatctgagacacagtattttagaaactggc

SEQ ID NO: 846439 - DNA, 33 bp, Homo sapien
ggcaaactatagtgcacgagctaaatcttaccc

SEQ ID NO: 846440 - DNA, 33 bp, Homo sapien
ggcaaactatagtgcatgagctaaatcttaccc

SEQ ID NO: 846441 - DNA, 33 bp, Homo sapien
attccatatgtcatcaccatttctgtttgtaca

SEQ ID NO: 846442 - DNA, 33 bp, Homo sapien
attccatatgtcatcagcatttctgtttgtaca

SEQ ID NO: 846443 - DNA, 33 bp, Homo sapien
tgttaatgattacaacggtgccaagtagcgcag

SEQ ID NO: 846444 - DNA, 33 bp, Homo sapien
tgttaatgattacaactgtgccaagtagcgcag

SEQ ID NO: 846445 - DNA, 33 bp, Homo sapien
agagaacaagtccctcaataacatcagtttgtt

SEQ ID NO: 846446 - DNA, 33 bp, Homo sapien
agagaacaagtccctcgataacatcagtttgtt

SEQ ID NO: 846447 - DNA, 33 bp, Homo sapien
ggctgaaagttgtgtaaaatttttgcccataca

SEQ ID NO: 846448 - DNA, 33 bp, Homo sapien
ggctgaaagttgtgtacaatttttgcccataca

SEQ ID NO: 846449 - DNA, 33 bp, Homo sapien
gcaagaaaatagaccaagacagcgtattttcat

SEQ ID NO: 846450 - DNA, 33 bp, Homo sapien
gcaagaaaatagaccaggacagcgtattttcat

SEQ ID NO: 846451 - DNA, 33 bp, Homo sapien
gaccacacctaacacccaggactgttttcaata

SEQ ID NO: 846452 - DNA, 33 bp, Homo sapien
gaccacacctaacaccgaggactgttttcaata

SEQ ID NO: 846453 - DNA, 33 bp, Homo sapien
gttatgagagtaagtgcataggcatgacttccg

SEQ ID NO: 846454 - DNA, 33 bp, Homo sapien
gttatgagagtaagtgtataggcatgacttccg

SEQ ID NO: 846455 - DNA, 33 bp, Homo sapien
ctggattctcatttaaagatcctttaggcaact

SEQ ID NO: 846456 - DNA, 33 bp, Homo sapien
ctggattctcatttaaggatcctttaggcaact

SEQ ID NO: 846457 - DNA, 33 bp, Homo sapien
tcaaatgaattaatagccatttgatatgcaaat

SEQ ID NO: 846458 - DNA, 33 bp, Homo sapien
tcaaatgaattaataggcatttgatatgcaaat

SEQ ID NO: 846459 - DNA, 33 bp, Homo sapien
ctcccaaagtgttaaaattataagcataagcca

SEQ ID NO: 846460 - DNA, 33 bp, Homo sapien
ctcccaaagtgttaaacttataagcataagcca

SEQ ID NO: 846461 - DNA, 33 bp, Homo sapien
ggtaatttatcaagaaaggagtttatttggttc

SEQ ID NO: 846462 - DNA, 33 bp, Homo sapien
ggtaatttatcaagaacggagtttatttggttc

SEQ ID NO: 846463 - DNA, 33 bp, Homo sapien
gtaagattttgctcaacggacaaagagctcaac

SEQ ID NO: 846464 - DNA, 33 bp, Homo sapien
gtaagattttgctcaatggacaaagagctcaac

SEQ ID NO: 846465 - DNA, 33 bp, Homo sapien
atttaattgtttgaaacgactatacttgataaa

SEQ ID NO: 846466 - DNA, 33 bp, Homo sapien
atttaattgtttgaaatgactatacttgataaa

SEQ ID NO: 846467 - DNA, 33 bp, Homo sapien
tagaaaacatacttaagagtgcacatccattgt

SEQ ID NO: 846468 - DNA, 33 bp, Homo sapien
tagaaaacatacttaatagtgcacatccattgt

SEQ ID NO: 846469 - DNA, 33 bp, Homo sapien
ttactctgataaggaaatagaaagtcaccagat

SEQ ID NO: 846470 - DNA, 33 bp, Homo sapien
ttactctgataaggaagtagaaagtcaccagat

SEQ ID NO: 846471 - DNA, 33 bp, Homo sapien
taggaagtgcctcacaggatttcttaacccagt

SEQ ID NO: 846472 - DNA, 33 bp, Homo sapien
taggaagtgcctcacatgatttcttaacccagt

SEQ ID NO: 846473 - DNA, 33 bp, Homo sapien
cctaatttactgggacactttcctatcaagaat

SEQ ID NO: 846474 - DNA, 33 bp, Homo sapien
cctaatttactgggacgctttcctatcaagaat

SEQ ID NO: 846475 - DNA, 33 bp, Homo sapien
ttgatagtgatttgaacagatgagttaaaaaaa

SEQ ID NO: 846476 - DNA, 33 bp, Homo sapien
ttgatagtgatttgaagagatgagttaaaaaaa

SEQ ID NO: 846477 - DNA, 33 bp, Homo sapien
gtaaatgaagtcgaaccaacagacatttttctt

SEQ ID NO: 846478 - DNA, 33 bp, Homo sapien
gtaaatgaagtcgaactaacagacatttttctt

SEQ ID NO: 846479 - DNA, 33 bp, Homo sapien
ttgaacttttgcaccaccagtttaactgtgtat

SEQ ID NO: 846480 - DNA, 33 bp, Homo sapien
ttgaacttttgcaccatcagtttaactgtgtat

SEQ ID NO: 846481 - DNA, 33 bp, Homo sapien
tgtattaggaaagaaaaatctggcccaactttg

SEQ ID NO: 846482 - DNA, 33 bp, Homo sapien
tgtattaggaaagaaatatctggcccaactttg

SEQ ID NO: 846483 - DNA, 33 bp, Homo sapien
ctttgttgaaatttcactctaagtatttgcttg

SEQ ID NO: 846484 - DNA, 33 bp, Homo sapien
ctttgttgaaatttcagtctaagtatttgcttg

SEQ ID NO: 846485 - DNA, 33 bp, Homo sapien
tatcaaagccaattcaacatctgttattttgaa

SEQ ID NO: 846486 - DNA, 33 bp, Homo sapien
tatcaaagccaattcagcatctgttattttgaa

SEQ ID NO: 846487 - DNA, 33 bp, Homo sapien
gccacaattttccacacgaagattttgttcgtt

SEQ ID NO: 846488 - DNA, 33 bp, Homo sapien
gccacaattttccacatgaagattttgttcgtt

SEQ ID NO: 846489 - DNA, 33 bp, Homo sapien
gctgagaagacacacccataaccacaatgcatg

SEQ ID NO: 846490 - DNA, 33 bp, Homo sapien
gctgagaagacacacctataaccacaatgcatg

SEQ ID NO: 846491 - DNA, 33 bp, Homo sapien
ggactcttttccagccaccaccttagctgtgcc

SEQ ID NO: 846492 - DNA, 33 bp, Homo sapien
ggactcttttccagccgccaccttagctgtgcc

SEQ ID NO: 846493 - DNA, 33 bp, Homo sapien
actggtggagttttaaactgaaaatcaatctac

SEQ ID NO: 846494 - DNA, 33 bp, Homo sapien
actggtggagttttaacctgaaaatcaatctac

SEQ ID NO: 846495 - DNA, 33 bp, Homo sapien
ccagtaatgatttgcacagtttattctcttgtt

SEQ ID NO: 846496 - DNA, 33 bp, Homo sapien
ccagtaatgatttgcatagtttattctcttgtt

SEQ ID NO: 846497 - DNA, 33 bp, Homo sapien
gaagataatttaggaacctggtatgtattgtaa

SEQ ID NO: 846498 - DNA, 33 bp, Homo sapien
gaagataatttaggaatctggtatgtattgtaa

SEQ ID NO: 846499 - DNA, 33 bp, Homo sapien
ctgctattttttcaaaacaacacactctgtcag

SEQ ID NO: 846500 - DNA, 33 bp, Homo sapien
ctgctattttttcaaagcaacacactctgtcag

SEQ ID NO: 846501 - DNA, 33 bp, Homo sapien
accctggacttagccacatatcagctctacccg

SEQ ID NO: 846502 - DNA, 33 bp, Homo sapien
accctggacttagccatatatcagctctacccg

SEQ ID NO: 846503 - DNA, 33 bp, Homo sapien
tgtcaatactactactctgaatttgagaatttt

SEQ ID NO: 846504 - DNA, 33 bp, Homo sapien
tgtcaatactactactttgaatttgagaatttt

SEQ ID NO: 846505 - DNA, 33 bp, Homo sapien
cttagctagcagaggaagtaataataacaggaa

SEQ ID NO: 846506 - DNA, 33 bp, Homo sapien
cttagctagcagaggaggtaataataacaggaa

SEQ ID NO: 846507 - DNA, 33 bp, Homo sapien
agaaagtactgtaacccgaccaggccatacttt

SEQ ID NO: 846508 - DNA, 33 bp, Homo sapien
agaaagtactgtaacctgaccaggccatacttt

SEQ ID NO: 846509 - DNA, 33 bp, Homo sapien
ctaattacccagatccaatcaatatatatgtat

SEQ ID NO: 846510 - DNA, 33 bp, Homo sapien
ctaattacccagatccgatcaatatatatgtat

SEQ ID NO: 846511 - DNA, 33 bp, Homo sapien
ttcattttgctcaagaccatttacattgccttg

SEQ ID NO: 846512 - DNA, 33 bp, Homo sapien
ttcattttgctcaagatcatttacattgccttg

SEQ ID NO: 846513 - DNA, 33 bp, Homo sapien
caaagtcagagaaatccataaccaaggggcgaa

SEQ ID NO: 846514 - DNA, 33 bp, Homo sapien
caaagtcagagaaatctataaccaaggggcgaa

SEQ ID NO: 846515 - DNA, 33 bp, Homo sapien
gagtttcaaattttcacgtgcctagtaattata

SEQ ID NO: 846516 - DNA, 33 bp, Homo sapien
gagtttcaaattttcatgtgcctagtaattata

SEQ ID NO: 846517 - DNA, 33 bp, Homo sapien
gacagagatatgattaaataacagagtagaaac

SEQ ID NO: 846518 - DNA, 33 bp, Homo sapien
gacagagatatgattagataacagagtagaaac

SEQ ID NO: 846519 - DNA, 33 bp, Homo sapien
ttactttctgtttacagtatgtttctcctctta

SEQ ID NO: 846520 - DNA, 33 bp, Homo sapien
ttactttctgtttacattatgtttctcctctta

SEQ ID NO: 846521 - DNA, 33 bp, Homo sapien
caattcacaaaaatctaaaacaatgcatttgag

SEQ ID NO: 846522 - DNA, 33 bp, Homo sapien
caattcacaaaaatctgaaacaatgcatttgag

SEQ ID NO: 846523 - DNA, 33 bp, Homo sapien
atgcttacccacaagcaatgacagcaaaaagat

SEQ ID NO: 846524 - DNA, 33 bp, Homo sapien
atgcttacccacaagcgatgacagcaaaaagat

SEQ ID NO: 846525 - DNA, 33 bp, Homo sapien
tccagaattcttagctaactacattctgtactt

SEQ ID NO: 846526 - DNA, 33 bp, Homo sapien
tccagaattcttagctgactacattctgtactt

SEQ ID NO: 846527 - DNA, 33 bp, Homo sapien
tactaaatatacatcgaacgtgtaaaagaattt

SEQ ID NO: 846528 - DNA, 33 bp, Homo sapien
tactaaatatacatcggacgtgtaaaagaattt

SEQ ID NO: 846529 - DNA, 33 bp, Homo sapien
gtctctttctctcacaagatgtttgttggttcc

SEQ ID NO: 846530 - DNA, 33 bp, Homo sapien
gtctctttctctcacaggatgtttgttggttcc

SEQ ID NO: 846531 - DNA, 33 bp, Homo sapien
tgcaaaattggtaaaaatctgaagagaggtacg

SEQ ID NO: 846532 - DNA, 33 bp, Homo sapien
tgcaaaattggtaaaattctgaagagaggtacg

SEQ ID NO: 846533 - DNA, 33 bp, Homo sapien
agctagggccatcttgcatattggtttaatctc

SEQ ID NO: 846534 - DNA, 33 bp, Homo sapien
agctagggccatcttgtatattggtttaatctc

SEQ ID NO: 846535 - DNA, 33 bp, Homo sapien
ctgtttatgtcatttaactctgaaatatttagt

SEQ ID NO: 846536 - DNA, 33 bp, Homo sapien
ctgtttatgtcatttatctctgaaatatttagt

SEQ ID NO: 846537 - DNA, 33 bp, Homo sapien
tatccttgtggtataaaaaatgttagtttgaca

SEQ ID NO: 846538 - DNA, 33 bp, Homo sapien
tatccttgtggtataagaaatgttagtttgaca

SEQ ID NO: 846539 - DNA, 33 bp, Homo sapien
ttaaagcctgccaccaaagtaagtgtagatgac

SEQ ID NO: 846540 - DNA, 33 bp, Homo sapien
ttaaagcctgccaccagagtaagtgtagatgac

SEQ ID NO: 846541 - DNA, 33 bp, Homo sapien
tttaggttaagtatggaaattaggtatacttcg

SEQ ID NO: 846542 - DNA, 33 bp, Homo sapien
tttaggttaagtatgggaattaggtatacttcg

SEQ ID NO: 846543 - DNA, 33 bp, Homo sapien
ggaaggtaagtttgacgcgatcctgtagggaaa

SEQ ID NO: 846544 - DNA, 33 bp, Homo sapien
ggaaggtaagtttgactcgatcctgtagggaaa

SEQ ID NO: 846545 - DNA, 33 bp, Homo sapien
gtgcgttcatggataacgaccctccgaactggg

SEQ ID NO: 846546 - DNA, 33 bp, Homo sapien
gtgcgttcatggataatgaccctccgaactggg

SEQ ID NO: 846547 - DNA, 33 bp, Homo sapien
tacattgattttcaagcacttagcagcagatgt

SEQ ID NO: 846548 - DNA, 33 bp, Homo sapien
tacattgattttcaagtacttagcagcagatgt

SEQ ID NO: 846549 - DNA, 33 bp, Homo sapien
tgcatgttactgcaggccctatagagcttgtac

SEQ ID NO: 846550 - DNA, 33 bp, Homo sapien
tgcatgttactgcaggtcctatagagcttgtac

SEQ ID NO: 846551 - DNA, 33 bp, Homo sapien
gaggaagcaagactcactatgggcttcagtcca

SEQ ID NO: 846552 - DNA, 33 bp, Homo sapien
gaggaagcaagactcagtatgggcttcagtcca

SEQ ID NO: 846553 - DNA, 33 bp, Homo sapien
cagaataaagcttcacaagaaattagcatatgt

SEQ ID NO: 846554 - DNA, 33 bp, Homo sapien
cagaataaagcttcacgagaaattagcatatgt

SEQ ID NO: 846555 - DNA, 33 bp, Homo sapien
aaatctgtcattcacaatggttttacagattcc

SEQ ID NO: 846556 - DNA, 33 bp, Homo sapien
aaatctgtcattcacagtggttttacagattcc

SEQ ID NO: 846557 - DNA, 33 bp, Homo sapien
gtcactgtgtttttaactgaatttgttttaagc

SEQ ID NO: 846558 - DNA, 33 bp, Homo sapien
gtcactgtgtttttaagtgaatttgttttaagc

SEQ ID NO: 846559 - DNA, 33 bp, Homo sapien
tgaaaacaagattctgaataaagcaatgaaata

SEQ ID NO: 846560 - DNA, 33 bp, Homo sapien
tgaaaacaagattctggataaagcaatgaaata

SEQ ID NO: 846561 - DNA, 33 bp, Homo sapien
gacatctgaaaatataggtatggcaggtgatta

SEQ ID NO: 846562 - DNA, 33 bp, Homo sapien
gacatctgaaaatatatgtatggcaggtgatta

SEQ ID NO: 846563 - DNA, 33 bp, Homo sapien
aaaaatgaaagatgtaggtcaggagttttcaag

SEQ ID NO: 846564 - DNA, 33 bp, Homo sapien
aaaaatgaaagatgtatgtcaggagttttcaag

SEQ ID NO: 846565 - DNA, 33 bp, Homo sapien
ttattatgcgtgtaacaaataataccagaatta

SEQ ID NO: 846566 - DNA, 33 bp, Homo sapien
ttattatgcgtgtaaccaataataccagaatta

SEQ ID NO: 846567 - DNA, 33 bp, Homo sapien
attggaagtcatcatcaagcaattgtcaagata

SEQ ID NO: 846568 - DNA, 33 bp, Homo sapien
attggaagtcatcatcgagcaattgtcaagata

SEQ ID NO: 846569 - DNA, 33 bp, Homo sapien
ttaatggctatactaacttacaatcccaccaac

SEQ ID NO: 846570 - DNA, 33 bp, Homo sapien
ttaatggctatactaatttacaatcccaccaac

SEQ ID NO: 846571 - DNA, 33 bp, Homo sapien
gactttctttctccaaacatatgtcacaccatc

SEQ ID NO: 846572 - DNA, 33 bp, Homo sapien
gactttctttctccaagcatatgtcacaccatc

SEQ ID NO: 846573 - DNA, 33 bp, Homo sapien
gtattcattatttcacacgttatactctcataa

SEQ ID NO: 846574 - DNA, 33 bp, Homo sapien
gtattcattatttcacgcgttatactctcataa

SEQ ID NO: 846575 - DNA, 33 bp, Homo sapien
ctgtacctatgctaaaacctgctatttgtctcc

SEQ ID NO: 846576 - DNA, 33 bp, Homo sapien
ctgtacctatgctaaaccctgctatttgtctcc

SEQ ID NO: 846577 - DNA, 33 bp, Homo sapien
aagctatttgaaacccactctcagtagcttatt

SEQ ID NO: 846578 - DNA, 33 bp, Homo sapien
aagctatttgaaacccgctctcagtagcttatt

SEQ ID NO: 846579 - DNA, 33 bp, Homo sapien
gatgtgtttccatataagtctatttcactgaga

SEQ ID NO: 846580 - DNA, 33 bp, Homo sapien
gatgtgtttccatatatgtctatttcactgaga

SEQ ID NO: 846581 - DNA, 33 bp, Homo sapien
attactgaaccaaagaacatggaaatgatcaga

SEQ ID NO: 846582 - DNA, 33 bp, Homo sapien
attactgaaccaaagagcatggaaatgatcaga

SEQ ID NO: 846583 - DNA, 33 bp, Homo sapien
aattcagtttgatctcaacttttgcaggaaacc

SEQ ID NO: 846584 - DNA, 33 bp, Homo sapien
aattcagtttgatctcgacttttgcaggaaacc

SEQ ID NO: 846585 - DNA, 33 bp, Homo sapien
accttctctgctttacaccttgtcatatctgca

SEQ ID NO: 846586 - DNA, 33 bp, Homo sapien
accttctctgctttacgccttgtcatatctgca

SEQ ID NO: 846587 - DNA, 33 bp, Homo sapien
gtggtcaatggctatgcaaaataatagaggcca

SEQ ID NO: 846588 - DNA, 33 bp, Homo sapien
gtggtcaatggctatgtaaaataatagaggcca

SEQ ID NO: 846589 - DNA, 33 bp, Homo sapien
tataggttaagaagaaattacttgggcagataa

SEQ ID NO: 846590 - DNA, 33 bp, Homo sapien
tataggttaagaagaagttacttgggcagataa

SEQ ID NO: 846591 - DNA, 33 bp, Homo sapien
taacagtaaacctgctgaaaccttctgacttgt

SEQ ID NO: 846592 - DNA, 33 bp, Homo sapien
taacagtaaacctgcttaaaccttctgacttgt

SEQ ID NO: 846593 - DNA, 33 bp, Homo sapien
tatcatctatagctccactgcaaatagtagagt

SEQ ID NO: 846594 - DNA, 33 bp, Homo sapien
tatcatctatagctcctctgcaaatagtagagt

SEQ ID NO: 846595 - DNA, 33 bp, Homo sapien
gcaagtcaagattaacaccttaaatggaagcat

SEQ ID NO: 846596 - DNA, 33 bp, Homo sapien
gcaagtcaagattaactccttaaatggaagcat

SEQ ID NO: 846597 - DNA, 33 bp, Homo sapien
tttcggatgcctgctaaatgttagaggtttaaa

SEQ ID NO: 846598 - DNA, 33 bp, Homo sapien
tttcggatgcctgctagatgttagaggtttaaa

SEQ ID NO: 846599 - DNA, 33 bp, Homo sapien
cttttgccagtttgcacaggaagacagaagtca

SEQ ID NO: 846600 - DNA, 33 bp, Homo sapien
cttttgccagtttgcataggaagacagaagtca

SEQ ID NO: 846601 - DNA, 33 bp, Homo sapien
taggctctcaggtttacagaacaaatggcaaga

SEQ ID NO: 846602 - DNA, 33 bp, Homo sapien
taggctctcaggtttatagaacaaatggcaaga

SEQ ID NO: 846603 - DNA, 33 bp, Homo sapien
agcaactgagtataataagtctctaacccagta

SEQ ID NO: 846604 - DNA, 33 bp, Homo sapien
agcaactgagtataatgagtctctaacccagta

SEQ ID NO: 846605 - DNA, 33 bp, Homo sapien
ctgtagggaatcttacaaaaatcttacataatt

SEQ ID NO: 846606 - DNA, 33 bp, Homo sapien
ctgtagggaatcttaccaaaatcttacataatt

SEQ ID NO: 846607 - DNA, 33 bp, Homo sapien
aaatttcaactcttgaacataacatgaactaat

SEQ ID NO: 846608 - DNA, 33 bp, Homo sapien
aaatttcaactcttgaccataacatgaactaat

SEQ ID NO: 846609 - DNA, 33 bp, Homo sapien
gagagatgttgtttcaagaatatttgtgttcat

SEQ ID NO: 846610 - DNA, 33 bp, Homo sapien
gagagatgttgtttcaggaatatttgtgttcat

SEQ ID NO: 846611 - DNA, 33 bp, Homo sapien
tgggtaataattctggaccaagtacaaagcatt

SEQ ID NO: 846612 - DNA, 33 bp, Homo sapien
tgggtaataattctgggccaagtacaaagcatt

SEQ ID NO: 846613 - DNA, 33 bp, Homo sapien
tcttctgtctatagaacaaaataacgctgccta

SEQ ID NO: 846614 - DNA, 33 bp, Homo sapien
tcttctgtctatagaataaaataacgctgccta

SEQ ID NO: 846615 - DNA, 33 bp, Homo sapien
ttgctaggtactctgacctttttatttacaagc

SEQ ID NO: 846616 - DNA, 33 bp, Homo sapien
ttgctaggtactctgatctttttatttacaagc

SEQ ID NO: 846617 - DNA, 33 bp, Homo sapien
cataaaccttatcataactttcttagaccatgt

SEQ ID NO: 846618 - DNA, 33 bp, Homo sapien
cataaaccttatcatatctttcttagaccatgt

SEQ ID NO: 846619 - DNA, 33 bp, Homo sapien
ggagatggagagaagaataatggttatcagagg

SEQ ID NO: 846620 - DNA, 33 bp, Homo sapien
ggagatggagagaagagtaatggttatcagagg

SEQ ID NO: 846621 - DNA, 33 bp, Homo sapien
tctgaggagaggaaaaatgtttcagtaacagtt

SEQ ID NO: 846622 - DNA, 33 bp, Homo sapien
tctgaggagaggaaaagtgtttcagtaacagtt

SEQ ID NO: 846623 - DNA, 33 bp, Homo sapien
tagcgcacacaaaagaaatatgtaaacaggaca

SEQ ID NO: 846624 - DNA, 33 bp, Homo sapien
tagcgcacacaaaagagatatgtaaacaggaca

SEQ ID NO: 846625 - DNA, 33 bp, Homo sapien
ttggctgcattatcagaccaacaagatgagcca

SEQ ID NO: 846626 - DNA, 33 bp, Homo sapien
ttggctgcattatcaggccaacaagatgagcca

SEQ ID NO: 846627 - DNA, 33 bp, Homo sapien
gagatgatgaagggaaggttaccactgacccca

SEQ ID NO: 846628 - DNA, 33 bp, Homo sapien
gagatgatgaagggaatgttaccactgacccca

SEQ ID NO: 846629 - DNA, 33 bp, Homo sapien
ttcatttttgtctacccccctttgcatatccat

SEQ ID NO: 846630 - DNA, 33 bp, Homo sapien
ttcatttttgtctacctccctttgcatatccat

SEQ ID NO: 846631 - DNA, 33 bp, Homo sapien
gggctttgtcattcaaacttcatacatggaaat

SEQ ID NO: 846632 - DNA, 33 bp, Homo sapien
gggctttgtcattcaaccttcatacatggaaat

SEQ ID NO: 846633 - DNA, 33 bp, Homo sapien
atttacatttcagcccccttgtaggttctaata

SEQ ID NO: 846634 - DNA, 33 bp, Homo sapien
atttacatttcagccctcttgtaggttctaata

SEQ ID NO: 846635 - DNA, 33 bp, Homo sapien
cctgaacctgttcaagaaaaatagctcagatta

SEQ ID NO: 846636 - DNA, 33 bp, Homo sapien
cctgaacctgttcaaggaaaatagctcagatta

SEQ ID NO: 846637 - DNA, 33 bp, Homo sapien
tcttcttaggcgaaggaatttgaaagaactctt

SEQ ID NO: 846638 - DNA, 33 bp, Homo sapien
tcttcttaggcgaaggcatttgaaagaactctt

SEQ ID NO: 846639 - DNA, 33 bp, Homo sapien
agactctattttaaccaattttcttcagctcaa

SEQ ID NO: 846640 - DNA, 33 bp, Homo sapien
agactctattttaacccattttcttcagctcaa

SEQ ID NO: 846641 - DNA, 33 bp, Homo sapien
aataaacaggttcctaacaaattcagaacattt

SEQ ID NO: 846642 - DNA, 33 bp, Homo sapien
aataaacaggttcctagcaaattcagaacattt

SEQ ID NO: 846643 - DNA, 33 bp, Homo sapien
tacaaatcacgtgaaaaaagtaaatgataaaag

SEQ ID NO: 846644 - DNA, 33 bp, Homo sapien
tacaaatcacgtgaaagaagtaaatgataaaag

SEQ ID NO: 846645 - DNA, 33 bp, Homo sapien
atgataaaagtctgtgaaagtttagaaagaaaa

SEQ ID NO: 846646 - DNA, 33 bp, Homo sapien
atgataaaagtctgtggaagtttagaaagaaaa

SEQ ID NO: 846647 - DNA, 33 bp, Homo sapien
tttgccttaactaatcaaataatcattcctgtt

SEQ ID NO: 846648 - DNA, 33 bp, Homo sapien
tttgccttaactaatcgaataatcattcctgtt

SEQ ID NO: 846649 - DNA, 33 bp, Homo sapien
aggtgatgtcttaaccaatcttttaaattacat

SEQ ID NO: 846650 - DNA, 33 bp, Homo sapien
aggtgatgtcttaaccgatcttttaaattacat

SEQ ID NO: 846651 - DNA, 33 bp, Homo sapien
tagcaattggctgaacaacttattttaagctag

SEQ ID NO: 846652 - DNA, 33 bp, Homo sapien
tagcaattggctgaacgacttattttaagctag

SEQ ID NO: 846653 - DNA, 33 bp, Homo sapien
tattggaggatgtcgagcaaagaatgacgtgat

SEQ ID NO: 846654 - DNA, 33 bp, Homo sapien
tattggaggatgtcgatcaaagaatgacgtgat

SEQ ID NO: 846655 - DNA, 33 bp, Homo sapien
ttattttcgcattaacagtgctcttaaactgtg

SEQ ID NO: 846656 - DNA, 33 bp, Homo sapien
ttattttcgcattaacggtgctcttaaactgtg

SEQ ID NO: 846657 - DNA, 33 bp, Homo sapien
gaagtgagagctacgaaatggtaattctagggc

SEQ ID NO: 846658 - DNA, 33 bp, Homo sapien
gaagtgagagctacgacatggtaattctagggc

SEQ ID NO: 846659 - DNA, 33 bp, Homo sapien
ttaagtgtgacagagaaaaccataatgtggatt

SEQ ID NO: 846660 - DNA, 33 bp, Homo sapien
ttaagtgtgacagagagaaccataatgtggatt

SEQ ID NO: 846661 - DNA, 33 bp, Homo sapien
atctatattgaatccaacatcttaagttgcctg

SEQ ID NO: 846662 - DNA, 33 bp, Homo sapien
atctatattgaatccagcatcttaagttgcctg

SEQ ID NO: 846663 - DNA, 33 bp, Homo sapien
catttccaagaagcaacgcaaagtaagttttcc

SEQ ID NO: 846664 - DNA, 33 bp, Homo sapien
catttccaagaagcaatgcaaagtaagttttcc

SEQ ID NO: 846665 - DNA, 33 bp, Homo sapien
ttggttgtcaactcaaatatctcactatcacag

SEQ ID NO: 846666 - DNA, 33 bp, Homo sapien
ttggttgtcaactcaactatctcactatcacag

SEQ ID NO: 846667 - DNA, 33 bp, Homo sapien
taagatggcaatgccaatacttctcagaattat

SEQ ID NO: 846668 - DNA, 33 bp, Homo sapien
taagatggcaatgccactacttctcagaattat

SEQ ID NO: 846669 - DNA, 33 bp, Homo sapien
tccatctcaacgaaacaaagaagccctgaatac

SEQ ID NO: 846670 - DNA, 33 bp, Homo sapien
tccatctcaacgaaaccaagaagccctgaatac

SEQ ID NO: 846671 - DNA, 33 bp, Homo sapien
ctgggggcagctgccacgtacactggactgccc

SEQ ID NO: 846672 - DNA, 33 bp, Homo sapien
ctgggggcagctgccatgtacactggactgccc

SEQ ID NO: 846673 - DNA, 33 bp, Homo sapien
ccacgtggtgtaaaaaacaataatacatgattg

SEQ ID NO: 846674 - DNA, 33 bp, Homo sapien
ccacgtggtgtaaaaatcaataatacatgattg

SEQ ID NO: 846675 - DNA, 33 bp, Homo sapien
atcctgtattgacaaaattctctaataagcttt

SEQ ID NO: 846676 - DNA, 33 bp, Homo sapien
atcctgtattgacaaagttctctaataagcttt

SEQ ID NO: 846677 - DNA, 33 bp, Homo sapien
tattatttctgaatgacgagtttctttcttttc

SEQ ID NO: 846678 - DNA, 33 bp, Homo sapien
tattatttctgaatgatgagtttctttcttttc

SEQ ID NO: 846679 - DNA, 33 bp, Homo sapien
ctaggcttcaataatacggattccttctttatg

SEQ ID NO: 846680 - DNA, 33 bp, Homo sapien
ctaggcttcaataatatggattccttctttatg

SEQ ID NO: 846681 - DNA, 33 bp, Homo sapien
cagagttctttttttcaccatgcacagtggtgt

SEQ ID NO: 846682 - DNA, 33 bp, Homo sapien
cagagttctttttttcgccatgcacagtggtgt

SEQ ID NO: 846683 - DNA, 33 bp, Homo sapien
aaaatagtggttgttaccggtggcaacagtcca

SEQ ID NO: 846684 - DNA, 33 bp, Homo sapien
aaaatagtggttgttagcggtggcaacagtcca

SEQ ID NO: 846685 - DNA, 33 bp, Homo sapien
tctgttctttgtattcacatattttttttcttt

SEQ ID NO: 846686 - DNA, 33 bp, Homo sapien
tctgttctttgtattcgcatattttttttcttt

SEQ ID NO: 846687 - DNA, 33 bp, Homo sapien
gtaataaaactactaccaggtgaatgcccagtt

SEQ ID NO: 846688 - DNA, 33 bp, Homo sapien
gtaataaaactactactaggtgaatgcccagtt

SEQ ID NO: 846689 - DNA, 33 bp, Homo sapien
aggccatacctttgaaatctcactgttcatatg

SEQ ID NO: 846690 - DNA, 33 bp, Homo sapien
aggccatacctttgaattctcactgttcatatg

SEQ ID NO: 846691 - DNA, 33 bp, Homo sapien
tttcaagtggattctacgacatctaactttgag

SEQ ID NO: 846692 - DNA, 33 bp, Homo sapien
tttcaagtggattctaggacatctaactttgag

SEQ ID NO: 846693 - DNA, 33 bp, Homo sapien
gatcaaataatctaatcatggtttaggtacatc

SEQ ID NO: 846694 - DNA, 33 bp, Homo sapien
gatcaaataatctaatgatggtttaggtacatc

SEQ ID NO: 846695 - DNA, 33 bp, Homo sapien
tgtgttagacaaatcacatccagagcattgttt

SEQ ID NO: 846696 - DNA, 33 bp, Homo sapien
tgtgttagacaaatcatatccagagcattgttt

SEQ ID NO: 846697 - DNA, 33 bp, Homo sapien
gaagcttgattgattaagtctctgggaatgatt

SEQ ID NO: 846698 - DNA, 33 bp, Homo sapien
gaagcttgattgattatgtctctgggaatgatt

SEQ ID NO: 846699 - DNA, 33 bp, Homo sapien
ccttttagcaaaaatacgtcacctacaccatgt

SEQ ID NO: 846700 - DNA, 33 bp, Homo sapien
ccttttagcaaaaatatgtcacctacaccatgt

SEQ ID NO: 846701 - DNA, 33 bp, Homo sapien
ttcaagtcttatatccaacaatgtccaagcttt

SEQ ID NO: 846702 - DNA, 33 bp, Homo sapien
ttcaagtcttatatcccacaatgtccaagcttt

SEQ ID NO: 846703 - DNA, 33 bp, Homo sapien
ttggtgttttcttcacaaagtttttgcccacgc

SEQ ID NO: 846704 - DNA, 33 bp, Homo sapien
ttggtgttttcttcacgaagtttttgcccacgc

SEQ ID NO: 846705 - DNA, 33 bp, Homo sapien; identical to SEQ ID NO: 846703

SEQ ID NO: 846706 - DNA, 33 bp, Homo sapien; identical to SEQ ID NO: 846704

SEQ ID NO: 846707 - DNA, 33 bp, Homo sapien
aatataatcctcaaggccagagtttgagttgta

SEQ ID NO: 846708 - DNA, 33 bp, Homo sapien
aatataatcctcaaggtcagagtttgagttgta

SEQ ID NO: 846709 - DNA, 33 bp, Homo sapien
agctgatatatgaaaaaacataagtgacggtca

SEQ ID NO: 846710 - DNA, 33 bp, Homo sapien
agctgatatatgaaaagacataagtgacggtca

SEQ ID NO: 846711 - DNA, 33 bp, Homo sapien
taggagactacctaaaatgatcttcagattcca

SEQ ID NO: 846712 - DNA, 33 bp, Homo sapien
taggagactacctaaagtgatcttcagattcca

SEQ ID NO: 846713 - DNA, 33 bp, Homo sapien
ctcataccagatcttaggtaaaaggatttgagt

SEQ ID NO: 846714 - DNA, 33 bp, Homo sapien
ctcataccagatcttatgtaaaaggatttgagt

SEQ ID NO: 846715 - DNA, 33 bp, Homo sapien
taaaggtaatatctccagcatcgccttgatacc

SEQ ID NO: 846716 - DNA, 33 bp, Homo sapien
taaaggtaatatctccggcatcgccttgatacc

SEQ ID NO: 846717 - DNA, 33 bp, Homo sapien
actaacacattcaataaagtgaatcagatgcag

SEQ ID NO: 846718 - DNA, 33 bp, Homo sapien
actaacacattcaatagagtgaatcagatgcag

SEQ ID NO: 846719 - DNA, 33 bp, Homo sapien
tctgccattggcactgacaaaacctcccaaaca

SEQ ID NO: 846720 - DNA, 33 bp, Homo sapien
tctgccattggcactggcaaaacctcccaaaca

SEQ ID NO: 846721 - DNA, 33 bp, Homo sapien
tttccagttgtaaagaaccctcacagtcagtaa

SEQ ID NO: 846722 - DNA, 33 bp, Homo sapien
tttccagttgtaaagagccctcacagtcagtaa

SEQ ID NO: 846723 - DNA, 33 bp, Homo sapien
ttttgaaaatgcacttaaaaacggaacctttaa

SEQ ID NO: 846724 - DNA, 33 bp, Homo sapien
ttttgaaaatgcactttaaaacggaacctttaa

SEQ ID NO: 846725 - DNA, 33 bp, Homo sapien
tataaactcatgacacgaatactacaatcaaga

SEQ ID NO: 846726 - DNA, 33 bp, Homo sapien
tataaactcatgacactaatactacaatcaaga

SEQ ID NO: 846727 - DNA, 33 bp, Homo sapien
ccccaccaaaggacaacataactcaaggaaatt

SEQ ID NO: 846728 - DNA, 33 bp, Homo sapien
ccccaccaaaggacaatataactcaaggaaatt

SEQ ID NO: 846729 - DNA, 33 bp, Homo sapien
gaagcagagaatacaacggagcttgccaggggc

SEQ ID NO: 846730 - DNA, 33 bp, Homo sapien
gaagcagagaatacaatggagcttgccaggggc

SEQ ID NO: 846731 - DNA, 33 bp, Homo sapien
tttgtggaatcatgaaatccttttataactggc

SEQ ID NO: 846732 - DNA, 33 bp, Homo sapien
tttgtggaatcatgaagtccttttataactggc

SEQ ID NO: 846733 - DNA, 33 bp, Homo sapien
gtctcgctctggatgacggaaattttaaagaca

SEQ ID NO: 846734 - DNA, 33 bp, Homo sapien
gtctcgctctggatgatggaaattttaaagaca

SEQ ID NO: 846735 - DNA, 33 bp, Homo sapien
caaaggttagtttcaacaactcattctacgtat

SEQ ID NO: 846736 - DNA, 33 bp, Homo sapien
caaaggttagtttcaagaactcattctacgtat

SEQ ID NO: 846737 - DNA, 33 bp, Homo sapien
ttggtgtggaacaataataggctttctgttaaa

SEQ ID NO: 846738 - DNA, 33 bp, Homo sapien
ttggtgtggaacaatagtaggctttctgttaaa

SEQ ID NO: 846739 - DNA, 33 bp, Homo sapien
aaatgttcttttgatgcagttagtcctacaggg

SEQ ID NO: 846740 - DNA, 33 bp, Homo sapien
aaatgttcttttgatggagttagtcctacaggg

SEQ ID NO: 846741 - DNA, 33 bp, Homo sapien
atttaaggagcactaaactgtatcatttcctag

SEQ ID NO: 846742 - DNA, 33 bp, Homo sapien
atttaaggagcactaagctgtatcatttcctag

SEQ ID NO: 846743 - DNA, 33 bp, Homo sapien
aaggaaacctcaaaaagtgtgagctgctgttgt

SEQ ID NO: 846744 - DNA, 33 bp, Homo sapien
aaggaaacctcaaaaattgtgagctgctgttgt

SEQ ID NO: 846745 - DNA, 33 bp, Homo sapien
tagaatggcctagcaaagtgagcaaaaacttga

SEQ ID NO: 846746 - DNA, 33 bp, Homo sapien
tagaatggcctagcaatgtgagcaaaaacttga

SEQ ID NO: 846747 - DNA, 33 bp, Homo sapien
ttgtttttattttacaaggtcataggcagaagg

SEQ ID NO: 846748 - DNA, 33 bp, Homo sapien
ttgtttttattttacagggtcataggcagaagg

SEQ ID NO: 846749 - DNA, 33 bp, Homo sapien
ttcttttctgaatccaaagtgaattaggtgaat

SEQ ID NO: 846750 - DNA, 33 bp, Homo sapien
ttcttttctgaatccagagtgaattaggtgaat

SEQ ID NO: 846751 - DNA, 33 bp, Homo sapien
aaaaccatggccaaaaaattaatattcccacaa

SEQ ID NO: 846752 - DNA, 33 bp, Homo sapien
aaaaccatggccaaaacattaatattcccacaa

SEQ ID NO: 846753 - DNA, 33 bp, Homo sapien
agaggtaagaaagcacgcaagttcatttgcttc

SEQ ID NO: 846754 - DNA, 33 bp, Homo sapien
agaggtaagaaagcactcaagttcatttgcttc

SEQ ID NO: 846755 - DNA, 33 bp, Homo sapien
ctactctttgtgaaaaggtgaaatagaaataaa

SEQ ID NO: 846756 - DNA, 33 bp, Homo sapien
ctactctttgtgaaaatgtgaaatagaaataaa

SEQ ID NO: 846757 - DNA, 33 bp, Homo sapien
tctgaaaatgttggcacgggtgaataaaggatt

SEQ ID NO: 846758 - DNA, 33 bp, Homo sapien
tctgaaaatgttggcatgggtgaataaaggatt

SEQ ID NO: 846759 - DNA, 33 bp, Homo sapien
gaggaaactgcttatcaactgaaatctctaatg

SEQ ID NO: 846760 - DNA, 33 bp, Homo sapien
gaggaaactgcttatcgactgaaatctctaatg

SEQ ID NO: 846761 - DNA, 33 bp, Homo sapien
ccttgtagataagacaccaaagtgagttctgta

SEQ ID NO: 846762 - DNA, 33 bp, Homo sapien
ccttgtagataagacatcaaagtgagttctgta

SEQ ID NO: 846763 - DNA, 33 bp, Homo sapien
caggagccctgggtgacgctggaaattgaagga

SEQ ID NO: 846764 - DNA, 33 bp, Homo sapien
caggagccctgggtgatgctggaaattgaagga

SEQ ID NO: 846765 - DNA, 33 bp, Homo sapien
cattccttcttaaaatgacctgacttgccacat

SEQ ID NO: 846766 - DNA, 33 bp, Homo sapien
cattccttcttaaaattacctgacttgccacat

SEQ ID NO: 846767 - DNA, 33 bp, Homo sapien
agacatgttgcttatcgccatatttttctgcag

SEQ ID NO: 846768 - DNA, 33 bp, Homo sapien
agacatgttgcttatctccatatttttctgcag

SEQ ID NO: 846769 - DNA, 33 bp, Homo sapien
acaagtctaaaaagtcaaagggaaatcataagc

SEQ ID NO: 846770 - DNA, 33 bp, Homo sapien
acaagtctaaaaagtcgaagggaaatcataagc

SEQ ID NO: 846771 - DNA, 33 bp, Homo sapien
ttgatgctgcaatgtaccacagcgggccagcaa

SEQ ID NO: 846772 - DNA, 33 bp, Homo sapien
ttgatgctgcaatgtatcacagcgggccagcaa

SEQ ID NO: 846773 - DNA, 33 bp, Homo sapien
tctcacttgcctcagaactttccccagccttgc

SEQ ID NO: 846774 - DNA, 33 bp, Homo sapien
tctcacttgcctcagatctttccccagccttgc

SEQ ID NO: 846775 - DNA, 33 bp, Homo sapien
agggagcaaccccttacagcccagaggaatata

SEQ ID NO: 846776 - DNA, 33 bp, Homo sapien
agggagcaaccccttatagcccagaggaatata

SEQ ID NO: 846777 - DNA, 33 bp, Homo sapien
tgcaatcaagctaaaacttcaaaatttgtagac

SEQ ID NO: 846778 - DNA, 33 bp, Homo sapien
tgcaatcaagctaaaagttcaaaatttgtagac

SEQ ID NO: 846779 - DNA, 33 bp, Homo sapien
cacccactcttcagtgcagcaaagttgtggatg

SEQ ID NO: 846780 - DNA, 33 bp, Homo sapien
cacccactcttcagtggagcaaagttgtggatg

SEQ ID NO: 846781 - DNA, 33 bp, Homo sapien
accatcaacataccaaccacagcgcacagacta

SEQ ID NO: 846782 - DNA, 33 bp, Homo sapien
accatcaacataccaatcacagcgcacagacta

SEQ ID NO: 846783 - DNA, 33 bp, Homo sapien
ggccaggccacaggagaaatggaccggagtggg

SEQ ID NO: 846784 - DNA, 33 bp, Homo sapien
ggccaggccacaggaggaatggaccggagtggg

SEQ ID NO: 846785 - DNA, 33 bp, Homo sapien
cattgatgcctctctaagacctattatcaattg

SEQ ID NO: 846786 - DNA, 33 bp, Homo sapien
cattgatgcctctctatgacctattatcaattg

SEQ ID NO: 846787 - DNA, 33 bp, Homo sapien
ccctctccaattgccacggttagctgataatgc

SEQ ID NO: 846788 - DNA, 33 bp, Homo sapien
ccctctccaattgccatggttagctgataatgc

SEQ ID NO: 846789 - DNA, 33 bp, Homo sapien
gggacttgtcctgtatcagagtgagtctgtgcc

SEQ ID NO: 846790 - DNA, 33 bp, Homo sapien
gggacttgtcctgtattagagtgagtctgtgcc

SEQ ID NO: 846791 - DNA, 33 bp, Homo sapien
caatgtcttctaggagccattaggaattttcta

SEQ ID NO: 846792 - DNA, 33 bp, Homo sapien
caatgtcttctaggagtcattaggaattttcta

SEQ ID NO: 846793 - DNA, 33 bp, Homo sapien
tttgtttaatcactataaagtagctcctagaca

SEQ ID NO: 846794 - DNA, 33 bp, Homo sapien
tttgtttaatcactatgaagtagctcctagaca

SEQ ID NO: 846795 - DNA, 33 bp, Homo sapien
caccaccagcatcttaaacctttccttgcctcc

SEQ ID NO: 846796 - DNA, 33 bp, Homo sapien
caccaccagcatcttagacctttccttgcctcc

SEQ ID NO: 846797 - DNA, 33 bp, Homo sapien
aaagtgtgaataaaaaattagaaagtgcacagt

SEQ ID NO: 846798 - DNA, 33 bp, Homo sapien
aaagtgtgaataaaaagttagaaagtgcacagt

SEQ ID NO: 846799 - DNA, 33 bp, Homo sapien
caggtgtgcaccaccacatccttagcagagatg

SEQ ID NO: 846800 - DNA, 33 bp, Homo sapien
caggtgtgcaccaccatatccttagcagagatg

SEQ ID NO: 846801 - DNA, 33 bp, Homo sapien
caaaggaattgtagaactagccaatgtgtacca

SEQ ID NO: 846802 - DNA, 33 bp, Homo sapien
caaaggaattgtagaagtagccaatgtgtacca

SEQ ID NO: 846803 - DNA, 33 bp, Homo sapien
aacatctcatcagaccaagagattcaattgata

SEQ ID NO: 846804 - DNA, 33 bp, Homo sapien
aacatctcatcagacccagagattcaattgata

SEQ ID NO: 846805 - DNA, 33 bp, Homo sapien
cataataattgtgcaacgagaaaaatcttcaaa

SEQ ID NO: 846806 - DNA, 33 bp, Homo sapien
cataataattgtgcaatgagaaaaatcttcaaa

SEQ ID NO: 846807 - DNA, 33 bp, Homo sapien
tgtgagtgttttagagacctatattgttattct

SEQ ID NO: 846808 - DNA, 33 bp, Homo sapien
tgtgagtgttttagaggcctatattgttattct

SEQ ID NO: 846809 - DNA, 33 bp, Homo sapien
ttgggagcaggactaacagagagaaaagtatgt

SEQ ID NO: 846810 - DNA, 33 bp, Homo sapien
ttgggagcaggactaagagagagaaaagtatgt

SEQ ID NO: 846811 - DNA, 33 bp, Homo sapien
gggttggggctgtgataataggaagggtatttg

SEQ ID NO: 846812 - DNA, 33 bp, Homo sapien
gggttggggctgtgatgataggaagggtatttg

SEQ ID NO: 846813 - DNA, 33 bp, Homo sapien
acatatttccagtttaaatatcaaatacccttc

SEQ ID NO: 846814 - DNA, 33 bp, Homo sapien
acatatttccagtttagatatcaaatacccttc

SEQ ID NO: 846815 - DNA, 33 bp, Homo sapien
taagagaaaataaaaccagtcactggtgaggcc

SEQ ID NO: 846816 - DNA, 33 bp, Homo sapien
taagagaaaataaaactagtcactggtgaggcc

SEQ ID NO: 846817 - DNA, 33 bp, Homo sapien
ctcctgtctcctctcactagaaacaccgggagt

SEQ ID NO: 846818 - DNA, 33 bp, Homo sapien
ctcctgtctcctctcagtagaaacaccgggagt

SEQ ID NO: 846819 - DNA, 33 bp, Homo sapien
aagagccactgagaacaagcaaataaagattgc

SEQ ID NO: 846820 - DNA, 33 bp, Homo sapien
aagagccactgagaacgagcaaataaagattgc

SEQ ID NO: 846821 - DNA, 33 bp, Homo sapien
cataaggaaaaatgcacgaccttgaaatacatt

SEQ ID NO: 846822 - DNA, 33 bp, Homo sapien
cataaggaaaaatgcatgaccttgaaatacatt

SEQ ID NO: 846823 - DNA, 33 bp, Homo sapien
caaacacaattcagtaaagcagtatttttcagt

SEQ ID NO: 846824 - DNA, 33 bp, Homo sapien
caaacacaattcagtagagcagtatttttcagt

SEQ ID NO: 846825 - DNA, 33 bp, Homo sapien
attctgcaatagcaaaggagtgaacaagtcaat

SEQ ID NO: 846826 - DNA, 33 bp, Homo sapien
attctgcaatagcaaatgagtgaacaagtcaat

SEQ ID NO: 846827 - DNA, 33 bp, Homo sapien
agtgacagggattgaaatataaatgggaactgg

SEQ ID NO: 846828 - DNA, 33 bp, Homo sapien
agtgacagggattgaattataaatgggaactgg

SEQ ID NO: 846829 - DNA, 33 bp, Homo sapien
caattacagaaaagaaagacaaaaggcaaaggg

SEQ ID NO: 846830 - DNA, 33 bp, Homo sapien
caattacagaaaagaacgacaaaaggcaaaggg

SEQ ID NO: 846831 - DNA, 33 bp, Homo sapien
ttacttccttcaaagacgagtttattaagaata

SEQ ID NO: 846832 - DNA, 33 bp, Homo sapien
ttacttccttcaaagatgagtttattaagaata

SEQ ID NO: 846833 - DNA, 33 bp, Homo sapien
gttgaattccactgacaggaaagcattaagtaa

SEQ ID NO: 846834 - DNA, 33 bp, Homo sapien
gttgaattccactgactggaaagcattaagtaa

SEQ ID NO: 846835 - DNA, 33 bp, Homo sapien
aaaagataaattaggacactagggcccaagaaa

SEQ ID NO: 846836 - DNA, 33 bp, Homo sapien
aaaagataaattaggatactagggcccaagaaa

SEQ ID NO: 846837 - DNA, 33 bp, Homo sapien
caagatcatctttttaaagttccacatacgagt

SEQ ID NO: 846838 - DNA, 33 bp, Homo sapien
caagatcatctttttacagttccacatacgagt

SEQ ID NO: 846839 - DNA, 33 bp, Homo sapien
gttctctgtgttttcacaaataacaagattctt

SEQ ID NO: 846840 - DNA, 33 bp, Homo sapien
gttctctgtgttttcataaataacaagattctt

SEQ ID NO: 846841 - DNA, 33 bp, Homo sapien
aatgtaggcgagaacacgtagaaatcagatatc

SEQ ID NO: 846842 - DNA, 33 bp, Homo sapien
aatgtaggcgagaacatgtagaaatcagatatc

SEQ ID NO: 846843 - DNA, 33 bp, Homo sapien
gtttcactgtctcaagaatcctctatgatctgt

SEQ ID NO: 846844 - DNA, 33 bp, Homo sapien
gtttcactgtctcaagtatcctctatgatctgt

SEQ ID NO: 846845 - DNA, 33 bp, Homo sapien
ttctcttgacatttgaaagtttgattattacat

SEQ ID NO: 846846 - DNA, 33 bp, Homo sapien
ttctcttgacatttgagagtttgattattacat

SEQ ID NO: 846847 - DNA, 33 bp, Homo sapien
taataaaagaacagataagataggctacattaa

SEQ ID NO: 846848 - DNA, 33 bp, Homo sapien
taataaaagaacagatcagataggctacattaa

SEQ ID NO: 846849 - DNA, 33 bp, Homo sapien
agcttaggaatggtaaagcttcattgaattaaa

SEQ ID NO: 846850 - DNA, 33 bp, Homo sapien
agcttaggaatggtaacgcttcattgaattaaa

SEQ ID NO: 846851 - DNA, 33 bp, Homo sapien
agaaaatgaaaaatgacattggaagtgatattc

SEQ ID NO: 846852 - DNA, 33 bp, Homo sapien
agaaaatgaaaaatgagattggaagtgatattc

SEQ ID NO: 846853 - DNA, 33 bp, Homo sapien
agattgcatcgtttcagcaatgtaattttttaa

SEQ ID NO: 846854 - DNA, 33 bp, Homo sapien
agattgcatcgtttcatcaatgtaattttttaa

SEQ ID NO: 846855 - DNA, 33 bp, Homo sapien
attaaatggccaattcccctcagaactactgtt

SEQ ID NO: 846856 - DNA, 33 bp, Homo sapien
attaaatggccaattctcctcagaactactgtt

SEQ ID NO: 846857 - DNA, 33 bp, Homo sapien
atatatttctgaagaagaaaaaggatgagaaaa

SEQ ID NO: 846858 - DNA, 33 bp, Homo sapien
atatatttctgaagaataaaaaggatgagaaaa

SEQ ID NO: 846859 - DNA, 33 bp, Homo sapien
aatatgatagcctttacaggaaaaagtgcataa

SEQ ID NO: 846860 - DNA, 33 bp, Homo sapien
aatatgatagcctttataggaaaaagtgcataa

SEQ ID NO: 846861 - DNA, 33 bp, Homo sapien
tctcaatcctggaaatcagccaggcttacttct

SEQ ID NO: 846862 - DNA, 33 bp, Homo sapien
tctcaatcctggaaatgagccaggcttacttct

SEQ ID NO: 846863 - DNA, 33 bp, Homo sapien
tgttcccttctttgcaaatatatgtatcagtga

SEQ ID NO: 846864 - DNA, 33 bp, Homo sapien
tgttcccttctttgcacatatatgtatcagtga

SEQ ID NO: 846865 - DNA, 33 bp, Homo sapien
tgcagtcttgtcaggacctattgttttctgctt

SEQ ID NO: 846866 - DNA, 33 bp, Homo sapien
tgcagtcttgtcaggatctattgttttctgctt

SEQ ID NO: 846867 - DNA, 33 bp, Homo sapien
tgtagtaatttctaaggaaaagaggtctatttg

SEQ ID NO: 846868 - DNA, 33 bp, Homo sapien
tgtagtaatttctaagtaaaagaggtctatttg

SEQ ID NO: 846869 - DNA, 33 bp, Homo sapien
tacatactccattttgaatgttgtcagaatatg

SEQ ID NO: 846870 - DNA, 33 bp, Homo sapien
tacatactccattttggatgttgtcagaatatg

SEQ ID NO: 846871 - DNA, 33 bp, Homo sapien
gaactatcttttggaaagttttaatgtgaaaag

SEQ ID NO: 846872 - DNA, 33 bp, Homo sapien
gaactatcttttggaacgttttaatgtgaaaag

SEQ ID NO: 846873 - DNA, 33 bp, Homo sapien
ttgtttttacaagctcaaacaagactgagtatt

SEQ ID NO: 846874 - DNA, 33 bp, Homo sapien
ttgtttttacaagctcgaacaagactgagtatt

SEQ ID NO: 846875 - DNA, 33 bp, Homo sapien
ctttaatattctagccacattattctcattttc

SEQ ID NO: 846876 - DNA, 33 bp, Homo sapien
ctttaatattctagcctcattattctcattttc

SEQ ID NO: 846877 - DNA, 33 bp, Homo sapien
atttgtgtatgctgaaacatccttacatccttg

SEQ ID NO: 846878 - DNA, 33 bp, Homo sapien
atttgtgtatgctgaaccatccttacatccttg

SEQ ID NO: 846879 - DNA, 33 bp, Homo sapien
taaaggagttatccatcacctcaagtacttatc

SEQ ID NO: 846880 - DNA, 33 bp, Homo sapien
taaaggagttatccattacctcaagtacttatc

SEQ ID NO: 846881 - DNA, 33 bp, Homo sapien
gtatatatgaatggggaacctgttttaatacag

SEQ ID NO: 846882 - DNA, 33 bp, Homo sapien
gtatatatgaatggggtacctgttttaatacag

SEQ ID NO: 846883 - DNA, 33 bp, Homo sapien
ctgagaaacgagcccccacaatctagtcaccac

SEQ ID NO: 846884 - DNA, 33 bp, Homo sapien
ctgagaaacgagcccctacaatctagtcaccac

SEQ ID NO: 846885 - DNA, 33 bp, Homo sapien
gagtgtaatgacagaaaaattcacttgagataa

SEQ ID NO: 846886 - DNA, 33 bp, Homo sapien
gagtgtaatgacagaacaattcacttgagataa

SEQ ID NO: 846887 - DNA, 33 bp, Homo sapien
gaccatagaaacacaacctcaatagtttttgcc

SEQ ID NO: 846888 - DNA, 33 bp, Homo sapien
gaccatagaaacacaatctcaatagtttttgcc

SEQ ID NO: 846889 - DNA, 33 bp, Homo sapien
taatacgcaattcttacgttttattgttattca

SEQ ID NO: 846890 - DNA, 33 bp, Homo sapien
taatacgcaattcttatgttttattgttattca

SEQ ID NO: 846891 - DNA, 33 bp, Homo sapien
aggagttgtctgctaccgaattctccactgaaa

SEQ ID NO: 846892 - DNA, 33 bp, Homo sapien
aggagttgtctgctactgaattctccactgaaa

SEQ ID NO: 846893 - DNA, 33 bp, Homo sapien
atatagtatcctgacactcaacatgacttttaa

SEQ ID NO: 846894 - DNA, 33 bp, Homo sapien
atatagtatcctgacattcaacatgacttttaa

SEQ ID NO: 846895 - DNA, 33 bp, Homo sapien
cttgtgaacatcatcactattgtctgtattatc

SEQ ID NO: 846896 - DNA, 33 bp, Homo sapien
cttgtgaacatcatcattattgtctgtattatc

SEQ ID NO: 846897 - DNA, 33 bp, Homo sapien
tgcatgagaccttagtcacgtgtttatacagta

SEQ ID NO: 846898 - DNA, 33 bp, Homo sapien
tgcatgagaccttagttacgtgtttatacagta

SEQ ID NO: 846899 - DNA, 33 bp, Homo sapien
gttggaagtgactgaaggataagtatgtagaaa

SEQ ID NO: 846900 - DNA, 33 bp, Homo sapien
gttggaagtgactgaatgataagtatgtagaaa

SEQ ID NO: 846901 - DNA, 33 bp, Homo sapien
gtggctataaattaaaatacatccttgagaaat

SEQ ID NO: 846902 - DNA, 33 bp, Homo sapien
gtggctataaattaaagtacatccttgagaaat

SEQ ID NO: 846903 - DNA, 33 bp, Homo sapien
ttgtttattcatttcagtagactaattttgtcg

SEQ ID NO: 846904 - DNA, 33 bp, Homo sapien
ttgtttattcatttcattagactaattttgtcg

SEQ ID NO: 846905 - DNA, 33 bp, Homo sapien
aactggcaaactttggaaaaatcacgacaaaat

SEQ ID NO: 846906 - DNA, 33 bp, Homo sapien
aactggcaaactttgggaaaatcacgacaaaat

SEQ ID NO: 846907 - DNA, 33 bp, Homo sapien
ttgcaccaacctaatacattaaggaacatctat

SEQ ID NO: 846908 - DNA, 33 bp, Homo sapien
ttgcaccaacctaatagattaaggaacatctat

SEQ ID NO: 846909 - DNA, 33 bp, Homo sapien
gagagtagctaagttcaagaaactttcatttaa

SEQ ID NO: 846910 - DNA, 33 bp, Homo sapien
gagagtagctaagttcgagaaactttcatttaa

SEQ ID NO: 846911 - DNA, 33 bp, Homo sapien
atgatttgttaagtacaagtctagataatcatc

SEQ ID NO: 846912 - DNA, 33 bp, Homo sapien
atgatttgttaagtaccagtctagataatcatc

SEQ ID NO: 846913 - DNA, 33 bp, Homo sapien
ctatgtagatctacaacgttaactaagcgaatg

SEQ ID NO: 846914 - DNA, 33 bp, Homo sapien
ctatgtagatctacaatgttaactaagcgaatg

SEQ ID NO: 846915 - DNA, 33 bp, Homo sapien
ctatgcctaggggaagaaaagctaaaacagaat

SEQ ID NO: 846916 - DNA, 33 bp, Homo sapien
ctatgcctaggggaaggaaagctaaaacagaat

SEQ ID NO: 846917 - DNA, 33 bp, Homo sapien
tatttttatcagtagacagtttaagacacagct

SEQ ID NO: 846918 - DNA, 33 bp, Homo sapien
tatttttatcagtagagagtttaagacacagct

SEQ ID NO: 846919 - DNA, 33 bp, Homo sapien
gcatgctgtataatcacggtgcagattttttca

SEQ ID NO: 846920 - DNA, 33 bp, Homo sapien
gcatgctgtataatcatggtgcagattttttca

SEQ ID NO: 846921 - DNA, 33 bp, Homo sapien
ccatttgtgaattggaatattggttatttgctt

SEQ ID NO: 846922 - DNA, 33 bp, Homo sapien
ccatttgtgaattggattattggttatttgctt

SEQ ID NO: 846923 - DNA, 33 bp, Homo sapien
acactgccggtttgaacaggagtttaaaatctt

SEQ ID NO: 846924 - DNA, 33 bp, Homo sapien
acactgccggtttgaataggagtttaaaatctt

SEQ ID NO: 846925 - DNA, 33 bp, Homo sapien
cagatcttgccataaaatgactcataatcttct

SEQ ID NO: 846926 - DNA, 33 bp, Homo sapien
cagatcttgccataaagtgactcataatcttct

SEQ ID NO: 846927 - DNA, 33 bp, Homo sapien
agaatagatacaaccacggaaagaataagtgaa

SEQ ID NO: 846928 - DNA, 33 bp, Homo sapien
agaatagatacaaccatggaaagaataagtgaa

SEQ ID NO: 846929 - DNA, 33 bp, Homo sapien
ctcctgttttagccaaattatcattttagtgag

SEQ ID NO: 846930 - DNA, 33 bp, Homo sapien
ctcctgttttagccaagttatcattttagtgag

SEQ ID NO: 846931 - DNA, 33 bp, Homo sapien
gcagtgactgtgctcacatacccagtataccac

SEQ ID NO: 846932 - DNA, 33 bp, Homo sapien
gcagtgactgtgctcatatacccagtataccac

SEQ ID NO: 846933 - DNA, 33 bp, Homo sapien
ggtgataacactcaaactgggtgacctgggggg

SEQ ID NO: 846934 - DNA, 33 bp, Homo sapien
ggtgataacactcaaattgggtgacctgggggg

SEQ ID NO: 846935 - DNA, 33 bp, Homo sapien
gataattttactgtcaaaggcttagctcagcac

SEQ ID NO: 846936 - DNA, 33 bp, Homo sapien
gataattttactgtcataggcttagctcagcac

SEQ ID NO: 846937 - DNA, 33 bp, Homo sapien
cacattagcttcccagaaatagttcttaaccag

SEQ ID NO: 846938 - DNA, 33 bp, Homo sapien
cacattagcttcccaggaatagttcttaaccag

SEQ ID NO: 846939 - DNA, 33 bp, Homo sapien
taccctcaaagtccaacgattatacagttttta

SEQ ID NO: 846940 - DNA, 33 bp, Homo sapien
taccctcaaagtccaatgattatacagttttta

SEQ ID NO: 846941 - DNA, 33 bp, Homo sapien
aactacggatagtgccaaattctatataccgtg

SEQ ID NO: 846942 - DNA, 33 bp, Homo sapien
aactacggatagtgccgaattctatataccgtg

SEQ ID NO: 846943 - DNA, 33 bp, Homo sapien
cctatcaccatttaacaacgggactgtctttct

SEQ ID NO: 846944 - DNA, 33 bp, Homo sapien
cctatcaccatttaacgacgggactgtctttct

SEQ ID NO: 846945 - DNA, 33 bp, Homo sapien
aatctagaagacataccccctttcctagacttt

SEQ ID NO: 846946 - DNA, 33 bp, Homo sapien
aatctagaagacatactccctttcctagacttt

SEQ ID NO: 846947 - DNA, 33 bp, Homo sapien
cagtatttagactggccaactggaccccaaagt

SEQ ID NO: 846948 - DNA, 33 bp, Homo sapien
cagtatttagactggctaactggaccccaaagt

SEQ ID NO: 846949 - DNA, 33 bp, Homo sapien
ttctatcgattaaagcaagtttcaggcccacct

SEQ ID NO: 846950 - DNA, 33 bp, Homo sapien
ttctatcgattaaagcgagtttcaggcccacct

SEQ ID NO: 846951 - DNA, 33 bp, Homo sapien
cttgcagagaactctacgatgtgtcgaaatact

SEQ ID NO: 846952 - DNA, 33 bp, Homo sapien
cttgcagagaactctatgatgtgtcgaaatact

SEQ ID NO: 846953 - DNA, 33 bp, Homo sapien
ccagttcactttaaggcatcttggagaaataga

SEQ ID NO: 846954 - DNA, 33 bp, Homo sapien
ccagttcactttaagggatcttggagaaataga

SEQ ID NO: 846955 - DNA, 33 bp, Homo sapien
tctaccactgaaaataacaactagaaatgctga

SEQ ID NO: 846956 - DNA, 33 bp, Homo sapien
tctaccactgaaaatatcaactagaaatgctga

SEQ ID NO: 846957 - DNA, 33 bp, Homo sapien
tgaactcatgatggagaacttggaaaaacagat

SEQ ID NO: 846958 - DNA, 33 bp, Homo sapien
tgaactcatgatggagcacttggaaaaacagat

SEQ ID NO: 846959 - DNA, 33 bp, Homo sapien
gaaaatgatattcccaataactacagagaggag

SEQ ID NO: 846960 - DNA, 33 bp, Homo sapien
gaaaatgatattcccagtaactacagagaggag

SEQ ID NO: 846961 - DNA, 33 bp, Homo sapien
tgggaaattgacactcactttttaagataatgg

SEQ ID NO: 846962 - DNA, 33 bp, Homo sapien
tgggaaattgacactcgctttttaagataatgg

SEQ ID NO: 846963 - DNA, 33 bp, Homo sapien
tcaaacagggttgataaaaatgttccacactgt

SEQ ID NO: 846964 - DNA, 33 bp, Homo sapien
tcaaacagggttgatacaaatgttccacactgt

SEQ ID NO: 846965 - DNA, 33 bp, Homo sapien
tgtctcctaagtaataagtcatgttatttccat

SEQ ID NO: 846966 - DNA, 33 bp, Homo sapien
tgtctcctaagtaataggtcatgttatttccat

SEQ ID NO: 846967 - DNA, 33 bp, Homo sapien
acatgggccggtgaccaactagtcacttttgta

SEQ ID NO: 846968 - DNA, 33 bp, Homo sapien
acatgggccggtgaccgactagtcacttttgta

SEQ ID NO: 846969 - DNA, 33 bp, Homo sapien
tctcagcatacttacactgaaattcctccatgt

SEQ ID NO: 846970 - DNA, 33 bp, Homo sapien
tctcagcatacttacattgaaattcctccatgt

SEQ ID NO: 846971 - DNA, 33 bp, Homo sapien
actggtagcgcagaaaaacaaagaattgtgaga

SEQ ID NO: 846972 - DNA, 33 bp, Homo sapien
actggtagcgcagaaacacaaagaattgtgaga

SEQ ID NO: 846973 - DNA, 33 bp, Homo sapien
aacatacaatctgcgaagaccaaatcatgaaga

SEQ ID NO: 846974 - DNA, 33 bp, Homo sapien
aacatacaatctgcgaggaccaaatcatgaaga

SEQ ID NO: 846975 - DNA, 33 bp, Homo sapien
tagtaaacagtttagaaattgatttgtaaggta

SEQ ID NO: 846976 - DNA, 33 bp, Homo sapien
tagtaaacagtttagagattgatttgtaaggta

SEQ ID NO: 846977 - DNA, 33 bp, Homo sapien
ttaacagagcaaagaaggtttttatatcagtga

SEQ ID NO: 846978 - DNA, 33 bp, Homo sapien
ttaacagagcaaagaatgtttttatatcagtga

SEQ ID NO: 846979 - DNA, 33 bp, Homo sapien
actttataacatcctgaaaaaggtaaaggtatg

SEQ ID NO: 846980 - DNA, 33 bp, Homo sapien
actttataacatcctggaaaaggtaaaggtatg

SEQ ID NO: 846981 - DNA, 33 bp, Homo sapien
catactgtatggttccaactttataacatcctg

SEQ ID NO: 846982 - DNA, 33 bp, Homo sapien
catactgtatggttcccactttataacatcctg

SEQ ID NO: 846983 - DNA, 33 bp, Homo sapien
gctttggattgccttgcaatgaaatgggcagta

SEQ ID NO: 846984 - DNA, 33 bp, Homo sapien
gctttggattgccttgtaatgaaatgggcagta

SEQ ID NO: 846985 - DNA, 33 bp, Homo sapien
accactgagtgaaacacgtacagaaaagacaaa

SEQ ID NO: 846986 - DNA, 33 bp, Homo sapien
accactgagtgaaacaggtacagaaaagacaaa

SEQ ID NO: 846987 - DNA, 33 bp, Homo sapien
tctttgttacgtaaaagagatgagaaaatgtta

SEQ ID NO: 846988 - DNA, 33 bp, Homo sapien
tctttgttacgtaaaatagatgagaaaatgtta

SEQ ID NO: 846989 - DNA, 33 bp, Homo sapien
ttatgcatgaaggaaactgaacgtcacgaaatt

SEQ ID NO: 846990 - DNA, 33 bp, Homo sapien
ttatgcatgaaggaaattgaacgtcacgaaatt

SEQ ID NO: 846991 - DNA, 33 bp, Homo sapien
tattgaaatgtctaccagcagtatctaattcaa

SEQ ID NO: 846992 - DNA, 33 bp, Homo sapien
tattgaaatgtctaccggcagtatctaattcaa

SEQ ID NO: 846993 - DNA, 33 bp, Homo sapien
cagttgatgcctgagagcatgtttgtaacataa

SEQ ID NO: 846994 - DNA, 33 bp, Homo sapien
cagttgatgcctgagatcatgtttgtaacataa

SEQ ID NO: 846995 - DNA, 33 bp, Homo sapien
ttaaaatcagtgaagaactgctctatcaattaa

SEQ ID NO: 846996 - DNA, 33 bp, Homo sapien
ttaaaatcagtgaagagctgctctatcaattaa

SEQ ID NO: 846997 - DNA, 33 bp, Homo sapien
ttctgtagagagtaacagattagtgttttctgg

SEQ ID NO: 846998 - DNA, 33 bp, Homo sapien
ttctgtagagagtaaccgattagtgttttctgg

SEQ ID NO: 846999 - DNA, 33 bp, Homo sapien
aatatcactaataatcagagaaatgtgaatcaa

SEQ ID NO: 847000 - DNA, 33 bp, Homo sapien
aatatcactaataatcggagaaatgtgaatcaa

SEQ ID NO: 847001 - DNA, 33 bp, Homo sapien
aggggagttccgctacacagttatcttgcctgc

SEQ ID NO: 847002 - DNA, 33 bp, Homo sapien
aggggagttccgctacgcagttatcttgcctgc

SEQ ID NO: 847003 - DNA, 33 bp, Homo sapien
agctttgaacaattgaataaagtataatcctat

SEQ ID NO: 847004 - DNA, 33 bp, Homo sapien
agctttgaacaattgagtaaagtataatcctat

SEQ ID NO: 847005 - DNA, 33 bp, Homo sapien
gctaagccctagctaccgaacggcttttcgtgt

SEQ ID NO: 847006 - DNA, 33 bp, Homo sapien
gctaagccctagctactgaacggcttttcgtgt

SEQ ID NO: 847007 - DNA, 33 bp, Homo sapien
acctaattgtcatttaagaaacatttcacacca

SEQ ID NO: 847008 - DNA, 33 bp, Homo sapien
acctaattgtcatttaggaaacatttcacacca

SEQ ID NO: 847009 - DNA, 33 bp, Homo sapien
tagaactctctcgtaaggctaatctcatggtaa

SEQ ID NO: 847010 - DNA, 33 bp, Homo sapien
tagaactctctcgtaatgctaatctcatggtaa

SEQ ID NO: 847011 - DNA, 33 bp, Homo sapien
aatttgaagttttctacctcttcttctttcatc

SEQ ID NO: 847012 - DNA, 33 bp, Homo sapien
aatttgaagttttctagctcttcttctttcatc

SEQ ID NO: 847013 - DNA, 33 bp, Homo sapien
tttactcaatatattaagtgtggctatgaacaa

SEQ ID NO: 847014 - DNA, 33 bp, Homo sapien
tttactcaatatattatgtgtggctatgaacaa

SEQ ID NO: 847015 - DNA, 33 bp, Homo sapien
actaatttttagctaactcctctattgttttca

SEQ ID NO: 847016 - DNA, 33 bp, Homo sapien
actaatttttagctaattcctctattgttttca

SEQ ID NO: 847017 - DNA, 33 bp, Homo sapien
tattctccatagcttcacattgcaaaagttaaa

SEQ ID NO: 847018 - DNA, 33 bp, Homo sapien
tattctccatagcttcgcattgcaaaagttaaa

SEQ ID NO: 847019 - DNA, 33 bp, Homo sapien
tactagaggcttttgaaacaagattcagtttgc

SEQ ID NO: 847020 - DNA, 33 bp, Homo sapien
tactagaggcttttgagacaagattcagtttgc

SEQ ID NO: 847021 - DNA, 33 bp, Homo sapien
tcttcattatgacccagctggttacccacagct

SEQ ID NO: 847022 - DNA, 33 bp, Homo sapien
tcttcattatgacccatctggttacccacagct

SEQ ID NO: 847023 - DNA, 33 bp, Homo sapien
tggatagaacgagagaccattatccttagcaaa

SEQ ID NO: 847024 - DNA, 33 bp, Homo sapien
tggatagaacgagagatcattatccttagcaaa

SEQ ID NO: 847025 - DNA, 33 bp, Homo sapien
tttcaactcttaagcacctaaaattcattttct

SEQ ID NO: 847026 - DNA, 33 bp, Homo sapien
tttcaactcttaagcatctaaaattcattttct

SEQ ID NO: 847027 - DNA, 33 bp, Homo sapien
ctgatagaaggtgcaaacactagatttataaat

SEQ ID NO: 847028 - DNA, 33 bp, Homo sapien
ctgatagaaggtgcaagcactagatttataaat

SEQ ID NO: 847029 - DNA, 33 bp, Homo sapien
tttaccttgacctcacagctggcctccaaatta

SEQ ID NO: 847030 - DNA, 33 bp, Homo sapien
tttaccttgacctcacggctggcctccaaatta

SEQ ID NO: 847031 - DNA, 33 bp, Homo sapien
gcaaaatgacacattaaaaacaaacacaatctg

SEQ ID NO: 847032 - DNA, 33 bp, Homo sapien
gcaaaatgacacattagaaacaaacacaatctg

SEQ ID NO: 847033 - DNA, 33 bp, Homo sapien
cagagcctaaggtctaactatgtcaaaaggaag

SEQ ID NO: 847034 - DNA, 33 bp, Homo sapien
cagagcctaaggtctagctatgtcaaaaggaag

SEQ ID NO: 847035 - DNA, 33 bp, Homo sapien
tgagagacaaaagtgcaacataatacaactaca

SEQ ID NO: 847036 - DNA, 33 bp, Homo sapien
tgagagacaaaagtgcgacataatacaactaca

SEQ ID NO: 847037 - DNA, 33 bp, Homo sapien
gtgtgattgatatgaggaggtcaaaatatctac

SEQ ID NO: 847038 - DNA, 33 bp, Homo sapien
gtgtgattgatatgagtaggtcaaaatatctac

SEQ ID NO: 847039 - DNA, 33 bp, Homo sapien
taattcttatctttgccactttgtgtgtaaact

SEQ ID NO: 847040 - DNA, 33 bp, Homo sapien
taattcttatctttgctactttgtgtgtaaact

SEQ ID NO: 847041 - DNA, 33 bp, Homo sapien
tttcctacaaacaacaatagtcctccagcaaag

SEQ ID NO: 847042 - DNA, 33 bp, Homo sapien
tttcctacaaacaacactagtcctccagcaaag

SEQ ID NO: 847043 - DNA, 33 bp, Homo sapien
atgtttctcaatcttcaaagttggaattctttg

SEQ ID NO: 847044 - DNA, 33 bp, Homo sapien
atgtttctcaatcttcgaagttggaattctttg

SEQ ID NO: 847045 - DNA, 33 bp, Homo sapien
ggaactaagtcctacaaatatggcagagctaaa

SEQ ID NO: 847046 - DNA, 33 bp, Homo sapien
ggaactaagtcctacagatatggcagagctaaa

SEQ ID NO: 847047 - DNA, 33 bp, Homo sapien
aatctaagcatagatacataatagcttgactgg

SEQ ID NO: 847048 - DNA, 33 bp, Homo sapien
aatctaagcatagatagataatagcttgactgg

SEQ ID NO: 847049 - DNA, 33 bp, Homo sapien
tatcatgggtgaaagcagcatgtgaaaccttgt

SEQ ID NO: 847050 - DNA, 33 bp, Homo sapien
tatcatgggtgaaagcggcatgtgaaaccttgt

SEQ ID NO: 847051 - DNA, 33 bp, Homo sapien
agcatgtaggtaagaacggataatctcacccct

SEQ ID NO: 847052 - DNA, 33 bp, Homo sapien
agcatgtaggtaagaatggataatctcacccct

SEQ ID NO: 847053 - DNA, 33 bp, Homo sapien
cctctgatttccaaaaaccaactgtaaagtgac

SEQ ID NO: 847054 - DNA, 33 bp, Homo sapien
cctctgatttccaaaacccaactgtaaagtgac

SEQ ID NO: 847055 - DNA, 33 bp, Homo sapien
ctgtgtttaccaaaagaataagtcaatgtgggt

SEQ ID NO: 847056 - DNA, 33 bp, Homo sapien
ctgtgtttaccaaaaggataagtcaatgtgggt

SEQ ID NO: 847057 - DNA, 33 bp, Homo sapien
taaaaacattttgtgacaaagcgttccgggtat

SEQ ID NO: 847058 - DNA, 33 bp, Homo sapien
taaaaacattttgtgataaagcgttccgggtat

SEQ ID NO: 847059 - DNA, 33 bp, Homo sapien
accctgctcaataaaagcacttacatttcacaa

SEQ ID NO: 847060 - DNA, 33 bp, Homo sapien
accctgctcaataaaatcacttacatttcacaa

SEQ ID NO: 847061 - DNA, 33 bp, Homo sapien
tataggcatatggtgacgaaactttatataact

SEQ ID NO: 847062 - DNA, 33 bp, Homo sapien
tataggcatatggtgatgaaactttatataact

SEQ ID NO: 847063 - DNA, 33 bp, Homo sapien
tgagttgcaaaccatccaattacactgtttaag

SEQ ID NO: 847064 - DNA, 33 bp, Homo sapien
tgagttgcaaaccatctaattacactgtttaag

SEQ ID NO: 847065 - DNA, 33 bp, Homo sapien
atctgaaattgttccaaaggtctttgatattct

SEQ ID NO: 847066 - DNA, 33 bp, Homo sapien
atctgaaattgttccataggtctttgatattct

SEQ ID NO: 847067 - DNA, 33 bp, Homo sapien
tatacaacttcctgcacattgatggtttccaag

SEQ ID NO: 847068 - DNA, 33 bp, Homo sapien
tatacaacttcctgcatattgatggtttccaag

SEQ ID NO: 847069 - DNA, 33 bp, Homo sapien
gtttatatatctttgaactaaattgcttattac

SEQ ID NO: 847070 - DNA, 33 bp, Homo sapien
gtttatatatctttgacctaaattgcttattac

SEQ ID NO: 847071 - DNA, 33 bp, Homo sapien
tattttccaaaacttacccagctgtatcttcat

SEQ ID NO: 847072 - DNA, 33 bp, Homo sapien
tattttccaaaacttatccagctgtatcttcat

SEQ ID NO: 847073 - DNA, 33 bp, Homo sapien
atatgcacacaaattacgtaaaaactgcaaaca

SEQ ID NO: 847074 - DNA, 33 bp, Homo sapien
atatgcacacaaattaggtaaaaactgcaaaca

SEQ ID NO: 847075 - DNA, 33 bp, Homo sapien
tgtacatttgtgtataagtgtttgcagttttta

SEQ ID NO: 847076 - DNA, 33 bp, Homo sapien
tgtacatttgtgtatatgtgtttgcagttttta

SEQ ID NO: 847077 - DNA, 33 bp, Homo sapien
tgccagacttctttcccaagtactttcaaacaa

SEQ ID NO: 847078 - DNA, 33 bp, Homo sapien
tgccagacttctttcctaagtactttcaaacaa

SEQ ID NO: 847079 - DNA, 33 bp, Homo sapien
atcacaggtatttctacgacacaatagtattgg

SEQ ID NO: 847080 - DNA, 33 bp, Homo sapien
atcacaggtatttctatgacacaatagtattgg

SEQ ID NO: 847081 - DNA, 33 bp, Homo sapien
taacaaaccttgttaaccttagaaaatatacaa

SEQ ID NO: 847082 - DNA, 33 bp, Homo sapien
taacaaaccttgttaatcttagaaaatatacaa

SEQ ID NO: 847083 - DNA, 33 bp, Homo sapien
ctactctatgtttcaaaaaaggtactggtcact

SEQ ID NO: 847084 - DNA, 33 bp, Homo sapien
ctactctatgtttcaagaaaggtactggtcact

SEQ ID NO: 847085 - DNA, 33 bp, Homo sapien
caaattctgagccatacgctttaacagggaaaa

SEQ ID NO: 847086 - DNA, 33 bp, Homo sapien
caaattctgagccatatgctttaacagggaaaa

SEQ ID NO: 847087 - DNA, 33 bp, Homo sapien
ttttaacagaggcagcccagaatatggtggctc

SEQ ID NO: 847088 - DNA, 33 bp, Homo sapien
ttttaacagaggcagcgcagaatatggtggctc

SEQ ID NO: 847089 - DNA, 33 bp, Homo sapien
atatatagtaggttgaaaaggtgaatagaaaat

SEQ ID NO: 847090 - DNA, 33 bp, Homo sapien
atatatagtaggttgagaaggtgaatagaaaat

SEQ ID NO: 847091 - DNA, 33 bp, Homo sapien
cattcagcttattgtacgattctgttccttgcc

SEQ ID NO: 847092 - DNA, 33 bp, Homo sapien
cattcagcttattgtaggattctgttccttgcc

SEQ ID NO: 847093 - DNA, 33 bp, Homo sapien
aaaatcagggtgttagaactgtcgggtcctggc

SEQ ID NO: 847094 - DNA, 33 bp, Homo sapien
aaaatcagggtgttagcactgtcgggtcctggc

SEQ ID NO: 847095 - DNA, 33 bp, Homo sapien
tttgttgtttatagacaccagtttgaagtgctt

SEQ ID NO: 847096 - DNA, 33 bp, Homo sapien
tttgttgtttatagactccagtttgaagtgctt

SEQ ID NO: 847097 - DNA, 33 bp, Homo sapien
ctagtgttcatggggaaagactcttatggcttg

SEQ ID NO: 847098 - DNA, 33 bp, Homo sapien
ctagtgttcatggggagagactcttatggcttg

SEQ ID NO: 847099 - DNA, 33 bp, Homo sapien
attctgcccatgtaagaaaaagtatccttcttc

SEQ ID NO: 847100 - DNA, 33 bp, Homo sapien
attctgcccatgtaaggaaaagtatccttcttc

SEQ ID NO: 847101 - DNA, 33 bp, Homo sapien
ctccttttctgtgatacgttttgaaaataattt

SEQ ID NO: 847102 - DNA, 33 bp, Homo sapien
ctccttttctgtgatatgttttgaaaataattt

SEQ ID NO: 847103 - DNA, 33 bp, Homo sapien
cttgtagatcacagcaaaattgggcagaaagaa

SEQ ID NO: 847104 - DNA, 33 bp, Homo sapien
cttgtagatcacagcagaattgggcagaaagaa

SEQ ID NO: 847105 - DNA, 33 bp, Homo sapien
gagcgcaaaactaccgaaggcaacagtcttggt

SEQ ID NO: 847106 - DNA, 33 bp, Homo sapien
gagcgcaaaactaccggaggcaacagtcttggt

SEQ ID NO: 847107 - DNA, 33 bp, Homo sapien
ctgaatcttgtagttacgttattaaagcctaaa

SEQ ID NO: 847108 - DNA, 33 bp, Homo sapien
ctgaatcttgtagttatgttattaaagcctaaa

SEQ ID NO: 847109 - DNA, 33 bp, Homo sapien
agaaacgataattataacaaagacaagacagca

SEQ ID NO: 847110 - DNA, 33 bp, Homo sapien
agaaacgataattatagcaaagacaagacagca

SEQ ID NO: 847111 - DNA, 33 bp, Homo sapien
ctatcatataattaagcctcagaaatctgtttt

SEQ ID NO: 847112 - DNA, 33 bp, Homo sapien
ctatcatataattaagtctcagaaatctgtttt

SEQ ID NO: 847113 - DNA, 33 bp, Homo sapien
cctgctcagaggacctaacattcctgtcttttt

SEQ ID NO: 847114 - DNA, 33 bp, Homo sapien
cctgctcagaggaccttacattcctgtcttttt

SEQ ID NO: 847115 - DNA, 33 bp, Homo sapien
ggatttgtagtgggtactaagtgagaggccagg

SEQ ID NO: 847116 - DNA, 33 bp, Homo sapien
ggatttgtagtgggtattaagtgagaggccagg

SEQ ID NO: 847117 - DNA, 33 bp, Homo sapien
gtcccgggcattgaccaaacactgaaggaaggc

SEQ ID NO: 847118 - DNA, 33 bp, Homo sapien
gtcccgggcattgaccgaacactgaaggaaggc

SEQ ID NO: 847119 - DNA, 33 bp, Homo sapien
tcagctaagacaggaactagccgtttttcttct

SEQ ID NO: 847120 - DNA, 33 bp, Homo sapien
tcagctaagacaggaattagccgtttttcttct

SEQ ID NO: 847121 - DNA, 33 bp, Homo sapien
attagttgcatcgaacacatattagtgaactat

SEQ ID NO: 847122 - DNA, 33 bp, Homo sapien
attagttgcatcgaacgcatattagtgaactat

SEQ ID NO: 847123 - DNA, 33 bp, Homo sapien
ttatgtcaagtttttcccacaatccacatacat

SEQ ID NO: 847124 - DNA, 33 bp, Homo sapien
ttatgtcaagtttttctcacaatccacatacat

SEQ ID NO: 847125 - DNA, 33 bp, Homo sapien
aaagaaaaaatgaacaacacacaaggaaggttc

SEQ ID NO: 847126 - DNA, 33 bp, Homo sapien
aaagaaaaaatgaacagcacacaaggaaggttc

SEQ ID NO: 847127 - DNA, 33 bp, Homo sapien
ctctagggtgtctgtacataaattatttggctt

SEQ ID NO: 847128 - DNA, 33 bp, Homo sapien
ctctagggtgtctgtagataaattatttggctt

SEQ ID NO: 847129 - DNA, 33 bp, Homo sapien
aatacctgtgcatctacactgatataaatacat

SEQ ID NO: 847130 - DNA, 33 bp, Homo sapien
aatacctgtgcatctatactgatataaatacat

SEQ ID NO: 847131 - DNA, 33 bp, Homo sapien
atggcaacatggaaagaatgaagaggtatatta

SEQ ID NO: 847132 - DNA, 33 bp, Homo sapien
atggcaacatggaaaggatgaagaggtatatta

SEQ ID NO: 847133 - DNA, 33 bp, Homo sapien
aaactccactggattaactctgcacattttgaa

SEQ ID NO: 847134 - DNA, 33 bp, Homo sapien
aaactccactggattacctctgcacattttgaa

SEQ ID NO: 847135 - DNA, 33 bp, Homo sapien
tacaaaccagctcctgaaatcagcttagtaaat

SEQ ID NO: 847136 - DNA, 33 bp, Homo sapien
tacaaaccagctcctggaatcagcttagtaaat

SEQ ID NO: 847137 - DNA, 33 bp, Homo sapien
ttgcttgctaccctcccaagttaggtctgttca

SEQ ID NO: 847138 - DNA, 33 bp, Homo sapien
ttgcttgctaccctcctaagttaggtctgttca

SEQ ID NO: 847139 - DNA, 33 bp, Homo sapien
aaaaacaaaaactaaacaagcagatggtttgag

SEQ ID NO: 847140 - DNA, 33 bp, Homo sapien
aaaaacaaaaactaaataagcagatggtttgag

SEQ ID NO: 847141 - DNA, 33 bp, Homo sapien
gggtagaacaaatgtgaaataagaaaggaccct

SEQ ID NO: 847142 - DNA, 33 bp, Homo sapien
gggtagaacaaatgtgcaataagaaaggaccct

SEQ ID NO: 847143 - DNA, 33 bp, Homo sapien
attataagatgaccaaattatgcaatggcattg

SEQ ID NO: 847144 - DNA, 33 bp, Homo sapien
attataagatgaccaagttatgcaatggcattg

SEQ ID NO: 847145 - DNA, 33 bp, Homo sapien
ctcactgtctcttatgacagcaaaacaagaggg

SEQ ID NO: 847146 - DNA, 33 bp, Homo sapien
ctcactgtctcttatggcagcaaaacaagaggg

SEQ ID NO: 847147 - DNA, 33 bp, Homo sapien
ataaaggtggcttaatcagctggttggtctcca

SEQ ID NO: 847148 - DNA, 33 bp, Homo sapien
ataaaggtggcttaattagctggttggtctcca

SEQ ID NO: 847149 - DNA, 33 bp, Homo sapien
ttcatatacttggcaactggagtagcccccaca

SEQ ID NO: 847150 - DNA, 33 bp, Homo sapien
ttcatatacttggcaattggagtagcccccaca

SEQ ID NO: 847151 - DNA, 33 bp, Homo sapien
taaaacagatggcataataaggtaggctagttt

SEQ ID NO: 847152 - DNA, 33 bp, Homo sapien
taaaacagatggcatactaaggtaggctagttt

SEQ ID NO: 847153 - DNA, 33 bp, Homo sapien
cactctaggacaaggaacaataagaatttgact

SEQ ID NO: 847154 - DNA, 33 bp, Homo sapien
cactctaggacaaggagcaataagaatttgact

SEQ ID NO: 847155 - DNA, 33 bp, Homo sapien
ttccatggctctaagacgtggctgtattacagt

SEQ ID NO: 847156 - DNA, 33 bp, Homo sapien
ttccatggctctaagatgtggctgtattacagt

SEQ ID NO: 847157 - DNA, 33 bp, Homo sapien
agccaaaccttatcaaatgtatacatcaattta

SEQ ID NO: 847158 - DNA, 33 bp, Homo sapien
agccaaaccttatcaagtgtatacatcaattta

SEQ ID NO: 847159 - DNA, 33 bp, Homo sapien
tttgaagtgacgaagcacatagggcacagaatt

SEQ ID NO: 847160 - DNA, 33 bp, Homo sapien
tttgaagtgacgaagctcatagggcacagaatt

SEQ ID NO: 847161 - DNA, 33 bp, Homo sapien
gttcaaatttcaaaaggctactttcactgctga

SEQ ID NO: 847162 - DNA, 33 bp, Homo sapien
gttcaaatttcaaaagtctactttcactgctga

SEQ ID NO: 847163 - DNA, 33 bp, Homo sapien
tcagatgtttttcaaacttagcccatcctggtc

SEQ ID NO: 847164 - DNA, 33 bp, Homo sapien
tcagatgtttttcaaatttagcccatcctggtc

SEQ ID NO: 847165 - DNA, 33 bp, Homo sapien
cacataataaataggcagaacggcaatcagact

SEQ ID NO: 847166 - DNA, 33 bp, Homo sapien
cacataataaataggcggaacggcaatcagact

SEQ ID NO: 847167 - DNA, 33 bp, Homo sapien
tgcatgtacctaattaaagaatttccagcaatg

SEQ ID NO: 847168 - DNA, 33 bp, Homo sapien
tgcatgtacctaattagagaatttccagcaatg

SEQ ID NO: 847169 - DNA, 33 bp, Homo sapien
tgaaataaatatcctgaaagtcataattagata

SEQ ID NO: 847170 - DNA, 33 bp, Homo sapien
tgaaataaatatcctggaagtcataattagata

SEQ ID NO: 847171 - DNA, 33 bp, Homo sapien
ccatctctttgggaaggcatataactgagcact

SEQ ID NO: 847172 - DNA, 33 bp, Homo sapien
ccatctctttgggaagtcatataactgagcact

SEQ ID NO: 847173 - DNA, 33 bp, Homo sapien
gcatcataagtaaagacgagctgaatgctaata

SEQ ID NO: 847174 - DNA, 33 bp, Homo sapien
gcatcataagtaaagaggagctgaatgctaata

SEQ ID NO: 847175 - DNA, 33 bp, Homo sapien
tgtattacatcactgggaatccattcatttagt

SEQ ID NO: 847176 - DNA, 33 bp, Homo sapien
tgtattacatcactggtaatccattcatttagt

SEQ ID NO: 847177 - DNA, 33 bp, Homo sapien
tacctcgaccatttatcagcattagttttagtg

SEQ ID NO: 847178 - DNA, 33 bp, Homo sapien
tacctcgaccatttattagcattagttttagtg

SEQ ID NO: 847179 - DNA, 33 bp, Homo sapien
aaaatgcagttgactggacctgtgtagatataa

SEQ ID NO: 847180 - DNA, 33 bp, Homo sapien
aaaatgcagttgactgtacctgtgtagatataa

SEQ ID NO: 847181 - DNA, 33 bp, Homo sapien
aaaggactcttaaaaccaagtttcaaacctctt

SEQ ID NO: 847182 - DNA, 33 bp, Homo sapien
aaaggactcttaaaactaagtttcaaacctctt

SEQ ID NO: 847183 - DNA, 33 bp, Homo sapien
aatcaaagagttgaagaaacttacctaaagacc

SEQ ID NO: 847184 - DNA, 33 bp, Homo sapien
aatcaaagagttgaagtaacttacctaaagacc

SEQ ID NO: 847185 - DNA, 33 bp, Homo sapien
aatgctgatgttgttcaatgcctgtttattcat

SEQ ID NO: 847186 - DNA, 33 bp, Homo sapien
aatgctgatgttgttcgatgcctgtttattcat

SEQ ID NO: 847187 - DNA, 33 bp, Homo sapien
tgaaatctgataaccaaagatgttccagagatt

SEQ ID NO: 847188 - DNA, 33 bp, Homo sapien
tgaaatctgataaccagagatgttccagagatt

SEQ ID NO: 847189 - DNA, 33 bp, Homo sapien
gttttatgagtattcacggtgaaaatctcttat

SEQ ID NO: 847190 - DNA, 33 bp, Homo sapien
gttttatgagtattcagggtgaaaatctcttat

SEQ ID NO: 847191 - DNA, 33 bp, Homo sapien
gatagaggaagggtcacaagtatcttagcacat

SEQ ID NO: 847192 - DNA, 33 bp, Homo sapien
gatagaggaagggtcataagtatcttagcacat

SEQ ID NO: 847193 - DNA, 33 bp, Homo sapien
tttctctggacaagagcagaaaataggagtgag

SEQ ID NO: 847194 - DNA, 33 bp, Homo sapien
tttctctggacaagagtagaaaataggagtgag

SEQ ID NO: 847195 - DNA, 33 bp, Homo sapien
gatctgattaggacaaaaatggaagggcaatta

SEQ ID NO: 847196 - DNA, 33 bp, Homo sapien
gatctgattaggacaagaatggaagggcaatta

SEQ ID NO: 847197 - DNA, 33 bp, Homo sapien
tagtgagagattgcctgaacatcataaaaaata

SEQ ID NO: 847198 - DNA, 33 bp, Homo sapien
tagtgagagattgccttaacatcataaaaaata

SEQ ID NO: 847199 - DNA, 33 bp, Homo sapien
gtctcctagaattcaaaacaccttctttcaaaa

SEQ ID NO: 847200 - DNA, 33 bp, Homo sapien
gtctcctagaattcaacacaccttctttcaaaa

SEQ ID NO: 847201 - DNA, 33 bp, Homo sapien
ctgttcttgtaatagcaaataagcctcacaaaa

SEQ ID NO: 847202 - DNA, 33 bp, Homo sapien
ctgttcttgtaatagcgaataagcctcacaaaa

SEQ ID NO: 847203 - DNA, 33 bp, Homo sapien
tttctgaacacggggacggcagaagaaggaaat

SEQ ID NO: 847204 - DNA, 33 bp, Homo sapien
tttctgaacacggggatggcagaagaaggaaat

SEQ ID NO: 847205 - DNA, 33 bp, Homo sapien
ttattgatttggcaaacgactttctctccatcc

SEQ ID NO: 847206 - DNA, 33 bp, Homo sapien
ttattgatttggcaaatgactttctctccatcc

SEQ ID NO: 847207 - DNA, 33 bp, Homo sapien
gtgatttgagagttagaatctggaaacggtgtc

SEQ ID NO: 847208 - DNA, 33 bp, Homo sapien
gtgatttgagagttaggatctggaaacggtgtc

SEQ ID NO: 847209 - DNA, 33 bp, Homo sapien
tctgtggatgttttgaaaacaagaggtagatag

SEQ ID NO: 847210 - DNA, 33 bp, Homo sapien
tctgtggatgttttgagaacaagaggtagatag

SEQ ID NO: 847211 - DNA, 33 bp, Homo sapien
tacagtgtcatgattacctctggctctgagttc

SEQ ID NO: 847212 - DNA, 33 bp, Homo sapien
tacagtgtcatgattatctctggctctgagttc

SEQ ID NO: 847213 - DNA, 33 bp, Homo sapien
tgatgagtcaaaataaaaggtggtggttgtgtg

SEQ ID NO: 847214 - DNA, 33 bp, Homo sapien
tgatgagtcaaaataacaggtggtggttgtgtg

SEQ ID NO: 847215 - DNA, 33 bp, Homo sapien
tgcacgagcatccacaagtaatgagtgatccct

SEQ ID NO: 847216 - DNA, 33 bp, Homo sapien
tgcacgagcatccacacgtaatgagtgatccct

SEQ ID NO: 847217 - DNA, 33 bp, Homo sapien
atatgttagcaaaatgccatggtcctgctttcc

SEQ ID NO: 847218 - DNA, 33 bp, Homo sapien
atatgttagcaaaatgtcatggtcctgctttcc

SEQ ID NO: 847219 - DNA, 33 bp, Homo sapien
gatcaatcaccaactaaaggtaaacagtgaaag

SEQ ID NO: 847220 - DNA, 33 bp, Homo sapien
gatcaatcaccaactataggtaaacagtgaaag

SEQ ID NO: 847221 - DNA, 33 bp, Homo sapien
taacattaaccattccaagtgttgaaaaataac

SEQ ID NO: 847222 - DNA, 33 bp, Homo sapien
taacattaaccattccgagtgttgaaaaataac

SEQ ID NO: 847223 - DNA, 33 bp, Homo sapien
ttctgcctagatgataagtctaacactgtcact

SEQ ID NO: 847224 - DNA, 33 bp, Homo sapien
ttctgcctagatgatatgtctaacactgtcact

SEQ ID NO: 847225 - DNA, 33 bp, Homo sapien
gtttctcacccagttaaaatttccaggcagttt

SEQ ID NO: 847226 - DNA, 33 bp, Homo sapien
gtttctcacccagttagaatttccaggcagttt

SEQ ID NO: 847227 - DNA, 33 bp, Homo sapien
catatcacatctaagagaacatattgtagcaca

SEQ ID NO: 847228 - DNA, 33 bp, Homo sapien
catatcacatctaagataacatattgtagcaca

SEQ ID NO: 847229 - DNA, 33 bp, Homo sapien
gttcaatatatagttcaacatcccagactttat

SEQ ID NO: 847230 - DNA, 33 bp, Homo sapien
gttcaatatatagttcgacatcccagactttat

SEQ ID NO: 847231 - DNA, 33 bp, Homo sapien
tacagaaatgcagtgtaaagactgacaaacaaa

SEQ ID NO: 847232 - DNA, 33 bp, Homo sapien
tacagaaatgcagtgtgaagactgacaaacaaa

SEQ ID NO: 847233 - DNA, 33 bp, Homo sapien
tgtgacatttcttctcacctgtagtaagacagg

SEQ ID NO: 847234 - DNA, 33 bp, Homo sapien
tgtgacatttcttctctcctgtagtaagacagg

SEQ ID NO: 847235 - DNA, 33 bp, Homo sapien
taaactaggatactcaagtttgtcattaatggg

SEQ ID NO: 847236 - DNA, 33 bp, Homo sapien
taaactaggatactcatgtttgtcattaatggg

SEQ ID NO: 847237 - DNA, 33 bp, Homo sapien
aatcaatttacccaaactctcacagtacatagt

SEQ ID NO: 847238 - DNA, 33 bp, Homo sapien
aatcaatttacccaaattctcacagtacatagt

SEQ ID NO: 847239 - DNA, 33 bp, Homo sapien
tttctatgtatgggaacttataagccctgagtc

SEQ ID NO: 847240 - DNA, 33 bp, Homo sapien
tttctatgtatgggaatttataagccctgagtc

SEQ ID NO: 847241 - DNA, 33 bp, Homo sapien
tgaggtgatcaaatgaagtaatagttgtgaaca

SEQ ID NO: 847242 - DNA, 33 bp, Homo sapien
tgaggtgatcaaatgaggtaatagttgtgaaca

SEQ ID NO: 847243 - DNA, 33 bp, Homo sapien
aaagtggaatattgcacgagagaggaattcaaa

SEQ ID NO: 847244 - DNA, 33 bp, Homo sapien
aaagtggaatattgcatgagagaggaattcaaa

SEQ ID NO: 847245 - DNA, 33 bp, Homo sapien
attgtattggtattagcatgttttgtcccttta

SEQ ID NO: 847246 - DNA, 33 bp, Homo sapien
attgtattggtattagtatgttttgtcccttta

SEQ ID NO: 847247 - DNA, 33 bp, Homo sapien
gctcatagaatgtcacaaaactttaactacaga

SEQ ID NO: 847248 - DNA, 33 bp, Homo sapien
gctcatagaatgtcacgaaactttaactacaga

SEQ ID NO: 847249 - DNA, 33 bp, Homo sapien
aatataaaaagtgctacatttgtgagtagacag

SEQ ID NO: 847250 - DNA, 33 bp, Homo sapien
aatataaaaagtgctatatttgtgagtagacag

SEQ ID NO: 847251 - DNA, 33 bp, Homo sapien
gtgtaaggctcattcaatcagttaaaggccata

SEQ ID NO: 847252 - DNA, 33 bp, Homo sapien
gtgtaaggctcattcagtcagttaaaggccata

SEQ ID NO: 847253 - DNA, 33 bp, Homo sapien
gccaaacaatcattaaatgtaggtaacccatat

SEQ ID NO: 847254 - DNA, 33 bp, Homo sapien
gccaaacaatcattaagtgtaggtaacccatat

SEQ ID NO: 847255 - DNA, 33 bp, Homo sapien
caagaacagaaaatgaaaaaccacatgttctca

SEQ ID NO: 847256 - DNA, 33 bp, Homo sapien
caagaacagaaaatgagaaaccacatgttctca

SEQ ID NO: 847257 - DNA, 33 bp, Homo sapien
tgcaaggatggcttaaagtatgcaaatcaacca

SEQ ID NO: 847258 - DNA, 33 bp, Homo sapien
tgcaaggatggcttaacgtatgcaaatcaacca

SEQ ID NO: 847259 - DNA, 33 bp, Homo sapien
attcaacattccttcacgatgaaaaccctcaaa

SEQ ID NO: 847260 - DNA, 33 bp, Homo sapien
attcaacattccttcatgatgaaaaccctcaaa

SEQ ID NO: 847261 - DNA, 33 bp, Homo sapien
tggtgtccttgtggatgaatgatggagttttct

SEQ ID NO: 847262 - DNA, 33 bp, Homo sapien
tggtgtccttgtggattaatgatggagttttct

SEQ ID NO: 847263 - DNA, 33 bp, Homo sapien
agtactttcccaaagcggagaaatagagaaaaa

SEQ ID NO: 847264 - DNA, 33 bp, Homo sapien
agtactttcccaaagctgagaaatagagaaaaa

SEQ ID NO: 847265 - DNA, 33 bp, Homo sapien
cagataatgcttaagaaacccagtaattacgtt

SEQ ID NO: 847266 - DNA, 33 bp, Homo sapien
cagataatgcttaagagacccagtaattacgtt

SEQ ID NO: 847267 - DNA, 33 bp, Homo sapien
gagggagtttataaaaagccatgagaaaacttt

SEQ ID NO: 847268 - DNA, 33 bp, Homo sapien
gagggagtttataaaaggccatgagaaaacttt

SEQ ID NO: 847269 - DNA, 33 bp, Homo sapien
tatgcttcaagacccaaatctaatagttctctc

SEQ ID NO: 847270 - DNA, 33 bp, Homo sapien
tatgcttcaagacccagatctaatagttctctc

SEQ ID NO: 847271 - DNA, 33 bp, Homo sapien
acctctgcttcgatgaacctggaaaagtttcag

SEQ ID NO: 847272 - DNA, 33 bp, Homo sapien
acctctgcttcgatgagcctggaaaagtttcag

SEQ ID NO: 847273 - DNA, 33 bp, Homo sapien
atgagagacttttcataacgggttcaatcgtac

SEQ ID NO: 847274 - DNA, 33 bp, Homo sapien
atgagagacttttcatcacgggttcaatcgtac

SEQ ID NO: 847275 - DNA, 33 bp, Homo sapien
gtttatctgtgcatacaattaacgtttattgaa

SEQ ID NO: 847276 - DNA, 33 bp, Homo sapien
gtttatctgtgcatacgattaacgtttattgaa

SEQ ID NO: 847277 - DNA, 33 bp, Homo sapien
tacaggctattgtgccaaagatggaaaatcgca

SEQ ID NO: 847278 - DNA, 33 bp, Homo sapien
tacaggctattgtgccgaagatggaaaatcgca

SEQ ID NO: 847279 - DNA, 33 bp, Homo sapien
attggtttccaagacaataggttgcttgaagaa

SEQ ID NO: 847280 - DNA, 33 bp, Homo sapien
attggtttccaagacagtaggttgcttgaagaa

SEQ ID NO: 847281 - DNA, 33 bp, Homo sapien
tgaggatacatctaacagtctcaaatgcatgaa

SEQ ID NO: 847282 - DNA, 33 bp, Homo sapien
tgaggatacatctaactgtctcaaatgcatgaa

SEQ ID NO: 847283 - DNA, 33 bp, Homo sapien
aaaaatctgttgctgaaaatatctagtgtgaac

SEQ ID NO: 847284 - DNA, 33 bp, Homo sapien
aaaaatctgttgctgacaatatctagtgtgaac

SEQ ID NO: 847285 - DNA, 33 bp, Homo sapien
gattacaaacaggtgcgcatttggacaagctct

SEQ ID NO: 847286 - DNA, 33 bp, Homo sapien
gattacaaacaggtgctcatttggacaagctct

SEQ ID NO: 847287 - DNA, 33 bp, Homo sapien
aaaagctaaagaggggaagagcttgtccaaatg

SEQ ID NO: 847288 - DNA, 33 bp, Homo sapien
aaaagctaaagagggggagagcttgtccaaatg

SEQ ID NO: 847289 - DNA, 33 bp, Homo sapien
aataaatcttatgtaacgtgataaaggagaaag

SEQ ID NO: 847290 - DNA, 33 bp, Homo sapien
aataaatcttatgtaatgtgataaaggagaaag

SEQ ID NO: 847291 - DNA, 33 bp, Homo sapien
tagaccacatttttaaatccaattgtccattaa

SEQ ID NO: 847292 - DNA, 33 bp, Homo sapien
tagaccacatttttaagtccaattgtccattaa

SEQ ID NO: 847293 - DNA, 33 bp, Homo sapien
gacaatattatacaacagaactgactctgggat

SEQ ID NO: 847294 - DNA, 33 bp, Homo sapien
gacaatattatacaacggaactgactctgggat

SEQ ID NO: 847295 - DNA, 33 bp, Homo sapien
tctcctgagaactaggaaaaatacatttgtcat

SEQ ID NO: 847296 - DNA, 33 bp, Homo sapien
tctcctgagaactagggaaaatacatttgtcat

SEQ ID NO: 847297 - DNA, 33 bp, Homo sapien
cctaatatgttgctggcagatggtaaaagaatt

SEQ ID NO: 847298 - DNA, 33 bp, Homo sapien
cctaatatgttgctggtagatggtaaaagaatt

SEQ ID NO: 847299 - DNA, 33 bp, Homo sapien
ttatacttggtaaatggcactggaacttgagaa

SEQ ID NO: 847300 - DNA, 33 bp, Homo sapien
ttatacttggtaaatgtcactggaacttgagaa

SEQ ID NO: 847301 - DNA, 33 bp, Homo sapien
ttaatttgaaggcttacatatgttatgatctga

SEQ ID NO: 847302 - DNA, 33 bp, Homo sapien
ttaatttgaaggcttatatatgttatgatctga

SEQ ID NO: 847303 - DNA, 33 bp, Homo sapien
taatttttgaaggttcaacttctcaacttttta

SEQ ID NO: 847304 - DNA, 33 bp, Homo sapien
taatttttgaaggttcgacttctcaacttttta

SEQ ID NO: 847305 - DNA, 33 bp, Homo sapien
gacaggggaggaattacatgatttggctatgtg

SEQ ID NO: 847306 - DNA, 33 bp, Homo sapien
gacaggggaggaattatatgatttggctatgtg

SEQ ID NO: 847307 - DNA, 33 bp, Homo sapien
cacctacttttggggaatatattagtccattct

SEQ ID NO: 847308 - DNA, 33 bp, Homo sapien
cacctacttttggggagtatattagtccattct

SEQ ID NO: 847309 - DNA, 33 bp, Homo sapien
agtccaatcaccaataacacacctacttttggg

SEQ ID NO: 847310 - DNA, 33 bp, Homo sapien
agtccaatcaccaatagcacacctacttttggg

SEQ ID NO: 847311 - DNA, 33 bp, Homo sapien
aaatggaagtgctaaaactataagatctgtaga

SEQ ID NO: 847312 - DNA, 33 bp, Homo sapien
aaatggaagtgctaaagctataagatctgtaga

SEQ ID NO: 847313 - DNA, 33 bp, Homo sapien
ttccccgcctcaggtaacatttaattgctgaga

SEQ ID NO: 847314 - DNA, 33 bp, Homo sapien
ttccccgcctcaggtaccatttaattgctgaga

SEQ ID NO: 847315 - DNA, 33 bp, Homo sapien
aatggacacatatagaacgagatgctgtctata

SEQ ID NO: 847316 - DNA, 33 bp, Homo sapien
aatggacacatatagagcgagatgctgtctata

SEQ ID NO: 847317 - DNA, 33 bp, Homo sapien
tcaataactataataaatggagagtcataaaga

SEQ ID NO: 847318 - DNA, 33 bp, Homo sapien
tcaataactataataagtggagagtcataaaga

SEQ ID NO: 847319 - DNA, 33 bp, Homo sapien
ttcatatacttcgcccacttttcgatgtttttt

SEQ ID NO: 847320 - DNA, 33 bp, Homo sapien
ttcatatacttcgcccgcttttcgatgtttttt

SEQ ID NO: 847321 - DNA, 33 bp, Homo sapien
attggtacataccttgaacttacacgagttgta

SEQ ID NO: 847322 - DNA, 33 bp, Homo sapien
attggtacataccttgcacttacacgagttgta

SEQ ID NO: 847323 - DNA, 33 bp, Homo sapien
gttacacccatacaccgctttaggataacatag

SEQ ID NO: 847324 - DNA, 33 bp, Homo sapien
gttacacccatacacctctttaggataacatag

SEQ ID NO: 847325 - DNA, 33 bp, Homo sapien
cactaattcttcagtacaattcagagctttctt

SEQ ID NO: 847326 - DNA, 33 bp, Homo sapien
cactaattcttcagtataattcagagctttctt

SEQ ID NO: 847327 - DNA, 33 bp, Homo sapien
gtttcttccgagtttgcaagctgatatcaccaa

SEQ ID NO: 847328 - DNA, 33 bp, Homo sapien
gtttcttccgagtttgtaagctgatatcaccaa

SEQ ID NO: 847329 - DNA, 33 bp, Homo sapien
tctaataaatcaattccccatcttctttccact

SEQ ID NO: 847330 - DNA, 33 bp, Homo sapien
tctaataaatcaattctccatcttctttccact

SEQ ID NO: 847331 - DNA, 33 bp, Homo sapien
cttctttccactaaccacttacttgtaaatgac

SEQ ID NO: 847332 - DNA, 33 bp, Homo sapien
cttctttccactaaccgcttacttgtaaatgac

SEQ ID NO: 847333 - DNA, 33 bp, Homo sapien
actctattcccaactacgcagaagaccaagcag

SEQ ID NO: 847334 - DNA, 33 bp, Homo sapien
actctattcccaactatgcagaagaccaagcag

SEQ ID NO: 847335 - DNA, 33 bp, Homo sapien
attgatccaagcagctcactaggttcattacag

SEQ ID NO: 847336 - DNA, 33 bp, Homo sapien
attgatccaagcagctgactaggttcattacag

SEQ ID NO: 847337 - DNA, 33 bp, Homo sapien
ttacattaaatcagtaccgtcatagctgttcta

SEQ ID NO: 847338 - DNA, 33 bp, Homo sapien
ttacattaaatcagtatcgtcatagctgttcta

SEQ ID NO: 847339 - DNA, 33 bp, Homo sapien
tcaacaagtatcaataaccaagaacgttctact

SEQ ID NO: 847340 - DNA, 33 bp, Homo sapien
tcaacaagtatcaatacccaagaacgttctact

SEQ ID NO: 847341 - DNA, 33 bp, Homo sapien
aaggagaagaacaaaagttgaggactgacacta

SEQ ID NO: 847342 - DNA, 33 bp, Homo sapien
aaggagaagaacaaaatttgaggactgacacta

SEQ ID NO: 847343 - DNA, 33 bp, Homo sapien
atctaactagttcttaactggcatttctggatc

SEQ ID NO: 847344 - DNA, 33 bp, Homo sapien
atctaactagttcttacctggcatttctggatc

SEQ ID NO: 847345 - DNA, 33 bp, Homo sapien
ctcattagatagaacaaagagacatcaaaataa

SEQ ID NO: 847346 - DNA, 33 bp, Homo sapien
ctcattagatagaacagagagacatcaaaataa

SEQ ID NO: 847347 - DNA, 33 bp, Homo sapien
aattatacaatacttcacatccttaaaaataat

SEQ ID NO: 847348 - DNA, 33 bp, Homo sapien
aattatacaatacttcgcatccttaaaaataat

SEQ ID NO: 847349 - DNA, 33 bp, Homo sapien
tttgtaacagtgagaccacaatgcaaggtgaat

SEQ ID NO: 847350 - DNA, 33 bp, Homo sapien
tttgtaacagtgagactacaatgcaaggtgaat

SEQ ID NO: 847351 - DNA, 33 bp, Homo sapien
caagccctggcccacaaagtttcatcagattct

SEQ ID NO: 847352 - DNA, 33 bp, Homo sapien
caagccctggcccacagagtttcatcagattct

SEQ ID NO: 847353 - DNA, 33 bp, Homo sapien
aatgtcaactctatgacgagatattcacatgct

SEQ ID NO: 847354 - DNA, 33 bp, Homo sapien
aatgtcaactctatgatgagatattcacatgct

SEQ ID NO: 847355 - DNA, 33 bp, Homo sapien
actaaggatgtatggcacaggatgtattggcag

SEQ ID NO: 847356 - DNA, 33 bp, Homo sapien
actaaggatgtatggcgcaggatgtattggcag

SEQ ID NO: 847357 - DNA, 33 bp, Homo sapien
gtttgttgcaaaattgcacaatgtaacctccac

SEQ ID NO: 847358 - DNA, 33 bp, Homo sapien
gtttgttgcaaaattgtacaatgtaacctccac

SEQ ID NO: 847359 - DNA, 33 bp, Homo sapien
attcttcatggcagaactgttaaccaagacatg

SEQ ID NO: 847360 - DNA, 33 bp, Homo sapien
attcttcatggcagaattgttaaccaagacatg

SEQ ID NO: 847361 - DNA, 33 bp, Homo sapien
cctaaatcccatacagccgtcagtgctttgcac

SEQ ID NO: 847362 - DNA, 33 bp, Homo sapien
cctaaatcccatacagtcgtcagtgctttgcac

SEQ ID NO: 847363 - DNA, 33 bp, Homo sapien
gtctttttcaatgcacagaagtcctcaattttt

SEQ ID NO: 847364 - DNA, 33 bp, Homo sapien
gtctttttcaatgcacggaagtcctcaattttt

SEQ ID NO: 847365 - DNA, 33 bp, Homo sapien
tggttagctttgaaataaatgaagaggtatact

SEQ ID NO: 847366 - DNA, 33 bp, Homo sapien
tggttagctttgaaatgaatgaagaggtatact

SEQ ID NO: 847367 - DNA, 33 bp, Homo sapien
ccctgctacccagtaggagtcacgtcctggaca

SEQ ID NO: 847368 - DNA, 33 bp, Homo sapien
ccctgctacccagtagtagtcacgtcctggaca

SEQ ID NO: 847369 - DNA, 33 bp, Homo sapien
taagaaaataatttcacgagcagtgtggaagat

SEQ ID NO: 847370 - DNA, 33 bp, Homo sapien
taagaaaataatttcatgagcagtgtggaagat

SEQ ID NO: 847371 - DNA, 33 bp, Homo sapien
tgaaggagaaatcagacctttttcagacaaaga

SEQ ID NO: 847372 - DNA, 33 bp, Homo sapien
tgaaggagaaatcagatctttttcagacaaaga

SEQ ID NO: 847373 - DNA, 33 bp, Homo sapien
tttggggaataaaattaaacaggtgatgtgtct

SEQ ID NO: 847374 - DNA, 33 bp, Homo sapien
tttggggaataaaatttaacaggtgatgtgtct

SEQ ID NO: 847375 - DNA, 33 bp, Homo sapien
gagaagatacacgaggcaaagaatgaagaaatg

SEQ ID NO: 847376 - DNA, 33 bp, Homo sapien
gagaagatacacgaggtaaagaatgaagaaatg

SEQ ID NO: 847377 - DNA, 33 bp, Homo sapien
tgttattgtttcaagacgtttcataatcttttt

SEQ ID NO: 847378 - DNA, 33 bp, Homo sapien
tgttattgtttcaagatgtttcataatcttttt

SEQ ID NO: 847379 - DNA, 33 bp, Homo sapien
actgtgagatgataaagttctgtctgtaagcca

SEQ ID NO: 847380 - DNA, 33 bp, Homo sapien
actgtgagatgataaatttctgtctgtaagcca

SEQ ID NO: 847381 - DNA, 33 bp, Homo sapien
cacttctcgtctcagcgctttctttgcttcttg

SEQ ID NO: 847382 - DNA, 33 bp, Homo sapien
cacttctcgtctcagctctttctttgcttcttg

SEQ ID NO: 847383 - DNA, 33 bp, Homo sapien
taattagtcaagctcaatcacttgtcaaaggtg

SEQ ID NO: 847384 - DNA, 33 bp, Homo sapien
taattagtcaagctcagtcacttgtcaaaggtg

SEQ ID NO: 847385 - DNA, 33 bp, Homo sapien
aaatctatacagactcggaagttgaaatacatg

SEQ ID NO: 847386 - DNA, 33 bp, Homo sapien
aaatctatacagactctgaagttgaaatacatg

SEQ ID NO: 847387 - DNA, 33 bp, Homo sapien
atatccatatgcagaacaacaacactagatccc

SEQ ID NO: 847388 - DNA, 33 bp, Homo sapien
atatccatatgcagaagaacaacactagatccc

SEQ ID NO: 847389 - DNA, 33 bp, Homo sapien
ccacttttgtaagggcactaatcccactgtcat

SEQ ID NO: 847390 - DNA, 33 bp, Homo sapien
ccacttttgtaagggcgctaatcccactgtcat

SEQ ID NO: 847391 - DNA, 33 bp, Homo sapien
aagaaaaagcttgttacgaataatggaggtgac

SEQ ID NO: 847392 - DNA, 33 bp, Homo sapien
aagaaaaagcttgttatgaataatggaggtgac

SEQ ID NO: 847393 - DNA, 33 bp, Homo sapien
tacaccccaatacacccactccaagaaagagtg

SEQ ID NO: 847394 - DNA, 33 bp, Homo sapien
tacaccccaatacacctactccaagaaagagtg

SEQ ID NO: 847395 - DNA, 33 bp, Homo sapien
ctgaacaatgttagaacgattttgagcccattt

SEQ ID NO: 847396 - DNA, 33 bp, Homo sapien
ctgaacaatgttagaatgattttgagcccattt

SEQ ID NO: 847397 - DNA, 33 bp, Homo sapien
ggaggttgctgagtacactgaagaactgttttg

SEQ ID NO: 847398 - DNA, 33 bp, Homo sapien
ggaggttgctgagtacgctgaagaactgttttg

SEQ ID NO: 847399 - DNA, 33 bp, Homo sapien
tgtattataatagctaagagacaaccatttgca

SEQ ID NO: 847400 - DNA, 33 bp, Homo sapien
tgtattataatagctaggagacaaccatttgca

SEQ ID NO: 847401 - DNA, 33 bp, Homo sapien
aatgtgtgttttcagaatccaccagcatagagg

SEQ ID NO: 847402 - DNA, 33 bp, Homo sapien
aatgtgtgttttcagagtccaccagcatagagg

SEQ ID NO: 847403 - DNA, 33 bp, Homo sapien
ttgtggctgaggaataaactaggaacctgaagt

SEQ ID NO: 847404 - DNA, 33 bp, Homo sapien
ttgtggctgaggaatagactaggaacctgaagt

SEQ ID NO: 847405 - DNA, 33 bp, Homo sapien
ttagcaattatcttcaaacgtcaacattttggt

SEQ ID NO: 847406 - DNA, 33 bp, Homo sapien
ttagcaattatcttcagacgtcaacattttggt

SEQ ID NO: 847407 - DNA, 33 bp, Homo sapien
atgctacattggcatcaacaggctttgttggtt

SEQ ID NO: 847408 - DNA, 33 bp, Homo sapien
atgctacattggcatccacaggctttgttggtt

SEQ ID NO: 847409 - DNA, 33 bp, Homo sapien
acatctacaaaacatacagtgtgttcaagtttg

SEQ ID NO: 847410 - DNA, 33 bp, Homo sapien
acatctacaaaacatagagtgtgttcaagtttg

SEQ ID NO: 847411 - DNA, 33 bp, Homo sapien
acaatttttccacagcagagttaacgttcattt

SEQ ID NO: 847412 - DNA, 33 bp, Homo sapien
acaatttttccacagcggagttaacgttcattt

SEQ ID NO: 847413 - DNA, 33 bp, Homo sapien
aatgtcataaaaacaaattcatccacaaagaca

SEQ ID NO: 847414 - DNA, 33 bp, Homo sapien
aatgtcataaaaacaagttcatccacaaagaca

SEQ ID NO: 847415 - DNA, 33 bp, Homo sapien
gtgtttctcactactcaaatccaatgagccaat

SEQ ID NO: 847416 - DNA, 33 bp, Homo sapien
gtgtttctcactactcgaatccaatgagccaat

SEQ ID NO: 847417 - DNA, 33 bp, Homo sapien
gtgtgatgtagaagcaatagttttgactacacc

SEQ ID NO: 847418 - DNA, 33 bp, Homo sapien
gtgtgatgtagaagcattagttttgactacacc

SEQ ID NO: 847419 - DNA, 33 bp, Homo sapien
ctatcatgtgaacctgcaaaataatgaaagaaa

SEQ ID NO: 847420 - DNA, 33 bp, Homo sapien
ctatcatgtgaacctggaaaataatgaaagaaa

SEQ ID NO: 847421 - DNA, 33 bp, Homo sapien
ttgacgaaattgagaaatacatctgtaagttgt

SEQ ID NO: 847422 - DNA, 33 bp, Homo sapien
ttgacgaaattgagaagtacatctgtaagttgt

SEQ ID NO: 847423 - DNA, 33 bp, Homo sapien
acagtttatttgcttgaacttttaacgtcacta

SEQ ID NO: 847424 - DNA, 33 bp, Homo sapien
acagtttatttgcttgcacttttaacgtcacta

SEQ ID NO: 847425 - DNA, 33 bp, Homo sapien
cttactagcaatataaccttgtgccctcaaaag

SEQ ID NO: 847426 - DNA, 33 bp, Homo sapien
cttactagcaatataatcttgtgccctcaaaag

SEQ ID NO: 847427 - DNA, 33 bp, Homo sapien
aggtgaattgagaaagaaatcctggaaatacag

SEQ ID NO: 847428 - DNA, 33 bp, Homo sapien
aggtgaattgagaaaggaatcctggaaatacag

SEQ ID NO: 847429 - DNA, 33 bp, Homo sapien
tgtagagcttaaaagaaaagactgagttgtatt

SEQ ID NO: 847430 - DNA, 33 bp, Homo sapien
tgtagagcttaaaagagaagactgagttgtatt

SEQ ID NO: 847431 - DNA, 33 bp, Homo sapien
agagtctagtcgaggaagtgaaatgagtagtca

SEQ ID NO: 847432 - DNA, 33 bp, Homo sapien
agagtctagtcgaggaggtgaaatgagtagtca

SEQ ID NO: 847433 - DNA, 33 bp, Homo sapien
acatatatcatgtttacgtgagtttggggtgta

SEQ ID NO: 847434 - DNA, 33 bp, Homo sapien
acatatatcatgtttatgtgagtttggggtgta

SEQ ID NO: 847435 - DNA, 33 bp, Homo sapien
cactagcttatatcccaacattgttcttcaaaa

SEQ ID NO: 847436 - DNA, 33 bp, Homo sapien
cactagcttatatccccacattgttcttcaaaa

SEQ ID NO: 847437 - DNA, 33 bp, Homo sapien
gtctccttgtagagtgaaggtcttgatataggc

SEQ ID NO: 847438 - DNA, 33 bp, Homo sapien
gtctccttgtagagtggaggtcttgatataggc

SEQ ID NO: 847439 - DNA, 33 bp, Homo sapien
aagacacagaagataaaaccatttgatgataga

SEQ ID NO: 847440 - DNA, 33 bp, Homo sapien
aagacacagaagataacaccatttgatgataga

SEQ ID NO: 847441 - DNA, 33 bp, Homo sapien
aaagcttgagcatcaaatatgtccaattaaaag

SEQ ID NO: 847442 - DNA, 33 bp, Homo sapien
aaagcttgagcatcaagtatgtccaattaaaag

SEQ ID NO: 847443 - DNA, 33 bp, Homo sapien
caagatgttattcagaaataaaggctataggtg

SEQ ID NO: 847444 - DNA, 33 bp, Homo sapien
caagatgttattcagagataaaggctataggtg

SEQ ID NO: 847445 - DNA, 33 bp, Homo sapien
agaggtgataaaacaacgtctgcaccctctaaa

SEQ ID NO: 847446 - DNA, 33 bp, Homo sapien
agaggtgataaaacaatgtctgcaccctctaaa

SEQ ID NO: 847447 - DNA, 33 bp, Homo sapien
aacacaagttgaggataaatattccaccattat

SEQ ID NO: 847448 - DNA, 33 bp, Homo sapien
aacacaagttgaggatcaatattccaccattat

SEQ ID NO: 847449 - DNA, 33 bp, Homo sapien
gaactttatagaactcccaaaatgatcaaagaa

SEQ ID NO: 847450 - DNA, 33 bp, Homo sapien
gaactttatagaactctcaaaatgatcaaagaa

SEQ ID NO: 847451 - DNA, 33 bp, Homo sapien
tctctgcacctctgacgctagggcacagatttc

SEQ ID NO: 847452 - DNA, 33 bp, Homo sapien
tctctgcacctctgactctagggcacagatttc

SEQ ID NO: 847453 - DNA, 33 bp, Homo sapien
cccacaggaaaaaaaaatgtcatatcaaaaaga

SEQ ID NO: 847454 - DNA, 33 bp, Homo sapien
cccacaggaaaaaaaattgtcatatcaaaaaga

SEQ ID NO: 847455 - DNA, 33 bp, Homo sapien
cacagcatgaaataaaccctattatcctcagtt

SEQ ID NO: 847456 - DNA, 33 bp, Homo sapien
cacagcatgaaataaatcctattatcctcagtt

SEQ ID NO: 847457 - DNA, 33 bp, Homo sapien
ataaactgggggtgaaacaagactcaggtttct

SEQ ID NO: 847458 - DNA, 33 bp, Homo sapien
ataaactgggggtgaaccaagactcaggtttct

SEQ ID NO: 847459 - DNA, 33 bp, Homo sapien
tacccagcattcagtacaggaaaatgaatgagt

SEQ ID NO: 847460 - DNA, 33 bp, Homo sapien
tacccagcattcagtataggaaaatgaatgagt

SEQ ID NO: 847461 - DNA, 33 bp, Homo sapien
tttgttactggtaagacgcaatttcttctcctg

SEQ ID NO: 847462 - DNA, 33 bp, Homo sapien
tttgttactggtaagatgcaatttcttctcctg

SEQ ID NO: 847463 - DNA, 33 bp, Homo sapien
gggacttagtgccaaactctgacacaaagaagt

SEQ ID NO: 847464 - DNA, 33 bp, Homo sapien
gggacttagtgccaaattctgacacaaagaagt

SEQ ID NO: 847465 - DNA, 33 bp, Homo sapien
tactttttggttccaaaacttccaggagtttgt

SEQ ID NO: 847466 - DNA, 33 bp, Homo sapien
tactttttggttccaacacttccaggagtttgt

SEQ ID NO: 847467 - DNA, 33 bp, Homo sapien
ccttgataataatagcaagacatggtcagattg

SEQ ID NO: 847468 - DNA, 33 bp, Homo sapien
ccttgataataatagcgagacatggtcagattg

SEQ ID NO: 847469 - DNA, 33 bp, Homo sapien
cccagctgactgaccaaaagccatcagccagtt

SEQ ID NO: 847470 - DNA, 33 bp, Homo sapien
cccagctgactgaccataagccatcagccagtt

SEQ ID NO: 847471 - DNA, 33 bp, Homo sapien
aaacccagtagtttcacagatcagaattttcca

SEQ ID NO: 847472 - DNA, 33 bp, Homo sapien
aaacccagtagtttcagagatcagaattttcca

SEQ ID NO: 847473 - DNA, 33 bp, Homo sapien
cagaattacctaaataccagtgttttatgaaaa

SEQ ID NO: 847474 - DNA, 33 bp, Homo sapien
cagaattacctaaatatcagtgttttatgaaaa

SEQ ID NO: 847475 - DNA, 33 bp, Homo sapien
atcatcagaggtatccactgctttgtaaactta

SEQ ID NO: 847476 - DNA, 33 bp, Homo sapien
atcatcagaggtatccgctgctttgtaaactta

SEQ ID NO: 847477 - DNA, 33 bp, Homo sapien
ccatttgccataataccatccctgtatgttgaa

SEQ ID NO: 847478 - DNA, 33 bp, Homo sapien
ccatttgccataatactatccctgtatgttgaa

SEQ ID NO: 847479 - DNA, 33 bp, Homo sapien
atctctttctaatgacgatgaaaccagaagatg

SEQ ID NO: 847480 - DNA, 33 bp, Homo sapien
atctctttctaatgactatgaaaccagaagatg

SEQ ID NO: 847481 - DNA, 33 bp, Homo sapien
gatactaatgaagcaaaacaggcaagaggcata

SEQ ID NO: 847482 - DNA, 33 bp, Homo sapien
gatactaatgaagcaagacaggcaagaggcata

SEQ ID NO: 847483 - DNA, 33 bp, Homo sapien
agattagcttagcagcacctaattcacctttgt

SEQ ID NO: 847484 - DNA, 33 bp, Homo sapien
agattagcttagcagctcctaattcacctttgt

SEQ ID NO: 847485 - DNA, 33 bp, Homo sapien
gggggattctaaaaaacggtcctataggatctt

SEQ ID NO: 847486 - DNA, 33 bp, Homo sapien
gggggattctaaaaaatggtcctataggatctt

SEQ ID NO: 847487 - DNA, 33 bp, Homo sapien
gcatgactgccatataacaagcgaagtgtggga

SEQ ID NO: 847488 - DNA, 33 bp, Homo sapien
gcatgactgccatatagcaagcgaagtgtggga

SEQ ID NO: 847489 - DNA, 33 bp, Homo sapien
aaatgttggagcctcaataagtatgtaatcagt

SEQ ID NO: 847490 - DNA, 33 bp, Homo sapien
aaatgttggagcctcagtaagtatgtaatcagt

SEQ ID NO: 847491 - DNA, 33 bp, Homo sapien
atttttaaatattctgaacagattaaacatacg

SEQ ID NO: 847492 - DNA, 33 bp, Homo sapien
atttttaaatattctggacagattaaacatacg

SEQ ID NO: 847493 - DNA, 33 bp, Homo sapien
aaggcttatgtagaatcagttgttgtcagtcca

SEQ ID NO: 847494 - DNA, 33 bp, Homo sapien
aaggcttatgtagaatgagttgttgtcagtcca

SEQ ID NO: 847495 - DNA, 33 bp, Homo sapien
ctcaaagctgcagaagactaaattgttctccat

SEQ ID NO: 847496 - DNA, 33 bp, Homo sapien
ctcaaagctgcagaagcctaaattgttctccat

SEQ ID NO: 847497 - DNA, 33 bp, Homo sapien
tatattgcaccacaaacgtgtacttagggcata

SEQ ID NO: 847498 - DNA, 33 bp, Homo sapien
tatattgcaccacaaaggtgtacttagggcata

SEQ ID NO: 847499 - DNA, 33 bp, Homo sapien
gaaaatcaaatgaattaaaccatgaagaccttg

SEQ ID NO: 847500 - DNA, 33 bp, Homo sapien
gaaaatcaaatgaattgaaccatgaagaccttg

SEQ ID NO: 847501 - DNA, 33 bp, Homo sapien
ctatacctatcacaaacaatgaattgactatta

SEQ ID NO: 847502 - DNA, 33 bp, Homo sapien
ctatacctatcacaaataatgaattgactatta

SEQ ID NO: 847503 - DNA, 33 bp, Homo sapien
ttttaacacataggtcaattcagaaatataaaa

SEQ ID NO: 847504 - DNA, 33 bp, Homo sapien
ttttaacacataggtcgattcagaaatataaaa

SEQ ID NO: 847505 - DNA, 33 bp, Homo sapien
aaacaggtcattactcaacattggaaagctact

SEQ ID NO: 847506 - DNA, 33 bp, Homo sapien
aaacaggtcattactcgacattggaaagctact

SEQ ID NO: 847507 - DNA, 33 bp, Homo sapien
caggggaaaaaaaaacaagatctactattaggt

SEQ ID NO: 847508 - DNA, 33 bp, Homo sapien
caggggaaaaaaaaacgagatctactattaggt

SEQ ID NO: 847509 - DNA, 33 bp, Homo sapien
agggattgacataagtcacctaatccataaatc

SEQ ID NO: 847510 - DNA, 33 bp, Homo sapien
agggattgacataagtgacctaatccataaatc

SEQ ID NO: 847511 - DNA, 33 bp, Homo sapien
agagcaccctttgtcacgcataattcatcctaa

SEQ ID NO: 847512 - DNA, 33 bp, Homo sapien
agagcaccctttgtcatgcataattcatcctaa

SEQ ID NO: 847513 - DNA, 33 bp, Homo sapien
aaattgcaagtatctacaccatacgtttccaag

SEQ ID NO: 847514 - DNA, 33 bp, Homo sapien
aaattgcaagtatctataccatacgtttccaag

SEQ ID NO: 847515 - DNA, 33 bp, Homo sapien
ggtatattaagcataactcaaagcagtcgaatg

SEQ ID NO: 847516 - DNA, 33 bp, Homo sapien
ggtatattaagcataattcaaagcagtcgaatg

SEQ ID NO: 847517 - DNA, 33 bp, Homo sapien
agaaacaataagtaagcagaaaggccatgattc

SEQ ID NO: 847518 - DNA, 33 bp, Homo sapien
agaaacaataagtaagtagaaaggccatgattc

SEQ ID NO: 847519 - DNA, 33 bp, Homo sapien
aactttaagtcctgtacgctccattcattgtaa

SEQ ID NO: 847520 - DNA, 33 bp, Homo sapien
aactttaagtcctgtaggctccattcattgtaa

SEQ ID NO: 847521 - DNA, 33 bp, Homo sapien
cattctttactattgacattttcgccccctaca

SEQ ID NO: 847522 - DNA, 33 bp, Homo sapien
cattctttactattgatattttcgccccctaca

SEQ ID NO: 847523 - DNA, 33 bp, Homo sapien
cacaaatagatccaaactgaggaagtctaaatt

SEQ ID NO: 847524 - DNA, 33 bp, Homo sapien
cacaaatagatccaaattgaggaagtctaaatt

SEQ ID NO: 847525 - DNA, 33 bp, Homo sapien
cacatttccagaacataaaagacagactcaaag

SEQ ID NO: 847526 - DNA, 33 bp, Homo sapien
cacatttccagaacatgaaagacagactcaaag

SEQ ID NO: 847527 - DNA, 33 bp, Homo sapien
ttttgtccacaacctcactaggatctgttattt

SEQ ID NO: 847528 - DNA, 33 bp, Homo sapien
ttttgtccacaacctcgctaggatctgttattt

SEQ ID NO: 847529 - DNA, 33 bp, Homo sapien
acataatactgggtgaagaatgattaaatgtaa

SEQ ID NO: 847530 - DNA, 33 bp, Homo sapien
acataatactgggtgaggaatgattaaatgtaa

SEQ ID NO: 847531 - DNA, 33 bp, Homo sapien
tattgcctactaccatcagtattgagtaacctt

SEQ ID NO: 847532 - DNA, 33 bp, Homo sapien
tattgcctactaccattagtattgagtaacctt

SEQ ID NO: 847533 - DNA, 33 bp, Homo sapien
ttttgctcctcaaccaacttatttcaattacca

SEQ ID NO: 847534 - DNA, 33 bp, Homo sapien
ttttgctcctcaaccagcttatttcaattacca

SEQ ID NO: 847535 - DNA, 33 bp, Homo sapien
atttatattcaagtgaactaacggcactggtcc

SEQ ID NO: 847536 - DNA, 33 bp, Homo sapien
atttatattcaagtgagctaacggcactggtcc

SEQ ID NO: 847537 - DNA, 33 bp, Homo sapien
ttaagcttctgtaagaaaattacatggcatgcg

SEQ ID NO: 847538 - DNA, 33 bp, Homo sapien
ttaagcttctgtaagagaattacatggcatgcg

SEQ ID NO: 847539 - DNA, 33 bp, Homo sapien
tactcctagcaccttgcataatatttgcacata

SEQ ID NO: 847540 - DNA, 33 bp, Homo sapien
tactcctagcaccttgtataatatttgcacata

SEQ ID NO: 847541 - DNA, 33 bp, Homo sapien
ttcttggatatgaaaccaagataattttaattg

SEQ ID NO: 847542 - DNA, 33 bp, Homo sapien
ttcttggatatgaaacgaagataattttaattg

SEQ ID NO: 847543 - DNA, 33 bp, Homo sapien
attaagatgttattggcatactcgattttgccc

SEQ ID NO: 847544 - DNA, 33 bp, Homo sapien
attaagatgttattgggatactcgattttgccc

SEQ ID NO: 847545 - DNA, 33 bp, Homo sapien
gaaccatcttgggagaccataagcatggcttaa

SEQ ID NO: 847546 - DNA, 33 bp, Homo sapien
gaaccatcttgggagagcataagcatggcttaa

SEQ ID NO: 847547 - DNA, 33 bp, Homo sapien
attgcagtaaaaactgaaggcaatttcttgctc

SEQ ID NO: 847548 - DNA, 33 bp, Homo sapien
attgcagtaaaaactggaggcaatttcttgctc

SEQ ID NO: 847549 - DNA, 33 bp, Homo sapien
caaaaggaattgaagaacaacatctccatagaa

SEQ ID NO: 847550 - DNA, 33 bp, Homo sapien
caaaaggaattgaagagcaacatctccatagaa

SEQ ID NO: 847551 - DNA, 33 bp, Homo sapien
tgaggccagattaccccgatagcaaaaccagac

SEQ ID NO: 847552 - DNA, 33 bp, Homo sapien
tgaggccagattaccctgatagcaaaaccagac

SEQ ID NO: 847553 - DNA, 33 bp, Homo sapien
ctctgctgagagctaaacagatgtcaggatgac

SEQ ID NO: 847554 - DNA, 33 bp, Homo sapien
ctctgctgagagctaagcagatgtcaggatgac

SEQ ID NO: 847555 - DNA, 33 bp, Homo sapien
aaggttatagaacatcacacagatttaccttgt

SEQ ID NO: 847556 - DNA, 33 bp, Homo sapien
aaggttatagaacatctcacagatttaccttgt

SEQ ID NO: 847557 - DNA, 33 bp, Homo sapien
cattagctaagcctataaggtcctttctatggt

SEQ ID NO: 847558 - DNA, 33 bp, Homo sapien
cattagctaagcctatgaggtcctttctatggt

SEQ ID NO: 847559 - DNA, 33 bp, Homo sapien
catttgcaagaccaaactgaaaatatagctttt

SEQ ID NO: 847560 - DNA, 33 bp, Homo sapien
catttgcaagaccaaattgaaaatatagctttt

SEQ ID NO: 847561 - DNA, 33 bp, Homo sapien
tctgatatatagaaaaggtgttctctgccgtaa

SEQ ID NO: 847562 - DNA, 33 bp, Homo sapien
tctgatatatagaaaatgtgttctctgccgtaa

SEQ ID NO: 847563 - DNA, 33 bp, Homo sapien
tctatgtcaccttacacgaactctctaccttga

SEQ ID NO: 847564 - DNA, 33 bp, Homo sapien
tctatgtcaccttacatgaactctctaccttga

SEQ ID NO: 847565 - DNA, 33 bp, Homo sapien
tcacctcaaaatcttaaccaagctcttcatgta

SEQ ID NO: 847566 - DNA, 33 bp, Homo sapien
tcacctcaaaatcttacccaagctcttcatgta

SEQ ID NO: 847567 - DNA, 33 bp, Homo sapien
atagtccattcagggaagaaatagggtcataat

SEQ ID NO: 847568 - DNA, 33 bp, Homo sapien
atagtccattcagggaggaaatagggtcataat

SEQ ID NO: 847569 - DNA, 33 bp, Homo sapien
ttgctaaaagcttactcaatgataatgataata

SEQ ID NO: 847570 - DNA, 33 bp, Homo sapien
ttgctaaaagcttacttaatgataatgataata

SEQ ID NO: 847571 - DNA, 33 bp, Homo sapien
atcagcagagacggagaatgctttaactctaca

SEQ ID NO: 847572 - DNA, 33 bp, Homo sapien
atcagcagagacggaggatgctttaactctaca

SEQ ID NO: 847573 - DNA, 33 bp, Homo sapien
gattcctatttatatacccacactggacagaat

SEQ ID NO: 847574 - DNA, 33 bp, Homo sapien
gattcctatttatatatccacactggacagaat

SEQ ID NO: 847575 - DNA, 33 bp, Homo sapien
gtgcttcttctgtgaacgcttgtcaactgaagc

SEQ ID NO: 847576 - DNA, 33 bp, Homo sapien
gtgcttcttctgtgaatgcttgtcaactgaagc

SEQ ID NO: 847577 - DNA, 33 bp, Homo sapien
aaaaattatatgctaccgaagggaagaattcat

SEQ ID NO: 847578 - DNA, 33 bp, Homo sapien
aaaaattatatgctactgaagggaagaattcat

SEQ ID NO: 847579 - DNA, 33 bp, Homo sapien
agatgaatgtgggaagccaatgagagaccagat

SEQ ID NO: 847580 - DNA, 33 bp, Homo sapien
agatgaatgtgggaagtcaatgagagaccagat

SEQ ID NO: 847581 - DNA, 33 bp, Homo sapien
aaaaatcattacatgacctgaacatttattatt

SEQ ID NO: 847582 - DNA, 33 bp, Homo sapien
aaaaatcattacatgagctgaacatttattatt

SEQ ID NO: 847583 - DNA, 33 bp, Homo sapien
gggaagtaagtaacgccgatgttcatgttttag

SEQ ID NO: 847584 - DNA, 33 bp, Homo sapien
gggaagtaagtaacgctgatgttcatgttttag

SEQ ID NO: 847585 - DNA, 33 bp, Homo sapien
aatattaacatttgtaggcttgttataatatct

SEQ ID NO: 847586 - DNA, 33 bp, Homo sapien
aatattaacatttgtatgcttgttataatatct

SEQ ID NO: 847587 - DNA, 33 bp, Homo sapien
tgatagaatttcagaaatgccataagttcagct

SEQ ID NO: 847588 - DNA, 33 bp, Homo sapien
tgatagaatttcagaagtgccataagttcagct

SEQ ID NO: 847589 - DNA, 33 bp, Homo sapien
tatgtgcactttgccacagttagggaaaatagc

SEQ ID NO: 847590 - DNA, 33 bp, Homo sapien
tatgtgcactttgccagagttagggaaaatagc

SEQ ID NO: 847591 - DNA, 33 bp, Homo sapien
cctggccctattaccaatctaaattctctccca

SEQ ID NO: 847592 - DNA, 33 bp, Homo sapien
cctggccctattaccagtctaaattctctccca

SEQ ID NO: 847593 - DNA, 33 bp, Homo sapien
tttcaacaatccaatcacaattcttgcagatgt

SEQ ID NO: 847594 - DNA, 33 bp, Homo sapien
tttcaacaatccaatcgcaattcttgcagatgt

SEQ ID NO: 847595 - DNA, 33 bp, Homo sapien
acttagcaataaacgacatttgtaaactgtggt

SEQ ID NO: 847596 - DNA, 33 bp, Homo sapien
acttagcaataaacgatatttgtaaactgtggt

SEQ ID NO: 847597 - DNA, 33 bp, Homo sapien
tataatttaaactcacaacataagaataaaaca

SEQ ID NO: 847598 - DNA, 33 bp, Homo sapien
tataatttaaactcacgacataagaataaaaca

SEQ ID NO: 847599 - DNA, 33 bp, Homo sapien
actaaaatccatcataacttttctactgatatt

SEQ ID NO: 847600 - DNA, 33 bp, Homo sapien
actaaaatccatcatatcttttctactgatatt

SEQ ID NO: 847601 - DNA, 33 bp, Homo sapien
ttttgtggttactgaaacattaacataaatgtt

SEQ ID NO: 847602 - DNA, 33 bp, Homo sapien
ttttgtggttactgaaccattaacataaatgtt

SEQ ID NO: 847603 - DNA, 33 bp, Homo sapien
gtgtctaatcactcataactgctttctaatgtg

SEQ ID NO: 847604 - DNA, 33 bp, Homo sapien
gtgtctaatcactcatgactgctttctaatgtg

SEQ ID NO: 847605 - DNA, 33 bp, Homo sapien
tgttcaaaactgaccaactcatgtattttcact

SEQ ID NO: 847606 - DNA, 33 bp, Homo sapien
tgttcaaaactgaccagctcatgtattttcact

SEQ ID NO: 847607 - DNA, 33 bp, Homo sapien
aatttattttcagacaagcccatacttagatta

SEQ ID NO: 847608 - DNA, 33 bp, Homo sapien
aatttattttcagacaggcccatacttagatta

SEQ ID NO: 847609 - DNA, 33 bp, Homo sapien
tcaatgcagattcttcaagttcgtttcctaatg

SEQ ID NO: 847610 - DNA, 33 bp, Homo sapien
tcaatgcagattcttcgagttcgtttcctaatg

SEQ ID NO: 847611 - DNA, 33 bp, Homo sapien
tcttgaatgctaatccaccattttgatttctca

SEQ ID NO: 847612 - DNA, 33 bp, Homo sapien
tcttgaatgctaatcctccattttgatttctca

SEQ ID NO: 847613 - DNA, 33 bp, Homo sapien
cctgctctcagaaacagaatctatctctggtga

SEQ ID NO: 847614 - DNA, 33 bp, Homo sapien
cctgctctcagaaacataatctatctctggtga

SEQ ID NO: 847615 - DNA, 33 bp, Homo sapien
tgcttgttttgggttaaggcaatgaacaaacac

SEQ ID NO: 847616 - DNA, 33 bp, Homo sapien
tgcttgttttgggttagggcaatgaacaaacac

SEQ ID NO: 847617 - DNA, 33 bp, Homo sapien
tttctgcagactaaaaattattcactcttcagc

SEQ ID NO: 847618 - DNA, 33 bp, Homo sapien
tttctgcagactaaaacttattcactcttcagc

SEQ ID NO: 847619 - DNA, 33 bp, Homo sapien
tggggttacactgaccacaaaactgtaatgaaa

SEQ ID NO: 847620 - DNA, 33 bp, Homo sapien
tggggttacactgaccgcaaaactgtaatgaaa

SEQ ID NO: 847621 - DNA, 33 bp, Homo sapien
gagcatagcaaccctaatagcagaattgctgag

SEQ ID NO: 847622 - DNA, 33 bp, Homo sapien
gagcatagcaaccctactagcagaattgctgag

SEQ ID NO: 847623 - DNA, 33 bp, Homo sapien
tgacagcctcgttgtccccagttttataaggaa

SEQ ID NO: 847624 - DNA, 33 bp, Homo sapien
tgacagcctcgttgtctccagttttataaggaa

SEQ ID NO: 847625 - DNA, 33 bp, Homo sapien
gcaagagcatactcaacggatctttcttccact

SEQ ID NO: 847626 - DNA, 33 bp, Homo sapien
gcaagagcatactcaatggatctttcttccact

SEQ ID NO: 847627 - DNA, 33 bp, Homo sapien
cctgaaagaggttttaccattaggatgggtgaa

SEQ ID NO: 847628 - DNA, 33 bp, Homo sapien
cctgaaagaggttttatcattaggatgggtgaa

SEQ ID NO: 847629 - DNA, 33 bp, Homo sapien
ttgaagatatatgcttaaaaaattcctaacacc

SEQ ID NO: 847630 - DNA, 33 bp, Homo sapien
ttgaagatatatgctttaaaaattcctaacacc

SEQ ID NO: 847631 - DNA, 33 bp, Homo sapien; identical to SEQ ID NO: 847629

SEQ ID NO: 847632 - DNA, 33 bp, Homo sapien; identical to SEQ ID NO: 847630

SEQ ID NO: 847633 - DNA, 33 bp, Homo sapien
tcatttctcctaaagacgtcagatccacaggag

SEQ ID NO: 847634 - DNA, 33 bp, Homo sapien
tcatttctcctaaagatgtcagatccacaggag

SEQ ID NO: 847635 - DNA, 33 bp, Homo sapien
gaacatatctctaacaatggaaaagtttatatc

SEQ ID NO: 847636 - DNA, 33 bp, Homo sapien
gaacatatctctaacagtggaaaagtttatatc

SEQ ID NO: 847637 - DNA, 33 bp, Homo sapien
aaaatagatcattccacataaactggctgttca

SEQ ID NO: 847638 - DNA, 33 bp, Homo sapien
aaaatagatcattccatataaactggctgttca

SEQ ID NO: 847639 - DNA, 33 bp, Homo sapien
tgtgtgtgttctctacccagcattataacaaag

SEQ ID NO: 847640 - DNA, 33 bp, Homo sapien
tgtgtgtgttctctacgcagcattataacaaag

SEQ ID NO: 847641 - DNA, 33 bp, Homo sapien
attacagtgaccaataagtatgtcattcagcac

SEQ ID NO: 847642 - DNA, 33 bp, Homo sapien
attacagtgaccaataggtatgtcattcagcac

SEQ ID NO: 847643 - DNA, 33 bp, Homo sapien
atattccagtgtcccaagatataaagaaatgaa

SEQ ID NO: 847644 - DNA, 33 bp, Homo sapien
atattccagtgtcccaggatataaagaaatgaa

SEQ ID NO: 847645 - DNA, 33 bp, Homo sapien
ctctttttttcggacaacatgtggatttggtaa

SEQ ID NO: 847646 - DNA, 33 bp, Homo sapien
ctctttttttcggacaccatgtggatttggtaa

SEQ ID NO: 847647 - DNA, 33 bp, Homo sapien
ttaggtattgatcggacgtatttcaaaataata

SEQ ID NO: 847648 - DNA, 33 bp, Homo sapien
ttaggtattgatcggatgtatttcaaaataata

SEQ ID NO: 847649 - DNA, 33 bp, Homo sapien
atagagatagagttaacgatagagacagacaga

SEQ ID NO: 847650 - DNA, 33 bp, Homo sapien
atagagatagagttaaggatagagacagacaga

SEQ ID NO: 847651 - DNA, 33 bp, Homo sapien
caggttcctaatttcaactgatggctaactcat

SEQ ID NO: 847652 - DNA, 33 bp, Homo sapien
caggttcctaatttcagctgatggctaactcat

SEQ ID NO: 847653 - DNA, 33 bp, Homo sapien
agtcctaaatctatgccacttcttcacctgggt

SEQ ID NO: 847654 - DNA, 33 bp, Homo sapien
agtcctaaatctatgctacttcttcacctgggt

SEQ ID NO: 847655 - DNA, 33 bp, Homo sapien
ttctggctcatactacaggtaaagatagttaca

SEQ ID NO: 847656 - DNA, 33 bp, Homo sapien
ttctggctcatactactggtaaagatagttaca

SEQ ID NO: 847657 - DNA, 33 bp, Homo sapien
tgttcagagtggtaaaagagtagattttaggta

SEQ ID NO: 847658 - DNA, 33 bp, Homo sapien
tgttcagagtggtaaaggagtagattttaggta

SEQ ID NO: 847659 - DNA, 33 bp, Homo sapien
tttaaaattggttggaacagtagtaacacatat

SEQ ID NO: 847660 - DNA, 33 bp, Homo sapien
tttaaaattggttggagcagtagtaacacatat

SEQ ID NO: 847661 - DNA, 33 bp, Homo sapien
tatttttcttctggagcagtaatcttgaccaag

SEQ ID NO: 847662 - DNA, 33 bp, Homo sapien
tatttttcttctggaggagtaatcttgaccaag

SEQ ID NO: 847663 - DNA, 33 bp, Homo sapien
tatctacctcaaaaaaatttatctctaaacctc

SEQ ID NO: 847664 - DNA, 33 bp, Homo sapien
tatctacctcaaaaaattttatctctaaacctc

SEQ ID NO: 847665 - DNA, 33 bp, Homo sapien
ttgcagatgacaagcaaggtggtagggaggttg

SEQ ID NO: 847666 - DNA, 33 bp, Homo sapien
ttgcagatgacaagcacggtggtagggaggttg

SEQ ID NO: 847667 - DNA, 33 bp, Homo sapien
tcaggaagtttggagaagacaaaacatacacag

SEQ ID NO: 847668 - DNA, 33 bp, Homo sapien
tcaggaagtttggagacgacaaaacatacacag

SEQ ID NO: 847669 - DNA, 33 bp, Homo sapien
aacaaaatacatatcaatagggaacctgggcta

SEQ ID NO: 847670 - DNA, 33 bp, Homo sapien
aacaaaatacatatcagtagggaacctgggcta

SEQ ID NO: 847671 - DNA, 33 bp, Homo sapien
attaagataacctcacaggaaaaataaaaaaga

SEQ ID NO: 847672 - DNA, 33 bp, Homo sapien
attaagataacctcactggaaaaataaaaaaga

SEQ ID NO: 847673 - DNA, 33 bp, Homo sapien
cagataagtgaaatcactcaacaactgtccttt

SEQ ID NO: 847674 - DNA, 33 bp, Homo sapien
cagataagtgaaatcattcaacaactgtccttt

SEQ ID NO: 847675 - DNA, 33 bp, Homo sapien
attttgacaccatgagaagagtccaaataagaa

SEQ ID NO: 847676 - DNA, 33 bp, Homo sapien
attttgacaccatgaggagagtccaaataagaa

SEQ ID NO: 847677 - DNA, 33 bp, Homo sapien
taccctgttccttaccacaacttttttcttaac

SEQ ID NO: 847678 - DNA, 33 bp, Homo sapien
taccctgttccttaccgcaacttttttcttaac

SEQ ID NO: 847679 - DNA, 33 bp, Homo sapien
tgtaggtctcagagtacgagaaaagctgggaag

SEQ ID NO: 847680 - DNA, 33 bp, Homo sapien
tgtaggtctcagagtatgagaaaagctgggaag

SEQ ID NO: 847681 - DNA, 33 bp, Homo sapien
tttctatttttagtcaagtttgtaataatgaaa

SEQ ID NO: 847682 - DNA, 33 bp, Homo sapien
tttctatttttagtcacgtttgtaataatgaaa

SEQ ID NO: 847683 - DNA, 33 bp, Homo sapien
tgctgttagatattgcaaaaagaacaacctcaa

SEQ ID NO: 847684 - DNA, 33 bp, Homo sapien
tgctgttagatattgctaaaagaacaacctcaa

SEQ ID NO: 847685 - DNA, 33 bp, Homo sapien
ttattgcccatgagaaaacattcagattcctaa

SEQ ID NO: 847686 - DNA, 33 bp, Homo sapien
ttattgcccatgagaagacattcagattcctaa

SEQ ID NO: 847687 - DNA, 33 bp, Homo sapien
acaatttattactctgaaagtagccaaaagtga

SEQ ID NO: 847688 - DNA, 33 bp, Homo sapien
acaatttattactctggaagtagccaaaagtga

SEQ ID NO: 847689 - DNA, 33 bp, Homo sapien
atgggtaaaatatcagacctttcataattctta

SEQ ID NO: 847690 - DNA, 33 bp, Homo sapien
atgggtaaaatatcaggcctttcataattctta

SEQ ID NO: 847691 - DNA, 33 bp, Homo sapien
ggaaaaagactcagaaattagcatgatatcatc

SEQ ID NO: 847692 - DNA, 33 bp, Homo sapien
ggaaaaagactcagaatttagcatgatatcatc

SEQ ID NO: 847693 - DNA, 33 bp, Homo sapien
agcagagagttacttaaagagacagtacattct

SEQ ID NO: 847694 - DNA, 33 bp, Homo sapien
agcagagagttacttacagagacagtacattct

SEQ ID NO: 847695 - DNA, 33 bp, Homo sapien
tctgcaaagatgaagcagagtgggcaaatgaag

SEQ ID NO: 847696 - DNA, 33 bp, Homo sapien
tctgcaaagatgaagcggagtgggcaaatgaag

SEQ ID NO: 847697 - DNA, 33 bp, Homo sapien
atgcacaccaactgacaataaaggagggtccca

SEQ ID NO: 847698 - DNA, 33 bp, Homo sapien
atgcacaccaactgacgataaaggagggtccca

SEQ ID NO: 847699 - DNA, 33 bp, Homo sapien
tctataattttcagtcaaagagttttaaactac

SEQ ID NO: 847700 - DNA, 33 bp, Homo sapien
tctataattttcagtcgaagagttttaaactac

SEQ ID NO: 847701 - DNA, 33 bp, Homo sapien
tggtactagtgcatcacctgtgacgtagattgg

SEQ ID NO: 847702 - DNA, 33 bp, Homo sapien
tggtactagtgcatcagctgtgacgtagattgg

SEQ ID NO: 847703 - DNA, 33 bp, Homo sapien
ctgccatgtttgtcaactgagaaggaccactga

SEQ ID NO: 847704 - DNA, 33 bp, Homo sapien
ctgccatgtttgtcaattgagaaggaccactga

SEQ ID NO: 847705 - DNA, 33 bp, Homo sapien
acataggatactctggaaatttgagttaccaga

SEQ ID NO: 847706 - DNA, 33 bp, Homo sapien
acataggatactctggcaatttgagttaccaga

SEQ ID NO: 847707 - DNA, 33 bp, Homo sapien
cttgaaatatgctttccaaattgtctgctttct

SEQ ID NO: 847708 - DNA, 33 bp, Homo sapien
cttgaaatatgctttctaaattgtctgctttct

SEQ ID NO: 847709 - DNA, 33 bp, Homo sapien
ccacacaaacaagccaacatagtaaccagctaa

SEQ ID NO: 847710 - DNA, 33 bp, Homo sapien
ccacacaaacaagccatcatagtaaccagctaa

SEQ ID NO: 847711 - DNA, 33 bp, Homo sapien
aagactaaagctggaaaccttctttacaccaca

SEQ ID NO: 847712 - DNA, 33 bp, Homo sapien
aagactaaagctggaacccttctttacaccaca

SEQ ID NO: 847713 - DNA, 33 bp, Homo sapien
acagaatcctgtcacaactttgaggaagtcaca

SEQ ID NO: 847714 - DNA, 33 bp, Homo sapien
acagaatcctgtcacacctttgaggaagtcaca

SEQ ID NO: 847715 - DNA, 33 bp, Homo sapien
ctaacaacactgaaaaaattgtcaggtaaaaca

SEQ ID NO: 847716 - DNA, 33 bp, Homo sapien
ctaacaacactgaaaacattgtcaggtaaaaca

SEQ ID NO: 847717 - DNA, 33 bp, Homo sapien
aggtaacatcaataaaaatggaataagacatat

SEQ ID NO: 847718 - DNA, 33 bp, Homo sapien
aggtaacatcaataaagatggaataagacatat

SEQ ID NO: 847719 - DNA, 33 bp, Homo sapien
ctcagttcaaaatctagctctactgattgtgca

SEQ ID NO: 847720 - DNA, 33 bp, Homo sapien
ctcagttcaaaatctatctctactgattgtgca

SEQ ID NO: 847721 - DNA, 33 bp, Homo sapien
ataatattataaacgacgatacctgagaactag

SEQ ID NO: 847722 - DNA, 33 bp, Homo sapien
ataatattataaacgatgatacctgagaactag

SEQ ID NO: 847723 - DNA, 33 bp, Homo sapien
gcatgggctctgacaaacattttaacagtatca

SEQ ID NO: 847724 - DNA, 33 bp, Homo sapien
gcatgggctctgacaaccattttaacagtatca

SEQ ID NO: 847725 - DNA, 33 bp, Homo sapien
ttccaggggcttcaaaactcaatcagtataaac

SEQ ID NO: 847726 - DNA, 33 bp, Homo sapien
ttccaggggcttcaaatctcaatcagtataaac

SEQ ID NO: 847727 - DNA, 33 bp, Homo sapien
ttggtgaaatcttgcaactgtaagagggtgatg

SEQ ID NO: 847728 - DNA, 33 bp, Homo sapien
ttggtgaaatcttgcacctgtaagagggtgatg

SEQ ID NO: 847729 - DNA, 33 bp, Homo sapien
gttggatactgtgctaaatcttagggctaaagg

SEQ ID NO: 847730 - DNA, 33 bp, Homo sapien
gttggatactgtgctagatcttagggctaaagg

SEQ ID NO: 847731 - DNA, 33 bp, Homo sapien
actacaaatctttgcaacagtgagaataagaaa

SEQ ID NO: 847732 - DNA, 33 bp, Homo sapien
actacaaatctttgcaccagtgagaataagaaa

SEQ ID NO: 847733 - DNA, 33 bp, Homo sapien; identical to SEQ ID NO: 847731

SEQ ID NO: 847734 - DNA, 33 bp, Homo sapien; identical to SEQ ID NO: 847732

SEQ ID NO: 847735 - DNA, 33 bp, Homo sapien
agttccttgcagataaatgtttatgtctgttgg

SEQ ID NO: 847736 - DNA, 33 bp, Homo sapien
agttccttgcagataattgtttatgtctgttgg

SEQ ID NO: 847737 - DNA, 33 bp, Homo sapien
tggctcctgataaccccgcttctgtattcacga

SEQ ID NO: 847738 - DNA, 33 bp, Homo sapien
tggctcctgataaccctgcttctgtattcacga

SEQ ID NO: 847739 - DNA, 33 bp, Homo sapien
gcttgctcatattaacaaagctgccagtttgtg

SEQ ID NO: 847740 - DNA, 33 bp, Homo sapien
gcttgctcatattaaccaagctgccagtttgtg

SEQ ID NO: 847741 - DNA, 33 bp, Homo sapien
ccactgtcttgattcacgctaatgcaccagtag

SEQ ID NO: 847742 - DNA, 33 bp, Homo sapien
ccactgtcttgattcatgctaatgcaccagtag

SEQ ID NO: 847743 - DNA, 33 bp, Homo sapien
agcaggactttatgtacgcatgcttcatatttt

SEQ ID NO: 847744 - DNA, 33 bp, Homo sapien
agcaggactttatgtatgcatgcttcatatttt

SEQ ID NO: 847745 - DNA, 33 bp, Homo sapien
tagattataggtagagcataactcatcaccaca

SEQ ID NO: 847746 - DNA, 33 bp, Homo sapien
tagattataggtagaggataactcatcaccaca

SEQ ID NO: 847747 - DNA, 33 bp, Homo sapien
aagcctgagggaaaaaataggatggtccttcct

SEQ ID NO: 847748 - DNA, 33 bp, Homo sapien
aagcctgagggaaaaagtaggatggtccttcct

SEQ ID NO: 847749 - DNA, 33 bp, Homo sapien
ttccatgtcatctaaccaaataaaccatcacaa

SEQ ID NO: 847750 - DNA, 33 bp, Homo sapien
ttccatgtcatctaactaaataaaccatcacaa

SEQ ID NO: 847751 - DNA, 33 bp, Homo sapien
tgatgggacaactctccatctttcacgaagctc

SEQ ID NO: 847752 - DNA, 33 bp, Homo sapien
tgatgggacaactctctatctttcacgaagctc

SEQ ID NO: 847753 - DNA, 33 bp, Homo sapien
ttattatattataaaactgaacatgggcataca

SEQ ID NO: 847754 - DNA, 33 bp, Homo sapien
ttattatattataaaattgaacatgggcataca

SEQ ID NO: 847755 - DNA, 33 bp, Homo sapien
caagaatcacaatttggaagaagaacattactt

SEQ ID NO: 847756 - DNA, 33 bp, Homo sapien
caagaatcacaatttgtaagaagaacattactt

SEQ ID NO: 847757 - DNA, 33 bp, Homo sapien
caaattaaaaataaaaaccttgtctcacatctt

SEQ ID NO: 847758 - DNA, 33 bp, Homo sapien
caaattaaaaataaaatccttgtctcacatctt

SEQ ID NO: 847759 - DNA, 33 bp, Homo sapien
ccactttggcatctcacagaggtgttgttagaa

SEQ ID NO: 847760 - DNA, 33 bp, Homo sapien
ccactttggcatctcatagaggtgttgttagaa

SEQ ID NO: 847761 - DNA, 33 bp, Homo sapien
actatgtgaaaaaaaaattgaggtcagaaatga

SEQ ID NO: 847762 - DNA, 33 bp, Homo sapien
actatgtgaaaaaaaatttgaggtcagaaatga

SEQ ID NO: 847763 - DNA, 33 bp, Homo sapien
tcctgttttggaataaactgtctggccgcccaa

SEQ ID NO: 847764 - DNA, 33 bp, Homo sapien
tcctgttttggaataatctgtctggccgcccaa

SEQ ID NO: 847765 - DNA, 33 bp, Homo sapien
tatagaatcatagtacagagaagggcattgtaa

SEQ ID NO: 847766 - DNA, 33 bp, Homo sapien
tatagaatcatagtacggagaagggcattgtaa

SEQ ID NO: 847767 - DNA, 33 bp, Homo sapien
agggactatgttcaaacgtggaagcattggaat

SEQ ID NO: 847768 - DNA, 33 bp, Homo sapien
agggactatgttcaaatgtggaagcattggaat

SEQ ID NO: 847769 - DNA, 33 bp, Homo sapien
tggggcccacgttcaacgtatctttgtatactg

SEQ ID NO: 847770 - DNA, 33 bp, Homo sapien
tggggcccacgttcaatgtatctttgtatactg

SEQ ID NO: 847771 - DNA, 33 bp, Homo sapien
atgctcttcgcttatactaacaccacgtctaat

SEQ ID NO: 847772 - DNA, 33 bp, Homo sapien
atgctcttcgcttatagtaacaccacgtctaat

SEQ ID NO: 847773 - DNA, 33 bp, Homo sapien
ttattttcagaagcaacggtaaacacagcattt

SEQ ID NO: 847774 - DNA, 33 bp, Homo sapien
ttattttcagaagcaatggtaaacacagcattt

SEQ ID NO: 847775 - DNA, 33 bp, Homo sapien
ctaacccttagttgtcaatctcgtctactttat

SEQ ID NO: 847776 - DNA, 33 bp, Homo sapien
ctaacccttagttgtccatctcgtctactttat

SEQ ID NO: 847777 - DNA, 33 bp, Homo sapien
tatatcagtggggcatcacaaatatggaacagt

SEQ ID NO: 847778 - DNA, 33 bp, Homo sapien
tatatcagtggggcattacaaatatggaacagt

SEQ ID NO: 847779 - DNA, 33 bp, Homo sapien
aaaattagagacaaaactgtggacttcctttta

SEQ ID NO: 847780 - DNA, 33 bp, Homo sapien
aaaattagagacaaaattgtggacttcctttta

SEQ ID NO: 847781 - DNA, 33 bp, Homo sapien
tgggttggtgcttccaatcttggcttttgaact

SEQ ID NO: 847782 - DNA, 33 bp, Homo sapien
tgggttggtgcttccagtcttggcttttgaact

SEQ ID NO: 847783 - DNA, 33 bp, Homo sapien
gataaaatgacggttgaatgcaaatgcctagag

SEQ ID NO: 847784 - DNA, 33 bp, Homo sapien
gataaaatgacggttggatgcaaatgcctagag

SEQ ID NO: 847785 - DNA, 33 bp, Homo sapien
tagaggtaggagcaaacagtcatgtgcctggta

SEQ ID NO: 847786 - DNA, 33 bp, Homo sapien
tagaggtaggagcaaatagtcatgtgcctggta

SEQ ID NO: 847787 - DNA, 33 bp, Homo sapien
aataaaaaaaaaagaaatgtgcaaagagaaata

SEQ ID NO: 847788 - DNA, 33 bp, Homo sapien
aataaaaaaaaaagaagtgtgcaaagagaaata

SEQ ID NO: 847789 - DNA, 33 bp, Homo sapien
cttttgcgcatagtaacatttaaattgaaaact

SEQ ID NO: 847790 - DNA, 33 bp, Homo sapien
cttttgcgcatagtaatatttaaattgaaaact

SEQ ID NO: 847791 - DNA, 33 bp, Homo sapien
accatctttagctgcactaaggaaaagtcctgc

SEQ ID NO: 847792 - DNA, 33 bp, Homo sapien
accatctttagctgcattaaggaaaagtcctgc

SEQ ID NO: 847793 - DNA, 33 bp, Homo sapien; identical to SEQ ID NO: 847791

SEQ ID NO: 847794 - DNA, 33 bp, Homo sapien; identical to SEQ ID NO: 847792

SEQ ID NO: 847795 - DNA, 33 bp, Homo sapien
ctctccaagttctcaaaacaaattcagaggctg

SEQ ID NO: 847796 - DNA, 33 bp, Homo sapien
ctctccaagttctcaagacaaattcagaggctg

SEQ ID NO: 847797 - DNA, 33 bp, Homo sapien
aaagcatcaagcactactaaaggtcaattctct

SEQ ID NO: 847798 - DNA, 33 bp, Homo sapien
aaagcatcaagcactattaaaggtcaattctct

SEQ ID NO: 847799 - DNA, 33 bp, Homo sapien
taatgtgatagtaaaaattgaacaaatatagag

SEQ ID NO: 847800 - DNA, 33 bp, Homo sapien
taatgtgatagtaaaacttgaacaaatatagag

SEQ ID NO: 847801 - DNA, 33 bp, Homo sapien
ggaaaatcaagattcaaagatcatagtcatttc

SEQ ID NO: 847802 - DNA, 33 bp, Homo sapien
ggaaaatcaagattcagagatcatagtcatttc

SEQ ID NO: 847803 - DNA, 33 bp, Homo sapien
acaccttttagtataaacatggtgattgagagc

SEQ ID NO: 847804 - DNA, 33 bp, Homo sapien
acaccttttagtataatcatggtgattgagagc

SEQ ID NO: 847805 - DNA, 33 bp, Homo sapien
cagcaaatagacaatgaaatgtaaacatctgcc

SEQ ID NO: 847806 - DNA, 33 bp, Homo sapien
cagcaaatagacaatggaatgtaaacatctgcc

SEQ ID NO: 847807 - DNA, 33 bp, Homo sapien
aacaagggaatgctcaaataaaatattacgtat

SEQ ID NO: 847808 - DNA, 33 bp, Homo sapien
aacaagggaatgctcacataaaatattacgtat

SEQ ID NO: 847809 - DNA, 33 bp, Homo sapien
ggaagaagtggaaatacgttaattcagccattc

SEQ ID NO: 847810 - DNA, 33 bp, Homo sapien
ggaagaagtggaaatatgttaattcagccattc

SEQ ID NO: 847811 - DNA, 33 bp, Homo sapien
tttttgagtagaaccccggcattgtactttttg

SEQ ID NO: 847812 - DNA, 33 bp, Homo sapien
tttttgagtagaaccctggcattgtactttttg

SEQ ID NO: 847813 - DNA, 33 bp, Homo sapien
atttggatcctgactacagcaaattgttaacga

SEQ ID NO: 847814 - DNA, 33 bp, Homo sapien
atttggatcctgactagagcaaattgttaacga

SEQ ID NO: 847815 - DNA, 33 bp, Homo sapien
tataaatactaacacccggcagtaaactaatgc

SEQ ID NO: 847816 - DNA, 33 bp, Homo sapien
tataaatactaacacctggcagtaaactaatgc

SEQ ID NO: 847817 - DNA, 33 bp, Homo sapien
atgtggaggcagaaaccgttatctaaaggcaag

SEQ ID NO: 847818 - DNA, 33 bp, Homo sapien
atgtggaggcagaaactgttatctaaaggcaag

SEQ ID NO: 847819 - DNA, 33 bp, Homo sapien
attcaagtacgataagaacaaattctttggtta

SEQ ID NO: 847820 - DNA, 33 bp, Homo sapien
attcaagtacgataagcacaaattctttggtta

SEQ ID NO: 847821 - DNA, 33 bp, Homo sapien
aaagtaggctctattaggagaagaatgtctaaa

SEQ ID NO: 847822 - DNA, 33 bp, Homo sapien
aaagtaggctctattatgagaagaatgtctaaa

SEQ ID NO: 847823 - DNA, 33 bp, Homo sapien
gggcatatggagagtaccaattatccaaaggct

SEQ ID NO: 847824 - DNA, 33 bp, Homo sapien
gggcatatggagagtatcaattatccaaaggct

SEQ ID NO: 847825 - DNA, 33 bp, Homo sapien
tgggcaactgtgctagcaacaaatccagaaaag

SEQ ID NO: 847826 - DNA, 33 bp, Homo sapien
tgggcaactgtgctaggaacaaatccagaaaag

SEQ ID NO: 847827 - DNA, 33 bp, Homo sapien
atagatgcttgtaaaaccagccgaatatcagga

SEQ ID NO: 847828 - DNA, 33 bp, Homo sapien
atagatgcttgtaaaatcagccgaatatcagga

SEQ ID NO: 847829 - DNA, 33 bp, Homo sapien
tgttttgtggactgcaaatgtttcataaggatt

SEQ ID NO: 847830 - DNA, 33 bp, Homo sapien
tgttttgtggactgcagatgtttcataaggatt

SEQ ID NO: 847831 - DNA, 33 bp, Homo sapien
aaaaggtcatattatacaggttggtataagcac

SEQ ID NO: 847832 - DNA, 33 bp, Homo sapien
aaaaggtcatattatataggttggtataagcac

SEQ ID NO: 847833 - DNA, 33 bp, Homo sapien
ggttgctagagaagagcaagtgtgtggttgggt

SEQ ID NO: 847834 - DNA, 33 bp, Homo sapien
ggttgctagagaagaggaagtgtgtggttgggt

SEQ ID NO: 847835 - DNA, 33 bp, Homo sapien
ctttcaggtttccaggacaacttaatagagtaa

SEQ ID NO: 847836 - DNA, 33 bp, Homo sapien
ctttcaggtttccagggcaacttaatagagtaa

SEQ ID NO: 847837 - DNA, 33 bp, Homo sapien
tgcaacacttttcaaacgatggcgttcccttca

SEQ ID NO: 847838 - DNA, 33 bp, Homo sapien
tgcaacacttttcaaatgatggcgttcccttca

SEQ ID NO: 847839 - DNA, 33 bp, Homo sapien
aattacatatactgaacgaagcacattagctct

SEQ ID NO: 847840 - DNA, 33 bp, Homo sapien
aattacatatactgaatgaagcacattagctct

SEQ ID NO: 847841 - DNA, 33 bp, Homo sapien
gtgttagaatatcttacgaaaatgtgaaatgta

SEQ ID NO: 847842 - DNA, 33 bp, Homo sapien
gtgttagaatatcttatgaaaatgtgaaatgta

SEQ ID NO: 847843 - DNA, 33 bp, Homo sapien
ttctaataaatctgacgggcctttgacttctca

SEQ ID NO: 847844 - DNA, 33 bp, Homo sapien
ttctaataaatctgactggcctttgacttctca

SEQ ID NO: 847845 - DNA, 33 bp, Homo sapien
tggagatcctcttggaaactatatcatcaaatg

SEQ ID NO: 847846 - DNA, 33 bp, Homo sapien
tggagatcctcttggacactatatcatcaaatg

SEQ ID NO: 847847 - DNA, 33 bp, Homo sapien
gggagaagctcaggtacgagaaaccctctctcc

SEQ ID NO: 847848 - DNA, 33 bp, Homo sapien
gggagaagctcaggtatgagaaaccctctctcc

SEQ ID NO: 847849 - DNA, 33 bp, Homo sapien
ccaacatctgaaagtccatatgtctgtgcctaa

SEQ ID NO: 847850 - DNA, 33 bp, Homo sapien
ccaacatctgaaagtctatatgtctgtgcctaa

SEQ ID NO: 847851 - DNA, 33 bp, Homo sapien
cacttctaattcctgccaatgaatgtaccaacc

SEQ ID NO: 847852 - DNA, 33 bp, Homo sapien
cacttctaattcctgctaatgaatgtaccaacc

SEQ ID NO: 847853 - DNA, 33 bp, Homo sapien
tcatctgaaacacttccaaatagagataagacc

SEQ ID NO: 847854 - DNA, 33 bp, Homo sapien
tcatctgaaacacttctaaatagagataagacc

SEQ ID NO: 847855 - DNA, 33 bp, Homo sapien
aactatcttggtaatcacaaagcacatttcagt

SEQ ID NO: 847856 - DNA, 33 bp, Homo sapien
aactatcttggtaatcgcaaagcacatttcagt

SEQ ID NO: 847857 - DNA, 33 bp, Homo sapien
tcttaggtaaccatgaacttctgcatgaggaat

SEQ ID NO: 847858 - DNA, 33 bp, Homo sapien
tcttaggtaaccatgagcttctgcatgaggaat

SEQ ID NO: 847859 - DNA, 33 bp, Homo sapien
ggtgatttttattgaacagagtaacaggtatta

SEQ ID NO: 847860 - DNA, 33 bp, Homo sapien
ggtgatttttattgaagagagtaacaggtatta

SEQ ID NO: 847861 - DNA, 33 bp, Homo sapien
ttttgcaaatcctagcccagttgctaccaagaa

SEQ ID NO: 847862 - DNA, 33 bp, Homo sapien
ttttgcaaatcctagctcagttgctaccaagaa

SEQ ID NO: 847863 - DNA, 33 bp, Homo sapien
gctgtgtcctcacataatagaagggtgaccaag

SEQ ID NO: 847864 - DNA, 33 bp, Homo sapien
gctgtgtcctcacatagtagaagggtgaccaag

SEQ ID NO: 847865 - DNA, 33 bp, Homo sapien
atgtttaccccatttaagatctaaactggctct

SEQ ID NO: 847866 - DNA, 33 bp, Homo sapien
atgtttaccccatttaggatctaaactggctct

SEQ ID NO: 847867 - DNA, 33 bp, Homo sapien
acaagaaagcaggacgaaaagtatttagggttc

SEQ ID NO: 847868 - DNA, 33 bp, Homo sapien
acaagaaagcaggacggaaagtatttagggttc

SEQ ID NO: 847869 - DNA, 33 bp, Homo sapien
atctgagatttccaaaagaggtttcccagggaa

SEQ ID NO: 847870 - DNA, 33 bp, Homo sapien
atctgagatttccaaaggaggtttcccagggaa

SEQ ID NO: 847871 - DNA, 33 bp, Homo sapien
aaaccagcaaagggacaagtcataacaagtaat

SEQ ID NO: 847872 - DNA, 33 bp, Homo sapien
aaaccagcaaagggacgagtcataacaagtaat

SEQ ID NO: 847873 - DNA, 33 bp, Homo sapien
tttgaagttcttgcataaataactgcagattaa

SEQ ID NO: 847874 - DNA, 33 bp, Homo sapien
tttgaagttcttgcattaataactgcagattaa

SEQ ID NO: 847875 - DNA, 33 bp, Homo sapien
aagagattagtcttcaaatttcttagctacaac

SEQ ID NO: 847876 - DNA, 33 bp, Homo sapien
aagagattagtcttcagatttcttagctacaac

SEQ ID NO: 847877 - DNA, 33 bp, Homo sapien
aacaagagctttcaaactgtgttctctgtaagt

SEQ ID NO: 847878 - DNA, 33 bp, Homo sapien
aacaagagctttcaaattgtgttctctgtaagt

SEQ ID NO: 847879 - DNA, 33 bp, Homo sapien
acaataaactttccaaagctgtgctcataaatt

SEQ ID NO: 847880 - DNA, 33 bp, Homo sapien
acaataaactttccaatgctgtgctcataaatt

SEQ ID NO: 847881 - DNA, 33 bp, Homo sapien
attcttgtcatatttcaaggtttctcagtcttc

SEQ ID NO: 847882 - DNA, 33 bp, Homo sapien
attcttgtcatatttccaggtttctcagtcttc

SEQ ID NO: 847883 - DNA, 33 bp, Homo sapien
ttttatcttctgagccacagaagggccagttat

SEQ ID NO: 847884 - DNA, 33 bp, Homo sapien
ttttatcttctgagccgcagaagggccagttat

SEQ ID NO: 847885 - DNA, 33 bp, Homo sapien
gccttactctgaggaaagcgtgtgggtttacag

SEQ ID NO: 847886 - DNA, 33 bp, Homo sapien
gccttactctgaggaaggcgtgtgggtttacag

SEQ ID NO: 847887 - DNA, 33 bp, Homo sapien
gaatgacttccatcaaagtcccttatctctttg

SEQ ID NO: 847888 - DNA, 33 bp, Homo sapien
gaatgacttccatcaatgtcccttatctctttg

SEQ ID NO: 847889 - DNA, 33 bp, Homo sapien
gaaaaagaaatggctaagagagaagtgagcccg

SEQ ID NO: 847890 - DNA, 33 bp, Homo sapien
gaaaaagaaatggctaggagagaagtgagcccg

SEQ ID NO: 847891 - DNA, 33 bp, Homo sapien
agaagataaatctagactaaaagtgtagttcat

SEQ ID NO: 847892 - DNA, 33 bp, Homo sapien
agaagataaatctagagtaaaagtgtagttcat

SEQ ID NO: 847893 - DNA, 33 bp, Homo sapien
agttctggattcataccggcacttattagctgt

SEQ ID NO: 847894 - DNA, 33 bp, Homo sapien
agttctggattcatactggcacttattagctgt

SEQ ID NO: 847895 - DNA, 33 bp, Homo sapien
gtatgcacattccttcacctcttttctctggct

SEQ ID NO: 847896 - DNA, 33 bp, Homo sapien
gtatgcacattccttcgcctcttttctctggct

SEQ ID NO: 847897 - DNA, 33 bp, Homo sapien
tctgttgattcattacaagttttcagttaacta

SEQ ID NO: 847898 - DNA, 33 bp, Homo sapien
tctgttgattcattacgagttttcagttaacta

SEQ ID NO: 847899 - DNA, 33 bp, Homo sapien
catcttcaggttggaacaagatatgaacacaaa

SEQ ID NO: 847900 - DNA, 33 bp, Homo sapien
catcttcaggttggaataagatatgaacacaaa

SEQ ID NO: 847901 - DNA, 33 bp, Homo sapien
atataaagtaagataacgtgcatccaagcacca

SEQ ID NO: 847902 - DNA, 33 bp, Homo sapien
atataaagtaagataatgtgcatccaagcacca

SEQ ID NO: 847903 - DNA, 33 bp, Homo sapien
tttagagtctagtccacaatgtttgattcaagg

SEQ ID NO: 847904 - DNA, 33 bp, Homo sapien
tttagagtctagtccataatgtttgattcaagg

SEQ ID NO: 847905 - DNA, 33 bp, Homo sapien
ttttcaaacttcctgacggggaaatgagtgttt

SEQ ID NO: 847906 - DNA, 33 bp, Homo sapien
ttttcaaacttcctgagggggaaatgagtgttt

SEQ ID NO: 847907 - DNA, 33 bp, Homo sapien
cagaagccatggaaaaagtgatttctaagtgga

SEQ ID NO: 847908 - DNA, 33 bp, Homo sapien
cagaagccatggaaaaggtgatttctaagtgga

SEQ ID NO: 847909 - DNA, 33 bp, Homo sapien
gtgatacaataccctacaaatctcaaaccttga

SEQ ID NO: 847910 - DNA, 33 bp, Homo sapien
gtgatacaataccctataaatctcaaaccttga

SEQ ID NO: 847911 - DNA, 33 bp, Homo sapien
tccagattgatcactaggcacaaatatatatcc

SEQ ID NO: 847912 - DNA, 33 bp, Homo sapien
tccagattgatcactatgcacaaatatatatcc

SEQ ID NO: 847913 - DNA, 33 bp, Homo sapien
cagtgatgctgcccacacaaatgaggctcttgc

SEQ ID NO: 847914 - DNA, 33 bp, Homo sapien
cagtgatgctgcccacgcaaatgaggctcttgc

SEQ ID NO: 847915 - DNA, 33 bp, Homo sapien
ataatttacaataatacgtttcagagcatccag

SEQ ID NO: 847916 - DNA, 33 bp, Homo sapien
ataatttacaataatatgtttcagagcatccag

SEQ ID NO: 847917 - DNA, 33 bp, Homo sapien
aataaatatgaaattcaataatcacagtttgaa

SEQ ID NO: 847918 - DNA, 33 bp, Homo sapien
aataaatatgaaattctataatcacagtttgaa

SEQ ID NO: 847919 - DNA, 33 bp, Homo sapien
ctcactatctacctggaatgtgtggttgatatt

SEQ ID NO: 847920 - DNA, 33 bp, Homo sapien
ctcactatctacctgggatgtgtggttgatatt

SEQ ID NO: 847921 - DNA, 33 bp, Homo sapien
tacttttcggataatgacagctaatgctctata

SEQ ID NO: 847922 - DNA, 33 bp, Homo sapien
tacttttcggataatgtcagctaatgctctata

SEQ ID NO: 847923 - DNA, 33 bp, Homo sapien
ttgttacatctcagaaacactgaaaattctcag

SEQ ID NO: 847924 - DNA, 33 bp, Homo sapien
ttgttacatctcagaagcactgaaaattctcag

SEQ ID NO: 847925 - DNA, 33 bp, Homo sapien
ttcctattggtgttaacgctgcttattcttcac

SEQ ID NO: 847926 - DNA, 33 bp, Homo sapien
ttcctattggtgttaatgctgcttattcttcac

SEQ ID NO: 847927 - DNA, 33 bp, Homo sapien
ggtctcctgttccactcaaacacctggcttcag

SEQ ID NO: 847928 - DNA, 33 bp, Homo sapien
ggtctcctgttccactgaaacacctggcttcag

SEQ ID NO: 847929 - DNA, 33 bp, Homo sapien
aatcttaagtacttaccgagatagctgaggatc

SEQ ID NO: 847930 - DNA, 33 bp, Homo sapien
aatcttaagtacttactgagatagctgaggatc

SEQ ID NO: 847931 - DNA, 33 bp, Homo sapien
aaatgttaccaggaaccaagtcttcttcaggtg

SEQ ID NO: 847932 - DNA, 33 bp, Homo sapien
aaatgttaccaggaactaagtcttcttcaggtg

SEQ ID NO: 847933 - DNA, 33 bp, Homo sapien
tgatactcccttttcacgcagtacttattcatg

SEQ ID NO: 847934 - DNA, 33 bp, Homo sapien
tgatactcccttttcatgcagtacttattcatg

SEQ ID NO: 847935 - DNA, 33 bp, Homo sapien
caacaaaggaaaaccacaggactggatatgcaa

SEQ ID NO: 847936 - DNA, 33 bp, Homo sapien
caacaaaggaaaaccataggactggatatgcaa

SEQ ID NO: 847937 - DNA, 33 bp, Homo sapien
taattatgggccatgacgacgattaatattaaa

SEQ ID NO: 847938 - DNA, 33 bp, Homo sapien
taattatgggccatgatgacgattaatattaaa

SEQ ID NO: 847939 - DNA, 33 bp, Homo sapien
tacatatatatccaccaaagaaataaaatcaaa

SEQ ID NO: 847940 - DNA, 33 bp, Homo sapien
tacatatatatccaccgaagaaataaaatcaaa

SEQ ID NO: 847941 - DNA, 33 bp, Homo sapien
tctctttcatggagggaatttgctgggctcttt

SEQ ID NO: 847942 - DNA, 33 bp, Homo sapien
tctctttcatggaggggatttgctgggctcttt

SEQ ID NO: 847943 - DNA, 33 bp, Homo sapien
tcttctgcttctgtaaactacttcacttaactg

SEQ ID NO: 847944 - DNA, 33 bp, Homo sapien
tcttctgcttctgtaatctacttcacttaactg

SEQ ID NO: 847945 - DNA, 33 bp, Homo sapien
ttgcataatctatttggaagtgcttgtttccaa

SEQ ID NO: 847946 - DNA, 33 bp, Homo sapien
ttgcataatctatttgtaagtgcttgtttccaa

SEQ ID NO: 847947 - DNA, 33 bp, Homo sapien
ctctcctttgacttgacagaatttagttccata

SEQ ID NO: 847948 - DNA, 33 bp, Homo sapien
ctctcctttgacttgagagaatttagttccata

SEQ ID NO: 847949 - DNA, 33 bp, Homo sapien
aaacagcaagccaatacgattacacagataata

SEQ ID NO: 847950 - DNA, 33 bp, Homo sapien
aaacagcaagccaatatgattacacagataata

SEQ ID NO: 847951 - DNA, 33 bp, Homo sapien
acaaacgcttttggaaacgatggatgatgactg

SEQ ID NO: 847952 - DNA, 33 bp, Homo sapien
acaaacgcttttggaagcgatggatgatgactg

SEQ ID NO: 847953 - DNA, 33 bp, Homo sapien
tagcaagtcactaatcactcagtttcttcatct

SEQ ID NO: 847954 - DNA, 33 bp, Homo sapien
tagcaagtcactaatctctcagtttcttcatct

SEQ ID NO: 847955 - DNA, 33 bp, Homo sapien
tgttgaaaaaaatttgaattagttgctaacatt

SEQ ID NO: 847956 - DNA, 33 bp, Homo sapien
tgttgaaaaaaatttgcattagttgctaacatt

SEQ ID NO: 847957 - DNA, 33 bp, Homo sapien
tgtgaaccgttattataagtcagcttcactttt

SEQ ID NO: 847958 - DNA, 33 bp, Homo sapien
tgtgaaccgttattatgagtcagcttcactttt

SEQ ID NO: 847959 - DNA, 33 bp, Homo sapien
aggtccttgacatttcagaaaaccatgtaatca

SEQ ID NO: 847960 - DNA, 33 bp, Homo sapien
aggtccttgacatttcggaaaaccatgtaatca

SEQ ID NO: 847961 - DNA, 33 bp, Homo sapien
tcctctttgtgcactcactagggcaaaacataa

SEQ ID NO: 847962 - DNA, 33 bp, Homo sapien
tcctctttgtgcactcgctagggcaaaacataa

SEQ ID NO: 847963 - DNA, 33 bp, Homo sapien
atcccagtcagtgccacgagagcagaatgaaca

SEQ ID NO: 847964 - DNA, 33 bp, Homo sapien
atcccagtcagtgccatgagagcagaatgaaca

SEQ ID NO: 847965 - DNA, 33 bp, Homo sapien
tttagcatattgatggaattgtgcaaccatcac

SEQ ID NO: 847966 - DNA, 33 bp, Homo sapien
tttagcatattgatgggattgtgcaaccatcac

SEQ ID NO: 847967 - DNA, 33 bp, Homo sapien
atgtatctaacaagaaagagattctgcacattc

SEQ ID NO: 847968 - DNA, 33 bp, Homo sapien
atgtatctaacaagaaggagattctgcacattc

SEQ ID NO: 847969 - DNA, 33 bp, Homo sapien
gaatctaaaggatttcaatgtatctaacaagaa

SEQ ID NO: 847970 - DNA, 33 bp, Homo sapien
gaatctaaaggatttcgatgtatctaacaagaa

SEQ ID NO: 847971 - DNA, 33 bp, Homo sapien
acctttaatatatttcccagactcacagacaat

SEQ ID NO: 847972 - DNA, 33 bp, Homo sapien
acctttaatatatttctcagactcacagacaat

SEQ ID NO: 847973 - DNA, 33 bp, Homo sapien
acctcaaacctctataacagtcaatgaagttag

SEQ ID NO: 847974 - DNA, 33 bp, Homo sapien
acctcaaacctctatatcagtcaatgaagttag

SEQ ID NO: 847975 - DNA, 33 bp, Homo sapien
ttggtttgaaagcctacgggcaggaaagacagc

SEQ ID NO: 847976 - DNA, 33 bp, Homo sapien
ttggtttgaaagcctatgggcaggaaagacagc

SEQ ID NO: 847977 - DNA, 33 bp, Homo sapien
aaaatgtggaataatgaagtcagaaaccataga

SEQ ID NO: 847978 - DNA, 33 bp, Homo sapien
aaaatgtggaataatggagtcagaaaccataga

SEQ ID NO: 847979 - DNA, 33 bp, Homo sapien
aattgtacttaaacacaatctttgatgccactc

SEQ ID NO: 847980 - DNA, 33 bp, Homo sapien
aattgtacttaaacacgatctttgatgccactc

SEQ ID NO: 847981 - DNA, 33 bp, Homo sapien
ctcaagagcagatccactctaccaagtgatgac

SEQ ID NO: 847982 - DNA, 33 bp, Homo sapien
ctcaagagcagatccagtctaccaagtgatgac

SEQ ID NO: 847983 - DNA, 33 bp, Homo sapien
agagattttgaagaccggaaaaagaccttgaat

SEQ ID NO: 847984 - DNA, 33 bp, Homo sapien
agagattttgaagacctgaaaaagaccttgaat

SEQ ID NO: 847985 - DNA, 33 bp, Homo sapien
tttcttttatcagacaatagatcccatttattt

SEQ ID NO: 847986 - DNA, 33 bp, Homo sapien
tttcttttatcagacagtagatcccatttattt

SEQ ID NO: 847987 - DNA, 33 bp, Homo sapien
tgtagaacttacactaccattcccacttccttc

SEQ ID NO: 847988 - DNA, 33 bp, Homo sapien
tgtagaacttacactatcattcccacttccttc

SEQ ID NO: 847989 - DNA, 33 bp, Homo sapien
cttccaagggtattcccaagctcactccttcca

SEQ ID NO: 847990 - DNA, 33 bp, Homo sapien
cttccaagggtattcctaagctcactccttcca

SEQ ID NO: 847991 - DNA, 33 bp, Homo sapien
atttgattggagacacaaacctcaggatggggc

SEQ ID NO: 847992 - DNA, 33 bp, Homo sapien
atttgattggagacacgaacctcaggatggggc

SEQ ID NO: 847993 - DNA, 33 bp, Homo sapien
atattttgttcaaaggaaagcatcttaccaatg

SEQ ID NO: 847994 - DNA, 33 bp, Homo sapien
atattttgttcaaagggaagcatcttaccaatg

SEQ ID NO: 847995 - DNA, 33 bp, Homo sapien
ggaatgcctttattaccctcattttgtagaact

SEQ ID NO: 847996 - DNA, 33 bp, Homo sapien
ggaatgcctttattactctcattttgtagaact

SEQ ID NO: 847997 - DNA, 33 bp, Homo sapien
ccaattcttctctatcagacaaacattttatct

SEQ ID NO: 847998 - DNA, 33 bp, Homo sapien
ccaattcttctctatcggacaaacattttatct

SEQ ID NO: 847999 - DNA, 33 bp, Homo sapien
ctacatcgaagtaaaccgttcagatgaaaatgg

SEQ ID NO: 848000 - DNA, 33 bp, Homo sapien
ctacatcgaagtaaactgttcagatgaaaatgg

SEQ ID NO: 848001 - DNA, 33 bp, Homo sapien
taggtcaattcaggaaataagtgttgtgtttga

SEQ ID NO: 848002 - DNA, 33 bp, Homo sapien
taggtcaattcaggaagtaagtgttgtgtttga

SEQ ID NO: 848003 - DNA, 33 bp, Homo sapien
taacacacacctgccacattgtgcaaatgcaga

SEQ ID NO: 848004 - DNA, 33 bp, Homo sapien
taacacacacctgccatattgtgcaaatgcaga

SEQ ID NO: 848005 - DNA, 33 bp, Homo sapien
ttgcataacaacagcaaatctaagtattcaatg

SEQ ID NO: 848006 - DNA, 33 bp, Homo sapien
ttgcataacaacagcatatctaagtattcaatg

SEQ ID NO: 848007 - DNA, 33 bp, Homo sapien
aaagtaaagattaacagaagatctgcctgttgt

SEQ ID NO: 848008 - DNA, 33 bp, Homo sapien
aaagtaaagattaacataagatctgcctgttgt

SEQ ID NO: 848009 - DNA, 33 bp, Homo sapien
gtcctcatggagcttacggttttctgcatagtt

SEQ ID NO: 848010 - DNA, 33 bp, Homo sapien
gtcctcatggagcttatggttttctgcatagtt

SEQ ID NO: 848011 - DNA, 33 bp, Homo sapien
atgcgaatacaagtgacgatcttaatagatgag

SEQ ID NO: 848012 - DNA, 33 bp, Homo sapien
atgcgaatacaagtgatgatcttaatagatgag

SEQ ID NO: 848013 - DNA, 33 bp, Homo sapien
acaattccattactgaaatccctgataaccttt

SEQ ID NO: 848014 - DNA, 33 bp, Homo sapien
acaattccattactgagatccctgataaccttt

SEQ ID NO: 848015 - DNA, 33 bp, Homo sapien
tgacactggatatgtgacaagggaaaagtgacc

SEQ ID NO: 848016 - DNA, 33 bp, Homo sapien
tgacactggatatgtggcaagggaaaagtgacc

SEQ ID NO: 848017 - DNA, 33 bp, Homo sapien
ttgttccttaatctgccaactaagtctgtatca

SEQ ID NO: 848018 - DNA, 33 bp, Homo sapien
ttgttccttaatctgctaactaagtctgtatca

SEQ ID NO: 848019 - DNA, 33 bp, Homo sapien
tctgtatcattgctaactcctttactgctttaa

SEQ ID NO: 848020 - DNA, 33 bp, Homo sapien
tctgtatcattgctaattcctttactgctttaa

SEQ ID NO: 848021 - DNA, 33 bp, Homo sapien
ctgtgttcctatagcaccttgcctggatctttc

SEQ ID NO: 848022 - DNA, 33 bp, Homo sapien
ctgtgttcctatagcagcttgcctggatctttc

SEQ ID NO: 848023 - DNA, 33 bp, Homo sapien
accactctctggaatcactataagtatgctaat

SEQ ID NO: 848024 - DNA, 33 bp, Homo sapien
accactctctggaatcgctataagtatgctaat

SEQ ID NO: 848025 - DNA, 33 bp, Homo sapien
aataatatgccaaaaacgtttatgactttctta

SEQ ID NO: 848026 - DNA, 33 bp, Homo sapien
aataatatgccaaaaatgtttatgactttctta

SEQ ID NO: 848027 - DNA, 33 bp, Homo sapien
acccttattttggcccacaacggattctctatt

SEQ ID NO: 848028 - DNA, 33 bp, Homo sapien
acccttattttggcccgcaacggattctctatt

SEQ ID NO: 848029 - DNA, 33 bp, Homo sapien
cagtagtaatggtgaaagtgagatagggagagc

SEQ ID NO: 848030 - DNA, 33 bp, Homo sapien
cagtagtaatggtgaaggtgagatagggagagc

SEQ ID NO: 848031 - DNA, 33 bp, Homo sapien
aaccagtttcaacaatcagtagcttgagggaaa

SEQ ID NO: 848032 - DNA, 33 bp, Homo sapien
aaccagtttcaacaatgagtagcttgagggaaa

SEQ ID NO: 848033 - DNA, 33 bp, Homo sapien
gtctcatttccatactaacataagggctaaaca

SEQ ID NO: 848034 - DNA, 33 bp, Homo sapien
gtctcatttccatactgacataagggctaaaca

SEQ ID NO: 848035 - DNA, 33 bp, Homo sapien
tatatccattacactcgatcatggctagttggt

SEQ ID NO: 848036 - DNA, 33 bp, Homo sapien
tatatccattacactctatcatggctagttggt

SEQ ID NO: 848037 - DNA, 33 bp, Homo sapien
atctgacaacactgcaaatttatgctgaataca

SEQ ID NO: 848038 - DNA, 33 bp, Homo sapien
atctgacaacactgcacatttatgctgaataca

SEQ ID NO: 848039 - DNA, 33 bp, Homo sapien
cttatgaaaaacacacaaaccttctgaatagtg

SEQ ID NO: 848040 - DNA, 33 bp, Homo sapien
cttatgaaaaacacacgaaccttctgaatagtg

SEQ ID NO: 848041 - DNA, 33 bp, Homo sapien
ctaggcattaattctaaatacaaattcagtgca

SEQ ID NO: 848042 - DNA, 33 bp, Homo sapien
ctaggcattaattctatatacaaattcagtgca

SEQ ID NO: 848043 - DNA, 33 bp, Homo sapien
aatattatacttactacctgcatgataaaataa

SEQ ID NO: 848044 - DNA, 33 bp, Homo sapien
aatattatacttactatctgcatgataaaataa

SEQ ID NO: 848045 - DNA, 33 bp, Homo sapien
tagtccctaatcaccaagcactttccagagcct

SEQ ID NO: 848046 - DNA, 33 bp, Homo sapien
tagtccctaatcaccaggcactttccagagcct

SEQ ID NO: 848047 - DNA, 33 bp, Homo sapien
cccccaaactaaggaaagggaccagaaatgttt

SEQ ID NO: 848048 - DNA, 33 bp, Homo sapien
cccccaaactaaggaacgggaccagaaatgttt

SEQ ID NO: 848049 - DNA, 33 bp, Homo sapien
tgttggtggtgacttaaaacgattttattttat

SEQ ID NO: 848050 - DNA, 33 bp, Homo sapien
tgttggtggtgacttacaacgattttattttat

SEQ ID NO: 848051 - DNA, 33 bp, Homo sapien
ttagcacttaagtcaaagttacaaggctctctt

SEQ ID NO: 848052 - DNA, 33 bp, Homo sapien
ttagcacttaagtcaaggttacaaggctctctt

SEQ ID NO: 848053 - DNA, 33 bp, Homo sapien
ttataaatagttgagaaggaaccagtaaagaaa

SEQ ID NO: 848054 - DNA, 33 bp, Homo sapien
ttataaatagttgagagggaaccagtaaagaaa

SEQ ID NO: 848055 - DNA, 33 bp, Homo sapien
agaatttaagattgaacgtagttaatattactg

SEQ ID NO: 848056 - DNA, 33 bp, Homo sapien
agaatttaagattgaatgtagttaatattactg

SEQ ID NO: 848057 - DNA, 33 bp, Homo sapien
tatgttttggtcttccactatctgtctttatac

SEQ ID NO: 848058 - DNA, 33 bp, Homo sapien
tatgttttggtcttccgctatctgtctttatac

SEQ ID NO: 848059 - DNA, 33 bp, Homo sapien
tctgtctcagagtatgaatcttccaagatagct

SEQ ID NO: 848060 - DNA, 33 bp, Homo sapien
tctgtctcagagtatggatcttccaagatagct

SEQ ID NO: 848061 - DNA, 33 bp, Homo sapien
taagaattgctgttaacgcacaacctaagattg

SEQ ID NO: 848062 - DNA, 33 bp, Homo sapien
taagaattgctgttaaggcacaacctaagattg

SEQ ID NO: 848063 - DNA, 33 bp, Homo sapien
tcctagacattttgaagattttcctaacattct

SEQ ID NO: 848064 - DNA, 33 bp, Homo sapien
tcctagacattttgaatattttcctaacattct

SEQ ID NO: 848065 - DNA, 33 bp, Homo sapien
tctacagtagtaagcaataatgtcctagatctt

SEQ ID NO: 848066 - DNA, 33 bp, Homo sapien
tctacagtagtaagcagtaatgtcctagatctt

SEQ ID NO: 848067 - DNA, 33 bp, Homo sapien
ttacattgagggccccacagacattgaatgaaa

SEQ ID NO: 848068 - DNA, 33 bp, Homo sapien
ttacattgagggccccgcagacattgaatgaaa

SEQ ID NO: 848069 - DNA, 33 bp, Homo sapien
aaagtctatcaggcgacgaaagacaataatgcc

SEQ ID NO: 848070 - DNA, 33 bp, Homo sapien
aaagtctatcaggcgaggaaagacaataatgcc

SEQ ID NO: 848071 - DNA, 33 bp, Homo sapien
acaatgattgcttcaacgtgctatggatagttt

SEQ ID NO: 848072 - DNA, 33 bp, Homo sapien
acaatgattgcttcaatgtgctatggatagttt

SEQ ID NO: 848073 - DNA, 33 bp, Homo sapien
cagcttagtaagtatacattctggtcctattta

SEQ ID NO: 848074 - DNA, 33 bp, Homo sapien
cagcttagtaagtatatattctggtcctattta

SEQ ID NO: 848075 - DNA, 33 bp, Homo sapien
caaattcataaacacaagttcagtatatccagc

SEQ ID NO: 848076 - DNA, 33 bp, Homo sapien
caaattcataaacacaggttcagtatatccagc

SEQ ID NO: 848077 - DNA, 33 bp, Homo sapien
ttaatcattttggcaaccttatattgtagggat

SEQ ID NO: 848078 - DNA, 33 bp, Homo sapien
ttaatcattttggcaatcttatattgtagggat

SEQ ID NO: 848079 - DNA, 33 bp, Homo sapien
atccatccattttaacaatctacaggtaatgaa

SEQ ID NO: 848080 - DNA, 33 bp, Homo sapien
atccatccattttaactatctacaggtaatgaa

SEQ ID NO: 848081 - DNA, 33 bp, Homo sapien
ccttccagcagcaaaactagccgaaggctcaga

SEQ ID NO: 848082 - DNA, 33 bp, Homo sapien
ccttccagcagcaaaagtagccgaaggctcaga

SEQ ID NO: 848083 - DNA, 33 bp, Homo sapien
ttatttaatgtgctcaacttttaatgcactagt

SEQ ID NO: 848084 - DNA, 33 bp, Homo sapien
ttatttaatgtgctcagcttttaatgcactagt

SEQ ID NO: 848085 - DNA, 33 bp, Homo sapien
tagaagtatggaataactgagcttaaaaccctt

SEQ ID NO: 848086 - DNA, 33 bp, Homo sapien
tagaagtatggaataattgagcttaaaaccctt

SEQ ID NO: 848087 - DNA, 33 bp, Homo sapien
cacatttttattgacaatgcctaacatgctgcc

SEQ ID NO: 848088 - DNA, 33 bp, Homo sapien
cacatttttattgacagtgcctaacatgctgcc

SEQ ID NO: 848089 - DNA, 33 bp, Homo sapien
aaggttgttttggaaccaggtgagaaaatacac

SEQ ID NO: 848090 - DNA, 33 bp, Homo sapien
aaggttgttttggaacgaggtgagaaaatacac

SEQ ID NO: 848091 - DNA, 33 bp, Homo sapien
tctgaacttgtcaaacagtcccttaagaagccg

SEQ ID NO: 848092 - DNA, 33 bp, Homo sapien
tctgaacttgtcaaacggtcccttaagaagccg

SEQ ID NO: 848093 - DNA, 33 bp, Homo sapien
cttcctcagtagaacaagttttaacatctgtaa

SEQ ID NO: 848094 - DNA, 33 bp, Homo sapien
cttcctcagtagaacaggttttaacatctgtaa

SEQ ID NO: 848095 - DNA, 33 bp, Homo sapien
ctgtggcattaagtcaaagtgactccttcaaag

SEQ ID NO: 848096 - DNA, 33 bp, Homo sapien
ctgtggcattaagtcagagtgactccttcaaag

SEQ ID NO: 848097 - DNA, 33 bp, Homo sapien
gtttaatgagactatcactttctgaacttttgg

SEQ ID NO: 848098 - DNA, 33 bp, Homo sapien
gtttaatgagactatcgctttctgaacttttgg

SEQ ID NO: 848099 - DNA, 33 bp, Homo sapien
agtttaatcaccaccacaatagattatgtcgtc

SEQ ID NO: 848100 - DNA, 33 bp, Homo sapien
agtttaatcaccaccagaatagattatgtcgtc

SEQ ID NO: 848101 - DNA, 33 bp, Homo sapien
ttcagtgttcatcacacggatttatcagtgtga

SEQ ID NO: 848102 - DNA, 33 bp, Homo sapien
ttcagtgttcatcacatggatttatcagtgtga

SEQ ID NO: 848103 - DNA, 33 bp, Homo sapien
acaccatctctatatccgacacttcctctgtgt

SEQ ID NO: 848104 - DNA, 33 bp, Homo sapien
acaccatctctatatctgacacttcctctgtgt

SEQ ID NO: 848105 - DNA, 33 bp, Homo sapien
ctgtgtcagtctgaccaaagcactgtcgctctg

SEQ ID NO: 848106 - DNA, 33 bp, Homo sapien
ctgtgtcagtctgaccgaagcactgtcgctctg

SEQ ID NO: 848107 - DNA, 33 bp, Homo sapien; identical to SEQ ID NO: 848105

SEQ ID NO: 848108 - DNA, 33 bp, Homo sapien; identical to SEQ ID NO: 848106

SEQ ID NO: 848109 - DNA, 33 bp, Homo sapien
gtacatggggacacacagtatactattctacct

SEQ ID NO: 848110 - DNA, 33 bp, Homo sapien
gtacatggggacacaccgtatactattctacct

SEQ ID NO: 848111 - DNA, 33 bp, Homo sapien
ctcaggtttatctttcaagtaatgagactatgt

SEQ ID NO: 848112 - DNA, 33 bp, Homo sapien
ctcaggtttatctttcgagtaatgagactatgt

SEQ ID NO: 848113 - DNA, 33 bp, Homo sapien
gagtgcccagcaccaaaactgactgcaaagaga

SEQ ID NO: 848114 - DNA, 33 bp, Homo sapien
gagtgcccagcaccaagactgactgcaaagaga

SEQ ID NO: 848115 - DNA, 33 bp, Homo sapien
tgtatgtatatgtttacggagagaaagagaaag

SEQ ID NO: 848116 - DNA, 33 bp, Homo sapien
tgtatgtatatgtttatggagagaaagagaaag

SEQ ID NO: 848117 - DNA, 33 bp, Homo sapien
ttgcaagaggaaagtacctgcatggcctaattt

SEQ ID NO: 848118 - DNA, 33 bp, Homo sapien
ttgcaagaggaaagtatctgcatggcctaattt

SEQ ID NO: 848119 - DNA, 33 bp, Homo sapien
cttcaattccacatacaggacaggcctaaaagc

SEQ ID NO: 848120 - DNA, 33 bp, Homo sapien
cttcaattccacatacgggacaggcctaaaagc

SEQ ID NO: 848121 - DNA, 33 bp, Homo sapien
gtctaatgttctcagaaatatgggaggagcttt

SEQ ID NO: 848122 - DNA, 33 bp, Homo sapien
gtctaatgttctcagagatatgggaggagcttt

SEQ ID NO: 848123 - DNA, 33 bp, Homo sapien
gatattgttatcctcactacacaggggaggaaa

SEQ ID NO: 848124 - DNA, 33 bp, Homo sapien
gatattgttatcctcattacacaggggaggaaa

SEQ ID NO: 848125 - DNA, 33 bp, Homo sapien
gagggcaagaggacctaaattcacacaatgtca

SEQ ID NO: 848126 - DNA, 33 bp, Homo sapien
gagggcaagaggacctgaattcacacaatgtca

SEQ ID NO: 848127 - DNA, 33 bp, Homo sapien
aaaaaacgtctacagacactaagtggttgcagc

SEQ ID NO: 848128 - DNA, 33 bp, Homo sapien
aaaaaacgtctacagatactaagtggttgcagc

SEQ ID NO: 848129 - DNA, 33 bp, Homo sapien
gagttcattgtaaggcactcacctagtttgttt

SEQ ID NO: 848130 - DNA, 33 bp, Homo sapien
gagttcattgtaaggctctcacctagtttgttt

SEQ ID NO: 848131 - DNA, 33 bp, Homo sapien
aaaggccttgaagaacaatatggcttcttcaca

SEQ ID NO: 848132 - DNA, 33 bp, Homo sapien
aaaggccttgaagaacgatatggcttcttcaca

SEQ ID NO: 848133 - DNA, 33 bp, Homo sapien
gattaattaaatagtacgtggaaactttcttct

SEQ ID NO: 848134 - DNA, 33 bp, Homo sapien
gattaattaaatagtatgtggaaactttcttct

SEQ ID NO: 848135 - DNA, 33 bp, Homo sapien
ttatgtgaaagcaaatcaggaagtgtgttgaat

SEQ ID NO: 848136 - DNA, 33 bp, Homo sapien
ttatgtgaaagcaaattaggaagtgtgttgaat

SEQ ID NO: 848137 - DNA, 33 bp, Homo sapien
ccaaagcaatgttctacgaaaattactctgaat

SEQ ID NO: 848138 - DNA, 33 bp, Homo sapien
ccaaagcaatgttctaggaaaattactctgaat

SEQ ID NO: 848139 - DNA, 33 bp, Homo sapien
aaaagctaggagaaaaaaagagcagattaatgt

SEQ ID NO: 848140 - DNA, 33 bp, Homo sapien
aaaagctaggagaaaagaagagcagattaatgt

SEQ ID NO: 848141 - DNA, 33 bp, Homo sapien
ttcttcgttgtggatcggaagaaatagagactc

SEQ ID NO: 848142 - DNA, 33 bp, Homo sapien
ttcttcgttgtggatctgaagaaatagagactc

SEQ ID NO: 848143 - DNA, 33 bp, Homo sapien
ggaagctcagagaacaacaactaagataaaagg

SEQ ID NO: 848144 - DNA, 33 bp, Homo sapien
ggaagctcagagaacaccaactaagataaaagg

SEQ ID NO: 848145 - DNA, 33 bp, Homo sapien
atcatgcttgtgttccgatcaactgtaaaaaca

SEQ ID NO: 848146 - DNA, 33 bp, Homo sapien
atcatgcttgtgttcctatcaactgtaaaaaca

SEQ ID NO: 848147 - DNA, 33 bp, Homo sapien
cgggtctcaatggtgcacccggaaaactcaact

SEQ ID NO: 848148 - DNA, 33 bp, Homo sapien
cgggtctcaatggtgcgcccggaaaactcaact

SEQ ID NO: 848149 - DNA, 33 bp, Homo sapien
agtgatctggcagaaaaaattcaatagggataa

SEQ ID NO: 848150 - DNA, 33 bp, Homo sapien
agtgatctggcagaaagaattcaatagggataa

SEQ ID NO: 848151 - DNA, 33 bp, Homo sapien
gcaatctactggccaacgacaaggtggttaaaa

SEQ ID NO: 848152 - DNA, 33 bp, Homo sapien
gcaatctactggccaatgacaaggtggttaaaa

SEQ ID NO: 848153 - DNA, 33 bp, Homo sapien
ttagtaggtatgaagacgtgatctgcttcttca

SEQ ID NO: 848154 - DNA, 33 bp, Homo sapien
ttagtaggtatgaagatgtgatctgcttcttca

SEQ ID NO: 848155 - DNA, 33 bp, Homo sapien
agcacctgctgtaccacgttatgtttgtaagtg

SEQ ID NO: 848156 - DNA, 33 bp, Homo sapien
agcacctgctgtaccatgttatgtttgtaagtg

SEQ ID NO: 848157 - DNA, 33 bp, Homo sapien
ttgttcatgtggattacagttcccgtctagcat

SEQ ID NO: 848158 - DNA, 33 bp, Homo sapien
ttgttcatgtggattagagttcccgtctagcat

SEQ ID NO: 848159 - DNA, 33 bp, Homo sapien
ttccaggcagagacaaatacacgtgatggcggg

SEQ ID NO: 848160 - DNA, 33 bp, Homo sapien
ttccaggcagagacaagtacacgtgatggcggg

SEQ ID NO: 848161 - DNA, 33 bp, Homo sapien
ggagaaaatcgaagccaaaaaagatcattaaag

SEQ ID NO: 848162 - DNA, 33 bp, Homo sapien
ggagaaaatcgaagccgaaaaagatcattaaag

SEQ ID NO: 848163 - DNA, 33 bp, Homo sapien
tatatagggttttgtccacagaatacagaatgg

SEQ ID NO: 848164 - DNA, 33 bp, Homo sapien
tatatagggttttgtctacagaatacagaatgg

SEQ ID NO: 848165 - DNA, 33 bp, Homo sapien
ggatattatgagtgaaactgtttgaacattcag

SEQ ID NO: 848166 - DNA, 33 bp, Homo sapien
ggatattatgagtgaagctgtttgaacattcag

SEQ ID NO: 848167 - DNA, 33 bp, Homo sapien
tgtaagtggaataacactatatgaggccttttc

SEQ ID NO: 848168 - DNA, 33 bp, Homo sapien
tgtaagtggaataacagtatatgaggccttttc

SEQ ID NO: 848169 - DNA, 33 bp, Homo sapien
tatgattatgtcatgcccttgtcttttttgatc

SEQ ID NO: 848170 - DNA, 33 bp, Homo sapien
tatgattatgtcatgcgcttgtcttttttgatc

SEQ ID NO: 848171 - DNA, 33 bp, Homo sapien
aggaaatgaccttaaaatactgcttctaatcat

SEQ ID NO: 848172 - DNA, 33 bp, Homo sapien
aggaaatgaccttaaactactgcttctaatcat

SEQ ID NO: 848173 - DNA, 33 bp, Homo sapien
tacaatcttagacatacaacacagacttcaaaa

SEQ ID NO: 848174 - DNA, 33 bp, Homo sapien
tacaatcttagacatagaacacagacttcaaaa

SEQ ID NO: 848175 - DNA, 33 bp, Homo sapien
tcctgaaaatgaaggccattctacttcttaggc

SEQ ID NO: 848176 - DNA, 33 bp, Homo sapien
tcctgaaaatgaaggcgattctacttcttaggc

SEQ ID NO: 848177 - DNA, 33 bp, Homo sapien
gtaggccagctagacaacaaaaagtgtctaaac

SEQ ID NO: 848178 - DNA, 33 bp, Homo sapien
gtaggccagctagacagcaaaaagtgtctaaac

SEQ ID NO: 848179 - DNA, 33 bp, Homo sapien
atttcaaacttcctataagtcaaaagttctgct

SEQ ID NO: 848180 - DNA, 33 bp, Homo sapien
atttcaaacttcctatgagtcaaaagttctgct

SEQ ID NO: 848181 - DNA, 33 bp, Homo sapien
ggtgtctgtatgtgcccaacttttatcacctta

SEQ ID NO: 848182 - DNA, 33 bp, Homo sapien
ggtgtctgtatgtgcctaacttttatcacctta

SEQ ID NO: 848183 - DNA, 33 bp, Homo sapien
taatatggggctcataagagataataagtgagt

SEQ ID NO: 848184 - DNA, 33 bp, Homo sapien
taatatggggctcataggagataataagtgagt

SEQ ID NO: 848185 - DNA, 33 bp, Homo sapien
tagagtccagtaatcactcactgagggaaaggg

SEQ ID NO: 848186 - DNA, 33 bp, Homo sapien
tagagtccagtaatcattcactgagggaaaggg

SEQ ID NO: 848187 - DNA, 33 bp, Homo sapien
ggataccctacgatgaacaagaaggttgggcca

SEQ ID NO: 848188 - DNA, 33 bp, Homo sapien
ggataccctacgatgagcaagaaggttgggcca

SEQ ID NO: 848189 - DNA, 33 bp, Homo sapien
tatccttgtacacatcaaatcatttaaccttca

SEQ ID NO: 848190 - DNA, 33 bp, Homo sapien
tatccttgtacacatctaatcatttaaccttca

SEQ ID NO: 848191 - DNA, 33 bp, Homo sapien
tgagttgaacctaaagccttaaggaacgataaa

SEQ ID NO: 848192 - DNA, 33 bp, Homo sapien
tgagttgaacctaaaggcttaaggaacgataaa

SEQ ID NO: 848193 - DNA, 33 bp, Homo sapien
aagatctggagcaagaaaagaacacccactttt

SEQ ID NO: 848194 - DNA, 33 bp, Homo sapien
aagatctggagcaagacaagaacacccactttt

SEQ ID NO: 848195 - DNA, 33 bp, Homo sapien
tcttatacagagaaaaacctaaaagacttcatc

SEQ ID NO: 848196 - DNA, 33 bp, Homo sapien
tcttatacagagaaaaccctaaaagacttcatc

SEQ ID NO: 848197 - DNA, 33 bp, Homo sapien
cctaaaagacttcatcaaaaagctgttagaatt

SEQ ID NO: 848198 - DNA, 33 bp, Homo sapien
cctaaaagacttcatccaaaagctgttagaatt

SEQ ID NO: 848199 - DNA, 33 bp, Homo sapien
tataatttcctgacccagaacaatgaagataag

SEQ ID NO: 848200 - DNA, 33 bp, Homo sapien
tataatttcctgacccggaacaatgaagataag

SEQ ID NO: 848201 - DNA, 33 bp, Homo sapien
cctgtttatgtacacacggacctcaaagactga

SEQ ID NO: 848202 - DNA, 33 bp, Homo sapien
cctgtttatgtacacatggacctcaaagactga

SEQ ID NO: 848203 - DNA, 33 bp, Homo sapien
agatgacaataatagaactcataaggatttttt

SEQ ID NO: 848204 - DNA, 33 bp, Homo sapien
agatgacaataatagacctcataaggatttttt

SEQ ID NO: 848205 - DNA, 33 bp, Homo sapien
ctccagatgaatgtaacagtctcattgcattgc

SEQ ID NO: 848206 - DNA, 33 bp, Homo sapien
ctccagatgaatgtaatagtctcattgcattgc

SEQ ID NO: 848207 - DNA, 33 bp, Homo sapien
ataagtcataagtcaccgatcaaacatatggtc

SEQ ID NO: 848208 - DNA, 33 bp, Homo sapien
ataagtcataagtcactgatcaaacatatggtc

SEQ ID NO: 848209 - DNA, 33 bp, Homo sapien
actgtctgtcagtgatcacaaaattgtatgttt

SEQ ID NO: 848210 - DNA, 33 bp, Homo sapien
actgtctgtcagtgattacaaaattgtatgttt

SEQ ID NO: 848211 - DNA, 33 bp, Homo sapien
gagttgattgtaaaagaccttagaacatgaaag

SEQ ID NO: 848212 - DNA, 33 bp, Homo sapien
gagttgattgtaaaaggccttagaacatgaaag

SEQ ID NO: 848213 - DNA, 33 bp, Homo sapien
gtctgaccctagatgacgccatgggaagataca

SEQ ID NO: 848214 - DNA, 33 bp, Homo sapien
gtctgaccctagatgatgccatgggaagataca

SEQ ID NO: 848215 - DNA, 33 bp, Homo sapien
tctctttcagttctgacatacaagattctaaca

SEQ ID NO: 848216 - DNA, 33 bp, Homo sapien
tctctttcagttctgatatacaagattctaaca

SEQ ID NO: 848217 - DNA, 33 bp, Homo sapien
gagtgtgcagaccccaagaacggattgctagcc

SEQ ID NO: 848218 - DNA, 33 bp, Homo sapien
gagtgtgcagaccccacgaacggattgctagcc

SEQ ID NO: 848219 - DNA, 33 bp, Homo sapien; identical to SEQ ID NO: 848217

SEQ ID NO: 848220 - DNA, 33 bp, Homo sapien; identical to SEQ ID NO: 848218

SEQ ID NO: 848221 - DNA, 33 bp, Homo sapien
cactcctttatcctcaacgcagttactgctcat

SEQ ID NO: 848222 - DNA, 33 bp, Homo sapien
cactcctttatcctcagcgcagttactgctcat

SEQ ID NO: 848223 - DNA, 33 bp, Homo sapien
atcatttcaaaggaccaaaggaccagtaatgaa

SEQ ID NO: 848224 - DNA, 33 bp, Homo sapien
atcatttcaaaggaccgaaggaccagtaatgaa

SEQ ID NO: 848225 - DNA, 33 bp, Homo sapien
ctgtgaccgacattaccgaagcagagagttgta

SEQ ID NO: 848226 - DNA, 33 bp, Homo sapien
ctgtgaccgacattactgaagcagagagttgta

SEQ ID NO: 848227 - DNA, 33 bp, Homo sapien
tggaaggtgctatgaaagtaatagtgtgttgag

SEQ ID NO: 848228 - DNA, 33 bp, Homo sapien
tggaaggtgctatgaatgtaatagtgtgttgag

SEQ ID NO: 848229 - DNA, 33 bp, Homo sapien
agtgttacacaaatgaaggccagcatttatagt

SEQ ID NO: 848230 - DNA, 33 bp, Homo sapien
agtgttacacaaatgagggccagcatttatagt

SEQ ID NO: 848231 - DNA, 33 bp, Homo sapien
tttttgcacaaagagaacgatgaaacataaaga

SEQ ID NO: 848232 - DNA, 33 bp, Homo sapien
tttttgcacaaagagagcgatgaaacataaaga

SEQ ID NO: 848233 - DNA, 33 bp, Homo sapien
gtagtgaaggagaaacaaaaggaacataaatca

SEQ ID NO: 848234 - DNA, 33 bp, Homo sapien
gtagtgaaggagaaacgaaaggaacataaatca

SEQ ID NO: 848235 - DNA, 33 bp, Homo sapien
tcattataaggtctgacctccattatgatctga

SEQ ID NO: 848236 - DNA, 33 bp, Homo sapien
tcattataaggtctgatctccattatgatctga

SEQ ID NO: 848237 - DNA, 33 bp, Homo sapien
cagaaactgtcagtccactaataatggttttta

SEQ ID NO: 848238 - DNA, 33 bp, Homo sapien
cagaaactgtcagtccgctaataatggttttta

SEQ ID NO: 848239 - DNA, 33 bp, Homo sapien
gaaagctgatacttcaatctgtaatacaggctg

SEQ ID NO: 848240 - DNA, 33 bp, Homo sapien
gaaagctgatacttcagtctgtaatacaggctg

SEQ ID NO: 848241 - DNA, 33 bp, Homo sapien
ggtgagctcaacaatactatactgttagtaaat

SEQ ID NO: 848242 - DNA, 33 bp, Homo sapien
ggtgagctcaacaatattatactgttagtaaat

SEQ ID NO: 848243 - DNA, 33 bp, Homo sapien
aggcaatgacacagacaagtgagaatctgatta

SEQ ID NO: 848244 - DNA, 33 bp, Homo sapien
aggcaatgacacagacgagtgagaatctgatta

SEQ ID NO: 848245 - DNA, 33 bp, Homo sapien
cagttttgatagaaaacgaatgaaagcaagtaa

SEQ ID NO: 848246 - DNA, 33 bp, Homo sapien
cagttttgatagaaaatgaatgaaagcaagtaa

SEQ ID NO: 848247 - DNA, 33 bp, Homo sapien
aatgaaaggtgaggaaacaatgttagaaccagc

SEQ ID NO: 848248 - DNA, 33 bp, Homo sapien
aatgaaaggtgaggaatcaatgttagaaccagc

SEQ ID NO: 848249 - DNA, 33 bp, Homo sapien
caatatacaaaagttaagtgtggaaaatattgg

SEQ ID NO: 848250 - DNA, 33 bp, Homo sapien
caatatacaaaagttaggtgtggaaaatattgg

SEQ ID NO: 848251 - DNA, 33 bp, Homo sapien
atggggctaaccagaaatcaggttttgaccact

SEQ ID NO: 848252 - DNA, 33 bp, Homo sapien
atggggctaaccagaattcaggttttgaccact

SEQ ID NO: 848253 - DNA, 33 bp, Homo sapien
ctctccacaatggtcaaatctatttacattccc

SEQ ID NO: 848254 - DNA, 33 bp, Homo sapien
ctctccacaatggtcacatctatttacattccc

SEQ ID NO: 848255 - DNA, 33 bp, Homo sapien
tcaaaacagactggaacgaatcagtgctgacag

SEQ ID NO: 848256 - DNA, 33 bp, Homo sapien
tcaaaacagactggaatgaatcagtgctgacag

SEQ ID NO: 848257 - DNA, 33 bp, Homo sapien
atgaacatccatgttacatgacaatgaagaaca

SEQ ID NO: 848258 - DNA, 33 bp, Homo sapien
atgaacatccatgttatatgacaatgaagaaca

SEQ ID NO: 848259 - DNA, 33 bp, Homo sapien
aagaggaagagtagaccaatcttgtcactgttc

SEQ ID NO: 848260 - DNA, 33 bp, Homo sapien
aagaggaagagtagactaatcttgtcactgttc

SEQ ID NO: 848261 - DNA, 33 bp, Homo sapien
tttccactctctttatgaatccactcatggtga

SEQ ID NO: 848262 - DNA, 33 bp, Homo sapien
tttccactctctttattaatccactcatggtga

SEQ ID NO: 848263 - DNA, 33 bp, Homo sapien
ctatagaacttcaggaaacatcacatcttttgc

SEQ ID NO: 848264 - DNA, 33 bp, Homo sapien
ctatagaacttcaggagacatcacatcttttgc

SEQ ID NO: 848265 - DNA, 33 bp, Homo sapien
tttctgttctcatcaaaactataaactcttcaa

SEQ ID NO: 848266 - DNA, 33 bp, Homo sapien
tttctgttctcatcaacactataaactcttcaa

SEQ ID NO: 848267 - DNA, 33 bp, Homo sapien
aatccatagaataagccgcctcggtacggcatt

SEQ ID NO: 848268 - DNA, 33 bp, Homo sapien
aatccatagaataagctgcctcggtacggcatt

SEQ ID NO: 848269 - DNA, 33 bp, Homo sapien
gcttactagtaacaaacagcaagtgtaatgccg

SEQ ID NO: 848270 - DNA, 33 bp, Homo sapien
gcttactagtaacaaatagcaagtgtaatgccg

SEQ ID NO: 848271 - DNA, 33 bp, Homo sapien
aggttgactgtgttagaaaaacagaatattttt

SEQ ID NO: 848272 - DNA, 33 bp, Homo sapien
aggttgactgtgttaggaaaacagaatattttt

SEQ ID NO: 848273 - DNA, 33 bp, Homo sapien
tttcatttacttcatacctgtccaaataagcct

SEQ ID NO: 848274 - DNA, 33 bp, Homo sapien
tttcatttacttcatatctgtccaaataagcct

SEQ ID NO: 848275 - DNA, 33 bp, Homo sapien
acactctcaattcttgaactcatctcacagact

SEQ ID NO: 848276 - DNA, 33 bp, Homo sapien
acactctcaattcttgtactcatctcacagact

SEQ ID NO: 848277 - DNA, 33 bp, Homo sapien
agaaagaacctttgtccctcacacctggctgca

SEQ ID NO: 848278 - DNA, 33 bp, Homo sapien
agaaagaacctttgtctctcacacctggctgca

SEQ ID NO: 848279 - DNA, 33 bp, Homo sapien
tgttattggcaatcagcaaatctagaaatcaat

SEQ ID NO: 848280 - DNA, 33 bp, Homo sapien
tgttattggcaatcaggaaatctagaaatcaat

SEQ ID NO: 848281 - DNA, 33 bp, Homo sapien
agctccatcaccaaaaatacctgtcctgtctcc

SEQ ID NO: 848282 - DNA, 33 bp, Homo sapien
agctccatcaccaaaagtacctgtcctgtctcc

SEQ ID NO: 848283 - DNA, 33 bp, Homo sapien
tgagtatggttataaacgggagacaggacaggt

SEQ ID NO: 848284 - DNA, 33 bp, Homo sapien
tgagtatggttataaatgggagacaggacaggt

SEQ ID NO: 848285 - DNA, 33 bp, Homo sapien
ggaatcagctcagatacccttcaacaggtgaat

SEQ ID NO: 848286 - DNA, 33 bp, Homo sapien
ggaatcagctcagatatccttcaacaggtgaat

SEQ ID NO: 848287 - DNA, 33 bp, Homo sapien
gcctttgccggtatcagaagttcacatatcaaa

SEQ ID NO: 848288 - DNA, 33 bp, Homo sapien
gcctttgccggtatcataagttcacatatcaaa

SEQ ID NO: 848289 - DNA, 33 bp, Homo sapien
ttacctgggttgaagaacctaatagctaggtgt

SEQ ID NO: 848290 - DNA, 33 bp, Homo sapien
ttacctgggttgaagatcctaatagctaggtgt

SEQ ID NO: 848291 - DNA, 33 bp, Homo sapien
atggttatacaactaacgagttctggacctgtt

SEQ ID NO: 848292 - DNA, 33 bp, Homo sapien
atggttatacaactaatgagttctggacctgtt

SEQ ID NO: 848293 - DNA, 33 bp, Homo sapien
ttatctaataaaactcacttctactttgcctac

SEQ ID NO: 848294 - DNA, 33 bp, Homo sapien
ttatctaataaaactcgcttctactttgcctac

SEQ ID NO: 848295 - DNA, 33 bp, Homo sapien
acatttcaatagcatactagtaggcaaagtaga

SEQ ID NO: 848296 - DNA, 33 bp, Homo sapien
acatttcaatagcatattagtaggcaaagtaga

SEQ ID NO: 848297 - DNA, 33 bp, Homo sapien
tgctttcagaatagaaatgtctctctataaagc

SEQ ID NO: 848298 - DNA, 33 bp, Homo sapien
tgctttcagaatagaagtgtctctctataaagc

SEQ ID NO: 848299 - DNA, 33 bp, Homo sapien
tgtataaacttgaaagaaccaagtagctattac

SEQ ID NO: 848300 - DNA, 33 bp, Homo sapien
tgtataaacttgaaagcaccaagtagctattac

SEQ ID NO: 848301 - DNA, 33 bp, Homo sapien
cactggttgcggttaaatgtttataacaattat

SEQ ID NO: 848302 - DNA, 33 bp, Homo sapien
cactggttgcggttaagtgtttataacaattat

SEQ ID NO: 848303 - DNA, 33 bp, Homo sapien
ttaatctctagatgcaataatcagttttccttt

SEQ ID NO: 848304 - DNA, 33 bp, Homo sapien
ttaatctctagatgcagtaatcagttttccttt

SEQ ID NO: 848305 - DNA, 33 bp, Homo sapien
taagtatccttgtctcactgactcacattattt

SEQ ID NO: 848306 - DNA, 33 bp, Homo sapien
taagtatccttgtctcgctgactcacattattt

SEQ ID NO: 848307 - DNA, 33 bp, Homo sapien
tcccacagtaaagagaacaatctaaggatgcat

SEQ ID NO: 848308 - DNA, 33 bp, Homo sapien
tcccacagtaaagagatcaatctaaggatgcat

SEQ ID NO: 848309 - DNA, 33 bp, Homo sapien
gcattagaattctcccactttgaaattctgttt

SEQ ID NO: 848310 - DNA, 33 bp, Homo sapien
gcattagaattctcccgctttgaaattctgttt

SEQ ID NO: 848311 - DNA, 33 bp, Homo sapien
gcatcagctgaagtccaataaagaggatgaaaa

SEQ ID NO: 848312 - DNA, 33 bp, Homo sapien
gcatcagctgaagtcctataaagaggatgaaaa

SEQ ID NO: 848313 - DNA, 33 bp, Homo sapien
ctggaggccaacaaacacagaaccagggcacta

SEQ ID NO: 848314 - DNA, 33 bp, Homo sapien
ctggaggccaacaaacgcagaaccagggcacta

SEQ ID NO: 848315 - DNA, 33 bp, Homo sapien
gtgacatctctttatggaaaaggtccccaagct

SEQ ID NO: 848316 - DNA, 33 bp, Homo sapien
gtgacatctctttatgtaaaaggtccccaagct

SEQ ID NO: 848317 - DNA, 33 bp, Homo sapien
gttcctgcccgaaagcccttcgtttctattaag

SEQ ID NO: 848318 - DNA, 33 bp, Homo sapien
gttcctgcccgaaagctcttcgtttctattaag

SEQ ID NO: 848319 - DNA, 33 bp, Homo sapien
tattttcactatgtacagaagtaggccttgaca

SEQ ID NO: 848320 - DNA, 33 bp, Homo sapien
tattttcactatgtacggaagtaggccttgaca

SEQ ID NO: 848321 - DNA, 33 bp, Homo sapien
catagcagtttgtaatcacatgtttctcagtcc

SEQ ID NO: 848322 - DNA, 33 bp, Homo sapien
catagcagtttgtaatgacatgtttctcagtcc

SEQ ID NO: 848323 - DNA, 33 bp, Homo sapien
catcactcccctgaccacttaggatcataacta

SEQ ID NO: 848324 - DNA, 33 bp, Homo sapien
catcactcccctgacctcttaggatcataacta

SEQ ID NO: 848325 - DNA, 33 bp, Homo sapien
gattggaactctgaacacataaatatatataca

SEQ ID NO: 848326 - DNA, 33 bp, Homo sapien
gattggaactctgaacgcataaatatatataca

SEQ ID NO: 848327 - DNA, 33 bp, Homo sapien
tgaaagcttttgttccgcggaagagataaagga

SEQ ID NO: 848328 - DNA, 33 bp, Homo sapien
tgaaagcttttgttcctcggaagagataaagga

SEQ ID NO: 848329 - DNA, 33 bp, Homo sapien
ctagaatatctacaggaccgtaactacagctga

SEQ ID NO: 848330 - DNA, 33 bp, Homo sapien
ctagaatatctacagggccgtaactacagctga

SEQ ID NO: 848331 - DNA, 33 bp, Homo sapien
tcacaatattcacatacaagaagaagactgaaa

SEQ ID NO: 848332 - DNA, 33 bp, Homo sapien
tcacaatattcacatataagaagaagactgaaa

SEQ ID NO: 848333 - DNA, 33 bp, Homo sapien
gattggctcctagaaagcactaagtacattttt

SEQ ID NO: 848334 - DNA, 33 bp, Homo sapien
gattggctcctagaaatcactaagtacattttt

SEQ ID NO: 848335 - DNA, 33 bp, Homo sapien
ttgtatcccagcctaacaaagggcctgacatat

SEQ ID NO: 848336 - DNA, 33 bp, Homo sapien
ttgtatcccagcctaagaaagggcctgacatat

SEQ ID NO: 848337 - DNA, 33 bp, Homo sapien
gttttggggatgggtaaagactaattccttata

SEQ ID NO: 848338 - DNA, 33 bp, Homo sapien
gttttggggatgggtacagactaattccttata

SEQ ID NO: 848339 - DNA, 33 bp, Homo sapien
ttcctttgcctgtgtgcagcaacagttggtagt

SEQ ID NO: 848340 - DNA, 33 bp, Homo sapien
ttcctttgcctgtgtgtagcaacagttggtagt

SEQ ID NO: 848341 - DNA, 33 bp, Homo sapien
ttctgtagaatctcacaataaaaataacttcat

SEQ ID NO: 848342 - DNA, 33 bp, Homo sapien
ttctgtagaatctcacgataaaaataacttcat

SEQ ID NO: 848343 - DNA, 33 bp, Homo sapien
gttcctgctactttcagagtcctcagatctcgt

SEQ ID NO: 848344 - DNA, 33 bp, Homo sapien
gttcctgctactttcatagtcctcagatctcgt

SEQ ID NO: 848345 - DNA, 33 bp, Homo sapien
gactgagcatctcctgaaagttaactagtttgc

SEQ ID NO: 848346 - DNA, 33 bp, Homo sapien
gactgagcatctcctgcaagttaactagtttgc

SEQ ID NO: 848347 - DNA, 33 bp, Homo sapien
aactcagcactgtgaccagaatatattttttag

SEQ ID NO: 848348 - DNA, 33 bp, Homo sapien
aactcagcactgtgactagaatatattttttag

SEQ ID NO: 848349 - DNA, 33 bp, Homo sapien
tggccacaactttaaacaacagcccacttatag

SEQ ID NO: 848350 - DNA, 33 bp, Homo sapien
tggccacaactttaaagaacagcccacttatag

SEQ ID NO: 848351 - DNA, 33 bp, Homo sapien
ccagccaggtgttcacagtaggtcaccatggct

SEQ ID NO: 848352 - DNA, 33 bp, Homo sapien
ccagccaggtgttcacggtaggtcaccatggct

SEQ ID NO: 848353 - DNA, 33 bp, Homo sapien
ctggaagatgcctacacgtaaggagtgtgaaga

SEQ ID NO: 848354 - DNA, 33 bp, Homo sapien
ctggaagatgcctacatgtaaggagtgtgaaga

SEQ ID NO: 848355 - DNA, 33 bp, Homo sapien
tctttaagccagatcactccacatcccaagtta

SEQ ID NO: 848356 - DNA, 33 bp, Homo sapien
tctttaagccagatcattccacatcccaagtta

SEQ ID NO: 848357 - DNA, 33 bp, Homo sapien
gtcccacagacattaaagagcatggtgtgttta

SEQ ID NO: 848358 - DNA, 33 bp, Homo sapien
gtcccacagacattaaggagcatggtgtgttta

SEQ ID NO: 848359 - DNA, 33 bp, Homo sapien
gtaatgtaaggcagtaacaggatctgtctacaa

SEQ ID NO: 848360 - DNA, 33 bp, Homo sapien
gtaatgtaaggcagtatcaggatctgtctacaa

SEQ ID NO: 848361 - DNA, 33 bp, Homo sapien
aaaattctggctgtgtaaaatgaattgaaacaa

SEQ ID NO: 848362 - DNA, 33 bp, Homo sapien
aaaattctggctgtgtcaaatgaattgaaacaa

SEQ ID NO: 848363 - DNA, 33 bp, Homo sapien
gtagaagagttagggcaaggaaaagcaactgaa

SEQ ID NO: 848364 - DNA, 33 bp, Homo sapien
gtagaagagttagggcgaggaaaagcaactgaa

SEQ ID NO: 848365 - DNA, 33 bp, Homo sapien
atagtaggtggaagaaactatggctggctccct

SEQ ID NO: 848366 - DNA, 33 bp, Homo sapien
atagtaggtggaagaacctatggctggctccct

SEQ ID NO: 848367 - DNA, 33 bp, Homo sapien
gatgactttcttcttcacccaagtattttgtgt

SEQ ID NO: 848368 - DNA, 33 bp, Homo sapien
gatgactttcttcttcgcccaagtattttgtgt

SEQ ID NO: 848369 - DNA, 33 bp, Homo sapien
catcataacacttataataatggtgtatgtgtc

SEQ ID NO: 848370 - DNA, 33 bp, Homo sapien
catcataacacttatagtaatggtgtatgtgtc

SEQ ID NO: 848371 - DNA, 33 bp, Homo sapien
gaaagaacagtcatccaatagagaaagaaagac

SEQ ID NO: 848372 - DNA, 33 bp, Homo sapien
gaaagaacagtcatccgatagagaaagaaagac

SEQ ID NO: 848373 - DNA, 33 bp, Homo sapien
atgaagttaagttaaacgaaacatggtgtttct

SEQ ID NO: 848374 - DNA, 33 bp, Homo sapien
atgaagttaagttaaatgaaacatggtgtttct

SEQ ID NO: 848375 - DNA, 33 bp, Homo sapien
tacctttgcaaaatcaagactccgaatccagtc

SEQ ID NO: 848376 - DNA, 33 bp, Homo sapien
tacctttgcaaaatcatgactccgaatccagtc

SEQ ID NO: 848377 - DNA, 33 bp, Homo sapien
aaggctgaatctcaacactctcctccaggttga

SEQ ID NO: 848378 - DNA, 33 bp, Homo sapien
aaggctgaatctcaacgctctcctccaggttga

SEQ ID NO: 848379 - DNA, 33 bp, Homo sapien
gtaggcatggtcgttacgccatttgcacagact

SEQ ID NO: 848380 - DNA, 33 bp, Homo sapien
gtaggcatggtcgttatgccatttgcacagact

SEQ ID NO: 848381 - DNA, 33 bp, Homo sapien
tttgcatctttcagcacctaacaccattcttta

SEQ ID NO: 848382 - DNA, 33 bp, Homo sapien
tttgcatctttcagcatctaacaccattcttta

SEQ ID NO: 848383 - DNA, 33 bp, Homo sapien
ctgtgccagtcactatcagaacagtctaatgct

SEQ ID NO: 848384 - DNA, 33 bp, Homo sapien
ctgtgccagtcactatgagaacagtctaatgct

SEQ ID NO: 848385 - DNA, 33 bp, Homo sapien
tcaaccatagctttagcactttgagtatgatta

SEQ ID NO: 848386 - DNA, 33 bp, Homo sapien
tcaaccatagctttagtactttgagtatgatta

SEQ ID NO: 848387 - DNA, 33 bp, Homo sapien
catcccacgtgaactaagccaagttgtccaaga

SEQ ID NO: 848388 - DNA, 33 bp, Homo sapien
catcccacgtgaactaggccaagttgtccaaga

SEQ ID NO: 848389 - DNA, 33 bp, Homo sapien
tctgttaagtggagacaattgggtcagataatc

SEQ ID NO: 848390 - DNA, 33 bp, Homo sapien
tctgttaagtggagacgattgggtcagataatc

SEQ ID NO: 848391 - DNA, 33 bp, Homo sapien
aacatatcctggcctaccgcttgataactcgcg

SEQ ID NO: 848392 - DNA, 33 bp, Homo sapien
aacatatcctggcctatcgcttgataactcgcg

SEQ ID NO: 848393 - DNA, 33 bp, Homo sapien
agaacgtgtagagagaacaatatgaaggatact

SEQ ID NO: 848394 - DNA, 33 bp, Homo sapien
agaacgtgtagagagagcaatatgaaggatact

SEQ ID NO: 848395 - DNA, 33 bp, Homo sapien
ctctaaaccttttccaaagaagcaagaagaaaa

SEQ ID NO: 848396 - DNA, 33 bp, Homo sapien
ctctaaaccttttccagagaagcaagaagaaaa

SEQ ID NO: 848397 - DNA, 33 bp, Homo sapien
tatttacttatctaccggaccctcagctatata

SEQ ID NO: 848398 - DNA, 33 bp, Homo sapien
tatttacttatctacctgaccctcagctatata

SEQ ID NO: 848399 - DNA, 33 bp, Homo sapien
gctccacgggggtctactagaatgtttcatctt

SEQ ID NO: 848400 - DNA, 33 bp, Homo sapien
gctccacgggggtctattagaatgtttcatctt

SEQ ID NO: 848401 - DNA, 33 bp, Homo sapien
gccatctacatgaggacggtttggtttgagttc

SEQ ID NO: 848402 - DNA, 33 bp, Homo sapien
gccatctacatgaggatggtttggtttgagttc

SEQ ID NO: 848403 - DNA, 33 bp, Homo sapien
aaagtagaatgacgtagaaagaagccaacatcg

SEQ ID NO: 848404 - DNA, 33 bp, Homo sapien
aaagtagaatgacgtataaagaagccaacatcg

SEQ ID NO: 848405 - DNA, 33 bp, Homo sapien
agataaattagcggacactttctcaaaagaatg

SEQ ID NO: 848406 - DNA, 33 bp, Homo sapien
agataaattagcggacgctttctcaaaagaatg

SEQ ID NO: 848407 - DNA, 33 bp, Homo sapien
agcttgtttacaaaacaggattgaaaaatctct

SEQ ID NO: 848408 - DNA, 33 bp, Homo sapien
agcttgtttacaaaacgggattgaaaaatctct

SEQ ID NO: 848409 - DNA, 33 bp, Homo sapien
ttccttggatcctgtacgctggccttatttttt

SEQ ID NO: 848410 - DNA, 33 bp, Homo sapien
ttccttggatcctgtatgctggccttatttttt

SEQ ID NO: 848411 - DNA, 33 bp, Homo sapien
tctccagttcctattacatttctgcctaatttt

SEQ ID NO: 848412 - DNA, 33 bp, Homo sapien
tctccagttcctattatatttctgcctaatttt

SEQ ID NO: 848413 - DNA, 33 bp, Homo sapien
cagcaaagtatgaagacattttgtgaggcttag

SEQ ID NO: 848414 - DNA, 33 bp, Homo sapien
cagcaaagtatgaagagattttgtgaggcttag

SEQ ID NO: 848415 - DNA, 33 bp, Homo sapien
cattcaagaaaggggaggccttgagtaagagaa

SEQ ID NO: 848416 - DNA, 33 bp, Homo sapien
cattcaagaaaggggatgccttgagtaagagaa

SEQ ID NO: 848417 - DNA, 33 bp, Homo sapien
ctgttgcctgggataacatggaagatagaaaat

SEQ ID NO: 848418 - DNA, 33 bp, Homo sapien
ctgttgcctgggataatatggaagatagaaaat

SEQ ID NO: 848419 - DNA, 33 bp, Homo sapien
gaaataagtacctagacatgagtgctaccatag

SEQ ID NO: 848420 - DNA, 33 bp, Homo sapien
gaaataagtacctagatatgagtgctaccatag

SEQ ID NO: 848421 - DNA, 33 bp, Homo sapien
tggaaaagctcatacgacagagaactggtggca

SEQ ID NO: 848422 - DNA, 33 bp, Homo sapien
tggaaaagctcatacggcagagaactggtggca

SEQ ID NO: 848423 - DNA, 33 bp, Homo sapien
atttcttcattcatcaataatttgcacagcaga

SEQ ID NO: 848424 - DNA, 33 bp, Homo sapien
atttcttcattcatcagtaatttgcacagcaga

SEQ ID NO: 848425 - DNA, 33 bp, Homo sapien
tctgaaccacaaagcaaaaaaatattctgagtg

SEQ ID NO: 848426 - DNA, 33 bp, Homo sapien
tctgaaccacaaagcacaaaaatattctgagtg

SEQ ID NO: 848427 - DNA, 33 bp, Homo sapien
tgaaagaaaataattgaaagtggctgggcattg

SEQ ID NO: 848428 - DNA, 33 bp, Homo sapien
tgaaagaaaataattggaagtggctgggcattg

SEQ ID NO: 848429 - DNA, 33 bp, Homo sapien
ggcttcctgacagaatcagaccgtgatgtgagc

SEQ ID NO: 848430 - DNA, 33 bp, Homo sapien
ggcttcctgacagaatgagaccgtgatgtgagc

SEQ ID NO: 848431 - DNA, 33 bp, Homo sapien
caccactttcaaagaaacatggtataataaaat

SEQ ID NO: 848432 - DNA, 33 bp, Homo sapien
caccactttcaaagaatcatggtataataaaat

SEQ ID NO: 848433 - DNA, 33 bp, Homo sapien
taaatattgcaatcaaaatggcctctacccttg

SEQ ID NO: 848434 - DNA, 33 bp, Homo sapien
taaatattgcaatcaacatggcctctacccttg

SEQ ID NO: 848435 - DNA, 33 bp, Homo sapien
aacagatgcaattagacacaagagaggaatggc

SEQ ID NO: 848436 - DNA, 33 bp, Homo sapien
aacagatgcaattagatacaagagaggaatggc

SEQ ID NO: 848437 - DNA, 33 bp, Homo sapien
tcatgtttccctagacaatatgtagtaaatata

SEQ ID NO: 848438 - DNA, 33 bp, Homo sapien
tcatgtttccctagaccatatgtagtaaatata

SEQ ID NO: 848439 - DNA, 33 bp, Homo sapien
ctgagggtcagttagcagaatagttctttctca

SEQ ID NO: 848440 - DNA, 33 bp, Homo sapien
ctgagggtcagttagcggaatagttctttctca

SEQ ID NO: 848441 - DNA, 33 bp, Homo sapien
tttcttccaaaaatgagggtgggtgaaactgag

SEQ ID NO: 848442 - DNA, 33 bp, Homo sapien
tttcttccaaaaatgatggtgggtgaaactgag

SEQ ID NO: 848443 - DNA, 33 bp, Homo sapien
ttaaggagtcatttccactagagagaaacacgt

SEQ ID NO: 848444 - DNA, 33 bp, Homo sapien
ttaaggagtcatttccgctagagagaaacacgt

SEQ ID NO: 848445 - DNA, 33 bp, Homo sapien
gttatcacctagagcccgaagcttaccttaggg

SEQ ID NO: 848446 - DNA, 33 bp, Homo sapien
gttatcacctagagcctgaagcttaccttaggg

SEQ ID NO: 848447 - DNA, 33 bp, Homo sapien
tttaagttgcaaaaccaaaaagtatgttactga

SEQ ID NO: 848448 - DNA, 33 bp, Homo sapien
tttaagttgcaaaaccgaaaagtatgttactga

SEQ ID NO: 848449 - DNA, 33 bp, Homo sapien
gccctcaacagggggagaattggttcttagggt

SEQ ID NO: 848450 - DNA, 33 bp, Homo sapien
gccctcaacagggggataattggttcttagggt

SEQ ID NO: 848451 - DNA, 33 bp, Homo sapien
ccttagtatctttgacagatgtccttctggatg

SEQ ID NO: 848452 - DNA, 33 bp, Homo sapien
ccttagtatctttgactgatgtccttctggatg

SEQ ID NO: 848453 - DNA, 33 bp, Homo sapien
gaaggatcttgaaggacagcccagataattagg

SEQ ID NO: 848454 - DNA, 33 bp, Homo sapien
gaaggatcttgaaggagagcccagataattagg

SEQ ID NO: 848455 - DNA, 33 bp, Homo sapien
ataaacactgggcgaaatggccaaacatagtgt

SEQ ID NO: 848456 - DNA, 33 bp, Homo sapien
ataaacactgggcgaattggccaaacatagtgt

SEQ ID NO: 848457 - DNA, 33 bp, Homo sapien
tgaatgtgatctgatacattttgctggaatttt

SEQ ID NO: 848458 - DNA, 33 bp, Homo sapien
tgaatgtgatctgatatattttgctggaatttt

SEQ ID NO: 848459 - DNA, 33 bp, Homo sapien
atatgaagagtagaaactaatccttaactgatg

SEQ ID NO: 848460 - DNA, 33 bp, Homo sapien
atatgaagagtagaaattaatccttaactgatg

SEQ ID NO: 848461 - DNA, 33 bp, Homo sapien
agcctcttatttttcaatcagctaagatgagta

SEQ ID NO: 848462 - DNA, 33 bp, Homo sapien
agcctcttatttttcactcagctaagatgagta

SEQ ID NO: 848463 - DNA, 33 bp, Homo sapien
gcctctgcaagttctgaataacccaatgtcaat

SEQ ID NO: 848464 - DNA, 33 bp, Homo sapien
gcctctgcaagttctgcataacccaatgtcaat

SEQ ID NO: 848465 - DNA, 33 bp, Homo sapien
tgttaaagttatttgcaaaagttggaatgttta

SEQ ID NO: 848466 - DNA, 33 bp, Homo sapien
tgttaaagttatttgcgaaagttggaatgttta

SEQ ID NO: 848467 - DNA, 33 bp, Homo sapien
tgattattgcgtgaaccagcacttctgaatgtg

SEQ ID NO: 848468 - DNA, 33 bp, Homo sapien
tgattattgcgtgaactagcacttctgaatgtg

SEQ ID NO: 848469 - DNA, 33 bp, Homo sapien
attattagaggcaccactgaggtttcatctcat

SEQ ID NO: 848470 - DNA, 33 bp, Homo sapien
attattagaggcaccattgaggtttcatctcat

SEQ ID NO: 848471 - DNA, 33 bp, Homo sapien
agataaagtgtatgaaagcattttgtaaatctc

SEQ ID NO: 848472 - DNA, 33 bp, Homo sapien
agataaagtgtatgaaggcattttgtaaatctc

SEQ ID NO: 848473 - DNA, 33 bp, Homo sapien
atattcaagaaattcaataaatcccaagcacaa

SEQ ID NO: 848474 - DNA, 33 bp, Homo sapien
atattcaagaaattcactaaatcccaagcacaa

SEQ ID NO: 848475 - DNA, 33 bp, Homo sapien
ttcagcaatacatgaacggaggttttcaagaga

SEQ ID NO: 848476 - DNA, 33 bp, Homo sapien
ttcagcaatacatgaatggaggttttcaagaga

SEQ ID NO: 848477 - DNA, 33 bp, Homo sapien
gacacaaggagtcaaactccacagaatcatggt

SEQ ID NO: 848478 - DNA, 33 bp, Homo sapien
gacacaaggagtcaaattccacagaatcatggt

SEQ ID NO: 848479 - DNA, 33 bp, Homo sapien
catgcgaagccaatacaaggtcatggcggagca

SEQ ID NO: 848480 - DNA, 33 bp, Homo sapien
catgcgaagccaatacgaggtcatggcggagca

SEQ ID NO: 848481 - DNA, 33 bp, Homo sapien
catctagaaagaccaaacatgaactctgtagct

SEQ ID NO: 848482 - DNA, 33 bp, Homo sapien
catctagaaagaccaatcatgaactctgtagct

SEQ ID NO: 848483 - DNA, 33 bp, Homo sapien
ttattgtcaataaaccaacaacaaaggtaaatt

SEQ ID NO: 848484 - DNA, 33 bp, Homo sapien
ttattgtcaataaaccgacaacaaaggtaaatt

SEQ ID NO: 848485 - DNA, 33 bp, Homo sapien
ttgataccacacaataagttcatgaattaaaat

SEQ ID NO: 848486 - DNA, 33 bp, Homo sapien
ttgataccacacaatacgttcatgaattaaaat

SEQ ID NO: 848487 - DNA, 33 bp, Homo sapien
atcccaaatcactctacgtacctctgatagaca

SEQ ID NO: 848488 - DNA, 33 bp, Homo sapien
atcccaaatcactctatgtacctctgatagaca

SEQ ID NO: 848489 - DNA, 33 bp, Homo sapien
acacttggtaccttgcacttgattaaggttttt

SEQ ID NO: 848490 - DNA, 33 bp, Homo sapien
acacttggtaccttgcccttgattaaggttttt

SEQ ID NO: 848491 - DNA, 33 bp, Homo sapien
agtgtgggtgtgaggccatctggtagagactgt

SEQ ID NO: 848492 - DNA, 33 bp, Homo sapien
agtgtgggtgtgaggctatctggtagagactgt

SEQ ID NO: 848493 - DNA, 33 bp, Homo sapien
tgtgccaggtatgagcagaataactccatctaa

SEQ ID NO: 848494 - DNA, 33 bp, Homo sapien
tgtgccaggtatgagcggaataactccatctaa

SEQ ID NO: 848495 - DNA, 33 bp, Homo sapien
tacttcagagaaaagaagaacacaaatgcttct

SEQ ID NO: 848496 - DNA, 33 bp, Homo sapien
tacttcagagaaaagaggaacacaaatgcttct

SEQ ID NO: 848497 - DNA, 33 bp, Homo sapien
ccaaaaaattagataggaggaggaaggtgccag

SEQ ID NO: 848498 - DNA, 33 bp, Homo sapien
ccaaaaaattagatagtaggaggaaggtgccag

SEQ ID NO: 848499 - DNA, 33 bp, Homo sapien
tgcacaaagatactataatagagtggtgaaaag

SEQ ID NO: 848500 - DNA, 33 bp, Homo sapien
tgcacaaagatactatgatagagtggtgaaaag

SEQ ID NO: 848501 - DNA, 33 bp, Homo sapien
taaattcttccttacaaattattttcagaaaca

SEQ ID NO: 848502 - DNA, 33 bp, Homo sapien
taaattcttccttacagattattttcagaaaca

SEQ ID NO: 848503 - DNA, 33 bp, Homo sapien
ctaactttaactgccacgattaataatctttga

SEQ ID NO: 848504 - DNA, 33 bp, Homo sapien
ctaactttaactgccatgattaataatctttga

SEQ ID NO: 848505 - DNA, 33 bp, Homo sapien
gactatattaggcaaccgtgataatttctagac

SEQ ID NO: 848506 - DNA, 33 bp, Homo sapien
gactatattaggcaactgtgataatttctagac

SEQ ID NO: 848507 - DNA, 33 bp, Homo sapien
agacactgtctgcctaacattttctaaaacctc

SEQ ID NO: 848508 - DNA, 33 bp, Homo sapien
agacactgtctgcctagcattttctaaaacctc

SEQ ID NO: 848509 - DNA, 33 bp, Homo sapien
gaagccctgtgtacataatcttcaattcttaca

SEQ ID NO: 848510 - DNA, 33 bp, Homo sapien
gaagccctgtgtacatgatcttcaattcttaca

SEQ ID NO: 848511 - DNA, 33 bp, Homo sapien
agcacatacaatgactcagagacacagacaaag

SEQ ID NO: 848512 - DNA, 33 bp, Homo sapien
agcacatacaatgactgagagacacagacaaag

SEQ ID NO: 848513 - DNA, 33 bp, Homo sapien
gtcagagagaagtcaaatagcccaatgccatct

SEQ ID NO: 848514 - DNA, 33 bp, Homo sapien
gtcagagagaagtcaagtagcccaatgccatct

SEQ ID NO: 848515 - DNA, 33 bp, Homo sapien
ccaaattgattacatgcagcagtatataacata

SEQ ID NO: 848516 - DNA, 33 bp, Homo sapien
ccaaattgattacatggagcagtatataacata

SEQ ID NO: 848517 - DNA, 33 bp, Homo sapien
gagtgaaacattagcaagcataaatttatctca

SEQ ID NO: 848518 - DNA, 33 bp, Homo sapien
gagtgaaacattagcacgcataaatttatctca

SEQ ID NO: 848519 - DNA, 33 bp, Homo sapien
ccatagccacttgcaccatcttccttaattaca

SEQ ID NO: 848520 - DNA, 33 bp, Homo sapien
ccatagccacttgcactatcttccttaattaca

SEQ ID NO: 848521 - DNA, 33 bp, Homo sapien
ttggaaatcaggacttaaactatggtaggggga

SEQ ID NO: 848522 - DNA, 33 bp, Homo sapien
ttggaaatcaggacttgaactatggtaggggga

SEQ ID NO: 848523 - DNA, 33 bp, Homo sapien
atgtcataaaagtttacggtgagatgatatagc

SEQ ID NO: 848524 - DNA, 33 bp, Homo sapien
atgtcataaaagtttatggtgagatgatatagc

SEQ ID NO: 848525 - DNA, 33 bp, Homo sapien
ttccccataaataaaccaccgaaactattttat

SEQ ID NO: 848526 - DNA, 33 bp, Homo sapien
ttccccataaataaactaccgaaactattttat

SEQ ID NO: 848527 - DNA, 33 bp, Homo sapien
ctttgagaagatattacgaaattgaaacaaaac

SEQ ID NO: 848528 - DNA, 33 bp, Homo sapien
ctttgagaagatattatgaaattgaaacaaaac

SEQ ID NO: 848529 - DNA, 33 bp, Homo sapien
ccaaaaccaatacagcaatatttgaaaagataa

SEQ ID NO: 848530 - DNA, 33 bp, Homo sapien
ccaaaaccaatacagcgatatttgaaaagataa

SEQ ID NO: 848531 - DNA, 33 bp, Homo sapien
tagcagcaggagttgacgtaatatgactggagc

SEQ ID NO: 848532 - DNA, 33 bp, Homo sapien
tagcagcaggagttgatgtaatatgactggagc

SEQ ID NO: 848533 - DNA, 33 bp, Homo sapien
ccaccgtggagaaataagatggaataaagggga

SEQ ID NO: 848534 - DNA, 33 bp, Homo sapien
ccaccgtggagaaatacgatggaataaagggga

SEQ ID NO: 848535 - DNA, 33 bp, Homo sapien
atgaaatccttctatcggactataaagccaatt

SEQ ID NO: 848536 - DNA, 33 bp, Homo sapien
atgaaatccttctatctgactataaagccaatt

SEQ ID NO: 848537 - DNA, 33 bp, Homo sapien
ctgatgagctctgatagctctttctccttgtgc

SEQ ID NO: 848538 - DNA, 33 bp, Homo sapien
ctgatgagctctgatatctctttctccttgtgc

SEQ ID NO: 848539 - DNA, 33 bp, Homo sapien
cacgtcattagccaagccccagttgttcctagg

SEQ ID NO: 848540 - DNA, 33 bp, Homo sapien
cacgtcattagccaagtcccagttgttcctagg

SEQ ID NO: 848541 - DNA, 33 bp, Homo sapien
tttttacaggttagaaatcaaacgggtgtgggg

SEQ ID NO: 848542 - DNA, 33 bp, Homo sapien
tttttacaggttagaagtcaaacgggtgtgggg

SEQ ID NO: 848543 - DNA, 33 bp, Homo sapien
gagccactatagttaacaggacaaaataatact

SEQ ID NO: 848544 - DNA, 33 bp, Homo sapien
gagccactatagttaagaggacaaaataatact

SEQ ID NO: 848545 - DNA, 33 bp, Homo sapien
ctagttaatgtcacaagtattgtaatgagcatc

SEQ ID NO: 848546 - DNA, 33 bp, Homo sapien
ctagttaatgtcacaattattgtaatgagcatc

SEQ ID NO: 848547 - DNA, 33 bp, Homo sapien
tttttgaattgaacaccctgtaagcttgaatag

SEQ ID NO: 848548 - DNA, 33 bp, Homo sapien
tttttgaattgaacactctgtaagcttgaatag

SEQ ID NO: 848549 - DNA, 33 bp, Homo sapien
tctttgcaatggaaaaacaattagacacagtta

SEQ ID NO: 848550 - DNA, 33 bp, Homo sapien
tctttgcaatggaaaagcaattagacacagtta

SEQ ID NO: 848551 - DNA, 33 bp, Homo sapien
tatagagtaagttttcaaaaggatgcaaataat

SEQ ID NO: 848552 - DNA, 33 bp, Homo sapien
tatagagtaagttttcgaaaggatgcaaataat

SEQ ID NO: 848553 - DNA, 33 bp, Homo sapien
ttgtttgctaacagtaaggctaagaatagaaca

SEQ ID NO: 848554 - DNA, 33 bp, Homo sapien
ttgtttgctaacagtagggctaagaatagaaca

SEQ ID NO: 848555 - DNA, 33 bp, Homo sapien
aaaggcagttagtgccaccacttataagcaatc

SEQ ID NO: 848556 - DNA, 33 bp, Homo sapien
aaaggcagttagtgccgccacttataagcaatc

SEQ ID NO: 848557 - DNA, 33 bp, Homo sapien
ttgggagtcagtgctacggatcagagacctatt

SEQ ID NO: 848558 - DNA, 33 bp, Homo sapien
ttgggagtcagtgctatggatcagagacctatt

SEQ ID NO: 848559 - DNA, 33 bp, Homo sapien
atttctaactctacaactctgtcacctttctgc

SEQ ID NO: 848560 - DNA, 33 bp, Homo sapien
atttctaactctacaattctgtcacctttctgc

SEQ ID NO: 848561 - DNA, 33 bp, Homo sapien
tgcttcaagagactgagtaagagaatgaaaatg

SEQ ID NO: 848562 - DNA, 33 bp, Homo sapien
tgcttcaagagactgattaagagaatgaaaatg

SEQ ID NO: 848563 - DNA, 33 bp, Homo sapien
ttttttgcaaagtgcaactaaccatagtaattt

SEQ ID NO: 848564 - DNA, 33 bp, Homo sapien
ttttttgcaaagtgcacctaaccatagtaattt

SEQ ID NO: 848565 - DNA, 33 bp, Homo sapien
tcttcatcagtaagtaaggataagtattatgta

SEQ ID NO: 848566 - DNA, 33 bp, Homo sapien
tcttcatcagtaagtacggataagtattatgta

SEQ ID NO: 848567 - DNA, 33 bp, Homo sapien
taatgtccttatggagacctttgctgaaggata

SEQ ID NO: 848568 - DNA, 33 bp, Homo sapien
taatgtccttatggagtcctttgctgaaggata

SEQ ID NO: 848569 - DNA, 33 bp, Homo sapien
aagttactctcaaatacgaatccctgaagccaa

SEQ ID NO: 848570 - DNA, 33 bp, Homo sapien
aagttactctcaaatatgaatccctgaagccaa

SEQ ID NO: 848571 - DNA, 33 bp, Homo sapien
cagaacttgtttggaacgtctttgtggagggta

SEQ ID NO: 848572 - DNA, 33 bp, Homo sapien
cagaacttgtttggaatgtctttgtggagggta

SEQ ID NO: 848573 - DNA, 33 bp, Homo sapien
ggcaaagagcccactaagttataccctccacaa

SEQ ID NO: 848574 - DNA, 33 bp, Homo sapien
ggcaaagagcccactacgttataccctccacaa

SEQ ID NO: 848575 - DNA, 33 bp, Homo sapien
acttctgggttcaccacggaagggaaagagaac

SEQ ID NO: 848576 - DNA, 33 bp, Homo sapien
acttctgggttcaccatggaagggaaagagaac

SEQ ID NO: 848577 - DNA, 33 bp, Homo sapien
aacttgctcccattggaaaagttctgaacacag

SEQ ID NO: 848578 - DNA, 33 bp, Homo sapien
aacttgctcccattggtaaagttctgaacacag

SEQ ID NO: 848579 - DNA, 33 bp, Homo sapien
aaactcaccttttcaaatctgctccaatgctcc

SEQ ID NO: 848580 - DNA, 33 bp, Homo sapien
aaactcaccttttcaagtctgctccaatgctcc

SEQ ID NO: 848581 - DNA, 33 bp, Homo sapien
tcctttcttaacagtcccccaagttcttaactc

SEQ ID NO: 848582 - DNA, 33 bp, Homo sapien
tcctttcttaacagtctcccaagttcttaactc

SEQ ID NO: 848583 - DNA, 33 bp, Homo sapien
ttaaaggactggccagaatgtagatgggtgtta

SEQ ID NO: 848584 - DNA, 33 bp, Homo sapien
ttaaaggactggccaggatgtagatgggtgtta

SEQ ID NO: 848585 - DNA, 33 bp, Homo sapien
gctatagtttagacatcaaggattcagttgtga

SEQ ID NO: 848586 - DNA, 33 bp, Homo sapien
gctatagtttagacatgaaggattcagttgtga

SEQ ID NO: 848587 - DNA, 33 bp, Homo sapien
aggattgagattcgacaagggtttcacatgttt

SEQ ID NO: 848588 - DNA, 33 bp, Homo sapien
aggattgagattcgacgagggtttcacatgttt

SEQ ID NO: 848589 - DNA, 33 bp, Homo sapien
gcggctgcaaccactacgtcaacttgaacatgg

SEQ ID NO: 848590 - DNA, 33 bp, Homo sapien
gcggctgcaaccactatgtcaacttgaacatgg

SEQ ID NO: 848591 - DNA, 33 bp, Homo sapien
ccattgtggcagacaacgtagcgattcctcagg

SEQ ID NO: 848592 - DNA, 33 bp, Homo sapien
ccattgtggcagacaatgtagcgattcctcagg

SEQ ID NO: 848593 - DNA, 33 bp, Homo sapien
ttttttggaggaaaaaattctctgactacacag

SEQ ID NO: 848594 - DNA, 33 bp, Homo sapien
ttttttggaggaaaaatttctctgactacacag

SEQ ID NO: 848595 - DNA, 33 bp, Homo sapien
aaagaaagaggcagaagctcgggccagaccatg

SEQ ID NO: 848596 - DNA, 33 bp, Homo sapien
aaagaaagaggcagaatctcgggccagaccatg

SEQ ID NO: 848597 - DNA, 33 bp, Homo sapien
gaaactgtatttgcacaggccctaaagtgagaa

SEQ ID NO: 848598 - DNA, 33 bp, Homo sapien
gaaactgtatttgcacgggccctaaagtgagaa

SEQ ID NO: 848599 - DNA, 33 bp, Homo sapien
caaccaggttctcaaaagaaagattgaagaaaa

SEQ ID NO: 848600 - DNA, 33 bp, Homo sapien
caaccaggttctcaaaggaaagattgaagaaaa

SEQ ID NO: 848601 - DNA, 33 bp, Homo sapien
tgacatgagcatcttcgcattttattagtcttc

SEQ ID NO: 848602 - DNA, 33 bp, Homo sapien
tgacatgagcatcttctcattttattagtcttc

SEQ ID NO: 848603 - DNA, 33 bp, Homo sapien
cagtttatatgttcaaaaataggattagtttag

SEQ ID NO: 848604 - DNA, 33 bp, Homo sapien
cagtttatatgttcaacaataggattagtttag

SEQ ID NO: 848605 - DNA, 33 bp, Homo sapien
tccttagcaactccacaaggtagatacgaatat

SEQ ID NO: 848606 - DNA, 33 bp, Homo sapien
tccttagcaactccacgaggtagatacgaatat

SEQ ID NO: 848607 - DNA, 33 bp, Homo sapien
aaaagcaggtctaaaaaggctacatattatatg

SEQ ID NO: 848608 - DNA, 33 bp, Homo sapien
aaaagcaggtctaaaacggctacatattatatg

SEQ ID NO: 848609 - DNA, 33 bp, Homo sapien
taaaaaccaagaagaacacagttgtaggacccc

SEQ ID NO: 848610 - DNA, 33 bp, Homo sapien
taaaaaccaagaagaatacagttgtaggacccc

SEQ ID NO: 848611 - DNA, 33 bp, Homo sapien
ttctgaggagaagttcactgtaattctcatcct

SEQ ID NO: 848612 - DNA, 33 bp, Homo sapien
ttctgaggagaagttcgctgtaattctcatcct

SEQ ID NO: 848613 - DNA, 33 bp, Homo sapien
tttggatgggttttggaaaattgtggatcataa

SEQ ID NO: 848614 - DNA, 33 bp, Homo sapien
tttggatgggttttgggaaattgtggatcataa

SEQ ID NO: 848615 - DNA, 33 bp, Homo sapien
tcttgagtttttgcaacggcagatgaggttggc

SEQ ID NO: 848616 - DNA, 33 bp, Homo sapien
tcttgagtttttgcaatggcagatgaggttggc

SEQ ID NO: 848617 - DNA, 33 bp, Homo sapien
atacattatccaaatacagtccattctttgata

SEQ ID NO: 848618 - DNA, 33 bp, Homo sapien
atacattatccaaatatagtccattctttgata

SEQ ID NO: 848619 - DNA, 33 bp, Homo sapien
gtgtgatcagactataaggtagttaatgccagg

SEQ ID NO: 848620 - DNA, 33 bp, Homo sapien
gtgtgatcagactatagggtagttaatgccagg

SEQ ID NO: 848621 - DNA, 33 bp, Homo sapien
aagtgaattagaaatgccagaacttctggggca

SEQ ID NO: 848622 - DNA, 33 bp, Homo sapien
aagtgaattagaaatgtcagaacttctggggca

SEQ ID NO: 848623 - DNA, 33 bp, Homo sapien
gtctgacacttctccacgtttccaagagtaatc

SEQ ID NO: 848624 - DNA, 33 bp, Homo sapien
gtctgacacttctccatgtttccaagagtaatc

SEQ ID NO: 848625 - DNA, 33 bp, Homo sapien
tgactgaaaaatataacgttaagtttatggatt

SEQ ID NO: 848626 - DNA, 33 bp, Homo sapien
tgactgaaaaatataaggttaagtttatggatt

SEQ ID NO: 848627 - DNA, 33 bp, Homo sapien
cagttggtcgtagttccatatggtgagatgggg

SEQ ID NO: 848628 - DNA, 33 bp, Homo sapien
cagttggtcgtagttctatatggtgagatgggg

SEQ ID NO: 848629 - DNA, 33 bp, Homo sapien
atctgttgagtgatgaagcatggagtgtatgaa

SEQ ID NO: 848630 - DNA, 33 bp, Homo sapien
atctgttgagtgatgaggcatggagtgtatgaa

SEQ ID NO: 848631 - DNA, 33 bp, Homo sapien
caaaactatggcctacaagccaaatttagccaa

SEQ ID NO: 848632 - DNA, 33 bp, Homo sapien
caaaactatggcctacgagccaaatttagccaa

SEQ ID NO: 848633 - DNA, 33 bp, Homo sapien
actgccgtagtcagaaaaagaggtgagtgctgg

SEQ ID NO: 848634 - DNA, 33 bp, Homo sapien
actgccgtagtcagaagaagaggtgagtgctgg

SEQ ID NO: 848635 - DNA, 33 bp, Homo sapien
tggactttacatcgtccatttgattagttcaca

SEQ ID NO: 848636 - DNA, 33 bp, Homo sapien
tggactttacatcgtctatttgattagttcaca

SEQ ID NO: 848637 - DNA, 33 bp, Homo sapien
caaaaatagattgggcactactcatgatatgct

SEQ ID NO: 848638 - DNA, 33 bp, Homo sapien
caaaaatagattgggcgctactcatgatatgct

SEQ ID NO: 848639 - DNA, 33 bp, Homo sapien
gttgaaaacctctttggaagaagccatattgaa

SEQ ID NO: 848640 - DNA, 33 bp, Homo sapien
gttgaaaacctctttgtaagaagccatattgaa

SEQ ID NO: 848641 - DNA, 33 bp, Homo sapien
atgtaggcagcacaacacttgttaacttaggat

SEQ ID NO: 848642 - DNA, 33 bp, Homo sapien
atgtaggcagcacaacgcttgttaacttaggat

SEQ ID NO: 848643 - DNA, 33 bp, Homo sapien
gataggaaaacattgaataatacccacaaataa

SEQ ID NO: 848644 - DNA, 33 bp, Homo sapien
gataggaaaacattgattaatacccacaaataa

SEQ ID NO: 848645 - DNA, 33 bp, Homo sapien
aaatgagaattctaacacctttcaatcaaacaa

SEQ ID NO: 848646 - DNA, 33 bp, Homo sapien
aaatgagaattctaacgcctttcaatcaaacaa

SEQ ID NO: 848647 - DNA, 33 bp, Homo sapien
ctctctagaaattcaaagacttgatgaagaaaa

SEQ ID NO: 848648 - DNA, 33 bp, Homo sapien
ctctctagaaattcaaggacttgatgaagaaaa

SEQ ID NO: 848649 - DNA, 33 bp, Homo sapien
acatcctgtgtcctaaaaccagactggacgtat

SEQ ID NO: 848650 - DNA, 33 bp, Homo sapien
acatcctgtgtcctaataccagactggacgtat

SEQ ID NO: 848651 - DNA, 33 bp, Homo sapien
atggcctctatatgaccaaaaccaaagcacact

SEQ ID NO: 848652 - DNA, 33 bp, Homo sapien
atggcctctatatgacgaaaaccaaagcacact

SEQ ID NO: 848653 - DNA, 33 bp, Homo sapien
ttcctcctcaagcctacagaagtacagcatttc

SEQ ID NO: 848654 - DNA, 33 bp, Homo sapien
ttcctcctcaagcctatagaagtacagcatttc

SEQ ID NO: 848655 - DNA, 33 bp, Homo sapien
tacataaactatccaaatgttccttttaagtta

SEQ ID NO: 848656 - DNA, 33 bp, Homo sapien
tacataaactatccaagtgttccttttaagtta

SEQ ID NO: 848657 - DNA, 33 bp, Homo sapien
atagactaggtgataaacatcatgttattaaaa

SEQ ID NO: 848658 - DNA, 33 bp, Homo sapien
atagactaggtgataatcatcatgttattaaaa

SEQ ID NO: 848659 - DNA, 33 bp, Homo sapien
tttagtgctaaaatacagaaagttccagaaaaa

SEQ ID NO: 848660 - DNA, 33 bp, Homo sapien
tttagtgctaaaatacggaaagttccagaaaaa

SEQ ID NO: 848661 - DNA, 33 bp, Homo sapien
cctggtacgtagcagaagctcaacatatatcta

SEQ ID NO: 848662 - DNA, 33 bp, Homo sapien
cctggtacgtagcagatgctcaacatatatcta

SEQ ID NO: 848663 - DNA, 33 bp, Homo sapien
tcccaagtatagccacacaagaggttcggactt

SEQ ID NO: 848664 - DNA, 33 bp, Homo sapien
tcccaagtatagccacgcaagaggttcggactt

SEQ ID NO: 848665 - DNA, 33 bp, Homo sapien
aatccacataaagtagataaatgttcctaaata

SEQ ID NO: 848666 - DNA, 33 bp, Homo sapien
aatccacataaagtaggtaaatgttcctaaata

SEQ ID NO: 848667 - DNA, 33 bp, Homo sapien
gtttagtagccaaccactctatcgtaatttgcc

SEQ ID NO: 848668 - DNA, 33 bp, Homo sapien
gtttagtagccaaccattctatcgtaatttgcc

SEQ ID NO: 848669 - DNA, 33 bp, Homo sapien
agcttgattttagacaagataaatctgaggtgc

SEQ ID NO: 848670 - DNA, 33 bp, Homo sapien
agcttgattttagacacgataaatctgaggtgc

SEQ ID NO: 848671 - DNA, 33 bp, Homo sapien
agaatgccttcttagacggagaagtaagagaca

SEQ ID NO: 848672 - DNA, 33 bp, Homo sapien
agaatgccttcttagagggagaagtaagagaca

SEQ ID NO: 848673 - DNA, 33 bp, Homo sapien
ggcacagatgtctacaaaatgaggaaaattaaa

SEQ ID NO: 848674 - DNA, 33 bp, Homo sapien
ggcacagatgtctacagaatgaggaaaattaaa

SEQ ID NO: 848675 - DNA, 33 bp, Homo sapien
ccatctgttgtttggacctaaagtgaaagcaat

SEQ ID NO: 848676 - DNA, 33 bp, Homo sapien
ccatctgttgtttggagctaaagtgaaagcaat

SEQ ID NO: 848677 - DNA, 33 bp, Homo sapien
taaggtaatttgcctacgtaaacacaactgata

SEQ ID NO: 848678 - DNA, 33 bp, Homo sapien
taaggtaatttgcctatgtaaacacaactgata

SEQ ID NO: 848679 - DNA, 33 bp, Homo sapien
ttgtgtgtatctcaaacgcacttaaatatctca

SEQ ID NO: 848680 - DNA, 33 bp, Homo sapien
ttgtgtgtatctcaaatgcacttaaatatctca

SEQ ID NO: 848681 - DNA, 33 bp, Homo sapien
aggatagcatcatcccaggaagtctctggagcg

SEQ ID NO: 848682 - DNA, 33 bp, Homo sapien
aggatagcatcatccctggaagtctctggagcg

SEQ ID NO: 848683 - DNA, 33 bp, Homo sapien
taggatgtgtgtacaacggtggaagggcatagg

SEQ ID NO: 848684 - DNA, 33 bp, Homo sapien
taggatgtgtgtacaatggtggaagggcatagg

SEQ ID NO: 848685 - DNA, 33 bp, Homo sapien
ttattgtttctgaaagcagttggaataatcatc

SEQ ID NO: 848686 - DNA, 33 bp, Homo sapien
ttattgtttctgaaagtagttggaataatcatc

SEQ ID NO: 848687 - DNA, 33 bp, Homo sapien
cactatagcagcgaacacaggcccgtattacta

SEQ ID NO: 848688 - DNA, 33 bp, Homo sapien
cactatagcagcgaacgcaggcccgtattacta

SEQ ID NO: 848689 - DNA, 33 bp, Homo sapien
ttgaactcatagagggacagaaaatacagagat

SEQ ID NO: 848690 - DNA, 33 bp, Homo sapien
ttgaactcatagaggggcagaaaatacagagat

SEQ ID NO: 848691 - DNA, 33 bp, Homo sapien
tagtcttgcattcatgaaatttaattatttccg

SEQ ID NO: 848692 - DNA, 33 bp, Homo sapien
tagtcttgcattcatgtaatttaattatttccg

SEQ ID NO: 848693 - DNA, 33 bp, Homo sapien
ggaggccacccaaaaggaaccatgatgggatga

SEQ ID NO: 848694 - DNA, 33 bp, Homo sapien
ggaggccacccaaaagtaaccatgatgggatga

SEQ ID NO: 848695 - DNA, 33 bp, Homo sapien
tctcttttcacataagaccagaggaaggtcctc

SEQ ID NO: 848696 - DNA, 33 bp, Homo sapien
tctcttttcacataagcccagaggaaggtcctc

SEQ ID NO: 848697 - DNA, 33 bp, Homo sapien
ggaaccagagggcataaagatgattagaacata

SEQ ID NO: 848698 - DNA, 33 bp, Homo sapien
ggaaccagagggcatagagatgattagaacata

SEQ ID NO: 848699 - DNA, 33 bp, Homo sapien
ctgagtgttgtccacacaacgagtgatcctatc

SEQ ID NO: 848700 - DNA, 33 bp, Homo sapien
ctgagtgttgtccacagaacgagtgatcctatc

SEQ ID NO: 848701 - DNA, 33 bp, Homo sapien
gtgagagagagcgagaatatgaaggaggaactg

SEQ ID NO: 848702 - DNA, 33 bp, Homo sapien
gtgagagagagcgagagtatgaaggaggaactg

SEQ ID NO: 848703 - DNA, 33 bp, Homo sapien
cttatgtggaaaagcacgctatattcgcctttc

SEQ ID NO: 848704 - DNA, 33 bp, Homo sapien
cttatgtggaaaagcaggctatattcgcctttc

SEQ ID NO: 848705 - DNA, 33 bp, Homo sapien
cagggaaatttgttcacccaaacacacaaatat

SEQ ID NO: 848706 - DNA, 33 bp, Homo sapien
cagggaaatttgttcatccaaacacacaaatat

SEQ ID NO: 848707 - DNA, 33 bp, Homo sapien
attcatgcaccgatggacacttagtttgattca

SEQ ID NO: 848708 - DNA, 33 bp, Homo sapien
attcatgcaccgatggccacttagtttgattca

SEQ ID NO: 848709 - DNA, 33 bp, Homo sapien
tctccctcttaactaccgaaaaggagacatatg

SEQ ID NO: 848710 - DNA, 33 bp, Homo sapien
tctccctcttaactactgaaaaggagacatatg

SEQ ID NO: 848711 - DNA, 33 bp, Homo sapien
aagttacaaagaacagccaaatgctaagaaatg

SEQ ID NO: 848712 - DNA, 33 bp, Homo sapien
aagttacaaagaacaggcaaatgctaagaaatg

SEQ ID NO: 848713 - DNA, 33 bp, Homo sapien
agaaaatgaaatggccaaatgaggatagagaga

SEQ ID NO: 848714 - DNA, 33 bp, Homo sapien
agaaaatgaaatggccgaatgaggatagagaga

SEQ ID NO: 848715 - DNA, 33 bp, Homo sapien
aagctttataaagtcacgttctttcaactgtac

SEQ ID NO: 848716 - DNA, 33 bp, Homo sapien
aagctttataaagtcatgttctttcaactgtac

SEQ ID NO: 848717 - DNA, 33 bp, Homo sapien
cattgccagaaactccaatgaatgcagaccata

SEQ ID NO: 848718 - DNA, 33 bp, Homo sapien
cattgccagaaactccgatgaatgcagaccata

SEQ ID NO: 848719 - DNA, 33 bp, Homo sapien
taaagtgaggtgataagttagcacagtgcattc

SEQ ID NO: 848720 - DNA, 33 bp, Homo sapien
taaagtgaggtgataatttagcacagtgcattc

SEQ ID NO: 848721 - DNA, 33 bp, Homo sapien
ggataaccaagagaaaagttgaatatgatgtac

SEQ ID NO: 848722 - DNA, 33 bp, Homo sapien
ggataaccaagagaaatgttgaatatgatgtac

SEQ ID NO: 848723 - DNA, 33 bp, Homo sapien
agatagatagatagataaaaaaccattctcaat

SEQ ID NO: 848724 - DNA, 33 bp, Homo sapien
agatagatagatagattaaaaaccattctcaat

SEQ ID NO: 848725 - DNA, 33 bp, Homo sapien
gtgttgagtagtacaaagagttggactttgagg

SEQ ID NO: 848726 - DNA, 33 bp, Homo sapien
gtgttgagtagtacaaggagttggactttgagg

SEQ ID NO: 848727 - DNA, 33 bp, Homo sapien
cttaggagagagactccatacccccattccaga

SEQ ID NO: 848728 - DNA, 33 bp, Homo sapien
cttaggagagagactcgatacccccattccaga

SEQ ID NO: 848729 - DNA, 33 bp, Homo sapien
cttccctcagttgtgcaaagtccttccttgtgt

SEQ ID NO: 848730 - DNA, 33 bp, Homo sapien
cttccctcagttgtgccaagtccttccttgtgt

SEQ ID NO: 848731 - DNA, 33 bp, Homo sapien
gaacatacagttggaacggaattatagtaaagt

SEQ ID NO: 848732 - DNA, 33 bp, Homo sapien
gaacatacagttggaatggaattatagtaaagt

SEQ ID NO: 848733 - DNA, 33 bp, Homo sapien
tctgactttgtagcacacaagtagccatagaca

SEQ ID NO: 848734 - DNA, 33 bp, Homo sapien
tctgactttgtagcacgcaagtagccatagaca

SEQ ID NO: 848735 - DNA, 33 bp, Homo sapien
gctacatactgggataaaatcactgaaatcaca

SEQ ID NO: 848736 - DNA, 33 bp, Homo sapien
gctacatactgggatacaatcactgaaatcaca

SEQ ID NO: 848737 - DNA, 33 bp, Homo sapien
tcaagggtaatgaccacgcaacaggttttttct

SEQ ID NO: 848738 - DNA, 33 bp, Homo sapien
tcaagggtaatgaccatgcaacaggttttttct

SEQ ID NO: 848739 - DNA, 33 bp, Homo sapien
tgtctttctggagatacgcactacttccctttg

SEQ ID NO: 848740 - DNA, 33 bp, Homo sapien
tgtctttctggagatatgcactacttccctttg

SEQ ID NO: 848741 - DNA, 33 bp, Homo sapien
tttgacaagagttctacctatttatttttaatt

SEQ ID NO: 848742 - DNA, 33 bp, Homo sapien
tttgacaagagttctatctatttatttttaatt

SEQ ID NO: 848743 - DNA, 33 bp, Homo sapien
tcagggtctgtttttaagggagcctgaccaaca

SEQ ID NO: 848744 - DNA, 33 bp, Homo sapien
tcagggtctgtttttaggggagcctgaccaaca

SEQ ID NO: 848745 - DNA, 33 bp, Homo sapien
ttcctctgagcgtgagaaaattgtaggatttat

SEQ ID NO: 848746 - DNA, 33 bp, Homo sapien
ttcctctgagcgtgaggaaattgtaggatttat

SEQ ID NO: 848747 - DNA, 33 bp, Homo sapien
taaataagaagtggtccgaaggccaggcatggt

SEQ ID NO: 848748 - DNA, 33 bp, Homo sapien
taaataagaagtggtctgaaggccaggcatggt

SEQ ID NO: 848749 - DNA, 33 bp, Homo sapien
gagcttttgacctctcaaatgttaagaaaataa

SEQ ID NO: 848750 - DNA, 33 bp, Homo sapien
gagcttttgacctctcgaatgttaagaaaataa

SEQ ID NO: 848751 - DNA, 33 bp, Homo sapien
tcagcgaatggaaaaaacaaagttatgttagct

SEQ ID NO: 848752 - DNA, 33 bp, Homo sapien
tcagcgaatggaaaaatcaaagttatgttagct

SEQ ID NO: 848753 - DNA, 33 bp, Homo sapien
aattgtataaggaagaacaggaccttgagatta

SEQ ID NO: 848754 - DNA, 33 bp, Homo sapien
aattgtataaggaagaccaggaccttgagatta

SEQ ID NO: 848755 - DNA, 33 bp, Homo sapien
tggctttatctggattcaaacaaaacagcacca

SEQ ID NO: 848756 - DNA, 33 bp, Homo sapien
tggctttatctggatttaaacaaaacagcacca

SEQ ID NO: 848757 - DNA, 33 bp, Homo sapien
tagaaagctgaaaaaaactgagtagaactataa

SEQ ID NO: 848758 - DNA, 33 bp, Homo sapien
tagaaagctgaaaaaacctgagtagaactataa

SEQ ID NO: 848759 - DNA, 33 bp, Homo sapien
tcaatgaggagtattagctacataagccatgtt

SEQ ID NO: 848760 - DNA, 33 bp, Homo sapien
tcaatgaggagtattatctacataagccatgtt

SEQ ID NO: 848761 - DNA, 33 bp, Homo sapien
agaaggcacagataagaagatacactaacctta

SEQ ID NO: 848762 - DNA, 33 bp, Homo sapien
agaaggcacagataagtagatacactaacctta

SEQ ID NO: 848763 - DNA, 33 bp, Homo sapien
ctgtcttagtggccaaaaatcaactgattataa

SEQ ID NO: 848764 - DNA, 33 bp, Homo sapien
ctgtcttagtggccaacaatcaactgattataa

SEQ ID NO: 848765 - DNA, 33 bp, Homo sapien
tgttcataattttgagccaaatgctagtgtggc

SEQ ID NO: 848766 - DNA, 33 bp, Homo sapien
tgttcataattttgagtcaaatgctagtgtggc

SEQ ID NO: 848767 - DNA, 33 bp, Homo sapien
tggtgaaaaggcataaagtaagataacaggttg

SEQ ID NO: 848768 - DNA, 33 bp, Homo sapien
tggtgaaaaggcataaggtaagataacaggttg

SEQ ID NO: 848769 - DNA, 33 bp, Homo sapien
ttaatcatgagtttaacggaaagaatacacatt

SEQ ID NO: 848770 - DNA, 33 bp, Homo sapien
ttaatcatgagtttaatggaaagaatacacatt

SEQ ID NO: 848771 - DNA, 33 bp, Homo sapien
taaatgttctatgtaaccctcacaggaagagac

SEQ ID NO: 848772 - DNA, 33 bp, Homo sapien
taaatgttctatgtaagcctcacaggaagagac

SEQ ID NO: 848773 - DNA, 33 bp, Homo sapien
ttctcaaacaaaagtccattcactgctcaaaca

SEQ ID NO: 848774 - DNA, 33 bp, Homo sapien
ttctcaaacaaaagtctattcactgctcaaaca

SEQ ID NO: 848775 - DNA, 33 bp, Homo sapien
gaacagaatacgctcaacagaggtgaatgaaaa

SEQ ID NO: 848776 - DNA, 33 bp, Homo sapien
gaacagaatacgctcagcagaggtgaatgaaaa

SEQ ID NO: 848777 - DNA, 33 bp, Homo sapien
taatgacatctttctaagtagactgtccatgac

SEQ ID NO: 848778 - DNA, 33 bp, Homo sapien
taatgacatctttctaggtagactgtccatgac

SEQ ID NO: 848779 - DNA, 33 bp, Homo sapien
tgtgaattgaaactccaagtctgatcaattagc

SEQ ID NO: 848780 - DNA, 33 bp, Homo sapien
tgtgaattgaaactccgagtctgatcaattagc

SEQ ID NO: 848781 - DNA, 33 bp, Homo sapien
tcaggagtaagagaaaaagcgtgagtggtggat

SEQ ID NO: 848782 - DNA, 33 bp, Homo sapien
tcaggagtaagagaaagagcgtgagtggtggat

SEQ ID NO: 848783 - DNA, 33 bp, Homo sapien
acagagaagtaaccaaaaataggtgcaaatatt

SEQ ID NO: 848784 - DNA, 33 bp, Homo sapien
acagagaagtaaccaagaataggtgcaaatatt

SEQ ID NO: 848785 - DNA, 33 bp, Homo sapien
tctgtctccttaatgacgtagaagttgcttata

SEQ ID NO: 848786 - DNA, 33 bp, Homo sapien
tctgtctccttaatgatgtagaagttgcttata

SEQ ID NO: 848787 - DNA, 33 bp, Homo sapien
cattgattgtatctgacgtaaagggaatgatca

SEQ ID NO: 848788 - DNA, 33 bp, Homo sapien
cattgattgtatctgatgtaaagggaatgatca

SEQ ID NO: 848789 - DNA, 33 bp, Homo sapien
aatttagacatccttacacaccagtaaagccct

SEQ ID NO: 848790 - DNA, 33 bp, Homo sapien
aatttagacatccttatacaccagtaaagccct

SEQ ID NO: 848791 - DNA, 33 bp, Homo sapien
gaagctactgtgaaaactagagtaagccctcac

SEQ ID NO: 848792 - DNA, 33 bp, Homo sapien
gaagctactgtgaaaattagagtaagccctcac

SEQ ID NO: 848793 - DNA, 33 bp, Homo sapien
tctaacattgctaaaacggttagtcgttcacac

SEQ ID NO: 848794 - DNA, 33 bp, Homo sapien
tctaacattgctaaaagggttagtcgttcacac

SEQ ID NO: 848795 - DNA, 33 bp, Homo sapien
acaatcaccacctaaaatgtaatgaagatgaga

SEQ ID NO: 848796 - DNA, 33 bp, Homo sapien
acaatcaccacctaaactgtaatgaagatgaga

SEQ ID NO: 848797 - DNA, 33 bp, Homo sapien
gagtgttctgtagacaaagtagtaataacaata

SEQ ID NO: 848798 - DNA, 33 bp, Homo sapien
gagtgttctgtagacagagtagtaataacaata

SEQ ID NO: 848799 - DNA, 33 bp, Homo sapien
ttataagtacttgtaacggaaagatgaataaga

SEQ ID NO: 848800 - DNA, 33 bp, Homo sapien
ttataagtacttgtaatggaaagatgaataaga

SEQ ID NO: 848801 - DNA, 33 bp, Homo sapien
taagattaacaacaacggctgtattaacataca

SEQ ID NO: 848802 - DNA, 33 bp, Homo sapien
taagattaacaacaactgctgtattaacataca

SEQ ID NO: 848803 - DNA, 33 bp, Homo sapien
tcagattacaaaaagaacatagcgtccctttca

SEQ ID NO: 848804 - DNA, 33 bp, Homo sapien
tcagattacaaaaagagcatagcgtccctttca

SEQ ID NO: 848805 - DNA, 33 bp, Homo sapien
ggctaatgagagttagcatttgcctcttgctgt

SEQ ID NO: 848806 - DNA, 33 bp, Homo sapien
ggctaatgagagttagtatttgcctcttgctgt

SEQ ID NO: 848807 - DNA, 33 bp, Homo sapien
gtgaattaaaaccctaacagtgaagatgaggga

SEQ ID NO: 848808 - DNA, 33 bp, Homo sapien
gtgaattaaaaccctagcagtgaagatgaggga

SEQ ID NO: 848809 - DNA, 33 bp, Homo sapien
atgtaactgcagacaaaaggtgactggcaactg

SEQ ID NO: 848810 - DNA, 33 bp, Homo sapien
atgtaactgcagacaagaggtgactggcaactg

SEQ ID NO: 848811 - DNA, 33 bp, Homo sapien
aagttgacaccaaaaacgaactatcacagtgtg

SEQ ID NO: 848812 - DNA, 33 bp, Homo sapien
aagttgacaccaaaaatgaactatcacagtgtg

SEQ ID NO: 848813 - DNA, 33 bp, Homo sapien
attgtgttgaataacacaaatggcatctttgga

SEQ ID NO: 848814 - DNA, 33 bp, Homo sapien
attgtgttgaataacagaaatggcatctttgga

SEQ ID NO: 848815 - DNA, 33 bp, Homo sapien
agcatagagggttgcaaattgtgttgaataaca

SEQ ID NO: 848816 - DNA, 33 bp, Homo sapien
agcatagagggttgcatattgtgttgaataaca

SEQ ID NO: 848817 - DNA, 33 bp, Homo sapien
gaacagaggttcagaagcagggtagacatatag

SEQ ID NO: 848818 - DNA, 33 bp, Homo sapien
gaacagaggttcagaatcagggtagacatatag

SEQ ID NO: 848819 - DNA, 33 bp, Homo sapien
attttgtaacaaagaacgcaacctcctgaggca

SEQ ID NO: 848820 - DNA, 33 bp, Homo sapien
attttgtaacaaagaatgcaacctcctgaggca

SEQ ID NO: 848821 - DNA, 33 bp, Homo sapien
caatttttgccaactgaagtgcttaagtaaggc

SEQ ID NO: 848822 - DNA, 33 bp, Homo sapien
caatttttgccaactgcagtgcttaagtaaggc

SEQ ID NO: 848823 - DNA, 33 bp, Homo sapien
ttcagaaatccttcaacataacaaagtgatcaa

SEQ ID NO: 848824 - DNA, 33 bp, Homo sapien
ttcagaaatccttcaatataacaaagtgatcaa

SEQ ID NO: 848825 - DNA, 33 bp, Homo sapien
aatcttttgaaaagtaaaagtcatgatatgtac

SEQ ID NO: 848826 - DNA, 33 bp, Homo sapien
aatcttttgaaaagtagaagtcatgatatgtac

SEQ ID NO: 848827 - DNA, 33 bp, Homo sapien
tagtacaccgaatggaaacaaccagtaatcatc

SEQ ID NO: 848828 - DNA, 33 bp, Homo sapien
tagtacaccgaatggagacaaccagtaatcatc

SEQ ID NO: 848829 - DNA, 33 bp, Homo sapien
caggtagctccatgcaatatacccagaagtact

SEQ ID NO: 848830 - DNA, 33 bp, Homo sapien
caggtagctccatgcactatacccagaagtact

SEQ ID NO: 848831 - DNA, 33 bp, Homo sapien
tgtgtgtgggataaagaaaggtctagagcatga

SEQ ID NO: 848832 - DNA, 33 bp, Homo sapien
tgtgtgtgggataaaggaaggtctagagcatga

SEQ ID NO: 848833 - DNA, 33 bp, Homo sapien
gtgtaagttactgttaccatatttgtacaccct

SEQ ID NO: 848834 - DNA, 33 bp, Homo sapien
gtgtaagttactgttagcatatttgtacaccct

SEQ ID NO: 848835 - DNA, 33 bp, Homo sapien
ggactccctatgactaccacttttcctcatatt

SEQ ID NO: 848836 - DNA, 33 bp, Homo sapien
ggactccctatgactatcacttttcctcatatt

SEQ ID NO: 848837 - DNA, 33 bp, Homo sapien
aatgctttttataatccagagaatccagtcact

SEQ ID NO: 848838 - DNA, 33 bp, Homo sapien
aatgctttttataatctagagaatccagtcact

SEQ ID NO: 848839 - DNA, 33 bp, Homo sapien
aagggaaaatatttgaagtaggtcatcccttgc

SEQ ID NO: 848840 - DNA, 33 bp, Homo sapien
aagggaaaatatttgacgtaggtcatcccttgc

SEQ ID NO: 848841 - DNA, 33 bp, Homo sapien
atggctgtcaggtaaaacctaaagaatagtaag

SEQ ID NO: 848842 - DNA, 33 bp, Homo sapien
atggctgtcaggtaaatcctaaagaatagtaag

SEQ ID NO: 848843 - DNA, 33 bp, Homo sapien
gaattaagttaaagcaactagttaagaggcaac

SEQ ID NO: 848844 - DNA, 33 bp, Homo sapien
gaattaagttaaagcagctagttaagaggcaac

SEQ ID NO: 848845 - DNA, 33 bp, Homo sapien
taaggacaaaccacaaatgaatgctcttgagtc

SEQ ID NO: 848846 - DNA, 33 bp, Homo sapien
taaggacaaaccacaactgaatgctcttgagtc

SEQ ID NO: 848847 - DNA, 33 bp, Homo sapien
gaccttttctgatcaaaccctgtgtatggctga

SEQ ID NO: 848848 - DNA, 33 bp, Homo sapien
gaccttttctgatcaagccctgtgtatggctga

SEQ ID NO: 848849 - DNA, 33 bp, Homo sapien
tcatttgagagttttacagggttagtaagaaga

SEQ ID NO: 848850 - DNA, 33 bp, Homo sapien
tcatttgagagttttatagggttagtaagaaga

SEQ ID NO: 848851 - DNA, 33 bp, Homo sapien
gtcacagacagtaaataaatgaatatgcataat

SEQ ID NO: 848852 - DNA, 33 bp, Homo sapien
gtcacagacagtaaatgaatgaatatgcataat

SEQ ID NO: 848853 - DNA, 33 bp, Homo sapien
aacagtcaacattacactctactacatgaagtg

SEQ ID NO: 848854 - DNA, 33 bp, Homo sapien
aacagtcaacattacattctactacatgaagtg

SEQ ID NO: 848855 - DNA, 33 bp, Homo sapien
gctatcctagtatctaccaagtctaaacattaa

SEQ ID NO: 848856 - DNA, 33 bp, Homo sapien
gctatcctagtatctatcaagtctaaacattaa

SEQ ID NO: 848857 - DNA, 33 bp, Homo sapien
gtaattttctgcacaacatgtagtaaaccagac

SEQ ID NO: 848858 - DNA, 33 bp, Homo sapien
gtaattttctgcacaatatgtagtaaaccagac

SEQ ID NO: 848859 - DNA, 33 bp, Homo sapien
cagattaaattgaaccaaatgttctcaaactag

SEQ ID NO: 848860 - DNA, 33 bp, Homo sapien
cagattaaattgaacctaatgttctcaaactag

SEQ ID NO: 848861 - DNA, 33 bp, Homo sapien
agggttgtgatgctaaaaggtaacgtgtagatg

SEQ ID NO: 848862 - DNA, 33 bp, Homo sapien
agggttgtgatgctaagaggtaacgtgtagatg

SEQ ID NO: 848863 - DNA, 33 bp, Homo sapien
tctttccctgtctcaggaatccagccctcaaag

SEQ ID NO: 848864 - DNA, 33 bp, Homo sapien
tctttccctgtctcagtaatccagccctcaaag

SEQ ID NO: 848865 - DNA, 33 bp, Homo sapien
atgtaaagtaagtttaagaaagtcctgagtcac

SEQ ID NO: 848866 - DNA, 33 bp, Homo sapien
atgtaaagtaagtttaggaaagtcctgagtcac

SEQ ID NO: 848867 - DNA, 33 bp, Homo sapien
atggtgtctttgctccaaataaactgaactagt

SEQ ID NO: 848868 - DNA, 33 bp, Homo sapien
atggtgtctttgctccgaataaactgaactagt

SEQ ID NO: 848869 - DNA, 33 bp, Homo sapien
attgtctagatttgctcaaactaaataactggc

SEQ ID NO: 848870 - DNA, 33 bp, Homo sapien
attgtctagatttgctgaaactaaataactggc

SEQ ID NO: 848871 - DNA, 33 bp, Homo sapien
tggagcaaagggacagcatgccttgtattatct

SEQ ID NO: 848872 - DNA, 33 bp, Homo sapien
tggagcaaagggacagtatgccttgtattatct

SEQ ID NO: 848873 - DNA, 33 bp, Homo sapien
aggaatttggagaatacgtgaaaggattaacct

SEQ ID NO: 848874 - DNA, 33 bp, Homo sapien
aggaatttggagaatatgtgaaaggattaacct

SEQ ID NO: 848875 - DNA, 33 bp, Homo sapien
ctatattgctcaactacatccattgcctgtgat

SEQ ID NO: 848876 - DNA, 33 bp, Homo sapien
ctatattgctcaactatatccattgcctgtgat

SEQ ID NO: 848877 - DNA, 33 bp, Homo sapien
gcctatgatttggctaaagagaaaaatctatcc

SEQ ID NO: 848878 - DNA, 33 bp, Homo sapien
gcctatgatttggctacagagaaaaatctatcc

SEQ ID NO: 848879 - DNA, 33 bp, Homo sapien
tttctgtgagtctccaagttgtattcatacatg

SEQ ID NO: 848880 - DNA, 33 bp, Homo sapien
tttctgtgagtctccaggttgtattcatacatg

SEQ ID NO: 848881 - DNA, 33 bp, Homo sapien
tttacttgctaagaagacctgtgcattcatgta

SEQ ID NO: 848882 - DNA, 33 bp, Homo sapien
tttacttgctaagaaggcctgtgcattcatgta

SEQ ID NO: 848883 - DNA, 33 bp, Homo sapien
ttaaaataatcactccagctactgtgggaaaaa

SEQ ID NO: 848884 - DNA, 33 bp, Homo sapien
ttaaaataatcactccggctactgtgggaaaaa

SEQ ID NO: 848885 - DNA, 33 bp, Homo sapien
ttcagagttcttaggaaaaagctgtagttgaac

SEQ ID NO: 848886 - DNA, 33 bp, Homo sapien
ttcagagttcttaggagaaagctgtagttgaac

SEQ ID NO: 848887 - DNA, 33 bp, Homo sapien
ataagaataatctaaaactatatgcaacaacat

SEQ ID NO: 848888 - DNA, 33 bp, Homo sapien
ataagaataatctaaagctatatgcaacaacat

SEQ ID NO: 848889 - DNA, 33 bp, Homo sapien
aggcactgtgttacaccgcaactgggaagcgtg

SEQ ID NO: 848890 - DNA, 33 bp, Homo sapien
aggcactgtgttacactgcaactgggaagcgtg

SEQ ID NO: 848891 - DNA, 33 bp, Homo sapien
ctaacttccactaagccatctgagtggccaaac

SEQ ID NO: 848892 - DNA, 33 bp, Homo sapien
ctaacttccactaagctatctgagtggccaaac

SEQ ID NO: 848893 - DNA, 33 bp, Homo sapien
cctaatgcacaagagaagatatgccaataaata

SEQ ID NO: 848894 - DNA, 33 bp, Homo sapien
cctaatgcacaagagacgatatgccaataaata

SEQ ID NO: 848895 - DNA, 33 bp, Homo sapien
taaattgctgaatctaagaaaatcacttacata

SEQ ID NO: 848896 - DNA, 33 bp, Homo sapien
taaattgctgaatctacgaaaatcacttacata

SEQ ID NO: 848897 - DNA, 33 bp, Homo sapien
attttgggtgaaataaacctctcttgtttccta

SEQ ID NO: 848898 - DNA, 33 bp, Homo sapien
attttgggtgaaataagcctctcttgtttccta

SEQ ID NO: 848899 - DNA, 33 bp, Homo sapien
tctggtggcaatctcacccctcctcgaatcgtc

SEQ ID NO: 848900 - DNA, 33 bp, Homo sapien
tctggtggcaatctcatccctcctcgaatcgtc

SEQ ID NO: 848901 - DNA, 33 bp, Homo sapien
caaagtcttgttaataaaggcaaagggatcttc

SEQ ID NO: 848902 - DNA, 33 bp, Homo sapien
caaagtcttgttaatacaggcaaagggatcttc

SEQ ID NO: 848903 - DNA, 33 bp, Homo sapien
ataaatgataaggccactaaagcccagagaagc

SEQ ID NO: 848904 - DNA, 33 bp, Homo sapien
ataaatgataaggccagtaaagcccagagaagc

SEQ ID NO: 848905 - DNA, 33 bp, Homo sapien
cttctgtctaggtagacgcttccgacatgttgg

SEQ ID NO: 848906 - DNA, 33 bp, Homo sapien
cttctgtctaggtagatgcttccgacatgttgg

SEQ ID NO: 848907 - DNA, 33 bp, Homo sapien
tgtaaagagcaacgcccgacacaggaagttaag

SEQ ID NO: 848908 - DNA, 33 bp, Homo sapien
tgtaaagagcaacgcctgacacaggaagttaag

SEQ ID NO: 848909 - DNA, 33 bp, Homo sapien
gtctttgcttttgctaccaaccatcttgagaaa

SEQ ID NO: 848910 - DNA, 33 bp, Homo sapien
gtctttgcttttgctatcaaccatcttgagaaa

SEQ ID NO: 848911 - DNA, 33 bp, Homo sapien
cgttaatctagatatacgatgtggatttcataa

SEQ ID NO: 848912 - DNA, 33 bp, Homo sapien
cgttaatctagatatatgatgtggatttcataa

SEQ ID NO: 848913 - DNA, 33 bp, Homo sapien
caagtagaggacctcacggttccaatttgaagt

SEQ ID NO: 848914 - DNA, 33 bp, Homo sapien
caagtagaggacctcagggttccaatttgaagt

SEQ ID NO: 848915 - DNA, 33 bp, Homo sapien
aaatatgtaaaagcagaaagacagaggaagcct

SEQ ID NO: 848916 - DNA, 33 bp, Homo sapien
aaatatgtaaaagcaggaagacagaggaagcct

SEQ ID NO: 848917 - DNA, 33 bp, Homo sapien
aatttctgacattacaagtctctcaaatcatac

SEQ ID NO: 848918 - DNA, 33 bp, Homo sapien
aatttctgacattacacgtctctcaaatcatac

SEQ ID NO: 848919 - DNA, 33 bp, Homo sapien
tgcacgaaggataagacagggccgttcaggggc

SEQ ID NO: 848920 - DNA, 33 bp, Homo sapien
tgcacgaaggataagatagggccgttcaggggc

SEQ ID NO: 848921 - DNA, 33 bp, Homo sapien
aaagggccccagaatcagaatggcttttccacc

SEQ ID NO: 848922 - DNA, 33 bp, Homo sapien
aaagggccccagaatcggaatggcttttccacc

SEQ ID NO: 848923 - DNA, 33 bp, Homo sapien
agaatgagaggaaagaaaattaatgagagcaga

SEQ ID NO: 848924 - DNA, 33 bp, Homo sapien
agaatgagaggaaagagaattaatgagagcaga

SEQ ID NO: 848925 - DNA, 33 bp, Homo sapien
aatgttttacttagtcaacctccatttcaagta

SEQ ID NO: 848926 - DNA, 33 bp, Homo sapien
aatgttttacttagtcgacctccatttcaagta

SEQ ID NO: 848927 - DNA, 33 bp, Homo sapien
attgggtttgtactcaaccactctgcttattaa

SEQ ID NO: 848928 - DNA, 33 bp, Homo sapien
attgggtttgtactcagccactctgcttattaa

SEQ ID NO: 848929 - DNA, 33 bp, Homo sapien
gacttaaaactaaacaaacacatcacatttgtt

SEQ ID NO: 848930 - DNA, 33 bp, Homo sapien
gacttaaaactaaacagacacatcacatttgtt

SEQ ID NO: 848931 - DNA, 33 bp, Homo sapien
gccaaagatacactaagagctgaagagggaggg

SEQ ID NO: 848932 - DNA, 33 bp, Homo sapien
gccaaagatacactaatagctgaagagggaggg

SEQ ID NO: 848933 - DNA, 33 bp, Homo sapien
aattccacagtgggggaaaatgagataaagaaa

SEQ ID NO: 848934 - DNA, 33 bp, Homo sapien
aattccacagtggggggaaatgagataaagaaa

SEQ ID NO: 848935 - DNA, 33 bp, Homo sapien
agtggattcactacagaatatcgaacctatctc

SEQ ID NO: 848936 - DNA, 33 bp, Homo sapien
agtggattcactacaggatatcgaacctatctc

SEQ ID NO: 848937 - DNA, 33 bp, Homo sapien
tcttgtggtggaaaagaaatttagacctgttat

SEQ ID NO: 848938 - DNA, 33 bp, Homo sapien
tcttgtggtggaaaagcaatttagacctgttat

SEQ ID NO: 848939 - DNA, 33 bp, Homo sapien
aggaacagaccagggccaatccgtcagtcacat

SEQ ID NO: 848940 - DNA, 33 bp, Homo sapien
aggaacagaccagggcgaatccgtcagtcacat

SEQ ID NO: 848941 - DNA, 33 bp, Homo sapien
attttgattctgcaaaacctagtaggaaattct

SEQ ID NO: 848942 - DNA, 33 bp, Homo sapien
attttgattctgcaaagcctagtaggaaattct

SEQ ID NO: 848943 - DNA, 33 bp, Homo sapien
gggagaaggtgggagaagtaactttatgtacag

SEQ ID NO: 848944 - DNA, 33 bp, Homo sapien
gggagaaggtgggagaggtaactttatgtacag

SEQ ID NO: 848945 - DNA, 33 bp, Homo sapien
gaaaaattttcatttcacgaattgtacaaaaat

SEQ ID NO: 848946 - DNA, 33 bp, Homo sapien
gaaaaattttcatttcgcgaattgtacaaaaat

SEQ ID NO: 848947 - DNA, 33 bp, Homo sapien
aagactacttgacaccacagcagatggtagtgt

SEQ ID NO: 848948 - DNA, 33 bp, Homo sapien
aagactacttgacaccgcagcagatggtagtgt

SEQ ID NO: 848949 - DNA, 33 bp, Homo sapien
gctgcttgagttgaaaagaaacagcagtaagat

SEQ ID NO: 848950 - DNA, 33 bp, Homo sapien
gctgcttgagttgaaaggaaacagcagtaagat

SEQ ID NO: 848951 - DNA, 33 bp, Homo sapien
tgaatcacttttttaagaatcaaatttcaggat

SEQ ID NO: 848952 - DNA, 33 bp, Homo sapien
tgaatcacttttttaataatcaaatttcaggat

SEQ ID NO: 848953 - DNA, 33 bp, Homo sapien
gtgtctaaatgcctctaaaggaaatttacaaga

SEQ ID NO: 848954 - DNA, 33 bp, Homo sapien
gtgtctaaatgcctcttaaggaaatttacaaga

SEQ ID NO: 848955 - DNA, 33 bp, Homo sapien
atgccaagtattttaacctggcatcatctcatt

SEQ ID NO: 848956 - DNA, 33 bp, Homo sapien
atgccaagtattttaatctggcatcatctcatt

SEQ ID NO: 848957 - DNA, 33 bp, Homo sapien
tctggaaatgttgccaatattgtcaatttgatg

SEQ ID NO: 848958 - DNA, 33 bp, Homo sapien
tctggaaatgttgccattattgtcaatttgatg

SEQ ID NO: 848959 - DNA, 33 bp, Homo sapien
agataataaggcctgacaagtatgtgttgagtg

SEQ ID NO: 848960 - DNA, 33 bp, Homo sapien
agataataaggcctgataagtatgtgttgagtg

SEQ ID NO: 848961 - DNA, 33 bp, Homo sapien
acttgatgcaagcctgcaaatcagagagtatct

SEQ ID NO: 848962 - DNA, 33 bp, Homo sapien
acttgatgcaagcctgtaaatcagagagtatct

SEQ ID NO: 848963 - DNA, 33 bp, Homo sapien
tgctatggggactctacggtgatatggaatgac

SEQ ID NO: 848964 - DNA, 33 bp, Homo sapien
tgctatggggactctatggtgatatggaatgac

SEQ ID NO: 848965 - DNA, 33 bp, Homo sapien
actgcagcaggtgtaaacatcttggtcatcact

SEQ ID NO: 848966 - DNA, 33 bp, Homo sapien
actgcagcaggtgtaagcatcttggtcatcact

SEQ ID NO: 848967 - DNA, 33 bp, Homo sapien
atccagacagtcctctcaagtacctgaattcct

SEQ ID NO: 848968 - DNA, 33 bp, Homo sapien
atccagacagtcctcttaagtacctgaattcct

SEQ ID NO: 848969 - DNA, 33 bp, Homo sapien
agaagccataacaagacattgtccctgtttcta

SEQ ID NO: 848970 - DNA, 33 bp, Homo sapien
agaagccataacaagatattgtccctgtttcta

SEQ ID NO: 848971 - DNA, 33 bp, Homo sapien
acataatttcatatacaaagtaggcagcaaact

SEQ ID NO: 848972 - DNA, 33 bp, Homo sapien
acataatttcatatacgaagtaggcagcaaact

SEQ ID NO: 848973 - DNA, 33 bp, Homo sapien
gtattctcggctcaggaagacacttctctatct

SEQ ID NO: 848974 - DNA, 33 bp, Homo sapien
gtattctcggctcagggagacacttctctatct

SEQ ID NO: 848975 - DNA, 33 bp, Homo sapien
attttttaaatcaggtaaaatcaagtatgaata

SEQ ID NO: 848976 - DNA, 33 bp, Homo sapien
attttttaaatcaggtgaaatcaagtatgaata

SEQ ID NO: 848977 - DNA, 33 bp, Homo sapien
catccaattctccaccactgtaggctataggtc

SEQ ID NO: 848978 - DNA, 33 bp, Homo sapien
catccaattctccaccgctgtaggctataggtc

SEQ ID NO: 848979 - DNA, 33 bp, Homo sapien
gatctgattcaggacactgatcttcgattctaa

SEQ ID NO: 848980 - DNA, 33 bp, Homo sapien
gatctgattcaggacattgatcttcgattctaa

SEQ ID NO: 848981 - DNA, 33 bp, Homo sapien
ggcatacctaagaacaatgggcatatatctgtc

SEQ ID NO: 848982 - DNA, 33 bp, Homo sapien
ggcatacctaagaacagtgggcatatatctgtc

SEQ ID NO: 848983 - DNA, 33 bp, Homo sapien
ctgtcttctccaataacaggctttactgctttt

SEQ ID NO: 848984 - DNA, 33 bp, Homo sapien
ctgtcttctccaataataggctttactgctttt

SEQ ID NO: 848985 - DNA, 33 bp, Homo sapien
agtatgacatggtttacgcataattgcagtttt

SEQ ID NO: 848986 - DNA, 33 bp, Homo sapien
agtatgacatggtttaggcataattgcagtttt

SEQ ID NO: 848987 - DNA, 33 bp, Homo sapien
acagggtccatggtgaccaattcatattgattt

SEQ ID NO: 848988 - DNA, 33 bp, Homo sapien
acagggtccatggtgatcaattcatattgattt

SEQ ID NO: 848989 - DNA, 33 bp, Homo sapien
gtccttatgtgtcttaaatatcattatggtatt

SEQ ID NO: 848990 - DNA, 33 bp, Homo sapien
gtccttatgtgtcttatatatcattatggtatt

SEQ ID NO: 848991 - DNA, 33 bp, Homo sapien
attgttatagctatcaaccattagagtttattt

SEQ ID NO: 848992 - DNA, 33 bp, Homo sapien
attgttatagctatcatccattagagtttattt

SEQ ID NO: 848993 - DNA, 33 bp, Homo sapien
gtgcagggagaaggataagctgaatgaggaata

SEQ ID NO: 848994 - DNA, 33 bp, Homo sapien
gtgcagggagaaggatgagctgaatgaggaata

SEQ ID NO: 848995 - DNA, 33 bp, Homo sapien
tggatctttacatcacaatattggacataattc

SEQ ID NO: 848996 - DNA, 33 bp, Homo sapien
tggatctttacatcacgatattggacataattc

SEQ ID NO: 848997 - DNA, 33 bp, Homo sapien
gttaagtgataatagcaacctgcccttctgcct

SEQ ID NO: 848998 - DNA, 33 bp, Homo sapien
gttaagtgataatagccacctgcccttctgcct

SEQ ID NO: 848999 - DNA, 33 bp, Homo sapien
ggaagatgacttattcaattgtatctcatcatc

SEQ ID NO: 849000 - DNA, 33 bp, Homo sapien
ggaagatgacttattcgattgtatctcatcatc

SEQ ID NO: 849001 - DNA, 33 bp, Homo sapien
acacagtcatttaactgaatgtgtctaaaacag

SEQ ID NO: 849002 - DNA, 33 bp, Homo sapien
acacagtcatttaacttaatgtgtctaaaacag

SEQ ID NO: 849003 - DNA, 33 bp, Homo sapien
aggtctttcagttaacccactccataaagacaa

SEQ ID NO: 849004 - DNA, 33 bp, Homo sapien
aggtctttcagttaacgcactccataaagacaa

SEQ ID NO: 849005 - DNA, 33 bp, Homo sapien; identical to SEQ ID NO: 849003

SEQ ID NO: 849006 - DNA, 33 bp, Homo sapien; identical to SEQ ID NO: 849004

SEQ ID NO: 849007 - DNA, 33 bp, Homo sapien
gtgtgctgatgaatagcaaggcaggaggggcag

SEQ ID NO: 849008 - DNA, 33 bp, Homo sapien
gtgtgctgatgaataggaaggcaggaggggcag

SEQ ID NO: 849009 - DNA, 33 bp, Homo sapien
gatgctatgatttacaaacacaatgtggaatca

SEQ ID NO: 849010 - DNA, 33 bp, Homo sapien
gatgctatgatttacagacacaatgtggaatca

SEQ ID NO: 849011 - DNA, 33 bp, Homo sapien
atattataagccaataactaacattatactcca

SEQ ID NO: 849012 - DNA, 33 bp, Homo sapien
atattataagccaatagctaacattatactcca

SEQ ID NO: 849013 - DNA, 33 bp, Homo sapien
aaaaagttaaatctaagacctcaatctatgaaa

SEQ ID NO: 849014 - DNA, 33 bp, Homo sapien
aaaaagttaaatctaatacctcaatctatgaaa

SEQ ID NO: 849015 - DNA, 33 bp, Homo sapien
tgtgggatattactcaagaaatccttgccctgg

SEQ ID NO: 849016 - DNA, 33 bp, Homo sapien
tgtgggatattactcacgaaatccttgccctgg

SEQ ID NO: 849017 - DNA, 33 bp, Homo sapien
gtttcctggaacaaaacgatgaaatccaggaga

SEQ ID NO: 849018 - DNA, 33 bp, Homo sapien
gtttcctggaacaaaatgatgaaatccaggaga

SEQ ID NO: 849019 - DNA, 33 bp, Homo sapien
cattggcattgctcggaaacatatattagtgaa

SEQ ID NO: 849020 - DNA, 33 bp, Homo sapien
cattggcattgctcggtaacatatattagtgaa

SEQ ID NO: 849021 - DNA, 33 bp, Homo sapien
gcaacatttgtgtccacagtgcttgatgggtca

SEQ ID NO: 849022 - DNA, 33 bp, Homo sapien
gcaacatttgtgtccatagtgcttgatgggtca

SEQ ID NO: 849023 - DNA, 33 bp, Homo sapien
gatgggtcattttccaatctctgtgcttcattg

SEQ ID NO: 849024 - DNA, 33 bp, Homo sapien
gatgggtcattttccattctctgtgcttcattg

SEQ ID NO: 849025 - DNA, 33 bp, Homo sapien
tggaaatggtttagaacgtttcagctgaccatc

SEQ ID NO: 849026 - DNA, 33 bp, Homo sapien
tggaaatggtttagaaggtttcagctgaccatc

SEQ ID NO: 849027 - DNA, 33 bp, Homo sapien
cagtagttaggtgtcccgaatcccatgaagcca

SEQ ID NO: 849028 - DNA, 33 bp, Homo sapien
cagtagttaggtgtcctgaatcccatgaagcca

SEQ ID NO: 849029 - DNA, 33 bp, Homo sapien
tctcccaagatcagtaagaacaggtggtttttt

SEQ ID NO: 849030 - DNA, 33 bp, Homo sapien
tctcccaagatcagtacgaacaggtggtttttt

SEQ ID NO: 849031 - DNA, 33 bp, Homo sapien
cgttttggaggatgaaactaagatgggtgatcg

SEQ ID NO: 849032 - DNA, 33 bp, Homo sapien
cgttttggaggatgaatctaagatgggtgatcg

SEQ ID NO: 849033 - DNA, 33 bp, Homo sapien
ttataaaagaatccctaagcactttcctattcg

SEQ ID NO: 849034 - DNA, 33 bp, Homo sapien
ttataaaagaatccctgagcactttcctattcg

SEQ ID NO: 849035 - DNA, 33 bp, Homo sapien
gttttgtttgtttacaaaagaattgcttctccc

SEQ ID NO: 849036 - DNA, 33 bp, Homo sapien
gttttgtttgtttacagaagaattgcttctccc

SEQ ID NO: 849037 - DNA, 33 bp, Homo sapien
gccttgagggacccccacaatcggaagatattc

SEQ ID NO: 849038 - DNA, 33 bp, Homo sapien
gccttgagggacccccgcaatcggaagatattc

SEQ ID NO: 849039 - DNA, 33 bp, Homo sapien
cacatcttattttgcacaatcctcatgcctaaa

SEQ ID NO: 849040 - DNA, 33 bp, Homo sapien
cacatcttattttgcagaatcctcatgcctaaa

SEQ ID NO: 849041 - DNA, 33 bp, Homo sapien
tgtccaatgatgatgacgcttgaacagcaccta

SEQ ID NO: 849042 - DNA, 33 bp, Homo sapien
tgtccaatgatgatgatgcttgaacagcaccta

SEQ ID NO: 849043 - DNA, 33 bp, Homo sapien
tagagtttagagtaaccgcttgggccctgatgc

SEQ ID NO: 849044 - DNA, 33 bp, Homo sapien
tagagtttagagtaactgcttgggccctgatgc

SEQ ID NO: 849045 - DNA, 33 bp, Homo sapien
tattaattttcatactcagagcaactttacaag

SEQ ID NO: 849046 - DNA, 33 bp, Homo sapien
tattaattttcatacttagagcaactttacaag

SEQ ID NO: 849047 - DNA, 33 bp, Homo sapien
tgagactggataaccaataaagactagaaattt

SEQ ID NO: 849048 - DNA, 33 bp, Homo sapien
tgagactggataaccagtaaagactagaaattt

SEQ ID NO: 849049 - DNA, 33 bp, Homo sapien
ttcacagctcttcttcaaggtccctttggcttt

SEQ ID NO: 849050 - DNA, 33 bp, Homo sapien
ttcacagctcttcttcgaggtccctttggcttt

SEQ ID NO: 849051 - DNA, 33 bp, Homo sapien
aatggtgcgactgatcaactaaattttaaaatg

SEQ ID NO: 849052 - DNA, 33 bp, Homo sapien
aatggtgcgactgatccactaaattttaaaatg

SEQ ID NO: 849053 - DNA, 33 bp, Homo sapien
gcaaatgtagccacaactaattaccttcaaaac

SEQ ID NO: 849054 - DNA, 33 bp, Homo sapien
gcaaatgtagccacaagtaattaccttcaaaac

SEQ ID NO: 849055 - DNA, 33 bp, Homo sapien
gtcttgtctagtaacccgatctaagatgaaaga

SEQ ID NO: 849056 - DNA, 33 bp, Homo sapien
gtcttgtctagtaacctgatctaagatgaaaga

SEQ ID NO: 849057 - DNA, 33 bp, Homo sapien
tttcaagaggaggtaccagtttaggtttgtgat

SEQ ID NO: 849058 - DNA, 33 bp, Homo sapien
tttcaagaggaggtactagtttaggtttgtgat

SEQ ID NO: 849059 - DNA, 33 bp, Homo sapien
gattgcatcactgggactaatacagcagcaaag

SEQ ID NO: 849060 - DNA, 33 bp, Homo sapien
gattgcatcactgggattaatacagcagcaaag

SEQ ID NO: 849061 - DNA, 33 bp, Homo sapien
attttgtgttaaagtacgaagatcttaatgtta

SEQ ID NO: 849062 - DNA, 33 bp, Homo sapien
attttgtgttaaagtatgaagatcttaatgtta

SEQ ID NO: 849063 - DNA, 33 bp, Homo sapien
tcatttgcatctccaccgctataggcttagaaa

SEQ ID NO: 849064 - DNA, 33 bp, Homo sapien
tcatttgcatctccactgctataggcttagaaa

SEQ ID NO: 849065 - DNA, 33 bp, Homo sapien
cgcaagctacagcataagtcagtgtgttctctc

SEQ ID NO: 849066 - DNA, 33 bp, Homo sapien
cgcaagctacagcatacgtcagtgtgttctctc

SEQ ID NO: 849067 - DNA, 33 bp, Homo sapien
atgagatgttcttaaaatgtccactgtaatctc

SEQ ID NO: 849068 - DNA, 33 bp, Homo sapien
atgagatgttcttaaattgtccactgtaatctc

SEQ ID NO: 849069 - DNA, 33 bp, Homo sapien
caactagggataaatcaagattcctacaaccca

SEQ ID NO: 849070 - DNA, 33 bp, Homo sapien
caactagggataaatcgagattcctacaaccca

SEQ ID NO: 849071 - DNA, 33 bp, Homo sapien
aggactgtggcagtgtaaaatatgtacagtatt

SEQ ID NO: 849072 - DNA, 33 bp, Homo sapien
aggactgtggcagtgtgaaatatgtacagtatt

SEQ ID NO: 849073 - DNA, 33 bp, Homo sapien
gacaatcactaagcaaacttgactggttaaaat

SEQ ID NO: 849074 - DNA, 33 bp, Homo sapien
gacaatcactaagcaatcttgactggttaaaat

SEQ ID NO: 849075 - DNA, 33 bp, Homo sapien
gaaagacatgaaaaacactgaagaaagtttgaa

SEQ ID NO: 849076 - DNA, 33 bp, Homo sapien
gaaagacatgaaaaaccctgaagaaagtttgaa

SEQ ID NO: 849077 - DNA, 33 bp, Homo sapien
ttattgtactgaaccaataattgaatatcagct

SEQ ID NO: 849078 - DNA, 33 bp, Homo sapien
ttattgtactgaaccagtaattgaatatcagct

SEQ ID NO: 849079 - DNA, 33 bp, Homo sapien
gctggtgcttgacagaacctcctctcacctctt

SEQ ID NO: 849080 - DNA, 33 bp, Homo sapien
gctggtgcttgacagaccctcctctcacctctt

SEQ ID NO: 849081 - DNA, 33 bp, Homo sapien
ccgggattgtacacccaccctaaggtagttcaa

SEQ ID NO: 849082 - DNA, 33 bp, Homo sapien
ccgggattgtacacccgccctaaggtagttcaa

SEQ ID NO: 849083 - DNA, 33 bp, Homo sapien
caagtcaactatatggacatttgactgtatata

SEQ ID NO: 849084 - DNA, 33 bp, Homo sapien
caagtcaactatatggccatttgactgtatata

SEQ ID NO: 849085 - DNA, 33 bp, Homo sapien
ggtctttaagggtgccactagcttctgccattc

SEQ ID NO: 849086 - DNA, 33 bp, Homo sapien
ggtctttaagggtgccgctagcttctgccattc

SEQ ID NO: 849087 - DNA, 33 bp, Homo sapien
aatggagatatgatgaagactaactctatcctt

SEQ ID NO: 849088 - DNA, 33 bp, Homo sapien
aatggagatatgatgatgactaactctatcctt

SEQ ID NO: 849089 - DNA, 33 bp, Homo sapien
acagtttccaagaaaaaacgaacagctgaagtg

SEQ ID NO: 849090 - DNA, 33 bp, Homo sapien
acagtttccaagaaaacacgaacagctgaagtg

SEQ ID NO: 849091 - DNA, 33 bp, Homo sapien
caatgtttaagtaacacctggtagactttaaca

SEQ ID NO: 849092 - DNA, 33 bp, Homo sapien
caatgtttaagtaacatctggtagactttaaca

SEQ ID NO: 849093 - DNA, 33 bp, Homo sapien
tcaaaatccaccttaacgtaggtcctgatcttg

SEQ ID NO: 849094 - DNA, 33 bp, Homo sapien
tcaaaatccaccttaatgtaggtcctgatcttg

SEQ ID NO: 849095 - DNA, 33 bp, Homo sapien
ttgtaaatgcaaggtgacaaggaaggtacacta

SEQ ID NO: 849096 - DNA, 33 bp, Homo sapien
ttgtaaatgcaaggtggcaaggaaggtacacta

SEQ ID NO: 849097 - DNA, 33 bp, Homo sapien
gtcaagtgagatggcacgtacctacagttccag

SEQ ID NO: 849098 - DNA, 33 bp, Homo sapien
gtcaagtgagatggcatgtacctacagttccag

SEQ ID NO: 849099 - DNA, 33 bp, Homo sapien
atatgtaagtgcatcaagttttttaagttgttg

SEQ ID NO: 849100 - DNA, 33 bp, Homo sapien
atatgtaagtgcatcaggttttttaagttgttg

SEQ ID NO: 849101 - DNA, 33 bp, Homo sapien
gggtgctaaatgaagaagctatataaacggcat

SEQ ID NO: 849102 - DNA, 33 bp, Homo sapien
gggtgctaaatgaagatgctatataaacggcat

SEQ ID NO: 849103 - DNA, 33 bp, Homo sapien
ggcagcatagcaagacccgatctctacaaaaat

SEQ ID NO: 849104 - DNA, 33 bp, Homo sapien
ggcagcatagcaagacgcgatctctacaaaaat

SEQ ID NO: 849105 - DNA, 33 bp, Homo sapien
caaagtattcatctcacctttgtaaaagcaaaa

SEQ ID NO: 849106 - DNA, 33 bp, Homo sapien
caaagtattcatctcatctttgtaaaagcaaaa

SEQ ID NO: 849107 - DNA, 33 bp, Homo sapien
attcccttagtgttaccggccctaagaaatctt

SEQ ID NO: 849108 - DNA, 33 bp, Homo sapien
attcccttagtgttactggccctaagaaatctt

SEQ ID NO: 849109 - DNA, 33 bp, Homo sapien
cagacattgtacagagaataaaaactgcagtta

SEQ ID NO: 849110 - DNA, 33 bp, Homo sapien
cagacattgtacagaggataaaaactgcagtta

SEQ ID NO: 849111 - DNA, 33 bp, Homo sapien
taaaggattcaaagaacatagttcatcaaggtc

SEQ ID NO: 849112 - DNA, 33 bp, Homo sapien
taaaggattcaaagaatatagttcatcaaggtc

SEQ ID NO: 849113 - DNA, 33 bp, Homo sapien
agaaatatagtaagacagaagtattggacatgt

SEQ ID NO: 849114 - DNA, 33 bp, Homo sapien
agaaatatagtaagacggaagtattggacatgt

SEQ ID NO: 849115 - DNA, 33 bp, Homo sapien
tgaaaaacagctctccaccgtgcctggccagga

SEQ ID NO: 849116 - DNA, 33 bp, Homo sapien
tgaaaaacagctctccgccgtgcctggccagga

SEQ ID NO: 849117 - DNA, 33 bp, Homo sapien
gacttgattggcttcacatataaactgttggaa

SEQ ID NO: 849118 - DNA, 33 bp, Homo sapien
gacttgattggcttcatatataaactgttggaa

SEQ ID NO: 849119 - DNA, 33 bp, Homo sapien
ctgtccatattttataagcccaacaataacaat

SEQ ID NO: 849120 - DNA, 33 bp, Homo sapien
ctgtccatattttataggcccaacaataacaat

SEQ ID NO: 849121 - DNA, 33 bp, Homo sapien
accaaatgagtctccaaggaaggggtgatctga

SEQ ID NO: 849122 - DNA, 33 bp, Homo sapien
accaaatgagtctccagggaaggggtgatctga

SEQ ID NO: 849123 - DNA, 33 bp, Homo sapien
tgttttcagagatatccatctaatcttcctgat

SEQ ID NO: 849124 - DNA, 33 bp, Homo sapien
tgttttcagagatatctatctaatcttcctgat

SEQ ID NO: 849125 - DNA, 33 bp, Homo sapien
aactgccctgtgaaggacagatattagcattgt

SEQ ID NO: 849126 - DNA, 33 bp, Homo sapien
aactgccctgtgaagggcagatattagcattgt

SEQ ID NO: 849127 - DNA, 33 bp, Homo sapien
agttagactttaattacatcacctcgcaaggct

SEQ ID NO: 849128 - DNA, 33 bp, Homo sapien
agttagactttaattatatcacctcgcaaggct

SEQ ID NO: 849129 - DNA, 33 bp, Homo sapien
aagctttctatgcaacacaaggactcagttttt

SEQ ID NO: 849130 - DNA, 33 bp, Homo sapien
aagctttctatgcaacccaaggactcagttttt

SEQ ID NO: 849131 - DNA, 33 bp, Homo sapien
gactttagcctctgcaataagttaatgttactt

SEQ ID NO: 849132 - DNA, 33 bp, Homo sapien
gactttagcctctgcagtaagttaatgttactt

SEQ ID NO: 849133 - DNA, 33 bp, Homo sapien; identical to SEQ ID NO: 849131

SEQ ID NO: 849134 - DNA, 33 bp, Homo sapien; identical to SEQ ID NO: 849132

SEQ ID NO: 849135 - DNA, 33 bp, Homo sapien
accggtgcctagagaaagtggcgcggggtaaac

SEQ ID NO: 849136 - DNA, 33 bp, Homo sapien
accggtgcctagagaaggtggcgcggggtaaac

SEQ ID NO: 849137 - DNA, 33 bp, Homo sapien
tggtgaatcacaattaagtacctcaaagaacta

SEQ ID NO: 849138 - DNA, 33 bp, Homo sapien
tggtgaatcacaattatgtacctcaaagaacta

SEQ ID NO: 849139 - DNA, 33 bp, Homo sapien
catagcctcctttcaccggcttatgcccacagt

SEQ ID NO: 849140 - DNA, 33 bp, Homo sapien
catagcctcctttcactggcttatgcccacagt

SEQ ID NO: 849141 - DNA, 33 bp, Homo sapien
ggacttgacagtctaacgaaatgttgaagtgtt

SEQ ID NO: 849142 - DNA, 33 bp, Homo sapien
ggacttgacagtctaatgaaatgttgaagtgtt

SEQ ID NO: 849143 - DNA, 33 bp, Homo sapien
aaggcctaaaaaactccgaggtagctggtgata

SEQ ID NO: 849144 - DNA, 33 bp, Homo sapien
aaggcctaaaaaactctgaggtagctggtgata

SEQ ID NO: 849145 - DNA, 33 bp, Homo sapien
catctcaaggtgaaataagagtaaacagtttcc

SEQ ID NO: 849146 - DNA, 33 bp, Homo sapien
catctcaaggtgaaatgagagtaaacagtttcc

SEQ ID NO: 849147 - DNA, 33 bp, Homo sapien
gtagctccagagtaaaaacatcaagcagatcat

SEQ ID NO: 849148 - DNA, 33 bp, Homo sapien
gtagctccagagtaaagacatcaagcagatcat

SEQ ID NO: 849149 - DNA, 33 bp, Homo sapien
cacacacatgaaatcccagctacttgggaggct

SEQ ID NO: 849150 - DNA, 33 bp, Homo sapien
cacacacatgaaatcctagctacttgggaggct

SEQ ID NO: 849151 - DNA, 33 bp, Homo sapien
tgcagattacgtgtgccaaacacagctgggctt

SEQ ID NO: 849152 - DNA, 33 bp, Homo sapien
tgcagattacgtgtgcgaaacacagctgggctt

SEQ ID NO: 849153 - DNA, 33 bp, Homo sapien
tttactaagcttaaaggcttatacgtcttcttc

SEQ ID NO: 849154 - DNA, 33 bp, Homo sapien
tttactaagcttaaagtcttatacgtcttcttc

SEQ ID NO: 849155 - DNA, 33 bp, Homo sapien
cagggacccgaggcacagagcaagtaagtggat

SEQ ID NO: 849156 - DNA, 33 bp, Homo sapien
cagggacccgaggcaccgagcaagtaagtggat

SEQ ID NO: 849157 - DNA, 33 bp, Homo sapien
atctccaagtatttaacaaaagtggagcaaaat

SEQ ID NO: 849158 - DNA, 33 bp, Homo sapien
atctccaagtatttaagaaaagtggagcaaaat

SEQ ID NO: 849159 - DNA, 33 bp, Homo sapien
cttaagtgacacggtaactgttactatttcctc

SEQ ID NO: 849160 - DNA, 33 bp, Homo sapien
cttaagtgacacggtacctgttactatttcctc

SEQ ID NO: 849161 - DNA, 33 bp, Homo sapien
tcagtcagctgagaacaagtacagcagtcctca

SEQ ID NO: 849162 - DNA, 33 bp, Homo sapien
tcagtcagctgagaaccagtacagcagtcctca

SEQ ID NO: 849163 - DNA, 33 bp, Homo sapien
attttcatcttttgacaatagcactattttttt

SEQ ID NO: 849164 - DNA, 33 bp, Homo sapien
attttcatcttttgacgatagcactattttttt

SEQ ID NO: 849165 - DNA, 33 bp, Homo sapien
ttcatgtgttataatgaatgttaccgatggatt

SEQ ID NO: 849166 - DNA, 33 bp, Homo sapien
ttcatgtgttataatggatgttaccgatggatt

SEQ ID NO: 849167 - DNA, 33 bp, Homo sapien
actcttgcctgaagcccattatttctggataca

SEQ ID NO: 849168 - DNA, 33 bp, Homo sapien
actcttgcctgaagcctattatttctggataca

SEQ ID NO: 849169 - DNA, 33 bp, Homo sapien
cattcattcatctgacaaaatgcctactacatg

SEQ ID NO: 849170 - DNA, 33 bp, Homo sapien
cattcattcatctgacgaaatgcctactacatg

SEQ ID NO: 849171 - DNA, 33 bp, Homo sapien
ctgtggacagaggtgacgatagttaaaagttta

SEQ ID NO: 849172 - DNA, 33 bp, Homo sapien
ctgtggacagaggtgatgatagttaaaagttta

SEQ ID NO: 849173 - DNA, 33 bp, Homo sapien
gaaacactatattgccaggaagactaacaaatt

SEQ ID NO: 849174 - DNA, 33 bp, Homo sapien
gaaacactatattgcctggaagactaacaaatt

SEQ ID NO: 849175 - DNA, 33 bp, Homo sapien
cctcaaccttctaggcacaagtaattctcccac

SEQ ID NO: 849176 - DNA, 33 bp, Homo sapien
cctcaaccttctaggctcaagtaattctcccac

SEQ ID NO: 849177 - DNA, 33 bp, Homo sapien
ttactataaaataaaacgcagatgcagaaaacc

SEQ ID NO: 849178 - DNA, 33 bp, Homo sapien
ttactataaaataaaatgcagatgcagaaaacc

SEQ ID NO: 849179 - DNA, 33 bp, Homo sapien
atatggaagaaataaaatatcaatagctggcca

SEQ ID NO: 849180 - DNA, 33 bp, Homo sapien
atatggaagaaataaactatcaatagctggcca

SEQ ID NO: 849181 - DNA, 33 bp, Homo sapien
ttcttttcttaattccaaggatatcatggggtt

SEQ ID NO: 849182 - DNA, 33 bp, Homo sapien
ttcttttcttaattccgaggatatcatggggtt

SEQ ID NO: 849183 - DNA, 33 bp, Homo sapien
ttatctcacctgcatacgaaatgctaagaagtt

SEQ ID NO: 849184 - DNA, 33 bp, Homo sapien
ttatctcacctgcatatgaaatgctaagaagtt

SEQ ID NO: 849185 - DNA, 33 bp, Homo sapien
ttttctggataagaataaaacgaatcaggttcc

SEQ ID NO: 849186 - DNA, 33 bp, Homo sapien
ttttctggataagaatcaaacgaatcaggttcc

SEQ ID NO: 849187 - DNA, 33 bp, Homo sapien
gtaaagataaatggtaactagtgctattattag

SEQ ID NO: 849188 - DNA, 33 bp, Homo sapien
gtaaagataaatggtagctagtgctattattag

SEQ ID NO: 849189 - DNA, 33 bp, Homo sapien
tgcaaactttctagtaagtgggtgagtcataac

SEQ ID NO: 849190 - DNA, 33 bp, Homo sapien
tgcaaactttctagtaggtgggtgagtcataac

SEQ ID NO: 849191 - DNA, 33 bp, Homo sapien
attaagcagaaaactgcagtggctgagctaggc

SEQ ID NO: 849192 - DNA, 33 bp, Homo sapien
attaagcagaaaactgtagtggctgagctaggc

SEQ ID NO: 849193 - DNA, 33 bp, Homo sapien
tataatatgtagagaccaccatctacccactgg

SEQ ID NO: 849194 - DNA, 33 bp, Homo sapien
tataatatgtagagacgaccatctacccactgg

SEQ ID NO: 849195 - DNA, 33 bp, Homo sapien
agcagatagctggcaccgagatggatgtgatga

SEQ ID NO: 849196 - DNA, 33 bp, Homo sapien
agcagatagctggcactgagatggatgtgatga

SEQ ID NO: 849197 - DNA, 33 bp, Homo sapien
acctcatccaaagacaaccagcaagttaacaca

SEQ ID NO: 849198 - DNA, 33 bp, Homo sapien
acctcatccaaagacacccagcaagttaacaca

SEQ ID NO: 849199 - DNA, 33 bp, Homo sapien
gaaagacaaattcataagttcttactcatgtat

SEQ ID NO: 849200 - DNA, 33 bp, Homo sapien
gaaagacaaattcatatgttcttactcatgtat

SEQ ID NO: 849201 - DNA, 33 bp, Homo sapien
aatggatacaacatacactatttggctgatgtt

SEQ ID NO: 849202 - DNA, 33 bp, Homo sapien
aatggatacaacatacgctatttggctgatgtt

SEQ ID NO: 849203 - DNA, 33 bp, Homo sapien
ttcaaacatgtcaaaaatgtgtagtgtgaagaa

SEQ ID NO: 849204 - DNA, 33 bp, Homo sapien
ttcaaacatgtcaaaactgtgtagtgtgaagaa

SEQ ID NO: 849205 - DNA, 33 bp, Homo sapien
tcccgcaagcacgtataaccttaaaatagcaac

SEQ ID NO: 849206 - DNA, 33 bp, Homo sapien
tcccgcaagcacgtatcaccttaaaatagcaac

SEQ ID NO: 849207 - DNA, 33 bp, Homo sapien
gaaaagagcagtgccacgctgagacatactaga

SEQ ID NO: 849208 - DNA, 33 bp, Homo sapien
gaaaagagcagtgccatgctgagacatactaga

SEQ ID NO: 849209 - DNA, 33 bp, Homo sapien
ccaaccatattgttcccaattcttcacccacaa

SEQ ID NO: 849210 - DNA, 33 bp, Homo sapien
ccaaccatattgttcctaattcttcacccacaa

SEQ ID NO: 849211 - DNA, 33 bp, Homo sapien
ataaatcaatgaagaccccaggcctggaactca

SEQ ID NO: 849212 - DNA, 33 bp, Homo sapien
ataaatcaatgaagacgccaggcctggaactca

SEQ ID NO: 849213 - DNA, 33 bp, Homo sapien
gactatttctggattacgtgtgaataacatgtc

SEQ ID NO: 849214 - DNA, 33 bp, Homo sapien
gactatttctggattatgtgtgaataacatgtc

SEQ ID NO: 849215 - DNA, 33 bp, Homo sapien
aaaaagtgtatagccactgctttttatatgcca

SEQ ID NO: 849216 - DNA, 33 bp, Homo sapien
aaaaagtgtatagccagtgctttttatatgcca

SEQ ID NO: 849217 - DNA, 33 bp, Homo sapien
ctgcgttaagataatacagggccgctttgtgct

SEQ ID NO: 849218 - DNA, 33 bp, Homo sapien
ctgcgttaagataatatagggccgctttgtgct

SEQ ID NO: 849219 - DNA, 33 bp, Homo sapien
ctgccagacatctccacctgaatttctgacaga

SEQ ID NO: 849220 - DNA, 33 bp, Homo sapien
ctgccagacatctccatctgaatttctgacaga

SEQ ID NO: 849221 - DNA, 33 bp, Homo sapien
cataaagcatcccataataacccccatgcctat

SEQ ID NO: 849222 - DNA, 33 bp, Homo sapien
cataaagcatcccatagtaacccccatgcctat

SEQ ID NO: 849223 - DNA, 33 bp, Homo sapien
ccatttcaatactagcaatcccattattgggta

SEQ ID NO: 849224 - DNA, 33 bp, Homo sapien
ccatttcaatactagcgatcccattattgggta

SEQ ID NO: 849225 - DNA, 33 bp, Homo sapien
tgcagcaatagttacaatagccaaaaaggtgga

SEQ ID NO: 849226 - DNA, 33 bp, Homo sapien
tgcagcaatagttacagtagccaaaaaggtgga

SEQ ID NO: 849227 - DNA, 33 bp, Homo sapien
tcatttttgaaaaaaccgtatctcatggatgtt

SEQ ID NO: 849228 - DNA, 33 bp, Homo sapien
tcatttttgaaaaaactgtatctcatggatgtt

SEQ ID NO: 849229 - DNA, 33 bp, Homo sapien
tcaaattatacttacagaagactgcgcttcagt

SEQ ID NO: 849230 - DNA, 33 bp, Homo sapien
tcaaattatacttacataagactgcgcttcagt

SEQ ID NO: 849231 - DNA, 33 bp, Homo sapien
aaaaatgaaaatcacaatctctatgttcatcta

SEQ ID NO: 849232 - DNA, 33 bp, Homo sapien
aaaaatgaaaatcacagtctctatgttcatcta

SEQ ID NO: 849233 - DNA, 33 bp, Homo sapien
taccttttcactgtaacagaaggaacctgatac

SEQ ID NO: 849234 - DNA, 33 bp, Homo sapien
taccttttcactgtaatagaaggaacctgatac

SEQ ID NO: 849235 - DNA, 33 bp, Homo sapien
ctactaagtcagaatcacttgggctatggcttg

SEQ ID NO: 849236 - DNA, 33 bp, Homo sapien
ctactaagtcagaatcgcttgggctatggcttg

SEQ ID NO: 849237 - DNA, 33 bp, Homo sapien
gcttggaacagagttgaaactttacaccaagct

SEQ ID NO: 849238 - DNA, 33 bp, Homo sapien
gcttggaacagagttggaactttacaccaagct

SEQ ID NO: 849239 - DNA, 33 bp, Homo sapien
agaacactgcaaatcacaattatcccatagtgt

SEQ ID NO: 849240 - DNA, 33 bp, Homo sapien
agaacactgcaaatcagaattatcccatagtgt

SEQ ID NO: 849241 - DNA, 33 bp, Homo sapien
ttcctggtcctttccaacatatcccattgcttc

SEQ ID NO: 849242 - DNA, 33 bp, Homo sapien
ttcctggtcctttccatcatatcccattgcttc

SEQ ID NO: 849243 - DNA, 33 bp, Homo sapien
tacaaaatgaatggtccaaatcctcagtatctg

SEQ ID NO: 849244 - DNA, 33 bp, Homo sapien
tacaaaatgaatggtcgaaatcctcagtatctg

SEQ ID NO: 849245 - DNA, 33 bp, Homo sapien
caacaaatatcagctacagtagaattagttgcc

SEQ ID NO: 849246 - DNA, 33 bp, Homo sapien
caacaaatatcagctatagtagaattagttgcc

SEQ ID NO: 849247 - DNA, 33 bp, Homo sapien
tccccctctaaatgccaggacagatgatggaca

SEQ ID NO: 849248 - DNA, 33 bp, Homo sapien
tccccctctaaatgccgggacagatgatggaca

SEQ ID NO: 849249 - DNA, 33 bp, Homo sapien
cccacatagctatacaatgaaggtcaaacatgg

SEQ ID NO: 849250 - DNA, 33 bp, Homo sapien
cccacatagctatacactgaaggtcaaacatgg

SEQ ID NO: 849251 - DNA, 33 bp, Homo sapien
cattattttgttggtcaaaacaacagctacatc

SEQ ID NO: 849252 - DNA, 33 bp, Homo sapien
cattattttgttggtcgaaacaacagctacatc

SEQ ID NO: 849253 - DNA, 33 bp, Homo sapien
ggaaaatggaaccataacatgaaaactgttttt

SEQ ID NO: 849254 - DNA, 33 bp, Homo sapien
ggaaaatggaaccatagcatgaaaactgttttt

SEQ ID NO: 849255 - DNA, 33 bp, Homo sapien
cacaacagacgagaaaagcaaaaacatagctct

SEQ ID NO: 849256 - DNA, 33 bp, Homo sapien
cacaacagacgagaaaggcaaaaacatagctct

SEQ ID NO: 849257 - DNA, 33 bp, Homo sapien
agatcacatcaacaacagcagttccaagtatga

SEQ ID NO: 849258 - DNA, 33 bp, Homo sapien
agatcacatcaacaacggcagttccaagtatga

SEQ ID NO: 849259 - DNA, 33 bp, Homo sapien
atagccagagtttaaccatgaattcaacctaag

SEQ ID NO: 849260 - DNA, 33 bp, Homo sapien
atagccagagtttaactatgaattcaacctaag

SEQ ID NO: 849261 - DNA, 33 bp, Homo sapien
aggactaaattctccacatagccagagtttaac

SEQ ID NO: 849262 - DNA, 33 bp, Homo sapien
aggactaaattctccagatagccagagtttaac

SEQ ID NO: 849263 - DNA, 33 bp, Homo sapien
acagaggaggaaatgcaaaataatctaaaacgg

SEQ ID NO: 849264 - DNA, 33 bp, Homo sapien
acagaggaggaaatgctaaataatctaaaacgg

SEQ ID NO: 849265 - DNA, 33 bp, Homo sapien
tcaggcattttgggccacgtagagtctccgttg

SEQ ID NO: 849266 - DNA, 33 bp, Homo sapien
tcaggcattttgggccgcgtagagtctccgttg

SEQ ID NO: 849267 - DNA, 33 bp, Homo sapien
gacaatgtgttctagcaagtttagattgcaaag

SEQ ID NO: 849268 - DNA, 33 bp, Homo sapien
gacaatgtgttctagcgagtttagattgcaaag

SEQ ID NO: 849269 - DNA, 33 bp, Homo sapien
atctcataaaatgcagcaggcagtaagcagtaa

SEQ ID NO: 849270 - DNA, 33 bp, Homo sapien
atctcataaaatgcagtaggcagtaagcagtaa

SEQ ID NO: 849271 - DNA, 33 bp, Homo sapien
gattttcattgcctaggacaaggtcaggtactt

SEQ ID NO: 849272 - DNA, 33 bp, Homo sapien
gattttcattgcctagtacaaggtcaggtactt

SEQ ID NO: 849273 - DNA, 33 bp, Homo sapien
attctgaatatttccacgtgcaggatacagtat

SEQ ID NO: 849274 - DNA, 33 bp, Homo sapien
attctgaatatttccatgtgcaggatacagtat

SEQ ID NO: 849275 - DNA, 33 bp, Homo sapien
actactgcctgtgcaaccatttctactatagtg

SEQ ID NO: 849276 - DNA, 33 bp, Homo sapien
actactgcctgtgcaatcatttctactatagtg

SEQ ID NO: 849277 - DNA, 33 bp, Homo sapien
tcctaaattgtgacatcagtaactggacataat

SEQ ID NO: 849278 - DNA, 33 bp, Homo sapien
tcctaaattgtgacattagtaactggacataat

SEQ ID NO: 849279 - DNA, 33 bp, Homo sapien
acctggctaccacctaagtttgtttaagaccac

SEQ ID NO: 849280 - DNA, 33 bp, Homo sapien
acctggctaccacctatgtttgtttaagaccac

SEQ ID NO: 849281 - DNA, 33 bp, Homo sapien
gctctggaaccagatcactaggatttcagtcca

SEQ ID NO: 849282 - DNA, 33 bp, Homo sapien
gctctggaaccagatcgctaggatttcagtcca

SEQ ID NO: 849283 - DNA, 33 bp, Homo sapien
acagaaccctgtgtcacaaggaattttacttgt

SEQ ID NO: 849284 - DNA, 33 bp, Homo sapien
acagaaccctgtgtcataaggaattttacttgt

SEQ ID NO: 849285 - DNA, 33 bp, Homo sapien
tagaaggctctggaacgataaagatcatctagt

SEQ ID NO: 849286 - DNA, 33 bp, Homo sapien
tagaaggctctggaactataaagatcatctagt

SEQ ID NO: 849287 - DNA, 33 bp, Homo sapien
ttaaggacaaaacaggaaagtggaagttaccat

SEQ ID NO: 849288 - DNA, 33 bp, Homo sapien
ttaaggacaaaacagggaagtggaagttaccat

SEQ ID NO: 849289 - DNA, 33 bp, Homo sapien
aaccagacctcctacccacacttcggcatgtac

SEQ ID NO: 849290 - DNA, 33 bp, Homo sapien
aaccagacctcctacctacacttcggcatgtac

SEQ ID NO: 849291 - DNA, 33 bp, Homo sapien
gggtatgtattctacactcttcatttgtcagat

SEQ ID NO: 849292 - DNA, 33 bp, Homo sapien
gggtatgtattctacagtcttcatttgtcagat

SEQ ID NO: 849293 - DNA, 33 bp, Homo sapien
taatcgagaacttgtaaatctgagggaacctgc

SEQ ID NO: 849294 - DNA, 33 bp, Homo sapien
taatcgagaacttgtacatctgagggaacctgc

SEQ ID NO: 849295 - DNA, 33 bp, Homo sapien
agttgcaaggactagacagaactcagccaaatg

SEQ ID NO: 849296 - DNA, 33 bp, Homo sapien
agttgcaaggactagagagaactcagccaaatg

SEQ ID NO: 849297 - DNA, 33 bp, Homo sapien
ttttattcttgtttccagatcaggcaccttagg

SEQ ID NO: 849298 - DNA, 33 bp, Homo sapien
ttttattcttgtttccggatcaggcaccttagg

SEQ ID NO: 849299 - DNA, 33 bp, Homo sapien
aacatgacatgcctgcagaaatatgaacaagca

SEQ ID NO: 849300 - DNA, 33 bp, Homo sapien
aacatgacatgcctgcggaaatatgaacaagca

SEQ ID NO: 849301 - DNA, 33 bp, Homo sapien
agtagcaaaacttcccacgttctcttttatttt

SEQ ID NO: 849302 - DNA, 33 bp, Homo sapien
agtagcaaaacttcccgcgttctcttttatttt

SEQ ID NO: 849303 - DNA, 33 bp, Homo sapien
tatggagacatcctcaagcaaatggcctcctgc

SEQ ID NO: 849304 - DNA, 33 bp, Homo sapien
tatggagacatcctcaggcaaatggcctcctgc

SEQ ID NO: 849305 - DNA, 33 bp, Homo sapien
ccattatgggcagccaaatgatcagaccatacc

SEQ ID NO: 849306 - DNA, 33 bp, Homo sapien
ccattatgggcagccagatgatcagaccatacc

SEQ ID NO: 849307 - DNA, 33 bp, Homo sapien
cttttctgaagaatgcgttgggccagtgttcta

SEQ ID NO: 849308 - DNA, 33 bp, Homo sapien
cttttctgaagaatgctttgggccagtgttcta

SEQ ID NO: 849309 - DNA, 33 bp, Homo sapien
atatacaccaacttacaaaaatgtgtcaggtga

SEQ ID NO: 849310 - DNA, 33 bp, Homo sapien
atatacaccaacttacgaaaatgtgtcaggtga

SEQ ID NO: 849311 - DNA, 33 bp, Homo sapien
gcagtcttgccaatcccagaactcaaactaatg

SEQ ID NO: 849312 - DNA, 33 bp, Homo sapien
gcagtcttgccaatcctagaactcaaactaatg

SEQ ID NO: 849313 - DNA, 33 bp, Homo sapien
ggtcctgaaactaacaaagagctaccaagaaat

SEQ ID NO: 849314 - DNA, 33 bp, Homo sapien
ggtcctgaaactaacagagagctaccaagaaat

SEQ ID NO: 849315 - DNA, 33 bp, Homo sapien
aagcagctacagcaagcctccaatttagagctc

SEQ ID NO: 849316 - DNA, 33 bp, Homo sapien
aagcagctacagcaaggctccaatttagagctc

SEQ ID NO: 849317 - DNA, 33 bp, Homo sapien
ttgcttctcaatgccacagcacatagtctaagg

SEQ ID NO: 849318 - DNA, 33 bp, Homo sapien
ttgcttctcaatgccagagcacatagtctaagg

SEQ ID NO: 849319 - DNA, 33 bp, Homo sapien
atctggcctcagaaaactcttatgaaatagtat

SEQ ID NO: 849320 - DNA, 33 bp, Homo sapien
atctggcctcagaaaattcttatgaaatagtat

SEQ ID NO: 849321 - DNA, 33 bp, Homo sapien
ggattactatggatcaagaaggaaatgtaacaa

SEQ ID NO: 849322 - DNA, 33 bp, Homo sapien
ggattactatggatcaggaaggaaatgtaacaa

SEQ ID NO: 849323 - DNA, 33 bp, Homo sapien
ctgtgatactggagagcaaggcagaatgtaatc

SEQ ID NO: 849324 - DNA, 33 bp, Homo sapien
ctgtgatactggagaggaaggcagaatgtaatc

SEQ ID NO: 849325 - DNA, 33 bp, Homo sapien
tacacagaaagcaacaagagagattttcaagaa

SEQ ID NO: 849326 - DNA, 33 bp, Homo sapien
tacacagaaagcaacatgagagattttcaagaa

SEQ ID NO: 849327 - DNA, 33 bp, Homo sapien
tctcactcatatgtgcagaagctaaaaagctca

SEQ ID NO: 849328 - DNA, 33 bp, Homo sapien
tctcactcatatgtgcggaagctaaaaagctca

SEQ ID NO: 849329 - DNA, 33 bp, Homo sapien
ccttgagatgaatgcacattggacatcttcctc

SEQ ID NO: 849330 - DNA, 33 bp, Homo sapien
ccttgagatgaatgcatattggacatcttcctc

SEQ ID NO: 849331 - DNA, 33 bp, Homo sapien
caggaagacaaactaaaaaagaggacaggaggg

SEQ ID NO: 849332 - DNA, 33 bp, Homo sapien
caggaagacaaactaagaaagaggacaggaggg

SEQ ID NO: 849333 - DNA, 33 bp, Homo sapien
tactaataactaaaagactataaagcaggtaat

SEQ ID NO: 849334 - DNA, 33 bp, Homo sapien
tactaataactaaaaggctataaagcaggtaat

SEQ ID NO: 849335 - DNA, 33 bp, Homo sapien
tacattgaccaatatacagctagaggattctaa

SEQ ID NO: 849336 - DNA, 33 bp, Homo sapien
tacattgaccaatatatagctagaggattctaa

SEQ ID NO: 849337 - DNA, 33 bp, Homo sapien
caggtcgtcactagacactctggaagatttctc

SEQ ID NO: 849338 - DNA, 33 bp, Homo sapien
caggtcgtcactagactctctggaagatttctc

SEQ ID NO: 849339 - DNA, 33 bp, Homo sapien
gcaagatttaagctaaatgctatgtgaaatata

SEQ ID NO: 849340 - DNA, 33 bp, Homo sapien
gcaagatttaagctaactgctatgtgaaatata

SEQ ID NO: 849341 - DNA, 33 bp, Homo sapien
tgctgtgattattcagaactttttgttgctcca

SEQ ID NO: 849342 - DNA, 33 bp, Homo sapien
tgctgtgattattcaggactttttgttgctcca

SEQ ID NO: 849343 - DNA, 33 bp, Homo sapien
ccaggagaaatatatgccaaacaatgaaaaccc

SEQ ID NO: 849344 - DNA, 33 bp, Homo sapien
ccaggagaaatatatgtcaaacaatgaaaaccc

SEQ ID NO: 849345 - DNA, 33 bp, Homo sapien
atataagcattctagaagcaaaatattttagag

SEQ ID NO: 849346 - DNA, 33 bp, Homo sapien
atataagcattctagaggcaaaatattttagag

SEQ ID NO: 849347 - DNA, 33 bp, Homo sapien
tcaattcacttgtccaaaaataactccaaaaat

SEQ ID NO: 849348 - DNA, 33 bp, Homo sapien
tcaattcacttgtccagaaataactccaaaaat

SEQ ID NO: 849349 - DNA, 33 bp, Homo sapien
aaaagcagtcactgcaaaaaactgtggaaattt

SEQ ID NO: 849350 - DNA, 33 bp, Homo sapien
aaaagcagtcactgcagaaaactgtggaaattt

SEQ ID NO: 849351 - DNA, 33 bp, Homo sapien
cacctactatgcatcgaactatgttagagagat

SEQ ID NO: 849352 - DNA, 33 bp, Homo sapien
cacctactatgcatcgcactatgttagagagat

SEQ ID NO: 849353 - DNA, 33 bp, Homo sapien
gatgcaacactataccaatcaaactaccaatgt

SEQ ID NO: 849354 - DNA, 33 bp, Homo sapien
gatgcaacactataccgatcaaactaccaatgt

SEQ ID NO: 849355 - DNA, 33 bp, Homo sapien
tgtaaattatacctcaataaatgtgacatatat

SEQ ID NO: 849356 - DNA, 33 bp, Homo sapien
tgtaaattatacctcagtaaatgtgacatatat

SEQ ID NO: 849357 - DNA, 33 bp, Homo sapien
ataggagttaagctaggaaatgtgaaaggaaaa

SEQ ID NO: 849358 - DNA, 33 bp, Homo sapien
ataggagttaagctagtaaatgtgaaaggaaaa

SEQ ID NO: 849359 - DNA, 33 bp, Homo sapien
actattaaaggtctcccaccactgaagtaggga

SEQ ID NO: 849360 - DNA, 33 bp, Homo sapien
actattaaaggtctcctaccactgaagtaggga

SEQ ID NO: 849361 - DNA, 33 bp, Homo sapien
gcttcttccaaatgagacccgttctcttcttcc

SEQ ID NO: 849362 - DNA, 33 bp, Homo sapien
gcttcttccaaatgagtcccgttctcttcttcc

SEQ ID NO: 849363 - DNA, 33 bp, Homo sapien
actaccattacaccaccgtactacattgatgtg

SEQ ID NO: 849364 - DNA, 33 bp, Homo sapien
actaccattacaccactgtactacattgatgtg

SEQ ID NO: 849365 - DNA, 33 bp, Homo sapien
gagagtttcatctttcaagccagtgagagctgt

SEQ ID NO: 849366 - DNA, 33 bp, Homo sapien
gagagtttcatctttcgagccagtgagagctgt

SEQ ID NO: 849367 - DNA, 33 bp, Homo sapien
ttaaggcagtatgtaacggatgccataggaatc

SEQ ID NO: 849368 - DNA, 33 bp, Homo sapien
ttaaggcagtatgtaatggatgccataggaatc

SEQ ID NO: 849369 - DNA, 33 bp, Homo sapien
gcttcctggatgccaaatcactttttaaaaaca

SEQ ID NO: 849370 - DNA, 33 bp, Homo sapien
gcttcctggatgccaagtcactttttaaaaaca

SEQ ID NO: 849371 - DNA, 33 bp, Homo sapien
atcctgcttgcttctgaaaaggtggactccccc

SEQ ID NO: 849372 - DNA, 33 bp, Homo sapien
atcctgcttgcttctggaaaggtggactccccc

SEQ ID NO: 849373 - DNA, 33 bp, Homo sapien
caacctaatagtagtgaagaatgctgacagggt

SEQ ID NO: 849374 - DNA, 33 bp, Homo sapien
caacctaatagtagtgcagaatgctgacagggt

SEQ ID NO: 849375 - DNA, 33 bp, Homo sapien
taaagtttcctgagacaatatagaaatctaggc

SEQ ID NO: 849376 - DNA, 33 bp, Homo sapien
taaagtttcctgagacgatatagaaatctaggc

SEQ ID NO: 849377 - DNA, 33 bp, Homo sapien
cattcaacaaaaccaaccgacacaagcacaatc

SEQ ID NO: 849378 - DNA, 33 bp, Homo sapien
cattcaacaaaaccaatcgacacaagcacaatc

SEQ ID NO: 849379 - DNA, 33 bp, Homo sapien
tcatcatccatcaccaaagagtacatttgttgc

SEQ ID NO: 849380 - DNA, 33 bp, Homo sapien
tcatcatccatcaccagagagtacatttgttgc

SEQ ID NO: 849381 - DNA, 33 bp, Homo sapien
ttgtgacattggtaggcatagtattgtagttaa

SEQ ID NO: 849382 - DNA, 33 bp, Homo sapien
ttgtgacattggtaggtatagtattgtagttaa

SEQ ID NO: 849383 - DNA, 33 bp, Homo sapien
attatcaaggaagcaacttaaccttctattaca

SEQ ID NO: 849384 - DNA, 33 bp, Homo sapien
attatcaaggaagcaatttaaccttctattaca

SEQ ID NO: 849385 - DNA, 33 bp, Homo sapien
caggcacacacaatgaccacaggcagttaattt

SEQ ID NO: 849386 - DNA, 33 bp, Homo sapien
caggcacacacaatgagcacaggcagttaattt

SEQ ID NO: 849387 - DNA, 33 bp, Homo sapien
ggttaggaatctccaaataggggaatttattag

SEQ ID NO: 849388 - DNA, 33 bp, Homo sapien
ggttaggaatctccaagtaggggaatttattag

SEQ ID NO: 849389 - DNA, 33 bp, Homo sapien
aaaggatgaatgtccaaggagtggcaaagcttg

SEQ ID NO: 849390 - DNA, 33 bp, Homo sapien
aaaggatgaatgtccagggagtggcaaagcttg

SEQ ID NO: 849391 - DNA, 33 bp, Homo sapien
tttggtgtccatgagaggtcctagaaccaatcc

SEQ ID NO: 849392 - DNA, 33 bp, Homo sapien
tttggtgtccatgagatgtcctagaaccaatcc

SEQ ID NO: 849393 - DNA, 33 bp, Homo sapien
ggtataagaaaattgaaggtgttctagaatcac

SEQ ID NO: 849394 - DNA, 33 bp, Homo sapien
ggtataagaaaattgacggtgttctagaatcac

SEQ ID NO: 849395 - DNA, 33 bp, Homo sapien
ggattagtgtgagttaataaatgaagtccagtg

SEQ ID NO: 849396 - DNA, 33 bp, Homo sapien
ggattagtgtgagttagtaaatgaagtccagtg

SEQ ID NO: 849397 - DNA, 33 bp, Homo sapien
catggccacgtctctgaaaaaaagttctggaat

SEQ ID NO: 849398 - DNA, 33 bp, Homo sapien
catggccacgtctctgtaaaaaagttctggaat

SEQ ID NO: 849399 - DNA, 33 bp, Homo sapien
gattcttccttcttccactgtaaaaaagttgta

SEQ ID NO: 849400 - DNA, 33 bp, Homo sapien
gattcttccttcttcctctgtaaaaaagttgta

SEQ ID NO: 849401 - DNA, 33 bp, Homo sapien
tagagtcttgagtaaacacaatgccagaatagg

SEQ ID NO: 849402 - DNA, 33 bp, Homo sapien
tagagtcttgagtaaatacaatgccagaatagg

SEQ ID NO: 849403 - DNA, 33 bp, Homo sapien
aatgtcggctttgaatcagtgtttagggaatca

SEQ ID NO: 849404 - DNA, 33 bp, Homo sapien
aatgtcggctttgaatgagtgtttagggaatca

SEQ ID NO: 849405 - DNA, 33 bp, Homo sapien
gcttgagaagattgacacattacatacagggaa

SEQ ID NO: 849406 - DNA, 33 bp, Homo sapien
gcttgagaagattgacgcattacatacagggaa

SEQ ID NO: 849407 - DNA, 33 bp, Homo sapien
acaggcaattattcaactctgaacttccttcca

SEQ ID NO: 849408 - DNA, 33 bp, Homo sapien
acaggcaattattcaattctgaacttccttcca

SEQ ID NO: 849409 - DNA, 33 bp, Homo sapien
ttcttcagtccaataaagaacatctataaaaca

SEQ ID NO: 849410 - DNA, 33 bp, Homo sapien
ttcttcagtccaataaggaacatctataaaaca

SEQ ID NO: 849411 - DNA, 33 bp, Homo sapien
tgcttgacattgagaaattcccttccttctctt

SEQ ID NO: 849412 - DNA, 33 bp, Homo sapien
tgcttgacattgagaagttcccttccttctctt

SEQ ID NO: 849413 - DNA, 33 bp, Homo sapien
ttccaagcaatagccaatactatcagaaaatcc

SEQ ID NO: 849414 - DNA, 33 bp, Homo sapien
ttccaagcaatagccagtactatcagaaaatcc

SEQ ID NO: 849415 - DNA, 33 bp, Homo sapien
tgggcgatgaaaacaacgtaaaaagttctgaga

SEQ ID NO: 849416 - DNA, 33 bp, Homo sapien
tgggcgatgaaaacaatgtaaaaagttctgaga

SEQ ID NO: 849417 - DNA, 33 bp, Homo sapien
caaaaatatgatccaaacaaattcaatataaat

SEQ ID NO: 849418 - DNA, 33 bp, Homo sapien
caaaaatatgatccaagcaaattcaatataaat

SEQ ID NO: 849419 - DNA, 33 bp, Homo sapien
aaatgaaagtgtgaaacatttaacccaatagaa

SEQ ID NO: 849420 - DNA, 33 bp, Homo sapien
aaatgaaagtgtgaaatatttaacccaatagaa

SEQ ID NO: 849421 - DNA, 33 bp, Homo sapien
aataaatcagaagcaaccaaaacaatatccata

SEQ ID NO: 849422 - DNA, 33 bp, Homo sapien
aataaatcagaagcaatcaaaacaatatccata

SEQ ID NO: 849423 - DNA, 33 bp, Homo sapien
acagtgctggtatgaaaaaaatcaatttgcaac

SEQ ID NO: 849424 - DNA, 33 bp, Homo sapien
acagtgctggtatgaagaaaatcaatttgcaac

SEQ ID NO: 849425 - DNA, 33 bp, Homo sapien
tgtcttttgctaatcacgcatagcctcaaaaaa

SEQ ID NO: 849426 - DNA, 33 bp, Homo sapien
tgtcttttgctaatcatgcatagcctcaaaaaa

SEQ ID NO: 849427 - DNA, 33 bp, Homo sapien
acatactgaaagtcataaacattcttggtgatg

SEQ ID NO: 849428 - DNA, 33 bp, Homo sapien
acatactgaaagtcatgaacattcttggtgatg

SEQ ID NO: 849429 - DNA, 33 bp, Homo sapien
tttgtgtctgacatagaaaaatgtgaggtgtgg

SEQ ID NO: 849430 - DNA, 33 bp, Homo sapien
tttgtgtctgacatagcaaaatgtgaggtgtgg

SEQ ID NO: 849431 - DNA, 33 bp, Homo sapien
agttccacaagcccaccgtgctaccaaacttgc

SEQ ID NO: 849432 - DNA, 33 bp, Homo sapien
agttccacaagcccactgtgctaccaaacttgc

SEQ ID NO: 849433 - DNA, 33 bp, Homo sapien
cgtagtgtgatatggacatgtttcttgtctttt

SEQ ID NO: 849434 - DNA, 33 bp, Homo sapien
cgtagtgtgatatggatatgtttcttgtctttt

SEQ ID NO: 849435 - DNA, 33 bp, Homo sapien
aggaggatagggcacacgtaagagacttgaggt

SEQ ID NO: 849436 - DNA, 33 bp, Homo sapien
aggaggatagggcacaggtaagagacttgaggt

SEQ ID NO: 849437 - DNA, 33 bp, Homo sapien
tcagtgcctcacaatcgctttgttcctcctacc

SEQ ID NO: 849438 - DNA, 33 bp, Homo sapien
tcagtgcctcacaatctctttgttcctcctacc

SEQ ID NO: 849439 - DNA, 33 bp, Homo sapien
aatatgtcattttggacggttttgtctataaaa

SEQ ID NO: 849440 - DNA, 33 bp, Homo sapien
aatatgtcattttggatggttttgtctataaaa

SEQ ID NO: 849441 - DNA, 33 bp, Homo sapien
ggccatgataatcttacaatatccgaaagagcc

SEQ ID NO: 849442 - DNA, 33 bp, Homo sapien
ggccatgataatcttagaatatccgaaagagcc

SEQ ID NO: 849443 - DNA, 33 bp, Homo sapien
tatttaaaactccttcaaacaaccatgtgaatg

SEQ ID NO: 849444 - DNA, 33 bp, Homo sapien
tatttaaaactccttcgaacaaccatgtgaatg

SEQ ID NO: 849445 - DNA, 33 bp, Homo sapien
agtacttcaaaatacacatcctgctgtttataa

SEQ ID NO: 849446 - DNA, 33 bp, Homo sapien
agtacttcaaaatacatatcctgctgtttataa

SEQ ID NO: 849447 - DNA, 33 bp, Homo sapien
caacacaatagttccaaaaagattgcctgctca

SEQ ID NO: 849448 - DNA, 33 bp, Homo sapien
caacacaatagttccagaaagattgcctgctca

SEQ ID NO: 849449 - DNA, 33 bp, Homo sapien
ctgcaagcttgcagaaagaaagagctgtgaaga

SEQ ID NO: 849450 - DNA, 33 bp, Homo sapien
ctgcaagcttgcagaaggaaagagctgtgaaga

SEQ ID NO: 849451 - DNA, 33 bp, Homo sapien
atgctcacttgttgtaactactttttaacacgt

SEQ ID NO: 849452 - DNA, 33 bp, Homo sapien
atgctcacttgttgtagctactttttaacacgt

SEQ ID NO: 849453 - DNA, 33 bp, Homo sapien
tgttcatcgaaagataccagtaacatagagaag

SEQ ID NO: 849454 - DNA, 33 bp, Homo sapien
tgttcatcgaaagatatcagtaacatagagaag

SEQ ID NO: 849455 - DNA, 33 bp, Homo sapien
aaatcagaatcagaaaatagcaagttacagtga

SEQ ID NO: 849456 - DNA, 33 bp, Homo sapien
aaatcagaatcagaaagtagcaagttacagtga

SEQ ID NO: 849457 - DNA, 33 bp, Homo sapien
ataattttgataaaacaggccacgattttatag

SEQ ID NO: 849458 - DNA, 33 bp, Homo sapien
ataattttgataaaacgggccacgattttatag

SEQ ID NO: 849459 - DNA, 33 bp, Homo sapien
gtttttttttaagtctcaagtgtcaaagtaatg

SEQ ID NO: 849460 - DNA, 33 bp, Homo sapien
gtttttttttaagtctgaagtgtcaaagtaatg

SEQ ID NO: 849461 - DNA, 33 bp, Homo sapien
tttttggttagacttccctacattgaaggggat

SEQ ID NO: 849462 - DNA, 33 bp, Homo sapien
tttttggttagacttctctacattgaaggggat

SEQ ID NO: 849463 - DNA, 33 bp, Homo sapien
atctagtcccagaaaaggtttccaggaagattt

SEQ ID NO: 849464 - DNA, 33 bp, Homo sapien
atctagtcccagaaaatgtttccaggaagattt

SEQ ID NO: 849465 - DNA, 33 bp, Homo sapien
aatatagcaaggttaacggaattgtccagagac

SEQ ID NO: 849466 - DNA, 33 bp, Homo sapien
aatatagcaaggttaatggaattgtccagagac

SEQ ID NO: 849467 - DNA, 33 bp, Homo sapien
tgcttcaccagcataaagttggaatttggtatt

SEQ ID NO: 849468 - DNA, 33 bp, Homo sapien
tgcttcaccagcataaggttggaatttggtatt

SEQ ID NO: 849469 - DNA, 33 bp, Homo sapien
agagagaaggtaaggcaaagggctgaaaaacta

SEQ ID NO: 849470 - DNA, 33 bp, Homo sapien
agagagaaggtaaggcgaagggctgaaaaacta

SEQ ID NO: 849471 - DNA, 33 bp, Homo sapien
gatagacagttattaccataggttatctaggtc

SEQ ID NO: 849472 - DNA, 33 bp, Homo sapien
gatagacagttattactataggttatctaggtc

SEQ ID NO: 849473 - DNA, 33 bp, Homo sapien
agttcacctcttttacaatcaccatttcactaa

SEQ ID NO: 849474 - DNA, 33 bp, Homo sapien
agttcacctcttttactatcaccatttcactaa

SEQ ID NO: 849475 - DNA, 33 bp, Homo sapien
ggtggactatatttaacccaaggcagtagaaaa

SEQ ID NO: 849476 - DNA, 33 bp, Homo sapien
ggtggactatatttaagccaaggcagtagaaaa

SEQ ID NO: 849477 - DNA, 33 bp, Homo sapien
tgctcagaacatagtcaatttctatcagtaaga

SEQ ID NO: 849478 - DNA, 33 bp, Homo sapien
tgctcagaacatagtcgatttctatcagtaaga

SEQ ID NO: 849479 - DNA, 33 bp, Homo sapien
tacatatattgtttcaaaatggtatgggcttgt

SEQ ID NO: 849480 - DNA, 33 bp, Homo sapien
tacatatattgtttcagaatggtatgggcttgt

SEQ ID NO: 849481 - DNA, 33 bp, Homo sapien
gcttgtttactccctgaaaattaatgagattca

SEQ ID NO: 849482 - DNA, 33 bp, Homo sapien
gcttgtttactccctgcaaattaatgagattca

SEQ ID NO: 849483 - DNA, 33 bp, Homo sapien
tcaaatagctcagttgaactaccatttaaccca

SEQ ID NO: 849484 - DNA, 33 bp, Homo sapien
tcaaatagctcagttgtactaccatttaaccca

SEQ ID NO: 849485 - DNA, 33 bp, Homo sapien
ccattatttttagtaggcatcaaatgaagcaga

SEQ ID NO: 849486 - DNA, 33 bp, Homo sapien
ccattatttttagtagtcatcaaatgaagcaga

SEQ ID NO: 849487 - DNA, 33 bp, Homo sapien
aaagaaaataattttacggaagccaagggaaga

SEQ ID NO: 849488 - DNA, 33 bp, Homo sapien
aaagaaaataattttatggaagccaagggaaga

SEQ ID NO: 849489 - DNA, 33 bp, Homo sapien
aacataatcaattacaggctgtctacaaaaaaa

SEQ ID NO: 849490 - DNA, 33 bp, Homo sapien
aacataatcaattacatgctgtctacaaaaaaa

SEQ ID NO: 849491 - DNA, 33 bp, Homo sapien
ttaatgtaaacagataaattatccactgaaaag

SEQ ID NO: 849492 - DNA, 33 bp, Homo sapien
ttaatgtaaacagatatattatccactgaaaag

SEQ ID NO: 849493 - DNA, 33 bp, Homo sapien
ttcttcatatactacagtgcattgttactcaat

SEQ ID NO: 849494 - DNA, 33 bp, Homo sapien
ttcttcatatactacattgcattgttactcaat

SEQ ID NO: 849495 - DNA, 33 bp, Homo sapien
gaaagaggatcctagtcaagccatgccattgca

SEQ ID NO: 849496 - DNA, 33 bp, Homo sapien
gaaagaggatcctagttaagccatgccattgca

SEQ ID NO: 849497 - DNA, 33 bp, Homo sapien
ctgccctgtgccaacactatgtaaacaggttat

SEQ ID NO: 849498 - DNA, 33 bp, Homo sapien
ctgccctgtgccaacagtatgtaaacaggttat

SEQ ID NO: 849499 - DNA, 33 bp, Homo sapien
tttgtttacctcttccccattcatggctgtgct

SEQ ID NO: 849500 - DNA, 33 bp, Homo sapien
tttgtttacctcttcctcattcatggctgtgct

SEQ ID NO: 849501 - DNA, 33 bp, Homo sapien
caactcacacttacaccgcttgacaaactgctc

SEQ ID NO: 849502 - DNA, 33 bp, Homo sapien
caactcacacttacactgcttgacaaactgctc

SEQ ID NO: 849503 - DNA, 33 bp, Homo sapien
caggatataactgactaaaaaaggagtacaatg

SEQ ID NO: 849504 - DNA, 33 bp, Homo sapien
caggatataactgactgaaaaaggagtacaatg

SEQ ID NO: 849505 - DNA, 33 bp, Homo sapien
aaaatcttacccattcaccaggttcaaattaaa

SEQ ID NO: 849506 - DNA, 33 bp, Homo sapien
aaaatcttacccattctccaggttcaaattaaa

SEQ ID NO: 849507 - DNA, 33 bp, Homo sapien
aagtcctaatccagtacgctctaattaaataga

SEQ ID NO: 849508 - DNA, 33 bp, Homo sapien
aagtcctaatccagtatgctctaattaaataga

SEQ ID NO: 849509 - DNA, 33 bp, Homo sapien
cacacatatcaagtagcattccaagtttacatg

SEQ ID NO: 849510 - DNA, 33 bp, Homo sapien
cacacatatcaagtagtattccaagtttacatg

SEQ ID NO: 849511 - DNA, 33 bp, Homo sapien
atggcttaggttcttaagtcagttcttccattt

SEQ ID NO: 849512 - DNA, 33 bp, Homo sapien
atggcttaggttcttatgtcagttcttccattt

SEQ ID NO: 849513 - DNA, 33 bp, Homo sapien
tatataactttcaacactatgattcacagtagg

SEQ ID NO: 849514 - DNA, 33 bp, Homo sapien
tatataactttcaacattatgattcacagtagg

SEQ ID NO: 849515 - DNA, 33 bp, Homo sapien
ttgtgttggttccaccgagattttcagagttcc

SEQ ID NO: 849516 - DNA, 33 bp, Homo sapien
ttgtgttggttccacctagattttcagagttcc

SEQ ID NO: 849517 - DNA, 33 bp, Homo sapien
tttcagagttcctttaaccctgtaaggtaacat

SEQ ID NO: 849518 - DNA, 33 bp, Homo sapien
tttcagagttcctttatccctgtaaggtaacat

SEQ ID NO: 849519 - DNA, 33 bp, Homo sapien
ttttactgtcaaagagaacccttgtgatcacag

SEQ ID NO: 849520 - DNA, 33 bp, Homo sapien
ttttactgtcaaagagcacccttgtgatcacag

SEQ ID NO: 849521 - DNA, 33 bp, Homo sapien
tctagaaggagaaataccatttgactcaacaat

SEQ ID NO: 849522 - DNA, 33 bp, Homo sapien
tctagaaggagaaatatcatttgactcaacaat

SEQ ID NO: 849523 - DNA, 33 bp, Homo sapien
ttctttttttcctgcaacattgccaacatctat

SEQ ID NO: 849524 - DNA, 33 bp, Homo sapien
ttctttttttcctgcatcattgccaacatctat

SEQ ID NO: 849525 - DNA, 33 bp, Homo sapien
ttattcatctcaaacactgtattccagatatca

SEQ ID NO: 849526 - DNA, 33 bp, Homo sapien
ttattcatctcaaacattgtattccagatatca

SEQ ID NO: 849527 - DNA, 33 bp, Homo sapien
gtttgagatgaataaacctgaagggcaacaaaa

SEQ ID NO: 849528 - DNA, 33 bp, Homo sapien
gtttgagatgaataaagctgaagggcaacaaaa

SEQ ID NO: 849529 - DNA, 33 bp, Homo sapien
ggctctatagaaaaaaatgtatgttaagccttt

SEQ ID NO: 849530 - DNA, 33 bp, Homo sapien
ggctctatagaaaaaagtgtatgttaagccttt

SEQ ID NO: 849531 - DNA, 33 bp, Homo sapien
cagtctaaagctaaaaaggaaagtctactatgg

SEQ ID NO: 849532 - DNA, 33 bp, Homo sapien
cagtctaaagctaaaacggaaagtctactatgg

SEQ ID NO: 849533 - DNA, 33 bp, Homo sapien
aagaaaacacagctacagaatggattggcctac

SEQ ID NO: 849534 - DNA, 33 bp, Homo sapien
aagaaaacacagctacggaatggattggcctac

SEQ ID NO: 849535 - DNA, 33 bp, Homo sapien
ccacccagatgacatcactcatgttttatctat

SEQ ID NO: 849536 - DNA, 33 bp, Homo sapien
ccacccagatgacatcgctcatgttttatctat

SEQ ID NO: 849537 - DNA, 33 bp, Homo sapien
ttagcctgtaacttcaataatacagcatctatt

SEQ ID NO: 849538 - DNA, 33 bp, Homo sapien
ttagcctgtaacttcattaatacagcatctatt

SEQ ID NO: 849539 - DNA, 33 bp, Homo sapien
aaacaatattttcaaacgtcctcaataaaatag

SEQ ID NO: 849540 - DNA, 33 bp, Homo sapien
aaacaatattttcaaatgtcctcaataaaatag

SEQ ID NO: 849541 - DNA, 33 bp, Homo sapien
cagatgatgcaaggaggcatgtttctattcttt

SEQ ID NO: 849542 - DNA, 33 bp, Homo sapien
cagatgatgcaaggagtcatgtttctattcttt

SEQ ID NO: 849543 - DNA, 33 bp, Homo sapien
atgtggagaaaacagaggtcttatatgctgtcg

SEQ ID NO: 849544 - DNA, 33 bp, Homo sapien
atgtggagaaaacagatgtcttatatgctgtcg

SEQ ID NO: 849545 - DNA, 33 bp, Homo sapien
aactttccaggtaactaagaacctgcagagaaa

SEQ ID NO: 849546 - DNA, 33 bp, Homo sapien
aactttccaggtaacttagaacctgcagagaaa

SEQ ID NO: 849547 - DNA, 33 bp, Homo sapien
agcactagggccttcagtgaagataggaggtag

SEQ ID NO: 849548 - DNA, 33 bp, Homo sapien
agcactagggccttcattgaagataggaggtag

SEQ ID NO: 849549 - DNA, 33 bp, Homo sapien
tatgtaacatatagtacagttagatgactttta

SEQ ID NO: 849550 - DNA, 33 bp, Homo sapien
tatgtaacatatagtatagttagatgactttta

SEQ ID NO: 849551 - DNA, 33 bp, Homo sapien
tgtttccatctcagtccaccaagtgaaaccttt

SEQ ID NO: 849552 - DNA, 33 bp, Homo sapien
tgtttccatctcagtctaccaagtgaaaccttt

SEQ ID NO: 849553 - DNA, 33 bp, Homo sapien
gttttaactttctcccgaatcctgattatcttt

SEQ ID NO: 849554 - DNA, 33 bp, Homo sapien
gttttaactttctccctaatcctgattatcttt

SEQ ID NO: 849555 - DNA, 33 bp, Homo sapien
gggcggtcttgcctgaaggatggggccagactg

SEQ ID NO: 849556 - DNA, 33 bp, Homo sapien
gggcggtcttgcctgatggatggggccagactg

SEQ ID NO: 849557 - DNA, 33 bp, Homo sapien
gtgctcaggaagaaaccgtagaaaccaataata

SEQ ID NO: 849558 - DNA, 33 bp, Homo sapien
gtgctcaggaagaaactgtagaaaccaataata

SEQ ID NO: 849559 - DNA, 33 bp, Homo sapien
agtgccaaaattcattcaagaaaaaatagacta

SEQ ID NO: 849560 - DNA, 33 bp, Homo sapien
agtgccaaaattcattgaagaaaaaatagacta

SEQ ID NO: 849561 - DNA, 33 bp, Homo sapien
tgataaaacaagccaacaaaaatatcaaaatca

SEQ ID NO: 849562 - DNA, 33 bp, Homo sapien
tgataaaacaagccaagaaaaatatcaaaatca

SEQ ID NO: 849563 - DNA, 33 bp, Homo sapien
gtcctcctgtgattgacacttttgttattaagt

SEQ ID NO: 849564 - DNA, 33 bp, Homo sapien
gtcctcctgtgattgatacttttgttattaagt

SEQ ID NO: 849565 - DNA, 33 bp, Homo sapien
tcaagcagattcaactcaaagaagactactcca

SEQ ID NO: 849566 - DNA, 33 bp, Homo sapien
tcaagcagattcaactgaaagaagactactcca

SEQ ID NO: 849567 - DNA, 33 bp, Homo sapien
gacaaattcctacatcaaaatctgaaataaaca

SEQ ID NO: 849568 - DNA, 33 bp, Homo sapien
gacaaattcctacatccaaatctgaaataaaca

SEQ ID NO: 849569 - DNA, 33 bp, Homo sapien
ctaaacaaatataaatcatcaacaaaaaagagc

SEQ ID NO: 849570 - DNA, 33 bp, Homo sapien
ctaaacaaatataaatgatcaacaaaaaagagc

SEQ ID NO: 849571 - DNA, 33 bp, Homo sapien
acttggcttaaaattacaaatgcattcatacac

SEQ ID NO: 849572 - DNA, 33 bp, Homo sapien
acttggcttaaaattataaatgcattcatacac

SEQ ID NO: 849573 - DNA, 33 bp, Homo sapien
agcttctgcacattgaagggaacaatcaacaaa

SEQ ID NO: 849574 - DNA, 33 bp, Homo sapien
agcttctgcacattgaggggaacaatcaacaaa

SEQ ID NO: 849575 - DNA, 33 bp, Homo sapien
tatttaatggcatgagaaatacataagaattgc

SEQ ID NO: 849576 - DNA, 33 bp, Homo sapien
tatttaatggcatgaggaatacataagaattgc

SEQ ID NO: 849577 - DNA, 33 bp, Homo sapien
taacagcaactacttcacagagttgttataaag

SEQ ID NO: 849578 - DNA, 33 bp, Homo sapien
taacagcaactacttcgcagagttgttataaag

SEQ ID NO: 849579 - DNA, 33 bp, Homo sapien
ctcaacaaatcttataacacgtctagatacttg

SEQ ID NO: 849580 - DNA, 33 bp, Homo sapien
ctcaacaaatcttataccacgtctagatacttg

SEQ ID NO: 849581 - DNA, 33 bp, Homo sapien
ttctctgagtggtcgaaaactgaagatctttat

SEQ ID NO: 849582 - DNA, 33 bp, Homo sapien
ttctctgagtggtcgacaactgaagatctttat

SEQ ID NO: 849583 - DNA, 33 bp, Homo sapien
tcttctgctggatacaaaaaatcatttctccca

SEQ ID NO: 849584 - DNA, 33 bp, Homo sapien
tcttctgctggatacacaaaatcatttctccca

SEQ ID NO: 849585 - DNA, 33 bp, Homo sapien
ccttaggcccggggtaagtccagaagtgccatc

SEQ ID NO: 849586 - DNA, 33 bp, Homo sapien
ccttaggcccggggtaggtccagaagtgccatc

SEQ ID NO: 849587 - DNA, 33 bp, Homo sapien
gatgcagagaatggttcaaaatagtcaaataaa

SEQ ID NO: 849588 - DNA, 33 bp, Homo sapien
gatgcagagaatggtttaaaatagtcaaataaa

SEQ ID NO: 849589 - DNA, 33 bp, Homo sapien
cctttggatgcaagagaagtgttttatttgtct

SEQ ID NO: 849590 - DNA, 33 bp, Homo sapien
cctttggatgcaagagcagtgttttatttgtct

SEQ ID NO: 849591 - DNA, 33 bp, Homo sapien
acatctagtctaactcccaatttgtgaaagagt

SEQ ID NO: 849592 - DNA, 33 bp, Homo sapien
acatctagtctaactctcaatttgtgaaagagt

SEQ ID NO: 849593 - DNA, 33 bp, Homo sapien
tttgattttttacacccgaaagcatcctgacag

SEQ ID NO: 849594 - DNA, 33 bp, Homo sapien
tttgattttttacacctgaaagcatcctgacag

SEQ ID NO: 849595 - DNA, 33 bp, Homo sapien
agcagaagaatagcaaaagcagggatccttgtg

SEQ ID NO: 849596 - DNA, 33 bp, Homo sapien
agcagaagaatagcaagagcagggatccttgtg

SEQ ID NO: 849597 - DNA, 33 bp, Homo sapien
tgaaacacatatacaacgctggggaacactgtt

SEQ ID NO: 849598 - DNA, 33 bp, Homo sapien
tgaaacacatatacaatgctggggaacactgtt

SEQ ID NO: 849599 - DNA, 33 bp, Homo sapien
tttccaaattggtacaagtatacatgatattta

SEQ ID NO: 849600 - DNA, 33 bp, Homo sapien
tttccaaattggtacaggtatacatgatattta

SEQ ID NO: 849601 - DNA, 33 bp, Homo sapien
taatagtttaacaaggcaagtgacatagagtca

SEQ ID NO: 849602 - DNA, 33 bp, Homo sapien
taatagtttaacaagggaagtgacatagagtca

SEQ ID NO: 849603 - DNA, 33 bp, Homo sapien
accaagagctaaagccaaatctggccaagtggc

SEQ ID NO: 849604 - DNA, 33 bp, Homo sapien
accaagagctaaagccgaatctggccaagtggc

SEQ ID NO: 849605 - DNA, 33 bp, Homo sapien
atataaaaaacagcaacttgatacccaccatca

SEQ ID NO: 849606 - DNA, 33 bp, Homo sapien
atataaaaaacagcaatttgatacccaccatca

SEQ ID NO: 849607 - DNA, 33 bp, Homo sapien
aagaagacaaaggaaacggtggacacaggacag

SEQ ID NO: 849608 - DNA, 33 bp, Homo sapien
aagaagacaaaggaaatggtggacacaggacag

SEQ ID NO: 849609 - DNA, 33 bp, Homo sapien
tacctgctgctaaaaaatattgatctgattttt

SEQ ID NO: 849610 - DNA, 33 bp, Homo sapien
tacctgctgctaaaaagtattgatctgattttt

SEQ ID NO: 849611 - DNA, 33 bp, Homo sapien
gtcttaagcaaattcacatagtcaatcatatag

SEQ ID NO: 849612 - DNA, 33 bp, Homo sapien
gtcttaagcaaattcatatagtcaatcatatag

SEQ ID NO: 849613 - DNA, 33 bp, Homo sapien
gctggttgtggcaataaagacacagtcagggtg

SEQ ID NO: 849614 - DNA, 33 bp, Homo sapien
gctggttgtggcaatacagacacagtcagggtg

SEQ ID NO: 849615 - DNA, 33 bp, Homo sapien
catccttgcatggctacgaaatgtttaatcctg

SEQ ID NO: 849616 - DNA, 33 bp, Homo sapien
catccttgcatggctatgaaatgtttaatcctg

SEQ ID NO: 849617 - DNA, 33 bp, Homo sapien
tcctgtgaagtagttacaaaaggaagtattttt

SEQ ID NO: 849618 - DNA, 33 bp, Homo sapien
tcctgtgaagtagttagaaaaggaagtattttt

SEQ ID NO: 849619 - DNA, 33 bp, Homo sapien
tcaagaagccaggacaatgcttcctctatcaca

SEQ ID NO: 849620 - DNA, 33 bp, Homo sapien
tcaagaagccaggacagtgcttcctctatcaca

SEQ ID NO: 849621 - DNA, 33 bp, Homo sapien
gactccctcaagtagacaatgagcaactgaagg

SEQ ID NO: 849622 - DNA, 33 bp, Homo sapien
gactccctcaagtagataatgagcaactgaagg

SEQ ID NO: 849623 - DNA, 33 bp, Homo sapien
cctaatagtcctataaatgtgaaaactataaat

SEQ ID NO: 849624 - DNA, 33 bp, Homo sapien
cctaatagtcctataagtgtgaaaactataaat

SEQ ID NO: 849625 - DNA, 33 bp, Homo sapien
atgagggcctatttaacggcaggttgtatttat

SEQ ID NO: 849626 - DNA, 33 bp, Homo sapien
atgagggcctatttaatggcaggttgtatttat

SEQ ID NO: 849627 - DNA, 33 bp, Homo sapien
tagcttcaattgccaaacaggtctacccacttc

SEQ ID NO: 849628 - DNA, 33 bp, Homo sapien
tagcttcaattgccaaccaggtctacccacttc

SEQ ID NO: 849629 - DNA, 33 bp, Homo sapien
ctgaccaataatatcacgtatctaatgttgatc

SEQ ID NO: 849630 - DNA, 33 bp, Homo sapien
ctgaccaataatatcatgtatctaatgttgatc

SEQ ID NO: 849631 - DNA, 33 bp, Homo sapien
aatgctgaggactgaaatgtcagattttttttt

SEQ ID NO: 849632 - DNA, 33 bp, Homo sapien
aatgctgaggactgaagtgtcagattttttttt

SEQ ID NO: 849633 - DNA, 33 bp, Homo sapien
agtgacattggcagaaatgaggaaagggggtag

SEQ ID NO: 849634 - DNA, 33 bp, Homo sapien
agtgacattggcagaactgaggaaagggggtag

SEQ ID NO: 849635 - DNA, 33 bp, Homo sapien
ccagctctggatgtccaaagctggtcaaactct

SEQ ID NO: 849636 - DNA, 33 bp, Homo sapien
ccagctctggatgtccgaagctggtcaaactct

SEQ ID NO: 849637 - DNA, 33 bp, Homo sapien
gagcttgatgtgggagcatctgtagtggtgcat

SEQ ID NO: 849638 - DNA, 33 bp, Homo sapien
gagcttgatgtgggagtatctgtagtggtgcat

SEQ ID NO: 849639 - DNA, 33 bp, Homo sapien
tataaccataacaaaaatgaagtttactacagc

SEQ ID NO: 849640 - DNA, 33 bp, Homo sapien
tataaccataacaaaagtgaagtttactacagc

SEQ ID NO: 849641 - DNA, 33 bp, Homo sapien
actcaaacaccatcttgaaagggtcatgtctaa

SEQ ID NO: 849642 - DNA, 33 bp, Homo sapien
actcaaacaccatctttaaagggtcatgtctaa

SEQ ID NO: 849643 - DNA, 33 bp, Homo sapien
actcgagaacatttgccagttgccttaataata

SEQ ID NO: 849644 - DNA, 33 bp, Homo sapien
actcgagaacatttgctagttgccttaataata

SEQ ID NO: 849645 - DNA, 33 bp, Homo sapien
gaagtcctgtccaggtaaaaaaagaagagatcc

SEQ ID NO: 849646 - DNA, 33 bp, Homo sapien
gaagtcctgtccaggtgaaaaaagaagagatcc

SEQ ID NO: 849647 - DNA, 33 bp, Homo sapien
cagagttatgtagctactaaagaatgaagagtg

SEQ ID NO: 849648 - DNA, 33 bp, Homo sapien
cagagttatgtagctattaaagaatgaagagtg

SEQ ID NO: 849649 - DNA, 33 bp, Homo sapien
tctcctggaagagttaataactacttattcaga

SEQ ID NO: 849650 - DNA, 33 bp, Homo sapien
tctcctggaagagttagtaactacttattcaga

SEQ ID NO: 849651 - DNA, 33 bp, Homo sapien
aaaactcagccttttaccttaaagaagacaaca

SEQ ID NO: 849652 - DNA, 33 bp, Homo sapien
aaaactcagccttttatcttaaagaagacaaca

SEQ ID NO: 849653 - DNA, 33 bp, Homo sapien
gtaaggtacagggcaaagtgtgataggacaggg

SEQ ID NO: 849654 - DNA, 33 bp, Homo sapien
gtaaggtacagggcaaggtgtgataggacaggg

SEQ ID NO: 849655 - DNA, 33 bp, Homo sapien
ataatgtcttgcggtaactaaactggttgagac

SEQ ID NO: 849656 - DNA, 33 bp, Homo sapien
ataatgtcttgcggtatctaaactggttgagac

SEQ ID NO: 849657 - DNA, 33 bp, Homo sapien
ttctttttttgccaaagaatttgtttactctgc

SEQ ID NO: 849658 - DNA, 33 bp, Homo sapien
ttctttttttgccaaataatttgtttactctgc

SEQ ID NO: 849659 - DNA, 33 bp, Homo sapien
tgaaatttaaaatcagcatagagcaaagtaatg

SEQ ID NO: 849660 - DNA, 33 bp, Homo sapien
tgaaatttaaaatcaggatagagcaaagtaatg

SEQ ID NO: 849661 - DNA, 33 bp, Homo sapien
ctctgaggacaaaacagtgtgtcaagatctggc

SEQ ID NO: 849662 - DNA, 33 bp, Homo sapien
ctctgaggacaaaacattgtgtcaagatctggc

SEQ ID NO: 849663 - DNA, 33 bp, Homo sapien
tcttgggaactgcctcgagtcagtaaactgagg

SEQ ID NO: 849664 - DNA, 33 bp, Homo sapien
tcttgggaactgcctctagtcagtaaactgagg

SEQ ID NO: 849665 - DNA, 33 bp, Homo sapien
atgctaacagatgaatgattatagatgcgtgta

SEQ ID NO: 849666 - DNA, 33 bp, Homo sapien
atgctaacagatgaattattatagatgcgtgta

SEQ ID NO: 849667 - DNA, 33 bp, Homo sapien
gctcaaaacacaaaatcatggggtagtgacaaa

SEQ ID NO: 849668 - DNA, 33 bp, Homo sapien
gctcaaaacacaaaatgatggggtagtgacaaa

SEQ ID NO: 849669 - DNA, 33 bp, Homo sapien
atggccaaagctgaagcaatatgagcaacaaaa

SEQ ID NO: 849670 - DNA, 33 bp, Homo sapien
atggccaaagctgaaggaatatgagcaacaaaa

SEQ ID NO: 849671 - DNA, 33 bp, Homo sapien
ggaggtatgttgcaaaataattaaagcaagaag

SEQ ID NO: 849672 - DNA, 33 bp, Homo sapien
ggaggtatgttgcaaagtaattaaagcaagaag

SEQ ID NO: 849673 - DNA, 33 bp, Homo sapien
cccttccttatgtgccgcagaggaagaaaaggg

SEQ ID NO: 849674 - DNA, 33 bp, Homo sapien
cccttccttatgtgcctcagaggaagaaaaggg

SEQ ID NO: 849675 - DNA, 33 bp, Homo sapien
cttagaatgagccaaacggtgttacaacaatag

SEQ ID NO: 849676 - DNA, 33 bp, Homo sapien
cttagaatgagccaaatggtgttacaacaatag

SEQ ID NO: 849677 - DNA, 33 bp, Homo sapien
aatcgccattaggctaagagttaaatagaaacc

SEQ ID NO: 849678 - DNA, 33 bp, Homo sapien
aatcgccattaggctatgagttaaatagaaacc

SEQ ID NO: 849679 - DNA, 33 bp, Homo sapien
ttatgctgcacataaaataaagggaagtattac

SEQ ID NO: 849680 - DNA, 33 bp, Homo sapien
ttatgctgcacataaagtaaagggaagtattac

SEQ ID NO: 849681 - DNA, 33 bp, Homo sapien
tactgaaagcaggatcaagaaagaggaagaaaa

SEQ ID NO: 849682 - DNA, 33 bp, Homo sapien
tactgaaagcaggatcgagaaagaggaagaaaa

SEQ ID NO: 849683 - DNA, 33 bp, Homo sapien
aaatgaatgagtggttaaaaatattcatccaaa

SEQ ID NO: 849684 - DNA, 33 bp, Homo sapien
aaatgaatgagtggtttaaaatattcatccaaa

SEQ ID NO: 849685 - DNA, 33 bp, Homo sapien
gttaaaacttgtagaacggaaacaccttcttcc

SEQ ID NO: 849686 - DNA, 33 bp, Homo sapien
gttaaaacttgtagaatggaaacaccttcttcc

SEQ ID NO: 849687 - DNA, 33 bp, Homo sapien
cattctcttggaaaaccagcaaggctaatccct

SEQ ID NO: 849688 - DNA, 33 bp, Homo sapien
cattctcttggaaaacgagcaaggctaatccct

SEQ ID NO: 849689 - DNA, 33 bp, Homo sapien
tgaggtctttgctgtcacccttttcaacacctc

SEQ ID NO: 849690 - DNA, 33 bp, Homo sapien
tgaggtctttgctgtcgcccttttcaacacctc

SEQ ID NO: 849691 - DNA, 33 bp, Homo sapien
gcagatgcagcttataccatgaaaccaaaatcc

SEQ ID NO: 849692 - DNA, 33 bp, Homo sapien
gcagatgcagcttatatcatgaaaccaaaatcc

SEQ ID NO: 849693 - DNA, 33 bp, Homo sapien
ttctgcagcaggcttgaattcttccccagaaaa

SEQ ID NO: 849694 - DNA, 33 bp, Homo sapien
ttctgcagcaggcttgtattcttccccagaaaa

SEQ ID NO: 849695 - DNA, 33 bp, Homo sapien
aggaagatagggtaccacaggaactggaaggag

SEQ ID NO: 849696 - DNA, 33 bp, Homo sapien
aggaagatagggtaccgcaggaactggaaggag

SEQ ID NO: 849697 - DNA, 33 bp, Homo sapien
ctgcagctgattgtagaccatatcaaaaccaac

SEQ ID NO: 849698 - DNA, 33 bp, Homo sapien
ctgcagctgattgtagtccatatcaaaaccaac

SEQ ID NO: 849699 - DNA, 33 bp, Homo sapien
ataggaatcagtgaacagcaggtggcctactgt

SEQ ID NO: 849700 - DNA, 33 bp, Homo sapien
ataggaatcagtgaacggcaggtggcctactgt

SEQ ID NO: 849701 - DNA, 33 bp, Homo sapien
caataaagctataattgaacacttcattaattt

SEQ ID NO: 849702 - DNA, 33 bp, Homo sapien
caataaagctataatttaacacttcattaattt

SEQ ID NO: 849703 - DNA, 33 bp, Homo sapien
aactatagttcaacaccctcgagtcttccttag

SEQ ID NO: 849704 - DNA, 33 bp, Homo sapien
aactatagttcaacactctcgagtcttccttag

SEQ ID NO: 849705 - DNA, 33 bp, Homo sapien
aaagtagtctacatcaatattcctggattttac

SEQ ID NO: 849706 - DNA, 33 bp, Homo sapien
aaagtagtctacatcagtattcctggattttac

SEQ ID NO: 849707 - DNA, 33 bp, Homo sapien
gtcattgccagatcacaaaatgatatacatcat

SEQ ID NO: 849708 - DNA, 33 bp, Homo sapien
gtcattgccagatcacgaaatgatatacatcat

SEQ ID NO: 849709 - DNA, 33 bp, Homo sapien
tgggggttgcctacaccaaatggttatactaaa

SEQ ID NO: 849710 - DNA, 33 bp, Homo sapien
tgggggttgcctacactaaatggttatactaaa

SEQ ID NO: 849711 - DNA, 33 bp, Homo sapien
attagcacttccatgacaggtatattcgtgtga

SEQ ID NO: 849712 - DNA, 33 bp, Homo sapien
attagcacttccatgataggtatattcgtgtga

SEQ ID NO: 849713 - DNA, 33 bp, Homo sapien
ctctctcggcaattaacaccctcccccttgttt

SEQ ID NO: 849714 - DNA, 33 bp, Homo sapien
ctctctcggcaattaagaccctcccccttgttt

SEQ ID NO: 849715 - DNA, 33 bp, Homo sapien
gaagtgctacaattcccgagaagtgtgtcagga

SEQ ID NO: 849716 - DNA, 33 bp, Homo sapien
gaagtgctacaattcctgagaagtgtgtcagga

SEQ ID NO: 849717 - DNA, 33 bp, Homo sapien
ctgtggaaccgggatcgcagagtaaacctttta

SEQ ID NO: 849718 - DNA, 33 bp, Homo sapien
ctgtggaaccgggatctcagagtaaacctttta

SEQ ID NO: 849719 - DNA, 33 bp, Homo sapien
catgctgtcaaagccactactactttagtgact

SEQ ID NO: 849720 - DNA, 33 bp, Homo sapien
catgctgtcaaagccattactactttagtgact

SEQ ID NO: 849721 - DNA, 33 bp, Homo sapien
taaaatacctttttcccctagcaacttaaagtg

SEQ ID NO: 849722 - DNA, 33 bp, Homo sapien
taaaatacctttttcctctagcaacttaaagtg

SEQ ID NO: 849723 - DNA, 33 bp, Homo sapien
aaagcacatcaacgaaggaagtgcacgataacc

SEQ ID NO: 849724 - DNA, 33 bp, Homo sapien
aaagcacatcaacgaatgaagtgcacgataacc

SEQ ID NO: 849725 - DNA, 33 bp, Homo sapien
gtacaatgaataaatgccatattgccaccaacc

SEQ ID NO: 849726 - DNA, 33 bp, Homo sapien
gtacaatgaataaatgtcatattgccaccaacc

SEQ ID NO: 849727 - DNA, 33 bp, Homo sapien
caaaggacagccatgccatgtgatcaatgtgag

SEQ ID NO: 849728 - DNA, 33 bp, Homo sapien
caaaggacagccatgctatgtgatcaatgtgag

SEQ ID NO: 849729 - DNA, 33 bp, Homo sapien
acaacctcatttttccaaagtcattctatacta

SEQ ID NO: 849730 - DNA, 33 bp, Homo sapien
acaacctcatttttccgaagtcattctatacta

SEQ ID NO: 849731 - DNA, 33 bp, Homo sapien
agtgaacttagtacagcatccagttgtgcagca

SEQ ID NO: 849732 - DNA, 33 bp, Homo sapien
agtgaacttagtacagtatccagttgtgcagca

SEQ ID NO: 849733 - DNA, 33 bp, Homo sapien
atgtgttttccagcagcaaaggtggacccaact

SEQ ID NO: 849734 - DNA, 33 bp, Homo sapien
atgtgttttccagcagtaaaggtggacccaact

SEQ ID NO: 849735 - DNA, 33 bp, Homo sapien
tctgttagcctgttagcataggagcaagtgata

SEQ ID NO: 849736 - DNA, 33 bp, Homo sapien
tctgttagcctgttaggataggagcaagtgata

SEQ ID NO: 849737 - DNA, 33 bp, Homo sapien
aatagtcatcaagtcaatagcattttcgatttc

SEQ ID NO: 849738 - DNA, 33 bp, Homo sapien
aatagtcatcaagtcagtagcattttcgatttc

SEQ ID NO: 849739 - DNA, 33 bp, Homo sapien
cagtaggttgtctacaataattacatttagact

SEQ ID NO: 849740 - DNA, 33 bp, Homo sapien
cagtaggttgtctacagtaattacatttagact

SEQ ID NO: 849741 - DNA, 33 bp, Homo sapien
ttagtcatttggaaaaataactacagaggtttc

SEQ ID NO: 849742 - DNA, 33 bp, Homo sapien
ttagtcatttggaaaagtaactacagaggtttc

SEQ ID NO: 849743 - DNA, 33 bp, Homo sapien
aatgaaagtctcgtcacgtctctacccagttta

SEQ ID NO: 849744 - DNA, 33 bp, Homo sapien
aatgaaagtctcgtcatgtctctacccagttta

SEQ ID NO: 849745 - DNA, 33 bp, Homo sapien
tttacagaggtcgagaagatagaaaattgaggc

SEQ ID NO: 849746 - DNA, 33 bp, Homo sapien
tttacagaggtcgagaggatagaaaattgaggc

SEQ ID NO: 849747 - DNA, 33 bp, Homo sapien
gttgaacacatagcaaacttttcattttcatct

SEQ ID NO: 849748 - DNA, 33 bp, Homo sapien
gttgaacacatagcaagcttttcattttcatct

SEQ ID NO: 849749 - DNA, 33 bp, Homo sapien
acatatcaccaactaaccatgcctgtgcatttc

SEQ ID NO: 849750 - DNA, 33 bp, Homo sapien
acatatcaccaactaatcatgcctgtgcatttc

SEQ ID NO: 849751 - DNA, 33 bp, Homo sapien
gattgtttattggagccacttcaaacagaaagg

SEQ ID NO: 849752 - DNA, 33 bp, Homo sapien
gattgtttattggagcgacttcaaacagaaagg

SEQ ID NO: 849753 - DNA, 33 bp, Homo sapien
taccctttggtaaatacgtgcttaccaaaaagg

SEQ ID NO: 849754 - DNA, 33 bp, Homo sapien
taccctttggtaaatatgtgcttaccaaaaagg

SEQ ID NO: 849755 - DNA, 33 bp, Homo sapien
atcttccaggtcagaaaggagtggaatgatata

SEQ ID NO: 849756 - DNA, 33 bp, Homo sapien
atcttccaggtcagaagggagtggaatgatata

SEQ ID NO: 849757 - DNA, 33 bp, Homo sapien
atttataaacaaaagacgttccattgacttacc

SEQ ID NO: 849758 - DNA, 33 bp, Homo sapien
atttataaacaaaagaggttccattgacttacc

SEQ ID NO: 849759 - DNA, 33 bp, Homo sapien
ctaaaataggatttgaatgtaagcattaataag

SEQ ID NO: 849760 - DNA, 33 bp, Homo sapien
ctaaaataggatttgagtgtaagcattaataag

SEQ ID NO: 849761 - DNA, 33 bp, Homo sapien
atctccaggaggtactcaattcagatgttttgg

SEQ ID NO: 849762 - DNA, 33 bp, Homo sapien
atctccaggaggtacttaattcagatgttttgg

SEQ ID NO: 849763 - DNA, 33 bp, Homo sapien
tattcttgggtcatagaaaataatgtagaccga

SEQ ID NO: 849764 - DNA, 33 bp, Homo sapien
tattcttgggtcatagcaaataatgtagaccga

SEQ ID NO: 849765 - DNA, 33 bp, Homo sapien
tcttattgcttgtaaaatatcagcattttacaa

SEQ ID NO: 849766 - DNA, 33 bp, Homo sapien
tcttattgcttgtaaagtatcagcattttacaa

SEQ ID NO: 849767 - DNA, 33 bp, Homo sapien
aaattttatctttaccaatacatctcaaatacc

SEQ ID NO: 849768 - DNA, 33 bp, Homo sapien
aaattttatctttaccgatacatctcaaatacc

SEQ ID NO: 849769 - DNA, 33 bp, Homo sapien
cttcaaagatgttaagacacgtggctgttaagt

SEQ ID NO: 849770 - DNA, 33 bp, Homo sapien
cttcaaagatgttaagtcacgtggctgttaagt

SEQ ID NO: 849771 - DNA, 33 bp, Homo sapien
ccactggtgagcaaaaattgactaactttctgg

SEQ ID NO: 849772 - DNA, 33 bp, Homo sapien
ccactggtgagcaaaacttgactaactttctgg

SEQ ID NO: 849773 - DNA, 33 bp, Homo sapien
gagtttctctgctttgacaaactaactgtagta

SEQ ID NO: 849774 - DNA, 33 bp, Homo sapien
gagtttctctgctttggcaaactaactgtagta

SEQ ID NO: 849775 - DNA, 33 bp, Homo sapien
tattaaaattagccacagtagttcagtttgtcc

SEQ ID NO: 849776 - DNA, 33 bp, Homo sapien
tattaaaattagccacggtagttcagtttgtcc

SEQ ID NO: 849777 - DNA, 33 bp, Homo sapien
ttattccatccaatgcaataaatcttaatatcc

SEQ ID NO: 849778 - DNA, 33 bp, Homo sapien
ttattccatccaatgcgataaatcttaatatcc

SEQ ID NO: 849779 - DNA, 33 bp, Homo sapien
tctggctaaataatgtaaataaactgccattga

SEQ ID NO: 849780 - DNA, 33 bp, Homo sapien
tctggctaaataatgtgaataaactgccattga

SEQ ID NO: 849781 - DNA, 33 bp, Homo sapien
aatccggtcatcacggaactcccaaaagaacac

SEQ ID NO: 849782 - DNA, 33 bp, Homo sapien
aatccggtcatcacgggactcccaaaagaacac

SEQ ID NO: 849783 - DNA, 33 bp, Homo sapien
cagtttttgaaaatcaatgatatattggactgt

SEQ ID NO: 849784 - DNA, 33 bp, Homo sapien
cagtttttgaaaatcagtgatatattggactgt

SEQ ID NO: 849785 - DNA, 33 bp, Homo sapien
caagcttacactatgaagagtttatagtgtaca

SEQ ID NO: 849786 - DNA, 33 bp, Homo sapien
caagcttacactatgacgagtttatagtgtaca

SEQ ID NO: 849787 - DNA, 33 bp, Homo sapien
aacttactcagtgttcactcaaaatagtgttgt

SEQ ID NO: 849788 - DNA, 33 bp, Homo sapien
aacttactcagtgttcgctcaaaatagtgttgt

SEQ ID NO: 849789 - DNA, 33 bp, Homo sapien
tcagtcagtttgataacaatattcctaaatatt

SEQ ID NO: 849790 - DNA, 33 bp, Homo sapien
tcagtcagtttgataagaatattcctaaatatt

SEQ ID NO: 849791 - DNA, 33 bp, Homo sapien
cattttttaaaaattcaagggctatacatttac

SEQ ID NO: 849792 - DNA, 33 bp, Homo sapien
cattttttaaaaattccagggctatacatttac

SEQ ID NO: 849793 - DNA, 33 bp, Homo sapien
ggggccaggtatgcaaccatctgagcaggtcaa

SEQ ID NO: 849794 - DNA, 33 bp, Homo sapien
ggggccaggtatgcaatcatctgagcaggtcaa

SEQ ID NO: 849795 - DNA, 33 bp, Homo sapien
gaaagaagagcaaaaaggggaaagaataaagaa

SEQ ID NO: 849796 - DNA, 33 bp, Homo sapien
gaaagaagagcaaaaatgggaaagaataaagaa

SEQ ID NO: 849797 - DNA, 33 bp, Homo sapien
tttagatatcagatctaaagttaataagctatg

SEQ ID NO: 849798 - DNA, 33 bp, Homo sapien
tttagatatcagatctgaagttaataagctatg

SEQ ID NO: 849799 - DNA, 33 bp, Homo sapien
cagatttcatggactacggaaatttaactcttg

SEQ ID NO: 849800 - DNA, 33 bp, Homo sapien
cagatttcatggactatggaaatttaactcttg

SEQ ID NO: 849801 - DNA, 33 bp, Homo sapien
aaataattaggaaagacaacaggtgcaacagac

SEQ ID NO: 849802 - DNA, 33 bp, Homo sapien
aaataattaggaaagataacaggtgcaacagac

SEQ ID NO: 849803 - DNA, 33 bp, Homo sapien
tagatgttgggaataactgacacctaacacttc

SEQ ID NO: 849804 - DNA, 33 bp, Homo sapien
tagatgttgggaataattgacacctaacacttc

SEQ ID NO: 849805 - DNA, 33 bp, Homo sapien
ctcccttccccttcaccgagtgacaatgcaaaa

SEQ ID NO: 849806 - DNA, 33 bp, Homo sapien
ctcccttccccttcactgagtgacaatgcaaaa

SEQ ID NO: 849807 - DNA, 33 bp, Homo sapien
tgttggcttacaataaattatgtacttcagagt

SEQ ID NO: 849808 - DNA, 33 bp, Homo sapien
tgttggcttacaataatttatgtacttcagagt

SEQ ID NO: 849809 - DNA, 33 bp, Homo sapien
tttccaaattattggcacaaagcatgagggcag

SEQ ID NO: 849810 - DNA, 33 bp, Homo sapien
tttccaaattattggcgcaaagcatgagggcag

SEQ ID NO: 849811 - DNA, 33 bp, Homo sapien
gccctgcagtgcctcaataatactccttccact

SEQ ID NO: 849812 - DNA, 33 bp, Homo sapien
gccctgcagtgcctcagtaatactccttccact

SEQ ID NO: 849813 - DNA, 33 bp, Homo sapien
ttaactaatttcctcaaaagggcaccgtccact

SEQ ID NO: 849814 - DNA, 33 bp, Homo sapien
ttaactaatttcctcacaagggcaccgtccact

SEQ ID NO: 849815 - DNA, 33 bp, Homo sapien
aaaatagacctcccataactttcatgaaaaagt

SEQ ID NO: 849816 - DNA, 33 bp, Homo sapien
aaaatagacctcccattactttcatgaaaaagt

SEQ ID NO: 849817 - DNA, 33 bp, Homo sapien
aatttccctgctcccactcaaaagctgaggctc

SEQ ID NO: 849818 - DNA, 33 bp, Homo sapien
aatttccctgctcccagtcaaaagctgaggctc

SEQ ID NO: 849819 - DNA, 33 bp, Homo sapien
tgagagcaaaagcacccgagaaactacataacc

SEQ ID NO: 849820 - DNA, 33 bp, Homo sapien
tgagagcaaaagcacctgagaaactacataacc

SEQ ID NO: 849821 - DNA, 33 bp, Homo sapien
agctggaaagaaagataacagataagcaaatat

SEQ ID NO: 849822 - DNA, 33 bp, Homo sapien
agctggaaagaaagatgacagataagcaaatat

SEQ ID NO: 849823 - DNA, 33 bp, Homo sapien
aaactaccttaaattccaagtgccaaactagat

SEQ ID NO: 849824 - DNA, 33 bp, Homo sapien
aaactaccttaaattctaagtgccaaactagat

SEQ ID NO: 849825 - DNA, 33 bp, Homo sapien
acatgaaaactccataaatacaaaatgtgtatg

SEQ ID NO: 849826 - DNA, 33 bp, Homo sapien
acatgaaaactccatacatacaaaatgtgtatg

SEQ ID NO: 849827 - DNA, 33 bp, Homo sapien
agacttcggacttcataacttccactgcataga

SEQ ID NO: 849828 - DNA, 33 bp, Homo sapien
agacttcggacttcatgacttccactgcataga

SEQ ID NO: 849829 - DNA, 33 bp, Homo sapien
cattacctcgagctctaaaagtagctcttaact

SEQ ID NO: 849830 - DNA, 33 bp, Homo sapien
cattacctcgagctctgaaagtagctcttaact

SEQ ID NO: 849831 - DNA, 33 bp, Homo sapien
ccgaccaagtaccaaacatcagctttgaaccta

SEQ ID NO: 849832 - DNA, 33 bp, Homo sapien
ccgaccaagtaccaaatatcagctttgaaccta

SEQ ID NO: 849833 - DNA, 33 bp, Homo sapien
gacagaacctattagcagaagtatttttaatta

SEQ ID NO: 849834 - DNA, 33 bp, Homo sapien
gacagaacctattagcggaagtatttttaatta

SEQ ID NO: 849835 - DNA, 33 bp, Homo sapien
ttgttagttccttccacgtcattctcactggtt

SEQ ID NO: 849836 - DNA, 33 bp, Homo sapien
ttgttagttccttccatgtcattctcactggtt

SEQ ID NO: 849837 - DNA, 33 bp, Homo sapien
tcagatgaagccactcgcttttcacctcctaaa

SEQ ID NO: 849838 - DNA, 33 bp, Homo sapien
tcagatgaagccactctcttttcacctcctaaa

SEQ ID NO: 849839 - DNA, 33 bp, Homo sapien
attcttgtgataaccaacatccttggaacactt

SEQ ID NO: 849840 - DNA, 33 bp, Homo sapien
attcttgtgataaccaccatccttggaacactt

SEQ ID NO: 849841 - DNA, 33 bp, Homo sapien
ttccatttctccttccacaagggatgtaccaaa

SEQ ID NO: 849842 - DNA, 33 bp, Homo sapien
ttccatttctccttccgcaagggatgtaccaaa

SEQ ID NO: 849843 - DNA, 33 bp, Homo sapien
tgcccagggtctaatgccaatttttgaatgggt

SEQ ID NO: 849844 - DNA, 33 bp, Homo sapien
tgcccagggtctaatgtcaatttttgaatgggt

SEQ ID NO: 849845 - DNA, 33 bp, Homo sapien
ttaagcaatgaacccaatacagtggacctattt

SEQ ID NO: 849846 - DNA, 33 bp, Homo sapien
ttaagcaatgaacccagtacagtggacctattt

SEQ ID NO: 849847 - DNA, 33 bp, Homo sapien
atagctctgcacaggaagtttcagatttgaatc

SEQ ID NO: 849848 - DNA, 33 bp, Homo sapien
atagctctgcacaggaggtttcagatttgaatc

SEQ ID NO: 849849 - DNA, 33 bp, Homo sapien
gaatcgttgcagagggcaatgctaaagaaaggt

SEQ ID NO: 849850 - DNA, 33 bp, Homo sapien
gaatcgttgcagaggggaatgctaaagaaaggt

SEQ ID NO: 849851 - DNA, 33 bp, Homo sapien
tttgccaaccctgatcaagactatgtgacagaa

SEQ ID NO: 849852 - DNA, 33 bp, Homo sapien
tttgccaaccctgatcgagactatgtgacagaa

SEQ ID NO: 849853 - DNA, 33 bp, Homo sapien
ccagtgaattactgaacggctactaaggtcaag

SEQ ID NO: 849854 - DNA, 33 bp, Homo sapien
ccagtgaattactgaatggctactaaggtcaag

SEQ ID NO: 849855 - DNA, 33 bp, Homo sapien
ataaaagttgagagtaagtttggggtagagtaa

SEQ ID NO: 849856 - DNA, 33 bp, Homo sapien
ataaaagttgagagtaggtttggggtagagtaa

SEQ ID NO: 849857 - DNA, 33 bp, Homo sapien
attccaacttaactgaacatcctgtatatttat

SEQ ID NO: 849858 - DNA, 33 bp, Homo sapien
attccaacttaactgagcatcctgtatatttat

SEQ ID NO: 849859 - DNA, 33 bp, Homo sapien
gttcaagcggtgcttaataagaattcttgaatg

SEQ ID NO: 849860 - DNA, 33 bp, Homo sapien
gttcaagcggtgcttagtaagaattcttgaatg

SEQ ID NO: 849861 - DNA, 33 bp, Homo sapien
ggtcctctacataccaatagttttacctttgta

SEQ ID NO: 849862 - DNA, 33 bp, Homo sapien
ggtcctctacataccagtagttttacctttgta

SEQ ID NO: 849863 - DNA, 33 bp, Homo sapien
attgatgctgaactgagagaacataggatctaa

SEQ ID NO: 849864 - DNA, 33 bp, Homo sapien
attgatgctgaactgatagaacataggatctaa

SEQ ID NO: 849865 - DNA, 33 bp, Homo sapien
cagctgatgaataccactgaatttccctattac

SEQ ID NO: 849866 - DNA, 33 bp, Homo sapien
cagctgatgaataccattgaatttccctattac

SEQ ID NO: 849867 - DNA, 33 bp, Homo sapien
tgggcctagtagaaaccgaatgctttcccttgg

SEQ ID NO: 849868 - DNA, 33 bp, Homo sapien
tgggcctagtagaaactgaatgctttcccttgg

SEQ ID NO: 849869 - DNA, 33 bp, Homo sapien
tagttagtatctctcactcactaagtccattta

SEQ ID NO: 849870 - DNA, 33 bp, Homo sapien
tagttagtatctctcattcactaagtccattta

SEQ ID NO: 849871 - DNA, 33 bp, Homo sapien
ttcattacattgatgacagtatgctaaatggac

SEQ ID NO: 849872 - DNA, 33 bp, Homo sapien
ttcattacattgatgatagtatgctaaatggac

SEQ ID NO: 849873 - DNA, 33 bp, Homo sapien
aggatcatcaggactacaaaggaggtggcaagc

SEQ ID NO: 849874 - DNA, 33 bp, Homo sapien
aggatcatcaggactataaaggaggtggcaagc

SEQ ID NO: 849875 - DNA, 33 bp, Homo sapien
ttttgggggggtcagtcacatagatatgtagtg

SEQ ID NO: 849876 - DNA, 33 bp, Homo sapien
ttttgggggggtcagttacatagatatgtagtg

SEQ ID NO: 849877 - DNA, 33 bp, Homo sapien
tggtattgtagaagcaaaacatcatgattatat

SEQ ID NO: 849878 - DNA, 33 bp, Homo sapien
tggtattgtagaagcagaacatcatgattatat

SEQ ID NO: 849879 - DNA, 33 bp, Homo sapien
agttgacaacatgaaccggagacaagaaataaa

SEQ ID NO: 849880 - DNA, 33 bp, Homo sapien
agttgacaacatgaactggagacaagaaataaa

SEQ ID NO: 849881 - DNA, 33 bp, Homo sapien
aataaacaaacaaaaaaagactagcaagccaaa

SEQ ID NO: 849882 - DNA, 33 bp, Homo sapien
aataaacaaacaaaaagagactagcaagccaaa

SEQ ID NO: 849883 - DNA, 33 bp, Homo sapien
ggcagcagtgacttggcatttgattttatggtg

SEQ ID NO: 849884 - DNA, 33 bp, Homo sapien
ggcagcagtgacttgggatttgattttatggtg

SEQ ID NO: 849885 - DNA, 33 bp, Homo sapien
aggcctttgtctcttcacagttagctcttctct

SEQ ID NO: 849886 - DNA, 33 bp, Homo sapien
aggcctttgtctcttcgcagttagctcttctct

SEQ ID NO: 849887 - DNA, 33 bp, Homo sapien
gtcagaagaaaggaatcagaaggtgtggatgac

SEQ ID NO: 849888 - DNA, 33 bp, Homo sapien
gtcagaagaaaggaattagaaggtgtggatgac

SEQ ID NO: 849889 - DNA, 33 bp, Homo sapien
atagctattttatttacgtaaaggcagtactct

SEQ ID NO: 849890 - DNA, 33 bp, Homo sapien
atagctattttatttatgtaaaggcagtactct

SEQ ID NO: 849891 - DNA, 33 bp, Homo sapien
tagcacacatttcttacacatagttcctaccag

SEQ ID NO: 849892 - DNA, 33 bp, Homo sapien
tagcacacatttcttatacatagttcctaccag

SEQ ID NO: 849893 - DNA, 33 bp, Homo sapien
atgtctgtgtttttgacgtaagttaccaagttg

SEQ ID NO: 849894 - DNA, 33 bp, Homo sapien
atgtctgtgtttttgatgtaagttaccaagttg

SEQ ID NO: 849895 - DNA, 33 bp, Homo sapien
aaaaaactcactcataactgctgctaatcaaag

SEQ ID NO: 849896 - DNA, 33 bp, Homo sapien
aaaaaactcactcatatctgctgctaatcaaag

SEQ ID NO: 849897 - DNA, 33 bp, Homo sapien
tcccctattgagacaaccctgattagtatttcc

SEQ ID NO: 849898 - DNA, 33 bp, Homo sapien
tcccctattgagacaatcctgattagtatttcc

SEQ ID NO: 849899 - DNA, 33 bp, Homo sapien
aaggaagaaaaccgaaaaactctcaatgacttg

SEQ ID NO: 849900 - DNA, 33 bp, Homo sapien
aaggaagaaaaccgaagaactctcaatgacttg

SEQ ID NO: 849901 - DNA, 33 bp, Homo sapien
atgttttacttgttcactattagtctttgtccc

SEQ ID NO: 849902 - DNA, 33 bp, Homo sapien
atgttttacttgttcagtattagtctttgtccc

SEQ ID NO: 849903 - DNA, 33 bp, Homo sapien
gtttaaatcagtggcaatcagttaaggctgggc

SEQ ID NO: 849904 - DNA, 33 bp, Homo sapien
gtttaaatcagtggcagtcagttaaggctgggc

SEQ ID NO: 849905 - DNA, 33 bp, Homo sapien
tcaaccaaactctagcaccatttgctcaactgc

SEQ ID NO: 849906 - DNA, 33 bp, Homo sapien
tcaaccaaactctagcgccatttgctcaactgc

SEQ ID NO: 849907 - DNA, 33 bp, Homo sapien
gcttcaccagcattcaatatttaaatgatgtat

SEQ ID NO: 849908 - DNA, 33 bp, Homo sapien
gcttcaccagcattcagtatttaaatgatgtat

SEQ ID NO: 849909 - DNA, 33 bp, Homo sapien
atacctctgcatggaaattattatcagtgcttc

SEQ ID NO: 849910 - DNA, 33 bp, Homo sapien
atacctctgcatggaagttattatcagtgcttc

SEQ ID NO: 849911 - DNA, 33 bp, Homo sapien
cagagttcattttctacctctcactaagatgac

SEQ ID NO: 849912 - DNA, 33 bp, Homo sapien
cagagttcattttctatctctcactaagatgac

SEQ ID NO: 849913 - DNA, 33 bp, Homo sapien
agaaggcaaactacataaaacaagttatttttg

SEQ ID NO: 849914 - DNA, 33 bp, Homo sapien
agaaggcaaactacatgaaacaagttatttttg

SEQ ID NO: 849915 - DNA, 33 bp, Homo sapien
ctctgtctcaaaaaaggagaagagaaaagatac

SEQ ID NO: 849916 - DNA, 33 bp, Homo sapien
ctctgtctcaaaaaagtagaagagaaaagatac

SEQ ID NO: 849917 - DNA, 33 bp, Homo sapien
ccattcacactgcaccactctaaagtcagtgga

SEQ ID NO: 849918 - DNA, 33 bp, Homo sapien
ccattcacactgcaccgctctaaagtcagtgga

SEQ ID NO: 849919 - DNA, 33 bp, Homo sapien
atctatcatgatcctcacctcaggtttgataat

SEQ ID NO: 849920 - DNA, 33 bp, Homo sapien
atctatcatgatcctcgcctcaggtttgataat

SEQ ID NO: 849921 - DNA, 33 bp, Homo sapien
gatgaatttctcggaaggtatccctatggttat

SEQ ID NO: 849922 - DNA, 33 bp, Homo sapien
gatgaatttctcggaatgtatccctatggttat

SEQ ID NO: 849923 - DNA, 33 bp, Homo sapien
ttttggtgctctttcccatttctcacttaacac

SEQ ID NO: 849924 - DNA, 33 bp, Homo sapien
ttttggtgctctttccgatttctcacttaacac

SEQ ID NO: 849925 - DNA, 33 bp, Homo sapien
acattgtgcgaggaagcctggtttaaaacagac

SEQ ID NO: 849926 - DNA, 33 bp, Homo sapien
acattgtgcgaggaagtctggtttaaaacagac

SEQ ID NO: 849927 - DNA, 33 bp, Homo sapien
gagcaaactgcgctccccctgcactgaatttta

SEQ ID NO: 849928 - DNA, 33 bp, Homo sapien
gagcaaactgcgctcctcctgcactgaatttta

SEQ ID NO: 849929 - DNA, 33 bp, Homo sapien
acatttttcttgctcacgtttctaggcactaac

SEQ ID NO: 849930 - DNA, 33 bp, Homo sapien
acatttttcttgctcatgtttctaggcactaac

SEQ ID NO: 849931 - DNA, 33 bp, Homo sapien
tagaaacagtaagaaactcttagttctccagaa

SEQ ID NO: 849932 - DNA, 33 bp, Homo sapien
tagaaacagtaagaaattcttagttctccagaa

SEQ ID NO: 849933 - DNA, 33 bp, Homo sapien
ctccatttgctccttcacatcctcaattctttc

SEQ ID NO: 849934 - DNA, 33 bp, Homo sapien
ctccatttgctccttcgcatcctcaattctttc

SEQ ID NO: 849935 - DNA, 33 bp, Homo sapien
attttcttctttgtcccgagtttggacttagtg

SEQ ID NO: 849936 - DNA, 33 bp, Homo sapien
attttcttctttgtcctgagtttggacttagtg

SEQ ID NO: 849937 - DNA, 33 bp, Homo sapien
catggagtcctcaacaatgtactagaaaacaga

SEQ ID NO: 849938 - DNA, 33 bp, Homo sapien
catggagtcctcaacagtgtactagaaaacaga

SEQ ID NO: 849939 - DNA, 33 bp, Homo sapien
ctcctgtggctgagtcacaggtgcatccttaac

SEQ ID NO: 849940 - DNA, 33 bp, Homo sapien
ctcctgtggctgagtcgcaggtgcatccttaac

SEQ ID NO: 849941 - DNA, 33 bp, Homo sapien
gaggagggtagaggaaataatcttatgccctag

SEQ ID NO: 849942 - DNA, 33 bp, Homo sapien
gaggagggtagaggaattaatcttatgccctag

SEQ ID NO: 849943 - DNA, 33 bp, Homo sapien
ttggactagtacgcacaacaaggttaaatatgt

SEQ ID NO: 849944 - DNA, 33 bp, Homo sapien
ttggactagtacgcactacaaggttaaatatgt

SEQ ID NO: 849945 - DNA, 33 bp, Homo sapien
ccaggctccaggggacaaggatggaagattagg

SEQ ID NO: 849946 - DNA, 33 bp, Homo sapien
ccaggctccaggggaccaggatggaagattagg

SEQ ID NO: 849947 - DNA, 33 bp, Homo sapien
tctttgattttgtcacacttgaaattgtctaac

SEQ ID NO: 849948 - DNA, 33 bp, Homo sapien
tctttgattttgtcacgcttgaaattgtctaac

SEQ ID NO: 849949 - DNA, 33 bp, Homo sapien
ccaaagagaaacaggacgcactacgaactagtt

SEQ ID NO: 849950 - DNA, 33 bp, Homo sapien
ccaaagagaaacaggatgcactacgaactagtt

SEQ ID NO: 849951 - DNA, 33 bp, Homo sapien
acatggatgaatcttaagttgagttaaataaaa

SEQ ID NO: 849952 - DNA, 33 bp, Homo sapien
acatggatgaatcttatgttgagttaaataaaa

SEQ ID NO: 849953 - DNA, 33 bp, Homo sapien
aacatatttgctatacagtagactaaaagtact

SEQ ID NO: 849954 - DNA, 33 bp, Homo sapien
aacatatttgctatacggtagactaaaagtact

SEQ ID NO: 849955 - DNA, 33 bp, Homo sapien
aactgtacatataaacacacactcaatgtgaat

SEQ ID NO: 849956 - DNA, 33 bp, Homo sapien
aactgtacatataaacgcacactcaatgtgaat

SEQ ID NO: 849957 - DNA, 33 bp, Homo sapien
gttgtaaagaggaatacgcgagttaaatatttg

SEQ ID NO: 849958 - DNA, 33 bp, Homo sapien
gttgtaaagaggaatatgcgagttaaatatttg

SEQ ID NO: 849959 - DNA, 33 bp, Homo sapien
ttccatttgtctttcaacccactttcacctcat

SEQ ID NO: 849960 - DNA, 33 bp, Homo sapien
ttccatttgtctttcagcccactttcacctcat

SEQ ID NO: 849961 - DNA, 33 bp, Homo sapien
acatttcacctgtctaatacgtacaatgtgcct

SEQ ID NO: 849962 - DNA, 33 bp, Homo sapien
acatttcacctgtctagtacgtacaatgtgcct

SEQ ID NO: 849963 - DNA, 33 bp, Homo sapien
taagaccagcagttaaagttgtggcttagaact

SEQ ID NO: 849964 - DNA, 33 bp, Homo sapien
taagaccagcagttaaggttgtggcttagaact

SEQ ID NO: 849965 - DNA, 33 bp, Homo sapien
aatggatgtcagtttcaaccacaaagatagttg

SEQ ID NO: 849966 - DNA, 33 bp, Homo sapien
aatggatgtcagtttcgaccacaaagatagttg

SEQ ID NO: 849967 - DNA, 33 bp, Homo sapien
ttcaccattatcttgaatattttacagtgcaat

SEQ ID NO: 849968 - DNA, 33 bp, Homo sapien
ttcaccattatcttgattattttacagtgcaat

SEQ ID NO: 849969 - DNA, 33 bp, Homo sapien
tgcgcctctgctgtcaaatgggcttacctcctt

SEQ ID NO: 849970 - DNA, 33 bp, Homo sapien
tgcgcctctgctgtcagatgggcttacctcctt

SEQ ID NO: 849971 - DNA, 33 bp, Homo sapien
ttctatgatttttcacacttgtgggcaaagata

SEQ ID NO: 849972 - DNA, 33 bp, Homo sapien
ttctatgatttttcacccttgtgggcaaagata

SEQ ID NO: 849973 - DNA, 33 bp, Homo sapien
aaaggctgagctataaatgatgccaggactttt

SEQ ID NO: 849974 - DNA, 33 bp, Homo sapien
aaaggctgagctataagtgatgccaggactttt

SEQ ID NO: 849975 - DNA, 33 bp, Homo sapien
ccatttgccttatgcactgatgataacttggga

SEQ ID NO: 849976 - DNA, 33 bp, Homo sapien
ccatttgccttatgcattgatgataacttggga

SEQ ID NO: 849977 - DNA, 33 bp, Homo sapien
ttaataaagtcttctcactagccatctgtaatt

SEQ ID NO: 849978 - DNA, 33 bp, Homo sapien
ttaataaagtcttctcgctagccatctgtaatt

SEQ ID NO: 849979 - DNA, 33 bp, Homo sapien
ttcaagtgcataaatacaaagcttgatgatgag

SEQ ID NO: 849980 - DNA, 33 bp, Homo sapien
ttcaagtgcataaatataaagcttgatgatgag

SEQ ID NO: 849981 - DNA, 33 bp, Homo sapien
gaaaatcagaatgcctcagatctttcattagtc

SEQ ID NO: 849982 - DNA, 33 bp, Homo sapien
gaaaatcagaatgcctgagatctttcattagtc

SEQ ID NO: 849983 - DNA, 33 bp, Homo sapien
acgtaggttactgtaaatctatctgaattaggg

SEQ ID NO: 849984 - DNA, 33 bp, Homo sapien
acgtaggttactgtaagtctatctgaattaggg

SEQ ID NO: 849985 - DNA, 33 bp, Homo sapien
atggtgatgaaagctacgtgtttgtgagggttt

SEQ ID NO: 849986 - DNA, 33 bp, Homo sapien
atggtgatgaaagctaggtgtttgtgagggttt

SEQ ID NO: 849987 - DNA, 33 bp, Homo sapien
gttcgcttggaacatacagtgaggtatggctct

SEQ ID NO: 849988 - DNA, 33 bp, Homo sapien
gttcgcttggaacatatagtgaggtatggctct

SEQ ID NO: 849989 - DNA, 33 bp, Homo sapien
ggatcttttatgctgcaatttgctttctcattt

SEQ ID NO: 849990 - DNA, 33 bp, Homo sapien
ggatcttttatgctgcgatttgctttctcattt

SEQ ID NO: 849991 - DNA, 33 bp, Homo sapien
cccatcaatagggaaacggttagagtacagtac

SEQ ID NO: 849992 - DNA, 33 bp, Homo sapien
cccatcaatagggaaatggttagagtacagtac

SEQ ID NO: 849993 - DNA, 33 bp, Homo sapien
agcaatgcttgatggaactagctttcctccata

SEQ ID NO: 849994 - DNA, 33 bp, Homo sapien
agcaatgcttgatggatctagctttcctccata

SEQ ID NO: 849995 - DNA, 33 bp, Homo sapien
tctgggtgatttctacactcactaaagtttaaa

SEQ ID NO: 849996 - DNA, 33 bp, Homo sapien
tctgggtgatttctacgctcactaaagtttaaa

SEQ ID NO: 849997 - DNA, 33 bp, Homo sapien
ccatcctacacattgcccctggccattttaaaa

SEQ ID NO: 849998 - DNA, 33 bp, Homo sapien
ccatcctacacattgctcctggccattttaaaa

SEQ ID NO: 849999 - DNA, 33 bp, Homo sapien
agtttatcattcatacaatactgcaagtttgga

SEQ ID NO: 850000 - DNA, 33 bp, Homo sapien
agtttatcattcatacgatactgcaagtttgga

SEQ ID NO: 850001 - DNA, 33 bp, Homo sapien
tcagattcctagaaaacaaggactcaaattcca

SEQ ID NO: 850002 - DNA, 33 bp, Homo sapien
tcagattcctagaaaagaaggactcaaattcca

SEQ ID NO: 850003 - DNA, 33 bp, Homo sapien
cctagtttttcagtgcaattggctgatccaaat

SEQ ID NO: 850004 - DNA, 33 bp, Homo sapien
cctagtttttcagtgcgattggctgatccaaat

SEQ ID NO: 850005 - DNA, 33 bp, Homo sapien
acactttcctcatataagggctgattataaact

SEQ ID NO: 850006 - DNA, 33 bp, Homo sapien
acactttcctcatataggggctgattataaact

SEQ ID NO: 850007 - DNA, 33 bp, Homo sapien
atttgacatgcaataacgtaatttttaatagta

SEQ ID NO: 850008 - DNA, 33 bp, Homo sapien
atttgacatgcaataatgtaatttttaatagta

SEQ ID NO: 850009 - DNA, 33 bp, Homo sapien
ttatgctggtacatagaagatgttcaataaatg

SEQ ID NO: 850010 - DNA, 33 bp, Homo sapien
ttatgctggtacatagtagatgttcaataaatg

SEQ ID NO: 850011 - DNA, 33 bp, Homo sapien
gcaagtgaattttgtcaaatggagatgccatcg

SEQ ID NO: 850012 - DNA, 33 bp, Homo sapien
gcaagtgaattttgtctaatggagatgccatcg

SEQ ID NO: 850013 - DNA, 33 bp, Homo sapien
tcaacaagatcatcaggcacacttaggatcctc

SEQ ID NO: 850014 - DNA, 33 bp, Homo sapien
tcaacaagatcatcagtcacacttaggatcctc

SEQ ID NO: 850015 - DNA, 33 bp, Homo sapien
gattctctttgcaaggcatgtaacaatggcttt

SEQ ID NO: 850016 - DNA, 33 bp, Homo sapien
gattctctttgcaaggtatgtaacaatggcttt

SEQ ID NO: 850017 - DNA, 33 bp, Homo sapien
ttcttgcaagctgtcccatggtgaattggatca

SEQ ID NO: 850018 - DNA, 33 bp, Homo sapien
ttcttgcaagctgtcctatggtgaattggatca

SEQ ID NO: 850019 - DNA, 33 bp, Homo sapien
ccatacacctgtcaaaccattaccacaatcaag

SEQ ID NO: 850020 - DNA, 33 bp, Homo sapien
ccatacacctgtcaaatcattaccacaatcaag

SEQ ID NO: 850021 - DNA, 33 bp, Homo sapien
accttaccattcacttcctgccatcattatccc

SEQ ID NO: 850022 - DNA, 33 bp, Homo sapien
accttaccattcactttctgccatcattatccc

SEQ ID NO: 850023 - DNA, 33 bp, Homo sapien
cattccctgaacataagaggaatcacagtgatg

SEQ ID NO: 850024 - DNA, 33 bp, Homo sapien
cattccctgaacataataggaatcacagtgatg

SEQ ID NO: 850025 - DNA, 33 bp, Homo sapien
tatttaaccagagagaagaacttatattagctt

SEQ ID NO: 850026 - DNA, 33 bp, Homo sapien
tatttaaccagagagaggaacttatattagctt

SEQ ID NO: 850027 - DNA, 33 bp, Homo sapien
atcatgaagctctttcaccactgaagtataatt

SEQ ID NO: 850028 - DNA, 33 bp, Homo sapien
atcatgaagctctttcgccactgaagtataatt

SEQ ID NO: 850029 - DNA, 33 bp, Homo sapien
gatgcccgtattctacacagagattatgattta

SEQ ID NO: 850030 - DNA, 33 bp, Homo sapien
gatgcccgtattctacgcagagattatgattta

SEQ ID NO: 850031 - DNA, 33 bp, Homo sapien
atttgcaggttcattacataggaaaacagtgtc

SEQ ID NO: 850032 - DNA, 33 bp, Homo sapien
atttgcaggttcattatataggaaaacagtgtc

SEQ ID NO: 850033 - DNA, 33 bp, Homo sapien
aaatggccaacagctaagaaaaggtgctctaat

SEQ ID NO: 850034 - DNA, 33 bp, Homo sapien
aaatggccaacagctatgaaaaggtgctctaat

SEQ ID NO: 850035 - DNA, 33 bp, Homo sapien
ttgcataccaaagacaaagtataagcaccccgg

SEQ ID NO: 850036 - DNA, 33 bp, Homo sapien
ttgcataccaaagacagagtataagcaccccgg

SEQ ID NO: 850037 - DNA, 33 bp, Homo sapien
tctgctaaaattgcagcagccacatagggctgg

SEQ ID NO: 850038 - DNA, 33 bp, Homo sapien
tctgctaaaattgcagtagccacatagggctgg

SEQ ID NO: 850039 - DNA, 33 bp, Homo sapien
tactatctcttttaaacttgaggagaataaagt

SEQ ID NO: 850040 - DNA, 33 bp, Homo sapien
tactatctcttttaaatttgaggagaataaagt

SEQ ID NO: 850041 - DNA, 33 bp, Homo sapien
atgcttaataaaaactaaatgctgaatgtatta

SEQ ID NO: 850042 - DNA, 33 bp, Homo sapien
atgcttaataaaaacttaatgctgaatgtatta

SEQ ID NO: 850043 - DNA, 33 bp, Homo sapien
ctttggttaagcaaaacatgcacatacaaacaa

SEQ ID NO: 850044 - DNA, 33 bp, Homo sapien
ctttggttaagcaaaatatgcacatacaaacaa

SEQ ID NO: 850045 - DNA, 33 bp, Homo sapien
actaataacctttccaaagtcataattttccaa

SEQ ID NO: 850046 - DNA, 33 bp, Homo sapien
actaataacctttccacagtcataattttccaa

SEQ ID NO: 850047 - DNA, 33 bp, Homo sapien
tgctgtttcctggatacgttggcctttttgtta

SEQ ID NO: 850048 - DNA, 33 bp, Homo sapien
tgctgtttcctggatatgttggcctttttgtta

SEQ ID NO: 850049 - DNA, 33 bp, Homo sapien
agttgtcttcttgatcaacaaaaaaaaataaat

SEQ ID NO: 850050 - DNA, 33 bp, Homo sapien
agttgtcttcttgatccacaaaaaaaaataaat

SEQ ID NO: 850051 - DNA, 33 bp, Homo sapien
ggtaatcagtaatgacagaaacaactcccatcc

SEQ ID NO: 850052 - DNA, 33 bp, Homo sapien
ggtaatcagtaatgacggaaacaactcccatcc

SEQ ID NO: 850053 - DNA, 33 bp, Homo sapien
ctttgtattttccacaccccttaacacacagtg

SEQ ID NO: 850054 - DNA, 33 bp, Homo sapien
ctttgtattttccacagcccttaacacacagtg

SEQ ID NO: 850055 - DNA, 33 bp, Homo sapien
acaccattttatataacagatgagcatccatgg

SEQ ID NO: 850056 - DNA, 33 bp, Homo sapien
acaccattttatataagagatgagcatccatgg

SEQ ID NO: 850057 - DNA, 33 bp, Homo sapien
atttttttctaagtcaaccatgcaaaaatttac

SEQ ID NO: 850058 - DNA, 33 bp, Homo sapien
atttttttctaagtcacccatgcaaaaatttac

SEQ ID NO: 850059 - DNA, 33 bp, Homo sapien
tatttcttaaaagaggacatacctgttgccaac

SEQ ID NO: 850060 - DNA, 33 bp, Homo sapien
tatttcttaaaagaggtcatacctgttgccaac

SEQ ID NO: 850061 - DNA, 33 bp, Homo sapien
ctgtcaaggccgtggacaaaaggaatgcttatg

SEQ ID NO: 850062 - DNA, 33 bp, Homo sapien
ctgtcaaggccgtggagaaaaggaatgcttatg

SEQ ID NO: 850063 - DNA, 33 bp, Homo sapien
catcattcaggtattaagctcagtgcccaatag

SEQ ID NO: 850064 - DNA, 33 bp, Homo sapien
catcattcaggtattacgctcagtgcccaatag

SEQ ID NO: 850065 - DNA, 33 bp, Homo sapien
ctgggaaataagttaacggtaagaatgtactgg

SEQ ID NO: 850066 - DNA, 33 bp, Homo sapien
ctgggaaataagttaatggtaagaatgtactgg

SEQ ID NO: 850067 - DNA, 33 bp, Homo sapien
tatttttgtgtacatacgaaatctgaaagctca

SEQ ID NO: 850068 - DNA, 33 bp, Homo sapien
tatttttgtgtacatatgaaatctgaaagctca

SEQ ID NO: 850069 - DNA, 33 bp, Homo sapien
ggaagagctatggtgacgtttcaaattgaacag

SEQ ID NO: 850070 - DNA, 33 bp, Homo sapien
ggaagagctatggtgatgtttcaaattgaacag

SEQ ID NO: 850071 - DNA, 33 bp, Homo sapien
aggccctgagaaggcacccaatttgtatcctgc

SEQ ID NO: 850072 - DNA, 33 bp, Homo sapien
aggccctgagaaggcatccaatttgtatcctgc

SEQ ID NO: 850073 - DNA, 33 bp, Homo sapien
tctagaattcttttcaacttgcaatactaaaac

SEQ ID NO: 850074 - DNA, 33 bp, Homo sapien
tctagaattcttttcatcttgcaatactaaaac

SEQ ID NO: 850075 - DNA, 33 bp, Homo sapien
aaagctttgagaatcacgcacaaaaaattcagg

SEQ ID NO: 850076 - DNA, 33 bp, Homo sapien
aaagctttgagaatcatgcacaaaaaattcagg

SEQ ID NO: 850077 - DNA, 33 bp, Homo sapien
gcaaagagcataaaaacggactggaagattata

SEQ ID NO: 850078 - DNA, 33 bp, Homo sapien
gcaaagagcataaaaatggactggaagattata

SEQ ID NO: 850079 - DNA, 33 bp, Homo sapien
atgatgtgtcaatgtaagtccattgattgtagc

SEQ ID NO: 850080 - DNA, 33 bp, Homo sapien
atgatgtgtcaatgtaggtccattgattgtagc

SEQ ID NO: 850081 - DNA, 33 bp, Homo sapien
aaagcaaaattgagcacaaagtacggagatttc

SEQ ID NO: 850082 - DNA, 33 bp, Homo sapien
aaagcaaaattgagcagaaagtacggagatttc

SEQ ID NO: 850083 - DNA, 33 bp, Homo sapien
ccgtggatatcctgaagtgtctggggttttttt

SEQ ID NO: 850084 - DNA, 33 bp, Homo sapien
ccgtggatatcctgaattgtctggggttttttt

SEQ ID NO: 850085 - DNA, 33 bp, Homo sapien
ctattctcagagcaagaaaagtcactgattgta

SEQ ID NO: 850086 - DNA, 33 bp, Homo sapien
ctattctcagagcaaggaaagtcactgattgta

SEQ ID NO: 850087 - DNA, 33 bp, Homo sapien
tatgtgtgggtaaaaccaaaatgattgacatgg

SEQ ID NO: 850088 - DNA, 33 bp, Homo sapien
tatgtgtgggtaaaactaaaatgattgacatgg

SEQ ID NO: 850089 - DNA, 33 bp, Homo sapien
tctaacgagtttgacaatgaatcttatgctaat

SEQ ID NO: 850090 - DNA, 33 bp, Homo sapien
tctaacgagtttgacattgaatcttatgctaat

SEQ ID NO: 850091 - DNA, 33 bp, Homo sapien
cttatctaaagtttcacaacaagtagagtccaa

SEQ ID NO: 850092 - DNA, 33 bp, Homo sapien
cttatctaaagtttcagaacaagtagagtccaa

SEQ ID NO: 850093 - DNA, 33 bp, Homo sapien
gttctaggaaataaacacagatgaattataact

SEQ ID NO: 850094 - DNA, 33 bp, Homo sapien
gttctaggaaataaacgcagatgaattataact

SEQ ID NO: 850095 - DNA, 33 bp, Homo sapien
tgatggaattatttacaccttaaaaacaggcaa

SEQ ID NO: 850096 - DNA, 33 bp, Homo sapien
tgatggaattatttacgccttaaaaacaggcaa

SEQ ID NO: 850097 - DNA, 33 bp, Homo sapien
aatctgtaactaggatcagcataatagaatgtc

SEQ ID NO: 850098 - DNA, 33 bp, Homo sapien
aatctgtaactaggatgagcataatagaatgtc

SEQ ID NO: 850099 - DNA, 33 bp, Homo sapien
ccagagtggtcatcaaaaaatctgtaactagga

SEQ ID NO: 850100 - DNA, 33 bp, Homo sapien
ccagagtggtcatcaagaaatctgtaactagga

SEQ ID NO: 850101 - DNA, 33 bp, Homo sapien
atatttgtgactggaacgctagaaagagagatg

SEQ ID NO: 850102 - DNA, 33 bp, Homo sapien
atatttgtgactggaatgctagaaagagagatg

SEQ ID NO: 850103 - DNA, 33 bp, Homo sapien
agtggctgacaacaaaagtatgaggttgaggga

SEQ ID NO: 850104 - DNA, 33 bp, Homo sapien
agtggctgacaacaaaggtatgaggttgaggga

SEQ ID NO: 850105 - DNA, 33 bp, Homo sapien
cccagttctccttctccagaaattctaagtgct

SEQ ID NO: 850106 - DNA, 33 bp, Homo sapien
cccagttctccttctctagaaattctaagtgct

SEQ ID NO: 850107 - DNA, 33 bp, Homo sapien
ataaattcctcttgaacgattagaactcactta

SEQ ID NO: 850108 - DNA, 33 bp, Homo sapien
ataaattcctcttgaatgattagaactcactta

SEQ ID NO: 850109 - DNA, 33 bp, Homo sapien
tttctttatttcattaactgacctgtatttaga

SEQ ID NO: 850110 - DNA, 33 bp, Homo sapien
tttctttatttcattagctgacctgtatttaga

SEQ ID NO: 850111 - DNA, 33 bp, Homo sapien
ctctcaaggtcagccccacaattttaactgaac

SEQ ID NO: 850112 - DNA, 33 bp, Homo sapien
ctctcaaggtcagcccgacaattttaactgaac

SEQ ID NO: 850113 - DNA, 33 bp, Homo sapien
tctagatgagactgacaaaggagaaagcattga

SEQ ID NO: 850114 - DNA, 33 bp, Homo sapien
tctagatgagactgacgaaggagaaagcattga

SEQ ID NO: 850115 - DNA, 33 bp, Homo sapien
ggcaggtctcacttccacattagctattgactt

SEQ ID NO: 850116 - DNA, 33 bp, Homo sapien
ggcaggtctcacttccgcattagctattgactt

SEQ ID NO: 850117 - DNA, 33 bp, Homo sapien
caatagagaactaatacacctctgttccagttt

SEQ ID NO: 850118 - DNA, 33 bp, Homo sapien
caatagagaactaatatacctctgttccagttt

SEQ ID NO: 850119 - DNA, 33 bp, Homo sapien
tctgcccattttcttgaaattcttctacatatt

SEQ ID NO: 850120 - DNA, 33 bp, Homo sapien
tctgcccattttcttgcaattcttctacatatt

SEQ ID NO: 850121 - DNA, 33 bp, Homo sapien
gatctgcaggcatttgaagcacccagtcacctg

SEQ ID NO: 850122 - DNA, 33 bp, Homo sapien
gatctgcaggcatttggagcacccagtcacctg

SEQ ID NO: 850123 - DNA, 33 bp, Homo sapien
gatttcttactattggcaaattatgcagtcact

SEQ ID NO: 850124 - DNA, 33 bp, Homo sapien
gatttcttactattggtaaattatgcagtcact

SEQ ID NO: 850125 - DNA, 33 bp, Homo sapien
agaatagccaagtagacagaaaagagtgagaac

SEQ ID NO: 850126 - DNA, 33 bp, Homo sapien
agaatagccaagtagatagaaaagagtgagaac

SEQ ID NO: 850127 - DNA, 33 bp, Homo sapien
ttaagatttttgtgaaagttaggaagcgttccc

SEQ ID NO: 850128 - DNA, 33 bp, Homo sapien
ttaagatttttgtgaatgttaggaagcgttccc

SEQ ID NO: 850129 - DNA, 33 bp, Homo sapien
tgaatgatatgttaaactctttgtgaaggtgat

SEQ ID NO: 850130 - DNA, 33 bp, Homo sapien
tgaatgatatgttaaattctttgtgaaggtgat

SEQ ID NO: 850131 - DNA, 33 bp, Homo sapien
gacactatcatgaaaggattacaccaatatcaa

SEQ ID NO: 850132 - DNA, 33 bp, Homo sapien
gacactatcatgaaagtattacaccaatatcaa

SEQ ID NO: 850133 - DNA, 33 bp, Homo sapien
attcaggggagggagaacatcaaccagaatagc

SEQ ID NO: 850134 - DNA, 33 bp, Homo sapien
attcaggggagggagagcatcaaccagaatagc

SEQ ID NO: 850135 - DNA, 33 bp, Homo sapien
gacataagattgtagcaataagtaggggtcaga

SEQ ID NO: 850136 - DNA, 33 bp, Homo sapien
gacataagattgtagcgataagtaggggtcaga

SEQ ID NO: 850137 - DNA, 33 bp, Homo sapien
ttcagtatttaaacatgacaagacatgtaacat

SEQ ID NO: 850138 - DNA, 33 bp, Homo sapien
ttcagtatttaaacattacaagacatgtaacat

SEQ ID NO: 850139 - DNA, 33 bp, Homo sapien
catgtgaattatgaagaaaagttatgcaaatgt

SEQ ID NO: 850140 - DNA, 33 bp, Homo sapien
catgtgaattatgaaggaaagttatgcaaatgt

SEQ ID NO: 850141 - DNA, 33 bp, Homo sapien
cattatgaagggaaaaaggaagataacatgtta

SEQ ID NO: 850142 - DNA, 33 bp, Homo sapien
cattatgaagggaaaagggaagataacatgtta

SEQ ID NO: 850143 - DNA, 33 bp, Homo sapien
acatataggatttttacacctgaagccaagaat

SEQ ID NO: 850144 - DNA, 33 bp, Homo sapien
acatataggatttttatacctgaagccaagaat

SEQ ID NO: 850145 - DNA, 33 bp, Homo sapien
cctcacaggatctccaataattccagccagagg

SEQ ID NO: 850146 - DNA, 33 bp, Homo sapien
cctcacaggatctccagtaattccagccagagg

SEQ ID NO: 850147 - DNA, 33 bp, Homo sapien
ttgttcctacagcccaagacaccagctgtggca

SEQ ID NO: 850148 - DNA, 33 bp, Homo sapien
ttgttcctacagcccatgacaccagctgtggca

SEQ ID NO: 850149 - DNA, 33 bp, Homo sapien; identical to SEQ ID NO: 850147

SEQ ID NO: 850150 - DNA, 33 bp, Homo sapien; identical to SEQ ID NO: 850148

SEQ ID NO: 850151 - DNA, 33 bp, Homo sapien
tttatactacccaaaacgatttagatgcaatgc

SEQ ID NO: 850152 - DNA, 33 bp, Homo sapien
tttatactacccaaaatgatttagatgcaatgc

SEQ ID NO: 850153 - DNA, 33 bp, Homo sapien
ctttttgtcttttcgacagtagccattctaact

SEQ ID NO: 850154 - DNA, 33 bp, Homo sapien
ctttttgtcttttcgatagtagccattctaact

SEQ ID NO: 850155 - DNA, 33 bp, Homo sapien
ctttaataagtggtaccgggaaactgaataacc

SEQ ID NO: 850156 - DNA, 33 bp, Homo sapien
ctttaataagtggtactgggaaactgaataacc

SEQ ID NO: 850157 - DNA, 33 bp, Homo sapien
tgtgctttatgtgtaacatctcatgttgtaaag

SEQ ID NO: 850158 - DNA, 33 bp, Homo sapien
tgtgctttatgtgtaatatctcatgttgtaaag

SEQ ID NO: 850159 - DNA, 33 bp, Homo sapien
ggctaaagatacgaataacttccaaaaggaaat

SEQ ID NO: 850160 - DNA, 33 bp, Homo sapien
ggctaaagatacgaatgacttccaaaaggaaat

SEQ ID NO: 850161 - DNA, 33 bp, Homo sapien
acaattatcctaattactaacaggccgttctgt

SEQ ID NO: 850162 - DNA, 33 bp, Homo sapien
acaattatcctaattagtaacaggccgttctgt

SEQ ID NO: 850163 - DNA, 33 bp, Homo sapien
tagaattgtgtgtagcactaaatctatgggaac

SEQ ID NO: 850164 - DNA, 33 bp, Homo sapien
tagaattgtgtgtagcgctaaatctatgggaac

SEQ ID NO: 850165 - DNA, 33 bp, Homo sapien
tttttgtactaaatgcacagtgtgaagtcttta

SEQ ID NO: 850166 - DNA, 33 bp, Homo sapien
tttttgtactaaatgcgcagtgtgaagtcttta

SEQ ID NO: 850167 - DNA, 33 bp, Homo sapien
tagagaaaattaggtacgattcaagttcttggt

SEQ ID NO: 850168 - DNA, 33 bp, Homo sapien
tagagaaaattaggtatgattcaagttcttggt

SEQ ID NO: 850169 - DNA, 33 bp, Homo sapien
taattagcagaaaaaacagcaaaggttaagaat

SEQ ID NO: 850170 - DNA, 33 bp, Homo sapien
taattagcagaaaaaatagcaaaggttaagaat

SEQ ID NO: 850171 - DNA, 33 bp, Homo sapien
cttataactgttaaaactgttgctctgccttat

SEQ ID NO: 850172 - DNA, 33 bp, Homo sapien
cttataactgttaaaattgttgctctgccttat

SEQ ID NO: 850173 - DNA, 33 bp, Homo sapien
ttttgaaatgggaagactaaaattttgaaaatc

SEQ ID NO: 850174 - DNA, 33 bp, Homo sapien
ttttgaaatgggaagattaaaattttgaaaatc

SEQ ID NO: 850175 - DNA, 33 bp, Homo sapien
ctggttaatgcctcaaagaacagctctgaagtt

SEQ ID NO: 850176 - DNA, 33 bp, Homo sapien
ctggttaatgcctcaaggaacagctctgaagtt

SEQ ID NO: 850177 - DNA, 33 bp, Homo sapien
tcaggacataggagcaaggaaagattttatgat

SEQ ID NO: 850178 - DNA, 33 bp, Homo sapien
tcaggacataggagcagggaaagattttatgat

SEQ ID NO: 850179 - DNA, 33 bp, Homo sapien
tctcctgatgtgcagacgcccttaagtttaact

SEQ ID NO: 850180 - DNA, 33 bp, Homo sapien
tctcctgatgtgcagatgcccttaagtttaact

SEQ ID NO: 850181 - DNA, 33 bp, Homo sapien
tggcattacatcgatcgattcaaatggctcatt

SEQ ID NO: 850182 - DNA, 33 bp, Homo sapien
tggcattacatcgatctattcaaatggctcatt

SEQ ID NO: 850183 - DNA, 33 bp, Homo sapien
cagctcacaggctccaatagtttctctaatact

SEQ ID NO: 850184 - DNA, 33 bp, Homo sapien
cagctcacaggctccagtagtttctctaatact

SEQ ID NO: 850185 - DNA, 33 bp, Homo sapien
ttgattgggaaagtgaaaaatgtacatgaaatc

SEQ ID NO: 850186 - DNA, 33 bp, Homo sapien
ttgattgggaaagtgataaatgtacatgaaatc

SEQ ID NO: 850187 - DNA, 33 bp, Homo sapien
ttttcttattcgacaacctaaaaacttaacttt

SEQ ID NO: 850188 - DNA, 33 bp, Homo sapien
ttttcttattcgacaagctaaaaacttaacttt

SEQ ID NO: 850189 - DNA, 33 bp, Homo sapien
attgagttaagaaaagaataattggtgaagaat

SEQ ID NO: 850190 - DNA, 33 bp, Homo sapien
attgagttaagaaaaggataattggtgaagaat

SEQ ID NO: 850191 - DNA, 33 bp, Homo sapien
acataggcaagtcttaacttagtctgcttgctc

SEQ ID NO: 850192 - DNA, 33 bp, Homo sapien
acataggcaagtcttatcttagtctgcttgctc

SEQ ID NO: 850193 - DNA, 33 bp, Homo sapien
tttaatttatcattcaaattacgggctaataga

SEQ ID NO: 850194 - DNA, 33 bp, Homo sapien
tttaatttatcattcagattacgggctaataga

SEQ ID NO: 850195 - DNA, 33 bp, Homo sapien
caatagtaagcaagagaacaatattaacctgga

SEQ ID NO: 850196 - DNA, 33 bp, Homo sapien
caatagtaagcaagaggacaatattaacctgga

SEQ ID NO: 850197 - DNA, 33 bp, Homo sapien
agtatttgtgaacagacctaataaccactataa

SEQ ID NO: 850198 - DNA, 33 bp, Homo sapien
agtatttgtgaacagatctaataaccactataa

SEQ ID NO: 850199 - DNA, 33 bp, Homo sapien
tattctagatattttccccctccaatgatgtat

SEQ ID NO: 850200 - DNA, 33 bp, Homo sapien
tattctagatattttcgccctccaatgatgtat

SEQ ID NO: 850201 - DNA, 33 bp, Homo sapien
gtgcacgtagcagaaacgttaagagcttaggct

SEQ ID NO: 850202 - DNA, 33 bp, Homo sapien
gtgcacgtagcagaaatgttaagagcttaggct

SEQ ID NO: 850203 - DNA, 33 bp, Homo sapien
agtactatttttcctaactagtatgtgaacatt

SEQ ID NO: 850204 - DNA, 33 bp, Homo sapien
agtactatttttcctagctagtatgtgaacatt

SEQ ID NO: 850205 - DNA, 33 bp, Homo sapien
atttatttccacatcactatattgttttcttct

SEQ ID NO: 850206 - DNA, 33 bp, Homo sapien
atttatttccacatcattatattgttttcttct

SEQ ID NO: 850207 - DNA, 33 bp, Homo sapien
tcctccctgtatattacagaccttgccttctaa

SEQ ID NO: 850208 - DNA, 33 bp, Homo sapien
tcctccctgtatattatagaccttgccttctaa

SEQ ID NO: 850209 - DNA, 33 bp, Homo sapien
tggagaagtggataaacttgtgatgtaatttgg

SEQ ID NO: 850210 - DNA, 33 bp, Homo sapien
tggagaagtggataaatttgtgatgtaatttgg

SEQ ID NO: 850211 - DNA, 33 bp, Homo sapien
aaaccttcttaacagacggactactacaagcag

SEQ ID NO: 850212 - DNA, 33 bp, Homo sapien
aaaccttcttaacagatggactactacaagcag

SEQ ID NO: 850213 - DNA, 33 bp, Homo sapien
catcaggctacccatactacaaggctacagtaa

SEQ ID NO: 850214 - DNA, 33 bp, Homo sapien
catcaggctacccatattacaaggctacagtaa

SEQ ID NO: 850215 - DNA, 33 bp, Homo sapien
tgataacactggactcacttagattatctagga

SEQ ID NO: 850216 - DNA, 33 bp, Homo sapien
tgataacactggactcgcttagattatctagga

SEQ ID NO: 850217 - DNA, 33 bp, Homo sapien
atgatccagggataggcagattttgactggtag

SEQ ID NO: 850218 - DNA, 33 bp, Homo sapien
atgatccagggataggtagattttgactggtag

SEQ ID NO: 850219 - DNA, 33 bp, Homo sapien
gaagatggaaataggacggattttattttaata

SEQ ID NO: 850220 - DNA, 33 bp, Homo sapien
gaagatggaaataggatggattttattttaata

SEQ ID NO: 850221 - DNA, 33 bp, Homo sapien
tatggttggaggtagaaatactgctagtgtacc

SEQ ID NO: 850222 - DNA, 33 bp, Homo sapien
tatggttggaggtagagatactgctagtgtacc

SEQ ID NO: 850223 - DNA, 33 bp, Homo sapien
tcttctcctctgcccccatctataactctcagt

SEQ ID NO: 850224 - DNA, 33 bp, Homo sapien
tcttctcctctgcccctatctataactctcagt

SEQ ID NO: 850225 - DNA, 33 bp, Homo sapien
tgaaagcaccctgccaaagaaacaagtggatat

SEQ ID NO: 850226 - DNA, 33 bp, Homo sapien
tgaaagcaccctgccatagaaacaagtggatat

SEQ ID NO: 850227 - DNA, 33 bp, Homo sapien
atgataaagggattacagcaatggaaagccgca

SEQ ID NO: 850228 - DNA, 33 bp, Homo sapien
atgataaagggattacggcaatggaaagccgca

SEQ ID NO: 850229 - DNA, 33 bp, Homo sapien
tcggtagtcaaggagcacctcactgaaaggtaa

SEQ ID NO: 850230 - DNA, 33 bp, Homo sapien
tcggtagtcaaggagcgcctcactgaaaggtaa

SEQ ID NO: 850231 - DNA, 33 bp, Homo sapien
tatggcagcattagcaccattgaaaaattgttg

SEQ ID NO: 850232 - DNA, 33 bp, Homo sapien
tatggcagcattagcatcattgaaaaattgttg

SEQ ID NO: 850233 - DNA, 33 bp, Homo sapien
tggatttcttgtgaaggagagtgagagctaagt

SEQ ID NO: 850234 - DNA, 33 bp, Homo sapien
tggatttcttgtgaagtagagtgagagctaagt

SEQ ID NO: 850235 - DNA, 33 bp, Homo sapien
tatccttagcttatgaactgtataaaaaggagg

SEQ ID NO: 850236 - DNA, 33 bp, Homo sapien
tatccttagcttatgagctgtataaaaaggagg

SEQ ID NO: 850237 - DNA, 33 bp, Homo sapien
ctataagcgagataaaactcttttcactataaa

SEQ ID NO: 850238 - DNA, 33 bp, Homo sapien
ctataagcgagataaacctcttttcactataaa

SEQ ID NO: 850239 - DNA, 33 bp, Homo sapien
caaaaacacttaggcaaagcattccaaggactc

SEQ ID NO: 850240 - DNA, 33 bp, Homo sapien
caaaaacacttaggcagagcattccaaggactc

SEQ ID NO: 850241 - DNA, 33 bp, Homo sapien
ttacagctggccttaaaggatataaacagctgc

SEQ ID NO: 850242 - DNA, 33 bp, Homo sapien
ttacagctggccttaagggatataaacagctgc

SEQ ID NO: 850243 - DNA, 33 bp, Homo sapien
cacagtaacaagtctacagaagtctgctggaat

SEQ ID NO: 850244 - DNA, 33 bp, Homo sapien
cacagtaacaagtctatagaagtctgctggaat

SEQ ID NO: 850245 - DNA, 33 bp, Homo sapien
gacacacaacctgtacacatccttctaagtctc

SEQ ID NO: 850246 - DNA, 33 bp, Homo sapien
gacacacaacctgtacgcatccttctaagtctc

SEQ ID NO: 850247 - DNA, 33 bp, Homo sapien
aacctcactggaattcgcaatccattgcttaag

SEQ ID NO: 850248 - DNA, 33 bp, Homo sapien
aacctcactggaattctcaatccattgcttaag

SEQ ID NO: 850249 - DNA, 33 bp, Homo sapien
gaggagctcaagcagacgaaaagacttatggga

SEQ ID NO: 850250 - DNA, 33 bp, Homo sapien
gaggagctcaagcagaggaaaagacttatggga

SEQ ID NO: 850251 - DNA, 33 bp, Homo sapien
agaaactcagcatccactaagcaataattttct

SEQ ID NO: 850252 - DNA, 33 bp, Homo sapien
agaaactcagcatccattaagcaataattttct

SEQ ID NO: 850253 - DNA, 33 bp, Homo sapien
tattttttccagagcactgatcaccagatgaca

SEQ ID NO: 850254 - DNA, 33 bp, Homo sapien
tattttttccagagcattgatcaccagatgaca

SEQ ID NO: 850255 - DNA, 33 bp, Homo sapien
aaaattgcaattcctaaaatcccaataaatgcc

SEQ ID NO: 850256 - DNA, 33 bp, Homo sapien
aaaattgcaattcctacaatcccaataaatgcc

SEQ ID NO: 850257 - DNA, 33 bp, Homo sapien
acaaaaatattctgcaataatcttacccatctt

SEQ ID NO: 850258 - DNA, 33 bp, Homo sapien
acaaaaatattctgcagtaatcttacccatctt

SEQ ID NO: 850259 - DNA, 33 bp, Homo sapien
gaaagagattcgaagaacctgctggcttgaaga

SEQ ID NO: 850260 - DNA, 33 bp, Homo sapien
gaaagagattcgaagatcctgctggcttgaaga

SEQ ID NO: 850261 - DNA, 33 bp, Homo sapien
atgaacagtatcttgaccattgttctggaagga

SEQ ID NO: 850262 - DNA, 33 bp, Homo sapien
atgaacagtatcttgagcattgttctggaagga

SEQ ID NO: 850263 - DNA, 33 bp, Homo sapien
cattattatttaaaacccctgctgtcataaaat

SEQ ID NO: 850264 - DNA, 33 bp, Homo sapien
cattattatttaaaactcctgctgtcataaaat

SEQ ID NO: 850265 - DNA, 33 bp, Homo sapien
ctaatatgccataatcaagtgagaattcaaaag

SEQ ID NO: 850266 - DNA, 33 bp, Homo sapien
ctaatatgccataatcgagtgagaattcaaaag

SEQ ID NO: 850267 - DNA, 33 bp, Homo sapien
tatgactgactccaccaggactaatgactcata

SEQ ID NO: 850268 - DNA, 33 bp, Homo sapien
tatgactgactccaccgggactaatgactcata

SEQ ID NO: 850269 - DNA, 33 bp, Homo sapien
tcccacatatgtatcaactctctttctctttgt

SEQ ID NO: 850270 - DNA, 33 bp, Homo sapien
tcccacatatgtatcatctctctttctctttgt

SEQ ID NO: 850271 - DNA, 33 bp, Homo sapien
aatccattatattcagacaattatctcccctcc

SEQ ID NO: 850272 - DNA, 33 bp, Homo sapien
aatccattatattcagtcaattatctcccctcc

SEQ ID NO: 850273 - DNA, 33 bp, Homo sapien
caggttattatgtctacgttctgatccactggc

SEQ ID NO: 850274 - DNA, 33 bp, Homo sapien
caggttattatgtctatgttctgatccactggc

SEQ ID NO: 850275 - DNA, 33 bp, Homo sapien
ttaaataaagaaaaacgaactgctattgtcata

SEQ ID NO: 850276 - DNA, 33 bp, Homo sapien
ttaaataaagaaaaactaactgctattgtcata

SEQ ID NO: 850277 - DNA, 33 bp, Homo sapien
acttattttgctcatcaaaaatttgcagataag

SEQ ID NO: 850278 - DNA, 33 bp, Homo sapien
acttattttgctcatcgaaaatttgcagataag

SEQ ID NO: 850279 - DNA, 33 bp, Homo sapien
tatctgagactttaacactgcattattgaatag

SEQ ID NO: 850280 - DNA, 33 bp, Homo sapien
tatctgagactttaactctgcattattgaatag

SEQ ID NO: 850281 - DNA, 33 bp, Homo sapien
acatggtctggattcaccaaaatggcatgaacc

SEQ ID NO: 850282 - DNA, 33 bp, Homo sapien
acatggtctggattcatcaaaatggcatgaacc

SEQ ID NO: 850283 - DNA, 33 bp, Homo sapien
atatggtaggaccttacgtgactgaagctatct

SEQ ID NO: 850284 - DNA, 33 bp, Homo sapien
atatggtaggaccttatgtgactgaagctatct

SEQ ID NO: 850285 - DNA, 33 bp, Homo sapien
cagaggggaaagcacaatagacaaggtcagcct

SEQ ID NO: 850286 - DNA, 33 bp, Homo sapien
cagaggggaaagcacagtagacaaggtcagcct

SEQ ID NO: 850287 - DNA, 33 bp, Homo sapien
caggagacttttaaaactgttcagtctctactt

SEQ ID NO: 850288 - DNA, 33 bp, Homo sapien
caggagacttttaaaattgttcagtctctactt

SEQ ID NO: 850289 - DNA, 33 bp, Homo sapien
cttgctacattttcacggactcatcagctgttg

SEQ ID NO: 850290 - DNA, 33 bp, Homo sapien
cttgctacattttcactgactcatcagctgttg

SEQ ID NO: 850291 - DNA, 33 bp, Homo sapien
tctttgttcatgcgtacgagaataggttgctag

SEQ ID NO: 850292 - DNA, 33 bp, Homo sapien
tctttgttcatgcgtatgagaataggttgctag

SEQ ID NO: 850293 - DNA, 33 bp, Homo sapien
aaaagatgaccaattcacattctttttcttaaa

SEQ ID NO: 850294 - DNA, 33 bp, Homo sapien
aaaagatgaccaattcgcattctttttcttaaa

SEQ ID NO: 850295 - DNA, 33 bp, Homo sapien
cctatatgcaccattcaccatatctaagaccat

SEQ ID NO: 850296 - DNA, 33 bp, Homo sapien
cctatatgcaccattcgccatatctaagaccat

SEQ ID NO: 850297 - DNA, 33 bp, Homo sapien
tcatgagagaattaccacttttacctgtcccat

SEQ ID NO: 850298 - DNA, 33 bp, Homo sapien
tcatgagagaattacctcttttacctgtcccat

SEQ ID NO: 850299 - DNA, 33 bp, Homo sapien
gcatcacctgcaacaacggagattacatttcaa

SEQ ID NO: 850300 - DNA, 33 bp, Homo sapien
gcatcacctgcaacaatggagattacatttcaa

SEQ ID NO: 850301 - DNA, 33 bp, Homo sapien
taatatgacaaaacaaagtaatttaacatgcac

SEQ ID NO: 850302 - DNA, 33 bp, Homo sapien
taatatgacaaaacaaggtaatttaacatgcac

SEQ ID NO: 850303 - DNA, 33 bp, Homo sapien
ggtacaattggaaccacggcacattttacaaaa

SEQ ID NO: 850304 - DNA, 33 bp, Homo sapien
ggtacaattggaaccatggcacattttacaaaa

SEQ ID NO: 850305 - DNA, 33 bp, Homo sapien
aacatcaaaagtaacacctgaaagagttgccag

SEQ ID NO: 850306 - DNA, 33 bp, Homo sapien
aacatcaaaagtaacagctgaaagagttgccag

SEQ ID NO: 850307 - DNA, 33 bp, Homo sapien
ctcttctcaaattagcaatcttttgtgtgcaat

SEQ ID NO: 850308 - DNA, 33 bp, Homo sapien
ctcttctcaaattagctatcttttgtgtgcaat

SEQ ID NO: 850309 - DNA, 33 bp, Homo sapien
ctcttattaatatgaagagattgttgcctacca

SEQ ID NO: 850310 - DNA, 33 bp, Homo sapien
ctcttattaatatgaatagattgttgcctacca

SEQ ID NO: 850311 - DNA, 33 bp, Homo sapien
tgccttcttataaatgaatcacactggtctgac

SEQ ID NO: 850312 - DNA, 33 bp, Homo sapien
tgccttcttataaatggatcacactggtctgac

SEQ ID NO: 850313 - DNA, 33 bp, Homo sapien
gtagtatctttcactcaatgttaggtttatatg

SEQ ID NO: 850314 - DNA, 33 bp, Homo sapien
gtagtatctttcactcgatgttaggtttatatg

SEQ ID NO: 850315 - DNA, 33 bp, Homo sapien
agacatgatcacgttcccttttatggttgcata

SEQ ID NO: 850316 - DNA, 33 bp, Homo sapien
agacatgatcacgttctcttttatggttgcata

SEQ ID NO: 850317 - DNA, 33 bp, Homo sapien; identical to SEQ ID NO: 850315

SEQ ID NO: 850318 - DNA, 33 bp, Homo sapien; identical to SEQ ID NO: 850316

SEQ ID NO: 850319 - DNA, 33 bp, Homo sapien
tataatactgtaacccggacactagttgggctg

SEQ ID NO: 850320 - DNA, 33 bp, Homo sapien
tataatactgtaaccctgacactagttgggctg

SEQ ID NO: 850321 - DNA, 33 bp, Homo sapien
gtatatgaaggtacaacggcataataaagactg

SEQ ID NO: 850322 - DNA, 33 bp, Homo sapien
gtatatgaaggtacaatggcataataaagactg

SEQ ID NO: 850323 - DNA, 33 bp, Homo sapien
caagagaagatcacgacgtttccaagtcaatgg

SEQ ID NO: 850324 - DNA, 33 bp, Homo sapien
caagagaagatcacgatgtttccaagtcaatgg

SEQ ID NO: 850325 - DNA, 33 bp, Homo sapien
caacttgtcctactgcaaaggaggttcatttat

SEQ ID NO: 850326 - DNA, 33 bp, Homo sapien
caacttgtcctactgcgaaggaggttcatttat

SEQ ID NO: 850327 - DNA, 33 bp, Homo sapien
tttgagaaaacaaagacaaagtgtttgaaggct

SEQ ID NO: 850328 - DNA, 33 bp, Homo sapien
tttgagaaaacaaagataaagtgtttgaaggct

SEQ ID NO: 850329 - DNA, 33 bp, Homo sapien
ggagtaggtttgttaacggtttggataggaagc

SEQ ID NO: 850330 - DNA, 33 bp, Homo sapien
ggagtaggtttgttaatggtttggataggaagc

SEQ ID NO: 850331 - DNA, 33 bp, Homo sapien
aatgagagggcagctgaaaggttattgccaagt

SEQ ID NO: 850332 - DNA, 33 bp, Homo sapien
aatgagagggcagctgtaaggttattgccaagt

SEQ ID NO: 850333 - DNA, 33 bp, Homo sapien
agtcccactgaaccaactcacttttaagtacca

SEQ ID NO: 850334 - DNA, 33 bp, Homo sapien
agtcccactgaaccaagtcacttttaagtacca

SEQ ID NO: 850335 - DNA, 33 bp, Homo sapien
tgctttctgcaattccactcaagcattccttct

SEQ ID NO: 850336 - DNA, 33 bp, Homo sapien
tgctttctgcaattccgctcaagcattccttct

SEQ ID NO: 850337 - DNA, 33 bp, Homo sapien
atggtgaaaggacagacggtgtcatttgggaag

SEQ ID NO: 850338 - DNA, 33 bp, Homo sapien
atggtgaaaggacagatggtgtcatttgggaag

SEQ ID NO: 850339 - DNA, 33 bp, Homo sapien
atgtaaattaggcagactcgaccttgtttgaag

SEQ ID NO: 850340 - DNA, 33 bp, Homo sapien
atgtaaattaggcagattcgaccttgtttgaag

SEQ ID NO: 850341 - DNA, 33 bp, Homo sapien
agggttttgaacagacagatccatgacccatgg

SEQ ID NO: 850342 - DNA, 33 bp, Homo sapien
agggttttgaacagactgatccatgacccatgg

SEQ ID NO: 850343 - DNA, 33 bp, Homo sapien
atgatattttaaaacccacaactaatcacatgt

SEQ ID NO: 850344 - DNA, 33 bp, Homo sapien
atgatattttaaaacctacaactaatcacatgt

SEQ ID NO: 850345 - DNA, 33 bp, Homo sapien
cagatattcaatggacccatggtgaaaggagaa

SEQ ID NO: 850346 - DNA, 33 bp, Homo sapien
cagatattcaatggactcatggtgaaaggagaa

SEQ ID NO: 850347 - DNA, 33 bp, Homo sapien
aactaatggtgaccaacgacaacactatgtgaa

SEQ ID NO: 850348 - DNA, 33 bp, Homo sapien
aactaatggtgaccaatgacaacactatgtgaa

SEQ ID NO: 850349 - DNA, 33 bp, Homo sapien
agagaaatgaagaaagcctggtttaggatacca

SEQ ID NO: 850350 - DNA, 33 bp, Homo sapien
agagaaatgaagaaaggctggtttaggatacca

SEQ ID NO: 850351 - DNA, 33 bp, Homo sapien
aagagcaggacagatgaacatccaggagataga

SEQ ID NO: 850352 - DNA, 33 bp, Homo sapien
aagagcaggacagatggacatccaggagataga

SEQ ID NO: 850353 - DNA, 33 bp, Homo sapien
ttgagtgtaggccacacagtccttgttgatttg

SEQ ID NO: 850354 - DNA, 33 bp, Homo sapien
ttgagtgtaggccacagagtccttgttgatttg

SEQ ID NO: 850355 - DNA, 33 bp, Homo sapien
gatttgatttattttgaaaagtctggacaatat

SEQ ID NO: 850356 - DNA, 33 bp, Homo sapien
gatttgatttattttgtaaagtctggacaatat

SEQ ID NO: 850357 - DNA, 33 bp, Homo sapien
cagcaatttgggaagacaagatggcagatcaca

SEQ ID NO: 850358 - DNA, 33 bp, Homo sapien
cagcaatttgggaagagaagatggcagatcaca

SEQ ID NO: 850359 - DNA, 33 bp, Homo sapien
tcaatcttaaagttcacgtggaatctcaggaaa

SEQ ID NO: 850360 - DNA, 33 bp, Homo sapien
tcaatcttaaagttcatgtggaatctcaggaaa

SEQ ID NO: 850361 - DNA, 33 bp, Homo sapien
taactcaaaattgaacaaaaacctaaatgtaag

SEQ ID NO: 850362 - DNA, 33 bp, Homo sapien
taactcaaaattgaacgaaaacctaaatgtaag

SEQ ID NO: 850363 - DNA, 33 bp, Homo sapien
cttctatgagttgttacaaatttggcccttaca

SEQ ID NO: 850364 - DNA, 33 bp, Homo sapien
cttctatgagttgttataaatttggcccttaca

SEQ ID NO: 850365 - DNA, 33 bp, Homo sapien
catagaaaactgttaccagggatgggtattgct

SEQ ID NO: 850366 - DNA, 33 bp, Homo sapien
catagaaaactgttactagggatgggtattgct

SEQ ID NO: 850367 - DNA, 33 bp, Homo sapien
tgctattgtgttaggaatacctttagcactatg

SEQ ID NO: 850368 - DNA, 33 bp, Homo sapien
tgctattgtgttaggagtacctttagcactatg

SEQ ID NO: 850369 - DNA, 33 bp, Homo sapien
ctaagtaaggtctgtgaatattttatatcagta

SEQ ID NO: 850370 - DNA, 33 bp, Homo sapien
ctaagtaaggtctgtgcatattttatatcagta

SEQ ID NO: 850371 - DNA, 33 bp, Homo sapien
gaactgagcagattataaaaaaactttagccta

SEQ ID NO: 850372 - DNA, 33 bp, Homo sapien
gaactgagcagattatgaaaaaactttagccta

SEQ ID NO: 850373 - DNA, 33 bp, Homo sapien
aaaaaaactattctaacgtgcatatgtaaccaa

SEQ ID NO: 850374 - DNA, 33 bp, Homo sapien
aaaaaaactattctaatgtgcatatgtaaccaa

SEQ ID NO: 850375 - DNA, 33 bp, Homo sapien
aattttgttcacagcactcctataacttcacgt

SEQ ID NO: 850376 - DNA, 33 bp, Homo sapien
aattttgttcacagcattcctataacttcacgt

SEQ ID NO: 850377 - DNA, 33 bp, Homo sapien
ccagcaacccaagccaataacagtggcagcaca

SEQ ID NO: 850378 - DNA, 33 bp, Homo sapien
ccagcaacccaagccagtaacagtggcagcaca

SEQ ID NO: 850379 - DNA, 33 bp, Homo sapien
ataactccatttatgcaaaatttctagtatagc

SEQ ID NO: 850380 - DNA, 33 bp, Homo sapien
ataactccatttatgcgaaatttctagtatagc

SEQ ID NO: 850381 - DNA, 33 bp, Homo sapien
aggttacatcatgtcggaaattatgttgttgcc

SEQ ID NO: 850382 - DNA, 33 bp, Homo sapien
aggttacatcatgtcgtaaattatgttgttgcc

SEQ ID NO: 850383 - DNA, 33 bp, Homo sapien
aaagatgtttttaaaggctgcaggctgtttggg

SEQ ID NO: 850384 - DNA, 33 bp, Homo sapien
aaagatgtttttaaagtctgcaggctgtttggg

SEQ ID NO: 850385 - DNA, 33 bp, Homo sapien
acatttcattctgacaaattagctttgaataaa

SEQ ID NO: 850386 - DNA, 33 bp, Homo sapien
acatttcattctgacagattagctttgaataaa

SEQ ID NO: 850387 - DNA, 33 bp, Homo sapien
gtgaattcaggtgcaaactattgtcattatctt

SEQ ID NO: 850388 - DNA, 33 bp, Homo sapien
gtgaattcaggtgcaagctattgtcattatctt

SEQ ID NO: 850389 - DNA, 33 bp, Homo sapien
tgagggaaccctagaacctcgtgaagatcttga

SEQ ID NO: 850390 - DNA, 33 bp, Homo sapien
tgagggaaccctagaatctcgtgaagatcttga

SEQ ID NO: 850391 - DNA, 33 bp, Homo sapien
actccattttctcatacggttgactcccctcat

SEQ ID NO: 850392 - DNA, 33 bp, Homo sapien
actccattttctcatatggttgactcccctcat

SEQ ID NO: 850393 - DNA, 33 bp, Homo sapien
aaatgtaccccaaataccttgctcacattcatc

SEQ ID NO: 850394 - DNA, 33 bp, Homo sapien
aaatgtaccccaaatatcttgctcacattcatc

SEQ ID NO: 850395 - DNA, 33 bp, Homo sapien
acggttcaccttagtacctacaaatgtacccca

SEQ ID NO: 850396 - DNA, 33 bp, Homo sapien
acggttcaccttagtatctacaaatgtacccca

SEQ ID NO: 850397 - DNA, 33 bp, Homo sapien
tgctgtcaggatacagacatatgaatcatccac

SEQ ID NO: 850398 - DNA, 33 bp, Homo sapien
tgctgtcaggatacaggcatatgaatcatccac

SEQ ID NO: 850399 - DNA, 33 bp, Homo sapien
ttctgtcttctttcccagctctgtaatgattag

SEQ ID NO: 850400 - DNA, 33 bp, Homo sapien
ttctgtcttctttcccggctctgtaatgattag

SEQ ID NO: 850401 - DNA, 33 bp, Homo sapien
tgactatttgaattgacatgacaggatccactt

SEQ ID NO: 850402 - DNA, 33 bp, Homo sapien
tgactatttgaattgatatgacaggatccactt

SEQ ID NO: 850403 - DNA, 33 bp, Homo sapien
gctctgtcaaaagagacagaaaaagatgtgaca

SEQ ID NO: 850404 - DNA, 33 bp, Homo sapien
gctctgtcaaaagagagagaaaaagatgtgaca

SEQ ID NO: 850405 - DNA, 33 bp, Homo sapien
tgaagcatccaaatccaagagaggaaaggccgt

SEQ ID NO: 850406 - DNA, 33 bp, Homo sapien
tgaagcatccaaatccgagagaggaaaggccgt

SEQ ID NO: 850407 - DNA, 33 bp, Homo sapien
gaaggcagtgtgttaccataagaaagctgtgaa

SEQ ID NO: 850408 - DNA, 33 bp, Homo sapien
gaaggcagtgtgttactataagaaagctgtgaa

SEQ ID NO: 850409 - DNA, 33 bp, Homo sapien
aatatttactaaaaaccaatgttgcttcagaca

SEQ ID NO: 850410 - DNA, 33 bp, Homo sapien
aatatttactaaaaactaatgttgcttcagaca

SEQ ID NO: 850411 - DNA, 33 bp, Homo sapien
tgtcacaatctgatgaagtagaatggcagggag

SEQ ID NO: 850412 - DNA, 33 bp, Homo sapien
tgtcacaatctgatgacgtagaatggcagggag

SEQ ID NO: 850413 - DNA, 33 bp, Homo sapien
agacagtatggtactaacataagactagacatg

SEQ ID NO: 850414 - DNA, 33 bp, Homo sapien
agacagtatggtactagcataagactagacatg

SEQ ID NO: 850415 - DNA, 33 bp, Homo sapien
tgtgtgtagacatagaccaataacagaagtgaa

SEQ ID NO: 850416 - DNA, 33 bp, Homo sapien
tgtgtgtagacatagatcaataacagaagtgaa

SEQ ID NO: 850417 - DNA, 33 bp, Homo sapien
gtttttcttacatagcgctttcacttctttggt

SEQ ID NO: 850418 - DNA, 33 bp, Homo sapien
gtttttcttacatagctctttcacttctttggt

SEQ ID NO: 850419 - DNA, 33 bp, Homo sapien
tactgcgaacaaggccaactttgcatatctaaa

SEQ ID NO: 850420 - DNA, 33 bp, Homo sapien
tactgcgaacaaggccgactttgcatatctaaa

SEQ ID NO: 850421 - DNA, 33 bp, Homo sapien
gtggagcccatgaggaagaacacgacgcacgta

SEQ ID NO: 850422 - DNA, 33 bp, Homo sapien
gtggagcccatgaggaggaacacgacgcacgta

SEQ ID NO: 850423 - DNA, 33 bp, Homo sapien
atctagagggaatccaccatttaggacagaaaa

SEQ ID NO: 850424 - DNA, 33 bp, Homo sapien
atctagagggaatccatcatttaggacagaaaa

SEQ ID NO: 850425 - DNA, 33 bp, Homo sapien
ggggttggtcttaaacggaagcaaatccagtgt

SEQ ID NO: 850426 - DNA, 33 bp, Homo sapien
ggggttggtcttaaactgaagcaaatccagtgt

SEQ ID NO: 850427 - DNA, 33 bp, Homo sapien
gaccgcatagacaagagtatgatgccagttttc

SEQ ID NO: 850428 - DNA, 33 bp, Homo sapien
gaccgcatagacaagattatgatgccagttttc

SEQ ID NO: 850429 - DNA, 33 bp, Homo sapien
ttaggactgggctcaaagaaagggaaaccagaa

SEQ ID NO: 850430 - DNA, 33 bp, Homo sapien
ttaggactgggctcaaggaaagggaaaccagaa

SEQ ID NO: 850431 - DNA, 33 bp, Homo sapien
agcacttagctaagcactgaatcttgccagaga

SEQ ID NO: 850432 - DNA, 33 bp, Homo sapien
agcacttagctaagcattgaatcttgccagaga

SEQ ID NO: 850433 - DNA, 33 bp, Homo sapien
aaaatatgagtatgtacgcttaggagcattgaa

SEQ ID NO: 850434 - DNA, 33 bp, Homo sapien
aaaatatgagtatgtaggcttaggagcattgaa

SEQ ID NO: 850435 - DNA, 33 bp, Homo sapien
ttaggtgttgctctggaaattgttgggctgcaa

SEQ ID NO: 850436 - DNA, 33 bp, Homo sapien
ttaggtgttgctctggtaattgttgggctgcaa

SEQ ID NO: 850437 - DNA, 33 bp, Homo sapien
tactataaaagtgctgaatagcttgctaggagg

SEQ ID NO: 850438 - DNA, 33 bp, Homo sapien
tactataaaagtgctgcatagcttgctaggagg

SEQ ID NO: 850439 - DNA, 33 bp, Homo sapien
agcgggttttcagaaaaagtggatggagaatac

SEQ ID NO: 850440 - DNA, 33 bp, Homo sapien
agcgggttttcagaaacagtggatggagaatac

SEQ ID NO: 850441 - DNA, 33 bp, Homo sapien
ctgagttcagaaatgacggtgcctttttcacca

SEQ ID NO: 850442 - DNA, 33 bp, Homo sapien
ctgagttcagaaatgatggtgcctttttcacca

SEQ ID NO: 850443 - DNA, 33 bp, Homo sapien
catcctttctcacgccactgattctggatctga

SEQ ID NO: 850444 - DNA, 33 bp, Homo sapien
catcctttctcacgccgctgattctggatctga

SEQ ID NO: 850445 - DNA, 33 bp, Homo sapien
ttcataagagctgacaaataacacaggcttcct

SEQ ID NO: 850446 - DNA, 33 bp, Homo sapien
ttcataagagctgacagataacacaggcttcct

SEQ ID NO: 850447 - DNA, 33 bp, Homo sapien
aatttcacagaaacaccgtaaggtattatagga

SEQ ID NO: 850448 - DNA, 33 bp, Homo sapien
aatttcacagaaacactgtaaggtattatagga

SEQ ID NO: 850449 - DNA, 33 bp, Homo sapien
acgaatcctggtgcacaatagcccatgcgggtt

SEQ ID NO: 850450 - DNA, 33 bp, Homo sapien
acgaatcctggtgcacgatagcccatgcgggtt

SEQ ID NO: 850451 - DNA, 33 bp, Homo sapien
attctgttaaatactgccagatttattttttta

SEQ ID NO: 850452 - DNA, 33 bp, Homo sapien
attctgttaaatactgtcagatttattttttta

SEQ ID NO: 850453 - DNA, 33 bp, Homo sapien
ccaccaaagtagagtacatgtgatggtaaatac

SEQ ID NO: 850454 - DNA, 33 bp, Homo sapien
ccaccaaagtagagtagatgtgatggtaaatac

SEQ ID NO: 850455 - DNA, 33 bp, Homo sapien
gtgacattcaggctacaggatattaaataggta

SEQ ID NO: 850456 - DNA, 33 bp, Homo sapien
gtgacattcaggctacgggatattaaataggta

SEQ ID NO: 850457 - DNA, 33 bp, Homo sapien
gtagcagaggtaatcacacaaagacaagccaca

SEQ ID NO: 850458 - DNA, 33 bp, Homo sapien
gtagcagaggtaatcatacaaagacaagccaca

SEQ ID NO: 850459 - DNA, 33 bp, Homo sapien
ccaacagccacaaaagccttaacgaattcaagc

SEQ ID NO: 850460 - DNA, 33 bp, Homo sapien
ccaacagccacaaaagtcttaacgaattcaagc

SEQ ID NO: 850461 - DNA, 33 bp, Homo sapien
ttcttgagaaatgaacagaaggtaaatgaggtg

SEQ ID NO: 850462 - DNA, 33 bp, Homo sapien
ttcttgagaaatgaacggaaggtaaatgaggtg

SEQ ID NO: 850463 - DNA, 33 bp, Homo sapien
ttctcaagaatactaagtagctcttcatcttac

SEQ ID NO: 850464 - DNA, 33 bp, Homo sapien
ttctcaagaatactaattagctcttcatcttac

SEQ ID NO: 850465 - DNA, 33 bp, Homo sapien
aatacataaatcgttaaccttttgttattgtat

SEQ ID NO: 850466 - DNA, 33 bp, Homo sapien
aatacataaatcgttagccttttgttattgtat

SEQ ID NO: 850467 - DNA, 33 bp, Homo sapien
cacatatttctcttaaaatccccagatagctac

SEQ ID NO: 850468 - DNA, 33 bp, Homo sapien
cacatatttctcttaacatccccagatagctac

SEQ ID NO: 850469 - DNA, 33 bp, Homo sapien
gggaaagaaagataaaagaggcaaactcaaaac

SEQ ID NO: 850470 - DNA, 33 bp, Homo sapien
gggaaagaaagataaatgaggcaaactcaaaac

SEQ ID NO: 850471 - DNA, 33 bp, Homo sapien
aggaacctctagaaataagacttggcataggta

SEQ ID NO: 850472 - DNA, 33 bp, Homo sapien
aggaacctctagaaatgagacttggcataggta

SEQ ID NO: 850473 - DNA, 33 bp, Homo sapien
tttaaatggacaactaactataattgactatag

SEQ ID NO: 850474 - DNA, 33 bp, Homo sapien
tttaaatggacaactatctataattgactatag

SEQ ID NO: 850475 - DNA, 33 bp, Homo sapien
tacagatcttatataccaaaaggccaagcttga

SEQ ID NO: 850476 - DNA, 33 bp, Homo sapien
tacagatcttatatactaaaaggccaagcttga

SEQ ID NO: 850477 - DNA, 33 bp, Homo sapien
agtggcttacctgtgtaaaggaagtggtagcaa

SEQ ID NO: 850478 - DNA, 33 bp, Homo sapien
agtggcttacctgtgttaaggaagtggtagcaa

SEQ ID NO: 850479 - DNA, 33 bp, Homo sapien
tctctccaagtgattcgcaaaattgccatgacc

SEQ ID NO: 850480 - DNA, 33 bp, Homo sapien
tctctccaagtgattctcaaaattgccatgacc

SEQ ID NO: 850481 - DNA, 33 bp, Homo sapien
gcttgtctatcattacagaaagataaagtatgt

SEQ ID NO: 850482 - DNA, 33 bp, Homo sapien
gcttgtctatcattacggaaagataaagtatgt

SEQ ID NO: 850483 - DNA, 33 bp, Homo sapien
tttgtgttttcactaacgtctattattctcaaa

SEQ ID NO: 850484 - DNA, 33 bp, Homo sapien
tttgtgttttcactaatgtctattattctcaaa

SEQ ID NO: 850485 - DNA, 33 bp, Homo sapien
taatcatggtcaaacaccaagttctagaggcca

SEQ ID NO: 850486 - DNA, 33 bp, Homo sapien
taatcatggtcaaacagcaagttctagaggcca

SEQ ID NO: 850487 - DNA, 33 bp, Homo sapien
gacaaacagcaaagcaatcacttgttaatgttg

SEQ ID NO: 850488 - DNA, 33 bp, Homo sapien
gacaaacagcaaagcagtcacttgttaatgttg

SEQ ID NO: 850489 - DNA, 33 bp, Homo sapien
taccaatttcaataaactaccacttggatctgt

SEQ ID NO: 850490 - DNA, 33 bp, Homo sapien
taccaatttcaataaagtaccacttggatctgt

SEQ ID NO: 850491 - DNA, 33 bp, Homo sapien
ttaattgacattttgcacaaaagcacagaacgg

SEQ ID NO: 850492 - DNA, 33 bp, Homo sapien
ttaattgacattttgcccaaaagcacagaacgg

SEQ ID NO: 850493 - DNA, 33 bp, Homo sapien
gccttatgtaactaaacccaatagcaaacacag

SEQ ID NO: 850494 - DNA, 33 bp, Homo sapien
gccttatgtaactaaatccaatagcaaacacag

SEQ ID NO: 850495 - DNA, 33 bp, Homo sapien
actggagaagtatagaaaaaggatggcaaactc

SEQ ID NO: 850496 - DNA, 33 bp, Homo sapien
actggagaagtatagagaaaggatggcaaactc

SEQ ID NO: 850497 - DNA, 33 bp, Homo sapien
ttttttatcacttgcaaccataggaataagaat

SEQ ID NO: 850498 - DNA, 33 bp, Homo sapien
ttttttatcacttgcagccataggaataagaat

SEQ ID NO: 850499 - DNA, 33 bp, Homo sapien
gaaagacttgcagtaacaatctgtatagtacat

SEQ ID NO: 850500 - DNA, 33 bp, Homo sapien
gaaagacttgcagtaataatctgtatagtacat

SEQ ID NO: 850501 - DNA, 33 bp, Homo sapien
cagctttattctggaagtacagtcctcttcagg

SEQ ID NO: 850502 - DNA, 33 bp, Homo sapien
cagctttattctggaattacagtcctcttcagg

SEQ ID NO: 850503 - DNA, 33 bp, Homo sapien
cataccctggtatttgaagatagctaaaatttt

SEQ ID NO: 850504 - DNA, 33 bp, Homo sapien
cataccctggtatttgcagatagctaaaatttt

SEQ ID NO: 850505 - DNA, 33 bp, Homo sapien
aagacaacaaatgccccagtttgtggaagaaaa

SEQ ID NO: 850506 - DNA, 33 bp, Homo sapien
aagacaacaaatgccctagtttgtggaagaaaa

SEQ ID NO: 850507 - DNA, 33 bp, Homo sapien
atctggagatggagataaatatgatgtgatgca

SEQ ID NO: 850508 - DNA, 33 bp, Homo sapien
atctggagatggagatgaatatgatgtgatgca

SEQ ID NO: 850509 - DNA, 33 bp, Homo sapien
tttgacttgagagttgcaaaagaactgggtgtg

SEQ ID NO: 850510 - DNA, 33 bp, Homo sapien
tttgacttgagagttgtaaaagaactgggtgtg

SEQ ID NO: 850511 - DNA, 33 bp, Homo sapien
cttcatagcaaaatcacgtgttaagaaaagtgc

SEQ ID NO: 850512 - DNA, 33 bp, Homo sapien
cttcatagcaaaatcatgtgttaagaaaagtgc

SEQ ID NO: 850513 - DNA, 33 bp, Homo sapien
ggtggtaaaggtgccacagtcaataagacaaat

SEQ ID NO: 850514 - DNA, 33 bp, Homo sapien
ggtggtaaaggtgccatagtcaataagacaaat

SEQ ID NO: 850515 - DNA, 33 bp, Homo sapien
agagacaattttgaacaaatgtggtgaaattat

SEQ ID NO: 850516 - DNA, 33 bp, Homo sapien
agagacaattttgaactaatgtggtgaaattat

SEQ ID NO: 850517 - DNA, 33 bp, Homo sapien
gactatgagtgaataactattgagaggatgcca

SEQ ID NO: 850518 - DNA, 33 bp, Homo sapien
gactatgagtgaataagtattgagaggatgcca

SEQ ID NO: 850519 - DNA, 33 bp, Homo sapien
cttccaatccattttacactgtgttgccagatt

SEQ ID NO: 850520 - DNA, 33 bp, Homo sapien
cttccaatccattttatactgtgttgccagatt

SEQ ID NO: 850521 - DNA, 33 bp, Homo sapien
gaaaactaggaatcagaaacattaatctggcaa

SEQ ID NO: 850522 - DNA, 33 bp, Homo sapien
gaaaactaggaatcaggaacattaatctggcaa

SEQ ID NO: 850523 - DNA, 33 bp, Homo sapien
gaggtctcatacagcaagaataggagggaggac

SEQ ID NO: 850524 - DNA, 33 bp, Homo sapien
gaggtctcatacagcaggaataggagggaggac

SEQ ID NO: 850525 - DNA, 33 bp, Homo sapien
ttgacaagattgaaataatagtgaataaatata

SEQ ID NO: 850526 - DNA, 33 bp, Homo sapien
ttgacaagattgaaatgatagtgaataaatata

SEQ ID NO: 850527 - DNA, 33 bp, Homo sapien
tgcttaatgtctttcaaaatgaatacaagaaaa

SEQ ID NO: 850528 - DNA, 33 bp, Homo sapien
tgcttaatgtctttcagaatgaatacaagaaaa

SEQ ID NO: 850529 - DNA, 33 bp, Homo sapien
taacagctttggtgaggatgaaatgggcttttg

SEQ ID NO: 850530 - DNA, 33 bp, Homo sapien
taacagctttggtgagtatgaaatgggcttttg

SEQ ID NO: 850531 - DNA, 33 bp, Homo sapien
gtggacaataactcaaaatgactatcagagcaa

SEQ ID NO: 850532 - DNA, 33 bp, Homo sapien
gtggacaataactcaagatgactatcagagcaa

SEQ ID NO: 850533 - DNA, 33 bp, Homo sapien
cccttatttctttttcacagaaactcaaaccaa

SEQ ID NO: 850534 - DNA, 33 bp, Homo sapien
cccttatttctttttcgcagaaactcaaaccaa

SEQ ID NO: 850535 - DNA, 33 bp, Homo sapien
gggctcatattactaaatgcagcatgagctgga

SEQ ID NO: 850536 - DNA, 33 bp, Homo sapien
gggctcatattactaagtgcagcatgagctgga

SEQ ID NO: 850537 - DNA, 33 bp, Homo sapien
aatactgttgcattcacagacaaagtgatgtta

SEQ ID NO: 850538 - DNA, 33 bp, Homo sapien
aatactgttgcattcatagacaaagtgatgtta

SEQ ID NO: 850539 - DNA, 33 bp, Homo sapien
ttaaattgtaaggatacgctaggaagacagttt

SEQ ID NO: 850540 - DNA, 33 bp, Homo sapien
ttaaattgtaaggatatgctaggaagacagttt

SEQ ID NO: 850541 - DNA, 33 bp, Homo sapien
atgtgaaacacatcgcaaaagttagagaaacag

SEQ ID NO: 850542 - DNA, 33 bp, Homo sapien
atgtgaaacacatcgccaaagttagagaaacag

SEQ ID NO: 850543 - DNA, 33 bp, Homo sapien
aagctggacagtctaaaagtaggagcagagaaa

SEQ ID NO: 850544 - DNA, 33 bp, Homo sapien
aagctggacagtctaacagtaggagcagagaaa

SEQ ID NO: 850545 - DNA, 33 bp, Homo sapien
ctcctaatgctatccaagtatctgttgaaaaat

SEQ ID NO: 850546 - DNA, 33 bp, Homo sapien
ctcctaatgctatccacgtatctgttgaaaaat

SEQ ID NO: 850547 - DNA, 33 bp, Homo sapien
aatggatcacataaaacgagaaaacgagtgaga

SEQ ID NO: 850548 - DNA, 33 bp, Homo sapien
aatggatcacataaaatgagaaaacgagtgaga

SEQ ID NO: 850549 - DNA, 33 bp, Homo sapien
gatctcctgtgtatgtcaaccaagtcaaagtgc

SEQ ID NO: 850550 - DNA, 33 bp, Homo sapien
gatctcctgtgtatgtgaaccaagtcaaagtgc

SEQ ID NO: 850551 - DNA, 33 bp, Homo sapien
aaaagctccaggaaagaacaaggtattttcagc

SEQ ID NO: 850552 - DNA, 33 bp, Homo sapien
aaaagctccaggaaaggacaaggtattttcagc

SEQ ID NO: 850553 - DNA, 33 bp, Homo sapien
agaatgagctggactaagttaggaaagactcca

SEQ ID NO: 850554 - DNA, 33 bp, Homo sapien
agaatgagctggactaggttaggaaagactcca

SEQ ID NO: 850555 - DNA, 33 bp, Homo sapien
actctaaaacaatgaactaggacacatttttcc

SEQ ID NO: 850556 - DNA, 33 bp, Homo sapien
actctaaaacaatgaattaggacacatttttcc

SEQ ID NO: 850557 - DNA, 33 bp, Homo sapien
cataaagatcttcagaatagcaatgatgtattt

SEQ ID NO: 850558 - DNA, 33 bp, Homo sapien
cataaagatcttcagactagcaatgatgtattt

SEQ ID NO: 850559 - DNA, 33 bp, Homo sapien
catttacgtttttgtaataatagctcagctgaa

SEQ ID NO: 850560 - DNA, 33 bp, Homo sapien
catttacgtttttgtagtaatagctcagctgaa

SEQ ID NO: 850561 - DNA, 33 bp, Homo sapien
caacactaccacaccccggagctttgaagtcca

SEQ ID NO: 850562 - DNA, 33 bp, Homo sapien
caacactaccacaccctggagctttgaagtcca

SEQ ID NO: 850563 - DNA, 33 bp, Homo sapien
ttacagaatttcactacgcttacctgaaaaatg

SEQ ID NO: 850564 - DNA, 33 bp, Homo sapien
ttacagaatttcactatgcttacctgaaaaatg

SEQ ID NO: 850565 - DNA, 33 bp, Homo sapien
aaagagaactgaagaaagaaaatgcaaatctgt

SEQ ID NO: 850566 - DNA, 33 bp, Homo sapien
aaagagaactgaagaaggaaaatgcaaatctgt

SEQ ID NO: 850567 - DNA, 33 bp, Homo sapien
tcctaaattttcccagaatgagatgactaaccc

SEQ ID NO: 850568 - DNA, 33 bp, Homo sapien
tcctaaattttcccagcatgagatgactaaccc

SEQ ID NO: 850569 - DNA, 33 bp, Homo sapien
acccaggactctcatacgtttactatctatcta

SEQ ID NO: 850570 - DNA, 33 bp, Homo sapien
acccaggactctcatatgtttactatctatcta

SEQ ID NO: 850571 - DNA, 33 bp, Homo sapien
cacaacttaaaccatcacttcaagagacaggat

SEQ ID NO: 850572 - DNA, 33 bp, Homo sapien
cacaacttaaaccatcccttcaagagacaggat

SEQ ID NO: 850573 - DNA, 33 bp, Homo sapien
ttcaaaaaattaacataatatgccctggccagt

SEQ ID NO: 850574 - DNA, 33 bp, Homo sapien
ttcaaaaaattaacattatatgccctggccagt

SEQ ID NO: 850575 - DNA, 33 bp, Homo sapien
gtggaaccctctaacaatagagcttgatactta

SEQ ID NO: 850576 - DNA, 33 bp, Homo sapien
gtggaaccctctaacagtagagcttgatactta

SEQ ID NO: 850577 - DNA, 33 bp, Homo sapien
caggtattgagagtcaagatataacagtataca

SEQ ID NO: 850578 - DNA, 33 bp, Homo sapien
caggtattgagagtcaggatataacagtataca

SEQ ID NO: 850579 - DNA, 33 bp, Homo sapien
gagctgtaaccactagactagtccagatccatc

SEQ ID NO: 850580 - DNA, 33 bp, Homo sapien
gagctgtaaccactaggctagtccagatccatc

SEQ ID NO: 850581 - DNA, 33 bp, Homo sapien
cacaggcagaggactagaattgcatgggtgagt

SEQ ID NO: 850582 - DNA, 33 bp, Homo sapien
cacaggcagaggactataattgcatgggtgagt

SEQ ID NO: 850583 - DNA, 33 bp, Homo sapien
attctaaaatggagaccgaaaggcttgaaatga

SEQ ID NO: 850584 - DNA, 33 bp, Homo sapien
attctaaaatggagactgaaaggcttgaaatga

SEQ ID NO: 850585 - DNA, 33 bp, Homo sapien
ttaaatcatacagaaaataagtaggaaaatcgt

SEQ ID NO: 850586 - DNA, 33 bp, Homo sapien
ttaaatcatacagaaattaagtaggaaaatcgt

SEQ ID NO: 850587 - DNA, 33 bp, Homo sapien
caatccaatgaactgactatttgccccctactc

SEQ ID NO: 850588 - DNA, 33 bp, Homo sapien
caatccaatgaactgattatttgccccctactc

SEQ ID NO: 850589 - DNA, 33 bp, Homo sapien
accttccccaccaacgaatcctgcttttctctg

SEQ ID NO: 850590 - DNA, 33 bp, Homo sapien
accttccccaccaacgcatcctgcttttctctg

SEQ ID NO: 850591 - DNA, 33 bp, Homo sapien
gtaaaatgctgaaaaaatatgtctccaagtgct

SEQ ID NO: 850592 - DNA, 33 bp, Homo sapien
gtaaaatgctgaaaaactatgtctccaagtgct

SEQ ID NO: 850593 - DNA, 33 bp, Homo sapien
catgtggtccagatccagacatatagttaatat

SEQ ID NO: 850594 - DNA, 33 bp, Homo sapien
catgtggtccagatccggacatatagttaatat

SEQ ID NO: 850595 - DNA, 33 bp, Homo sapien
ttttagagctgatctgaaagtttaatgtgatga

SEQ ID NO: 850596 - DNA, 33 bp, Homo sapien
ttttagagctgatctgcaagtttaatgtgatga

SEQ ID NO: 850597 - DNA, 33 bp, Homo sapien
gaaggtcccaaagatacgaggaagtctttggaa

SEQ ID NO: 850598 - DNA, 33 bp, Homo sapien
gaaggtcccaaagatatgaggaagtctttggaa

SEQ ID NO: 850599 - DNA, 33 bp, Homo sapien
gtaagatgtgatctaaggaaattccaaagactt

SEQ ID NO: 850600 - DNA, 33 bp, Homo sapien
gtaagatgtgatctaatgaaattccaaagactt

SEQ ID NO: 850601 - DNA, 33 bp, Homo sapien
tttatcattcactcataaggacccaaagaaaaa

SEQ ID NO: 850602 - DNA, 33 bp, Homo sapien
tttatcattcactcatgaggacccaaagaaaaa

SEQ ID NO: 850603 - DNA, 33 bp, Homo sapien
acattctccctcataagtcttggcactgatctt

SEQ ID NO: 850604 - DNA, 33 bp, Homo sapien
acattctccctcataattcttggcactgatctt

SEQ ID NO: 850605 - DNA, 33 bp, Homo sapien
gtgtggtttagactgcactttgaaaaatatgtg

SEQ ID NO: 850606 - DNA, 33 bp, Homo sapien
gtgtggtttagactgcgctttgaaaaatatgtg

SEQ ID NO: 850607 - DNA, 33 bp, Homo sapien
aaaacaagtcaagaacaacaatgggtttcaaat

SEQ ID NO: 850608 - DNA, 33 bp, Homo sapien
aaaacaagtcaagaacgacaatgggtttcaaat

SEQ ID NO: 850609 - DNA, 33 bp, Homo sapien
tggctaaaaatgctaaagtatgtaaaagcatga

SEQ ID NO: 850610 - DNA, 33 bp, Homo sapien
tggctaaaaatgctaacgtatgtaaaagcatga

SEQ ID NO: 850611 - DNA, 33 bp, Homo sapien
tgtttgcaaagacagaaataataatgcttcaca

SEQ ID NO: 850612 - DNA, 33 bp, Homo sapien
tgtttgcaaagacagatataataatgcttcaca

SEQ ID NO: 850613 - DNA, 33 bp, Homo sapien
ttgaagatgttttagtgaatgtggatgcaaagg

SEQ ID NO: 850614 - DNA, 33 bp, Homo sapien
ttgaagatgttttagttaatgtggatgcaaagg

SEQ ID NO: 850615 - DNA, 33 bp, Homo sapien
acctttcaccttctgaggctttatgcttagaag

SEQ ID NO: 850616 - DNA, 33 bp, Homo sapien
acctttcaccttctgatgctttatgcttagaag

SEQ ID NO: 850617 - DNA, 33 bp, Homo sapien
caggagactgcttgaactaatggccctaatgct

SEQ ID NO: 850618 - DNA, 33 bp, Homo sapien
caggagactgcttgaattaatggccctaatgct

SEQ ID NO: 850619 - DNA, 33 bp, Homo sapien
atgactttactgtatgaatgcaggagactgctt

SEQ ID NO: 850620 - DNA, 33 bp, Homo sapien
atgactttactgtatggatgcaggagactgctt

SEQ ID NO: 850621 - DNA, 33 bp, Homo sapien
tagtttttcaacatatgatagccaagaaatggt

SEQ ID NO: 850622 - DNA, 33 bp, Homo sapien
tagtttttcaacatattatagccaagaaatggt

SEQ ID NO: 850623 - DNA, 33 bp, Homo sapien
tgaaagcacactagaaacaattttcaggtaaca

SEQ ID NO: 850624 - DNA, 33 bp, Homo sapien
tgaaagcacactagaagcaattttcaggtaaca

SEQ ID NO: 850625 - DNA, 33 bp, Homo sapien
ttggctagaagtgttacaagggaaatttggttc

SEQ ID NO: 850626 - DNA, 33 bp, Homo sapien
ttggctagaagtgttagaagggaaatttggttc

SEQ ID NO: 850627 - DNA, 33 bp, Homo sapien
tgatctgaaccaaataaatgtgagaaatgttca

SEQ ID NO: 850628 - DNA, 33 bp, Homo sapien
tgatctgaaccaaatagatgtgagaaatgttca

SEQ ID NO: 850629 - DNA, 33 bp, Homo sapien
tgaatcaaatattctcaactactatccaagagt

SEQ ID NO: 850630 - DNA, 33 bp, Homo sapien
tgaatcaaatattctctactactatccaagagt

SEQ ID NO: 850631 - DNA, 33 bp, Homo sapien
aagagatacccacttcagaagtaagggtgcaga

SEQ ID NO: 850632 - DNA, 33 bp, Homo sapien
aagagatacccacttcggaagtaagggtgcaga

SEQ ID NO: 850633 - DNA, 33 bp, Homo sapien
cagaacacaaatgacaaagggaagtcaggagac

SEQ ID NO: 850634 - DNA, 33 bp, Homo sapien
cagaacacaaatgacagagggaagtcaggagac

SEQ ID NO: 850635 - DNA, 33 bp, Homo sapien
aatggaggatgttaaaggtgatgatgagaggga

SEQ ID NO: 850636 - DNA, 33 bp, Homo sapien
aatggaggatgttaaatgtgatgatgagaggga

SEQ ID NO: 850637 - DNA, 33 bp, Homo sapien
taaccttgtaacaattaaaagtcttaagatgtt

SEQ ID NO: 850638 - DNA, 33 bp, Homo sapien
taaccttgtaacaattgaaagtcttaagatgtt

SEQ ID NO: 850639 - DNA, 33 bp, Homo sapien
ccctagtgatccactaacaatttttttgctttc

SEQ ID NO: 850640 - DNA, 33 bp, Homo sapien
ccctagtgatccactagcaatttttttgctttc

SEQ ID NO: 850641 - DNA, 33 bp, Homo sapien
ggaaaatagggtgatactagttcagcaacaaga

SEQ ID NO: 850642 - DNA, 33 bp, Homo sapien
ggaaaatagggtgatattagttcagcaacaaga

SEQ ID NO: 850643 - DNA, 33 bp, Homo sapien
acctagattttctatacaatgggcaggagttgt

SEQ ID NO: 850644 - DNA, 33 bp, Homo sapien
acctagattttctatataatgggcaggagttgt

SEQ ID NO: 850645 - DNA, 33 bp, Homo sapien
atgcggcacaaattcacccgtcagcatatttta

SEQ ID NO: 850646 - DNA, 33 bp, Homo sapien
atgcggcacaaattcagccgtcagcatatttta

SEQ ID NO: 850647 - DNA, 33 bp, Homo sapien
ttgctattgcgaataacgccgaaataaatatat

SEQ ID NO: 850648 - DNA, 33 bp, Homo sapien
ttgctattgcgaataatgccgaaataaatatat

SEQ ID NO: 850649 - DNA, 33 bp, Homo sapien
tatctaaaggatatagaaggaagtcagtatggt

SEQ ID NO: 850650 - DNA, 33 bp, Homo sapien
tatctaaaggatataggaggaagtcagtatggt

SEQ ID NO: 850651 - DNA, 33 bp, Homo sapien
gcatattcctatggcaactaaatgtcttaaagt

SEQ ID NO: 850652 - DNA, 33 bp, Homo sapien
gcatattcctatggcatctaaatgtcttaaagt

SEQ ID NO: 850653 - DNA, 33 bp, Homo sapien
tggaaagaaaacttacgattgtcatgaggaaat

SEQ ID NO: 850654 - DNA, 33 bp, Homo sapien
tggaaagaaaacttactattgtcatgaggaaat

SEQ ID NO: 850655 - DNA, 33 bp, Homo sapien
agaaaataaaagagtaaattgttgatgtcttct

SEQ ID NO: 850656 - DNA, 33 bp, Homo sapien
agaaaataaaagagtagattgttgatgtcttct

SEQ ID NO: 850657 - DNA, 33 bp, Homo sapien
gtgtttttggtagctaggtccaaggcctttgct

SEQ ID NO: 850658 - DNA, 33 bp, Homo sapien
gtgtttttggtagctatgtccaaggcctttgct

SEQ ID NO: 850659 - DNA, 33 bp, Homo sapien
ccaatggattttccacgactctgctttttcttc

SEQ ID NO: 850660 - DNA, 33 bp, Homo sapien
ccaatggattttccactactctgctttttcttc

SEQ ID NO: 850661 - DNA, 33 bp, Homo sapien
tggttgacacccagttaaaatatctcttatcaa

SEQ ID NO: 850662 - DNA, 33 bp, Homo sapien
tggttgacacccagtttaaatatctcttatcaa

SEQ ID NO: 850663 - DNA, 33 bp, Homo sapien
ttgctacaaagaagagacctagagacgaatttc

SEQ ID NO: 850664 - DNA, 33 bp, Homo sapien
ttgctacaaagaagaggcctagagacgaatttc

SEQ ID NO: 850665 - DNA, 33 bp, Homo sapien
atgactatcataagcaaccatgaaatcaaaact

SEQ ID NO: 850666 - DNA, 33 bp, Homo sapien
atgactatcataagcatccatgaaatcaaaact

SEQ ID NO: 850667 - DNA, 33 bp, Homo sapien
tattcctcatttttgaagtttaaggtaacagat

SEQ ID NO: 850668 - DNA, 33 bp, Homo sapien
tattcctcatttttgaggtttaaggtaacagat

SEQ ID NO: 850669 - DNA, 33 bp, Homo sapien
ctatttatttccaagacgtgttctagtaaacat

SEQ ID NO: 850670 - DNA, 33 bp, Homo sapien
ctatttatttccaagatgtgttctagtaaacat

SEQ ID NO: 850671 - DNA, 33 bp, Homo sapien
tccagtggggtagtcaaatcctaaagggctgaa

SEQ ID NO: 850672 - DNA, 33 bp, Homo sapien
tccagtggggtagtcagatcctaaagggctgaa

SEQ ID NO: 850673 - DNA, 33 bp, Homo sapien
ccattctgagggtacacaagaagacaggaagat

SEQ ID NO: 850674 - DNA, 33 bp, Homo sapien
ccattctgagggtacataagaagacaggaagat

SEQ ID NO: 850675 - DNA, 33 bp, Homo sapien
aagacagaaggcaaaaaaataccatacacctaa

SEQ ID NO: 850676 - DNA, 33 bp, Homo sapien
aagacagaaggcaaaagaataccatacacctaa

SEQ ID NO: 850677 - DNA, 33 bp, Homo sapien
ttattcaattcacctaaatctgcagagggtcca

SEQ ID NO: 850678 - DNA, 33 bp, Homo sapien
ttattcaattcacctacatctgcagagggtcca

SEQ ID NO: 850679 - DNA, 33 bp, Homo sapien
ctatcatgtctcaagaaccaaacaacaaaacaa

SEQ ID NO: 850680 - DNA, 33 bp, Homo sapien
ctatcatgtctcaagagccaaacaacaaaacaa

SEQ ID NO: 850681 - DNA, 33 bp, Homo sapien
tatttttggtagtcaaataaagaggattaaaat

SEQ ID NO: 850682 - DNA, 33 bp, Homo sapien
tatttttggtagtcaattaaagaggattaaaat

SEQ ID NO: 850683 - DNA, 33 bp, Homo sapien
tatatcttattttctccactatgcccaagacaa

SEQ ID NO: 850684 - DNA, 33 bp, Homo sapien
tatatcttattttctctactatgcccaagacaa

SEQ ID NO: 850685 - DNA, 33 bp, Homo sapien
acccccagtcttaacaatagacatttgccaatc

SEQ ID NO: 850686 - DNA, 33 bp, Homo sapien
acccccagtcttaacagtagacatttgccaatc

SEQ ID NO: 850687 - DNA, 33 bp, Homo sapien
catgttataaaaatgaaagcctaggaattctaa

SEQ ID NO: 850688 - DNA, 33 bp, Homo sapien
catgttataaaaatgacagcctaggaattctaa

SEQ ID NO: 850689 - DNA, 33 bp, Homo sapien
ttaatttggagacagaccatggattccacaaga

SEQ ID NO: 850690 - DNA, 33 bp, Homo sapien
ttaatttggagacagatcatggattccacaaga

SEQ ID NO: 850691 - DNA, 33 bp, Homo sapien
agtctatgcttgttaaatacatgccaaactagt

SEQ ID NO: 850692 - DNA, 33 bp, Homo sapien
agtctatgcttgttaactacatgccaaactagt

SEQ ID NO: 850693 - DNA, 33 bp, Homo sapien
tgaagaaatgagctcgaactatttggtacagtg

SEQ ID NO: 850694 - DNA, 33 bp, Homo sapien
tgaagaaatgagctcgcactatttggtacagtg

SEQ ID NO: 850695 - DNA, 33 bp, Homo sapien
ccacaagaaagggtgccgagtagagtgcactat

SEQ ID NO: 850696 - DNA, 33 bp, Homo sapien
ccacaagaaagggtgctgagtagagtgcactat

SEQ ID NO: 850697 - DNA, 33 bp, Homo sapien
caggtaaaatgctgacaagtgtgaatatttagg

SEQ ID NO: 850698 - DNA, 33 bp, Homo sapien
caggtaaaatgctgacgagtgtgaatatttagg

SEQ ID NO: 850699 - DNA, 33 bp, Homo sapien
ctctagatcttcagaacattgttgaaattaacc

SEQ ID NO: 850700 - DNA, 33 bp, Homo sapien
ctctagatcttcagaagattgttgaaattaacc

SEQ ID NO: 850701 - DNA, 33 bp, Homo sapien
gatatgcagaaatttcaagagctgagaaggata

SEQ ID NO: 850702 - DNA, 33 bp, Homo sapien
gatatgcagaaatttcgagagctgagaaggata

SEQ ID NO: 850703 - DNA, 33 bp, Homo sapien
ttagctgtacaatgtgaaattttaaagctgagg

SEQ ID NO: 850704 - DNA, 33 bp, Homo sapien
ttagctgtacaatgtgcaattttaaagctgagg

SEQ ID NO: 850705 - DNA, 33 bp, Homo sapien
ataatgagaggtctagaaagtacagtctaaaaa

SEQ ID NO: 850706 - DNA, 33 bp, Homo sapien
ataatgagaggtctaggaagtacagtctaaaaa

SEQ ID NO: 850707 - DNA, 33 bp, Homo sapien
agctctccacttttcacggtctcctctgtaacc

SEQ ID NO: 850708 - DNA, 33 bp, Homo sapien
agctctccacttttcatggtctcctctgtaacc

SEQ ID NO: 850709 - DNA, 33 bp, Homo sapien
aagaacaacaagtgaaatactctgagccagaaa

SEQ ID NO: 850710 - DNA, 33 bp, Homo sapien
aagaacaacaagtgaagtactctgagccagaaa

SEQ ID NO: 850711 - DNA, 33 bp, Homo sapien
cacaaaacactactgaaaataattgaataacag

SEQ ID NO: 850712 - DNA, 33 bp, Homo sapien
cacaaaacactactgagaataattgaataacag

SEQ ID NO: 850713 - DNA, 33 bp, Homo sapien
tttctgattttttgaacgctgacaaatcactag

SEQ ID NO: 850714 - DNA, 33 bp, Homo sapien
tttctgattttttgaatgctgacaaatcactag

SEQ ID NO: 850715 - DNA, 33 bp, Homo sapien
tcatatagataaagaaacagtgaagctgacctg

SEQ ID NO: 850716 - DNA, 33 bp, Homo sapien
tcatatagataaagaaccagtgaagctgacctg

SEQ ID NO: 850717 - DNA, 33 bp, Homo sapien
ttcactttttccagctcaaaatcagtcagttaa

SEQ ID NO: 850718 - DNA, 33 bp, Homo sapien
ttcactttttccagctgaaaatcagtcagttaa

SEQ ID NO: 850719 - DNA, 33 bp, Homo sapien
tatgcacagtaggttaaattttgtatgatttga

SEQ ID NO: 850720 - DNA, 33 bp, Homo sapien
tatgcacagtaggttagattttgtatgatttga

SEQ ID NO: 850721 - DNA, 33 bp, Homo sapien
acataggaaactgaccaaatggtatattatatt

SEQ ID NO: 850722 - DNA, 33 bp, Homo sapien
acataggaaactgaccgaatggtatattatatt

SEQ ID NO: 850723 - DNA, 33 bp, Homo sapien
gagtcattacagaaaacagagatgcctctaaaa

SEQ ID NO: 850724 - DNA, 33 bp, Homo sapien
gagtcattacagaaaagagagatgcctctaaaa

SEQ ID NO: 850725 - DNA, 33 bp, Homo sapien
ctatcatcaagaagataagagataactgttggt

SEQ ID NO: 850726 - DNA, 33 bp, Homo sapien
ctatcatcaagaagattagagataactgttggt

SEQ ID NO: 850727 - DNA, 33 bp, Homo sapien
ttcatttctgaaagacagctttgccagataaat

SEQ ID NO: 850728 - DNA, 33 bp, Homo sapien
ttcatttctgaaagaccgctttgccagataaat

SEQ ID NO: 850729 - DNA, 33 bp, Homo sapien
aaaagacaaatgaaaaaacgctcgtcatcactg

SEQ ID NO: 850730 - DNA, 33 bp, Homo sapien
aaaagacaaatgaaaacacgctcgtcatcactg

SEQ ID NO: 850731 - DNA, 33 bp, Homo sapien
ctagatcacccagatacatgtagtaatacttat

SEQ ID NO: 850732 - DNA, 33 bp, Homo sapien
ctagatcacccagatatatgtagtaatacttat

SEQ ID NO: 850733 - DNA, 33 bp, Homo sapien
gaggaaataagaaacaatactaatactgcttag

SEQ ID NO: 850734 - DNA, 33 bp, Homo sapien
gaggaaataagaaacattactaatactgcttag

SEQ ID NO: 850735 - DNA, 33 bp, Homo sapien
gcagcaaagttgaaccaaattaagcactgttta

SEQ ID NO: 850736 - DNA, 33 bp, Homo sapien
gcagcaaagttgaacctaattaagcactgttta

SEQ ID NO: 850737 - DNA, 33 bp, Homo sapien
atttaaaagaaaatcacgtaccataatccatat

SEQ ID NO: 850738 - DNA, 33 bp, Homo sapien
atttaaaagaaaatcatgtaccataatccatat

SEQ ID NO: 850739 - DNA, 33 bp, Homo sapien
gcacagtcttctttaacgctgaaaaatcaagat

SEQ ID NO: 850740 - DNA, 33 bp, Homo sapien
gcacagtcttctttaaggctgaaaaatcaagat

SEQ ID NO: 850741 - DNA, 33 bp, Homo sapien
atttacattccatcagccaaggtaaattatatg

SEQ ID NO: 850742 - DNA, 33 bp, Homo sapien
atttacattccatcagtcaaggtaaattatatg

SEQ ID NO: 850743 - DNA, 33 bp, Homo sapien
tcagtgtaggtggatacaggtccatagtgtaag

SEQ ID NO: 850744 - DNA, 33 bp, Homo sapien
tcagtgtaggtggatagaggtccatagtgtaag

SEQ ID NO: 850745 - DNA, 33 bp, Homo sapien
aaactatgcatccaacaatagactactatccaa

SEQ ID NO: 850746 - DNA, 33 bp, Homo sapien
aaactatgcatccaacgatagactactatccaa

SEQ ID NO: 850747 - DNA, 33 bp, Homo sapien
caggtctcacaaataaagtgactaagacataaa

SEQ ID NO: 850748 - DNA, 33 bp, Homo sapien
caggtctcacaaataaggtgactaagacataaa

SEQ ID NO: 850749 - DNA, 33 bp, Homo sapien
gcagaataggaaaaaagacctgcgtggcaaaac

SEQ ID NO: 850750 - DNA, 33 bp, Homo sapien
gcagaataggaaaaaatacctgcgtggcaaaac

SEQ ID NO: 850751 - DNA, 33 bp, Homo sapien
tatctaacatttacccagagagatataaagcag

SEQ ID NO: 850752 - DNA, 33 bp, Homo sapien
tatctaacatttacccggagagatataaagcag

SEQ ID NO: 850753 - DNA, 33 bp, Homo sapien
tgatattttaaccaccaaatggaagggttcaat

SEQ ID NO: 850754 - DNA, 33 bp, Homo sapien
tgatattttaaccaccgaatggaagggttcaat

SEQ ID NO: 850755 - DNA, 33 bp, Homo sapien
cttggtatggattgataaaattcagattagtgt

SEQ ID NO: 850756 - DNA, 33 bp, Homo sapien
cttggtatggattgatcaaattcagattagtgt

SEQ ID NO: 850757 - DNA, 33 bp, Homo sapien
atcaatccataccaagacagccattataacaag

SEQ ID NO: 850758 - DNA, 33 bp, Homo sapien
atcaatccataccaaggcagccattataacaag

SEQ ID NO: 850759 - DNA, 33 bp, Homo sapien
tgtttacaggaaacctcacctataatgagcata

SEQ ID NO: 850760 - DNA, 33 bp, Homo sapien
tgtttacaggaaaccttacctataatgagcata

SEQ ID NO: 850761 - DNA, 33 bp, Homo sapien
tggtttatcctaaaaactgaatttccttgaata

SEQ ID NO: 850762 - DNA, 33 bp, Homo sapien
tggtttatcctaaaaattgaatttccttgaata

SEQ ID NO: 850763 - DNA, 33 bp, Homo sapien
tggagaaacccaaatacggctcctaagccaatc

SEQ ID NO: 850764 - DNA, 33 bp, Homo sapien
tggagaaacccaaatatggctcctaagccaatc

SEQ ID NO: 850765 - DNA, 33 bp, Homo sapien
ctgcccttgaacattacactccaggttcttcag

SEQ ID NO: 850766 - DNA, 33 bp, Homo sapien
ctgcccttgaacattagactccaggttcttcag

SEQ ID NO: 850767 - DNA, 33 bp, Homo sapien
aaaaactaattgcgtaagtatggattggaatct

SEQ ID NO: 850768 - DNA, 33 bp, Homo sapien
aaaaactaattgcgtatgtatggattggaatct

SEQ ID NO: 850769 - DNA, 33 bp, Homo sapien
atgtttagatacacgaatacttaccattgtgtt

SEQ ID NO: 850770 - DNA, 33 bp, Homo sapien
atgtttagatacacgattacttaccattgtgtt

SEQ ID NO: 850771 - DNA, 33 bp, Homo sapien
aaatatttttgttcaactgtgccatgtggttgt

SEQ ID NO: 850772 - DNA, 33 bp, Homo sapien
aaatatttttgttcaattgtgccatgtggttgt

SEQ ID NO: 850773 - DNA, 33 bp, Homo sapien
ggtggttgtctcctgaataatgaaagttgatta

SEQ ID NO: 850774 - DNA, 33 bp, Homo sapien
ggtggttgtctcctgagtaatgaaagttgatta

SEQ ID NO: 850775 - DNA, 33 bp, Homo sapien
gaagtaggtttgactacaaaaggagagtatagg

SEQ ID NO: 850776 - DNA, 33 bp, Homo sapien
gaagtaggtttgactataaaaggagagtatagg

SEQ ID NO: 850777 - DNA, 33 bp, Homo sapien
gtgtaaaagtttagggaatttgcagactggcca

SEQ ID NO: 850778 - DNA, 33 bp, Homo sapien
gtgtaaaagtttaggggatttgcagactggcca

SEQ ID NO: 850779 - DNA, 33 bp, Homo sapien
atcttaattcatgaaacccagaaagacagctga

SEQ ID NO: 850780 - DNA, 33 bp, Homo sapien
atcttaattcatgaaatccagaaagacagctga

SEQ ID NO: 850781 - DNA, 33 bp, Homo sapien
gcccaggaccagctgtaaagttcctaagggttg

SEQ ID NO: 850782 - DNA, 33 bp, Homo sapien
gcccaggaccagctgtgaagttcctaagggttg

SEQ ID NO: 850783 - DNA, 33 bp, Homo sapien
aacctctgtgtacagacagtattagcatagctg

SEQ ID NO: 850784 - DNA, 33 bp, Homo sapien
aacctctgtgtacagatagtattagcatagctg

SEQ ID NO: 850785 - DNA, 33 bp, Homo sapien
atagttgggcattactaaggctcttacaacttg

SEQ ID NO: 850786 - DNA, 33 bp, Homo sapien
atagttgggcattactgaggctcttacaacttg

SEQ ID NO: 850787 - DNA, 33 bp, Homo sapien
gaagattgcaagggagccaatgttctcattttt

SEQ ID NO: 850788 - DNA, 33 bp, Homo sapien
gaagattgcaagggagtcaatgttctcattttt

SEQ ID NO: 850789 - DNA, 33 bp, Homo sapien
ctcagtcattaacaacacatcaagagtatccat

SEQ ID NO: 850790 - DNA, 33 bp, Homo sapien
ctcagtcattaacaacgcatcaagagtatccat

SEQ ID NO: 850791 - DNA, 33 bp, Homo sapien
taaagacgtgaaggatcaaatagatgagccaca

SEQ ID NO: 850792 - DNA, 33 bp, Homo sapien
taaagacgtgaaggatgaaatagatgagccaca

SEQ ID NO: 850793 - DNA, 33 bp, Homo sapien
tctgtctgtaatggacacataatgtatgactcc

SEQ ID NO: 850794 - DNA, 33 bp, Homo sapien
tctgtctgtaatggacgcataatgtatgactcc

SEQ ID NO: 850795 - DNA, 33 bp, Homo sapien
taagaaatacttctaacgtctacctatcacacc

SEQ ID NO: 850796 - DNA, 33 bp, Homo sapien
taagaaatacttctaatgtctacctatcacacc

SEQ ID NO: 850797 - DNA, 33 bp, Homo sapien
tgcagaggaagcaaaaatcttcttcatggccaa

SEQ ID NO: 850798 - DNA, 33 bp, Homo sapien
tgcagaggaagcaaaagtcttcttcatggccaa

SEQ ID NO: 850799 - DNA, 33 bp, Homo sapien
acaaaacacataaacacggagtcaccatttgac

SEQ ID NO: 850800 - DNA, 33 bp, Homo sapien
acaaaacacataaacatggagtcaccatttgac

SEQ ID NO: 850801 - DNA, 33 bp, Homo sapien
ctctttaatttattccacaaagctgtattaaat

SEQ ID NO: 850802 - DNA, 33 bp, Homo sapien
ctctttaatttattccgcaaagctgtattaaat

SEQ ID NO: 850803 - DNA, 33 bp, Homo sapien
agaagtgaaggaatgaggagagttgacgctgta

SEQ ID NO: 850804 - DNA, 33 bp, Homo sapien
agaagtgaaggaatgatgagagttgacgctgta

SEQ ID NO: 850805 - DNA, 33 bp, Homo sapien
agataatgatacagaactaacaatggtgtcctt

SEQ ID NO: 850806 - DNA, 33 bp, Homo sapien
agataatgatacagaattaacaatggtgtcctt

SEQ ID NO: 850807 - DNA, 33 bp, Homo sapien
cataaaaaatttgtaaaaatggttgcctttgtg

SEQ ID NO: 850808 - DNA, 33 bp, Homo sapien
cataaaaaatttgtaacaatggttgcctttgtg

SEQ ID NO: 850809 - DNA, 33 bp, Homo sapien
tttcttaatcagcctaaaacttcacctcttttt

SEQ ID NO: 850810 - DNA, 33 bp, Homo sapien
tttcttaatcagcctacaacttcacctcttttt

SEQ ID NO: 850811 - DNA, 33 bp, Homo sapien
atgtgaaggcttgctacctattcatttaatcaa

SEQ ID NO: 850812 - DNA, 33 bp, Homo sapien
atgtgaaggcttgctatctattcatttaatcaa

SEQ ID NO: 850813 - DNA, 33 bp, Homo sapien
tgaaataaagagctcaccctaggatcagagaaa

SEQ ID NO: 850814 - DNA, 33 bp, Homo sapien
tgaaataaagagctcatcctaggatcagagaaa

SEQ ID NO: 850815 - DNA, 33 bp, Homo sapien
taggttctaggatacacgtacagaatatgcatg

SEQ ID NO: 850816 - DNA, 33 bp, Homo sapien
taggttctaggatacatgtacagaatatgcatg

SEQ ID NO: 850817 - DNA, 33 bp, Homo sapien
tgctatatacctataaaaacacttgaaatgaat

SEQ ID NO: 850818 - DNA, 33 bp, Homo sapien
tgctatatacctataacaacacttgaaatgaat

SEQ ID NO: 850819 - DNA, 33 bp, Homo sapien
agaagagtaaaactcgaattttcactgaacttt

SEQ ID NO: 850820 - DNA, 33 bp, Homo sapien
agaagagtaaaactcggattttcactgaacttt

SEQ ID NO: 850821 - DNA, 33 bp, Homo sapien
ctagtcaaaatgacctcagacaaatgaatcccc

SEQ ID NO: 850822 - DNA, 33 bp, Homo sapien
ctagtcaaaatgacctgagacaaatgaatcccc

SEQ ID NO: 850823 - DNA, 33 bp, Homo sapien
tcatattgcctttccactctgtgttccattttg

SEQ ID NO: 850824 - DNA, 33 bp, Homo sapien
tcatattgcctttccagtctgtgttccattttg

SEQ ID NO: 850825 - DNA, 33 bp, Homo sapien
cattgcttgctgctaaagaattaagctatttat

SEQ ID NO: 850826 - DNA, 33 bp, Homo sapien
cattgcttgctgctaaggaattaagctatttat

SEQ ID NO: 850827 - DNA, 33 bp, Homo sapien
aatgcatccagaaaaaagaatctggagttttga

SEQ ID NO: 850828 - DNA, 33 bp, Homo sapien
aatgcatccagaaaaatgaatctggagttttga

SEQ ID NO: 850829 - DNA, 33 bp, Homo sapien
tatgtgtgtgattctacgttgcacttacagcaa

SEQ ID NO: 850830 - DNA, 33 bp, Homo sapien
tatgtgtgtgattctatgttgcacttacagcaa

SEQ ID NO: 850831 - DNA, 33 bp, Homo sapien
aaagtaaatagttgggaatgacactcaggtttc

SEQ ID NO: 850832 - DNA, 33 bp, Homo sapien
aaagtaaatagttggggatgacactcaggtttc

SEQ ID NO: 850833 - DNA, 33 bp, Homo sapien
gttgttttgtaatgacaccaccattttcttggc

SEQ ID NO: 850834 - DNA, 33 bp, Homo sapien
gttgttttgtaatgacgccaccattttcttggc

SEQ ID NO: 850835 - DNA, 33 bp, Homo sapien
cccaatgaatgtctaacaatgtcatctgggagc

SEQ ID NO: 850836 - DNA, 33 bp, Homo sapien
cccaatgaatgtctaagaatgtcatctgggagc

SEQ ID NO: 850837 - DNA, 33 bp, Homo sapien
gtgctcatcagggaaactgatagtgattatcaa

SEQ ID NO: 850838 - DNA, 33 bp, Homo sapien
gtgctcatcagggaaattgatagtgattatcaa

SEQ ID NO: 850839 - DNA, 33 bp, Homo sapien
cataatgaattaggaaagtataatatgccacat

SEQ ID NO: 850840 - DNA, 33 bp, Homo sapien
cataatgaattaggaaggtataatatgccacat

SEQ ID NO: 850841 - DNA, 33 bp, Homo sapien
cacaagcttctccaaccaccttactttgttgtt

SEQ ID NO: 850842 - DNA, 33 bp, Homo sapien
cacaagcttctccaactaccttactttgttgtt

SEQ ID NO: 850843 - DNA, 33 bp, Homo sapien
ttggttcagaagtagaagtggaatagtatgagg

SEQ ID NO: 850844 - DNA, 33 bp, Homo sapien
ttggttcagaagtagaggtggaatagtatgagg

SEQ ID NO: 850845 - DNA, 33 bp, Homo sapien
tctgaaattttaacacaagtcaacaggggggca

SEQ ID NO: 850846 - DNA, 33 bp, Homo sapien
tctgaaattttaacacgagtcaacaggggggca

SEQ ID NO: 850847 - DNA, 33 bp, Homo sapien
atgggattagaatctacaaagaagagataaaat

SEQ ID NO: 850848 - DNA, 33 bp, Homo sapien
atgggattagaatctagaaagaagagataaaat

SEQ ID NO: 850849 - DNA, 33 bp, Homo sapien
cctctgccaccacagcaacagaaagtatttgta

SEQ ID NO: 850850 - DNA, 33 bp, Homo sapien
cctctgccaccacagcgacagaaagtatttgta

SEQ ID NO: 850851 - DNA, 33 bp, Homo sapien
tattacactgttgataacttttgcaaataacat

SEQ ID NO: 850852 - DNA, 33 bp, Homo sapien
tattacactgttgatagcttttgcaaataacat

SEQ ID NO: 850853 - DNA, 33 bp, Homo sapien
gaaaaacacattgagactaagctttcagatatt

SEQ ID NO: 850854 - DNA, 33 bp, Homo sapien
gaaaaacacattgagattaagctttcagatatt

SEQ ID NO: 850855 - DNA, 33 bp, Homo sapien
tgaaatcttagtcccacgcattttctatttttg

SEQ ID NO: 850856 - DNA, 33 bp, Homo sapien
tgaaatcttagtcccatgcattttctatttttg

SEQ ID NO: 850857 - DNA, 33 bp, Homo sapien
atactgaatgtagaaagctgtgtatcaaaactg

SEQ ID NO: 850858 - DNA, 33 bp, Homo sapien
atactgaatgtagaaatctgtgtatcaaaactg

SEQ ID NO: 850859 - DNA, 33 bp, Homo sapien
tatgtctagacataacaagtatcttgacactga

SEQ ID NO: 850860 - DNA, 33 bp, Homo sapien
tatgtctagacataacgagtatcttgacactga

SEQ ID NO: 850861 - DNA, 33 bp, Homo sapien
gtctagttgtcaattacaaaaatcagtgtcaag

SEQ ID NO: 850862 - DNA, 33 bp, Homo sapien
gtctagttgtcaattataaaaatcagtgtcaag

SEQ ID NO: 850863 - DNA, 33 bp, Homo sapien
aatgatgccatctatgaaaatgtgactggagtg

SEQ ID NO: 850864 - DNA, 33 bp, Homo sapien
aatgatgccatctatggaaatgtgactggagtg

SEQ ID NO: 850865 - DNA, 33 bp, Homo sapien
tgacctttgagcttgaaaatgattctttgtaag

SEQ ID NO: 850866 - DNA, 33 bp, Homo sapien
tgacctttgagcttgacaatgattctttgtaag

SEQ ID NO: 850867 - DNA, 33 bp, Homo sapien
gtaaagtctgccagcaactatggctcacagata

SEQ ID NO: 850868 - DNA, 33 bp, Homo sapien
gtaaagtctgccagcacctatggctcacagata

SEQ ID NO: 850869 - DNA, 33 bp, Homo sapien
ctcatcactcttgtacacccattataccaaact

SEQ ID NO: 850870 - DNA, 33 bp, Homo sapien
ctcatcactcttgtacgcccattataccaaact

SEQ ID NO: 850871 - DNA, 33 bp, Homo sapien
tattcaagtgggcccaacgtaattatatgagct

SEQ ID NO: 850872 - DNA, 33 bp, Homo sapien
tattcaagtgggcccagcgtaattatatgagct

SEQ ID NO: 850873 - DNA, 33 bp, Homo sapien
gtttttccttcacctaaacttctgattcagctg

SEQ ID NO: 850874 - DNA, 33 bp, Homo sapien
gtttttccttcacctagacttctgattcagctg

SEQ ID NO: 850875 - DNA, 33 bp, Homo sapien
gagagcaatatagtagcaccattttatgagatg

SEQ ID NO: 850876 - DNA, 33 bp, Homo sapien
gagagcaatatagtaggaccattttatgagatg

SEQ ID NO: 850877 - DNA, 33 bp, Homo sapien
tgagtagctcttaggaaaaaaagccattctgtg

SEQ ID NO: 850878 - DNA, 33 bp, Homo sapien
tgagtagctcttaggataaaaagccattctgtg

SEQ ID NO: 850879 - DNA, 33 bp, Homo sapien
attacatttgtgtataataaagccaaaatattt

SEQ ID NO: 850880 - DNA, 33 bp, Homo sapien
attacatttgtgtatagtaaagccaaaatattt

SEQ ID NO: 850881 - DNA, 33 bp, Homo sapien
tgagatggcctgcataaactacacatatccctc

SEQ ID NO: 850882 - DNA, 33 bp, Homo sapien
tgagatggcctgcatacactacacatatccctc

SEQ ID NO: 850883 - DNA, 33 bp, Homo sapien
acagatcagccaaaaacgactactgtcagcaga

SEQ ID NO: 850884 - DNA, 33 bp, Homo sapien
acagatcagccaaaaatgactactgtcagcaga

SEQ ID NO: 850885 - DNA, 33 bp, Homo sapien
acaatggcataaaagacgagaggagaataaatg

SEQ ID NO: 850886 - DNA, 33 bp, Homo sapien
acaatggcataaaagatgagaggagaataaatg

SEQ ID NO: 850887 - DNA, 33 bp, Homo sapien
aaggatgagtctgatactagttattccattgtt

SEQ ID NO: 850888 - DNA, 33 bp, Homo sapien
aaggatgagtctgatagtagttattccattgtt

SEQ ID NO: 850889 - DNA, 33 bp, Homo sapien
aggatagcaaacatgacgctataaaaattttta

SEQ ID NO: 850890 - DNA, 33 bp, Homo sapien
aggatagcaaacatgaggctataaaaattttta

SEQ ID NO: 850891 - DNA, 33 bp, Homo sapien
ccatgttctctgaaaacctgctagtcattgaac

SEQ ID NO: 850892 - DNA, 33 bp, Homo sapien
ccatgttctctgaaaatctgctagtcattgaac

SEQ ID NO: 850893 - DNA, 33 bp, Homo sapien
aagaagggatttggtacgtattgctaggttctc

SEQ ID NO: 850894 - DNA, 33 bp, Homo sapien
aagaagggatttggtatgtattgctaggttctc

SEQ ID NO: 850895 - DNA, 33 bp, Homo sapien
ggagatgggtgggtaacggcttttgcctcaata

SEQ ID NO: 850896 - DNA, 33 bp, Homo sapien
ggagatgggtgggtaatggcttttgcctcaata

SEQ ID NO: 850897 - DNA, 33 bp, Homo sapien
ttttcctttccattctaaagcacatttaaaaat

SEQ ID NO: 850898 - DNA, 33 bp, Homo sapien
ttttcctttccattctcaagcacatttaaaaat

SEQ ID NO: 850899 - DNA, 33 bp, Homo sapien
cagggctaaaagaacactgtaatacccctagac

SEQ ID NO: 850900 - DNA, 33 bp, Homo sapien
cagggctaaaagaacattgtaatacccctagac

SEQ ID NO: 850901 - DNA, 33 bp, Homo sapien
aagtaatagatagaagaaaaatctgatctgata

SEQ ID NO: 850902 - DNA, 33 bp, Homo sapien
aagtaatagatagaaggaaaatctgatctgata

SEQ ID NO: 850903 - DNA, 33 bp, Homo sapien
ttgacgtttcagtgtaaaatcaaactcctgtct

SEQ ID NO: 850904 - DNA, 33 bp, Homo sapien
ttgacgtttcagtgtagaatcaaactcctgtct

SEQ ID NO: 850905 - DNA, 33 bp, Homo sapien
gaagttaaagattgccaaatgtcaggtttggga

SEQ ID NO: 850906 - DNA, 33 bp, Homo sapien
gaagttaaagattgccgaatgtcaggtttggga

SEQ ID NO: 850907 - DNA, 33 bp, Homo sapien
ccgtgttaatcctctgaaactgaacctcagtct

SEQ ID NO: 850908 - DNA, 33 bp, Homo sapien
ccgtgttaatcctctggaactgaacctcagtct

SEQ ID NO: 850909 - DNA, 33 bp, Homo sapien
aaattgataaatagcaacaggagataacatatg

SEQ ID NO: 850910 - DNA, 33 bp, Homo sapien
aaattgataaatagcagcaggagataacatatg

SEQ ID NO: 850911 - DNA, 33 bp, Homo sapien
tacataggctcgtggcacagaacagagaaccca

SEQ ID NO: 850912 - DNA, 33 bp, Homo sapien
tacataggctcgtggcgcagaacagagaaccca

SEQ ID NO: 850913 - DNA, 33 bp, Homo sapien
atttatctttaaaaagactgattcctgaattct

SEQ ID NO: 850914 - DNA, 33 bp, Homo sapien
atttatctttaaaaagtctgattcctgaattct

SEQ ID NO: 850915 - DNA, 33 bp, Homo sapien
ggtcaggtataccatgaataacagttgttaata

SEQ ID NO: 850916 - DNA, 33 bp, Homo sapien
ggtcaggtataccatgcataacagttgttaata

SEQ ID NO: 850917 - DNA, 33 bp, Homo sapien
tatctaaattcacatcacaaattcacttgatta

SEQ ID NO: 850918 - DNA, 33 bp, Homo sapien
tatctaaattcacatcgcaaattcacttgatta

SEQ ID NO: 850919 - DNA, 33 bp, Homo sapien
acagaaatgtcacctgaattatatggacaccat

SEQ ID NO: 850920 - DNA, 33 bp, Homo sapien
acagaaatgtcacctgcattatatggacaccat

SEQ ID NO: 850921 - DNA, 33 bp, Homo sapien
ctatcaaaataacaatcacattcttcatagaaa

SEQ ID NO: 850922 - DNA, 33 bp, Homo sapien
ctatcaaaataacaatgacattcttcatagaaa

SEQ ID NO: 850923 - DNA, 33 bp, Homo sapien
catgatcaaatacaacaagaacatcaagtgaag

SEQ ID NO: 850924 - DNA, 33 bp, Homo sapien
catgatcaaatacaacgagaacatcaagtgaag

SEQ ID NO: 850925 - DNA, 33 bp, Homo sapien
acacacacacacagatgaaaactttgtattttc

SEQ ID NO: 850926 - DNA, 33 bp, Homo sapien
acacacacacacagattaaaactttgtattttc

SEQ ID NO: 850927 - DNA, 33 bp, Homo sapien
catttattatctcctaactatgtaatgctctta

SEQ ID NO: 850928 - DNA, 33 bp, Homo sapien
catttattatctcctatctatgtaatgctctta

SEQ ID NO: 850929 - DNA, 33 bp, Homo sapien
gaccctgcttgtataccaacaggcggaaaagca

SEQ ID NO: 850930 - DNA, 33 bp, Homo sapien
gaccctgcttgtatactaacaggcggaaaagca

SEQ ID NO: 850931 - DNA, 33 bp, Homo sapien
cactcacctctatatcacaggctttcacgtttt

SEQ ID NO: 850932 - DNA, 33 bp, Homo sapien
cactcacctctatatcgcaggctttcacgtttt

SEQ ID NO: 850933 - DNA, 33 bp, Homo sapien
gctagacatacccacacctgagagctattcaag

SEQ ID NO: 850934 - DNA, 33 bp, Homo sapien
gctagacatacccacatctgagagctattcaag

SEQ ID NO: 850935 - DNA, 33 bp, Homo sapien
tgtgatttactctgctcactgcattttactctt

SEQ ID NO: 850936 - DNA, 33 bp, Homo sapien
tgtgatttactctgcttactgcattttactctt

SEQ ID NO: 850937 - DNA, 33 bp, Homo sapien
actcacaagagttcaagagtgagcagaagtgca

SEQ ID NO: 850938 - DNA, 33 bp, Homo sapien
actcacaagagttcaatagtgagcagaagtgca

SEQ ID NO: 850939 - DNA, 33 bp, Homo sapien
tgccaatgggatggaccactcaaaagaaactga

SEQ ID NO: 850940 - DNA, 33 bp, Homo sapien
tgccaatgggatggactactcaaaagaaactga

SEQ ID NO: 850941 - DNA, 33 bp, Homo sapien
tgttgtttggtacaccacagtgttaagtgggct

SEQ ID NO: 850942 - DNA, 33 bp, Homo sapien
tgttgtttggtacaccgcagtgttaagtgggct

SEQ ID NO: 850943 - DNA, 33 bp, Homo sapien
tgttgagtagaggcaaacattcatcttacttca

SEQ ID NO: 850944 - DNA, 33 bp, Homo sapien
tgttgagtagaggcaatcattcatcttacttca

SEQ ID NO: 850945 - DNA, 33 bp, Homo sapien
agctttcctgggtcttcaacttacagatgatgg

SEQ ID NO: 850946 - DNA, 33 bp, Homo sapien
agctttcctgggtctttaacttacagatgatgg

SEQ ID NO: 850947 - DNA, 33 bp, Homo sapien
ttttgtatgttttagagatcacataggtatata

SEQ ID NO: 850948 - DNA, 33 bp, Homo sapien
ttttgtatgttttagatatcacataggtatata

SEQ ID NO: 850949 - DNA, 33 bp, Homo sapien
tgatagcgtttatatacactcttagcaatcttc

SEQ ID NO: 850950 - DNA, 33 bp, Homo sapien
tgatagcgtttatatagactcttagcaatcttc

SEQ ID NO: 850951 - DNA, 33 bp, Homo sapien
tgatttcttctctaccaaggacaaatttaatac

SEQ ID NO: 850952 - DNA, 33 bp, Homo sapien
tgatttcttctctaccgaggacaaatttaatac

SEQ ID NO: 850953 - DNA, 33 bp, Homo sapien
tggttgcaaggttaagaccctcatggagaacct

SEQ ID NO: 850954 - DNA, 33 bp, Homo sapien
tggttgcaaggttaaggccctcatggagaacct

SEQ ID NO: 850955 - DNA, 33 bp, Homo sapien
atttgcagttttcaacagtagtggcttgtcctc

SEQ ID NO: 850956 - DNA, 33 bp, Homo sapien
atttgcagttttcaacggtagtggcttgtcctc

SEQ ID NO: 850957 - DNA, 33 bp, Homo sapien
aagaactgcattcacaagttacaactgtcagac

SEQ ID NO: 850958 - DNA, 33 bp, Homo sapien
aagaactgcattcacacgttacaactgtcagac

SEQ ID NO: 850959 - DNA, 33 bp, Homo sapien
ttaatgctgaagaataacaagtctagtgatcat

SEQ ID NO: 850960 - DNA, 33 bp, Homo sapien
ttaatgctgaagaatagcaagtctagtgatcat

SEQ ID NO: 850961 - DNA, 33 bp, Homo sapien
gttgtctcacagtaaacagaggatgatagtcta

SEQ ID NO: 850962 - DNA, 33 bp, Homo sapien
gttgtctcacagtaaatagaggatgatagtcta

SEQ ID NO: 850963 - DNA, 33 bp, Homo sapien
cattgccatcatttagaagcttgttaagaatga

SEQ ID NO: 850964 - DNA, 33 bp, Homo sapien
cattgccatcatttaggagcttgttaagaatga

SEQ ID NO: 850965 - DNA, 33 bp, Homo sapien
tgtcctgttttgcaacaattctccactacaaat

SEQ ID NO: 850966 - DNA, 33 bp, Homo sapien
tgtcctgttttgcaacgattctccactacaaat

SEQ ID NO: 850967 - DNA, 33 bp, Homo sapien
tcagagaaaccaacaccattccagttttttgaa

SEQ ID NO: 850968 - DNA, 33 bp, Homo sapien
tcagagaaaccaacacgattccagttttttgaa

SEQ ID NO: 850969 - DNA, 33 bp, Homo sapien
taagaggattgattagcaaaaaggatatgtggg

SEQ ID NO: 850970 - DNA, 33 bp, Homo sapien
taagaggattgattaggaaaaaggatatgtggg

SEQ ID NO: 850971 - DNA, 33 bp, Homo sapien
aacttgttaaattccacgcctgttagttggtac

SEQ ID NO: 850972 - DNA, 33 bp, Homo sapien
aacttgttaaattccatgcctgttagttggtac

SEQ ID NO: 850973 - DNA, 33 bp, Homo sapien
tttaagaaagtatggcaaacagcccaaataaat

SEQ ID NO: 850974 - DNA, 33 bp, Homo sapien
tttaagaaagtatggccaacagcccaaataaat

SEQ ID NO: 850975 - DNA, 33 bp, Homo sapien
gagtgtcaataagaaaatatggaagcaatataa

SEQ ID NO: 850976 - DNA, 33 bp, Homo sapien
gagtgtcaataagaaagtatggaagcaatataa

SEQ ID NO: 850977 - DNA, 33 bp, Homo sapien
aattaatgagtataaacggaattaagttgaaaa

SEQ ID NO: 850978 - DNA, 33 bp, Homo sapien
aattaatgagtataaatggaattaagttgaaaa

SEQ ID NO: 850979 - DNA, 33 bp, Homo sapien
ttatgcaataattagaactccaatgtggattca

SEQ ID NO: 850980 - DNA, 33 bp, Homo sapien
ttatgcaataattagacctccaatgtggattca

SEQ ID NO: 850981 - DNA, 33 bp, Homo sapien
tgaacaactattacaacgactaaaaagatgttg

SEQ ID NO: 850982 - DNA, 33 bp, Homo sapien
tgaacaactattacaatgactaaaaagatgttg

SEQ ID NO: 850983 - DNA, 33 bp, Homo sapien
caagacatctattaaaaaacatggtgactacaa

SEQ ID NO: 850984 - DNA, 33 bp, Homo sapien
caagacatctattaaacaacatggtgactacaa

SEQ ID NO: 850985 - DNA, 33 bp, Homo sapien
tcccataccaacagaaataagtaggaaagaaaa

SEQ ID NO: 850986 - DNA, 33 bp, Homo sapien
tcccataccaacagaagtaagtaggaaagaaaa

SEQ ID NO: 850987 - DNA, 33 bp, Homo sapien
cagagagaaatgaggaacgtgtaattagaaatt

SEQ ID NO: 850988 - DNA, 33 bp, Homo sapien
cagagagaaatgaggagcgtgtaattagaaatt

SEQ ID NO: 850989 - DNA, 33 bp, Homo sapien
aacttcttgccaaaaccgggagccaccctccat

SEQ ID NO: 850990 - DNA, 33 bp, Homo sapien
aacttcttgccaaaactgggagccaccctccat

SEQ ID NO: 850991 - DNA, 33 bp, Homo sapien
atcagctctttagtccactcttacatagctatt

SEQ ID NO: 850992 - DNA, 33 bp, Homo sapien
atcagctctttagtccgctcttacatagctatt

SEQ ID NO: 850993 - DNA, 33 bp, Homo sapien
aagacttcaaacttccacaccaagttttaatcc

SEQ ID NO: 850994 - DNA, 33 bp, Homo sapien
aagacttcaaacttccgcaccaagttttaatcc

SEQ ID NO: 850995 - DNA, 33 bp, Homo sapien
tgaaacaataagtcaccatataatatgcatgat

SEQ ID NO: 850996 - DNA, 33 bp, Homo sapien
tgaaacaataagtcactatataatatgcatgat

SEQ ID NO: 850997 - DNA, 33 bp, Homo sapien
tagctctctcctttcaaagactttcccggcaca

SEQ ID NO: 850998 - DNA, 33 bp, Homo sapien
tagctctctcctttcagagactttcccggcaca

SEQ ID NO: 850999 - DNA, 33 bp, Homo sapien
aattccactcttgtcacgaacctctgggatccc

SEQ ID NO: 851000 - DNA, 33 bp, Homo sapien
aattccactcttgtcatgaacctctgggatccc

SEQ ID NO: 851001 - DNA, 33 bp, Homo sapien
tttttttcatcactcaataggatcatgagaggt

SEQ ID NO: 851002 - DNA, 33 bp, Homo sapien
tttttttcatcactcagtaggatcatgagaggt

SEQ ID NO: 851003 - DNA, 33 bp, Homo sapien
acatggtatcccagggaagatggagagtaccca

SEQ ID NO: 851004 - DNA, 33 bp, Homo sapien
acatggtatcccagggcagatggagagtaccca

SEQ ID NO: 851005 - DNA, 33 bp, Homo sapien
ttacttactccccacacctgacgaatgcacagg

SEQ ID NO: 851006 - DNA, 33 bp, Homo sapien
ttacttactccccacatctgacgaatgcacagg

SEQ ID NO: 851007 - DNA, 33 bp, Homo sapien
ttataagtagttctctaaaaagccatcaagttt

SEQ ID NO: 851008 - DNA, 33 bp, Homo sapien
ttataagtagttctctgaaaagccatcaagttt

SEQ ID NO: 851009 - DNA, 33 bp, Homo sapien
tactaaagctgtttgaagcaaagcattggcagc

SEQ ID NO: 851010 - DNA, 33 bp, Homo sapien
tactaaagctgtttgaggcaaagcattggcagc

SEQ ID NO: 851011 - DNA, 33 bp, Homo sapien
taaccagatggacacccaatcctgtagatattt

SEQ ID NO: 851012 - DNA, 33 bp, Homo sapien
taaccagatggacacctaatcctgtagatattt

SEQ ID NO: 851013 - DNA, 33 bp, Homo sapien
aacattttgggccataagtaataaggaagtcca

SEQ ID NO: 851014 - DNA, 33 bp, Homo sapien
aacattttgggccataggtaataaggaagtcca

SEQ ID NO: 851015 - DNA, 33 bp, Homo sapien
cctcaaaaatagcttacggtactatgacttaaa

SEQ ID NO: 851016 - DNA, 33 bp, Homo sapien
cctcaaaaatagcttatggtactatgacttaaa

SEQ ID NO: 851017 - DNA, 33 bp, Homo sapien
aagcttttttgggagaagaattcaggcaggctg

SEQ ID NO: 851018 - DNA, 33 bp, Homo sapien
aagcttttttgggagaggaattcaggcaggctg

SEQ ID NO: 851019 - DNA, 33 bp, Homo sapien
aatcatcatttcacctcaaaccttgtgaaaact

SEQ ID NO: 851020 - DNA, 33 bp, Homo sapien
aatcatcatttcaccttaaaccttgtgaaaact

SEQ ID NO: 851021 - DNA, 33 bp, Homo sapien
gtggttatggttgaagaaagtgctgggcaagga

SEQ ID NO: 851022 - DNA, 33 bp, Homo sapien
gtggttatggttgaaggaagtgctgggcaagga

SEQ ID NO: 851023 - DNA, 33 bp, Homo sapien
agactgtttgggaatacggaaaagaagttgaag

SEQ ID NO: 851024 - DNA, 33 bp, Homo sapien
agactgtttgggaatatggaaaagaagttgaag

SEQ ID NO: 851025 - DNA, 33 bp, Homo sapien
ctgtattattcaactacggctaattcaaacttc

SEQ ID NO: 851026 - DNA, 33 bp, Homo sapien
ctgtattattcaactatggctaattcaaacttc

SEQ ID NO: 851027 - DNA, 33 bp, Homo sapien
caccatgaaatactagacggccataaaaaggaa

SEQ ID NO: 851028 - DNA, 33 bp, Homo sapien
caccatgaaatactaggcggccataaaaaggaa

SEQ ID NO: 851029 - DNA, 33 bp, Homo sapien
aatccactcagaagcaaagagagagatcattat

SEQ ID NO: 851030 - DNA, 33 bp, Homo sapien
aatccactcagaagcagagagagagatcattat

SEQ ID NO: 851031 - DNA, 33 bp, Homo sapien
tttgatgttgttcaaacatagcacattgtttta

SEQ ID NO: 851032 - DNA, 33 bp, Homo sapien
tttgatgttgttcaaatatagcacattgtttta

SEQ ID NO: 851033 - DNA, 33 bp, Homo sapien
tcttgcctactgatgactcacagctgagtccac

SEQ ID NO: 851034 - DNA, 33 bp, Homo sapien
tcttgcctactgatgattcacagctgagtccac

SEQ ID NO: 851035 - DNA, 33 bp, Homo sapien
atacaactgtgcattcactctcacccattagta

SEQ ID NO: 851036 - DNA, 33 bp, Homo sapien
atacaactgtgcattcgctctcacccattagta

SEQ ID NO: 851037 - DNA, 33 bp, Homo sapien
atatcaaagtccaaatcaaatttataaagaaaa

SEQ ID NO: 851038 - DNA, 33 bp, Homo sapien
atatcaaagtccaaatgaaatttataaagaaaa

SEQ ID NO: 851039 - DNA, 33 bp, Homo sapien
gcaagcgagtgacagaactgagattagaacttg

SEQ ID NO: 851040 - DNA, 33 bp, Homo sapien
gcaagcgagtgacagatctgagattagaacttg

SEQ ID NO: 851041 - DNA, 33 bp, Homo sapien
ggtagtgttgtgtgcaatattcttttggggatg

SEQ ID NO: 851042 - DNA, 33 bp, Homo sapien
ggtagtgttgtgtgcattattcttttggggatg

SEQ ID NO: 851043 - DNA, 33 bp, Homo sapien
aggctgtcctattcacagaaacattaaagttaa

SEQ ID NO: 851044 - DNA, 33 bp, Homo sapien
aggctgtcctattcacggaaacattaaagttaa

SEQ ID NO: 851045 - DNA, 33 bp, Homo sapien
gcactgaccaagctagaagaaaggaaggtctcc

SEQ ID NO: 851046 - DNA, 33 bp, Homo sapien
gcactgaccaagctagcagaaaggaaggtctcc

SEQ ID NO: 851047 - DNA, 33 bp, Homo sapien
tgaataggtccctgaacataccatcatgtcaca

SEQ ID NO: 851048 - DNA, 33 bp, Homo sapien
tgaataggtccctgaatataccatcatgtcaca

SEQ ID NO: 851049 - DNA, 33 bp, Homo sapien
cacatttgttgagaaacggaacaaaacattatg

SEQ ID NO: 851050 - DNA, 33 bp, Homo sapien
cacatttgttgagaaagggaacaaaacattatg

SEQ ID NO: 851051 - DNA, 33 bp, Homo sapien
ctagcgactgttagtacggcaaaaatctcttat

SEQ ID NO: 851052 - DNA, 33 bp, Homo sapien
ctagcgactgttagtatggcaaaaatctcttat

SEQ ID NO: 851053 - DNA, 33 bp, Homo sapien
gcatttccacttaccaatccttcttctgtcctc

SEQ ID NO: 851054 - DNA, 33 bp, Homo sapien
gcatttccacttaccagtccttcttctgtcctc

SEQ ID NO: 851055 - DNA, 33 bp, Homo sapien
gaaaaggagggtccaactgatgaaataggtctt

SEQ ID NO: 851056 - DNA, 33 bp, Homo sapien
gaaaaggagggtccaagtgatgaaataggtctt

SEQ ID NO: 851057 - DNA, 33 bp, Homo sapien
aacttctataagaaacagtaatcccacctacta

SEQ ID NO: 851058 - DNA, 33 bp, Homo sapien
aacttctataagaaacggtaatcccacctacta

SEQ ID NO: 851059 - DNA, 33 bp, Homo sapien
agaggtgtttgagggtaaatatcttcatattct

SEQ ID NO: 851060 - DNA, 33 bp, Homo sapien
agaggtgtttgagggtgaatatcttcatattct

SEQ ID NO: 851061 - DNA, 33 bp, Homo sapien
ataacttctcactctgaaaatctttatagcaat

SEQ ID NO: 851062 - DNA, 33 bp, Homo sapien
ataacttctcactctggaaatctttatagcaat

SEQ ID NO: 851063 - DNA, 33 bp, Homo sapien
taaacgtaatccatcacataagcagaatcaaag

SEQ ID NO: 851064 - DNA, 33 bp, Homo sapien
taaacgtaatccatcagataagcagaatcaaag

SEQ ID NO: 851065 - DNA, 33 bp, Homo sapien
tctcaaaacaaccctgaatactacatgttgcaa

SEQ ID NO: 851066 - DNA, 33 bp, Homo sapien
tctcaaaacaaccctgcatactacatgttgcaa

SEQ ID NO: 851067 - DNA, 33 bp, Homo sapien
aatactgtcctagaagaattcacagtgatagtt

SEQ ID NO: 851068 - DNA, 33 bp, Homo sapien
aatactgtcctagaaggattcacagtgatagtt

SEQ ID NO: 851069 - DNA, 33 bp, Homo sapien
agcaattattcattgactacctacttttaccta

SEQ ID NO: 851070 - DNA, 33 bp, Homo sapien
agcaattattcattgagtacctacttttaccta

SEQ ID NO: 851071 - DNA, 33 bp, Homo sapien
attcatctgcctggaaatcctctttaatagcag

SEQ ID NO: 851072 - DNA, 33 bp, Homo sapien
attcatctgcctggaagtcctctttaatagcag

SEQ ID NO: 851073 - DNA, 33 bp, Homo sapien
ctttcacagatctaacactatttaatgggtatg

SEQ ID NO: 851074 - DNA, 33 bp, Homo sapien
ctttcacagatctaacgctatttaatgggtatg

SEQ ID NO: 851075 - DNA, 33 bp, Homo sapien
gctcagtattatttcacgatggtttatctttct

SEQ ID NO: 851076 - DNA, 33 bp, Homo sapien
gctcagtattatttcatgatggtttatctttct

SEQ ID NO: 851077 - DNA, 33 bp, Homo sapien
agaggtgctgtcagataaaggcgacatgagctt

SEQ ID NO: 851078 - DNA, 33 bp, Homo sapien
agaggtgctgtcagattaaggcgacatgagctt

SEQ ID NO: 851079 - DNA, 33 bp, Homo sapien
ttcagaaaagtggaaaactggctctatgagtat

SEQ ID NO: 851080 - DNA, 33 bp, Homo sapien
ttcagaaaagtggaaacctggctctatgagtat

SEQ ID NO: 851081 - DNA, 33 bp, Homo sapien
tctcatgggatagagcactatggctcagagaaa

SEQ ID NO: 851082 - DNA, 33 bp, Homo sapien
tctcatgggatagagcgctatggctcagagaaa

SEQ ID NO: 851083 - DNA, 33 bp, Homo sapien
ttcagttaagttttcacgaatctcctgttggaa

SEQ ID NO: 851084 - DNA, 33 bp, Homo sapien
ttcagttaagttttcatgaatctcctgttggaa

SEQ ID NO: 851085 - DNA, 33 bp, Homo sapien
aatgctcacacagcaactggtttcaagaggtaa

SEQ ID NO: 851086 - DNA, 33 bp, Homo sapien
aatgctcacacagcaagtggtttcaagaggtaa

SEQ ID NO: 851087 - DNA, 33 bp, Homo sapien
aactagcagaagatacaatataaccaaaatcag

SEQ ID NO: 851088 - DNA, 33 bp, Homo sapien
aactagcagaagatacgatataaccaaaatcag

SEQ ID NO: 851089 - DNA, 33 bp, Homo sapien
atttctgaacatattacgctcccgactgaacca

SEQ ID NO: 851090 - DNA, 33 bp, Homo sapien
atttctgaacatattatgctcccgactgaacca

SEQ ID NO: 851091 - DNA, 33 bp, Homo sapien
aaatatgggcaaactgaatctagcaacatatta

SEQ ID NO: 851092 - DNA, 33 bp, Homo sapien
aaatatgggcaaactgcatctagcaacatatta

SEQ ID NO: 851093 - DNA, 33 bp, Homo sapien
agcaacatattaaaaagcttatccactttgatc

SEQ ID NO: 851094 - DNA, 33 bp, Homo sapien
agcaacatattaaaaatcttatccactttgatc

SEQ ID NO: 851095 - DNA, 33 bp, Homo sapien
aataaacaatttcagcaaagtctcagggatata

SEQ ID NO: 851096 - DNA, 33 bp, Homo sapien
aataaacaatttcagcgaagtctcagggatata

SEQ ID NO: 851097 - DNA, 33 bp, Homo sapien
ggacaagagtgattgagaccagatactgggaaa

SEQ ID NO: 851098 - DNA, 33 bp, Homo sapien
ggacaagagtgattgataccagatactgggaaa

SEQ ID NO: 851099 - DNA, 33 bp, Homo sapien
cgtgagaatgcaaacaactttttgagatcctgt

SEQ ID NO: 851100 - DNA, 33 bp, Homo sapien
cgtgagaatgcaaacatctttttgagatcctgt

SEQ ID NO: 851101 - DNA, 33 bp, Homo sapien
agctaatgtctgacaaggtagattttatggcaa

SEQ ID NO: 851102 - DNA, 33 bp, Homo sapien
agctaatgtctgacaatgtagattttatggcaa

SEQ ID NO: 851103 - DNA, 33 bp, Homo sapien
aaattgaagccttagaaaatgttatctgcttcc

SEQ ID NO: 851104 - DNA, 33 bp, Homo sapien
aaattgaagccttagagaatgttatctgcttcc

SEQ ID NO: 851105 - DNA, 33 bp, Homo sapien
aaataaaccatcacaaagttggaaactctcttt

SEQ ID NO: 851106 - DNA, 33 bp, Homo sapien
aaataaaccatcacaaggttggaaactctcttt

SEQ ID NO: 851107 - DNA, 33 bp, Homo sapien
aatttcttatggtctgacaacataataaattat

SEQ ID NO: 851108 - DNA, 33 bp, Homo sapien
aatttcttatggtctggcaacataataaattat

SEQ ID NO: 851109 - DNA, 33 bp, Homo sapien
cataatatggtttctaaaaatgcatgaaggaat

SEQ ID NO: 851110 - DNA, 33 bp, Homo sapien
cataatatggtttctacaaatgcatgaaggaat

SEQ ID NO: 851111 - DNA, 33 bp, Homo sapien
cttgccactgtaaagaaaaggacataaacctgg

SEQ ID NO: 851112 - DNA, 33 bp, Homo sapien
cttgccactgtaaagagaaggacataaacctgg

SEQ ID NO: 851113 - DNA, 33 bp, Homo sapien
tcttctgagtcgctcacggtgggaactgtagac

SEQ ID NO: 851114 - DNA, 33 bp, Homo sapien
tcttctgagtcgctcatggtgggaactgtagac

SEQ ID NO: 851115 - DNA, 33 bp, Homo sapien
aattttcttgtaatgaacacaaatagtctttat

SEQ ID NO: 851116 - DNA, 33 bp, Homo sapien
aattttcttgtaatgagcacaaatagtctttat

SEQ ID NO: 851117 - DNA, 33 bp, Homo sapien
agtctcaaaaaatctcaaaccctcagggactga

SEQ ID NO: 851118 - DNA, 33 bp, Homo sapien
agtctcaaaaaatctcgaaccctcagggactga

SEQ ID NO: 851119 - DNA, 33 bp, Homo sapien
catcatttattgtataaggagtccttaccccat

SEQ ID NO: 851120 - DNA, 33 bp, Homo sapien
catcatttattgtatagggagtccttaccccat

SEQ ID NO: 851121 - DNA, 33 bp, Homo sapien
gttactcaatgtgaaactatactacagggctac

SEQ ID NO: 851122 - DNA, 33 bp, Homo sapien
gttactcaatgtgaaagtatactacagggctac

SEQ ID NO: 851123 - DNA, 33 bp, Homo sapien
gcacagaccagtgacactataaaacaaccacat

SEQ ID NO: 851124 - DNA, 33 bp, Homo sapien
gcacagaccagtgacagtataaaacaaccacat

SEQ ID NO: 851125 - DNA, 33 bp, Homo sapien
agcctgctggcacacaatcatggaagcaagtcc

SEQ ID NO: 851126 - DNA, 33 bp, Homo sapien
agcctgctggcacacagtcatggaagcaagtcc

SEQ ID NO: 851127 - DNA, 33 bp, Homo sapien
accaaaggatttcagccatggcagtcctggtct

SEQ ID NO: 851128 - DNA, 33 bp, Homo sapien
accaaaggatttcagctatggcagtcctggtct

SEQ ID NO: 851129 - DNA, 33 bp, Homo sapien
tgaacataaccacgaaacaattggctgacaaca

SEQ ID NO: 851130 - DNA, 33 bp, Homo sapien
tgaacataaccacgaagcaattggctgacaaca

SEQ ID NO: 851131 - DNA, 33 bp, Homo sapien
tcagctctgtgacttacgactgtctaacatggg

SEQ ID NO: 851132 - DNA, 33 bp, Homo sapien
tcagctctgtgacttatgactgtctaacatggg

SEQ ID NO: 851133 - DNA, 33 bp, Homo sapien
attgaacaatggcaaacagtctggtttgttgct

SEQ ID NO: 851134 - DNA, 33 bp, Homo sapien
attgaacaatggcaaatagtctggtttgttgct

SEQ ID NO: 851135 - DNA, 33 bp, Homo sapien
acaagagttgttagaagttatagacaaatcaat

SEQ ID NO: 851136 - DNA, 33 bp, Homo sapien
acaagagttgttagaatttatagacaaatcaat

SEQ ID NO: 851137 - DNA, 33 bp, Homo sapien
tcctgatctgatagccaatttcagcgtttatga

SEQ ID NO: 851138 - DNA, 33 bp, Homo sapien
tcctgatctgatagcctatttcagcgtttatga

SEQ ID NO: 851139 - DNA, 33 bp, Homo sapien
aggcaagcaccttttggagtatagcagttaatg

SEQ ID NO: 851140 - DNA, 33 bp, Homo sapien
aggcaagcaccttttgtagtatagcagttaatg

SEQ ID NO: 851141 - DNA, 33 bp, Homo sapien
tgacacaagcaggtcaacttttaaacttaacct

SEQ ID NO: 851142 - DNA, 33 bp, Homo sapien
tgacacaagcaggtcagcttttaaacttaacct

SEQ ID NO: 851143 - DNA, 33 bp, Homo sapien
actttatcgcccccacaacgtggtgttgggtct

SEQ ID NO: 851144 - DNA, 33 bp, Homo sapien
actttatcgcccccacgacgtggtgttgggtct

SEQ ID NO: 851145 - DNA, 33 bp, Homo sapien
aggaactagtaactaactgaatttctccggtat

SEQ ID NO: 851146 - DNA, 33 bp, Homo sapien
aggaactagtaactaattgaatttctccggtat

SEQ ID NO: 851147 - DNA, 33 bp, Homo sapien
cactttgctcattttcactgtaactcatttcac

SEQ ID NO: 851148 - DNA, 33 bp, Homo sapien
cactttgctcattttcgctgtaactcatttcac

SEQ ID NO: 851149 - DNA, 33 bp, Homo sapien
cagaagataaacaaccacaacctattaagaaag

SEQ ID NO: 851150 - DNA, 33 bp, Homo sapien
cagaagataaacaaccgcaacctattaagaaag

SEQ ID NO: 851151 - DNA, 33 bp, Homo sapien
cctcacttcatttctggaaagtctaaatccaat

SEQ ID NO: 851152 - DNA, 33 bp, Homo sapien
cctcacttcatttctgtaaagtctaaatccaat

SEQ ID NO: 851153 - DNA, 33 bp, Homo sapien
taattaccttcgtctaagagaagaatgggtcaa

SEQ ID NO: 851154 - DNA, 33 bp, Homo sapien
taattaccttcgtctaggagaagaatgggtcaa

SEQ ID NO: 851155 - DNA, 33 bp, Homo sapien
agatgagatgttttcccagaagattttaaaaga

SEQ ID NO: 851156 - DNA, 33 bp, Homo sapien
agatgagatgttttcctagaagattttaaaaga

SEQ ID NO: 851157 - DNA, 33 bp, Homo sapien
tttgagaataaagcacaatacctcacagccaac

SEQ ID NO: 851158 - DNA, 33 bp, Homo sapien
tttgagaataaagcacgatacctcacagccaac

SEQ ID NO: 851159 - DNA, 33 bp, Homo sapien
tcagtgcttattttccacttataagaacacaca

SEQ ID NO: 851160 - DNA, 33 bp, Homo sapien
tcagtgcttattttccgcttataagaacacaca

SEQ ID NO: 851161 - DNA, 33 bp, Homo sapien
ccaataaaaacacacacgtgaaacaggaagagc

SEQ ID NO: 851162 - DNA, 33 bp, Homo sapien
ccaataaaaacacacaggtgaaacaggaagagc

SEQ ID NO: 851163 - DNA, 33 bp, Homo sapien
gttgtctggtcccagccctgagatgatttaaaa

SEQ ID NO: 851164 - DNA, 33 bp, Homo sapien
gttgtctggtcccagctctgagatgatttaaaa

SEQ ID NO: 851165 - DNA, 33 bp, Homo sapien
gtacagcgggtttgagaaaaaagcttggtaaat

SEQ ID NO: 851166 - DNA, 33 bp, Homo sapien
gtacagcgggtttgaggaaaaagcttggtaaat

SEQ ID NO: 851167 - DNA, 33 bp, Homo sapien
tatacactatatttaactgacatgtctcatcag

SEQ ID NO: 851168 - DNA, 33 bp, Homo sapien
tatacactatatttaattgacatgtctcatcag

SEQ ID NO: 851169 - DNA, 33 bp, Homo sapien
tttctaacagaagttacgttaaagccaggcatc

SEQ ID NO: 851170 - DNA, 33 bp, Homo sapien
tttctaacagaagttatgttaaagccaggcatc

SEQ ID NO: 851171 - DNA, 33 bp, Homo sapien
agtgctttctaagctaagttaggtattttggac

SEQ ID NO: 851172 - DNA, 33 bp, Homo sapien
agtgctttctaagctaggttaggtattttggac

SEQ ID NO: 851173 - DNA, 33 bp, Homo sapien
tccaaaggtattagcgaatctttagtattgtcc

SEQ ID NO: 851174 - DNA, 33 bp, Homo sapien
tccaaaggtattagcgtatctttagtattgtcc

SEQ ID NO: 851175 - DNA, 33 bp, Homo sapien
tcatataacccttcacacctaacatattttatt

SEQ ID NO: 851176 - DNA, 33 bp, Homo sapien
tcatataacccttcacgcctaacatattttatt

SEQ ID NO: 851177 - DNA, 33 bp, Homo sapien
gttctgtgcatggaaaagggtttatgcatatta

SEQ ID NO: 851178 - DNA, 33 bp, Homo sapien
gttctgtgcatggaaatgggtttatgcatatta

SEQ ID NO: 851179 - DNA, 33 bp, Homo sapien
aagaagagtactggaaacataaaatattatccc

SEQ ID NO: 851180 - DNA, 33 bp, Homo sapien
aagaagagtactggaagcataaaatattatccc

SEQ ID NO: 851181 - DNA, 33 bp, Homo sapien
ggttactccttttgtcactcctctatggacatt

SEQ ID NO: 851182 - DNA, 33 bp, Homo sapien
ggttactccttttgtcgctcctctatggacatt

SEQ ID NO: 851183 - DNA, 33 bp, Homo sapien
cacagctttctacaaggatttgagatttgacat

SEQ ID NO: 851184 - DNA, 33 bp, Homo sapien
cacagctttctacaagtatttgagatttgacat

SEQ ID NO: 851185 - DNA, 33 bp, Homo sapien
tagttaccgggaatcacctaaccatgaccaaaa

SEQ ID NO: 851186 - DNA, 33 bp, Homo sapien
tagttaccgggaatcatctaaccatgaccaaaa

SEQ ID NO: 851187 - DNA, 33 bp, Homo sapien
gaagcagtgggaaaagccctgtcggattgctgg

SEQ ID NO: 851188 - DNA, 33 bp, Homo sapien
gaagcagtgggaaaagtcctgtcggattgctgg

SEQ ID NO: 851189 - DNA, 33 bp, Homo sapien
atgcaatcctgaaccactggaaatttgacataa

SEQ ID NO: 851190 - DNA, 33 bp, Homo sapien
atgcaatcctgaaccattggaaatttgacataa

SEQ ID NO: 851191 - DNA, 33 bp, Homo sapien
acattaaataaaaataacatggcacaaaataca

SEQ ID NO: 851192 - DNA, 33 bp, Homo sapien
acattaaataaaaatagcatggcacaaaataca

SEQ ID NO: 851193 - DNA, 33 bp, Homo sapien
ttttaggtgtcattgacgttagagttctgtttt

SEQ ID NO: 851194 - DNA, 33 bp, Homo sapien
ttttaggtgtcattgatgttagagttctgtttt

SEQ ID NO: 851195 - DNA, 33 bp, Homo sapien
ttccccatttctacacagtgccctttagaaggg

SEQ ID NO: 851196 - DNA, 33 bp, Homo sapien
ttccccatttctacaccgtgccctttagaaggg

SEQ ID NO: 851197 - DNA, 33 bp, Homo sapien
ccatagagcctatgaacgtgaccttattcaaaa

SEQ ID NO: 851198 - DNA, 33 bp, Homo sapien
ccatagagcctatgaatgtgaccttattcaaaa

SEQ ID NO: 851199 - DNA, 33 bp, Homo sapien
ttccaggtcattcagaatagcagtcagatatac

SEQ ID NO: 851200 - DNA, 33 bp, Homo sapien
ttccaggtcattcagagtagcagtcagatatac

SEQ ID NO: 851201 - DNA, 33 bp, Homo sapien
tcactctccaatgtcacgctaacaccacatggc

SEQ ID NO: 851202 - DNA, 33 bp, Homo sapien
tcactctccaatgtcatgctaacaccacatggc

SEQ ID NO: 851203 - DNA, 33 bp, Homo sapien
tcatttattagactgaccaaaatgagtgctggc

SEQ ID NO: 851204 - DNA, 33 bp, Homo sapien
tcatttattagactgatcaaaatgagtgctggc

SEQ ID NO: 851205 - DNA, 33 bp, Homo sapien
ttatgtctatgaaaggacatagcagtgccagga

SEQ ID NO: 851206 - DNA, 33 bp, Homo sapien
ttatgtctatgaaagggcatagcagtgccagga

SEQ ID NO: 851207 - DNA, 33 bp, Homo sapien
cagcctctgtccaaacacaaggtgaagtacaac

SEQ ID NO: 851208 - DNA, 33 bp, Homo sapien
cagcctctgtccaaacgcaaggtgaagtacaac

SEQ ID NO: 851209 - DNA, 33 bp, Homo sapien
tctgaaatgcctattagatagttgtggagcttc

SEQ ID NO: 851210 - DNA, 33 bp, Homo sapien
tctgaaatgcctattatatagttgtggagcttc

SEQ ID NO: 851211 - DNA, 33 bp, Homo sapien
ttgacgtcttggaagccctactcttcatctgta

SEQ ID NO: 851212 - DNA, 33 bp, Homo sapien
ttgacgtcttggaagctctactcttcatctgta

SEQ ID NO: 851213 - DNA, 33 bp, Homo sapien
ggtaactttctacaacaggcatttagaaaccat

SEQ ID NO: 851214 - DNA, 33 bp, Homo sapien
ggtaactttctacaacgggcatttagaaaccat

SEQ ID NO: 851215 - DNA, 33 bp, Homo sapien
acttcaaactagatgtaaagacgaataggacat

SEQ ID NO: 851216 - DNA, 33 bp, Homo sapien
acttcaaactagatgtgaagacgaataggacat

SEQ ID NO: 851217 - DNA, 33 bp, Homo sapien
gtctcaaatataaaataatcagtttttgccttg

SEQ ID NO: 851218 - DNA, 33 bp, Homo sapien
gtctcaaatataaaatcatcagtttttgccttg

SEQ ID NO: 851219 - DNA, 33 bp, Homo sapien
tacagaagagaaagaaagtgaaataaacaggtt

SEQ ID NO: 851220 - DNA, 33 bp, Homo sapien
tacagaagagaaagaatgtgaaataaacaggtt

SEQ ID NO: 851221 - DNA, 33 bp, Homo sapien
atttgagagaggtatcacatgagcagcatggac

SEQ ID NO: 851222 - DNA, 33 bp, Homo sapien
atttgagagaggtatcccatgagcagcatggac

SEQ ID NO: 851223 - DNA, 33 bp, Homo sapien
cttgttactgtccacaaatatgtgtgtggttgc

SEQ ID NO: 851224 - DNA, 33 bp, Homo sapien
cttgttactgtccacagatatgtgtgtggttgc

SEQ ID NO: 851225 - DNA, 33 bp, Homo sapien
aggaaagcaggaaacactctaggcagagcagag

SEQ ID NO: 851226 - DNA, 33 bp, Homo sapien
aggaaagcaggaaacattctaggcagagcagag

SEQ ID NO: 851227 - DNA, 33 bp, Homo sapien
caatagtgagatcctacgtcttgaagaaggaaa

SEQ ID NO: 851228 - DNA, 33 bp, Homo sapien
caatagtgagatcctatgtcttgaagaaggaaa

SEQ ID NO: 851229 - DNA, 33 bp, Homo sapien
tcatgccaaacccaggccagtacaagatcccag

SEQ ID NO: 851230 - DNA, 33 bp, Homo sapien
tcatgccaaacccaggtcagtacaagatcccag

SEQ ID NO: 851231 - DNA, 33 bp, Homo sapien
gacgactgcactcaacaccaacatcaatggatg

SEQ ID NO: 851232 - DNA, 33 bp, Homo sapien
gacgactgcactcaacgccaacatcaatggatg

SEQ ID NO: 851233 - DNA, 33 bp, Homo sapien
tgtaagataggcaaaaattagcaactgattaga

SEQ ID NO: 851234 - DNA, 33 bp, Homo sapien
tgtaagataggcaaaatttagcaactgattaga

SEQ ID NO: 851235 - DNA, 33 bp, Homo sapien
ttcttctgtttacataaaaatgcctcatattaa

SEQ ID NO: 851236 - DNA, 33 bp, Homo sapien
ttcttctgtttacatagaaatgcctcatattaa

SEQ ID NO: 851237 - DNA, 33 bp, Homo sapien
cttggccacacaggagcatcatttgcagagatt

SEQ ID NO: 851238 - DNA, 33 bp, Homo sapien
cttggccacacaggaggatcatttgcagagatt

SEQ ID NO: 851239 - DNA, 33 bp, Homo sapien
gaaactcaagtagatacgtttctcagtactgaa

SEQ ID NO: 851240 - DNA, 33 bp, Homo sapien
gaaactcaagtagatatgtttctcagtactgaa

SEQ ID NO: 851241 - DNA, 33 bp, Homo sapien
ctattggaggccagaacacatagtaaatatata

SEQ ID NO: 851242 - DNA, 33 bp, Homo sapien
ctattggaggccagaatacatagtaaatatata

SEQ ID NO: 851243 - DNA, 33 bp, Homo sapien
tttggcaaaatggggcaactccttgcagcagtg

SEQ ID NO: 851244 - DNA, 33 bp, Homo sapien
tttggcaaaatggggcgactccttgcagcagtg

SEQ ID NO: 851245 - DNA, 33 bp, Homo sapien
ctgtagtagactgaacccttcaagtgtctgtca

SEQ ID NO: 851246 - DNA, 33 bp, Homo sapien
ctgtagtagactgaactcttcaagtgtctgtca

SEQ ID NO: 851247 - DNA, 33 bp, Homo sapien
aatgagggatatatcacggctaagtaagaccta

SEQ ID NO: 851248 - DNA, 33 bp, Homo sapien
aatgagggatatatcatggctaagtaagaccta

SEQ ID NO: 851249 - DNA, 33 bp, Homo sapien
gcttctttggattttacggtggctttctgattt

SEQ ID NO: 851250 - DNA, 33 bp, Homo sapien
gcttctttggattttatggtggctttctgattt

SEQ ID NO: 851251 - DNA, 33 bp, Homo sapien; identical to SEQ ID NO: 851249

SEQ ID NO: 851252 - DNA, 33 bp, Homo sapien; identical to SEQ ID NO: 851250

SEQ ID NO: 851253 - DNA, 33 bp, Homo sapien
ctaataaactgtctccaaagctgaattgatatg

SEQ ID NO: 851254 - DNA, 33 bp, Homo sapien
ctaataaactgtctccgaagctgaattgatatg

SEQ ID NO: 851255 - DNA, 33 bp, Homo sapien; identical to SEQ ID NO: 851253

SEQ ID NO: 851256 - DNA, 33 bp, Homo sapien; identical to SEQ ID NO: 851254

SEQ ID NO: 851257 - DNA, 33 bp, Homo sapien
gggacgaaccacagagaagatccacgaggttgt

SEQ ID NO: 851258 - DNA, 33 bp, Homo sapien
gggacgaaccacagaggagatccacgaggttgt

SEQ ID NO: 851259 - DNA, 33 bp, Homo sapien
aatcagagtagtaaagacttgggtaataactag

SEQ ID NO: 851260 - DNA, 33 bp, Homo sapien
aatcagagtagtaaaggcttgggtaataactag

SEQ ID NO: 851261 - DNA, 33 bp, Homo sapien
cactgaagaagtttcaaaaggctaaattcttct

SEQ ID NO: 851262 - DNA, 33 bp, Homo sapien
cactgaagaagtttcagaaggctaaattcttct

SEQ ID NO: 851263 - DNA, 33 bp, Homo sapien
ggggcacaggacattactaagctgcacaaacgg

SEQ ID NO: 851264 - DNA, 33 bp, Homo sapien
ggggcacaggacattagtaagctgcacaaacgg

SEQ ID NO: 851265 - DNA, 33 bp, Homo sapien
tcttttccctgtttcaaaattcaccctgatact

SEQ ID NO: 851266 - DNA, 33 bp, Homo sapien
tcttttccctgtttcagaattcaccctgatact

SEQ ID NO: 851267 - DNA, 33 bp, Homo sapien
atgaaagggaaataacaatactggaaatttagg

SEQ ID NO: 851268 - DNA, 33 bp, Homo sapien
atgaaagggaaataacgatactggaaatttagg

SEQ ID NO: 851269 - DNA, 33 bp, Homo sapien
ttctgagattgtagtgaaaggtaaatctgaaat

SEQ ID NO: 851270 - DNA, 33 bp, Homo sapien
ttctgagattgtagtgcaaggtaaatctgaaat

SEQ ID NO: 851271 - DNA, 33 bp, Homo sapien
ccagaggcttccagggaacagggtgctggaaac

SEQ ID NO: 851272 - DNA, 33 bp, Homo sapien
ccagaggcttccaggggacagggtgctggaaac

SEQ ID NO: 851273 - DNA, 33 bp, Homo sapien
gtttgcagggtgagtaaatggataatgaagaaa

SEQ ID NO: 851274 - DNA, 33 bp, Homo sapien
gtttgcagggtgagtagatggataatgaagaaa

SEQ ID NO: 851275 - DNA, 33 bp, Homo sapien
ttttatcttttcaaaaactactgactttcactg

SEQ ID NO: 851276 - DNA, 33 bp, Homo sapien
ttttatcttttcaaaacctactgactttcactg

SEQ ID NO: 851277 - DNA, 33 bp, Homo sapien
tagatgtaagcagccaagagtatctaggaaatg

SEQ ID NO: 851278 - DNA, 33 bp, Homo sapien
tagatgtaagcagccaggagtatctaggaaatg

SEQ ID NO: 851279 - DNA, 33 bp, Homo sapien
tcttataccagtttcccgagtggcctgtaaatt

SEQ ID NO: 851280 - DNA, 33 bp, Homo sapien
tcttataccagtttcctgagtggcctgtaaatt

SEQ ID NO: 851281 - DNA, 33 bp, Homo sapien
aaaactgttatggaagaagagagcctggtgaga

SEQ ID NO: 851282 - DNA, 33 bp, Homo sapien
aaaactgttatggaagcagagagcctggtgaga

SEQ ID NO: 851283 - DNA, 33 bp, Homo sapien
tcagcttggccctagaaaaaactgttatggaag

SEQ ID NO: 851284 - DNA, 33 bp, Homo sapien
tcagcttggccctagacaaaactgttatggaag

SEQ ID NO: 851285 - DNA, 33 bp, Homo sapien
tggggctgtttgagagcaaagatcagtgagaag

SEQ ID NO: 851286 - DNA, 33 bp, Homo sapien
tggggctgtttgagaggaaagatcagtgagaag

SEQ ID NO: 851287 - DNA, 33 bp, Homo sapien
gggttttctgacagatgagtgtgattgcatgtg

SEQ ID NO: 851288 - DNA, 33 bp, Homo sapien
gggttttctgacagattagtgtgattgcatgtg

SEQ ID NO: 851289 - DNA, 33 bp, Homo sapien
acgcctttcagctgaaaaagcaaaatgaaagga

SEQ ID NO: 851290 - DNA, 33 bp, Homo sapien
acgcctttcagctgaagaagcaaaatgaaagga

SEQ ID NO: 851291 - DNA, 33 bp, Homo sapien
ttttgtgccccacatacgatgaattccggtgtg

SEQ ID NO: 851292 - DNA, 33 bp, Homo sapien
ttttgtgccccacatatgatgaattccggtgtg

SEQ ID NO: 851293 - DNA, 33 bp, Homo sapien
tctctgaagttaagtcaccctacctggatgtcc

SEQ ID NO: 851294 - DNA, 33 bp, Homo sapien
tctctgaagttaagtcgccctacctggatgtcc

SEQ ID NO: 851295 - DNA, 33 bp, Homo sapien
tgacaacaatagacaacagttagtgagtccttc

SEQ ID NO: 851296 - DNA, 33 bp, Homo sapien
tgacaacaatagacaagagttagtgagtccttc

SEQ ID NO: 851297 - DNA, 33 bp, Homo sapien
cagaattaggctctaaactcaaaacgttaggca

SEQ ID NO: 851298 - DNA, 33 bp, Homo sapien
cagaattaggctctaatctcaaaacgttaggca

SEQ ID NO: 851299 - DNA, 33 bp, Homo sapien
caaacaacttcagaacagtatgtattataacat

SEQ ID NO: 851300 - DNA, 33 bp, Homo sapien
caaacaacttcagaacggtatgtattataacat

SEQ ID NO: 851301 - DNA, 33 bp, Homo sapien
aatttagcgttttgatgaaatgctaccaaaaac

SEQ ID NO: 851302 - DNA, 33 bp, Homo sapien
aatttagcgttttgattaaatgctaccaaaaac

SEQ ID NO: 851303 - DNA, 33 bp, Homo sapien
ccacataacttcaatacctggaatttcacaaat

SEQ ID NO: 851304 - DNA, 33 bp, Homo sapien
ccacataacttcaatatctggaatttcacaaat

SEQ ID NO: 851305 - DNA, 33 bp, Homo sapien
tttctatttgaagtctaaacagtaaaatgccat

SEQ ID NO: 851306 - DNA, 33 bp, Homo sapien
tttctatttgaagtctgaacagtaaaatgccat

SEQ ID NO: 851307 - DNA, 33 bp, Homo sapien
aagtccaaggtccataactctgttaagatattt

SEQ ID NO: 851308 - DNA, 33 bp, Homo sapien
aagtccaaggtccatacctctgttaagatattt

SEQ ID NO: 851309 - DNA, 33 bp, Homo sapien
tattatcagcaatgagaagagtcaatgttttct

SEQ ID NO: 851310 - DNA, 33 bp, Homo sapien
tattatcagcaatgaggagagtcaatgttttct

SEQ ID NO: 851311 - DNA, 33 bp, Homo sapien
gtgactctgcaacttgaaatgaattgatattct

SEQ ID NO: 851312 - DNA, 33 bp, Homo sapien
gtgactctgcaacttggaatgaattgatattct

SEQ ID NO: 851313 - DNA, 33 bp, Homo sapien
gcaatagctgttcacactgatttgcttcataga

SEQ ID NO: 851314 - DNA, 33 bp, Homo sapien
gcaatagctgttcacattgatttgcttcataga

SEQ ID NO: 851315 - DNA, 33 bp, Homo sapien
ttgcaaatcccaattccatgtttgtgcattccc

SEQ ID NO: 851316 - DNA, 33 bp, Homo sapien
ttgcaaatcccaattcgatgtttgtgcattccc

SEQ ID NO: 851317 - DNA, 33 bp, Homo sapien
tcaaggctgctcaccacagggctctaacagatt

SEQ ID NO: 851318 - DNA, 33 bp, Homo sapien
tcaaggctgctcaccatagggctctaacagatt

SEQ ID NO: 851319 - DNA, 33 bp, Homo sapien
aagcttacgtcaacaaagtagaagagctaagga

SEQ ID NO: 851320 - DNA, 33 bp, Homo sapien
aagcttacgtcaacaatgtagaagagctaagga

SEQ ID NO: 851321 - DNA, 33 bp, Homo sapien
ctgaacttgagagtggaaatctgagctggacac

SEQ ID NO: 851322 - DNA, 33 bp, Homo sapien
ctgaacttgagagtgggaatctgagctggacac

SEQ ID NO: 851323 - DNA, 33 bp, Homo sapien
cacactcaatctttgccgattagaattgcaacc

SEQ ID NO: 851324 - DNA, 33 bp, Homo sapien
cacactcaatctttgctgattagaattgcaacc

SEQ ID NO: 851325 - DNA, 33 bp, Homo sapien
tgtattatctgataaacctgacagttgcctaag

SEQ ID NO: 851326 - DNA, 33 bp, Homo sapien
tgtattatctgataaatctgacagttgcctaag

SEQ ID NO: 851327 - DNA, 33 bp, Homo sapien
tgtacttatttgttcactagcaaaggatcttta

SEQ ID NO: 851328 - DNA, 33 bp, Homo sapien
tgtacttatttgttcattagcaaaggatcttta

SEQ ID NO: 851329 - DNA, 33 bp, Homo sapien
ctatgatattacctcccactgtagactatcacg

SEQ ID NO: 851330 - DNA, 33 bp, Homo sapien
ctatgatattacctcctactgtagactatcacg

SEQ ID NO: 851331 - DNA, 33 bp, Homo sapien
aaatttttaaggtataaatctatgcccaaacag

SEQ ID NO: 851332 - DNA, 33 bp, Homo sapien
aaatttttaaggtatatatctatgcccaaacag

SEQ ID NO: 851333 - DNA, 33 bp, Homo sapien
atgacagcttttgctacgcagagatcaaaggaa

SEQ ID NO: 851334 - DNA, 33 bp, Homo sapien
atgacagcttttgctatgcagagatcaaaggaa

SEQ ID NO: 851335 - DNA, 33 bp, Homo sapien
atttgatagacttagacatggactaaaacaagt

SEQ ID NO: 851336 - DNA, 33 bp, Homo sapien
atttgatagacttagatatggactaaaacaagt

SEQ ID NO: 851337 - DNA, 33 bp, Homo sapien
tatgcatctctaaaaaaactgaagtcaccatac

SEQ ID NO: 851338 - DNA, 33 bp, Homo sapien
tatgcatctctaaaaagactgaagtcaccatac

SEQ ID NO: 851339 - DNA, 33 bp, Homo sapien
tgaatgtatttatgtcacaaaattatgtttctg

SEQ ID NO: 851340 - DNA, 33 bp, Homo sapien
tgaatgtatttatgtctcaaaattatgtttctg

SEQ ID NO: 851341 - DNA, 33 bp, Homo sapien
taatttaaattttgcagcaagttacaaaaggaa

SEQ ID NO: 851342 - DNA, 33 bp, Homo sapien
taatttaaattttgcatcaagttacaaaaggaa

SEQ ID NO: 851343 - DNA, 33 bp, Homo sapien
cctcgtcataagtatcacaagtagctgtctaca

SEQ ID NO: 851344 - DNA, 33 bp, Homo sapien
cctcgtcataagtatcgcaagtagctgtctaca

SEQ ID NO: 851345 - DNA, 33 bp, Homo sapien
acagacaaaaatggcacggacagaattccacgt

SEQ ID NO: 851346 - DNA, 33 bp, Homo sapien
acagacaaaaatggcatggacagaattccacgt

SEQ ID NO: 851347 - DNA, 33 bp, Homo sapien
agttttgctagcagccaattggggattttaata

SEQ ID NO: 851348 - DNA, 33 bp, Homo sapien
agttttgctagcagccgattggggattttaata

SEQ ID NO: 851349 - DNA, 33 bp, Homo sapien
tagggggtcttgatgtcaacaccaaaataaaat

SEQ ID NO: 851350 - DNA, 33 bp, Homo sapien
tagggggtcttgatgtgaacaccaaaataaaat

SEQ ID NO: 851351 - DNA, 33 bp, Homo sapien
ttactgtgcttattgacaaacattctacagagt

SEQ ID NO: 851352 - DNA, 33 bp, Homo sapien
ttactgtgcttattgataaacattctacagagt

SEQ ID NO: 851353 - DNA, 33 bp, Homo sapien
ggggataccagaagccaagtatctcagaaaatg

SEQ ID NO: 851354 - DNA, 33 bp, Homo sapien
ggggataccagaagccgagtatctcagaaaatg

SEQ ID NO: 851355 - DNA, 33 bp, Homo sapien
tccagaaggatacatactaagacactaaaagtg

SEQ ID NO: 851356 - DNA, 33 bp, Homo sapien
tccagaaggatacatagtaagacactaaaagtg

SEQ ID NO: 851357 - DNA, 33 bp, Homo sapien
ggcatatgtatatgtacggtagatgcacctgac

SEQ ID NO: 851358 - DNA, 33 bp, Homo sapien
ggcatatgtatatgtatggtagatgcacctgac

SEQ ID NO: 851359 - DNA, 33 bp, Homo sapien
ctctaggatatacagaaaaaagaaagatggaaa

SEQ ID NO: 851360 - DNA, 33 bp, Homo sapien
ctctaggatatacagagaaaagaaagatggaaa

SEQ ID NO: 851361 - DNA, 33 bp, Homo sapien
tgtttattagtttccaccatcattttactggtc

SEQ ID NO: 851362 - DNA, 33 bp, Homo sapien
tgtttattagtttccatcatcattttactggtc

SEQ ID NO: 851363 - DNA, 33 bp, Homo sapien
gagttcacaaaacagacaactaggcaaataaaa

SEQ ID NO: 851364 - DNA, 33 bp, Homo sapien
gagttcacaaaacagataactaggcaaataaaa

SEQ ID NO: 851365 - DNA, 33 bp, Homo sapien
agcatttgcaaaagtaaaaggcattagataagc

SEQ ID NO: 851366 - DNA, 33 bp, Homo sapien
agcatttgcaaaagtagaaggcattagataagc

SEQ ID NO: 851367 - DNA, 33 bp, Homo sapien
cagagtccataataaccagtgagctattttaac

SEQ ID NO: 851368 - DNA, 33 bp, Homo sapien
cagagtccataataacgagtgagctattttaac

SEQ ID NO: 851369 - DNA, 33 bp, Homo sapien
ttctgactgtctactgcaatggaaagtttgacc

SEQ ID NO: 851370 - DNA, 33 bp, Homo sapien
ttctgactgtctactggaatggaaagtttgacc

SEQ ID NO: 851371 - DNA, 33 bp, Homo sapien
atttaaaggtgctaagacatcccaaactgattt

SEQ ID NO: 851372 - DNA, 33 bp, Homo sapien
atttaaaggtgctaagtcatcccaaactgattt

SEQ ID NO: 851373 - DNA, 33 bp, Homo sapien
tgcagaatacagagaacttccatacaccattcc

SEQ ID NO: 851374 - DNA, 33 bp, Homo sapien
tgcagaatacagagaatttccatacaccattcc

SEQ ID NO: 851375 - DNA, 33 bp, Homo sapien
atgagataaaacagaacggttcagactgctgta

SEQ ID NO: 851376 - DNA, 33 bp, Homo sapien
atgagataaaacagaagggttcagactgctgta

SEQ ID NO: 851377 - DNA, 33 bp, Homo sapien; identical to SEQ ID NO: 851375

SEQ ID NO: 851378 - DNA, 33 bp, Homo sapien; identical to SEQ ID NO: 851376

SEQ ID NO: 851379 - DNA, 33 bp, Homo sapien
aaggtctacagtgttgcattcacgtggcagtgg

SEQ ID NO: 851380 - DNA, 33 bp, Homo sapien
aaggtctacagtgttgtattcacgtggcagtgg

SEQ ID NO: 851381 - DNA, 33 bp, Homo sapien
aatcaatatagacaaaaccatttacaatcagcc

SEQ ID NO: 851382 - DNA, 33 bp, Homo sapien
aatcaatatagacaaagccatttacaatcagcc

SEQ ID NO: 851383 - DNA, 33 bp, Homo sapien
aaaggcatccagttggaaaatgaagaagtaaaa

SEQ ID NO: 851384 - DNA, 33 bp, Homo sapien
aaaggcatccagttgggaaatgaagaagtaaaa

SEQ ID NO: 851385 - DNA, 33 bp, Homo sapien
gcaaaaaggctctttccagagatgggacatggc

SEQ ID NO: 851386 - DNA, 33 bp, Homo sapien
gcaaaaaggctctttctagagatgggacatggc

SEQ ID NO: 851387 - DNA, 33 bp, Homo sapien
gctcaatacacagtacagcgggggcgctcctcc

SEQ ID NO: 851388 - DNA, 33 bp, Homo sapien
gctcaatacacagtacggcgggggcgctcctcc

SEQ ID NO: 851389 - DNA, 33 bp, Homo sapien
aagataaagcacttaccagacaaacctctctaa

SEQ ID NO: 851390 - DNA, 33 bp, Homo sapien
aagataaagcacttactagacaaacctctctaa

SEQ ID NO: 851391 - DNA, 33 bp, Homo sapien
ttcatcacacctataaaatgcctagcgtactac

SEQ ID NO: 851392 - DNA, 33 bp, Homo sapien
ttcatcacacctataagatgcctagcgtactac

SEQ ID NO: 851393 - DNA, 33 bp, Homo sapien
taagtaatagtttaggaaattgaaatctcatca

SEQ ID NO: 851394 - DNA, 33 bp, Homo sapien
taagtaatagtttaggcaattgaaatctcatca

SEQ ID NO: 851395 - DNA, 33 bp, Homo sapien
ccccaggttaagaaataatgatgtctgaatata

SEQ ID NO: 851396 - DNA, 33 bp, Homo sapien
ccccaggttaagaaatcatgatgtctgaatata

SEQ ID NO: 851397 - DNA, 33 bp, Homo sapien
ttgctggactgaacacagtgacagtgacaccaa

SEQ ID NO: 851398 - DNA, 33 bp, Homo sapien
ttgctggactgaacacggtgacagtgacaccaa

SEQ ID NO: 851399 - DNA, 33 bp, Homo sapien
aaaggcctgtgagatacggaactttcctcccaa

SEQ ID NO: 851400 - DNA, 33 bp, Homo sapien
aaaggcctgtgagatagggaactttcctcccaa

SEQ ID NO: 851401 - DNA, 33 bp, Homo sapien
cctgatgctagtatcacaaacatccacttgaaa

SEQ ID NO: 851402 - DNA, 33 bp, Homo sapien
cctgatgctagtatcataaacatccacttgaaa

SEQ ID NO: 851403 - DNA, 33 bp, Homo sapien
aataaaatgggaatgcacacagtctggcttaac

SEQ ID NO: 851404 - DNA, 33 bp, Homo sapien
aataaaatgggaatgcgcacagtctggcttaac

SEQ ID NO: 851405 - DNA, 33 bp, Homo sapien
ttttatcttaagtaccaaaagaaatcatataag

SEQ ID NO: 851406 - DNA, 33 bp, Homo sapien
ttttatcttaagtaccgaaagaaatcatataag

SEQ ID NO: 851407 - DNA, 33 bp, Homo sapien
tactaaataacttcaactgatgagctttaaaat

SEQ ID NO: 851408 - DNA, 33 bp, Homo sapien
tactaaataacttcaattgatgagctttaaaat

SEQ ID NO: 851409 - DNA, 33 bp, Homo sapien
ttggaacacttggtccactaactcccatgtgaa

SEQ ID NO: 851410 - DNA, 33 bp, Homo sapien
ttggaacacttggtcctctaactcccatgtgaa

SEQ ID NO: 851411 - DNA, 33 bp, Homo sapien
tttgtctctaattaaaataccttgcctgacatc

SEQ ID NO: 851412 - DNA, 33 bp, Homo sapien
tttgtctctaattaaagtaccttgcctgacatc

SEQ ID NO: 851413 - DNA, 33 bp, Homo sapien
tctcctggctccttcccgcttaggtcaaccctc

SEQ ID NO: 851414 - DNA, 33 bp, Homo sapien
tctcctggctccttcctgcttaggtcaaccctc

SEQ ID NO: 851415 - DNA, 33 bp, Homo sapien
tttagaattgtatgctcacagaaactatttttt

SEQ ID NO: 851416 - DNA, 33 bp, Homo sapien
tttagaattgtatgctgacagaaactatttttt

SEQ ID NO: 851417 - DNA, 33 bp, Homo sapien
tgtgtaacactgagtaaataatgttgtagatta

SEQ ID NO: 851418 - DNA, 33 bp, Homo sapien
tgtgtaacactgagtatataatgttgtagatta

SEQ ID NO: 851419 - DNA, 33 bp, Homo sapien
aggtggactccaaatcaattaaagctaagctga

SEQ ID NO: 851420 - DNA, 33 bp, Homo sapien
aggtggactccaaatcgattaaagctaagctga

SEQ ID NO: 851421 - DNA, 33 bp, Homo sapien
aaaggatggactgtgcaaaaagaaacaaattca

SEQ ID NO: 851422 - DNA, 33 bp, Homo sapien
aaaggatggactgtgcgaaaagaaacaaattca

SEQ ID NO: 851423 - DNA, 33 bp, Homo sapien
ccatccatttgacaagacattaataaccaggct

SEQ ID NO: 851424 - DNA, 33 bp, Homo sapien
ccatccatttgacaaggcattaataaccaggct

SEQ ID NO: 851425 - DNA, 33 bp, Homo sapien
ggtaactgaccttagacgccaggacatttcccc

SEQ ID NO: 851426 - DNA, 33 bp, Homo sapien
ggtaactgaccttagatgccaggacatttcccc

SEQ ID NO: 851427 - DNA, 33 bp, Homo sapien
acccaccaaaatggaaccaaagtgaaaatatct

SEQ ID NO: 851428 - DNA, 33 bp, Homo sapien
acccaccaaaatggaatcaaagtgaaaatatct

SEQ ID NO: 851429 - DNA, 33 bp, Homo sapien
tattttatcactgacagtacatagtattgtcag

SEQ ID NO: 851430 - DNA, 33 bp, Homo sapien
tattttatcactgacattacatagtattgtcag

SEQ ID NO: 851431 - DNA, 33 bp, Homo sapien
ccagtccaaaagaaaactatggggcacttctct

SEQ ID NO: 851432 - DNA, 33 bp, Homo sapien
ccagtccaaaagaaaattatggggcacttctct

SEQ ID NO: 851433 - DNA, 33 bp, Homo sapien
aatgggcaattggataagaaaatatgagacata

SEQ ID NO: 851434 - DNA, 33 bp, Homo sapien
aatgggcaattggatatgaaaatatgagacata

SEQ ID NO: 851435 - DNA, 33 bp, Homo sapien
cctttctcagaagtaacggctagtaagtaaggg

SEQ ID NO: 851436 - DNA, 33 bp, Homo sapien
cctttctcagaagtaagggctagtaagtaaggg

SEQ ID NO: 851437 - DNA, 33 bp, Homo sapien
ttggtaaactcatgccaaatattcccctgcgtc

SEQ ID NO: 851438 - DNA, 33 bp, Homo sapien
ttggtaaactcatgccgaatattcccctgcgtc

SEQ ID NO: 851439 - DNA, 33 bp, Homo sapien
gttatgcagacaaccaaagtgagcaaggagggg

SEQ ID NO: 851440 - DNA, 33 bp, Homo sapien
gttatgcagacaaccacagtgagcaaggagggg

SEQ ID NO: 851441 - DNA, 33 bp, Homo sapien
atgtgcttggctcacactagtggttcagatcct

SEQ ID NO: 851442 - DNA, 33 bp, Homo sapien
atgtgcttggctcacattagtggttcagatcct

SEQ ID NO: 851443 - DNA, 33 bp, Homo sapien
gttttcatggtataaagactcccacaattaaca

SEQ ID NO: 851444 - DNA, 33 bp, Homo sapien
gttttcatggtataaatactcccacaattaaca

SEQ ID NO: 851445 - DNA, 33 bp, Homo sapien
tcaaaattgtagtgaacgtaaagtgcttagcag

SEQ ID NO: 851446 - DNA, 33 bp, Homo sapien
tcaaaattgtagtgaatgtaaagtgcttagcag

SEQ ID NO: 851447 - DNA, 33 bp, Homo sapien
ttaaggccatgagttaaagaacagcctaagcaa

SEQ ID NO: 851448 - DNA, 33 bp, Homo sapien
ttaaggccatgagttagagaacagcctaagcaa

SEQ ID NO: 851449 - DNA, 33 bp, Homo sapien
tagcattaattggtacactctaggctctctcaa

SEQ ID NO: 851450 - DNA, 33 bp, Homo sapien
tagcattaattggtacgctctaggctctctcaa

SEQ ID NO: 851451 - DNA, 33 bp, Homo sapien
tccatgttccctggacaaactcattgacccatt

SEQ ID NO: 851452 - DNA, 33 bp, Homo sapien
tccatgttccctggaccaactcattgacccatt

SEQ ID NO: 851453 - DNA, 33 bp, Homo sapien
aacagtgctgaaggggacatacaacattagaaa

SEQ ID NO: 851454 - DNA, 33 bp, Homo sapien
aacagtgctgaagggggcatacaacattagaaa

SEQ ID NO: 851455 - DNA, 33 bp, Homo sapien
ggttcccactgacatacggaaagggttcggtaa

SEQ ID NO: 851456 - DNA, 33 bp, Homo sapien
ggttcccactgacatatggaaagggttcggtaa

SEQ ID NO: 851457 - DNA, 33 bp, Homo sapien
tggtaaaaagaatagaaaaatacatcggtggaa

SEQ ID NO: 851458 - DNA, 33 bp, Homo sapien
tggtaaaaagaatagacaaatacatcggtggaa

SEQ ID NO: 851459 - DNA, 33 bp, Homo sapien
tgtatatgcaagacaaacatactggatcagtgt

SEQ ID NO: 851460 - DNA, 33 bp, Homo sapien
tgtatatgcaagacaatcatactggatcagtgt

SEQ ID NO: 851461 - DNA, 33 bp, Homo sapien
tatctacctagccctgaaactatgcaggttgtt

SEQ ID NO: 851462 - DNA, 33 bp, Homo sapien
tatctacctagccctggaactatgcaggttgtt

SEQ ID NO: 851463 - DNA, 33 bp, Homo sapien
aagagtaatcaataaactgcaattagctgtgat

SEQ ID NO: 851464 - DNA, 33 bp, Homo sapien
aagagtaatcaataaagtgcaattagctgtgat

SEQ ID NO: 851465 - DNA, 33 bp, Homo sapien
aatcatcttactgaaactcctggaaacaacagt

SEQ ID NO: 851466 - DNA, 33 bp, Homo sapien
aatcatcttactgaaattcctggaaacaacagt

SEQ ID NO: 851467 - DNA, 33 bp, Homo sapien
taaaatgatacatttaacacctggcttgtggag

SEQ ID NO: 851468 - DNA, 33 bp, Homo sapien
taaaatgatacatttagcacctggcttgtggag

SEQ ID NO: 851469 - DNA, 33 bp, Homo sapien
ttcctcaatctaaaaacacatgatttcctcaga

SEQ ID NO: 851470 - DNA, 33 bp, Homo sapien
ttcctcaatctaaaaatacatgatttcctcaga

SEQ ID NO: 851471 - DNA, 33 bp, Homo sapien
agctgttcattcaaccaatatgtactctgtctg

SEQ ID NO: 851472 - DNA, 33 bp, Homo sapien
agctgttcattcaaccgatatgtactctgtctg

SEQ ID NO: 851473 - DNA, 33 bp, Homo sapien
attacacattatgtgcaaagaaataataagaac

SEQ ID NO: 851474 - DNA, 33 bp, Homo sapien
attacacattatgtgcgaagaaataataagaac

SEQ ID NO: 851475 - DNA, 33 bp, Homo sapien
acataagccagatcacccaaatgaggtcatttg

SEQ ID NO: 851476 - DNA, 33 bp, Homo sapien
acataagccagatcactcaaatgaggtcatttg

SEQ ID NO: 851477 - DNA, 33 bp, Homo sapien
ctggtaatcagtcttacgagatactgggaacta

SEQ ID NO: 851478 - DNA, 33 bp, Homo sapien
ctggtaatcagtcttatgagatactgggaacta

SEQ ID NO: 851479 - DNA, 33 bp, Homo sapien
tgtcctcaaaatggaacactaggtgctgaaaaa

SEQ ID NO: 851480 - DNA, 33 bp, Homo sapien
tgtcctcaaaatggaatactaggtgctgaaaaa

SEQ ID NO: 851481 - DNA, 33 bp, Homo sapien
gaacttttcttctgagccatctatcctggatac

SEQ ID NO: 851482 - DNA, 33 bp, Homo sapien
gaacttttcttctgagtcatctatcctggatac

SEQ ID NO: 851483 - DNA, 33 bp, Homo sapien
ttttgaatcggcgttacctgataatccaaacat

SEQ ID NO: 851484 - DNA, 33 bp, Homo sapien
ttttgaatcggcgttatctgataatccaaacat

SEQ ID NO: 851485 - DNA, 33 bp, Homo sapien
gtcttttggtcctgaactggagattaattacaa

SEQ ID NO: 851486 - DNA, 33 bp, Homo sapien
gtcttttggtcctgaagtggagattaattacaa

SEQ ID NO: 851487 - DNA, 33 bp, Homo sapien
aactccatcagtgaacagagctctactgtcttt

SEQ ID NO: 851488 - DNA, 33 bp, Homo sapien
aactccatcagtgaacggagctctactgtcttt

SEQ ID NO: 851489 - DNA, 33 bp, Homo sapien
ttcacaaatgggaaagcaaaggctcagtagtac

SEQ ID NO: 851490 - DNA, 33 bp, Homo sapien
ttcacaaatgggaaagtaaaggctcagtagtac

SEQ ID NO: 851491 - DNA, 33 bp, Homo sapien
tcagggtcagaaaaacagtttgccagtttccca

SEQ ID NO: 851492 - DNA, 33 bp, Homo sapien
tcagggtcagaaaaacggtttgccagtttccca

SEQ ID NO: 851493 - DNA, 33 bp, Homo sapien
aagactacttttaagaactgcttccttgcaatg

SEQ ID NO: 851494 - DNA, 33 bp, Homo sapien
aagactacttttaagatctgcttccttgcaatg

SEQ ID NO: 851495 - DNA, 33 bp, Homo sapien
tatgtagtgttacaatcatatgacaacaataag

SEQ ID NO: 851496 - DNA, 33 bp, Homo sapien
tatgtagtgttacaattatatgacaacaataag

SEQ ID NO: 851497 - DNA, 33 bp, Homo sapien
gcccagttgagtgacactgccctggcttatata

SEQ ID NO: 851498 - DNA, 33 bp, Homo sapien
gcccagttgagtgacattgccctggcttatata

SEQ ID NO: 851499 - DNA, 33 bp, Homo sapien
gctccttaatcacttaacaccgacaatgggaaa

SEQ ID NO: 851500 - DNA, 33 bp, Homo sapien
gctccttaatcacttagcaccgacaatgggaaa

SEQ ID NO: 851501 - DNA, 33 bp, Homo sapien
atttgagcgttgcttcgagaaatctggaatgaa

SEQ ID NO: 851502 - DNA, 33 bp, Homo sapien
atttgagcgttgcttctagaaatctggaatgaa

SEQ ID NO: 851503 - DNA, 33 bp, Homo sapien
tgttgtctgtaagctaacgtcataacattcttt

SEQ ID NO: 851504 - DNA, 33 bp, Homo sapien
tgttgtctgtaagctagcgtcataacattcttt

SEQ ID NO: 851505 - DNA, 33 bp, Homo sapien
acccagtgagcaaacacgggatggttagggaaa

SEQ ID NO: 851506 - DNA, 33 bp, Homo sapien
acccagtgagcaaacatgggatggttagggaaa

SEQ ID NO: 851507 - DNA, 33 bp, Homo sapien
gaaatggactgtggtaacattacagcacttagg

SEQ ID NO: 851508 - DNA, 33 bp, Homo sapien
gaaatggactgtggtagcattacagcacttagg

SEQ ID NO: 851509 - DNA, 33 bp, Homo sapien
gtctcatcatgccagaagacatcacttcgttcc

SEQ ID NO: 851510 - DNA, 33 bp, Homo sapien
gtctcatcatgccagaggacatcacttcgttcc

SEQ ID NO: 851511 - DNA, 33 bp, Homo sapien
atcatttcacctggtaaggtaagctgtatgtct

SEQ ID NO: 851512 - DNA, 33 bp, Homo sapien
atcatttcacctggtagggtaagctgtatgtct

SEQ ID NO: 851513 - DNA, 33 bp, Homo sapien
cagttgttcaactgaaacagggactcagtggca

SEQ ID NO: 851514 - DNA, 33 bp, Homo sapien
cagttgttcaactgaatcagggactcagtggca

SEQ ID NO: 851515 - DNA, 33 bp, Homo sapien
ctccctgccttaacaccctgagaacctattcct

SEQ ID NO: 851516 - DNA, 33 bp, Homo sapien
ctccctgccttaacacgctgagaacctattcct

SEQ ID NO: 851517 - DNA, 33 bp, Homo sapien
gagagaaaaagtgcacactgaaacacatcactt

SEQ ID NO: 851518 - DNA, 33 bp, Homo sapien
gagagaaaaagtgcacgctgaaacacatcactt

SEQ ID NO: 851519 - DNA, 33 bp, Homo sapien
ctttattaacacattccctgggataacctcatg

SEQ ID NO: 851520 - DNA, 33 bp, Homo sapien
ctttattaacacattctctgggataacctcatg

SEQ ID NO: 851521 - DNA, 33 bp, Homo sapien
ttacacactgagcaacaaaacaaaggtgttgaa

SEQ ID NO: 851522 - DNA, 33 bp, Homo sapien
ttacacactgagcaaccaaacaaaggtgttgaa

SEQ ID NO: 851523 - DNA, 33 bp, Homo sapien
tcatttctctcagtaaatagtaaatggacctaa

SEQ ID NO: 851524 - DNA, 33 bp, Homo sapien
tcatttctctcagtaagtagtaaatggacctaa

SEQ ID NO: 851525 - DNA, 33 bp, Homo sapien
cccacttgactctagaagacctattcatagact

SEQ ID NO: 851526 - DNA, 33 bp, Homo sapien
cccacttgactctagatgacctattcatagact

SEQ ID NO: 851527 - DNA, 33 bp, Homo sapien
gccaaatccaaaagcacatttgttgatattcaa

SEQ ID NO: 851528 - DNA, 33 bp, Homo sapien
gccaaatccaaaagcatatttgttgatattcaa

SEQ ID NO: 851529 - DNA, 33 bp, Homo sapien
aatttgataaatttgacgagtccatttatattt

SEQ ID NO: 851530 - DNA, 33 bp, Homo sapien
aatttgataaatttgatgagtccatttatattt

SEQ ID NO: 851531 - DNA, 33 bp, Homo sapien
ctgtgttgccagatagaccagaaatctgggagt

SEQ ID NO: 851532 - DNA, 33 bp, Homo sapien
ctgtgttgccagataggccagaaatctgggagt

SEQ ID NO: 851533 - DNA, 33 bp, Homo sapien
tttgctgccatttcacccactcatcttcaactg

SEQ ID NO: 851534 - DNA, 33 bp, Homo sapien
tttgctgccatttcactcactcatcttcaactg

SEQ ID NO: 851535 - DNA, 33 bp, Homo sapien
ttatcccagttggctacagctgcaggtctttgg

SEQ ID NO: 851536 - DNA, 33 bp, Homo sapien
ttatcccagttggctagagctgcaggtctttgg

SEQ ID NO: 851537 - DNA, 33 bp, Homo sapien
ttgaatgaggagttgacgtgagtactgtcagag

SEQ ID NO: 851538 - DNA, 33 bp, Homo sapien
ttgaatgaggagttgatgtgagtactgtcagag

SEQ ID NO: 851539 - DNA, 33 bp, Homo sapien
ggtgggggatatcaaaatagaaaagtagcttat

SEQ ID NO: 851540 - DNA, 33 bp, Homo sapien
ggtgggggatatcaaagtagaaaagtagcttat

SEQ ID NO: 851541 - DNA, 33 bp, Homo sapien
caagattttggttagacggctgttattctaggt

SEQ ID NO: 851542 - DNA, 33 bp, Homo sapien
caagattttggttagatggctgttattctaggt

SEQ ID NO: 851543 - DNA, 33 bp, Homo sapien
catggatatcaacaaactttggtccaagaaatc

SEQ ID NO: 851544 - DNA, 33 bp, Homo sapien
catggatatcaacaaattttggtccaagaaatc

SEQ ID NO: 851545 - DNA, 33 bp, Homo sapien
tttttatcttctcctaccctgaaaccagattgc

SEQ ID NO: 851546 - DNA, 33 bp, Homo sapien
tttttatcttctcctatcctgaaaccagattgc

SEQ ID NO: 851547 - DNA, 33 bp, Homo sapien
ccagaattacaagcagccctgatgaccaggcgc

SEQ ID NO: 851548 - DNA, 33 bp, Homo sapien
ccagaattacaagcagtcctgatgaccaggcgc

SEQ ID NO: 851549 - DNA, 33 bp, Homo sapien; identical to SEQ ID NO: 851547

SEQ ID NO: 851550 - DNA, 33 bp, Homo sapien; identical to SEQ ID NO: 851548

SEQ ID NO: 851551 - DNA, 33 bp, Homo sapien
agtcagagttttcctaagtcatacatttaaggt

SEQ ID NO: 851552 - DNA, 33 bp, Homo sapien
agtcagagttttcctaggtcatacatttaaggt

SEQ ID NO: 851553 - DNA, 33 bp, Homo sapien
taccttgatctaacggacataaaatatttcaac

SEQ ID NO: 851554 - DNA, 33 bp, Homo sapien
taccttgatctaacggtcataaaatatttcaac

SEQ ID NO: 851555 - DNA, 33 bp, Homo sapien
agaaacctggcttccaatatttgccattcattt

SEQ ID NO: 851556 - DNA, 33 bp, Homo sapien
agaaacctggcttccactatttgccattcattt

SEQ ID NO: 851557 - DNA, 33 bp, Homo sapien
gatctgatggggtgcactgaaaacagaagaatc

SEQ ID NO: 851558 - DNA, 33 bp, Homo sapien
gatctgatggggtgcattgaaaacagaagaatc

SEQ ID NO: 851559 - DNA, 33 bp, Homo sapien
ataatctctttgggaaatcttccatgattactt

SEQ ID NO: 851560 - DNA, 33 bp, Homo sapien
ataatctctttgggaagtcttccatgattactt

SEQ ID NO: 851561 - DNA, 33 bp, Homo sapien
atatttaaatgtcatgcaaacgagctgtaatat

SEQ ID NO: 851562 - DNA, 33 bp, Homo sapien
atatttaaatgtcatgtaaacgagctgtaatat

SEQ ID NO: 851563 - DNA, 33 bp, Homo sapien
aagatattttgtaaacaccttcagactgtcagg

SEQ ID NO: 851564 - DNA, 33 bp, Homo sapien
aagatattttgtaaactccttcagactgtcagg

SEQ ID NO: 851565 - DNA, 33 bp, Homo sapien
ccatgaactgtatgaaggactgaatactatcac

SEQ ID NO: 851566 - DNA, 33 bp, Homo sapien
ccatgaactgtatgaatgactgaatactatcac

SEQ ID NO: 851567 - DNA, 33 bp, Homo sapien
ggaggagttttgcggaaagcattaaaatcagga

SEQ ID NO: 851568 - DNA, 33 bp, Homo sapien
ggaggagttttgcggatagcattaaaatcagga

SEQ ID NO: 851569 - DNA, 33 bp, Homo sapien
cattttcctgctttaaatgcctagtaatttttt

SEQ ID NO: 851570 - DNA, 33 bp, Homo sapien
cattttcctgctttaagtgcctagtaatttttt

SEQ ID NO: 851571 - DNA, 33 bp, Homo sapien
tttattattcctccaagtctcgttgatctgttt

SEQ ID NO: 851572 - DNA, 33 bp, Homo sapien
tttattattcctccaattctcgttgatctgttt

SEQ ID NO: 851573 - DNA, 33 bp, Homo sapien
taatgcttctgcctggaaagagtttattattcc

SEQ ID NO: 851574 - DNA, 33 bp, Homo sapien
taatgcttctgcctgggaagagtttattattcc

SEQ ID NO: 851575 - DNA, 33 bp, Homo sapien
atcttggaggtcaacacaattcaagggttggat

SEQ ID NO: 851576 - DNA, 33 bp, Homo sapien
atcttggaggtcaacagaattcaagggttggat

SEQ ID NO: 851577 - DNA, 33 bp, Homo sapien
aggagccacttgcaaacgccagctgctcatggc

SEQ ID NO: 851578 - DNA, 33 bp, Homo sapien
aggagccacttgcaaatgccagctgctcatggc

SEQ ID NO: 851579 - DNA, 33 bp, Homo sapien
cagtcattttggataacagtctgggagttcttc

SEQ ID NO: 851580 - DNA, 33 bp, Homo sapien
cagtcattttggataagagtctgggagttcttc

SEQ ID NO: 851581 - DNA, 33 bp, Homo sapien
gattctaaacatattaacaatttacatcacatt

SEQ ID NO: 851582 - DNA, 33 bp, Homo sapien
gattctaaacatattagcaatttacatcacatt

SEQ ID NO: 851583 - DNA, 33 bp, Homo sapien
tcttccagttgattgaacaaaaaattggtgcct

SEQ ID NO: 851584 - DNA, 33 bp, Homo sapien
tcttccagttgattgaccaaaaaattggtgcct

SEQ ID NO: 851585 - DNA, 33 bp, Homo sapien
tgtagaattcacaaacaaataagtggtgaaaaa

SEQ ID NO: 851586 - DNA, 33 bp, Homo sapien
tgtagaattcacaaacgaataagtggtgaaaaa

SEQ ID NO: 851587 - DNA, 33 bp, Homo sapien
accatgttttctctataagtgtggtttgcagaa

SEQ ID NO: 851588 - DNA, 33 bp, Homo sapien
accatgttttctctatgagtgtggtttgcagaa

SEQ ID NO: 851589 - DNA, 33 bp, Homo sapien
aacatctttgtaaacaataaatgctcaaacatg

SEQ ID NO: 851590 - DNA, 33 bp, Homo sapien
aacatctttgtaaacagtaaatgctcaaacatg

SEQ ID NO: 851591 - DNA, 33 bp, Homo sapien
tcatctataaatgggacggaagccaaagaatcg

SEQ ID NO: 851592 - DNA, 33 bp, Homo sapien
tcatctataaatgggatggaagccaaagaatcg

SEQ ID NO: 851593 - DNA, 33 bp, Homo sapien
attttgaaaatgttgccaactactgatgttgac

SEQ ID NO: 851594 - DNA, 33 bp, Homo sapien
attttgaaaatgttgctaactactgatgttgac

SEQ ID NO: 851595 - DNA, 33 bp, Homo sapien
aagccaaggagtgatcaacgaattttctgggat

SEQ ID NO: 851596 - DNA, 33 bp, Homo sapien
aagccaaggagtgatcgacgaattttctgggat

SEQ ID NO: 851597 - DNA, 33 bp, Homo sapien
tgtggaattgatgacaacgctggtgaaccatta

SEQ ID NO: 851598 - DNA, 33 bp, Homo sapien
tgtggaattgatgacatcgctggtgaaccatta

SEQ ID NO: 851599 - DNA, 33 bp, Homo sapien
ggtaggtaattttgtaagagtagagatgccttt

SEQ ID NO: 851600 - DNA, 33 bp, Homo sapien
ggtaggtaattttgtaggagtagagatgccttt

SEQ ID NO: 851601 - DNA, 33 bp, Homo sapien
cctgaaagtatttacacagtgtcgaagaatctt

SEQ ID NO: 851602 - DNA, 33 bp, Homo sapien
cctgaaagtatttacatagtgtcgaagaatctt

SEQ ID NO: 851603 - DNA, 33 bp, Homo sapien
tgtgtctggtttgtatcagtcttcacatagtat

SEQ ID NO: 851604 - DNA, 33 bp, Homo sapien
tgtgtctggtttgtattagtcttcacatagtat

SEQ ID NO: 851605 - DNA, 33 bp, Homo sapien
caagatgatcctttgaatatagcaaccctatga

SEQ ID NO: 851606 - DNA, 33 bp, Homo sapien
caagatgatcctttgagtatagcaaccctatga

SEQ ID NO: 851607 - DNA, 33 bp, Homo sapien
acaaacgcacatactgaatttatgcaactgcaa

SEQ ID NO: 851608 - DNA, 33 bp, Homo sapien
acaaacgcacatactggatttatgcaactgcaa

SEQ ID NO: 851609 - DNA, 33 bp, Homo sapien
aggggaatacattttaaggatacggtgatgtct

SEQ ID NO: 851610 - DNA, 33 bp, Homo sapien
aggggaatacattttagggatacggtgatgtct

SEQ ID NO: 851611 - DNA, 33 bp, Homo sapien
tgcactattctaggacccctatcacattggatt

SEQ ID NO: 851612 - DNA, 33 bp, Homo sapien
tgcactattctaggactcctatcacattggatt

SEQ ID NO: 851613 - DNA, 33 bp, Homo sapien
ttatatgttgtgtctaccagattggcttataat

SEQ ID NO: 851614 - DNA, 33 bp, Homo sapien
ttatatgttgtgtctatcagattggcttataat

SEQ ID NO: 851615 - DNA, 33 bp, Homo sapien
aagatggaccaaaatgcattctgattattttaa

SEQ ID NO: 851616 - DNA, 33 bp, Homo sapien
aagatggaccaaaatgtattctgattattttaa

SEQ ID NO: 851617 - DNA, 33 bp, Homo sapien
aaaaagcactgtggggaaaaaaaggcatattaa

SEQ ID NO: 851618 - DNA, 33 bp, Homo sapien
aaaaagcactgtggggtaaaaaaggcatattaa

SEQ ID NO: 851619 - DNA, 33 bp, Homo sapien
aaaagacaaacattgacgaatggaatagaatag

SEQ ID NO: 851620 - DNA, 33 bp, Homo sapien
aaaagacaaacattgatgaatggaatagaatag

SEQ ID NO: 851621 - DNA, 33 bp, Homo sapien
aaaaaaatagtgcagcaaggctgagagactctg

SEQ ID NO: 851622 - DNA, 33 bp, Homo sapien
aaaaaaatagtgcagcgaggctgagagactctg

SEQ ID NO: 851623 - DNA, 33 bp, Homo sapien
tttttttcttcgtttgaatctattgttggagag

SEQ ID NO: 851624 - DNA, 33 bp, Homo sapien
tttttttcttcgtttggatctattgttggagag

SEQ ID NO: 851625 - DNA, 33 bp, Homo sapien
ctctgaaactggctaaatatcagctgaccccac

SEQ ID NO: 851626 - DNA, 33 bp, Homo sapien
ctctgaaactggctaagtatcagctgaccccac

SEQ ID NO: 851627 - DNA, 33 bp, Homo sapien
cctgtaaaagctatgaaaatgccaaagctctta

SEQ ID NO: 851628 - DNA, 33 bp, Homo sapien
cctgtaaaagctatgagaatgccaaagctctta

SEQ ID NO: 851629 - DNA, 33 bp, Homo sapien
cttatttttgaaggcaccttctctgaatttctc

SEQ ID NO: 851630 - DNA, 33 bp, Homo sapien
cttatttttgaaggcagcttctctgaatttctc

SEQ ID NO: 851631 - DNA, 33 bp, Homo sapien
aagagatgaagtcatgaaagtaaccagtggaac

SEQ ID NO: 851632 - DNA, 33 bp, Homo sapien
aagagatgaagtcatggaagtaaccagtggaac

SEQ ID NO: 851633 - DNA, 33 bp, Homo sapien
tgtccttatctcattaacatagtaagcctaaaa

SEQ ID NO: 851634 - DNA, 33 bp, Homo sapien
tgtccttatctcattagcatagtaagcctaaaa

SEQ ID NO: 851635 - DNA, 33 bp, Homo sapien
attccaggaacggataaaaattccattccattt

SEQ ID NO: 851636 - DNA, 33 bp, Homo sapien
attccaggaacggatacaaattccattccattt

SEQ ID NO: 851637 - DNA, 33 bp, Homo sapien
ctttcacgatcatctacatacatcaggttttat

SEQ ID NO: 851638 - DNA, 33 bp, Homo sapien
ctttcacgatcatctatatacatcaggttttat

SEQ ID NO: 851639 - DNA, 33 bp, Homo sapien
atagaatcctttgcccaatcgagagatgtcaac

SEQ ID NO: 851640 - DNA, 33 bp, Homo sapien
atagaatcctttgcccgatcgagagatgtcaac

SEQ ID NO: 851641 - DNA, 33 bp, Homo sapien
aaagacatttttggtcaccacaactggggatga

SEQ ID NO: 851642 - DNA, 33 bp, Homo sapien
aaagacatttttggtcgccacaactggggatga

SEQ ID NO: 851643 - DNA, 33 bp, Homo sapien
gttatctcctcaaccagaatatcaagaatattg

SEQ ID NO: 851644 - DNA, 33 bp, Homo sapien
gttatctcctcaaccataatatcaagaatattg

SEQ ID NO: 851645 - DNA, 33 bp, Homo sapien
tattcaccatttaaaccatagcaattgcttcta

SEQ ID NO: 851646 - DNA, 33 bp, Homo sapien
tattcaccatttaaacgatagcaattgcttcta

SEQ ID NO: 851647 - DNA, 33 bp, Homo sapien
agctaagccaacataaaatgtcaaccagagtat

SEQ ID NO: 851648 - DNA, 33 bp, Homo sapien
agctaagccaacataagatgtcaaccagagtat

SEQ ID NO: 851649 - DNA, 33 bp, Homo sapien
ttcaacagaactacagaccagtgatgaaaagat

SEQ ID NO: 851650 - DNA, 33 bp, Homo sapien
ttcaacagaactacaggccagtgatgaaaagat

SEQ ID NO: 851651 - DNA, 33 bp, Homo sapien
tgctccccggtcctacaactttatgatgccaaa

SEQ ID NO: 851652 - DNA, 33 bp, Homo sapien
tgctccccggtcctactactttatgatgccaaa

SEQ ID NO: 851653 - DNA, 33 bp, Homo sapien
tccaaatatcaagatgcactttctgttatgtta

SEQ ID NO: 851654 - DNA, 33 bp, Homo sapien
tccaaatatcaagatgtactttctgttatgtta

SEQ ID NO: 851655 - DNA, 33 bp, Homo sapien
tgtctggccatcataacagttctaaagggtaga

SEQ ID NO: 851656 - DNA, 33 bp, Homo sapien
tgtctggccatcataagagttctaaagggtaga

SEQ ID NO: 851657 - DNA, 33 bp, Homo sapien
gcttttcaattcgtaaatccccacttggcaaat

SEQ ID NO: 851658 - DNA, 33 bp, Homo sapien
gcttttcaattcgtaagtccccacttggcaaat

SEQ ID NO: 851659 - DNA, 33 bp, Homo sapien
caagacattctctgaagctcaggactgtttttt

SEQ ID NO: 851660 - DNA, 33 bp, Homo sapien
caagacattctctgaatctcaggactgtttttt

SEQ ID NO: 851661 - DNA, 33 bp, Homo sapien
tgcattacatatatgacgttctcttgatttcag

SEQ ID NO: 851662 - DNA, 33 bp, Homo sapien
tgcattacatatatgaggttctcttgatttcag

SEQ ID NO: 851663 - DNA, 33 bp, Homo sapien
gaaagtttggaatgagactactaaattaacttt

SEQ ID NO: 851664 - DNA, 33 bp, Homo sapien
gaaagtttggaatgagtctactaaattaacttt

SEQ ID NO: 851665 - DNA, 33 bp, Homo sapien
atttttagaacgtgaaggctgtgaaaatctaag

SEQ ID NO: 851666 - DNA, 33 bp, Homo sapien
atttttagaacgtgaatgctgtgaaaatctaag

SEQ ID NO: 851667 - DNA, 33 bp, Homo sapien
ccactttaattccttcaatagcaaatcctttgc

SEQ ID NO: 851668 - DNA, 33 bp, Homo sapien
ccactttaattccttccatagcaaatcctttgc

SEQ ID NO: 851669 - DNA, 33 bp, Homo sapien
agcagtagctactggcaaagaaacctcaaattt

SEQ ID NO: 851670 - DNA, 33 bp, Homo sapien
agcagtagctactggcgaagaaacctcaaattt

SEQ ID NO: 851671 - DNA, 33 bp, Homo sapien
gaacatgaggaagaacaaaagagcctcatggtg

SEQ ID NO: 851672 - DNA, 33 bp, Homo sapien
gaacatgaggaagaacgaaagagcctcatggtg

SEQ ID NO: 851673 - DNA, 33 bp, Homo sapien
ttcttatactgtgttcaaattttcacaagcata

SEQ ID NO: 851674 - DNA, 33 bp, Homo sapien
ttcttatactgtgttcgaattttcacaagcata

SEQ ID NO: 851675 - DNA, 33 bp, Homo sapien
tctgtcccttaagagaacccaaaacacacagca

SEQ ID NO: 851676 - DNA, 33 bp, Homo sapien
tctgtcccttaagagaccccaaaacacacagca

SEQ ID NO: 851677 - DNA, 33 bp, Homo sapien
cggtggaacagaagcaactgtagtgcgtggcac

SEQ ID NO: 851678 - DNA, 33 bp, Homo sapien
cggtggaacagaagcagctgtagtgcgtggcac

SEQ ID NO: 851679 - DNA, 33 bp, Homo sapien
tatcggccctagatgaactatattgtctaattt

SEQ ID NO: 851680 - DNA, 33 bp, Homo sapien
tatcggccctagatgacctatattgtctaattt

SEQ ID NO: 851681 - DNA, 33 bp, Homo sapien
aaaggattcaggaaggacatttactcttttagc

SEQ ID NO: 851682 - DNA, 33 bp, Homo sapien
aaaggattcaggaagggcatttactcttttagc

SEQ ID NO: 851683 - DNA, 33 bp, Homo sapien
ttgcaagttagtctaaaaatgaaggcaaaataa

SEQ ID NO: 851684 - DNA, 33 bp, Homo sapien
ttgcaagttagtctaagaatgaaggcaaaataa

SEQ ID NO: 851685 - DNA, 33 bp, Homo sapien
taatactccaggatgaaacagaatagaaataca

SEQ ID NO: 851686 - DNA, 33 bp, Homo sapien
taatactccaggatgatacagaatagaaataca

SEQ ID NO: 851687 - DNA, 33 bp, Homo sapien
ttgtcttcactggttcaagtatcaacagctaaa

SEQ ID NO: 851688 - DNA, 33 bp, Homo sapien
ttgtcttcactggttcgagtatcaacagctaaa

SEQ ID NO: 851689 - DNA, 33 bp, Homo sapien
ctaattatgtagcaaacctaattaagctcaagt

SEQ ID NO: 851690 - DNA, 33 bp, Homo sapien
ctaattatgtagcaaatctaattaagctcaagt

SEQ ID NO: 851691 - DNA, 33 bp, Homo sapien
ctgggaagatgagcaaataagaggaaggatgga

SEQ ID NO: 851692 - DNA, 33 bp, Homo sapien
ctgggaagatgagcaagtaagaggaaggatgga

SEQ ID NO: 851693 - DNA, 33 bp, Homo sapien
attgtacctatgaaaaagagactagtagaatta

SEQ ID NO: 851694 - DNA, 33 bp, Homo sapien
attgtacctatgaaaaggagactagtagaatta

SEQ ID NO: 851695 - DNA, 33 bp, Homo sapien
tggtatatgcaccaaggctcctggttaatttta

SEQ ID NO: 851696 - DNA, 33 bp, Homo sapien
tggtatatgcaccaagtctcctggttaatttta

SEQ ID NO: 851697 - DNA, 33 bp, Homo sapien
accagcaaatgttgtacacctgtgtgatagtgg

SEQ ID NO: 851698 - DNA, 33 bp, Homo sapien
accagcaaatgttgtatacctgtgtgatagtgg

SEQ ID NO: 851699 - DNA, 33 bp, Homo sapien
cacatcccatcctggcagaaatccagagaaaca

SEQ ID NO: 851700 - DNA, 33 bp, Homo sapien
cacatcccatcctggcggaaatccagagaaaca

SEQ ID NO: 851701 - DNA, 33 bp, Homo sapien
atatatagacaaagtacaatactcattcaaaac

SEQ ID NO: 851702 - DNA, 33 bp, Homo sapien
atatatagacaaagtagaatactcattcaaaac

SEQ ID NO: 851703 - DNA, 33 bp, Homo sapien
agccactgagtttaagcctcctgataaatgagt

SEQ ID NO: 851704 - DNA, 33 bp, Homo sapien
agccactgagtttaaggctcctgataaatgagt

SEQ ID NO: 851705 - DNA, 33 bp, Homo sapien
ttccttgtagagtcagaatattaatcttttgtc

SEQ ID NO: 851706 - DNA, 33 bp, Homo sapien
ttccttgtagagtcaggatattaatcttttgtc

SEQ ID NO: 851707 - DNA, 33 bp, Homo sapien
ggacacatttagagaaatgcaaaatgaactgga

SEQ ID NO: 851708 - DNA, 33 bp, Homo sapien
ggacacatttagagaagtgcaaaatgaactgga

SEQ ID NO: 851709 - DNA, 33 bp, Homo sapien
caaatggaaaaatatcccgtgttcacagatcta

SEQ ID NO: 851710 - DNA, 33 bp, Homo sapien
caaatggaaaaatatctcgtgttcacagatcta

SEQ ID NO: 851711 - DNA, 33 bp, Homo sapien
cattagggtagttatacgaggtgcaggttaggg

SEQ ID NO: 851712 - DNA, 33 bp, Homo sapien
cattagggtagttataggaggtgcaggttaggg

SEQ ID NO: 851713 - DNA, 33 bp, Homo sapien
gggagaaaagagagaactgggaagaatataatc

SEQ ID NO: 851714 - DNA, 33 bp, Homo sapien
gggagaaaagagagaattgggaagaatataatc

SEQ ID NO: 851715 - DNA, 33 bp, Homo sapien
aaatccaaagaaccaacgtgccaataaatgaaa

SEQ ID NO: 851716 - DNA, 33 bp, Homo sapien
aaatccaaagaaccaatgtgccaataaatgaaa

SEQ ID NO: 851717 - DNA, 33 bp, Homo sapien
gttagctgtttcagtccattttaatttcatgtt

SEQ ID NO: 851718 - DNA, 33 bp, Homo sapien
gttagctgtttcagtctattttaatttcatgtt

SEQ ID NO: 851719 - DNA, 33 bp, Homo sapien
aagtcatacaacccaaaagcaaacataccaaat

SEQ ID NO: 851720 - DNA, 33 bp, Homo sapien
aagtcatacaacccaatagcaaacataccaaat

SEQ ID NO: 851721 - DNA, 33 bp, Homo sapien
gatggcttccttaagcacagtcataaataataa

SEQ ID NO: 851722 - DNA, 33 bp, Homo sapien
gatggcttccttaagcgcagtcataaataataa

SEQ ID NO: 851723 - DNA, 33 bp, Homo sapien
tttagttgatgttttaaattgactgaattgaag

SEQ ID NO: 851724 - DNA, 33 bp, Homo sapien
tttagttgatgttttagattgactgaattgaag

SEQ ID NO: 851725 - DNA, 33 bp, Homo sapien
ttaactgctcatatttaaaactgtgtacgcatg

SEQ ID NO: 851726 - DNA, 33 bp, Homo sapien
ttaactgctcatatttgaaactgtgtacgcatg

SEQ ID NO: 851727 - DNA, 33 bp, Homo sapien
tacacagttcatcatacccagaaaaaaactagt

SEQ ID NO: 851728 - DNA, 33 bp, Homo sapien
tacacagttcatcatatccagaaaaaaactagt

SEQ ID NO: 851729 - DNA, 33 bp, Homo sapien
agtggcaaccagctaacaacaatagacagaaat

SEQ ID NO: 851730 - DNA, 33 bp, Homo sapien
agtggcaaccagctaataacaatagacagaaat

SEQ ID NO: 851731 - DNA, 33 bp, Homo sapien
ctattagttatggatacgaactttaaacaaaca

SEQ ID NO: 851732 - DNA, 33 bp, Homo sapien
ctattagttatggataggaactttaaacaaaca

SEQ ID NO: 851733 - DNA, 33 bp, Homo sapien
tgagagagactcaatgcacttgtaatctgtgtt

SEQ ID NO: 851734 - DNA, 33 bp, Homo sapien
tgagagagactcaatgtacttgtaatctgtgtt

SEQ ID NO: 851735 - DNA, 33 bp, Homo sapien
agcctttaagcctgaaatgtctacacctctcca

SEQ ID NO: 851736 - DNA, 33 bp, Homo sapien
agcctttaagcctgaagtgtctacacctctcca

SEQ ID NO: 851737 - DNA, 33 bp, Homo sapien
tctaactatactgaaagttgctgacactgcaag

SEQ ID NO: 851738 - DNA, 33 bp, Homo sapien
tctaactatactgaaatttgctgacactgcaag

SEQ ID NO: 851739 - DNA, 33 bp, Homo sapien
agggtcaaaatggccagaatgcaactgtgatgt

SEQ ID NO: 851740 - DNA, 33 bp, Homo sapien
agggtcaaaatggccataatgcaactgtgatgt

SEQ ID NO: 851741 - DNA, 33 bp, Homo sapien
aggatatagaacaaggccaagttccagagaggg

SEQ ID NO: 851742 - DNA, 33 bp, Homo sapien
aggatatagaacaaggtcaagttccagagaggg

SEQ ID NO: 851743 - DNA, 33 bp, Homo sapien
tgattgtcagtcccaaccttctgcctaaagtct

SEQ ID NO: 851744 - DNA, 33 bp, Homo sapien
tgattgtcagtcccaatcttctgcctaaagtct

SEQ ID NO: 851745 - DNA, 33 bp, Homo sapien
aaaataactttggaaacgtggcccatctggaaa

SEQ ID NO: 851746 - DNA, 33 bp, Homo sapien
aaaataactttggaaatgtggcccatctggaaa

SEQ ID NO: 851747 - DNA, 33 bp, Homo sapien; identical to SEQ ID NO: 851745

SEQ ID NO: 851748 - DNA, 33 bp, Homo sapien; identical to SEQ ID NO: 851746

SEQ ID NO: 851749 - DNA, 33 bp, Homo sapien
ctgatccataacagccaagaaaattctatcatc

SEQ ID NO: 851750 - DNA, 33 bp, Homo sapien
ctgatccataacagccgagaaaattctatcatc

SEQ ID NO: 851751 - DNA, 33 bp, Homo sapien
atgaatataaaattcaagaacaggcaaataatt

SEQ ID NO: 851752 - DNA, 33 bp, Homo sapien
atgaatataaaattcaggaacaggcaaataatt

SEQ ID NO: 851753 - DNA, 33 bp, Homo sapien
atccattctcaaatacaactgtccaattatcac

SEQ ID NO: 851754 - DNA, 33 bp, Homo sapien
atccattctcaaatacgactgtccaattatcac

SEQ ID NO: 851755 - DNA, 33 bp, Homo sapien
caattcattctgttcaaaactaagtcatttggt

SEQ ID NO: 851756 - DNA, 33 bp, Homo sapien
caattcattctgttcagaactaagtcatttggt

SEQ ID NO: 851757 - DNA, 33 bp, Homo sapien
agagaggcattattgaaaccaaactcagtcatt

SEQ ID NO: 851758 - DNA, 33 bp, Homo sapien
agagaggcattattgagaccaaactcagtcatt

SEQ ID NO: 851759 - DNA, 33 bp, Homo sapien
cactggttctatgaacaagatgcatgaatttgc

SEQ ID NO: 851760 - DNA, 33 bp, Homo sapien
cactggttctatgaactagatgcatgaatttgc

SEQ ID NO: 851761 - DNA, 33 bp, Homo sapien
aattgttttcagaatcagagatgagaaagtgac

SEQ ID NO: 851762 - DNA, 33 bp, Homo sapien
aattgttttcagaatcggagatgagaaagtgac

SEQ ID NO: 851763 - DNA, 33 bp, Homo sapien
gagtgaggcaaagcaaataactgggctaaagtg

SEQ ID NO: 851764 - DNA, 33 bp, Homo sapien
gagtgaggcaaagcaactaactgggctaaagtg

SEQ ID NO: 851765 - DNA, 33 bp, Homo sapien
agcaccattctcccgagtattcagtacttaact

SEQ ID NO: 851766 - DNA, 33 bp, Homo sapien
agcaccattctcccgattattcagtacttaact

SEQ ID NO: 851767 - DNA, 33 bp, Homo sapien
aggttgccctgtataaaatgcgaagtaagtgtt

SEQ ID NO: 851768 - DNA, 33 bp, Homo sapien
aggttgccctgtataagatgcgaagtaagtgtt

SEQ ID NO: 851769 - DNA, 33 bp, Homo sapien
taagcactgataaaaacccaatgactgggacca

SEQ ID NO: 851770 - DNA, 33 bp, Homo sapien
taagcactgataaaaatccaatgactgggacca

SEQ ID NO: 851771 - DNA, 33 bp, Homo sapien
ggtacagctgattatccaacatcattcctatgg

SEQ ID NO: 851772 - DNA, 33 bp, Homo sapien
ggtacagctgattatctaacatcattcctatgg

SEQ ID NO: 851773 - DNA, 33 bp, Homo sapien; identical to SEQ ID NO: 851771

SEQ ID NO: 851774 - DNA, 33 bp, Homo sapien; identical to SEQ ID NO: 851772

SEQ ID NO: 851775 - DNA, 33 bp, Homo sapien
ctgggggaaaagtgacgaccagaaagtgaagac

SEQ ID NO: 851776 - DNA, 33 bp, Homo sapien
ctgggggaaaagtgactaccagaaagtgaagac

SEQ ID NO: 851777 - DNA, 33 bp, Homo sapien
attcatttccatcatgccatagtactggagcag

SEQ ID NO: 851778 - DNA, 33 bp, Homo sapien
attcatttccatcatgtcatagtactggagcag

SEQ ID NO: 851779 - DNA, 33 bp, Homo sapien
caggtcttctgattgccagtaccatgaaatttc

SEQ ID NO: 851780 - DNA, 33 bp, Homo sapien
caggtcttctgattgctagtaccatgaaatttc

SEQ ID NO: 851781 - DNA, 33 bp, Homo sapien
cagaactgcattaaaagaagagagttcttcagg

SEQ ID NO: 851782 - DNA, 33 bp, Homo sapien
cagaactgcattaaaataagagagttcttcagg

SEQ ID NO: 851783 - DNA, 33 bp, Homo sapien
gagaatagcagaaaaaattggtttctggtttca

SEQ ID NO: 851784 - DNA, 33 bp, Homo sapien
gagaatagcagaaaaatttggtttctggtttca

SEQ ID NO: 851785 - DNA, 33 bp, Homo sapien
aattgtaagaaacagaagttatttggcaattga

SEQ ID NO: 851786 - DNA, 33 bp, Homo sapien
aattgtaagaaacagatgttatttggcaattga

SEQ ID NO: 851787 - DNA, 33 bp, Homo sapien
tccatcaaagtcatcaacttggcaggcttcata

SEQ ID NO: 851788 - DNA, 33 bp, Homo sapien
tccatcaaagtcatcagcttggcaggcttcata

SEQ ID NO: 851789 - DNA, 33 bp, Homo sapien
agatcccccatgctgaccttgtggtaacgagtg

SEQ ID NO: 851790 - DNA, 33 bp, Homo sapien
agatcccccatgctgatcttgtggtaacgagtg

SEQ ID NO: 851791 - DNA, 33 bp, Homo sapien
atgtgcatattttctacagaccttcaatcacac

SEQ ID NO: 851792 - DNA, 33 bp, Homo sapien
atgtgcatattttctatagaccttcaatcacac

SEQ ID NO: 851793 - DNA, 33 bp, Homo sapien
cattttactttttatacctaggacactttaata

SEQ ID NO: 851794 - DNA, 33 bp, Homo sapien
cattttactttttatagctaggacactttaata

SEQ ID NO: 851795 - DNA, 33 bp, Homo sapien
ttagtttgctgcttgaactgagtggactccatc

SEQ ID NO: 851796 - DNA, 33 bp, Homo sapien
ttagtttgctgcttgagctgagtggactccatc

SEQ ID NO: 851797 - DNA, 33 bp, Homo sapien
ttagaaggcaatattacgaatgataccatttca

SEQ ID NO: 851798 - DNA, 33 bp, Homo sapien
ttagaaggcaatattatgaatgataccatttca

SEQ ID NO: 851799 - DNA, 33 bp, Homo sapien
tgaagaaattcagaagaaagttgaaaaatgtct

SEQ ID NO: 851800 - DNA, 33 bp, Homo sapien
tgaagaaattcagaaggaagttgaaaaatgtct

SEQ ID NO: 851801 - DNA, 33 bp, Homo sapien
tttttaccaccaacaaatgtcacagcctattta

SEQ ID NO: 851802 - DNA, 33 bp, Homo sapien
tttttaccaccaacaagtgtcacagcctattta

SEQ ID NO: 851803 - DNA, 33 bp, Homo sapien
tactttagttgctgcaaggtgtactgcctaggg

SEQ ID NO: 851804 - DNA, 33 bp, Homo sapien
tactttagttgctgcacggtgtactgcctaggg

SEQ ID NO: 851805 - DNA, 33 bp, Homo sapien
gatgaaatttctagacacactctggatgaaaag

SEQ ID NO: 851806 - DNA, 33 bp, Homo sapien
gatgaaatttctagacgcactctggatgaaaag

SEQ ID NO: 851807 - DNA, 33 bp, Homo sapien
aacatttttcatttccaaagcccagaaagcaac

SEQ ID NO: 851808 - DNA, 33 bp, Homo sapien
aacatttttcatttccgaagcccagaaagcaac

SEQ ID NO: 851809 - DNA, 33 bp, Homo sapien
gcttcacaaacatatcactctacaaactcagtt

SEQ ID NO: 851810 - DNA, 33 bp, Homo sapien
gcttcacaaacatatcgctctacaaactcagtt

SEQ ID NO: 851811 - DNA, 33 bp, Homo sapien
tcttttacagatttaacgcagaatgttggtatg

SEQ ID NO: 851812 - DNA, 33 bp, Homo sapien
tcttttacagatttaatgcagaatgttggtatg

SEQ ID NO: 851813 - DNA, 33 bp, Homo sapien
tcaagggaatgtactacgactggatgtgcatgt

SEQ ID NO: 851814 - DNA, 33 bp, Homo sapien
tcaagggaatgtactatgactggatgtgcatgt

SEQ ID NO: 851815 - DNA, 33 bp, Homo sapien
gtgtgcatgacagatcattctctaaccctttac

SEQ ID NO: 851816 - DNA, 33 bp, Homo sapien
gtgtgcatgacagatcgttctctaaccctttac

SEQ ID NO: 851817 - DNA, 33 bp, Homo sapien
tatatgtggcatgcagcctaacagaatcatgct

SEQ ID NO: 851818 - DNA, 33 bp, Homo sapien
tatatgtggcatgcaggctaacagaatcatgct

SEQ ID NO: 851819 - DNA, 33 bp, Homo sapien
gtgtgaaataaatgaaactaagctagagagtta

SEQ ID NO: 851820 - DNA, 33 bp, Homo sapien
gtgtgaaataaatgaagctaagctagagagtta

SEQ ID NO: 851821 - DNA, 33 bp, Homo sapien
gtatctaacatctttagcctctgtaattggaac

SEQ ID NO: 851822 - DNA, 33 bp, Homo sapien
gtatctaacatctttatcctctgtaattggaac

SEQ ID NO: 851823 - DNA, 33 bp, Homo sapien
gataaatggatgaatacgttggatttatataaa

SEQ ID NO: 851824 - DNA, 33 bp, Homo sapien
gataaatggatgaatatgttggatttatataaa

SEQ ID NO: 851825 - DNA, 33 bp, Homo sapien
cctacatataatacgaagtcataaaaccccaca

SEQ ID NO: 851826 - DNA, 33 bp, Homo sapien
cctacatataatacgatgtcataaaaccccaca

SEQ ID NO: 851827 - DNA, 33 bp, Homo sapien
cgtttataggttcaaactctcaattttcctttc

SEQ ID NO: 851828 - DNA, 33 bp, Homo sapien
cgtttataggttcaaagtctcaattttcctttc

SEQ ID NO: 851829 - DNA, 33 bp, Homo sapien
gagaaagaaaagtataaagtgaaggtctacatc

SEQ ID NO: 851830 - DNA, 33 bp, Homo sapien
gagaaagaaaagtatacagtgaaggtctacatc

SEQ ID NO: 851831 - DNA, 33 bp, Homo sapien
gctggtgtataacccacaggattggcgagcata

SEQ ID NO: 851832 - DNA, 33 bp, Homo sapien
gctggtgtataacccataggattggcgagcata

SEQ ID NO: 851833 - DNA, 33 bp, Homo sapien
aatccctatcttcctacatttttcaagatggct

SEQ ID NO: 851834 - DNA, 33 bp, Homo sapien
aatccctatcttcctatatttttcaagatggct

SEQ ID NO: 851835 - DNA, 33 bp, Homo sapien
gcctagattataggaacagcagagtcacagaag

SEQ ID NO: 851836 - DNA, 33 bp, Homo sapien
gcctagattataggaagagcagagtcacagaag

SEQ ID NO: 851837 - DNA, 33 bp, Homo sapien
caacagaactccagcaatattcttgaccatatg

SEQ ID NO: 851838 - DNA, 33 bp, Homo sapien
caacagaactccagcattattcttgaccatatg

SEQ ID NO: 851839 - DNA, 33 bp, Homo sapien
atgtgagtcattaaaactagttgttaggaagat

SEQ ID NO: 851840 - DNA, 33 bp, Homo sapien
atgtgagtcattaaaagtagttgttaggaagat

SEQ ID NO: 851841 - DNA, 33 bp, Homo sapien
tcagctatataaaaacagtcagttggttgaatt

SEQ ID NO: 851842 - DNA, 33 bp, Homo sapien
tcagctatataaaaaccgtcagttggttgaatt

SEQ ID NO: 851843 - DNA, 33 bp, Homo sapien
atctcaaggatcaaatgattgctaagtcatcac

SEQ ID NO: 851844 - DNA, 33 bp, Homo sapien
atctcaaggatcaaattattgctaagtcatcac

SEQ ID NO: 851845 - DNA, 33 bp, Homo sapien
aatggtaaacaggaatcagtggataagtgttcc

SEQ ID NO: 851846 - DNA, 33 bp, Homo sapien
aatggtaaacaggaattagtggataagtgttcc

SEQ ID NO: 851847 - DNA, 33 bp, Homo sapien
aagtgttccaccctcccagatttggatgaaata

SEQ ID NO: 851848 - DNA, 33 bp, Homo sapien
aagtgttccaccctcctagatttggatgaaata

SEQ ID NO: 851849 - DNA, 33 bp, Homo sapien
tcttactttaatagacaatactcatgctccttt

SEQ ID NO: 851850 - DNA, 33 bp, Homo sapien
tcttactttaatagacgatactcatgctccttt

SEQ ID NO: 851851 - DNA, 33 bp, Homo sapien
tgtagcattggtctgcacccctcacatctcatt

SEQ ID NO: 851852 - DNA, 33 bp, Homo sapien
tgtagcattggtctgcgcccctcacatctcatt

SEQ ID NO: 851853 - DNA, 33 bp, Homo sapien
atgactactgctgctcaagaacaggactcatgg

SEQ ID NO: 851854 - DNA, 33 bp, Homo sapien
atgactactgctgctcgagaacaggactcatgg

SEQ ID NO: 851855 - DNA, 33 bp, Homo sapien
gctggacaacttggggaagactcagaagaaaaa

SEQ ID NO: 851856 - DNA, 33 bp, Homo sapien
gctggacaacttgggggagactcagaagaaaaa

SEQ ID NO: 851857 - DNA, 33 bp, Homo sapien
gtgatgtgagaaaaaaataagcttctcaacaaa

SEQ ID NO: 851858 - DNA, 33 bp, Homo sapien
gtgatgtgagaaaaaattaagcttctcaacaaa

SEQ ID NO: 851859 - DNA, 33 bp, Homo sapien
gaaaatatctaacatcccaatttgttcatttct

SEQ ID NO: 851860 - DNA, 33 bp, Homo sapien
gaaaatatctaacatcgcaatttgttcatttct

SEQ ID NO: 851861 - DNA, 33 bp, Homo sapien
cttttcattattttaccctaacacctagaactt

SEQ ID NO: 851862 - DNA, 33 bp, Homo sapien
cttttcattattttactctaacacctagaactt

SEQ ID NO: 851863 - DNA, 33 bp, Homo sapien
ttccttgtcttttctcactgcaaggaagctcta

SEQ ID NO: 851864 - DNA, 33 bp, Homo sapien
ttccttgtcttttctctctgcaaggaagctcta

SEQ ID NO: 851865 - DNA, 33 bp, Homo sapien
tacaaagatgaataaaaatcatggtacctaaca

SEQ ID NO: 851866 - DNA, 33 bp, Homo sapien
tacaaagatgaataaacatcatggtacctaaca

SEQ ID NO: 851867 - DNA, 33 bp, Homo sapien
atcctagtgttggagaataatgaggaattgagg

SEQ ID NO: 851868 - DNA, 33 bp, Homo sapien
atcctagtgttggagactaatgaggaattgagg

SEQ ID NO: 851869 - DNA, 33 bp, Homo sapien
ttttgtggtataaaacactttcatctcattata

SEQ ID NO: 851870 - DNA, 33 bp, Homo sapien
ttttgtggtataaaaccctttcatctcattata

SEQ ID NO: 851871 - DNA, 33 bp, Homo sapien
gattgaatgtaattccaagttaaattccaatga

SEQ ID NO: 851872 - DNA, 33 bp, Homo sapien
gattgaatgtaattccgagttaaattccaatga

SEQ ID NO: 851873 - DNA, 33 bp, Homo sapien
attacatttgttaccacagaactacaaaggatt

SEQ ID NO: 851874 - DNA, 33 bp, Homo sapien
attacatttgttaccatagaactacaaaggatt

SEQ ID NO: 851875 - DNA, 33 bp, Homo sapien
aggctctctagtagacagcatattaaaccaaac

SEQ ID NO: 851876 - DNA, 33 bp, Homo sapien
aggctctctagtagacggcatattaaaccaaac

SEQ ID NO: 851877 - DNA, 33 bp, Homo sapien
tagatagggtactaaactaaaattgaacttaaa

SEQ ID NO: 851878 - DNA, 33 bp, Homo sapien
tagatagggtactaaattaaaattgaacttaaa

SEQ ID NO: 851879 - DNA, 33 bp, Homo sapien
gcacccactgtccttcacccagtttctgacact

SEQ ID NO: 851880 - DNA, 33 bp, Homo sapien
gcacccactgtccttcgcccagtttctgacact

SEQ ID NO: 851881 - DNA, 33 bp, Homo sapien
aaggaagcttcacataacatttgagttgttctt

SEQ ID NO: 851882 - DNA, 33 bp, Homo sapien
aaggaagcttcacatagcatttgagttgttctt

SEQ ID NO: 851883 - DNA, 33 bp, Homo sapien
ctgaatccatttgaaaataagactatagagtaa

SEQ ID NO: 851884 - DNA, 33 bp, Homo sapien
ctgaatccatttgaaagtaagactatagagtaa

SEQ ID NO: 851885 - DNA, 33 bp, Homo sapien
atcacccagcagggcaagtaaagtgactctatt

SEQ ID NO: 851886 - DNA, 33 bp, Homo sapien
atcacccagcagggcacgtaaagtgactctatt

SEQ ID NO: 851887 - DNA, 33 bp, Homo sapien
ggaaaaattgcttgaaagacatacttctttaaa

SEQ ID NO: 851888 - DNA, 33 bp, Homo sapien
ggaaaaattgcttgaaggacatacttctttaaa

SEQ ID NO: 851889 - DNA, 33 bp, Homo sapien
tactgtataccaggaagagtgtaaatgttatta

SEQ ID NO: 851890 - DNA, 33 bp, Homo sapien
tactgtataccaggaatagtgtaaatgttatta

SEQ ID NO: 851891 - DNA, 33 bp, Homo sapien
ttaagtgtgttgggagaccactggagaattttg

SEQ ID NO: 851892 - DNA, 33 bp, Homo sapien
ttaagtgtgttgggaggccactggagaattttg

SEQ ID NO: 851893 - DNA, 33 bp, Homo sapien
ctcattgcaaccaaaacgataaaataataaggt

SEQ ID NO: 851894 - DNA, 33 bp, Homo sapien
ctcattgcaaccaaaatgataaaataataaggt

SEQ ID NO: 851895 - DNA, 33 bp, Homo sapien
tttttgggctccactagagtttcacaacctcct

SEQ ID NO: 851896 - DNA, 33 bp, Homo sapien
tttttgggctccactatagtttcacaacctcct

SEQ ID NO: 851897 - DNA, 33 bp, Homo sapien
gccttgtctgtagaggaattaatgggcatgtct

SEQ ID NO: 851898 - DNA, 33 bp, Homo sapien
gccttgtctgtagaggcattaatgggcatgtct

SEQ ID NO: 851899 - DNA, 33 bp, Homo sapien
atttgtttcagctggtaaaagtctcctgttgaa

SEQ ID NO: 851900 - DNA, 33 bp, Homo sapien
atttgtttcagctggtgaaagtctcctgttgaa

SEQ ID NO: 851901 - DNA, 33 bp, Homo sapien
actgtgtgaagaagcaatgccaaccagtactta

SEQ ID NO: 851902 - DNA, 33 bp, Homo sapien
actgtgtgaagaagcagtgccaaccagtactta

SEQ ID NO: 851903 - DNA, 33 bp, Homo sapien
tttcttcaacgtacaaactttagcataatataa

SEQ ID NO: 851904 - DNA, 33 bp, Homo sapien
tttcttcaacgtacaatctttagcataatataa

SEQ ID NO: 851905 - DNA, 33 bp, Homo sapien
cacatttttgtggatacagagagaagaagttga

SEQ ID NO: 851906 - DNA, 33 bp, Homo sapien
cacatttttgtggatagagagagaagaagttga

SEQ ID NO: 851907 - DNA, 33 bp, Homo sapien
gggaagaatagggagacgtttcttaaaggatac

SEQ ID NO: 851908 - DNA, 33 bp, Homo sapien
gggaagaatagggagatgtttcttaaaggatac

SEQ ID NO: 851909 - DNA, 33 bp, Homo sapien
tttatattaattttagaagtccctttagcttac

SEQ ID NO: 851910 - DNA, 33 bp, Homo sapien
tttatattaattttaggagtccctttagcttac

SEQ ID NO: 851911 - DNA, 33 bp, Homo sapien
aagtttttgaagataacgtgtgaggagtattat

SEQ ID NO: 851912 - DNA, 33 bp, Homo sapien
aagtttttgaagataatgtgtgaggagtattat

SEQ ID NO: 851913 - DNA, 33 bp, Homo sapien
aaatgattattgacacagagtaaaatttaaaat

SEQ ID NO: 851914 - DNA, 33 bp, Homo sapien
aaatgattattgacaccgagtaaaatttaaaat

SEQ ID NO: 851915 - DNA, 33 bp, Homo sapien
ttgtttaataacgcaaatattgaacatcatcat

SEQ ID NO: 851916 - DNA, 33 bp, Homo sapien
ttgtttaataacgcaagtattgaacatcatcat

SEQ ID NO: 851917 - DNA, 33 bp, Homo sapien
agtttgggtggtgacacagaggtaaaccatata

SEQ ID NO: 851918 - DNA, 33 bp, Homo sapien
agtttgggtggtgacatagaggtaaaccatata

SEQ ID NO: 851919 - DNA, 33 bp, Homo sapien
caggagaacatatagacactttttactgtagtt

SEQ ID NO: 851920 - DNA, 33 bp, Homo sapien
caggagaacatatagatactttttactgtagtt

SEQ ID NO: 851921 - DNA, 33 bp, Homo sapien
tagctatgtaagaaacagcctgaacagataata

SEQ ID NO: 851922 - DNA, 33 bp, Homo sapien
tagctatgtaagaaacggcctgaacagataata

SEQ ID NO: 851923 - DNA, 33 bp, Homo sapien
atgttttgtaattttcactgcatgagtatttca

SEQ ID NO: 851924 - DNA, 33 bp, Homo sapien
atgttttgtaattttctctgcatgagtatttca

SEQ ID NO: 851925 - DNA, 33 bp, Homo sapien
atactaaaagtccacaaagtaagacgtgatctg

SEQ ID NO: 851926 - DNA, 33 bp, Homo sapien
atactaaaagtccacagagtaagacgtgatctg

SEQ ID NO: 851927 - DNA, 33 bp, Homo sapien
gagtaaatgcttaggacaagtaagtgaatgaac

SEQ ID NO: 851928 - DNA, 33 bp, Homo sapien
gagtaaatgcttaggataagtaagtgaatgaac

SEQ ID NO: 851929 - DNA, 33 bp, Homo sapien
tggcagatctatcagcaactaggtcattcctga

SEQ ID NO: 851930 - DNA, 33 bp, Homo sapien
tggcagatctatcagcgactaggtcattcctga

SEQ ID NO: 851931 - DNA, 33 bp, Homo sapien
ggggggtatcggaacgacatttgcattttagaa

SEQ ID NO: 851932 - DNA, 33 bp, Homo sapien
ggggggtatcggaacggcatttgcattttagaa

SEQ ID NO: 851933 - DNA, 33 bp, Homo sapien
agatgagacttgagtcacttacaacactggccc

SEQ ID NO: 851934 - DNA, 33 bp, Homo sapien
agatgagacttgagtcgcttacaacactggccc

SEQ ID NO: 851935 - DNA, 33 bp, Homo sapien
caagtggtatttaggccataaattaagaaatgt

SEQ ID NO: 851936 - DNA, 33 bp, Homo sapien
caagtggtatttaggctataaattaagaaatgt

SEQ ID NO: 851937 - DNA, 33 bp, Homo sapien
acacataaacaacttaagactgtggaaagtcct

SEQ ID NO: 851938 - DNA, 33 bp, Homo sapien
acacataaacaacttacgactgtggaaagtcct

SEQ ID NO: 851939 - DNA, 33 bp, Homo sapien
caagtgtatagaaatacaggtatcggtatcaaa

SEQ ID NO: 851940 - DNA, 33 bp, Homo sapien
caagtgtatagaaatataggtatcggtatcaaa

SEQ ID NO: 851941 - DNA, 33 bp, Homo sapien
ttcctgttattataccaatagtttcattctcct

SEQ ID NO: 851942 - DNA, 33 bp, Homo sapien
ttcctgttattataccgatagtttcattctcct

SEQ ID NO: 851943 - DNA, 33 bp, Homo sapien
acggatgttaggatgaagttcaaggaccgacaa

SEQ ID NO: 851944 - DNA, 33 bp, Homo sapien
acggatgttaggatgaggttcaaggaccgacaa

SEQ ID NO: 851945 - DNA, 33 bp, Homo sapien
aatcaggattgtgccaggtaggaacttccactc

SEQ ID NO: 851946 - DNA, 33 bp, Homo sapien
aatcaggattgtgccatgtaggaacttccactc

SEQ ID NO: 851947 - DNA, 33 bp, Homo sapien
ctgctcatacctctaaaggacaactatggagca

SEQ ID NO: 851948 - DNA, 33 bp, Homo sapien
ctgctcatacctctaagggacaactatggagca

SEQ ID NO: 851949 - DNA, 33 bp, Homo sapien
caaagagcaatacaaagataatacaagcgtcct

SEQ ID NO: 851950 - DNA, 33 bp, Homo sapien
caaagagcaatacaaatataatacaagcgtcct

SEQ ID NO: 851951 - DNA, 33 bp, Homo sapien
tttacttctttgcaatcaaaattttcacttcat

SEQ ID NO: 851952 - DNA, 33 bp, Homo sapien
tttacttctttgcaattaaaattttcacttcat

SEQ ID NO: 851953 - DNA, 33 bp, Homo sapien
gataccttatttgaaccactatcatctaaagtc

SEQ ID NO: 851954 - DNA, 33 bp, Homo sapien
gataccttatttgaacgactatcatctaaagtc

SEQ ID NO: 851955 - DNA, 33 bp, Homo sapien
gatatggcttttaagaggatttggctagtgtta

SEQ ID NO: 851956 - DNA, 33 bp, Homo sapien
gatatggcttttaagatgatttggctagtgtta

SEQ ID NO: 851957 - DNA, 33 bp, Homo sapien
tatagaataattcaaaatgtccaagcatattat

SEQ ID NO: 851958 - DNA, 33 bp, Homo sapien
tatagaataattcaaagtgtccaagcatattat

SEQ ID NO: 851959 - DNA, 33 bp, Homo sapien
acttccatgttgattgcagcattattaacaata

SEQ ID NO: 851960 - DNA, 33 bp, Homo sapien
acttccatgttgattgtagcattattaacaata

SEQ ID NO: 851961 - DNA, 33 bp, Homo sapien
cagggcctttcaaaaacggctacatgaagaagt

SEQ ID NO: 851962 - DNA, 33 bp, Homo sapien
cagggcctttcaaaaatggctacatgaagaagt

SEQ ID NO: 851963 - DNA, 33 bp, Homo sapien
ttgtgaaatggtaaataattctctatgattaga

SEQ ID NO: 851964 - DNA, 33 bp, Homo sapien
ttgtgaaatggtaaattattctctatgattaga

SEQ ID NO: 851965 - DNA, 33 bp, Homo sapien
taaatatatacacttacgtacccacaaaaataa

SEQ ID NO: 851966 - DNA, 33 bp, Homo sapien
taaatatatacacttatgtacccacaaaaataa

SEQ ID NO: 851967 - DNA, 33 bp, Homo sapien
gtgggcctgtgtctcaagaaaaagattagtact

SEQ ID NO: 851968 - DNA, 33 bp, Homo sapien
gtgggcctgtgtctcaggaaaaagattagtact

SEQ ID NO: 851969 - DNA, 33 bp, Homo sapien
tttctggatacttctcccatgtgaaattttact

SEQ ID NO: 851970 - DNA, 33 bp, Homo sapien
tttctggatacttctctcatgtgaaattttact

SEQ ID NO: 851971 - DNA, 33 bp, Homo sapien
ttttactcttctttaccccagagttgcaggcca

SEQ ID NO: 851972 - DNA, 33 bp, Homo sapien
ttttactcttctttacgccagagttgcaggcca

SEQ ID NO: 851973 - DNA, 33 bp, Homo sapien
atataatatgggtaagaaaggaatgatggtagc

SEQ ID NO: 851974 - DNA, 33 bp, Homo sapien
atataatatgggtaaggaaggaatgatggtagc

SEQ ID NO: 851975 - DNA, 33 bp, Homo sapien
agttttaatgaagaggcagtgtacagcaaagtg

SEQ ID NO: 851976 - DNA, 33 bp, Homo sapien
agttttaatgaagaggtagtgtacagcaaagtg

SEQ ID NO: 851977 - DNA, 33 bp, Homo sapien
ttcagggccaatacacacaaaggagaaacaact

SEQ ID NO: 851978 - DNA, 33 bp, Homo sapien
ttcagggccaatacacgcaaaggagaaacaact

SEQ ID NO: 851979 - DNA, 33 bp, Homo sapien
tgtcagtttctagttgaatcatcattattatat

SEQ ID NO: 851980 - DNA, 33 bp, Homo sapien
tgtcagtttctagttgtatcatcattattatat

SEQ ID NO: 851981 - DNA, 33 bp, Homo sapien
ttcaatgcctcatataaaacttaccacttttca

SEQ ID NO: 851982 - DNA, 33 bp, Homo sapien
ttcaatgcctcatatagaacttaccacttttca

SEQ ID NO: 851983 - DNA, 33 bp, Homo sapien
gtaagaatggatactgccactctctaggctccc

SEQ ID NO: 851984 - DNA, 33 bp, Homo sapien
gtaagaatggatactgtcactctctaggctccc

SEQ ID NO: 851985 - DNA, 33 bp, Homo sapien
ctcccctgctcctctagacccgatttatgctat

SEQ ID NO: 851986 - DNA, 33 bp, Homo sapien
ctcccctgctcctctatacccgatttatgctat

SEQ ID NO: 851987 - DNA, 33 bp, Homo sapien
tgagtgatccagaggccgatgaaaactaaagtt

SEQ ID NO: 851988 - DNA, 33 bp, Homo sapien
tgagtgatccagaggctgatgaaaactaaagtt

SEQ ID NO: 851989 - DNA, 33 bp, Homo sapien
gggttggaaagatgcccagcggaagaaggtctt

SEQ ID NO: 851990 - DNA, 33 bp, Homo sapien
gggttggaaagatgcctagcggaagaaggtctt

SEQ ID NO: 851991 - DNA, 33 bp, Homo sapien
aatgaaaggaagaacactatgcctctgagaaag

SEQ ID NO: 851992 - DNA, 33 bp, Homo sapien
aatgaaaggaagaacattatgcctctgagaaag

SEQ ID NO: 851993 - DNA, 33 bp, Homo sapien
ttaaagatttaacagacggagcaagcctgaaag

SEQ ID NO: 851994 - DNA, 33 bp, Homo sapien
ttaaagatttaacagatggagcaagcctgaaag

SEQ ID NO: 851995 - DNA, 33 bp, Homo sapien
ggggctcttccgcttcgctcttcactcttctcc

SEQ ID NO: 851996 - DNA, 33 bp, Homo sapien
ggggctcttccgcttctctcttcactcttctcc

SEQ ID NO: 851997 - DNA, 33 bp, Homo sapien
ccccagattagagagacggaaagtggttgttag

SEQ ID NO: 851998 - DNA, 33 bp, Homo sapien
ccccagattagagagatggaaagtggttgttag

SEQ ID NO: 851999 - DNA, 33 bp, Homo sapien
ttgcttgtgaaaattgccaaccactttatatat

SEQ ID NO: 852000 - DNA, 33 bp, Homo sapien
ttgcttgtgaaaattgtcaaccactttatatat

SEQ ID NO: 852001 - DNA, 33 bp, Homo sapien
tgctttaaccaaagtaccacagtcataacctgt

SEQ ID NO: 852002 - DNA, 33 bp, Homo sapien
tgctttaaccaaagtatcacagtcataacctgt

SEQ ID NO: 852003 - DNA, 33 bp, Homo sapien
tctggggctgagccttcaaatatgtgcagatat

SEQ ID NO: 852004 - DNA, 33 bp, Homo sapien
tctggggctgagccttgaaatatgtgcagatat

SEQ ID NO: 852005 - DNA, 33 bp, Homo sapien
cgtgcaaggatggcaaaggaaaagtgtaatcaa

SEQ ID NO: 852006 - DNA, 33 bp, Homo sapien
cgtgcaaggatggcaagggaaaagtgtaatcaa

SEQ ID NO: 852007 - DNA, 33 bp, Homo sapien
attgctgttctctcaaaacggtgtctctgtgct

SEQ ID NO: 852008 - DNA, 33 bp, Homo sapien
attgctgttctctcaacacggtgtctctgtgct

SEQ ID NO: 852009 - DNA, 33 bp, Homo sapien
tgtgatgctcaaaagcaataatgctggaggagt

SEQ ID NO: 852010 - DNA, 33 bp, Homo sapien
tgtgatgctcaaaagctataatgctggaggagt

SEQ ID NO: 852011 - DNA, 33 bp, Homo sapien
ttctgaaaatccctaaatgacataaaaggccct

SEQ ID NO: 852012 - DNA, 33 bp, Homo sapien
ttctgaaaatccctaagtgacataaaaggccct

SEQ ID NO: 852013 - DNA, 33 bp, Homo sapien
gaaggacactataaaccgagtaaaaaggcaaat

SEQ ID NO: 852014 - DNA, 33 bp, Homo sapien
gaaggacactataaacggagtaaaaaggcaaat

SEQ ID NO: 852015 - DNA, 33 bp, Homo sapien
atacactgtcattgaaagtttgtaccatgatat

SEQ ID NO: 852016 - DNA, 33 bp, Homo sapien
atacactgtcattgaaggtttgtaccatgatat

SEQ ID NO: 852017 - DNA, 33 bp, Homo sapien
cagatctcatgaaaacgctatcacaagacacta

SEQ ID NO: 852018 - DNA, 33 bp, Homo sapien
cagatctcatgaaaactctatcacaagacacta

SEQ ID NO: 852019 - DNA, 33 bp, Homo sapien
agcacattagagatagcaagaaagtcagtaaac

SEQ ID NO: 852020 - DNA, 33 bp, Homo sapien
agcacattagagatagtaagaaagtcagtaaac

SEQ ID NO: 852021 - DNA, 33 bp, Homo sapien
atatattcccaggttccaagaattcacacttgg

SEQ ID NO: 852022 - DNA, 33 bp, Homo sapien
atatattcccaggttctaagaattcacacttgg

SEQ ID NO: 852023 - DNA, 33 bp, Homo sapien
gaatttctcacaattacgtgtcatgttacttgt

SEQ ID NO: 852024 - DNA, 33 bp, Homo sapien
gaatttctcacaattatgtgtcatgttacttgt

SEQ ID NO: 852025 - DNA, 33 bp, Homo sapien
ggaaaggaaaaagaaaccatgttgaaatgctct

SEQ ID NO: 852026 - DNA, 33 bp, Homo sapien
ggaaaggaaaaagaaatcatgttgaaatgctct

SEQ ID NO: 852027 - DNA, 33 bp, Homo sapien
ggtgaggcatggtaaagaaatgtctgaccataa

SEQ ID NO: 852028 - DNA, 33 bp, Homo sapien
ggtgaggcatggtaaataaatgtctgaccataa

SEQ ID NO: 852029 - DNA, 33 bp, Homo sapien
atttgattgtgccctgaagagcctaatttactc

SEQ ID NO: 852030 - DNA, 33 bp, Homo sapien
atttgattgtgccctggagagcctaatttactc

SEQ ID NO: 852031 - DNA, 33 bp, Homo sapien
tccaatatagaaacaacggccactcagatggac

SEQ ID NO: 852032 - DNA, 33 bp, Homo sapien
tccaatatagaaacaatggccactcagatggac

SEQ ID NO: 852033 - DNA, 33 bp, Homo sapien
ctgtggcccctgcctaacggagcactatggacc

SEQ ID NO: 852034 - DNA, 33 bp, Homo sapien
ctgtggcccctgcctagcggagcactatggacc

SEQ ID NO: 852035 - DNA, 33 bp, Homo sapien
tgaacttgagattatggacctccacatatggct

SEQ ID NO: 852036 - DNA, 33 bp, Homo sapien
tgaacttgagattatgtacctccacatatggct

SEQ ID NO: 852037 - DNA, 33 bp, Homo sapien
tgaaaacttcaatttacgtcagaatcttagcat

SEQ ID NO: 852038 - DNA, 33 bp, Homo sapien
tgaaaacttcaatttaggtcagaatcttagcat

SEQ ID NO: 852039 - DNA, 33 bp, Homo sapien
ctagtactttttatgaagccacgattaaccttc

SEQ ID NO: 852040 - DNA, 33 bp, Homo sapien
ctagtactttttatgaggccacgattaaccttc

SEQ ID NO: 852041 - DNA, 33 bp, Homo sapien
gtttagtgtctatgctaacttctaactttatat

SEQ ID NO: 852042 - DNA, 33 bp, Homo sapien
gtttagtgtctatgctgacttctaactttatat

SEQ ID NO: 852043 - DNA, 33 bp, Homo sapien
caagatactttgcagacatttctcagcaccagc

SEQ ID NO: 852044 - DNA, 33 bp, Homo sapien
caagatactttgcagatatttctcagcaccagc

SEQ ID NO: 852045 - DNA, 33 bp, Homo sapien
aatattagctcagccaataccacagaagtatta

SEQ ID NO: 852046 - DNA, 33 bp, Homo sapien
aatattagctcagccagtaccacagaagtatta

SEQ ID NO: 852047 - DNA, 33 bp, Homo sapien
agaccactaatgttgacgaacatacataacatt

SEQ ID NO: 852048 - DNA, 33 bp, Homo sapien
agaccactaatgttgatgaacatacataacatt

SEQ ID NO: 852049 - DNA, 33 bp, Homo sapien
tgtcaagatcatcaaaaataaagaagtatggga

SEQ ID NO: 852050 - DNA, 33 bp, Homo sapien
tgtcaagatcatcaaacataaagaagtatggga

SEQ ID NO: 852051 - DNA, 33 bp, Homo sapien
ttatcaaatttgtaagcctatagttgttcataa

SEQ ID NO: 852052 - DNA, 33 bp, Homo sapien
ttatcaaatttgtaagtctatagttgttcataa

SEQ ID NO: 852053 - DNA, 33 bp, Homo sapien
ggtgagcaacaagtaacatcctgatatggtttc

SEQ ID NO: 852054 - DNA, 33 bp, Homo sapien
ggtgagcaacaagtaagatcctgatatggtttc

SEQ ID NO: 852055 - DNA, 33 bp, Homo sapien
acaataaataaatgcaatacagtgagtagagat

SEQ ID NO: 852056 - DNA, 33 bp, Homo sapien
acaataaataaatgcagtacagtgagtagagat

SEQ ID NO: 852057 - DNA, 33 bp, Homo sapien
taatttcagatgtgtaaatctttgctataattt

SEQ ID NO: 852058 - DNA, 33 bp, Homo sapien
taatttcagatgtgtatatctttgctataattt

SEQ ID NO: 852059 - DNA, 33 bp, Homo sapien
tgattttttcctcaaaccataaagacaaaattt

SEQ ID NO: 852060 - DNA, 33 bp, Homo sapien
tgattttttcctcaaagcataaagacaaaattt

SEQ ID NO: 852061 - DNA, 33 bp, Homo sapien
tatataatactggagaagaactatttttatatg

SEQ ID NO: 852062 - DNA, 33 bp, Homo sapien
tatataatactggagatgaactatttttatatg

SEQ ID NO: 852063 - DNA, 33 bp, Homo sapien
actgaaagagctttaacagaaacagggttgaaa

SEQ ID NO: 852064 - DNA, 33 bp, Homo sapien
actgaaagagctttaatagaaacagggttgaaa

SEQ ID NO: 852065 - DNA, 33 bp, Homo sapien
tgagttctctattcaaatcttcctcctactcta

SEQ ID NO: 852066 - DNA, 33 bp, Homo sapien
tgagttctctattcaagtcttcctcctactcta

SEQ ID NO: 852067 - DNA, 33 bp, Homo sapien
taatgaactaaaaaaaatagtacatccactcag

SEQ ID NO: 852068 - DNA, 33 bp, Homo sapien
taatgaactaaaaaaagtagtacatccactcag

SEQ ID NO: 852069 - DNA, 33 bp, Homo sapien
gacccctatttactccagcagtttcatctcttg

SEQ ID NO: 852070 - DNA, 33 bp, Homo sapien
gacccctatttactccggcagtttcatctcttg

SEQ ID NO: 852071 - DNA, 33 bp, Homo sapien
aatttgtcatctataacaggtcatcctgaatta

SEQ ID NO: 852072 - DNA, 33 bp, Homo sapien
aatttgtcatctataataggtcatcctgaatta

SEQ ID NO: 852073 - DNA, 33 bp, Homo sapien
gactcatggaagtagacacattcatggctagca

SEQ ID NO: 852074 - DNA, 33 bp, Homo sapien
gactcatggaagtagatacattcatggctagca

SEQ ID NO: 852075 - DNA, 33 bp, Homo sapien
ctatacctaaaagcagaatttgaggacagcatt

SEQ ID NO: 852076 - DNA, 33 bp, Homo sapien
ctatacctaaaagcaggatttgaggacagcatt

SEQ ID NO: 852077 - DNA, 33 bp, Homo sapien
tgatacaattccaatacagtagtcaataaatta

SEQ ID NO: 852078 - DNA, 33 bp, Homo sapien
tgatacaattccaatatagtagtcaataaatta

SEQ ID NO: 852079 - DNA, 33 bp, Homo sapien
cccaactgtgggttaacgcaagtatactgagta

SEQ ID NO: 852080 - DNA, 33 bp, Homo sapien
cccaactgtgggttaatgcaagtatactgagta

SEQ ID NO: 852081 - DNA, 33 bp, Homo sapien
gtgaataatattgcaacgagcataaaagtgcag

SEQ ID NO: 852082 - DNA, 33 bp, Homo sapien
gtgaataatattgcaatgagcataaaagtgcag

SEQ ID NO: 852083 - DNA, 33 bp, Homo sapien
agctataaaacagagcaatatcatttctggcac

SEQ ID NO: 852084 - DNA, 33 bp, Homo sapien
agctataaaacagagcgatatcatttctggcac

SEQ ID NO: 852085 - DNA, 33 bp, Homo sapien
atcaagaatggcttcaccaaggaagtaatcttt

SEQ ID NO: 852086 - DNA, 33 bp, Homo sapien
atcaagaatggcttcatcaaggaagtaatcttt

SEQ ID NO: 852087 - DNA, 33 bp, Homo sapien
caagaaccctcagtaacagaatgactggatagt

SEQ ID NO: 852088 - DNA, 33 bp, Homo sapien
caagaaccctcagtaagagaatgactggatagt

SEQ ID NO: 852089 - DNA, 33 bp, Homo sapien
caagtcccagtgtgaaaaattatgtctgtacaa

SEQ ID NO: 852090 - DNA, 33 bp, Homo sapien
caagtcccagtgtgaacaattatgtctgtacaa

SEQ ID NO: 852091 - DNA, 33 bp, Homo sapien
ttttctagtgtatttacgtttgagatagtcctt

SEQ ID NO: 852092 - DNA, 33 bp, Homo sapien
ttttctagtgtatttatgtttgagatagtcctt

SEQ ID NO: 852093 - DNA, 33 bp, Homo sapien
gaaaagagggaaggaaacctctataggccaaaa

SEQ ID NO: 852094 - DNA, 33 bp, Homo sapien
gaaaagagggaaggaagcctctataggccaaaa

SEQ ID NO: 852095 - DNA, 33 bp, Homo sapien
gctcaatgcaaatcaaatgtcacctcacctatt

SEQ ID NO: 852096 - DNA, 33 bp, Homo sapien
gctcaatgcaaatcaagtgtcacctcacctatt

SEQ ID NO: 852097 - DNA, 33 bp, Homo sapien
agattttgctaactcccaggcaaattgagcggt

SEQ ID NO: 852098 - DNA, 33 bp, Homo sapien
agattttgctaactcctaggcaaattgagcggt

SEQ ID NO: 852099 - DNA, 33 bp, Homo sapien
gctgtaagttattacaaggaagtttgacactca

SEQ ID NO: 852100 - DNA, 33 bp, Homo sapien
gctgtaagttattacacggaagtttgacactca

SEQ ID NO: 852101 - DNA, 33 bp, Homo sapien
agaagtagccagaaaaagtagaatggtattgaa

SEQ ID NO: 852102 - DNA, 33 bp, Homo sapien
agaagtagccagaaaaggtagaatggtattgaa

SEQ ID NO: 852103 - DNA, 33 bp, Homo sapien
cttctcagcatctaacaatttcttttatctata

SEQ ID NO: 852104 - DNA, 33 bp, Homo sapien
cttctcagcatctaacgatttcttttatctata

SEQ ID NO: 852105 - DNA, 33 bp, Homo sapien
atgatctctgctttcaagaattaggggttcttc

SEQ ID NO: 852106 - DNA, 33 bp, Homo sapien
atgatctctgctttcaggaattaggggttcttc

SEQ ID NO: 852107 - DNA, 33 bp, Homo sapien
gtagcttgcatgattccctgtaaaatgaagcaa

SEQ ID NO: 852108 - DNA, 33 bp, Homo sapien
gtagcttgcatgattcgctgtaaaatgaagcaa

SEQ ID NO: 852109 - DNA, 33 bp, Homo sapien
aattatgtaattcctcccttaacccctgcttgc

SEQ ID NO: 852110 - DNA, 33 bp, Homo sapien
aattatgtaattcctctcttaacccctgcttgc

SEQ ID NO: 852111 - DNA, 33 bp, Homo sapien
caatgaatcctttaagccataagtggtttctat

SEQ ID NO: 852112 - DNA, 33 bp, Homo sapien
caatgaatcctttaagtcataagtggtttctat

SEQ ID NO: 852113 - DNA, 33 bp, Homo sapien
aggatctatggatatgaactgaaagtatgtaac

SEQ ID NO: 852114 - DNA, 33 bp, Homo sapien
aggatctatggatatgcactgaaagtatgtaac

SEQ ID NO: 852115 - DNA, 33 bp, Homo sapien
cctttgtcagaaaaaaaccaaaatatgtgttcg

SEQ ID NO: 852116 - DNA, 33 bp, Homo sapien
cctttgtcagaaaaaagccaaaatatgtgttcg

SEQ ID NO: 852117 - DNA, 33 bp, Homo sapien
tgttattggaatagaagacatggactgggcttt

SEQ ID NO: 852118 - DNA, 33 bp, Homo sapien
tgttattggaatagaatacatggactgggcttt

SEQ ID NO: 852119 - DNA, 33 bp, Homo sapien; identical to SEQ ID NO: 852117

SEQ ID NO: 852120 - DNA, 33 bp, Homo sapien; identical to SEQ ID NO: 852118

SEQ ID NO: 852121 - DNA, 33 bp, Homo sapien
aggactctggaaccataaaagggagtaacggcc

SEQ ID NO: 852122 - DNA, 33 bp, Homo sapien
aggactctggaaccattaaagggagtaacggcc

SEQ ID NO: 852123 - DNA, 33 bp, Homo sapien
gtaagatgtaattaaacagttcaaggactctgg

SEQ ID NO: 852124 - DNA, 33 bp, Homo sapien
gtaagatgtaattaaatagttcaaggactctgg

SEQ ID NO: 852125 - DNA, 33 bp, Homo sapien
tccctttgtatttccaatgactggcagggcata

SEQ ID NO: 852126 - DNA, 33 bp, Homo sapien
tccctttgtatttccagtgactggcagggcata

SEQ ID NO: 852127 - DNA, 33 bp, Homo sapien
tagaatcactcacaacaatatacttaaagtgaa

SEQ ID NO: 852128 - DNA, 33 bp, Homo sapien
tagaatcactcacaacgatatacttaaagtgaa

SEQ ID NO: 852129 - DNA, 33 bp, Homo sapien
ggactctggattggacactcttccctcttggta

SEQ ID NO: 852130 - DNA, 33 bp, Homo sapien
ggactctggattggaccctcttccctcttggta

SEQ ID NO: 852131 - DNA, 33 bp, Homo sapien
gacttcatcacaaatgccatcaatgttattatt

SEQ ID NO: 852132 - DNA, 33 bp, Homo sapien
gacttcatcacaaatgtcatcaatgttattatt

SEQ ID NO: 852133 - DNA, 33 bp, Homo sapien
tactacgatgaataacaggggttaaagtggcca

SEQ ID NO: 852134 - DNA, 33 bp, Homo sapien
tactacgatgaataaccggggttaaagtggcca

SEQ ID NO: 852135 - DNA, 33 bp, Homo sapien
tgaattcatttgtaaaccatttatagtgtttat

SEQ ID NO: 852136 - DNA, 33 bp, Homo sapien
tgaattcatttgtaaatcatttatagtgtttat

SEQ ID NO: 852137 - DNA, 33 bp, Homo sapien
tgtgttctattcagcaacagttaagcgaaactc

SEQ ID NO: 852138 - DNA, 33 bp, Homo sapien
tgtgttctattcagcatcagttaagcgaaactc

SEQ ID NO: 852139 - DNA, 33 bp, Homo sapien
aaatatcgagaaaagaatatttgcatctgacat

SEQ ID NO: 852140 - DNA, 33 bp, Homo sapien
aaatatcgagaaaagagtatttgcatctgacat

SEQ ID NO: 852141 - DNA, 33 bp, Homo sapien
acccagaatgtcctccccattttcataagttcg

SEQ ID NO: 852142 - DNA, 33 bp, Homo sapien
acccagaatgtcctcctcattttcataagttcg

SEQ ID NO: 852143 - DNA, 33 bp, Homo sapien
tcccctaaatttctcccgctcaaattaagtatc

SEQ ID NO: 852144 - DNA, 33 bp, Homo sapien
tcccctaaatttctcctgctcaaattaagtatc

SEQ ID NO: 852145 - DNA, 33 bp, Homo sapien
aacctgactagtgctccaaaccactggaacaga

SEQ ID NO: 852146 - DNA, 33 bp, Homo sapien
aacctgactagtgctcgaaaccactggaacaga

SEQ ID NO: 852147 - DNA, 33 bp, Homo sapien
ttggtactataaaaaccgtgattcatgtaacag

SEQ ID NO: 852148 - DNA, 33 bp, Homo sapien
ttggtactataaaaactgtgattcatgtaacag

SEQ ID NO: 852149 - DNA, 33 bp, Homo sapien
gcaaactcttttcctaactcttcaagtgattaa

SEQ ID NO: 852150 - DNA, 33 bp, Homo sapien
gcaaactcttttcctagctcttcaagtgattaa

SEQ ID NO: 852151 - DNA, 33 bp, Homo sapien
tattataaagaaaagtaaaaagcgcaaggagac

SEQ ID NO: 852152 - DNA, 33 bp, Homo sapien
tattataaagaaaagttaaaagcgcaaggagac

SEQ ID NO: 852153 - DNA, 33 bp, Homo sapien
ggaaaatccatacctagcacgtgttgattccag

SEQ ID NO: 852154 - DNA, 33 bp, Homo sapien
ggaaaatccatacctatcacgtgttgattccag

SEQ ID NO: 852155 - DNA, 33 bp, Homo sapien
taagacaaacaggatgaagttatggggacctgc

SEQ ID NO: 852156 - DNA, 33 bp, Homo sapien
taagacaaacaggatggagttatggggacctgc

SEQ ID NO: 852157 - DNA, 33 bp, Homo sapien
tgattaccactgaaaacatgttgtattcacaaa

SEQ ID NO: 852158 - DNA, 33 bp, Homo sapien
tgattaccactgaaaatatgttgtattcacaaa

SEQ ID NO: 852159 - DNA, 33 bp, Homo sapien
caccatgggagaatgaaagaatggaaaagaaaa

SEQ ID NO: 852160 - DNA, 33 bp, Homo sapien
caccatgggagaatgagagaatggaaaagaaaa

SEQ ID NO: 852161 - DNA, 33 bp, Homo sapien
tcattgcctagaccaacgtcatttaagcatttt

SEQ ID NO: 852162 - DNA, 33 bp, Homo sapien
tcattgcctagaccaatgtcatttaagcatttt

SEQ ID NO: 852163 - DNA, 33 bp, Homo sapien
ggctcaaagcattttacgtgttgactttctggt

SEQ ID NO: 852164 - DNA, 33 bp, Homo sapien
ggctcaaagcattttatgtgttgactttctggt

SEQ ID NO: 852165 - DNA, 33 bp, Homo sapien
aaacaatagtcaacacaatagacatctcaatta

SEQ ID NO: 852166 - DNA, 33 bp, Homo sapien
aaacaatagtcaacaccatagacatctcaatta

SEQ ID NO: 852167 - DNA, 33 bp, Homo sapien
tttctgtgatatgttcgaattcctcttttcatc

SEQ ID NO: 852168 - DNA, 33 bp, Homo sapien
tttctgtgatatgttctaattcctcttttcatc

SEQ ID NO: 852169 - DNA, 33 bp, Homo sapien
ttaggcatatgaaacactgcaaagaatggtaaa

SEQ ID NO: 852170 - DNA, 33 bp, Homo sapien
ttaggcatatgaaacagtgcaaagaatggtaaa

SEQ ID NO: 852171 - DNA, 33 bp, Homo sapien
ggttagctgcattgtaacctgtgaagcttgaaa

SEQ ID NO: 852172 - DNA, 33 bp, Homo sapien
ggttagctgcattgtaccctgtgaagcttgaaa

SEQ ID NO: 852173 - DNA, 33 bp, Homo sapien
gagaaaggccaggtcacctacgaaagaaagccc

SEQ ID NO: 852174 - DNA, 33 bp, Homo sapien
gagaaaggccaggtcatctacgaaagaaagccc

SEQ ID NO: 852175 - DNA, 33 bp, Homo sapien
tttatcaaacattagtaacgtgtagaaatcatg

SEQ ID NO: 852176 - DNA, 33 bp, Homo sapien
tttatcaaacattagtgacgtgtagaaatcatg

SEQ ID NO: 852177 - DNA, 33 bp, Homo sapien
atttactttctttggccattattttgtccttct

SEQ ID NO: 852178 - DNA, 33 bp, Homo sapien
atttactttctttggctattattttgtccttct

SEQ ID NO: 852179 - DNA, 33 bp, Homo sapien
ttaaatgactttgaacaatccgtagcatacata

SEQ ID NO: 852180 - DNA, 33 bp, Homo sapien
ttaaatgactttgaacgatccgtagcatacata

SEQ ID NO: 852181 - DNA, 33 bp, Homo sapien
agtccagcctgcaaaacgtagtaggactcccta

SEQ ID NO: 852182 - DNA, 33 bp, Homo sapien
agtccagcctgcaaaatgtagtaggactcccta

SEQ ID NO: 852183 - DNA, 33 bp, Homo sapien
tttgctctgtaattccaattcaacccttacatg

SEQ ID NO: 852184 - DNA, 33 bp, Homo sapien
tttgctctgtaattccgattcaacccttacatg

SEQ ID NO: 852185 - DNA, 33 bp, Homo sapien
tagaagaaaattggaactatgtattctacttag

SEQ ID NO: 852186 - DNA, 33 bp, Homo sapien
tagaagaaaattggaagtatgtattctacttag

SEQ ID NO: 852187 - DNA, 33 bp, Homo sapien
ttcttttggtctggaaacacaatgttcttatgg

SEQ ID NO: 852188 - DNA, 33 bp, Homo sapien
ttcttttggtctggaagcacaatgttcttatgg

SEQ ID NO: 852189 - DNA, 33 bp, Homo sapien
accactaattaactgcacaaactttggctaaaa

SEQ ID NO: 852190 - DNA, 33 bp, Homo sapien
accactaattaactgcgcaaactttggctaaaa

SEQ ID NO: 852191 - DNA, 33 bp, Homo sapien
gaaagctatgtttcccagactttgtcatttgat

SEQ ID NO: 852192 - DNA, 33 bp, Homo sapien
gaaagctatgtttcccggactttgtcatttgat

SEQ ID NO: 852193 - DNA, 33 bp, Homo sapien
tctttttcctttacatcaagtaactatctgatg

SEQ ID NO: 852194 - DNA, 33 bp, Homo sapien
tctttttcctttacatgaagtaactatctgatg

SEQ ID NO: 852195 - DNA, 33 bp, Homo sapien
gatgatttgaaaacataaaagagcaagtggcct

SEQ ID NO: 852196 - DNA, 33 bp, Homo sapien
gatgatttgaaaacatgaaagagcaagtggcct

SEQ ID NO: 852197 - DNA, 33 bp, Homo sapien
gcagctgaaaaatagcaaagtggctctttgaag

SEQ ID NO: 852198 - DNA, 33 bp, Homo sapien
gcagctgaaaaatagcgaagtggctctttgaag

SEQ ID NO: 852199 - DNA, 33 bp, Homo sapien
taaaaaaattccaaaaggatcatgacttaactg

SEQ ID NO: 852200 - DNA, 33 bp, Homo sapien
taaaaaaattccaaaatgatcatgacttaactg

SEQ ID NO: 852201 - DNA, 33 bp, Homo sapien
attcaaacatattttcaatctctgattcataag

SEQ ID NO: 852202 - DNA, 33 bp, Homo sapien
attcaaacatattttctatctctgattcataag

SEQ ID NO: 852203 - DNA, 33 bp, Homo sapien
aaagaagcatcctgaaaactgactcaaatagta

SEQ ID NO: 852204 - DNA, 33 bp, Homo sapien
aaagaagcatcctgaatactgactcaaatagta

SEQ ID NO: 852205 - DNA, 33 bp, Homo sapien
atttcatgctgtctggccaactcacagggagca

SEQ ID NO: 852206 - DNA, 33 bp, Homo sapien
atttcatgctgtctggtcaactcacagggagca

SEQ ID NO: 852207 - DNA, 33 bp, Homo sapien
atctatgtcattgtcaacctgaatttattaaga

SEQ ID NO: 852208 - DNA, 33 bp, Homo sapien
atctatgtcattgtcatcctgaatttattaaga

SEQ ID NO: 852209 - DNA, 33 bp, Homo sapien
tgaccagagcggaaaacacaaactcttacaact

SEQ ID NO: 852210 - DNA, 33 bp, Homo sapien
tgaccagagcggaaaatacaaactcttacaact

SEQ ID NO: 852211 - DNA, 33 bp, Homo sapien
tgagttgccatctatacctctatctctgtaact

SEQ ID NO: 852212 - DNA, 33 bp, Homo sapien
tgagttgccatctatatctctatctctgtaact

SEQ ID NO: 852213 - DNA, 33 bp, Homo sapien
ttcatctctaaaccaaaccatccttgcatctat

SEQ ID NO: 852214 - DNA, 33 bp, Homo sapien
ttcatctctaaaccaacccatccttgcatctat

SEQ ID NO: 852215 - DNA, 33 bp, Homo sapien
tgaaagaacacatatgaagttcaggcattatgc

SEQ ID NO: 852216 - DNA, 33 bp, Homo sapien
tgaaagaacacatatggagttcaggcattatgc

SEQ ID NO: 852217 - DNA, 33 bp, Homo sapien
tcattattatctgctacggctaagtgaagttaa

SEQ ID NO: 852218 - DNA, 33 bp, Homo sapien
tcattattatctgctatggctaagtgaagttaa

SEQ ID NO: 852219 - DNA, 33 bp, Homo sapien
caagaaatgtggtagactagataaacagcaata

SEQ ID NO: 852220 - DNA, 33 bp, Homo sapien
caagaaatgtggtagagtagataaacagcaata

SEQ ID NO: 852221 - DNA, 33 bp, Homo sapien
caaaaattaaaaataaactggatcaaacatcaa

SEQ ID NO: 852222 - DNA, 33 bp, Homo sapien
caaaaattaaaaataagctggatcaaacatcaa

SEQ ID NO: 852223 - DNA, 33 bp, Homo sapien
gcaactttgatgggagaaaagtagattgcttag

SEQ ID NO: 852224 - DNA, 33 bp, Homo sapien
gcaactttgatgggaggaaagtagattgcttag

SEQ ID NO: 852225 - DNA, 33 bp, Homo sapien
tgttcaataaacatggaaattcagatatctctt

SEQ ID NO: 852226 - DNA, 33 bp, Homo sapien
tgttcaataaacatgggaattcagatatctctt

SEQ ID NO: 852227 - DNA, 33 bp, Homo sapien
aataaggaggttgtcactgaaaagagtgaattc

SEQ ID NO: 852228 - DNA, 33 bp, Homo sapien
aataaggaggttgtcattgaaaagagtgaattc

SEQ ID NO: 852229 - DNA, 33 bp, Homo sapien
gagataatagctcctccaacaggtgagtccatg

SEQ ID NO: 852230 - DNA, 33 bp, Homo sapien
gagataatagctcctctaacaggtgagtccatg

SEQ ID NO: 852231 - DNA, 33 bp, Homo sapien
aataagcttggtctcactcatggcacttggata

SEQ ID NO: 852232 - DNA, 33 bp, Homo sapien
aataagcttggtctcattcatggcacttggata

SEQ ID NO: 852233 - DNA, 33 bp, Homo sapien
gcaggctaattcgttacgattaatgaaaagtag

SEQ ID NO: 852234 - DNA, 33 bp, Homo sapien
gcaggctaattcgttaggattaatgaaaagtag

SEQ ID NO: 852235 - DNA, 33 bp, Homo sapien
agtttgctgtgaatgacggttagatactggata

SEQ ID NO: 852236 - DNA, 33 bp, Homo sapien
agtttgctgtgaatgatggttagatactggata

SEQ ID NO: 852237 - DNA, 33 bp, Homo sapien
ctgtagttctcagattcaaatgtttgttatgtt

SEQ ID NO: 852238 - DNA, 33 bp, Homo sapien
ctgtagttctcagatttaaatgtttgttatgtt

SEQ ID NO: 852239 - DNA, 33 bp, Homo sapien
ctgcctcatactctacagacaaagaacttgagc

SEQ ID NO: 852240 - DNA, 33 bp, Homo sapien
ctgcctcatactctacggacaaagaacttgagc

SEQ ID NO: 852241 - DNA, 33 bp, Homo sapien
atttaatgtttataacagtcctttgaaatgggt

SEQ ID NO: 852242 - DNA, 33 bp, Homo sapien
atttaatgtttataaccgtcctttgaaatgggt

SEQ ID NO: 852243 - DNA, 33 bp, Homo sapien
taggcaacagaacaatcaattctgttcacatac

SEQ ID NO: 852244 - DNA, 33 bp, Homo sapien
taggcaacagaacaatgaattctgttcacatac

SEQ ID NO: 852245 - DNA, 33 bp, Homo sapien
gtccatccatcctttcactgatctgtagctcag

SEQ ID NO: 852246 - DNA, 33 bp, Homo sapien
gtccatccatcctttctctgatctgtagctcag

SEQ ID NO: 852247 - DNA, 33 bp, Homo sapien
atgatgaaaggtctgaagccctcactctaaagc

SEQ ID NO: 852248 - DNA, 33 bp, Homo sapien
atgatgaaaggtctgaggccctcactctaaagc

SEQ ID NO: 852249 - DNA, 33 bp, Homo sapien
ttagaatgctgcctaagtatgggttcttccttt

SEQ ID NO: 852250 - DNA, 33 bp, Homo sapien
ttagaatgctgcctaattatgggttcttccttt

SEQ ID NO: 852251 - DNA, 33 bp, Homo sapien
atagaaagttaagataactcagaaatccaagcc

SEQ ID NO: 852252 - DNA, 33 bp, Homo sapien
atagaaagttaagatacctcagaaatccaagcc

SEQ ID NO: 852253 - DNA, 33 bp, Homo sapien
tatccctatcaagagaaaaaatcaagcttcaca

SEQ ID NO: 852254 - DNA, 33 bp, Homo sapien
tatccctatcaagagagaaaatcaagcttcaca

SEQ ID NO: 852255 - DNA, 33 bp, Homo sapien
gaggaaacaaaagtccaaggttcactaagtagt

SEQ ID NO: 852256 - DNA, 33 bp, Homo sapien
gaggaaacaaaagtccgaggttcactaagtagt

SEQ ID NO: 852257 - DNA, 33 bp, Homo sapien
tcggctttccagaggactcaggctaagtgacat

SEQ ID NO: 852258 - DNA, 33 bp, Homo sapien
tcggctttccagaggattcaggctaagtgacat

SEQ ID NO: 852259 - DNA, 33 bp, Homo sapien
tctatataaccactgacgaaatcacagccctaa

SEQ ID NO: 852260 - DNA, 33 bp, Homo sapien
tctatataaccactgatgaaatcacagccctaa

SEQ ID NO: 852261 - DNA, 33 bp, Homo sapien
tttaacaagcgttgcactgaaaacaactttatg

SEQ ID NO: 852262 - DNA, 33 bp, Homo sapien
tttaacaagcgttgcattgaaaacaactttatg

SEQ ID NO: 852263 - DNA, 33 bp, Homo sapien
cgcgtggcgggctaacgacataggaaacggaga

SEQ ID NO: 852264 - DNA, 33 bp, Homo sapien
cgcgtggcgggctaactacataggaaacggaga

SEQ ID NO: 852265 - DNA, 33 bp, Homo sapien
caaaagtaagatatcccagatgtcccaatgcag

SEQ ID NO: 852266 - DNA, 33 bp, Homo sapien
caaaagtaagatatcctagatgtcccaatgcag

SEQ ID NO: 852267 - DNA, 33 bp, Homo sapien
acaaggataagaactcaataaacattggcgata

SEQ ID NO: 852268 - DNA, 33 bp, Homo sapien
acaaggataagaactcgataaacattggcgata

SEQ ID NO: 852269 - DNA, 33 bp, Homo sapien
tgcccccagagcataaagtatcttgaaggttaa

SEQ ID NO: 852270 - DNA, 33 bp, Homo sapien
tgcccccagagcataacgtatcttgaaggttaa

SEQ ID NO: 852271 - DNA, 33 bp, Homo sapien
gtatataaattgttaaatgacgttcaaaaggct

SEQ ID NO: 852272 - DNA, 33 bp, Homo sapien
gtatataaattgttaattgacgttcaaaaggct

SEQ ID NO: 852273 - DNA, 33 bp, Homo sapien
atcaactgcttacagaaccattggagtatttta

SEQ ID NO: 852274 - DNA, 33 bp, Homo sapien
atcaactgcttacagatccattggagtatttta

SEQ ID NO: 852275 - DNA, 33 bp, Homo sapien
cctgacccagggttccagatcatcaggtacaaa

SEQ ID NO: 852276 - DNA, 33 bp, Homo sapien
cctgacccagggttccggatcatcaggtacaaa

SEQ ID NO: 852277 - DNA, 33 bp, Homo sapien
aatgttacatgggtggaaactgcactattgatt

SEQ ID NO: 852278 - DNA, 33 bp, Homo sapien
aatgttacatgggtgggaactgcactattgatt

SEQ ID NO: 852279 - DNA, 33 bp, Homo sapien
gattgatccctaacaacaagaagctcgcagcca

SEQ ID NO: 852280 - DNA, 33 bp, Homo sapien
gattgatccctaacaagaagaagctcgcagcca

SEQ ID NO: 852281 - DNA, 33 bp, Homo sapien
agagttcttggaaatcacataccatcttcatgg

SEQ ID NO: 852282 - DNA, 33 bp, Homo sapien
agagttcttggaaatcgcataccatcttcatgg

SEQ ID NO: 852283 - DNA, 33 bp, Homo sapien
aacaaactgtgacttacccatacaatgaaatac

SEQ ID NO: 852284 - DNA, 33 bp, Homo sapien
aacaaactgtgacttatccatacaatgaaatac

SEQ ID NO: 852285 - DNA, 33 bp, Homo sapien
atcaacactgaatatcacttttgtatgtaagct

SEQ ID NO: 852286 - DNA, 33 bp, Homo sapien
atcaacactgaatatcgcttttgtatgtaagct

SEQ ID NO: 852287 - DNA, 33 bp, Homo sapien
tgctgcaaaacaaataacctcaaaatcagaagc

SEQ ID NO: 852288 - DNA, 33 bp, Homo sapien
tgctgcaaaacaaatagcctcaaaatcagaagc

SEQ ID NO: 852289 - DNA, 33 bp, Homo sapien
gcatttgcaaaaaataacaagggctgcaagtaa

SEQ ID NO: 852290 - DNA, 33 bp, Homo sapien
gcatttgcaaaaaatagcaagggctgcaagtaa

SEQ ID NO: 852291 - DNA, 33 bp, Homo sapien
ttgatggttggagataaatttattagaaaggca

SEQ ID NO: 852292 - DNA, 33 bp, Homo sapien
ttgatggttggagatacatttattagaaaggca

SEQ ID NO: 852293 - DNA, 33 bp, Homo sapien
aggcaatgaaaatgaacgcaacaagccatggaa

SEQ ID NO: 852294 - DNA, 33 bp, Homo sapien
aggcaatgaaaatgaatgcaacaagccatggaa

SEQ ID NO: 852295 - DNA, 33 bp, Homo sapien
gcattcatgtgactgcaacatcctttctatcag

SEQ ID NO: 852296 - DNA, 33 bp, Homo sapien
gcattcatgtgactgcgacatcctttctatcag

SEQ ID NO: 852297 - DNA, 33 bp, Homo sapien
agaaagacaactgtccaaaatgatacacactag

SEQ ID NO: 852298 - DNA, 33 bp, Homo sapien
agaaagacaactgtccgaaatgatacacactag

SEQ ID NO: 852299 - DNA, 33 bp, Homo sapien
cagaactgattgttcacaaggttaaaattttgg

SEQ ID NO: 852300 - DNA, 33 bp, Homo sapien
cagaactgattgttcataaggttaaaattttgg

SEQ ID NO: 852301 - DNA, 33 bp, Homo sapien
ttaaaattttggcttacgaaagttgtgcatcac

SEQ ID NO: 852302 - DNA, 33 bp, Homo sapien
ttaaaattttggcttatgaaagttgtgcatcac

SEQ ID NO: 852303 - DNA, 33 bp, Homo sapien
tcaggaagagctcatcaaacactttgcctttat

SEQ ID NO: 852304 - DNA, 33 bp, Homo sapien
tcaggaagagctcatcgaacactttgcctttat

SEQ ID NO: 852305 - DNA, 33 bp, Homo sapien
gagatagtagggggaccatttattaaggtgaaa

SEQ ID NO: 852306 - DNA, 33 bp, Homo sapien
gagatagtagggggactatttattaaggtgaaa

SEQ ID NO: 852307 - DNA, 33 bp, Homo sapien
gatgaatgcctttgcacaagaaagcagaacatg

SEQ ID NO: 852308 - DNA, 33 bp, Homo sapien
gatgaatgcctttgcagaagaaagcagaacatg

SEQ ID NO: 852309 - DNA, 33 bp, Homo sapien
gatgtacaaagataaaccaagtttgatagtagg

SEQ ID NO: 852310 - DNA, 33 bp, Homo sapien
gatgtacaaagataaatcaagtttgatagtagg

SEQ ID NO: 852311 - DNA, 33 bp, Homo sapien
cgtaagaatcaaatccaaactgtaagttacctg

SEQ ID NO: 852312 - DNA, 33 bp, Homo sapien
cgtaagaatcaaatccgaactgtaagttacctg

SEQ ID NO: 852313 - DNA, 33 bp, Homo sapien
gggttgatggtggtaaaatttcataaaatctct

SEQ ID NO: 852314 - DNA, 33 bp, Homo sapien
gggttgatggtggtaacatttcataaaatctct

SEQ ID NO: 852315 - DNA, 33 bp, Homo sapien
cagctgtcaaaacctactaatcctacttctata

SEQ ID NO: 852316 - DNA, 33 bp, Homo sapien
cagctgtcaaaacctattaatcctacttctata

SEQ ID NO: 852317 - DNA, 33 bp, Homo sapien
aggtgatgatacccaaatgatacttgcagaggg

SEQ ID NO: 852318 - DNA, 33 bp, Homo sapien
aggtgatgatacccaagtgatacttgcagaggg

SEQ ID NO: 852319 - DNA, 33 bp, Homo sapien
tgtcccttgacgaagccacttggctacttgtgt

SEQ ID NO: 852320 - DNA, 33 bp, Homo sapien
tgtcccttgacgaagctacttggctacttgtgt

SEQ ID NO: 852321 - DNA, 33 bp, Homo sapien
actgagagtcttataacggaattctgaaaatgt

SEQ ID NO: 852322 - DNA, 33 bp, Homo sapien
actgagagtcttataatggaattctgaaaatgt

SEQ ID NO: 852323 - DNA, 33 bp, Homo sapien
ctgaacatagtcaagacggcaattctctccaaa

SEQ ID NO: 852324 - DNA, 33 bp, Homo sapien
ctgaacatagtcaagatggcaattctctccaaa

SEQ ID NO: 852325 - DNA, 33 bp, Homo sapien
aattatttgctcagaactagatcctgaaaattt

SEQ ID NO: 852326 - DNA, 33 bp, Homo sapien
aattatttgctcagaagtagatcctgaaaattt

SEQ ID NO: 852327 - DNA, 33 bp, Homo sapien
tgggcacattttttacaccagagaaacagagtt

SEQ ID NO: 852328 - DNA, 33 bp, Homo sapien
tgggcacattttttacgccagagaaacagagtt

SEQ ID NO: 852329 - DNA, 33 bp, Homo sapien
ttccatactcagttccccttccacaccaagccc

SEQ ID NO: 852330 - DNA, 33 bp, Homo sapien
ttccatactcagttcctcttccacaccaagccc

SEQ ID NO: 852331 - DNA, 33 bp, Homo sapien
tgacatggatgaaaacaaacggaagcatatcat

SEQ ID NO: 852332 - DNA, 33 bp, Homo sapien
tgacatggatgaaaacgaacggaagcatatcat

SEQ ID NO: 852333 - DNA, 33 bp, Homo sapien
atactaagtactgagacgctgacatacacacat

SEQ ID NO: 852334 - DNA, 33 bp, Homo sapien
atactaagtactgagatgctgacatacacacat

SEQ ID NO: 852335 - DNA, 33 bp, Homo sapien
tgtgagattgaagcagaccttaattctagccat

SEQ ID NO: 852336 - DNA, 33 bp, Homo sapien
tgtgagattgaagcagcccttaattctagccat

SEQ ID NO: 852337 - DNA, 33 bp, Homo sapien
gtccgtcaatgaatgacagcataaacaaaaagt

SEQ ID NO: 852338 - DNA, 33 bp, Homo sapien
gtccgtcaatgaatgatagcataaacaaaaagt

SEQ ID NO: 852339 - DNA, 33 bp, Homo sapien
catcccttccttgaacagatccctctctctcat

SEQ ID NO: 852340 - DNA, 33 bp, Homo sapien
catcccttccttgaaccgatccctctctctcat

SEQ ID NO: 852341 - DNA, 33 bp, Homo sapien
ggtgcaactaacaaaaaatcccaacagtctgat

SEQ ID NO: 852342 - DNA, 33 bp, Homo sapien
ggtgcaactaacaaaagatcccaacagtctgat

SEQ ID NO: 852343 - DNA, 33 bp, Homo sapien
cacattaccttctactaacttgaaacctgaaga

SEQ ID NO: 852344 - DNA, 33 bp, Homo sapien
cacattaccttctactgacttgaaacctgaaga

SEQ ID NO: 852345 - DNA, 33 bp, Homo sapien
gattttggatgaggcactaaatatagtattttt

SEQ ID NO: 852346 - DNA, 33 bp, Homo sapien
gattttggatgaggcattaaatatagtattttt

SEQ ID NO: 852347 - DNA, 33 bp, Homo sapien
aaattgattccatcaccccatttacagatgctc

SEQ ID NO: 852348 - DNA, 33 bp, Homo sapien
aaattgattccatcactccatttacagatgctc

SEQ ID NO: 852349 - DNA, 33 bp, Homo sapien
aggcagatcctgatagaaaaatatacaatgata

SEQ ID NO: 852350 - DNA, 33 bp, Homo sapien
aggcagatcctgataggaaaatatacaatgata

SEQ ID NO: 852351 - DNA, 33 bp, Homo sapien
ggaatggaaattcagaacaaagcatcagaagga

SEQ ID NO: 852352 - DNA, 33 bp, Homo sapien
ggaatggaaattcagagcaaagcatcagaagga

SEQ ID NO: 852353 - DNA, 33 bp, Homo sapien
tttccattcctgtttacgctgccactccagaaa

SEQ ID NO: 852354 - DNA, 33 bp, Homo sapien
tttccattcctgtttatgctgccactccagaaa

SEQ ID NO: 852355 - DNA, 33 bp, Homo sapien
tttaccatgtactcacagtaaagtaatcattag

SEQ ID NO: 852356 - DNA, 33 bp, Homo sapien
tttaccatgtactcaccgtaaagtaatcattag

SEQ ID NO: 852357 - DNA, 33 bp, Homo sapien
agatttatccttaaaaaagtgcgttagactcca

SEQ ID NO: 852358 - DNA, 33 bp, Homo sapien
agatttatccttaaaagagtgcgttagactcca

SEQ ID NO: 852359 - DNA, 33 bp, Homo sapien
gtactagtaaattgaaccactcaaataattaat

SEQ ID NO: 852360 - DNA, 33 bp, Homo sapien
gtactagtaaattgaagcactcaaataattaat

SEQ ID NO: 852361 - DNA, 33 bp, Homo sapien
ctttatctgtcaagcaatgcccagtgacggagt

SEQ ID NO: 852362 - DNA, 33 bp, Homo sapien
ctttatctgtcaagcattgcccagtgacggagt

SEQ ID NO: 852363 - DNA, 33 bp, Homo sapien
tggcaaatccctgagaatatctggaagagtcaa

SEQ ID NO: 852364 - DNA, 33 bp, Homo sapien
tggcaaatccctgagagtatctggaagagtcaa

SEQ ID NO: 852365 - DNA, 33 bp, Homo sapien
aagagtcaatagtgcacgtggtttggcaatctg

SEQ ID NO: 852366 - DNA, 33 bp, Homo sapien
aagagtcaatagtgcaggtggtttggcaatctg

SEQ ID NO: 852367 - DNA, 33 bp, Homo sapien
tatccctgtggccctcccgaaaaccgggctcca

SEQ ID NO: 852368 - DNA, 33 bp, Homo sapien
tatccctgtggccctcgcgaaaaccgggctcca

SEQ ID NO: 852369 - DNA, 33 bp, Homo sapien
gacacactcactgaacgaaaaagaggagaattg

SEQ ID NO: 852370 - DNA, 33 bp, Homo sapien
gacacactcactgaactaaaaagaggagaattg

SEQ ID NO: 852371 - DNA, 33 bp, Homo sapien
gaaaatgaatgaatgaataatcacacttagtaa

SEQ ID NO: 852372 - DNA, 33 bp, Homo sapien
gaaaatgaatgaatgagtaatcacacttagtaa

SEQ ID NO: 852373 - DNA, 33 bp, Homo sapien
tctcaccagcaaagcaaggggtttagattggtt

SEQ ID NO: 852374 - DNA, 33 bp, Homo sapien
tctcaccagcaaagcacggggtttagattggtt

SEQ ID NO: 852375 - DNA, 33 bp, Homo sapien
cagcaggtcttgttaccgatcttgatgccattg

SEQ ID NO: 852376 - DNA, 33 bp, Homo sapien
cagcaggtcttgttactgatcttgatgccattg

SEQ ID NO: 852377 - DNA, 33 bp, Homo sapien
gcagacactgcatgcccgaatcaaagcaagatc

SEQ ID NO: 852378 - DNA, 33 bp, Homo sapien
gcagacactgcatgcctgaatcaaagcaagatc

SEQ ID NO: 852379 - DNA, 33 bp, Homo sapien
tggatagtgtatgcaagaattctacaagcccta

SEQ ID NO: 852380 - DNA, 33 bp, Homo sapien
tggatagtgtatgcaataattctacaagcccta

SEQ ID NO: 852381 - DNA, 33 bp, Homo sapien
tttggtaaaagctagcacattaatgttagcact

SEQ ID NO: 852382 - DNA, 33 bp, Homo sapien
tttggtaaaagctagcgcattaatgttagcact

SEQ ID NO: 852383 - DNA, 33 bp, Homo sapien
tgaattagtagcaagaccttatcagtcaatgtt

SEQ ID NO: 852384 - DNA, 33 bp, Homo sapien
tgaattagtagcaagatcttatcagtcaatgtt

SEQ ID NO: 852385 - DNA, 33 bp, Homo sapien
cactttgggcaaaatagcaccataggctttccc

SEQ ID NO: 852386 - DNA, 33 bp, Homo sapien
cactttgggcaaaatatcaccataggctttccc

SEQ ID NO: 852387 - DNA, 33 bp, Homo sapien
agaatcaaatgagctacggtaaggaagagctct

SEQ ID NO: 852388 - DNA, 33 bp, Homo sapien
agaatcaaatgagctatggtaaggaagagctct

SEQ ID NO: 852389 - DNA, 33 bp, Homo sapien
atgaacattaaagtcactaaaagcacgtttgtg

SEQ ID NO: 852390 - DNA, 33 bp, Homo sapien
atgaacattaaagtcattaaaagcacgtttgtg

SEQ ID NO: 852391 - DNA, 33 bp, Homo sapien
aatttttgtattttcaatagagtcggatttcac

SEQ ID NO: 852392 - DNA, 33 bp, Homo sapien
aatttttgtattttcagtagagtcggatttcac

SEQ ID NO: 852393 - DNA, 33 bp, Homo sapien
cttagaagtacacagaatattattttcgctgta

SEQ ID NO: 852394 - DNA, 33 bp, Homo sapien
cttagaagtacacagagtattattttcgctgta

SEQ ID NO: 852395 - DNA, 33 bp, Homo sapien
ttctaagaggaaggaaatagaagctgccaatct

SEQ ID NO: 852396 - DNA, 33 bp, Homo sapien
ttctaagaggaaggaagtagaagctgccaatct

SEQ ID NO: 852397 - DNA, 33 bp, Homo sapien
gcatggtttgccctgacgactgagccctgtggg

SEQ ID NO: 852398 - DNA, 33 bp, Homo sapien
gcatggtttgccctgatgactgagccctgtggg

SEQ ID NO: 852399 - DNA, 33 bp, Homo sapien
tagaaaattatcacgaaaataatcagatatttt

SEQ ID NO: 852400 - DNA, 33 bp, Homo sapien
tagaaaattatcacgacaataatcagatatttt

SEQ ID NO: 852401 - DNA, 33 bp, Homo sapien
gcaaacatgtctttgcagaatttacccagtaaa

SEQ ID NO: 852402 - DNA, 33 bp, Homo sapien
gcaaacatgtctttgcggaatttacccagtaaa

SEQ ID NO: 852403 - DNA, 33 bp, Homo sapien
cccacagctctgtgaaatggcaggtcatccatt

SEQ ID NO: 852404 - DNA, 33 bp, Homo sapien
cccacagctctgtgaagtggcaggtcatccatt

SEQ ID NO: 852405 - DNA, 33 bp, Homo sapien
aatttattttttagcaacttacagggtctgtga

SEQ ID NO: 852406 - DNA, 33 bp, Homo sapien
aatttattttttagcatcttacagggtctgtga

SEQ ID NO: 852407 - DNA, 33 bp, Homo sapien
aacctgcattgtgctacaaatatacaaagaagc

SEQ ID NO: 852408 - DNA, 33 bp, Homo sapien
aacctgcattgtgctataaatatacaaagaagc

SEQ ID NO: 852409 - DNA, 33 bp, Homo sapien
cttggttgtacttcaaatgaattctggggccag

SEQ ID NO: 852410 - DNA, 33 bp, Homo sapien
cttggttgtacttcaagtgaattctggggccag

SEQ ID NO: 852411 - DNA, 33 bp, Homo sapien
tgacaaaaccagagccaacatcatactgaaagg

SEQ ID NO: 852412 - DNA, 33 bp, Homo sapien
tgacaaaaccagagccgacatcatactgaaagg

SEQ ID NO: 852413 - DNA, 33 bp, Homo sapien
aaagactgctgccagaatctatgaaactcaaag

SEQ ID NO: 852414 - DNA, 33 bp, Homo sapien
aaagactgctgccagactctatgaaactcaaag

SEQ ID NO: 852415 - DNA, 33 bp, Homo sapien
tcatttgctattcttaaacttagaaacttctgg

SEQ ID NO: 852416 - DNA, 33 bp, Homo sapien
tcatttgctattcttacacttagaaacttctgg

SEQ ID NO: 852417 - DNA, 33 bp, Homo sapien
taaattgtaaagctttcaaagcacttatttgga

SEQ ID NO: 852418 - DNA, 33 bp, Homo sapien
taaattgtaaagctttgaaagcacttatttgga

SEQ ID NO: 852419 - DNA, 33 bp, Homo sapien
taagagactagcggaaagataaacagaggtaag

SEQ ID NO: 852420 - DNA, 33 bp, Homo sapien
taagagactagcggaaggataaacagaggtaag

SEQ ID NO: 852421 - DNA, 33 bp, Homo sapien
tcttggttgccaaagacggaaatcataacctgg

SEQ ID NO: 852422 - DNA, 33 bp, Homo sapien
tcttggttgccaaagatggaaatcataacctgg

SEQ ID NO: 852423 - DNA, 33 bp, Homo sapien
gaatgtaatatgactcacaacaatctagtctgg

SEQ ID NO: 852424 - DNA, 33 bp, Homo sapien
gaatgtaatatgactcgcaacaatctagtctgg

SEQ ID NO: 852425 - DNA, 33 bp, Homo sapien
tctgattggttttgccccatctcaatgtacttt

SEQ ID NO: 852426 - DNA, 33 bp, Homo sapien
tctgattggttttgcctcatctcaatgtacttt

SEQ ID NO: 852427 - DNA, 33 bp, Homo sapien
tttgttcattaggtaactgtctagcatggagac

SEQ ID NO: 852428 - DNA, 33 bp, Homo sapien
tttgttcattaggtaattgtctagcatggagac

SEQ ID NO: 852429 - DNA, 33 bp, Homo sapien
tgatacacattcaatcaaaactgtagtcaaaat

SEQ ID NO: 852430 - DNA, 33 bp, Homo sapien
tgatacacattcaatcgaaactgtagtcaaaat

SEQ ID NO: 852431 - DNA, 33 bp, Homo sapien
tgttatttacctgaatcagagccaacggttttt

SEQ ID NO: 852432 - DNA, 33 bp, Homo sapien
tgttatttacctgaattagagccaacggttttt

SEQ ID NO: 852433 - DNA, 33 bp, Homo sapien
atgggagaactgccaactggtgtaacagtcaga

SEQ ID NO: 852434 - DNA, 33 bp, Homo sapien
atgggagaactgccaattggtgtaacagtcaga

SEQ ID NO: 852435 - DNA, 33 bp, Homo sapien
tagtttctgatgataaagcaatgaacaagacag

SEQ ID NO: 852436 - DNA, 33 bp, Homo sapien
tagtttctgatgataaggcaatgaacaagacag

SEQ ID NO: 852437 - DNA, 33 bp, Homo sapien
aatttatgaagagaggccatttatgtactttgt

SEQ ID NO: 852438 - DNA, 33 bp, Homo sapien
aatttatgaagagaggtcatttatgtactttgt

SEQ ID NO: 852439 - DNA, 33 bp, Homo sapien
tttcttatatctttccacttttttccagattca

SEQ ID NO: 852440 - DNA, 33 bp, Homo sapien
tttcttatatctttccgcttttttccagattca

SEQ ID NO: 852441 - DNA, 33 bp, Homo sapien
gtatgatgaaatctcagagtgtcccactccaaa

SEQ ID NO: 852442 - DNA, 33 bp, Homo sapien
gtatgatgaaatctcatagtgtcccactccaaa

SEQ ID NO: 852443 - DNA, 33 bp, Homo sapien
ccaaatcattatccaaataaggtccatttattg

SEQ ID NO: 852444 - DNA, 33 bp, Homo sapien
ccaaatcattatccaagtaaggtccatttattg

SEQ ID NO: 852445 - DNA, 33 bp, Homo sapien
aaagaaaagaaagaacagacgaatgaacttgca

SEQ ID NO: 852446 - DNA, 33 bp, Homo sapien
aaagaaaagaaagaacggacgaatgaacttgca

SEQ ID NO: 852447 - DNA, 33 bp, Homo sapien
aaatgccaattcagtaacatactcctcaacatc

SEQ ID NO: 852448 - DNA, 33 bp, Homo sapien
aaatgccaattcagtaccatactcctcaacatc

SEQ ID NO: 852449 - DNA, 33 bp, Homo sapien
catctattagtttagccgcaagatcatgacaat

SEQ ID NO: 852450 - DNA, 33 bp, Homo sapien
catctattagtttagctgcaagatcatgacaat

SEQ ID NO: 852451 - DNA, 33 bp, Homo sapien
ggattgtgaagattcaataaaacttgttagaaa

SEQ ID NO: 852452 - DNA, 33 bp, Homo sapien
ggattgtgaagattcagtaaaacttgttagaaa

SEQ ID NO: 852453 - DNA, 33 bp, Homo sapien
taccttcttaatataaagccatacaagtacagt

SEQ ID NO: 852454 - DNA, 33 bp, Homo sapien
taccttcttaatataaggccatacaagtacagt

SEQ ID NO: 852455 - DNA, 33 bp, Homo sapien
aatgtcctgtgtgaaaagatactgaactgctca

SEQ ID NO: 852456 - DNA, 33 bp, Homo sapien
aatgtcctgtgtgaaaggatactgaactgctca

SEQ ID NO: 852457 - DNA, 33 bp, Homo sapien
agctcttggaagtaccaaaacaccttgcttttc

SEQ ID NO: 852458 - DNA, 33 bp, Homo sapien
agctcttggaagtaccgaaacaccttgcttttc

SEQ ID NO: 852459 - DNA, 33 bp, Homo sapien
tgatctaggagagatgcatgaagacttagaact

SEQ ID NO: 852460 - DNA, 33 bp, Homo sapien
tgatctaggagagatgtatgaagacttagaact

SEQ ID NO: 852461 - DNA, 33 bp, Homo sapien
tcttcacgattttgccgaagagttgagcctgca

SEQ ID NO: 852462 - DNA, 33 bp, Homo sapien
tcttcacgattttgcctaagagttgagcctgca

SEQ ID NO: 852463 - DNA, 33 bp, Homo sapien
tttgagctttgccaaaataatccttatgcttgt

SEQ ID NO: 852464 - DNA, 33 bp, Homo sapien
tttgagctttgccaaattaatccttatgcttgt

SEQ ID NO: 852465 - DNA, 33 bp, Homo sapien
aaagctcaaaatgatacctggcagtcaaaatgg

SEQ ID NO: 852466 - DNA, 33 bp, Homo sapien
aaagctcaaaatgatatctggcagtcaaaatgg

SEQ ID NO: 852467 - DNA, 33 bp, Homo sapien
ctgactctaattctaaccttaacccttgccaag

SEQ ID NO: 852468 - DNA, 33 bp, Homo sapien
ctgactctaattctaatcttaacccttgccaag

SEQ ID NO: 852469 - DNA, 33 bp, Homo sapien
agatcttagttctgaccaccttgttttacagtt

SEQ ID NO: 852470 - DNA, 33 bp, Homo sapien
agatcttagttctgactaccttgttttacagtt

SEQ ID NO: 852471 - DNA, 33 bp, Homo sapien
ctgcgatacattgtcaatacaaatattgcataa

SEQ ID NO: 852472 - DNA, 33 bp, Homo sapien
ctgcgatacattgtcattacaaatattgcataa

SEQ ID NO: 852473 - DNA, 33 bp, Homo sapien
agtaaaatgtaaattaaggaatgggtcaaaagg

SEQ ID NO: 852474 - DNA, 33 bp, Homo sapien
agtaaaatgtaaattagggaatgggtcaaaagg

SEQ ID NO: 852475 - DNA, 33 bp, Homo sapien
tttatcatatgaatcaaatggttatgaagttct

SEQ ID NO: 852476 - DNA, 33 bp, Homo sapien
tttatcatatgaatcagatggttatgaagttct

SEQ ID NO: 852477 - DNA, 33 bp, Homo sapien
acagacataaaaggcaacctgtaaagactagtc

SEQ ID NO: 852478 - DNA, 33 bp, Homo sapien
acagacataaaaggcatcctgtaaagactagtc

SEQ ID NO: 852479 - DNA, 33 bp, Homo sapien
tttccttatagtcacacggtagctgccactgct

SEQ ID NO: 852480 - DNA, 33 bp, Homo sapien
tttccttatagtcacatggtagctgccactgct

SEQ ID NO: 852481 - DNA, 33 bp, Homo sapien
aaaaatgcaataccaacatgtcctgatactcag

SEQ ID NO: 852482 - DNA, 33 bp, Homo sapien
aaaaatgcaataccaatatgtcctgatactcag

SEQ ID NO: 852483 - DNA, 33 bp, Homo sapien
gattataggaacattcaaattttaaacttggaa

SEQ ID NO: 852484 - DNA, 33 bp, Homo sapien
gattataggaacattcgaattttaaacttggaa

SEQ ID NO: 852485 - DNA, 33 bp, Homo sapien
ctattggagactgagagcgcctggcgggtagta

SEQ ID NO: 852486 - DNA, 33 bp, Homo sapien
ctattggagactgagatcgcctggcgggtagta

SEQ ID NO: 852487 - DNA, 33 bp, Homo sapien
tgttaagtgttgcacacaaaaaatggcaaatac

SEQ ID NO: 852488 - DNA, 33 bp, Homo sapien
tgttaagtgttgcacagaaaaaatggcaaatac

SEQ ID NO: 852489 - DNA, 33 bp, Homo sapien
aagtgacactgtagcaactattacacacttggc

SEQ ID NO: 852490 - DNA, 33 bp, Homo sapien
aagtgacactgtagcagctattacacacttggc

SEQ ID NO: 852491 - DNA, 33 bp, Homo sapien
atgttagtttcatctcaaggcattcaaagtgcc

SEQ ID NO: 852492 - DNA, 33 bp, Homo sapien
atgttagtttcatctcgaggcattcaaagtgcc

SEQ ID NO: 852493 - DNA, 33 bp, Homo sapien
gtcattggaaaggcacaaatgcagtaaaggaag

SEQ ID NO: 852494 - DNA, 33 bp, Homo sapien
gtcattggaaaggcacgaatgcagtaaaggaag

SEQ ID NO: 852495 - DNA, 33 bp, Homo sapien
ctaagcacctcactaaaccatctttataaaaat

SEQ ID NO: 852496 - DNA, 33 bp, Homo sapien
ctaagcacctcactaagccatctttataaaaat

SEQ ID NO: 852497 - DNA, 33 bp, Homo sapien
gcatagcctgtggtaggataaatcagtataaac

SEQ ID NO: 852498 - DNA, 33 bp, Homo sapien
gcatagcctgtggtagtataaatcagtataaac

SEQ ID NO: 852499 - DNA, 33 bp, Homo sapien
cgtgtttatcactgtcaacccttttccagaaaa

SEQ ID NO: 852500 - DNA, 33 bp, Homo sapien
cgtgtttatcactgtctacccttttccagaaaa

SEQ ID NO: 852501 - DNA, 33 bp, Homo sapien
acattatgctggctaaatacatgaacacatagt

SEQ ID NO: 852502 - DNA, 33 bp, Homo sapien
acattatgctggctaagtacatgaacacatagt

SEQ ID NO: 852503 - DNA, 33 bp, Homo sapien
aatcaacctagattcccatcaactggataaaga

SEQ ID NO: 852504 - DNA, 33 bp, Homo sapien
aatcaacctagattcctatcaactggataaaga

SEQ ID NO: 852505 - DNA, 33 bp, Homo sapien
aggtaagtgagggacccgaaaagaaaagagtta

SEQ ID NO: 852506 - DNA, 33 bp, Homo sapien
aggtaagtgagggacctgaaaagaaaagagtta

SEQ ID NO: 852507 - DNA, 33 bp, Homo sapien
aattaaaaagacagcaataatgttcctatgtat

SEQ ID NO: 852508 - DNA, 33 bp, Homo sapien
aattaaaaagacagcagtaatgttcctatgtat

SEQ ID NO: 852509 - DNA, 33 bp, Homo sapien
gaatttttatcacctgaatagtcctaaaatatc

SEQ ID NO: 852510 - DNA, 33 bp, Homo sapien
gaatttttatcacctgcatagtcctaaaatatc

SEQ ID NO: 852511 - DNA, 33 bp, Homo sapien
tctttcctagttatgtaaaattggacaagcttc

SEQ ID NO: 852512 - DNA, 33 bp, Homo sapien
tctttcctagttatgtgaaattggacaagcttc

SEQ ID NO: 852513 - DNA, 33 bp, Homo sapien
tgataataagtgctacaaagtaaaacaaagcag

SEQ ID NO: 852514 - DNA, 33 bp, Homo sapien
tgataataagtgctacgaagtaaaacaaagcag

SEQ ID NO: 852515 - DNA, 33 bp, Homo sapien
ggaacaggaggtgtcacggtttccatatttcta

SEQ ID NO: 852516 - DNA, 33 bp, Homo sapien
ggaacaggaggtgtcatggtttccatatttcta

SEQ ID NO: 852517 - DNA, 33 bp, Homo sapien
ctctagcactagcatagagccttgaaaactaga

SEQ ID NO: 852518 - DNA, 33 bp, Homo sapien
ctctagcactagcatatagccttgaaaactaga

SEQ ID NO: 852519 - DNA, 33 bp, Homo sapien
aacagtccgaaaataaattatctctttttctag

SEQ ID NO: 852520 - DNA, 33 bp, Homo sapien
aacagtccgaaaataagttatctctttttctag

SEQ ID NO: 852521 - DNA, 33 bp, Homo sapien
ccacagaaaaagttaactgccacttgttcacac

SEQ ID NO: 852522 - DNA, 33 bp, Homo sapien
ccacagaaaaagttaattgccacttgttcacac

SEQ ID NO: 852523 - DNA, 33 bp, Homo sapien
gtgtggcagaacatcacctatgagtaattgtac

SEQ ID NO: 852524 - DNA, 33 bp, Homo sapien
gtgtggcagaacatcatctatgagtaattgtac

SEQ ID NO: 852525 - DNA, 33 bp, Homo sapien
aacaacagaccatccagcagtctccaaagagtg

SEQ ID NO: 852526 - DNA, 33 bp, Homo sapien
aacaacagaccatccatcagtctccaaagagtg

SEQ ID NO: 852527 - DNA, 33 bp, Homo sapien
ccatgaaatgttaagcccatccaagtccatgca

SEQ ID NO: 852528 - DNA, 33 bp, Homo sapien
ccatgaaatgttaagctcatccaagtccatgca

SEQ ID NO: 852529 - DNA, 33 bp, Homo sapien
atttcagtgtgttaaagaggacattgggaatca

SEQ ID NO: 852530 - DNA, 33 bp, Homo sapien
atttcagtgtgttaaataggacattgggaatca

SEQ ID NO: 852531 - DNA, 33 bp, Homo sapien
cttccttccatgcataaaacacactgacatcct

SEQ ID NO: 852532 - DNA, 33 bp, Homo sapien
cttccttccatgcatagaacacactgacatcct

SEQ ID NO: 852533 - DNA, 33 bp, Homo sapien
gcccattcctagataactctgaatgacctgaca

SEQ ID NO: 852534 - DNA, 33 bp, Homo sapien
gcccattcctagataattctgaatgacctgaca

SEQ ID NO: 852535 - DNA, 33 bp, Homo sapien
tttttgagattgtgcaaagacagattttctttt

SEQ ID NO: 852536 - DNA, 33 bp, Homo sapien
tttttgagattgtgcatagacagattttctttt

SEQ ID NO: 852537 - DNA, 33 bp, Homo sapien
gtctgtatttagagacaggccctttaaagagtt

SEQ ID NO: 852538 - DNA, 33 bp, Homo sapien
gtctgtatttagagaccggccctttaaagagtt

SEQ ID NO: 852539 - DNA, 33 bp, Homo sapien
gggttgaatgctgtgacatacttaacagcttag

SEQ ID NO: 852540 - DNA, 33 bp, Homo sapien
gggttgaatgctgtgatatacttaacagcttag

SEQ ID NO: 852541 - DNA, 33 bp, Homo sapien
tatcttcagagttacaactgaatgtcctttgtg

SEQ ID NO: 852542 - DNA, 33 bp, Homo sapien
tatcttcagagttacacctgaatgtcctttgtg

SEQ ID NO: 852543 - DNA, 33 bp, Homo sapien
tgctgtagtgaggaaaggagaagcggtgtgtgt

SEQ ID NO: 852544 - DNA, 33 bp, Homo sapien
tgctgtagtgaggaaatgagaagcggtgtgtgt

SEQ ID NO: 852545 - DNA, 33 bp, Homo sapien
aagttgtccaaggatgaaactagggctcatatt

SEQ ID NO: 852546 - DNA, 33 bp, Homo sapien
aagttgtccaaggatggaactagggctcatatt

SEQ ID NO: 852547 - DNA, 33 bp, Homo sapien
ggcaaaagcatcaggccacctatagaggaaaac

SEQ ID NO: 852548 - DNA, 33 bp, Homo sapien
ggcaaaagcatcaggcgacctatagaggaaaac

SEQ ID NO: 852549 - DNA, 33 bp, Homo sapien
aatcgttaacacatagacacttgctttaaggag

SEQ ID NO: 852550 - DNA, 33 bp, Homo sapien
aatcgttaacacataggcacttgctttaaggag

SEQ ID NO: 852551 - DNA, 33 bp, Homo sapien
cagagatgtgctttgcaaatggtgctattttat

SEQ ID NO: 852552 - DNA, 33 bp, Homo sapien
cagagatgtgctttgcgaatggtgctattttat

SEQ ID NO: 852553 - DNA, 33 bp, Homo sapien
aaatgctcaaattacaaaagctcaatccaagga

SEQ ID NO: 852554 - DNA, 33 bp, Homo sapien
aaatgctcaaattacagaagctcaatccaagga

SEQ ID NO: 852555 - DNA, 33 bp, Homo sapien
aaaccttggtttcattaaagagtgttcatcctc

SEQ ID NO: 852556 - DNA, 33 bp, Homo sapien
aaaccttggtttcattgaagagtgttcatcctc

SEQ ID NO: 852557 - DNA, 33 bp, Homo sapien
ctggcagatgattttccaaagtgtcttttccat

SEQ ID NO: 852558 - DNA, 33 bp, Homo sapien
ctggcagatgattttctaaagtgtcttttccat

SEQ ID NO: 852559 - DNA, 33 bp, Homo sapien
gtgtttgacaagtttccccactgtaaatatagt

SEQ ID NO: 852560 - DNA, 33 bp, Homo sapien
gtgtttgacaagtttctccactgtaaatatagt

SEQ ID NO: 852561 - DNA, 33 bp, Homo sapien
aaacctaagtgcagtgaaataacccaaatgata

SEQ ID NO: 852562 - DNA, 33 bp, Homo sapien
aaacctaagtgcagtggaataacccaaatgata

SEQ ID NO: 852563 - DNA, 33 bp, Homo sapien
atctgtaccaggacacacaataatttaaaccac

SEQ ID NO: 852564 - DNA, 33 bp, Homo sapien
atctgtaccaggacacgcaataatttaaaccac

SEQ ID NO: 852565 - DNA, 33 bp, Homo sapien
ctacactattccacacggccttagtgcaggagg

SEQ ID NO: 852566 - DNA, 33 bp, Homo sapien
ctacactattccacactgccttagtgcaggagg

SEQ ID NO: 852567 - DNA, 33 bp, Homo sapien
ttatttaacttgggtaggatgtttgtgacaatt

SEQ ID NO: 852568 - DNA, 33 bp, Homo sapien
ttatttaacttgggtatgatgtttgtgacaatt

SEQ ID NO: 852569 - DNA, 33 bp, Homo sapien
gtgggaccattcatgaaaggaaataatgacatt

SEQ ID NO: 852570 - DNA, 33 bp, Homo sapien
gtgggaccattcatgagaggaaataatgacatt

SEQ ID NO: 852571 - DNA, 33 bp, Homo sapien
gagatctaatgctggacaagaggtactgtgccc

SEQ ID NO: 852572 - DNA, 33 bp, Homo sapien
gagatctaatgctggataagaggtactgtgccc

SEQ ID NO: 852573 - DNA, 33 bp, Homo sapien
aggataaaattagtagcacgcaagaagatttga

SEQ ID NO: 852574 - DNA, 33 bp, Homo sapien
aggataaaattagtagtacgcaagaagatttga

SEQ ID NO: 852575 - DNA, 33 bp, Homo sapien
aatctcaggaactgaccagacctacaaataaaa

SEQ ID NO: 852576 - DNA, 33 bp, Homo sapien
aatctcaggaactgactagacctacaaataaaa

SEQ ID NO: 852577 - DNA, 33 bp, Homo sapien
agttcgatcttcaaaaagagttaaagccacatc

SEQ ID NO: 852578 - DNA, 33 bp, Homo sapien
agttcgatcttcaaaatgagttaaagccacatc

SEQ ID NO: 852579 - DNA, 33 bp, Homo sapien
tgagcaatgatagttcaacttggtttccctcaa

SEQ ID NO: 852580 - DNA, 33 bp, Homo sapien
tgagcaatgatagttctacttggtttccctcaa

SEQ ID NO: 852581 - DNA, 33 bp, Homo sapien
tgaaaaggttctattacaagtaagactcagaaa

SEQ ID NO: 852582 - DNA, 33 bp, Homo sapien
tgaaaaggttctattataagtaagactcagaaa

SEQ ID NO: 852583 - DNA, 33 bp, Homo sapien
ttggaagcaggaatggaaataaagatgaagaga

SEQ ID NO: 852584 - DNA, 33 bp, Homo sapien
ttggaagcaggaatgggaataaagatgaagaga

SEQ ID NO: 852585 - DNA, 33 bp, Homo sapien
acaaatgcagtgtcaacagaatctgctggtgga

SEQ ID NO: 852586 - DNA, 33 bp, Homo sapien
acaaatgcagtgtcaagagaatctgctggtgga

SEQ ID NO: 852587 - DNA, 33 bp, Homo sapien
acggcttgccctcaccagctaaatgcaacactt

SEQ ID NO: 852588 - DNA, 33 bp, Homo sapien
acggcttgccctcacccgctaaatgcaacactt

SEQ ID NO: 852589 - DNA, 33 bp, Homo sapien
agccgacacagagaggaaagtgttgcatttagc

SEQ ID NO: 852590 - DNA, 33 bp, Homo sapien
agccgacacagagagggaagtgttgcatttagc

SEQ ID NO: 852591 - DNA, 33 bp, Homo sapien
aaggggaatagaatacacctatcaaagaaagca

SEQ ID NO: 852592 - DNA, 33 bp, Homo sapien
aaggggaatagaatactcctatcaaagaaagca

SEQ ID NO: 852593 - DNA, 33 bp, Homo sapien
tgtaccagggctcaacccagacaataggaattc

SEQ ID NO: 852594 - DNA, 33 bp, Homo sapien
tgtaccagggctcaactcagacaataggaattc

SEQ ID NO: 852595 - DNA, 33 bp, Homo sapien
ctgaatgtctcccctgaatctcactgcagattt

SEQ ID NO: 852596 - DNA, 33 bp, Homo sapien
ctgaatgtctcccctgtatctcactgcagattt

SEQ ID NO: 852597 - DNA, 33 bp, Homo sapien
tttttgagtcttcgataaaagtcttccgttata

SEQ ID NO: 852598 - DNA, 33 bp, Homo sapien
tttttgagtcttcgattaaagtcttccgttata

SEQ ID NO: 852599 - DNA, 33 bp, Homo sapien
atggcagcctgagaacaagctccagccttacct

SEQ ID NO: 852600 - DNA, 33 bp, Homo sapien
atggcagcctgagaacgagctccagccttacct

SEQ ID NO: 852601 - DNA, 33 bp, Homo sapien
ggagaacttggactgcaatcacctgggtcacag

SEQ ID NO: 852602 - DNA, 33 bp, Homo sapien
ggagaacttggactgccatcacctgggtcacag

SEQ ID NO: 852603 - DNA, 33 bp, Homo sapien
aactaattatgatggcagagtaaagacattttc

SEQ ID NO: 852604 - DNA, 33 bp, Homo sapien
aactaattatgatggcggagtaaagacattttc

SEQ ID NO: 852605 - DNA, 33 bp, Homo sapien
ccaaccttcattaaccaaaagagccaaatggcc

SEQ ID NO: 852606 - DNA, 33 bp, Homo sapien
ccaaccttcattaaccgaaagagccaaatggcc

SEQ ID NO: 852607 - DNA, 33 bp, Homo sapien
ttttggacattattgactaattcactttcaaaa

SEQ ID NO: 852608 - DNA, 33 bp, Homo sapien
ttttggacattattgagtaattcactttcaaaa

SEQ ID NO: 852609 - DNA, 33 bp, Homo sapien
tgtgaagggttgcagtcaaaactgaggtgcacg

SEQ ID NO: 852610 - DNA, 33 bp, Homo sapien
tgtgaagggttgcagtgaaaactgaggtgcacg

SEQ ID NO: 852611 - DNA, 33 bp, Homo sapien
tccccctgagatctagccatactggcctttact

SEQ ID NO: 852612 - DNA, 33 bp, Homo sapien
tccccctgagatctagtcatactggcctttact

SEQ ID NO: 852613 - DNA, 33 bp, Homo sapien
atcttctttatcttcaagtaagctccaatgact

SEQ ID NO: 852614 - DNA, 33 bp, Homo sapien
atcttctttatcttcatgtaagctccaatgact

SEQ ID NO: 852615 - DNA, 33 bp, Homo sapien
agctccaatgactttcacagagcctcccacatt

SEQ ID NO: 852616 - DNA, 33 bp, Homo sapien
agctccaatgactttcgcagagcctcccacatt

SEQ ID NO: 852617 - DNA, 33 bp, Homo sapien
agagtcttcaaaatcaactaatgacttgtccta

SEQ ID NO: 852618 - DNA, 33 bp, Homo sapien
agagtcttcaaaatcagctaatgacttgtccta

SEQ ID NO: 852619 - DNA, 33 bp, Homo sapien
agttttcagttctttcactgttctggtctttca

SEQ ID NO: 852620 - DNA, 33 bp, Homo sapien
agttttcagttctttctctgttctggtctttca

SEQ ID NO: 852621 - DNA, 33 bp, Homo sapien
cacatacgcatacatccctttcagagccctgga

SEQ ID NO: 852622 - DNA, 33 bp, Homo sapien
cacatacgcatacatctctttcagagccctgga

SEQ ID NO: 852623 - DNA, 33 bp, Homo sapien
tccaaaatttatatgccgaatttccaaccccca

SEQ ID NO: 852624 - DNA, 33 bp, Homo sapien
tccaaaatttatatgctgaatttccaaccccca

SEQ ID NO: 852625 - DNA, 33 bp, Homo sapien
ttaagctgctgtgatcaaagtcaaacattgtag

SEQ ID NO: 852626 - DNA, 33 bp, Homo sapien
ttaagctgctgtgatctaagtcaaacattgtag

SEQ ID NO: 852627 - DNA, 33 bp, Homo sapien
tcttggagaacagataaaattttgaatgggagg

SEQ ID NO: 852628 - DNA, 33 bp, Homo sapien
tcttggagaacagatacaattttgaatgggagg

SEQ ID NO: 852629 - DNA, 33 bp, Homo sapien
tgctatattcctccccgaagaaatctcagccca

SEQ ID NO: 852630 - DNA, 33 bp, Homo sapien
tgctatattcctcccctaagaaatctcagccca

SEQ ID NO: 852631 - DNA, 33 bp, Homo sapien
tccagcaggacgggccgcaaagtctcgttacaa

SEQ ID NO: 852632 - DNA, 33 bp, Homo sapien
tccagcaggacgggcctcaaagtctcgttacaa

SEQ ID NO: 852633 - DNA, 33 bp, Homo sapien
tcattactgatgctgaaacaacttctcctccct

SEQ ID NO: 852634 - DNA, 33 bp, Homo sapien
tcattactgatgctgatacaacttctcctccct

SEQ ID NO: 852635 - DNA, 33 bp, Homo sapien
aagatgatgggtctggaatcaccttaaacccat

SEQ ID NO: 852636 - DNA, 33 bp, Homo sapien
aagatgatgggtctggtatcaccttaaacccat

SEQ ID NO: 852637 - DNA, 33 bp, Homo sapien
agacacctggtacccactatgcttaatgtattt

SEQ ID NO: 852638 - DNA, 33 bp, Homo sapien
agacacctggtacccagtatgcttaatgtattt

SEQ ID NO: 852639 - DNA, 33 bp, Homo sapien
gtgtgacaaagatataacagtctgaagagacac

SEQ ID NO: 852640 - DNA, 33 bp, Homo sapien
gtgtgacaaagatataccagtctgaagagacac

SEQ ID NO: 852641 - DNA, 33 bp, Homo sapien
gcttagtagattgtcaaccaaaattcacccaat

SEQ ID NO: 852642 - DNA, 33 bp, Homo sapien
gcttagtagattgtcagccaaaattcacccaat

SEQ ID NO: 852643 - DNA, 33 bp, Homo sapien
gttgaagccgttgctgaaaagcgataaagaaag

SEQ ID NO: 852644 - DNA, 33 bp, Homo sapien
gttgaagccgttgctggaaagcgataaagaaag

SEQ ID NO: 852645 - DNA, 33 bp, Homo sapien
actgaaacatgataaacaagctccccctgcacc

SEQ ID NO: 852646 - DNA, 33 bp, Homo sapien
actgaaacatgataaataagctccccctgcacc

SEQ ID NO: 852647 - DNA, 33 bp, Homo sapien
tggtatttcaaagggcaagcatacaggagccaa

SEQ ID NO: 852648 - DNA, 33 bp, Homo sapien
tggtatttcaaagggcgagcatacaggagccaa

SEQ ID NO: 852649 - DNA, 33 bp, Homo sapien
caggatattggacacaactgaagagtaaattca

SEQ ID NO: 852650 - DNA, 33 bp, Homo sapien
caggatattggacacatctgaagagtaaattca

SEQ ID NO: 852651 - DNA, 33 bp, Homo sapien
taagactcttggaggcaaacactcagctcatct

SEQ ID NO: 852652 - DNA, 33 bp, Homo sapien
taagactcttggaggcgaacactcagctcatct

SEQ ID NO: 852653 - DNA, 33 bp, Homo sapien
cacttacattttcccccagcaatgttctcatca

SEQ ID NO: 852654 - DNA, 33 bp, Homo sapien
cacttacattttccccgagcaatgttctcatca

SEQ ID NO: 852655 - DNA, 33 bp, Homo sapien
cagaccagagaagaaacttgctgacttttggag

SEQ ID NO: 852656 - DNA, 33 bp, Homo sapien
cagaccagagaagaaatttgctgacttttggag

SEQ ID NO: 852657 - DNA, 33 bp, Homo sapien
gcatatgataaaactcgcgtaggttctaaaata

SEQ ID NO: 852658 - DNA, 33 bp, Homo sapien
gcatatgataaaactctcgtaggttctaaaata

SEQ ID NO: 852659 - DNA, 33 bp, Homo sapien
acagatgtgaattacacatatagttctgatcct

SEQ ID NO: 852660 - DNA, 33 bp, Homo sapien
acagatgtgaattacatatatagttctgatcct

SEQ ID NO: 852661 - DNA, 33 bp, Homo sapien
gtctgacaaaacatccaatatttgtgagggatg

SEQ ID NO: 852662 - DNA, 33 bp, Homo sapien
gtctgacaaaacatccgatatttgtgagggatg

SEQ ID NO: 852663 - DNA, 33 bp, Homo sapien
gtattgatctaaaaaaaatcaaactgatgatag

SEQ ID NO: 852664 - DNA, 33 bp, Homo sapien
gtattgatctaaaaaatatcaaactgatgatag

SEQ ID NO: 852665 - DNA, 33 bp, Homo sapien
ctacctttgaaaatgaacttaatggcccctttc

SEQ ID NO: 852666 - DNA, 33 bp, Homo sapien
ctacctttgaaaatgaccttaatggcccctttc

SEQ ID NO: 852667 - DNA, 33 bp, Homo sapien
tgaaccttgttctgaactgcatatgagagggat

SEQ ID NO: 852668 - DNA, 33 bp, Homo sapien
tgaaccttgttctgaattgcatatgagagggat

SEQ ID NO: 852669 - DNA, 33 bp, Homo sapien
acatttgactcaactcaattttattagggaggc

SEQ ID NO: 852670 - DNA, 33 bp, Homo sapien
acatttgactcaactcgattttattagggaggc

SEQ ID NO: 852671 - DNA, 33 bp, Homo sapien
ggaactgaatgttaaccgctgtaaatcctagga

SEQ ID NO: 852672 - DNA, 33 bp, Homo sapien
ggaactgaatgttaactgctgtaaatcctagga

SEQ ID NO: 852673 - DNA, 33 bp, Homo sapien
attgggaaattagatgcatttgatctaggcctc

SEQ ID NO: 852674 - DNA, 33 bp, Homo sapien
attgggaaattagatggatttgatctaggcctc

SEQ ID NO: 852675 - DNA, 33 bp, Homo sapien
catctgtcaattgcatcaggaaattttgtcctt

SEQ ID NO: 852676 - DNA, 33 bp, Homo sapien
catctgtcaattgcattaggaaattttgtcctt

SEQ ID NO: 852677 - DNA, 33 bp, Homo sapien
tctgctagaagacataacaaggctcagcctaac

SEQ ID NO: 852678 - DNA, 33 bp, Homo sapien
tctgctagaagacatagcaaggctcagcctaac

SEQ ID NO: 852679 - DNA, 33 bp, Homo sapien
catatttaaaggaaaccatgcccagtcttacat

SEQ ID NO: 852680 - DNA, 33 bp, Homo sapien
catatttaaaggaaactatgcccagtcttacat

SEQ ID NO: 852681 - DNA, 33 bp, Homo sapien
gttcttttatacagaactgttcactgaactttt

SEQ ID NO: 852682 - DNA, 33 bp, Homo sapien
gttcttttatacagaattgttcactgaactttt

SEQ ID NO: 852683 - DNA, 33 bp, Homo sapien
gaagcggaatataaaaaacctatcaagagcttc

SEQ ID NO: 852684 - DNA, 33 bp, Homo sapien
gaagcggaatataaaagacctatcaagagcttc

SEQ ID NO: 852685 - DNA, 33 bp, Homo sapien
atgaggagccacagtaacaataaacctacctgc

SEQ ID NO: 852686 - DNA, 33 bp, Homo sapien
atgaggagccacagtatcaataaacctacctgc

SEQ ID NO: 852687 - DNA, 33 bp, Homo sapien
aacaaacaccttaatcaattattctgcattata

SEQ ID NO: 852688 - DNA, 33 bp, Homo sapien
aacaaacaccttaatcgattattctgcattata

SEQ ID NO: 852689 - DNA, 33 bp, Homo sapien
ttctgagtatagctatgagttggaattctctca

SEQ ID NO: 852690 - DNA, 33 bp, Homo sapien
ttctgagtatagctattagttggaattctctca

SEQ ID NO: 852691 - DNA, 33 bp, Homo sapien
tgtacccacgatagacaatgtggtatgggtttt

SEQ ID NO: 852692 - DNA, 33 bp, Homo sapien
tgtacccacgatagacgatgtggtatgggtttt

SEQ ID NO: 852693 - DNA, 33 bp, Homo sapien
ttctgcagccagcttgcattttttcccagaata

SEQ ID NO: 852694 - DNA, 33 bp, Homo sapien
ttctgcagccagcttgtattttttcccagaata

SEQ ID NO: 852695 - DNA, 33 bp, Homo sapien
tttagaataccctatccactgtccccctgacag

SEQ ID NO: 852696 - DNA, 33 bp, Homo sapien
tttagaataccctatctactgtccccctgacag

SEQ ID NO: 852697 - DNA, 33 bp, Homo sapien
taccaatcactgagaacggtacctggaaaacag

SEQ ID NO: 852698 - DNA, 33 bp, Homo sapien
taccaatcactgagaatggtacctggaaaacag

SEQ ID NO: 852699 - DNA, 33 bp, Homo sapien
aaaactgagaaatcacagcctagaaaagaagcc

SEQ ID NO: 852700 - DNA, 33 bp, Homo sapien
aaaactgagaaatcacggcctagaaaagaagcc

SEQ ID NO: 852701 - DNA, 33 bp, Homo sapien
acctgaaaggaattcacacggcgaagggatgaa

SEQ ID NO: 852702 - DNA, 33 bp, Homo sapien
acctgaaaggaattcatacggcgaagggatgaa

SEQ ID NO: 852703 - DNA, 33 bp, Homo sapien
gggtggcagagactaacggctaacacactgaat

SEQ ID NO: 852704 - DNA, 33 bp, Homo sapien
gggtggcagagactaatggctaacacactgaat

SEQ ID NO: 852705 - DNA, 33 bp, Homo sapien
cagagagaagtttatagaagtggcaaaaaatac

SEQ ID NO: 852706 - DNA, 33 bp, Homo sapien
cagagagaagtttatataagtggcaaaaaatac

SEQ ID NO: 852707 - DNA, 33 bp, Homo sapien
aaaaaaatttaagagacggatcactatattatc

SEQ ID NO: 852708 - DNA, 33 bp, Homo sapien
aaaaaaatttaagagatggatcactatattatc

SEQ ID NO: 852709 - DNA, 33 bp, Homo sapien
ctagacctggtataacaaataggttctcttcat

SEQ ID NO: 852710 - DNA, 33 bp, Homo sapien
ctagacctggtataactaataggttctcttcat

SEQ ID NO: 852711 - DNA, 33 bp, Homo sapien
ttctctatgccaaataacttgggaaattgattc

SEQ ID NO: 852712 - DNA, 33 bp, Homo sapien
ttctctatgccaaatatcttgggaaattgattc

SEQ ID NO: 852713 - DNA, 33 bp, Homo sapien
cttacaattactttacaacgtttctagaatact

SEQ ID NO: 852714 - DNA, 33 bp, Homo sapien
cttacaattactttacgacgtttctagaatact

SEQ ID NO: 852715 - DNA, 33 bp, Homo sapien
tcctggggcaagttgacgctaatggagacactg

SEQ ID NO: 852716 - DNA, 33 bp, Homo sapien
tcctggggcaagttgatgctaatggagacactg

SEQ ID NO: 852717 - DNA, 33 bp, Homo sapien
agaatcaaaatgggtcaaaatgacctcctaaaa

SEQ ID NO: 852718 - DNA, 33 bp, Homo sapien
agaatcaaaatgggtcgaaatgacctcctaaaa

SEQ ID NO: 852719 - DNA, 33 bp, Homo sapien
tgcatttatctcagcaccccaacgctaattatt

SEQ ID NO: 852720 - DNA, 33 bp, Homo sapien
tgcatttatctcagcatcccaacgctaattatt

SEQ ID NO: 852721 - DNA, 33 bp, Homo sapien
ccttccccagaagaaacgtgtctgaaatatgga

SEQ ID NO: 852722 - DNA, 33 bp, Homo sapien
ccttccccagaagaaatgtgtctgaaatatgga

SEQ ID NO: 852723 - DNA, 33 bp, Homo sapien
tgatgtgtattttttgaagatgggattgaattg

SEQ ID NO: 852724 - DNA, 33 bp, Homo sapien
tgatgtgtattttttggagatgggattgaattg

SEQ ID NO: 852725 - DNA, 33 bp, Homo sapien
tagtgtgtgttatttccatcatttttctccttt

SEQ ID NO: 852726 - DNA, 33 bp, Homo sapien
tagtgtgtgttatttcgatcatttttctccttt

SEQ ID NO: 852727 - DNA, 33 bp, Homo sapien
ggacaaacacctgaacgaggttgatgcaatgat

SEQ ID NO: 852728 - DNA, 33 bp, Homo sapien
ggacaaacacctgaactaggttgatgcaatgat

SEQ ID NO: 852729 - DNA, 33 bp, Homo sapien
cattggtagacatacaaataagaggaaagatat

SEQ ID NO: 852730 - DNA, 33 bp, Homo sapien
cattggtagacatacacataagaggaaagatat

SEQ ID NO: 852731 - DNA, 33 bp, Homo sapien
tgaaaaataaattgcaaaaggacactatggtat

SEQ ID NO: 852732 - DNA, 33 bp, Homo sapien
tgaaaaataaattgcagaaggacactatggtat

SEQ ID NO: 852733 - DNA, 33 bp, Homo sapien
attagggcactagaaaatgaacaaaagtgaagc

SEQ ID NO: 852734 - DNA, 33 bp, Homo sapien
attagggcactagaaagtgaacaaaagtgaagc

SEQ ID NO: 852735 - DNA, 33 bp, Homo sapien
ccctcaagaactcatccaaatctaactacctcc

SEQ ID NO: 852736 - DNA, 33 bp, Homo sapien
ccctcaagaactcatctaaatctaactacctcc

SEQ ID NO: 852737 - DNA, 33 bp, Homo sapien
tgcatttacaaccatcaatattactgtatctat

SEQ ID NO: 852738 - DNA, 33 bp, Homo sapien
tgcatttacaaccatctatattactgtatctat

SEQ ID NO: 852739 - DNA, 33 bp, Homo sapien
aataccacattttacacagttgctatttcatgt

SEQ ID NO: 852740 - DNA, 33 bp, Homo sapien
aataccacattttacagagttgctatttcatgt

SEQ ID NO: 852741 - DNA, 33 bp, Homo sapien
aaatgactgagaactgaaatttgtatgtatata

SEQ ID NO: 852742 - DNA, 33 bp, Homo sapien
aaatgactgagaactgcaatttgtatgtatata

SEQ ID NO: 852743 - DNA, 33 bp, Homo sapien
attggtgggaaatggacaatgaactcaaaatga

SEQ ID NO: 852744 - DNA, 33 bp, Homo sapien
attggtgggaaatggagaatgaactcaaaatga

SEQ ID NO: 852745 - DNA, 33 bp, Homo sapien
tctttcctaatttgtaagttaagctatttgata

SEQ ID NO: 852746 - DNA, 33 bp, Homo sapien
tctttcctaatttgtatgttaagctatttgata

SEQ ID NO: 852747 - DNA, 33 bp, Homo sapien
gtaagaaaatatcaagaaaatcgaataacgtag

SEQ ID NO: 852748 - DNA, 33 bp, Homo sapien
gtaagaaaatatcaaggaaatcgaataacgtag

SEQ ID NO: 852749 - DNA, 33 bp, Homo sapien
agtagaatattaaaagcctttcaggtctgacag

SEQ ID NO: 852750 - DNA, 33 bp, Homo sapien
agtagaatattaaaaggctttcaggtctgacag

SEQ ID NO: 852751 - DNA, 33 bp, Homo sapien
ttctttatggcagtagaaacacagaaaatatgt

SEQ ID NO: 852752 - DNA, 33 bp, Homo sapien
ttctttatggcagtaggaacacagaaaatatgt

SEQ ID NO: 852753 - DNA, 33 bp, Homo sapien
ttaaggaaggtgaggaataataaaaggctatgt

SEQ ID NO: 852754 - DNA, 33 bp, Homo sapien
ttaaggaaggtgaggagtaataaaaggctatgt

SEQ ID NO: 852755 - DNA, 33 bp, Homo sapien
cgatctaatttctcacgatgagttaagcggctt

SEQ ID NO: 852756 - DNA, 33 bp, Homo sapien
cgatctaatttctcactatgagttaagcggctt

SEQ ID NO: 852757 - DNA, 33 bp, Homo sapien
agttattagcactaccaatgctgaaagacaagc

SEQ ID NO: 852758 - DNA, 33 bp, Homo sapien
agttattagcactaccgatgctgaaagacaagc

SEQ ID NO: 852759 - DNA, 33 bp, Homo sapien
gaccactcttgacatccgatctgagttctcatt

SEQ ID NO: 852760 - DNA, 33 bp, Homo sapien
gaccactcttgacatctgatctgagttctcatt

SEQ ID NO: 852761 - DNA, 33 bp, Homo sapien
gagctcttactctctacgctctaggctttggga

SEQ ID NO: 852762 - DNA, 33 bp, Homo sapien
gagctcttactctctatgctctaggctttggga

SEQ ID NO: 852763 - DNA, 33 bp, Homo sapien
agcatctatctgactgcagtggactaatgccat

SEQ ID NO: 852764 - DNA, 33 bp, Homo sapien
agcatctatctgactgtagtggactaatgccat

SEQ ID NO: 852765 - DNA, 33 bp, Homo sapien
attttttgttcatctgaattttcaaacttttct

SEQ ID NO: 852766 - DNA, 33 bp, Homo sapien
attttttgttcatctgtattttcaaacttttct

SEQ ID NO: 852767 - DNA, 33 bp, Homo sapien
gccttgtaggaaaaaacgtttcatcacttacat

SEQ ID NO: 852768 - DNA, 33 bp, Homo sapien
gccttgtaggaaaaaatgtttcatcacttacat

SEQ ID NO: 852769 - DNA, 33 bp, Homo sapien
gtgaattgagtaggccagatgagttggcagacc

SEQ ID NO: 852770 - DNA, 33 bp, Homo sapien
gtgaattgagtaggccggatgagttggcagacc

SEQ ID NO: 852771 - DNA, 33 bp, Homo sapien
gcctgcccctatgtaacatatccctatgctctt

SEQ ID NO: 852772 - DNA, 33 bp, Homo sapien
gcctgcccctatgtaagatatccctatgctctt

SEQ ID NO: 852773 - DNA, 33 bp, Homo sapien
ctcagaacgttacactcacaaggagaactgtaa

SEQ ID NO: 852774 - DNA, 33 bp, Homo sapien
ctcagaacgttacactgacaaggagaactgtaa

SEQ ID NO: 852775 - DNA, 33 bp, Homo sapien
agaaggaggagacttacgccaaaaaaattctag

SEQ ID NO: 852776 - DNA, 33 bp, Homo sapien
agaaggaggagacttatgccaaaaaaattctag

SEQ ID NO: 852777 - DNA, 33 bp, Homo sapien
gaggtcatagaggaaaagattaatgacctcaaa

SEQ ID NO: 852778 - DNA, 33 bp, Homo sapien
gaggtcatagaggaaaggattaatgacctcaaa

SEQ ID NO: 852779 - DNA, 33 bp, Homo sapien
accaatagctgtaaaactgcatctccatgagag

SEQ ID NO: 852780 - DNA, 33 bp, Homo sapien
accaatagctgtaaaattgcatctccatgagag

SEQ ID NO: 852781 - DNA, 33 bp, Homo sapien
aactgctcacgctgaggaggggaaaagaatgcc

SEQ ID NO: 852782 - DNA, 33 bp, Homo sapien
aactgctcacgctgagtaggggaaaagaatgcc

SEQ ID NO: 852783 - DNA, 33 bp, Homo sapien
aatgcagtgaagaaaacgacaggagaacattat

SEQ ID NO: 852784 - DNA, 33 bp, Homo sapien
aatgcagtgaagaaaatgacaggagaacattat

SEQ ID NO: 852785 - DNA, 33 bp, Homo sapien
ctcatagaatgacaccaggtgctagccaccaag

SEQ ID NO: 852786 - DNA, 33 bp, Homo sapien
ctcatagaatgacaccgggtgctagccaccaag

SEQ ID NO: 852787 - DNA, 33 bp, Homo sapien
aaacacaatgtgtgacaaacaatataattattt

SEQ ID NO: 852788 - DNA, 33 bp, Homo sapien
aaacacaatgtgtgacgaacaatataattattt

SEQ ID NO: 852789 - DNA, 33 bp, Homo sapien
aaatgtcatcagagacaacaaaataaaaccaca

SEQ ID NO: 852790 - DNA, 33 bp, Homo sapien
aaatgtcatcagagaccacaaaataaaaccaca

SEQ ID NO: 852791 - DNA, 33 bp, Homo sapien
tggaaagagactgcagcaaaaccaaattatgct

SEQ ID NO: 852792 - DNA, 33 bp, Homo sapien
tggaaagagactgcaggaaaaccaaattatgct

SEQ ID NO: 852793 - DNA, 33 bp, Homo sapien
gtctatctgaccgtaaatgtccaattcgatgta

SEQ ID NO: 852794 - DNA, 33 bp, Homo sapien
gtctatctgaccgtaagtgtccaattcgatgta

SEQ ID NO: 852795 - DNA, 33 bp, Homo sapien
caaaagctcaaaattgaacctcctaatttgttt

SEQ ID NO: 852796 - DNA, 33 bp, Homo sapien
caaaagctcaaaattgtacctcctaatttgttt

SEQ ID NO: 852797 - DNA, 33 bp, Homo sapien
tcatctggaataatgtcaaagtctgaatactaa

SEQ ID NO: 852798 - DNA, 33 bp, Homo sapien
tcatctggaataatgttaaagtctgaatactaa

SEQ ID NO: 852799 - DNA, 33 bp, Homo sapien
ttaacacagtgtgccacgttttttattttacca

SEQ ID NO: 852800 - DNA, 33 bp, Homo sapien
ttaacacagtgtgccatgttttttattttacca

SEQ ID NO: 852801 - DNA, 33 bp, Homo sapien
aaagtaattgccaacaagaaagccagaggccct

SEQ ID NO: 852802 - DNA, 33 bp, Homo sapien
aaagtaattgccaacaggaaagccagaggccct

SEQ ID NO: 852803 - DNA, 33 bp, Homo sapien
ttgtttaaagaggccaactttgataatttctaa

SEQ ID NO: 852804 - DNA, 33 bp, Homo sapien
ttgtttaaagaggccagctttgataatttctaa

SEQ ID NO: 852805 - DNA, 33 bp, Homo sapien
cccaaagtattgaaacaataggtgtgagctacc

SEQ ID NO: 852806 - DNA, 33 bp, Homo sapien
cccaaagtattgaaactataggtgtgagctacc

SEQ ID NO: 852807 - DNA, 33 bp, Homo sapien
tacagagaaccacatacagcttaatgaattgtt

SEQ ID NO: 852808 - DNA, 33 bp, Homo sapien
tacagagaaccacatatagcttaatgaattgtt

SEQ ID NO: 852809 - DNA, 33 bp, Homo sapien
tcatagtagtgactctaaaacttctatcatcac

SEQ ID NO: 852810 - DNA, 33 bp, Homo sapien
tcatagtagtgactctcaaacttctatcatcac

SEQ ID NO: 852811 - DNA, 33 bp, Homo sapien
caacagtaaataattacagcttgtttttgtata

SEQ ID NO: 852812 - DNA, 33 bp, Homo sapien
caacagtaaataattatagcttgtttttgtata

SEQ ID NO: 852813 - DNA, 33 bp, Homo sapien
gacctagaatattcagcaagctgagactcaata

SEQ ID NO: 852814 - DNA, 33 bp, Homo sapien
gacctagaatattcagtaagctgagactcaata

SEQ ID NO: 852815 - DNA, 33 bp, Homo sapien
tggatcactgcagttacctgaacagattaagaa

SEQ ID NO: 852816 - DNA, 33 bp, Homo sapien
tggatcactgcagttagctgaacagattaagaa

SEQ ID NO: 852817 - DNA, 33 bp, Homo sapien
gccttgaagatttatacgtctacgcacaaattt

SEQ ID NO: 852818 - DNA, 33 bp, Homo sapien
gccttgaagatttatatgtctacgcacaaattt

SEQ ID NO: 852819 - DNA, 33 bp, Homo sapien
ggtgtgaaccatgagaaatatgacaacagctca

SEQ ID NO: 852820 - DNA, 33 bp, Homo sapien
ggtgtgaaccatgagacatatgacaacagctca

SEQ ID NO: 852821 - DNA, 33 bp, Homo sapien
cgtctggaaaaacctaacaaatatgatgacacc

SEQ ID NO: 852822 - DNA, 33 bp, Homo sapien
cgtctggaaaaacctaccaaatatgatgacacc

SEQ ID NO: 852823 - DNA, 33 bp, Homo sapien; identical to SEQ ID NO: 852821

SEQ ID NO: 852824 - DNA, 33 bp, Homo sapien; identical to SEQ ID NO: 852822

SEQ ID NO: 852825 - DNA, 33 bp, Homo sapien
gtcaacttttattttaaatgcaacttgtgtctt

SEQ ID NO: 852826 - DNA, 33 bp, Homo sapien
gtcaacttttattttatatgcaacttgtgtctt

SEQ ID NO: 852827 - DNA, 33 bp, Homo sapien
cagtctgtagcaaatacatgaaggtcaccagct

SEQ ID NO: 852828 - DNA, 33 bp, Homo sapien
cagtctgtagcaaatatatgaaggtcaccagct

SEQ ID NO: 852829 - DNA, 33 bp, Homo sapien
gtgactcaaaccttcaatcctcaatggtctggg

SEQ ID NO: 852830 - DNA, 33 bp, Homo sapien
gtgactcaaaccttcagtcctcaatggtctggg

SEQ ID NO: 852831 - DNA, 33 bp, Homo sapien
tgaggatgtctttagagaattagatgtacaggt

SEQ ID NO: 852832 - DNA, 33 bp, Homo sapien
tgaggatgtctttagataattagatgtacaggt

SEQ ID NO: 852833 - DNA, 33 bp, Homo sapien
atgtatatcttcttgacaaaactgagactgtca

SEQ ID NO: 852834 - DNA, 33 bp, Homo sapien
atgtatatcttcttgagaaaactgagactgtca

SEQ ID NO: 852835 - DNA, 33 bp, Homo sapien
aaattgaaaatatgacacttaaaacaagctcaa

SEQ ID NO: 852836 - DNA, 33 bp, Homo sapien
aaattgaaaatatgactcttaaaacaagctcaa

SEQ ID NO: 852837 - DNA, 33 bp, Homo sapien
atgagcactagaaagaaaggtacgaacctgagt

SEQ ID NO: 852838 - DNA, 33 bp, Homo sapien
atgagcactagaaagacaggtacgaacctgagt

SEQ ID NO: 852839 - DNA, 33 bp, Homo sapien
ctgggtgctcatccagcatacagaaattgtctg

SEQ ID NO: 852840 - DNA, 33 bp, Homo sapien
ctgggtgctcatccagtatacagaaattgtctg

SEQ ID NO: 852841 - DNA, 33 bp, Homo sapien
aagtatcttaaatggactattggaatttgcttt

SEQ ID NO: 852842 - DNA, 33 bp, Homo sapien
aagtatcttaaatggattattggaatttgcttt

SEQ ID NO: 852843 - DNA, 33 bp, Homo sapien
atggaagtaaatcccccgggatgccactaagaa

SEQ ID NO: 852844 - DNA, 33 bp, Homo sapien
atggaagtaaatcccctgggatgccactaagaa

SEQ ID NO: 852845 - DNA, 33 bp, Homo sapien
gtataaatacagccaactattatcagggatttt

SEQ ID NO: 852846 - DNA, 33 bp, Homo sapien
gtataaatacagccaattattatcagggatttt

SEQ ID NO: 852847 - DNA, 33 bp, Homo sapien
caaatatttatcatctcacgtttatggagacta

SEQ ID NO: 852848 - DNA, 33 bp, Homo sapien
caaatatttatcatcttacgtttatggagacta

SEQ ID NO: 852849 - DNA, 33 bp, Homo sapien
gctgggtaattttaccaactcagttttcacctg

SEQ ID NO: 852850 - DNA, 33 bp, Homo sapien
gctgggtaattttacctactcagttttcacctg

SEQ ID NO: 852851 - DNA, 33 bp, Homo sapien
tctcaaattctggctaaatgtagtacacaatct

SEQ ID NO: 852852 - DNA, 33 bp, Homo sapien
tctcaaattctggctagatgtagtacacaatct

SEQ ID NO: 852853 - DNA, 33 bp, Homo sapien
aggcataagtacactacggtcagattgcctgct

SEQ ID NO: 852854 - DNA, 33 bp, Homo sapien
aggcataagtacactatggtcagattgcctgct

SEQ ID NO: 852855 - DNA, 33 bp, Homo sapien
aaatgagatctgaagcgataactacctaatcca

SEQ ID NO: 852856 - DNA, 33 bp, Homo sapien
aaatgagatctgaagctataactacctaatcca

SEQ ID NO: 852857 - DNA, 33 bp, Homo sapien
ccaatggattacttcaaaatcttcatgtagtca

SEQ ID NO: 852858 - DNA, 33 bp, Homo sapien
ccaatggattacttcagaatcttcatgtagtca

SEQ ID NO: 852859 - DNA, 33 bp, Homo sapien
acaaaatggataaaaaatgagaataagcaagtg

SEQ ID NO: 852860 - DNA, 33 bp, Homo sapien
acaaaatggataaaaattgagaataagcaagtg

SEQ ID NO: 852861 - DNA, 33 bp, Homo sapien
tcctcttcttgtaaggacatcaatcggattgga

SEQ ID NO: 852862 - DNA, 33 bp, Homo sapien
tcctcttcttgtaaggtcatcaatcggattgga

SEQ ID NO: 852863 - DNA, 33 bp, Homo sapien
catgatgccatttatgaaaagttttataaacat

SEQ ID NO: 852864 - DNA, 33 bp, Homo sapien
catgatgccatttatggaaagttttataaacat

SEQ ID NO: 852865 - DNA, 33 bp, Homo sapien
cttacaatggcatggaaaactcagataactggt

SEQ ID NO: 852866 - DNA, 33 bp, Homo sapien
cttacaatggcatggataactcagataactggt

SEQ ID NO: 852867 - DNA, 33 bp, Homo sapien
caaggagggttttaaacgtccagctgtcattat

SEQ ID NO: 852868 - DNA, 33 bp, Homo sapien
caaggagggttttaaatgtccagctgtcattat

SEQ ID NO: 852869 - DNA, 33 bp, Homo sapien
gattacctatggcgccaggcagaatacccagca

SEQ ID NO: 852870 - DNA, 33 bp, Homo sapien
gattacctatggcgccgggcagaatacccagca

SEQ ID NO: 852871 - DNA, 33 bp, Homo sapien
gagggtagacccaaaaccatatcagtaattact

SEQ ID NO: 852872 - DNA, 33 bp, Homo sapien
gagggtagacccaaaagcatatcagtaattact

SEQ ID NO: 852873 - DNA, 33 bp, Homo sapien
aaaataggtgaaaaaaaacaattgttgaagttg

SEQ ID NO: 852874 - DNA, 33 bp, Homo sapien
aaaataggtgaaaaaacacaattgttgaagttg

SEQ ID NO: 852875 - DNA, 33 bp, Homo sapien
agggaaccatatatacccaaaattatatacgcc

SEQ ID NO: 852876 - DNA, 33 bp, Homo sapien
agggaaccatatatactcaaaattatatacgcc

SEQ ID NO: 852877 - DNA, 33 bp, Homo sapien
tgcaggatgttaataacaggtaaatgtgtgtgt

SEQ ID NO: 852878 - DNA, 33 bp, Homo sapien
tgcaggatgttaataagaggtaaatgtgtgtgt

SEQ ID NO: 852879 - DNA, 33 bp, Homo sapien
gagccctaatagaaaccgtggattttagtgtat

SEQ ID NO: 852880 - DNA, 33 bp, Homo sapien
gagccctaatagaaactgtggattttagtgtat

SEQ ID NO: 852881 - DNA, 33 bp, Homo sapien
atccttctttctaagccgaacccctctctgtgt

SEQ ID NO: 852882 - DNA, 33 bp, Homo sapien
atccttctttctaagctgaacccctctctgtgt

SEQ ID NO: 852883 - DNA, 33 bp, Homo sapien
gagaaatagtaaatacaaagcatcaggaccaga

SEQ ID NO: 852884 - DNA, 33 bp, Homo sapien
gagaaatagtaaatacgaagcatcaggaccaga

SEQ ID NO: 852885 - DNA, 33 bp, Homo sapien
gtgtcaggcggaattcccattctgagttctgga

SEQ ID NO: 852886 - DNA, 33 bp, Homo sapien
gtgtcaggcggaattctcattctgagttctgga

SEQ ID NO: 852887 - DNA, 33 bp, Homo sapien
attgaattgctttcccccactaggtgacagatt

SEQ ID NO: 852888 - DNA, 33 bp, Homo sapien
attgaattgctttccctcactaggtgacagatt

SEQ ID NO: 852889 - DNA, 33 bp, Homo sapien
tgttttgaagtgatacaaattcaccaattaagg

SEQ ID NO: 852890 - DNA, 33 bp, Homo sapien
tgttttgaagtgatacgaattcaccaattaagg

SEQ ID NO: 852891 - DNA, 33 bp, Homo sapien
atataaaccttatgaacttcacttttgccattg

SEQ ID NO: 852892 - DNA, 33 bp, Homo sapien
atataaaccttatgaatttcacttttgccattg

SEQ ID NO: 852893 - DNA, 33 bp, Homo sapien
aattcaactctgatgaagctttcttaaaagtct

SEQ ID NO: 852894 - DNA, 33 bp, Homo sapien
aattcaactctgatgaggctttcttaaaagtct

SEQ ID NO: 852895 - DNA, 33 bp, Homo sapien
atttggtatatcttaacgcttggtactaatgat

SEQ ID NO: 852896 - DNA, 33 bp, Homo sapien
atttggtatatcttaatgcttggtactaatgat

SEQ ID NO: 852897 - DNA, 33 bp, Homo sapien
gatcattggattcgtcagacacactgcaaaacc

SEQ ID NO: 852898 - DNA, 33 bp, Homo sapien
gatcattggattcgtcggacacactgcaaaacc

SEQ ID NO: 852899 - DNA, 33 bp, Homo sapien
aactgatttttgcaacgaggtcattgctctttc

SEQ ID NO: 852900 - DNA, 33 bp, Homo sapien
aactgatttttgcaactaggtcattgctctttc

SEQ ID NO: 852901 - DNA, 33 bp, Homo sapien
accactagcagcaaaacggttcaacaaagtgta

SEQ ID NO: 852902 - DNA, 33 bp, Homo sapien
accactagcagcaaaatggttcaacaaagtgta

SEQ ID NO: 852903 - DNA, 33 bp, Homo sapien
ttgtagccagctagtccgaagtgggggtggtcc

SEQ ID NO: 852904 - DNA, 33 bp, Homo sapien
ttgtagccagctagtctgaagtgggggtggtcc

SEQ ID NO: 852905 - DNA, 33 bp, Homo sapien
gaattgcaaatgtcttaccacttgttcgataaa

SEQ ID NO: 852906 - DNA, 33 bp, Homo sapien
gaattgcaaatgtcttcccacttgttcgataaa

SEQ ID NO: 852907 - DNA, 33 bp, Homo sapien
cagctgtgagtacaacaatgtgctgagtcccat

SEQ ID NO: 852908 - DNA, 33 bp, Homo sapien
cagctgtgagtacaacgatgtgctgagtcccat

SEQ ID NO: 852909 - DNA, 33 bp, Homo sapien
tgccatgaaatttgacaagggattcatgtatac

SEQ ID NO: 852910 - DNA, 33 bp, Homo sapien
tgccatgaaatttgacgagggattcatgtatac

SEQ ID NO: 852911 - DNA, 33 bp, Homo sapien
catagtcttttgcgaccgacttctttcacttgg

SEQ ID NO: 852912 - DNA, 33 bp, Homo sapien
catagtcttttgcgactgacttctttcacttgg

SEQ ID NO: 852913 - DNA, 33 bp, Homo sapien
ttatgtttgatcatagcagtcaggaaaggatgg

SEQ ID NO: 852914 - DNA, 33 bp, Homo sapien
ttatgtttgatcatagtagtcaggaaaggatgg

SEQ ID NO: 852915 - DNA, 33 bp, Homo sapien
acaagcagtaatccaaagcaaactgtaccaatc

SEQ ID NO: 852916 - DNA, 33 bp, Homo sapien
acaagcagtaatccaaggcaaactgtaccaatc

SEQ ID NO: 852917 - DNA, 33 bp, Homo sapien
gttggggttcagaagcactacttccaaatgcat

SEQ ID NO: 852918 - DNA, 33 bp, Homo sapien
gttggggttcagaagcgctacttccaaatgcat

SEQ ID NO: 852919 - DNA, 33 bp, Homo sapien
tttattttgttctggaaagcgtgtattttaaaa

SEQ ID NO: 852920 - DNA, 33 bp, Homo sapien
tttattttgttctggagagcgtgtattttaaaa

SEQ ID NO: 852921 - DNA, 33 bp, Homo sapien
gcagcagtggcaacaaagctgtgtctagtggag

SEQ ID NO: 852922 - DNA, 33 bp, Homo sapien
gcagcagtggcaacaatgctgtgtctagtggag

SEQ ID NO: 852923 - DNA, 33 bp, Homo sapien
tgtctctggtgaaatacagattctttggctgca

SEQ ID NO: 852924 - DNA, 33 bp, Homo sapien
tgtctctggtgaaatatagattctttggctgca

SEQ ID NO: 852925 - DNA, 33 bp, Homo sapien
gttgttacatacagaaatctgtcaaaatggaag

SEQ ID NO: 852926 - DNA, 33 bp, Homo sapien
gttgttacatacagaagtctgtcaaaatggaag

SEQ ID NO: 852927 - DNA, 33 bp, Homo sapien
tgagaatctcacttaaacccagtagttaagagt

SEQ ID NO: 852928 - DNA, 33 bp, Homo sapien
tgagaatctcacttaagcccagtagttaagagt

SEQ ID NO: 852929 - DNA, 33 bp, Homo sapien
aacagtgttttttgaccaggcacatacctgaat

SEQ ID NO: 852930 - DNA, 33 bp, Homo sapien
aacagtgttttttgacgaggcacatacctgaat

SEQ ID NO: 852931 - DNA, 33 bp, Homo sapien
tcctacagagcagtcaagatagagaaagaaaag

SEQ ID NO: 852932 - DNA, 33 bp, Homo sapien
tcctacagagcagtcaggatagagaaagaaaag

SEQ ID NO: 852933 - DNA, 33 bp, Homo sapien
cctgagtacggagaacagattattttgtttcat

SEQ ID NO: 852934 - DNA, 33 bp, Homo sapien
cctgagtacggagaacggattattttgtttcat

SEQ ID NO: 852935 - DNA, 33 bp, Homo sapien
ctccttccatgtggaactggaaaccggaagtca

SEQ ID NO: 852936 - DNA, 33 bp, Homo sapien
ctccttccatgtggaattggaaaccggaagtca

SEQ ID NO: 852937 - DNA, 33 bp, Homo sapien
tacctgcttattcacaacctgcttgaggcttat

SEQ ID NO: 852938 - DNA, 33 bp, Homo sapien
tacctgcttattcacagcctgcttgaggcttat

SEQ ID NO: 852939 - DNA, 33 bp, Homo sapien
gtattctagatgatccagaactgtgtatttcct

SEQ ID NO: 852940 - DNA, 33 bp, Homo sapien
gtattctagatgatccggaactgtgtatttcct

SEQ ID NO: 852941 - DNA, 33 bp, Homo sapien
aatcagatagtgttagcccttcaagtttattat

SEQ ID NO: 852942 - DNA, 33 bp, Homo sapien
aatcagatagtgttagtccttcaagtttattat

SEQ ID NO: 852943 - DNA, 33 bp, Homo sapien
tgttttgttcttttcaatacatcagtcttacac

SEQ ID NO: 852944 - DNA, 33 bp, Homo sapien
tgttttgttcttttcagtacatcagtcttacac

SEQ ID NO: 852945 - DNA, 33 bp, Homo sapien
tagtgctcagtctagaacaagtttcttagcctt

SEQ ID NO: 852946 - DNA, 33 bp, Homo sapien
tagtgctcagtctagaccaagtttcttagcctt

SEQ ID NO: 852947 - DNA, 33 bp, Homo sapien
gagcaagttaaagaatcagaggaaaacctggag

SEQ ID NO: 852948 - DNA, 33 bp, Homo sapien
gagcaagttaaagaatgagaggaaaacctggag

SEQ ID NO: 852949 - DNA, 33 bp, Homo sapien
agtcaggagtcatacacagcacagaacattgtt

SEQ ID NO: 852950 - DNA, 33 bp, Homo sapien
agtcaggagtcatacatagcacagaacattgtt

SEQ ID NO: 852951 - DNA, 33 bp, Homo sapien
actgctgtgctgtgaaaatactacaattttgtt

SEQ ID NO: 852952 - DNA, 33 bp, Homo sapien
actgctgtgctgtgaagatactacaattttgtt

SEQ ID NO: 852953 - DNA, 33 bp, Homo sapien
tgattataagctctatgaaggatacattttgtg

SEQ ID NO: 852954 - DNA, 33 bp, Homo sapien
tgattataagctctattaaggatacattttgtg

SEQ ID NO: 852955 - DNA, 33 bp, Homo sapien
cagaaattgtcctacaaaatacatgagcaaaat

SEQ ID NO: 852956 - DNA, 33 bp, Homo sapien
cagaaattgtcctacacaatacatgagcaaaat

SEQ ID NO: 852957 - DNA, 33 bp, Homo sapien
attatgggaactaatacgagcaaatttctgttc

SEQ ID NO: 852958 - DNA, 33 bp, Homo sapien
attatgggaactaatatgagcaaatttctgttc

SEQ ID NO: 852959 - DNA, 33 bp, Homo sapien
cttatcctaagcagaactagatcacatggctgg

SEQ ID NO: 852960 - DNA, 33 bp, Homo sapien
cttatcctaagcagaagtagatcacatggctgg

SEQ ID NO: 852961 - DNA, 33 bp, Homo sapien
taggaagtaaaataaagtgaggtggcatagtgt

SEQ ID NO: 852962 - DNA, 33 bp, Homo sapien
taggaagtaaaataaattgaggtggcatagtgt

SEQ ID NO: 852963 - DNA, 33 bp, Homo sapien
cagggtcctaagactgcaagttgctggtctcgt

SEQ ID NO: 852964 - DNA, 33 bp, Homo sapien
cagggtcctaagactgtaagttgctggtctcgt

SEQ ID NO: 852965 - DNA, 33 bp, Homo sapien
tgccaagagtagctaacctggagcaagttatca

SEQ ID NO: 852966 - DNA, 33 bp, Homo sapien
tgccaagagtagctaatctggagcaagttatca

SEQ ID NO: 852967 - DNA, 33 bp, Homo sapien
cactggcctctaattacgtcatctcctaaaata

SEQ ID NO: 852968 - DNA, 33 bp, Homo sapien
cactggcctctaattatgtcatctcctaaaata

SEQ ID NO: 852969 - DNA, 33 bp, Homo sapien
gagattgcttaggagacaaaaatgataaattcc

SEQ ID NO: 852970 - DNA, 33 bp, Homo sapien
gagattgcttaggagataaaaatgataaattcc

SEQ ID NO: 852971 - DNA, 33 bp, Homo sapien
ttgggaggttttcttcccagctgtaactccagg

SEQ ID NO: 852972 - DNA, 33 bp, Homo sapien
ttgggaggttttcttctcagctgtaactccagg

SEQ ID NO: 852973 - DNA, 33 bp, Homo sapien
caattgaccatgaaaaacattgaaaccacagaa

SEQ ID NO: 852974 - DNA, 33 bp, Homo sapien
caattgaccatgaaaaccattgaaaccacagaa

SEQ ID NO: 852975 - DNA, 33 bp, Homo sapien
ttttgtgaaagctgaaggcctcgggttaacaca

SEQ ID NO: 852976 - DNA, 33 bp, Homo sapien
ttttgtgaaagctgaatgcctcgggttaacaca

SEQ ID NO: 852977 - DNA, 33 bp, Homo sapien
ggcccagagaatggaaaactaaagataatgggt

SEQ ID NO: 852978 - DNA, 33 bp, Homo sapien
ggcccagagaatggaagactaaagataatgggt

SEQ ID NO: 852979 - DNA, 33 bp, Homo sapien
aaggaactgatcttggacaaaaatttccaaacc

SEQ ID NO: 852980 - DNA, 33 bp, Homo sapien
aaggaactgatcttgggcaaaaatttccaaacc

SEQ ID NO: 852981 - DNA, 33 bp, Homo sapien
tgtctatccttcagtaaacaattctaaaacagc

SEQ ID NO: 852982 - DNA, 33 bp, Homo sapien
tgtctatccttcagtagacaattctaaaacagc

SEQ ID NO: 852983 - DNA, 33 bp, Homo sapien
gaatgtaaattagggccgaaaacagatttggga

SEQ ID NO: 852984 - DNA, 33 bp, Homo sapien
gaatgtaaattagggctgaaaacagatttggga

SEQ ID NO: 852985 - DNA, 33 bp, Homo sapien
gaagacaggcacatagaatcaaagttgaggtca

SEQ ID NO: 852986 - DNA, 33 bp, Homo sapien
gaagacaggcacatagtatcaaagttgaggtca

SEQ ID NO: 852987 - DNA, 33 bp, Homo sapien
atagtgttgtttcattcaacagcatttagttat

SEQ ID NO: 852988 - DNA, 33 bp, Homo sapien
atagtgttgtttcattgaacagcatttagttat

SEQ ID NO: 852989 - DNA, 33 bp, Homo sapien
agtacccattttatagcattgttcataggattc

SEQ ID NO: 852990 - DNA, 33 bp, Homo sapien
agtacccattttataggattgttcataggattc

SEQ ID NO: 852991 - DNA, 33 bp, Homo sapien
ccaccacatgtgaagacgattctttgctcaagg

SEQ ID NO: 852992 - DNA, 33 bp, Homo sapien
ccaccacatgtgaagatgattctttgctcaagg

SEQ ID NO: 852993 - DNA, 33 bp, Homo sapien
aactcactataactcaggtctgaatgaaaccta

SEQ ID NO: 852994 - DNA, 33 bp, Homo sapien
aactcactataactcatgtctgaatgaaaccta

SEQ ID NO: 852995 - DNA, 33 bp, Homo sapien
acctgtaccaaagcaaacagaaataatatccta

SEQ ID NO: 852996 - DNA, 33 bp, Homo sapien
acctgtaccaaagcaagcagaaataatatccta

SEQ ID NO: 852997 - DNA, 33 bp, Homo sapien
agcaaacttgtctgtccagtaaagcccacttca

SEQ ID NO: 852998 - DNA, 33 bp, Homo sapien
agcaaacttgtctgtctagtaaagcccacttca

SEQ ID NO: 852999 - DNA, 33 bp, Homo sapien
ttgcaaaagcaagttacagaaatgcaactaaca

SEQ ID NO: 853000 - DNA, 33 bp, Homo sapien
ttgcaaaagcaagttatagaaatgcaactaaca

SEQ ID NO: 853001 - DNA, 33 bp, Homo sapien
tgcctcaagagtaacacgtattctgactactaa

SEQ ID NO: 853002 - DNA, 33 bp, Homo sapien
tgcctcaagagtaacatgtattctgactactaa

SEQ ID NO: 853003 - DNA, 33 bp, Homo sapien
aactttggagaacaataagaaaaggtaagctag

SEQ ID NO: 853004 - DNA, 33 bp, Homo sapien
aactttggagaacaatgagaaaaggtaagctag

SEQ ID NO: 853005 - DNA, 33 bp, Homo sapien
gagttaaattgtaggacagacagtttgctgtag

SEQ ID NO: 853006 - DNA, 33 bp, Homo sapien
gagttaaattgtaggatagacagtttgctgtag

SEQ ID NO: 853007 - DNA, 33 bp, Homo sapien
agtatgttctatgctacatcttggaatatatac

SEQ ID NO: 853008 - DNA, 33 bp, Homo sapien
agtatgttctatgctatatcttggaatatatac

SEQ ID NO: 853009 - DNA, 33 bp, Homo sapien
tattatagcctatttacggagatttttgcgaac

SEQ ID NO: 853010 - DNA, 33 bp, Homo sapien
tattatagcctatttatggagatttttgcgaac

SEQ ID NO: 853011 - DNA, 33 bp, Homo sapien
gaaaaggagataagcaagataacagcctcttta

SEQ ID NO: 853012 - DNA, 33 bp, Homo sapien
gaaaaggagataagcaggataacagcctcttta

SEQ ID NO: 853013 - DNA, 33 bp, Homo sapien
tgttagataaaacataaaagtaagttacagcca

SEQ ID NO: 853014 - DNA, 33 bp, Homo sapien
tgttagataaaacatagaagtaagttacagcca

SEQ ID NO: 853015 - DNA, 33 bp, Homo sapien
gcatttgtttctaccactagatagtgtggtcct

SEQ ID NO: 853016 - DNA, 33 bp, Homo sapien
gcatttgtttctaccattagatagtgtggtcct

SEQ ID NO: 853017 - DNA, 33 bp, Homo sapien
ctctttttgagtgctaactaccattatgatcta

SEQ ID NO: 853018 - DNA, 33 bp, Homo sapien
ctctttttgagtgctagctaccattatgatcta

SEQ ID NO: 853019 - DNA, 33 bp, Homo sapien
gtgttcctcttgagtacattattcattcagcaa

SEQ ID NO: 853020 - DNA, 33 bp, Homo sapien
gtgttcctcttgagtatattattcattcagcaa

SEQ ID NO: 853021 - DNA, 33 bp, Homo sapien
agtagaattcccttccaacaaaaagcagcttct

SEQ ID NO: 853022 - DNA, 33 bp, Homo sapien
agtagaattcccttccgacaaaaagcagcttct

SEQ ID NO: 853023 - DNA, 33 bp, Homo sapien
aaaataagcaaaaagaatagacggagatgaaat

SEQ ID NO: 853024 - DNA, 33 bp, Homo sapien
aaaataagcaaaaagagtagacggagatgaaat

SEQ ID NO: 853025 - DNA, 33 bp, Homo sapien
tgtaattaggcatgcaaataaatagaccagcaa

SEQ ID NO: 853026 - DNA, 33 bp, Homo sapien
tgtaattaggcatgcagataaatagaccagcaa

SEQ ID NO: 853027 - DNA, 33 bp, Homo sapien
tcatatcacttttgcacatttctaatgtagcat

SEQ ID NO: 853028 - DNA, 33 bp, Homo sapien
tcatatcacttttgcatatttctaatgtagcat

SEQ ID NO: 853029 - DNA, 33 bp, Homo sapien
ctttctggatagtgtacattctgttcagacact

SEQ ID NO: 853030 - DNA, 33 bp, Homo sapien
ctttctggatagtgtatattctgttcagacact

SEQ ID NO: 853031 - DNA, 33 bp, Homo sapien
tatagaatcagggtaaaaatagctaatacttag

SEQ ID NO: 853032 - DNA, 33 bp, Homo sapien
tatagaatcagggtaacaatagctaatacttag

SEQ ID NO: 853033 - DNA, 33 bp, Homo sapien
tcccccgaggggctgccagctgaaaggtgtctc

SEQ ID NO: 853034 - DNA, 33 bp, Homo sapien
tcccccgaggggctgctagctgaaaggtgtctc

SEQ ID NO: 853035 - DNA, 33 bp, Homo sapien
gtaggggagacagataagtaaataaccatcttg

SEQ ID NO: 853036 - DNA, 33 bp, Homo sapien
gtaggggagacagatacgtaaataaccatcttg

SEQ ID NO: 853037 - DNA, 33 bp, Homo sapien
atacaggttctcagtaataaaaatcccataaag

SEQ ID NO: 853038 - DNA, 33 bp, Homo sapien
atacaggttctcagtagtaaaaatcccataaag

SEQ ID NO: 853039 - DNA, 33 bp, Homo sapien
tctcattaattgagaacaaagccatgttaaacc

SEQ ID NO: 853040 - DNA, 33 bp, Homo sapien
tctcattaattgagaataaagccatgttaaacc

SEQ ID NO: 853041 - DNA, 33 bp, Homo sapien
gctctacatacctcagacaatcatcatggggtc

SEQ ID NO: 853042 - DNA, 33 bp, Homo sapien
gctctacatacctcaggcaatcatcatggggtc

SEQ ID NO: 853043 - DNA, 33 bp, Homo sapien
catcttcccctcactgaatagacaggtgtgcag

SEQ ID NO: 853044 - DNA, 33 bp, Homo sapien
catcttcccctcactgcatagacaggtgtgcag

SEQ ID NO: 853045 - DNA, 33 bp, Homo sapien
tggctgtgacacaattaaaggaataacaaggag

SEQ ID NO: 853046 - DNA, 33 bp, Homo sapien
tggctgtgacacaattgaaggaataacaaggag

SEQ ID NO: 853047 - DNA, 33 bp, Homo sapien
gcaagtgaaagcagtgcacatatattcaggaat

SEQ ID NO: 853048 - DNA, 33 bp, Homo sapien
gcaagtgaaagcagtgtacatatattcaggaat

SEQ ID NO: 853049 - DNA, 33 bp, Homo sapien
tggactcattataaaaaagccaggttttccatg

SEQ ID NO: 853050 - DNA, 33 bp, Homo sapien
tggactcattataaaacagccaggttttccatg

SEQ ID NO: 853051 - DNA, 33 bp, Homo sapien
tagggacatagaggtgaacaagaaaaggtgaaa

SEQ ID NO: 853052 - DNA, 33 bp, Homo sapien
tagggacatagaggtggacaagaaaaggtgaaa

SEQ ID NO: 853053 - DNA, 33 bp, Homo sapien
tcatttccagaattgcaagaaaatacatttcta

SEQ ID NO: 853054 - DNA, 33 bp, Homo sapien
tcatttccagaattgcgagaaaatacatttcta

SEQ ID NO: 853055 - DNA, 33 bp, Homo sapien
ttcctaaggcagtaggaccaattctgtgatatg

SEQ ID NO: 853056 - DNA, 33 bp, Homo sapien
ttcctaaggcagtagggccaattctgtgatatg

SEQ ID NO: 853057 - DNA, 33 bp, Homo sapien
aggcaggctgtgggtaaaatctgagaatcctca

SEQ ID NO: 853058 - DNA, 33 bp, Homo sapien
aggcaggctgtgggtagaatctgagaatcctca

SEQ ID NO: 853059 - DNA, 33 bp, Homo sapien
attttaggactaggaacactagcatgaaataga

SEQ ID NO: 853060 - DNA, 33 bp, Homo sapien
attttaggactaggaatactagcatgaaataga

SEQ ID NO: 853061 - DNA, 33 bp, Homo sapien
gtttcctggaattaaactccattagtcaccctt

SEQ ID NO: 853062 - DNA, 33 bp, Homo sapien
gtttcctggaattaaagtccattagtcaccctt

SEQ ID NO: 853063 - DNA, 33 bp, Homo sapien
aaagggtcttcctgaagatgtggattctatctt

SEQ ID NO: 853064 - DNA, 33 bp, Homo sapien
aaagggtcttcctgaatatgtggattctatctt

SEQ ID NO: 853065 - DNA, 33 bp, Homo sapien
atttttcaacaagcaaaacgagctagtataaat

SEQ ID NO: 853066 - DNA, 33 bp, Homo sapien
atttttcaacaagcaagacgagctagtataaat

SEQ ID NO: 853067 - DNA, 33 bp, Homo sapien
aatacaatgatgtgaccgacataagatactagt

SEQ ID NO: 853068 - DNA, 33 bp, Homo sapien
aatacaatgatgtgactgacataagatactagt

SEQ ID NO: 853069 - DNA, 33 bp, Homo sapien
gcactgataacaacttcaactgaaatggacaga

SEQ ID NO: 853070 - DNA, 33 bp, Homo sapien
gcactgataacaactttaactgaaatggacaga

SEQ ID NO: 853071 - DNA, 33 bp, Homo sapien
agagtgactaatccagactgccaaggggaaatt

SEQ ID NO: 853072 - DNA, 33 bp, Homo sapien
agagtgactaatccaggctgccaaggggaaatt

SEQ ID NO: 853073 - DNA, 33 bp, Homo sapien
ctgaacccttgaccataagccacaaagttccca

SEQ ID NO: 853074 - DNA, 33 bp, Homo sapien
ctgaacccttgaccatgagccacaaagttccca

SEQ ID NO: 853075 - DNA, 33 bp, Homo sapien
agttctgttcctctagaataactcctggtgcca

SEQ ID NO: 853076 - DNA, 33 bp, Homo sapien
agttctgttcctctagcataactcctggtgcca

SEQ ID NO: 853077 - DNA, 33 bp, Homo sapien
aatcctgatgaagtgaaggaggaaactgcctgg

SEQ ID NO: 853078 - DNA, 33 bp, Homo sapien
aatcctgatgaagtgagggaggaaactgcctgg

SEQ ID NO: 853079 - DNA, 33 bp, Homo sapien
aaaaaaaagagtgtcaacttcacatttaagtat

SEQ ID NO: 853080 - DNA, 33 bp, Homo sapien
aaaaaaaagagtgtcatcttcacatttaagtat

SEQ ID NO: 853081 - DNA, 33 bp, Homo sapien
gggacaaggaatcaaagattaaagcagatttaa

SEQ ID NO: 853082 - DNA, 33 bp, Homo sapien
gggacaaggaatcaaatattaaagcagatttaa

SEQ ID NO: 853083 - DNA, 33 bp, Homo sapien
gcatctgaaaggccagaatttccaggtgaagtg

SEQ ID NO: 853084 - DNA, 33 bp, Homo sapien
gcatctgaaaggccaggatttccaggtgaagtg

SEQ ID NO: 853085 - DNA, 33 bp, Homo sapien
atgactcacaggtagactcaagctagtattagt

SEQ ID NO: 853086 - DNA, 33 bp, Homo sapien
atgactcacaggtagagtcaagctagtattagt

SEQ ID NO: 853087 - DNA, 33 bp, Homo sapien
agatctgcccacagtacaggagctgatgaaacc

SEQ ID NO: 853088 - DNA, 33 bp, Homo sapien
agatctgcccacagtagaggagctgatgaaacc

SEQ ID NO: 853089 - DNA, 33 bp, Homo sapien
ttcaggatcaaccaaagatgtacttagcgtgtg

SEQ ID NO: 853090 - DNA, 33 bp, Homo sapien
ttcaggatcaaccaaatatgtacttagcgtgtg

SEQ ID NO: 853091 - DNA, 33 bp, Homo sapien
atatttctaaggcattaaagttcctagcttttc

SEQ ID NO: 853092 - DNA, 33 bp, Homo sapien
atatttctaaggcattgaagttcctagcttttc

SEQ ID NO: 853093 - DNA, 33 bp, Homo sapien
ttggtttctgtcattacggtactttcaaatagt

SEQ ID NO: 853094 - DNA, 33 bp, Homo sapien
ttggtttctgtcattatggtactttcaaatagt

SEQ ID NO: 853095 - DNA, 33 bp, Homo sapien
ctagagctgcccaaagaatcttgaattaccttt

SEQ ID NO: 853096 - DNA, 33 bp, Homo sapien
ctagagctgcccaaaggatcttgaattaccttt

SEQ ID NO: 853097 - DNA, 33 bp, Homo sapien
tttaattctttttataacacttagcacattaat

SEQ ID NO: 853098 - DNA, 33 bp, Homo sapien
tttaattctttttatagcacttagcacattaat

SEQ ID NO: 853099 - DNA, 33 bp, Homo sapien
ggtgaaatgagcttgcaatgtctgggaaagaaa

SEQ ID NO: 853100 - DNA, 33 bp, Homo sapien
ggtgaaatgagcttgccatgtctgggaaagaaa

SEQ ID NO: 853101 - DNA, 33 bp, Homo sapien
ggcttgtcatttcacaacatcatgatagtctac

SEQ ID NO: 853102 - DNA, 33 bp, Homo sapien
ggcttgtcatttcacagcatcatgatagtctac

SEQ ID NO: 853103 - DNA, 33 bp, Homo sapien
acccactcaccattatcacctggcatgaaaaca

SEQ ID NO: 853104 - DNA, 33 bp, Homo sapien
acccactcaccattattacctggcatgaaaaca

SEQ ID NO: 853105 - DNA, 33 bp, Homo sapien
acctctgatggtgaaaatgtaaactgacattac

SEQ ID NO: 853106 - DNA, 33 bp, Homo sapien
acctctgatggtgaaagtgtaaactgacattac

SEQ ID NO: 853107 - DNA, 33 bp, Homo sapien
tcacctccacagttaaaccgcagctgagactac

SEQ ID NO: 853108 - DNA, 33 bp, Homo sapien
tcacctccacagttaagccgcagctgagactac

SEQ ID NO: 853109 - DNA, 33 bp, Homo sapien
gccttttgttcttgaaaagttgccagaactaaa

SEQ ID NO: 853110 - DNA, 33 bp, Homo sapien
gccttttgttcttgaagagttgccagaactaaa

SEQ ID NO: 853111 - DNA, 33 bp, Homo sapien
cactatctctcatgtcaaaggaataatagctct

SEQ ID NO: 853112 - DNA, 33 bp, Homo sapien
cactatctctcatgtctaaggaataatagctct

SEQ ID NO: 853113 - DNA, 33 bp, Homo sapien
cttaccaatctctacacagataacagaattttt

SEQ ID NO: 853114 - DNA, 33 bp, Homo sapien
cttaccaatctctacatagataacagaattttt

SEQ ID NO: 853115 - DNA, 33 bp, Homo sapien
tagaactctgatagataaaaagcttatttctat

SEQ ID NO: 853116 - DNA, 33 bp, Homo sapien
tagaactctgatagattaaaagcttatttctat

SEQ ID NO: 853117 - DNA, 33 bp, Homo sapien
tcatactatgtttagggagaaaataaaaggata

SEQ ID NO: 853118 - DNA, 33 bp, Homo sapien
tcatactatgtttaggtagaaaataaaaggata

SEQ ID NO: 853119 - DNA, 33 bp, Homo sapien
atacagatcaattgaactgcagaagcttgcagg

SEQ ID NO: 853120 - DNA, 33 bp, Homo sapien
atacagatcaattgaattgcagaagcttgcagg

SEQ ID NO: 853121 - DNA, 33 bp, Homo sapien
cctccataaaactcaacccccctggcaaacaag

SEQ ID NO: 853122 - DNA, 33 bp, Homo sapien
cctccataaaactcaagccccctggcaaacaag

SEQ ID NO: 853123 - DNA, 33 bp, Homo sapien
tgggtgagtttcctgcaacaagacgtgtagact

SEQ ID NO: 853124 - DNA, 33 bp, Homo sapien
tgggtgagtttcctgcgacaagacgtgtagact

SEQ ID NO: 853125 - DNA, 33 bp, Homo sapien
acatgacttttaccaaatatttaccatgttgtc

SEQ ID NO: 853126 - DNA, 33 bp, Homo sapien
acatgacttttaccaagtatttaccatgttgtc

SEQ ID NO: 853127 - DNA, 33 bp, Homo sapien
tgtctgttttgggaaaacctaccttctagtatg

SEQ ID NO: 853128 - DNA, 33 bp, Homo sapien
tgtctgttttgggaaagcctaccttctagtatg

SEQ ID NO: 853129 - DNA, 33 bp, Homo sapien
taggcaaatgggataacgaaaaatgttaatata

SEQ ID NO: 853130 - DNA, 33 bp, Homo sapien
taggcaaatgggataatgaaaaatgttaatata

SEQ ID NO: 853131 - DNA, 33 bp, Homo sapien
gactttctttattctacgttaccaatatgacag

SEQ ID NO: 853132 - DNA, 33 bp, Homo sapien
gactttctttattctatgttaccaatatgacag

SEQ ID NO: 853133 - DNA, 33 bp, Homo sapien
actaatttaaaaactcccatcaatggtgtataa

SEQ ID NO: 853134 - DNA, 33 bp, Homo sapien
actaatttaaaaactctcatcaatggtgtataa

SEQ ID NO: 853135 - DNA, 33 bp, Homo sapien; identical to SEQ ID NO: 853133

SEQ ID NO: 853136 - DNA, 33 bp, Homo sapien; identical to SEQ ID NO: 853134

SEQ ID NO: 853137 - DNA, 33 bp, Homo sapien
tatttttagtgtctgaatatttaacagctcaga

SEQ ID NO: 853138 - DNA, 33 bp, Homo sapien
tatttttagtgtctgattatttaacagctcaga

SEQ ID NO: 853139 - DNA, 33 bp, Homo sapien
ctagaatcagccttcaaaatgtaagttgctctt

SEQ ID NO: 853140 - DNA, 33 bp, Homo sapien
ctagaatcagccttcagaatgtaagttgctctt

SEQ ID NO: 853141 - DNA, 33 bp, Homo sapien
actaatagaataaatcagaaacaacaaaataac

SEQ ID NO: 853142 - DNA, 33 bp, Homo sapien
actaatagaataaatcggaaacaacaaaataac

SEQ ID NO: 853143 - DNA, 33 bp, Homo sapien
atctaaacaaagttcaagttcattttacagata

SEQ ID NO: 853144 - DNA, 33 bp, Homo sapien
atctaaacaaagttcaggttcattttacagata

SEQ ID NO: 853145 - DNA, 33 bp, Homo sapien
tctccccctatggcagcaatcatagcgcagatt

SEQ ID NO: 853146 - DNA, 33 bp, Homo sapien
tctccccctatggcagtaatcatagcgcagatt

SEQ ID NO: 853147 - DNA, 33 bp, Homo sapien
actttgatgccaacgaaggaaagaacaagataa

SEQ ID NO: 853148 - DNA, 33 bp, Homo sapien
actttgatgccaacgagggaaagaacaagataa

SEQ ID NO: 853149 - DNA, 33 bp, Homo sapien
gcctaatagacctacaactgggcaggttacact

SEQ ID NO: 853150 - DNA, 33 bp, Homo sapien
gcctaatagacctacagctgggcaggttacact

SEQ ID NO: 853151 - DNA, 33 bp, Homo sapien
ccccaaataatactaaaatttgacatccaggac

SEQ ID NO: 853152 - DNA, 33 bp, Homo sapien
ccccaaataatactaagatttgacatccaggac

SEQ ID NO: 853153 - DNA, 33 bp, Homo sapien
ttagattatattttaccgaattctcacacacac

SEQ ID NO: 853154 - DNA, 33 bp, Homo sapien
ttagattatattttactgaattctcacacacac

SEQ ID NO: 853155 - DNA, 33 bp, Homo sapien
ttttgagtatttcaaaacatcctaaatttgtaa

SEQ ID NO: 853156 - DNA, 33 bp, Homo sapien
ttttgagtatttcaaatcatcctaaatttgtaa

SEQ ID NO: 853157 - DNA, 33 bp, Homo sapien
acctcttctgaccactaaactaaaccacgtaca

SEQ ID NO: 853158 - DNA, 33 bp, Homo sapien
acctcttctgaccactgaactaaaccacgtaca

SEQ ID NO: 853159 - DNA, 33 bp, Homo sapien
ggttcattctagcaaagtctagctaagccaaaa

SEQ ID NO: 853160 - DNA, 33 bp, Homo sapien
ggttcattctagcaaattctagctaagccaaaa

SEQ ID NO: 853161 - DNA, 33 bp, Homo sapien
tgagataattcaagaacgtaatacctgttgcaa

SEQ ID NO: 853162 - DNA, 33 bp, Homo sapien
tgagataattcaagaatgtaatacctgttgcaa

SEQ ID NO: 853163 - DNA, 33 bp, Homo sapien
atttgatcctgctttaaaatacactggcagctc

SEQ ID NO: 853164 - DNA, 33 bp, Homo sapien
atttgatcctgctttataatacactggcagctc

SEQ ID NO: 853165 - DNA, 33 bp, Homo sapien
tgctcaaaattgtccaaaatggcacagccagag

SEQ ID NO: 853166 - DNA, 33 bp, Homo sapien
tgctcaaaattgtccagaatggcacagccagag

SEQ ID NO: 853167 - DNA, 33 bp, Homo sapien
ttaattaaagatgcagacattaatcaaacattt

SEQ ID NO: 853168 - DNA, 33 bp, Homo sapien
ttaattaaagatgcaggcattaatcaaacattt

SEQ ID NO: 853169 - DNA, 33 bp, Homo sapien
ttctatccacatccaaagtgtctctgagaagtc

SEQ ID NO: 853170 - DNA, 33 bp, Homo sapien
ttctatccacatccaaggtgtctctgagaagtc

SEQ ID NO: 853171 - DNA, 33 bp, Homo sapien
agaattctatattatgcatagcaaatgagccaa

SEQ ID NO: 853172 - DNA, 33 bp, Homo sapien
agaattctatattatgtatagcaaatgagccaa

SEQ ID NO: 853173 - DNA, 33 bp, Homo sapien
taagacctcctggcagcatctttcattagatgt

SEQ ID NO: 853174 - DNA, 33 bp, Homo sapien
taagacctcctggcagtatctttcattagatgt

SEQ ID NO: 853175 - DNA, 33 bp, Homo sapien
ggagctgaaaatggtcacatagccatgggaatg

SEQ ID NO: 853176 - DNA, 33 bp, Homo sapien
ggagctgaaaatggtcgcatagccatgggaatg

SEQ ID NO: 853177 - DNA, 33 bp, Homo sapien
ttggatgttaggaatactataaggctgaagaat

SEQ ID NO: 853178 - DNA, 33 bp, Homo sapien
ttggatgttaggaatattataaggctgaagaat

SEQ ID NO: 853179 - DNA, 33 bp, Homo sapien
agtgggaccaaaagaccggcctgcatggcattc

SEQ ID NO: 853180 - DNA, 33 bp, Homo sapien
agtgggaccaaaagactggcctgcatggcattc

SEQ ID NO: 853181 - DNA, 33 bp, Homo sapien
aacatgttgagaagaacgaatgcttatccttct

SEQ ID NO: 853182 - DNA, 33 bp, Homo sapien
aacatgttgagaagaatgaatgcttatccttct

SEQ ID NO: 853183 - DNA, 33 bp, Homo sapien
tttacttcagtttctaataacctgcacagaatg

SEQ ID NO: 853184 - DNA, 33 bp, Homo sapien
tttacttcagtttctactaacctgcacagaatg

SEQ ID NO: 853185 - DNA, 33 bp, Homo sapien
agtgttatatttaagggatatggaagtgtttgc

SEQ ID NO: 853186 - DNA, 33 bp, Homo sapien
agtgttatatttaaggtatatggaagtgtttgc

SEQ ID NO: 853187 - DNA, 33 bp, Homo sapien
ttattgagggtgttataaaggatctctgtacta

SEQ ID NO: 853188 - DNA, 33 bp, Homo sapien
ttattgagggtgttatgaaggatctctgtacta

SEQ ID NO: 853189 - DNA, 33 bp, Homo sapien
ctgcaagcctttaagacggcaagtcagttacat

SEQ ID NO: 853190 - DNA, 33 bp, Homo sapien
ctgcaagcctttaagatggcaagtcagttacat

SEQ ID NO: 853191 - DNA, 33 bp, Homo sapien
caaggccaaagcagaactgagtatgctacattg

SEQ ID NO: 853192 - DNA, 33 bp, Homo sapien
caaggccaaagcagaattgagtatgctacattg

SEQ ID NO: 853193 - DNA, 33 bp, Homo sapien
cagagcatctcattacactgtgaatatacacgt

SEQ ID NO: 853194 - DNA, 33 bp, Homo sapien
cagagcatctcattaccctgtgaatatacacgt

SEQ ID NO: 853195 - DNA, 33 bp, Homo sapien
gcatgcaatgttgcaccattccattttcagctc

SEQ ID NO: 853196 - DNA, 33 bp, Homo sapien
gcatgcaatgttgcacgattccattttcagctc

SEQ ID NO: 853197 - DNA, 33 bp, Homo sapien
gcttagatttgagcaaagcagctagactgggga

SEQ ID NO: 853198 - DNA, 33 bp, Homo sapien
gcttagatttgagcaaggcagctagactgggga

SEQ ID NO: 853199 - DNA, 33 bp, Homo sapien
taggtgaggctatcaggacagaagggatcagta

SEQ ID NO: 853200 - DNA, 33 bp, Homo sapien
taggtgaggctatcagtacagaagggatcagta

SEQ ID NO: 853201 - DNA, 33 bp, Homo sapien
aaggctgctaaatacaaaagacatatgtgtata

SEQ ID NO: 853202 - DNA, 33 bp, Homo sapien
aaggctgctaaatacagaagacatatgtgtata

SEQ ID NO: 853203 - DNA, 33 bp, Homo sapien
atgagcaaactgaatcactggtagtctaaataa

SEQ ID NO: 853204 - DNA, 33 bp, Homo sapien
atgagcaaactgaatcgctggtagtctaaataa

SEQ ID NO: 853205 - DNA, 33 bp, Homo sapien
aaatgcctcagcctacaagtctggagattggga

SEQ ID NO: 853206 - DNA, 33 bp, Homo sapien
aaatgcctcagcctacgagtctggagattggga

SEQ ID NO: 853207 - DNA, 33 bp, Homo sapien
agtccacctactagcaacccggcttctactcca

SEQ ID NO: 853208 - DNA, 33 bp, Homo sapien
agtccacctactagcagcccggcttctactcca

SEQ ID NO: 853209 - DNA, 33 bp, Homo sapien
acaagaggctctgtaacaacaatgtcagggtag

SEQ ID NO: 853210 - DNA, 33 bp, Homo sapien
acaagaggctctgtaagaacaatgtcagggtag

SEQ ID NO: 853211 - DNA, 33 bp, Homo sapien
atccctcccacagtaacctcagaggccacatgc

SEQ ID NO: 853212 - DNA, 33 bp, Homo sapien
atccctcccacagtaatctcagaggccacatgc

SEQ ID NO: 853213 - DNA, 33 bp, Homo sapien
tccactgggggaagaacggaacaattatgaaaa

SEQ ID NO: 853214 - DNA, 33 bp, Homo sapien
tccactgggggaagaatggaacaattatgaaaa

SEQ ID NO: 853215 - DNA, 33 bp, Homo sapien
tggaagtggaagggaaacctgatttgtagtatt

SEQ ID NO: 853216 - DNA, 33 bp, Homo sapien
tggaagtggaagggaaccctgatttgtagtatt

SEQ ID NO: 853217 - DNA, 33 bp, Homo sapien
ctgatgggtttccttcaaaagaaaatagttact

SEQ ID NO: 853218 - DNA, 33 bp, Homo sapien
ctgatgggtttccttccaaagaaaatagttact

SEQ ID NO: 853219 - DNA, 33 bp, Homo sapien
cctttacctacgccaacggaaaggcagtgaaca

SEQ ID NO: 853220 - DNA, 33 bp, Homo sapien
cctttacctacgccaatggaaaggcagtgaaca

SEQ ID NO: 853221 - DNA, 33 bp, Homo sapien
tgatagggtagaagaaagaatggagtttgtcta

SEQ ID NO: 853222 - DNA, 33 bp, Homo sapien
tgatagggtagaagaaggaatggagtttgtcta

SEQ ID NO: 853223 - DNA, 33 bp, Homo sapien
agggaccagccaagaaatgtgaatagtgtacag

SEQ ID NO: 853224 - DNA, 33 bp, Homo sapien
agggaccagccaagaattgtgaatagtgtacag

SEQ ID NO: 853225 - DNA, 33 bp, Homo sapien
agtgacctattaaagaaaaatctgtagctgtaa

SEQ ID NO: 853226 - DNA, 33 bp, Homo sapien
agtgacctattaaagagaaatctgtagctgtaa

SEQ ID NO: 853227 - DNA, 33 bp, Homo sapien
ttcttctatgtgtttcccatggcttgatagctc

SEQ ID NO: 853228 - DNA, 33 bp, Homo sapien
ttcttctatgtgtttctcatggcttgatagctc

SEQ ID NO: 853229 - DNA, 33 bp, Homo sapien
gtttctaaggtacatcacttttgtagcatgtat

SEQ ID NO: 853230 - DNA, 33 bp, Homo sapien
gtttctaaggtacatcccttttgtagcatgtat

SEQ ID NO: 853231 - DNA, 33 bp, Homo sapien
taataccaacaactaaagtttgcaagcacttaa

SEQ ID NO: 853232 - DNA, 33 bp, Homo sapien
taataccaacaactaaggtttgcaagcacttaa

SEQ ID NO: 853233 - DNA, 33 bp, Homo sapien
cagaaagagcttcctgaatgactagagaggaaa

SEQ ID NO: 853234 - DNA, 33 bp, Homo sapien
cagaaagagcttcctgtatgactagagaggaaa

SEQ ID NO: 853235 - DNA, 33 bp, Homo sapien
ctgcatccacactagcaaaattctgataccaaa

SEQ ID NO: 853236 - DNA, 33 bp, Homo sapien
ctgcatccacactagcgaaattctgataccaaa

SEQ ID NO: 853237 - DNA, 33 bp, Homo sapien
ctctttgtacatatagaccatttttacggttac

SEQ ID NO: 853238 - DNA, 33 bp, Homo sapien
ctctttgtacatataggccatttttacggttac

SEQ ID NO: 853239 - DNA, 33 bp, Homo sapien
aaatgaggcctgcagaatactagttccacagaa

SEQ ID NO: 853240 - DNA, 33 bp, Homo sapien
aaatgaggcctgcagagtactagttccacagaa

SEQ ID NO: 853241 - DNA, 33 bp, Homo sapien
tattgtccacttcacaatctccaagcccccagc

SEQ ID NO: 853242 - DNA, 33 bp, Homo sapien
tattgtccacttcacactctccaagcccccagc

SEQ ID NO: 853243 - DNA, 33 bp, Homo sapien
acttgattttcctgccaaccttcattatgttac

SEQ ID NO: 853244 - DNA, 33 bp, Homo sapien
acttgattttcctgcctaccttcattatgttac

SEQ ID NO: 853245 - DNA, 33 bp, Homo sapien
ttactgcactgcataacctagcttatactgatt

SEQ ID NO: 853246 - DNA, 33 bp, Homo sapien
ttactgcactgcataatctagcttatactgatt

SEQ ID NO: 853247 - DNA, 33 bp, Homo sapien
gaacccagccaacatacagaatcttatacaatg

SEQ ID NO: 853248 - DNA, 33 bp, Homo sapien
gaacccagccaacatatagaatcttatacaatg

SEQ ID NO: 853249 - DNA, 33 bp, Homo sapien
tgtgtcagtagcttgaaccatgacaagcagctg

SEQ ID NO: 853250 - DNA, 33 bp, Homo sapien
tgtgtcagtagcttgagccatgacaagcagctg

SEQ ID NO: 853251 - DNA, 33 bp, Homo sapien
ccaatgattttcttgactatttacacttggggt

SEQ ID NO: 853252 - DNA, 33 bp, Homo sapien
ccaatgattttcttgagtatttacacttggggt

SEQ ID NO: 853253 - DNA, 33 bp, Homo sapien
tttagtaagacaattcacctaacagataagaaa

SEQ ID NO: 853254 - DNA, 33 bp, Homo sapien
tttagtaagacaattcgcctaacagataagaaa

SEQ ID NO: 853255 - DNA, 33 bp, Homo sapien
aactgttacattaaaaactttcttcactagttg

SEQ ID NO: 853256 - DNA, 33 bp, Homo sapien
aactgttacattaaaagctttcttcactagttg

SEQ ID NO: 853257 - DNA, 33 bp, Homo sapien
atatggattaaaaaaaggtagggctgtgcattg

SEQ ID NO: 853258 - DNA, 33 bp, Homo sapien
atatggattaaaaaaatgtagggctgtgcattg

SEQ ID NO: 853259 - DNA, 33 bp, Homo sapien
ttgaatgttcctggacacaatttggtcaactaa

SEQ ID NO: 853260 - DNA, 33 bp, Homo sapien
ttgaatgttcctggacgcaatttggtcaactaa

SEQ ID NO: 853261 - DNA, 33 bp, Homo sapien
taagtttatttactgccgaacagatattgtaac

SEQ ID NO: 853262 - DNA, 33 bp, Homo sapien
taagtttatttactgctgaacagatattgtaac

SEQ ID NO: 853263 - DNA, 33 bp, Homo sapien
aactacagctgatcaacagtactaatcaaatga

SEQ ID NO: 853264 - DNA, 33 bp, Homo sapien
aactacagctgatcaatagtactaatcaaatga

SEQ ID NO: 853265 - DNA, 33 bp, Homo sapien
tttgtactttttcagacaccataattgtgaacc

SEQ ID NO: 853266 - DNA, 33 bp, Homo sapien
tttgtactttttcagataccataattgtgaacc

SEQ ID NO: 853267 - DNA, 33 bp, Homo sapien
gaacgctgtgttaccactgatgaaaacaacatt

SEQ ID NO: 853268 - DNA, 33 bp, Homo sapien
gaacgctgtgttaccagtgatgaaaacaacatt

SEQ ID NO: 853269 - DNA, 33 bp, Homo sapien
agaaagatgattatgaagtcatgtctacgagct

SEQ ID NO: 853270 - DNA, 33 bp, Homo sapien
agaaagatgattatgaggtcatgtctacgagct

SEQ ID NO: 853271 - DNA, 33 bp, Homo sapien
ttagacaaaaaaatcactgataaatgacaaacc

SEQ ID NO: 853272 - DNA, 33 bp, Homo sapien
ttagacaaaaaaatcagtgataaatgacaaacc

SEQ ID NO: 853273 - DNA, 33 bp, Homo sapien
tttacttggcttgttaaaatagtcttccaactt

SEQ ID NO: 853274 - DNA, 33 bp, Homo sapien
tttacttggcttgttagaatagtcttccaactt

SEQ ID NO: 853275 - DNA, 33 bp, Homo sapien
gccctataatccaaacagcaatactttgtagtg

SEQ ID NO: 853276 - DNA, 33 bp, Homo sapien
gccctataatccaaaccgcaatactttgtagtg

SEQ ID NO: 853277 - DNA, 33 bp, Homo sapien
ggaaactcattgcttccctttctaaaaataaat

SEQ ID NO: 853278 - DNA, 33 bp, Homo sapien
ggaaactcattgcttctctttctaaaaataaat

SEQ ID NO: 853279 - DNA, 33 bp, Homo sapien
agagaaggaagaagacgggaagggtgaagagca

SEQ ID NO: 853280 - DNA, 33 bp, Homo sapien
agagaaggaagaagactggaagggtgaagagca

SEQ ID NO: 853281 - DNA, 33 bp, Homo sapien
gctctgcatcccaggaactgttaaactctctct

SEQ ID NO: 853282 - DNA, 33 bp, Homo sapien
gctctgcatcccaggagctgttaaactctctct

SEQ ID NO: 853283 - DNA, 33 bp, Homo sapien
ctctgatggaaaagtccaggtgttaagaggttt

SEQ ID NO: 853284 - DNA, 33 bp, Homo sapien
ctctgatggaaaagtcgaggtgttaagaggttt

SEQ ID NO: 853285 - DNA, 33 bp, Homo sapien
tgagggggaggagataaatggaatcttggctgg

SEQ ID NO: 853286 - DNA, 33 bp, Homo sapien
tgagggggaggagatagatggaatcttggctgg

SEQ ID NO: 853287 - DNA, 33 bp, Homo sapien
tgatacttgccaaatcaatcgcctgcaaattag

SEQ ID NO: 853288 - DNA, 33 bp, Homo sapien
tgatacttgccaaatcgatcgcctgcaaattag

SEQ ID NO: 853289 - DNA, 33 bp, Homo sapien
aaccacaggaaaacaaattacatcagttaaggc

SEQ ID NO: 853290 - DNA, 33 bp, Homo sapien
aaccacaggaaaacaatttacatcagttaaggc

SEQ ID NO: 853291 - DNA, 33 bp, Homo sapien
cttcagaacaaagtacacaggagatattaagca

SEQ ID NO: 853292 - DNA, 33 bp, Homo sapien
cttcagaacaaagtacccaggagatattaagca

SEQ ID NO: 853293 - DNA, 33 bp, Homo sapien
gagaaagcctagtggactaaatggcagagctgg

SEQ ID NO: 853294 - DNA, 33 bp, Homo sapien
gagaaagcctagtggagtaaatggcagagctgg

SEQ ID NO: 853295 - DNA, 33 bp, Homo sapien
gctcatattttaaataagagtggcaaagagaag

SEQ ID NO: 853296 - DNA, 33 bp, Homo sapien
gctcatattttaaataggagtggcaaagagaag

SEQ ID NO: 853297 - DNA, 33 bp, Homo sapien
gagaaagtcccaacaaagatgagacaagggtca

SEQ ID NO: 853298 - DNA, 33 bp, Homo sapien
gagaaagtcccaacaaggatgagacaagggtca

SEQ ID NO: 853299 - DNA, 33 bp, Homo sapien
gggcactgaggacataaaacctaaaggaatgtg

SEQ ID NO: 853300 - DNA, 33 bp, Homo sapien
gggcactgaggacatagaacctaaaggaatgtg

SEQ ID NO: 853301 - DNA, 33 bp, Homo sapien
tctcctcacttccaaacttactcctctctattt

SEQ ID NO: 853302 - DNA, 33 bp, Homo sapien
tctcctcacttccaaatttactcctctctattt

SEQ ID NO: 853303 - DNA, 33 bp, Homo sapien
gataatagtaatcctgcaagaatgctgttgtgt

SEQ ID NO: 853304 - DNA, 33 bp, Homo sapien
gataatagtaatcctgtaagaatgctgttgtgt

SEQ ID NO: 853305 - DNA, 33 bp, Homo sapien
ggcagaaaatatgtctcaatgtgttcagctggc

SEQ ID NO: 853306 - DNA, 33 bp, Homo sapien
ggcagaaaatatgtcttaatgtgttcagctggc

SEQ ID NO: 853307 - DNA, 33 bp, Homo sapien
agaggggatatgagctaagaaatggattctcta

SEQ ID NO: 853308 - DNA, 33 bp, Homo sapien
agaggggatatgagctgagaaatggattctcta

SEQ ID NO: 853309 - DNA, 33 bp, Homo sapien
gagcctgctctccaagaacagggcaaggtggga

SEQ ID NO: 853310 - DNA, 33 bp, Homo sapien
gagcctgctctccaaggacagggcaaggtggga

SEQ ID NO: 853311 - DNA, 33 bp, Homo sapien
atgtttgtttaccaaaggaggaaatgaatgatt

SEQ ID NO: 853312 - DNA, 33 bp, Homo sapien
atgtttgtttaccaaatgaggaaatgaatgatt

SEQ ID NO: 853313 - DNA, 33 bp, Homo sapien
ctggcattaagtgctaagaagtatgagtcagaa

SEQ ID NO: 853314 - DNA, 33 bp, Homo sapien
ctggcattaagtgctaggaagtatgagtcagaa

SEQ ID NO: 853315 - DNA, 33 bp, Homo sapien
gggacaaaaatccagacgtgaagtggaggagag

SEQ ID NO: 853316 - DNA, 33 bp, Homo sapien
gggacaaaaatccagatgtgaagtggaggagag

SEQ ID NO: 853317 - DNA, 33 bp, Homo sapien
taggtaacacatgatcaatgaaagagcaggctc

SEQ ID NO: 853318 - DNA, 33 bp, Homo sapien
taggtaacacatgatctatgaaagagcaggctc

SEQ ID NO: 853319 - DNA, 33 bp, Homo sapien
aacacatgtctactctaaacactacaaacttgg

SEQ ID NO: 853320 - DNA, 33 bp, Homo sapien
aacacatgtctactctgaacactacaaacttgg

SEQ ID NO: 853321 - DNA, 33 bp, Homo sapien
accttagcactattcaaggcattttgtagggca

SEQ ID NO: 853322 - DNA, 33 bp, Homo sapien
accttagcactattcagggcattttgtagggca

SEQ ID NO: 853323 - DNA, 33 bp, Homo sapien
attcaccagacaataccataggcaaggaaacat

SEQ ID NO: 853324 - DNA, 33 bp, Homo sapien
attcaccagacaatactataggcaaggaaacat

SEQ ID NO: 853325 - DNA, 33 bp, Homo sapien
tgctagaaaggtttgcaagtactgattctggga

SEQ ID NO: 853326 - DNA, 33 bp, Homo sapien
tgctagaaaggtttgccagtactgattctggga

SEQ ID NO: 853327 - DNA, 33 bp, Homo sapien
acaccaatttgcagaaatctagttgaaaaatgt

SEQ ID NO: 853328 - DNA, 33 bp, Homo sapien
acaccaatttgcagaagtctagttgaaaaatgt

SEQ ID NO: 853329 - DNA, 33 bp, Homo sapien
gaaatgtaaagaaagacattgatcactaccata

SEQ ID NO: 853330 - DNA, 33 bp, Homo sapien
gaaatgtaaagaaagagattgatcactaccata

SEQ ID NO: 853331 - DNA, 33 bp, Homo sapien
ccttgtattgttaattaaaggcgaaatttgggc

SEQ ID NO: 853332 - DNA, 33 bp, Homo sapien
ccttgtattgttaatttaaggcgaaatttgggc

SEQ ID NO: 853333 - DNA, 33 bp, Homo sapien
tgtagtgacaggtgacagaactctcagatgctc

SEQ ID NO: 853334 - DNA, 33 bp, Homo sapien
tgtagtgacaggtgacggaactctcagatgctc

SEQ ID NO: 853335 - DNA, 33 bp, Homo sapien
tatctccctattccaagagattcaaagagaggt

SEQ ID NO: 853336 - DNA, 33 bp, Homo sapien
tatctccctattccaatagattcaaagagaggt

SEQ ID NO: 853337 - DNA, 33 bp, Homo sapien
aaattccacatgagtacagctagaggaaatctg

SEQ ID NO: 853338 - DNA, 33 bp, Homo sapien
aaattccacatgagtagagctagaggaaatctg

SEQ ID NO: 853339 - DNA, 33 bp, Homo sapien
taactttgctagccacaggggaatcttctattt

SEQ ID NO: 853340 - DNA, 33 bp, Homo sapien
taactttgctagccacgggggaatcttctattt

SEQ ID NO: 853341 - DNA, 33 bp, Homo sapien
aatggggtggatatcacagtccttcctgacttt

SEQ ID NO: 853342 - DNA, 33 bp, Homo sapien
aatggggtggatatcatagtccttcctgacttt

SEQ ID NO: 853343 - DNA, 33 bp, Homo sapien
ttgatggtatatagtaaggagcagactagtaag

SEQ ID NO: 853344 - DNA, 33 bp, Homo sapien
ttgatggtatatagtagggagcagactagtaag

SEQ ID NO: 853345 - DNA, 33 bp, Homo sapien
atgagcttctactaccaagatgctttggaaaac

SEQ ID NO: 853346 - DNA, 33 bp, Homo sapien
atgagcttctactaccgagatgctttggaaaac

SEQ ID NO: 853347 - DNA, 33 bp, Homo sapien
aagtggcaaataaatcggatacccaatttcaac

SEQ ID NO: 853348 - DNA, 33 bp, Homo sapien
aagtggcaaataaatctgatacccaatttcaac

SEQ ID NO: 853349 - DNA, 33 bp, Homo sapien
tgagaagtaggagcatcaggatatctggtacct

SEQ ID NO: 853350 - DNA, 33 bp, Homo sapien
tgagaagtaggagcattaggatatctggtacct

SEQ ID NO: 853351 - DNA, 33 bp, Homo sapien
actatctcctatttgagctctaaggaccttcca

SEQ ID NO: 853352 - DNA, 33 bp, Homo sapien
actatctcctatttgatctctaaggaccttcca

SEQ ID NO: 853353 - DNA, 33 bp, Homo sapien
attcaaaaagacacaagtgttttctcgaggatt

SEQ ID NO: 853354 - DNA, 33 bp, Homo sapien
attcaaaaagacacaattgttttctcgaggatt

SEQ ID NO: 853355 - DNA, 33 bp, Homo sapien
agtattggcatgcgtgcagtatgtttaagcaaa

SEQ ID NO: 853356 - DNA, 33 bp, Homo sapien
agtattggcatgcgtgtagtatgtttaagcaaa

SEQ ID NO: 853357 - DNA, 33 bp, Homo sapien
gctcatatttacaaaactgaaaggaaaggatga

SEQ ID NO: 853358 - DNA, 33 bp, Homo sapien
gctcatatttacaaaattgaaaggaaaggatga

SEQ ID NO: 853359 - DNA, 33 bp, Homo sapien
cttccagtactttcagaccaataaaaatgcagt

SEQ ID NO: 853360 - DNA, 33 bp, Homo sapien
cttccagtactttcagtccaataaaaatgcagt

SEQ ID NO: 853361 - DNA, 33 bp, Homo sapien
taaacttgattctgcaaagacagtgtacatact

SEQ ID NO: 853362 - DNA, 33 bp, Homo sapien
taaacttgattctgcacagacagtgtacatact

SEQ ID NO: 853363 - DNA, 33 bp, Homo sapien
ttgctttatgtccaaactgatctgttgcaatgt

SEQ ID NO: 853364 - DNA, 33 bp, Homo sapien
ttgctttatgtccaaattgatctgttgcaatgt

SEQ ID NO: 853365 - DNA, 33 bp, Homo sapien
tatagggtcttagatacactggattgatagtta

SEQ ID NO: 853366 - DNA, 33 bp, Homo sapien
tatagggtcttagatatactggattgatagtta

SEQ ID NO: 853367 - DNA, 33 bp, Homo sapien
agctaaccttgggaaacataatatagggtctta

SEQ ID NO: 853368 - DNA, 33 bp, Homo sapien
agctaaccttgggaaatataatatagggtctta

SEQ ID NO: 853369 - DNA, 33 bp, Homo sapien
cttttcagtgagctaacgcactctggctattct

SEQ ID NO: 853370 - DNA, 33 bp, Homo sapien
cttttcagtgagctaatgcactctggctattct

SEQ ID NO: 853371 - DNA, 33 bp, Homo sapien
acttcctttgtacctccccttgtagctgtagga

SEQ ID NO: 853372 - DNA, 33 bp, Homo sapien
acttcctttgtacctctccttgtagctgtagga

SEQ ID NO: 853373 - DNA, 33 bp, Homo sapien
gaggagcagcataagacggaagcagctgaatga

SEQ ID NO: 853374 - DNA, 33 bp, Homo sapien
gaggagcagcataagatggaagcagctgaatga

SEQ ID NO: 853375 - DNA, 33 bp, Homo sapien
aatttgaacacagacacagaggtaagatggaaa

SEQ ID NO: 853376 - DNA, 33 bp, Homo sapien
aatttgaacacagacatagaggtaagatggaaa

SEQ ID NO: 853377 - DNA, 33 bp, Homo sapien
atattctactccaacaatcatccctctgaagag

SEQ ID NO: 853378 - DNA, 33 bp, Homo sapien
atattctactccaacactcatccctctgaagag

SEQ ID NO: 853379 - DNA, 33 bp, Homo sapien
gttgtataccaatgcaataagtatgtacaaagc

SEQ ID NO: 853380 - DNA, 33 bp, Homo sapien
gttgtataccaatgcagtaagtatgtacaaagc

SEQ ID NO: 853381 - DNA, 33 bp, Homo sapien
atacccatgtaacaaaacttcatgtcatataca

SEQ ID NO: 853382 - DNA, 33 bp, Homo sapien
atacccatgtaacaaaccttcatgtcatataca

SEQ ID NO: 853383 - DNA, 33 bp, Homo sapien
tgaggaagcaatgccagtaaccagaatccaggg

SEQ ID NO: 853384 - DNA, 33 bp, Homo sapien
tgaggaagcaatgccattaaccagaatccaggg

SEQ ID NO: 853385 - DNA, 33 bp, Homo sapien
tactgtgaatattaaacaaaacaatgggcactc

SEQ ID NO: 853386 - DNA, 33 bp, Homo sapien
tactgtgaatattaaataaaacaatgggcactc

SEQ ID NO: 853387 - DNA, 33 bp, Homo sapien
acaatgagattctcagcatggaagttaggctag

SEQ ID NO: 853388 - DNA, 33 bp, Homo sapien
acaatgagattctcagtatggaagttaggctag

SEQ ID NO: 853389 - DNA, 33 bp, Homo sapien
ttccacaaaacatgaaccttcactctctgaaat

SEQ ID NO: 853390 - DNA, 33 bp, Homo sapien
ttccacaaaacatgaatcttcactctctgaaat

SEQ ID NO: 853391 - DNA, 33 bp, Homo sapien
gctcagattgagtgaccacgccatttctgaaaa

SEQ ID NO: 853392 - DNA, 33 bp, Homo sapien
gctcagattgagtgacgacgccatttctgaaaa

SEQ ID NO: 853393 - DNA, 33 bp, Homo sapien
ttccctatttaataaacgttgcaaaacctggct

SEQ ID NO: 853394 - DNA, 33 bp, Homo sapien
ttccctatttaataaatgttgcaaaacctggct

SEQ ID NO: 853395 - DNA, 33 bp, Homo sapien
tgaagatatccacagactagtaaaagcaggatg

SEQ ID NO: 853396 - DNA, 33 bp, Homo sapien
tgaagatatccacagagtagtaaaagcaggatg

SEQ ID NO: 853397 - DNA, 33 bp, Homo sapien
tttatatttggaagaacgtatgccattagaatt

SEQ ID NO: 853398 - DNA, 33 bp, Homo sapien
tttatatttggaagaatgtatgccattagaatt

SEQ ID NO: 853399 - DNA, 33 bp, Homo sapien
gatccaaataatcaccaagagtaggcccattat

SEQ ID NO: 853400 - DNA, 33 bp, Homo sapien
gatccaaataatcacccagagtaggcccattat

SEQ ID NO: 853401 - DNA, 33 bp, Homo sapien
gtaaatgagccagagcaagaaccatttgaattc

SEQ ID NO: 853402 - DNA, 33 bp, Homo sapien
gtaaatgagccagagctagaaccatttgaattc

SEQ ID NO: 853403 - DNA, 33 bp, Homo sapien
taagcaattctctcaactaccctgtaaagtcca

SEQ ID NO: 853404 - DNA, 33 bp, Homo sapien
taagcaattctctcaattaccctgtaaagtcca

SEQ ID NO: 853405 - DNA, 33 bp, Homo sapien
tttcaacctcttaaaaacacttgaatttctctg

SEQ ID NO: 853406 - DNA, 33 bp, Homo sapien
tttcaacctcttaaaaccacttgaatttctctg

SEQ ID NO: 853407 - DNA, 33 bp, Homo sapien
ttatgtttccagtctacccaaataatcttttca

SEQ ID NO: 853408 - DNA, 33 bp, Homo sapien
ttatgtttccagtctagccaaataatcttttca

SEQ ID NO: 853409 - DNA, 33 bp, Homo sapien
tttgactgaatttacccatgacttgagaaaatc

SEQ ID NO: 853410 - DNA, 33 bp, Homo sapien
tttgactgaatttacctatgacttgagaaaatc

SEQ ID NO: 853411 - DNA, 33 bp, Homo sapien
agtaatctgttcaggggacaaagactattcgag

SEQ ID NO: 853412 - DNA, 33 bp, Homo sapien
agtaatctgttcagggtacaaagactattcgag

SEQ ID NO: 853413 - DNA, 33 bp, Homo sapien
aagtacccaaactactgaggttgaaatagtcat

SEQ ID NO: 853414 - DNA, 33 bp, Homo sapien
aagtacccaaactacttaggttgaaatagtcat

SEQ ID NO: 853415 - DNA, 33 bp, Homo sapien
gatagatttattccagaaaagacaataaggtcc

SEQ ID NO: 853416 - DNA, 33 bp, Homo sapien
gatagatttattccagcaaagacaataaggtcc

SEQ ID NO: 853417 - DNA, 33 bp, Homo sapien
cacagacaataccttaacatttttatggacctt

SEQ ID NO: 853418 - DNA, 33 bp, Homo sapien
cacagacaataccttagcatttttatggacctt

SEQ ID NO: 853419 - DNA, 33 bp, Homo sapien
ctgaaaacaatagccaaataggaacagtaaaga

SEQ ID NO: 853420 - DNA, 33 bp, Homo sapien
ctgaaaacaatagccagataggaacagtaaaga

SEQ ID NO: 853421 - DNA, 33 bp, Homo sapien
tttaagccacctagtcgatggtactttcttatg

SEQ ID NO: 853422 - DNA, 33 bp, Homo sapien
tttaagccacctagtctatggtactttcttatg

SEQ ID NO: 853423 - DNA, 33 bp, Homo sapien
ctgacaggcctgtgacaaaaatcagaaatatct

SEQ ID NO: 853424 - DNA, 33 bp, Homo sapien
ctgacaggcctgtgacgaaaatcagaaatatct

SEQ ID NO: 853425 - DNA, 33 bp, Homo sapien
aggaagcttgatgaggaaagtgagaactgggtt

SEQ ID NO: 853426 - DNA, 33 bp, Homo sapien
aggaagcttgatgagggaagtgagaactgggtt

SEQ ID NO: 853427 - DNA, 33 bp, Homo sapien
aaattgcagaaatatgaatttatctaagtcgat

SEQ ID NO: 853428 - DNA, 33 bp, Homo sapien
aaattgcagaaatatgcatttatctaagtcgat

SEQ ID NO: 853429 - DNA, 33 bp, Homo sapien
gaagccaagataataactgtcatataccataat

SEQ ID NO: 853430 - DNA, 33 bp, Homo sapien
gaagccaagataataattgtcatataccataat

SEQ ID NO: 853431 - DNA, 33 bp, Homo sapien
ctcctacatgttcttaacccccacagaaggcat

SEQ ID NO: 853432 - DNA, 33 bp, Homo sapien
ctcctacatgttcttagcccccacagaaggcat

SEQ ID NO: 853433 - DNA, 33 bp, Homo sapien
tcattttgtaatgtccaaagtgtatcctcagat

SEQ ID NO: 853434 - DNA, 33 bp, Homo sapien
tcattttgtaatgtccgaagtgtatcctcagat

SEQ ID NO: 853435 - DNA, 33 bp, Homo sapien
tgaagacatccatgacaaccacactgtaatgaa

SEQ ID NO: 853436 - DNA, 33 bp, Homo sapien
tgaagacatccatgacgaccacactgtaatgaa

SEQ ID NO: 853437 - DNA, 33 bp, Homo sapien
aaaaattaactgaagacggaatgaagacttaaa

SEQ ID NO: 853438 - DNA, 33 bp, Homo sapien
aaaaattaactgaagatggaatgaagacttaaa

SEQ ID NO: 853439 - DNA, 33 bp, Homo sapien
gggtttccttctttgacgagggttggaggaagg

SEQ ID NO: 853440 - DNA, 33 bp, Homo sapien
gggtttccttctttgatgagggttggaggaagg

SEQ ID NO: 853441 - DNA, 33 bp, Homo sapien
cacacgcttaaaacatgaatttgcccaaagact

SEQ ID NO: 853442 - DNA, 33 bp, Homo sapien
cacacgcttaaaacattaatttgcccaaagact

SEQ ID NO: 853443 - DNA, 33 bp, Homo sapien
aaatacgctttattgaccccccttctccttctc

SEQ ID NO: 853444 - DNA, 33 bp, Homo sapien
aaatacgctttattgatcccccttctccttctc

SEQ ID NO: 853445 - DNA, 33 bp, Homo sapien
aacagaaataaacaaaccttgctctgacctgtc

SEQ ID NO: 853446 - DNA, 33 bp, Homo sapien
aacagaaataaacaaatcttgctctgacctgtc

SEQ ID NO: 853447 - DNA, 33 bp, Homo sapien
tcaaagccaggggaagacatttatctgggtttt

SEQ ID NO: 853448 - DNA, 33 bp, Homo sapien
tcaaagccaggggaaggcatttatctgggtttt

SEQ ID NO: 853449 - DNA, 33 bp, Homo sapien
taaggattcaatgacactatatagagacattca

SEQ ID NO: 853450 - DNA, 33 bp, Homo sapien
taaggattcaatgacattatatagagacattca

SEQ ID NO: 853451 - DNA, 33 bp, Homo sapien
gttaagagagtaagacagcttttttgttttttt

SEQ ID NO: 853452 - DNA, 33 bp, Homo sapien
gttaagagagtaagactgcttttttgttttttt

SEQ ID NO: 853453 - DNA, 33 bp, Homo sapien
attaaaaatactggaaatgaagcagcaaataga

SEQ ID NO: 853454 - DNA, 33 bp, Homo sapien
attaaaaatactggaagtgaagcagcaaataga

SEQ ID NO: 853455 - DNA, 33 bp, Homo sapien
agcatttgcgaaatgacaatgtgaggctcggtt

SEQ ID NO: 853456 - DNA, 33 bp, Homo sapien
agcatttgcgaaatgataatgtgaggctcggtt

SEQ ID NO: 853457 - DNA, 33 bp, Homo sapien
cagagggaaagtagaactagaatcaaaactgcc

SEQ ID NO: 853458 - DNA, 33 bp, Homo sapien
cagagggaaagtagaattagaatcaaaactgcc

SEQ ID NO: 853459 - DNA, 33 bp, Homo sapien
aaaactttggcaagagcccagaagatttgttta

SEQ ID NO: 853460 - DNA, 33 bp, Homo sapien
aaaactttggcaagagtccagaagatttgttta

SEQ ID NO: 853461 - DNA, 33 bp, Homo sapien
ccagctccttgtactacaattcaataaaaactt

SEQ ID NO: 853462 - DNA, 33 bp, Homo sapien
ccagctccttgtactataattcaataaaaactt

SEQ ID NO: 853463 - DNA, 33 bp, Homo sapien
taggctggatctaagacaagctgaaattaccat

SEQ ID NO: 853464 - DNA, 33 bp, Homo sapien
taggctggatctaagataagctgaaattaccat

SEQ ID NO: 853465 - DNA, 33 bp, Homo sapien
tgctacatttgctttgcatagcgttgtaaaatt

SEQ ID NO: 853466 - DNA, 33 bp, Homo sapien
tgctacatttgctttgtatagcgttgtaaaatt

SEQ ID NO: 853467 - DNA, 33 bp, Homo sapien
tgggtaaagcattaagaaagagacttttgagtc

SEQ ID NO: 853468 - DNA, 33 bp, Homo sapien
tgggtaaagcattaaggaagagacttttgagtc

SEQ ID NO: 853469 - DNA, 33 bp, Homo sapien
ttgttagcaatctggaatcaaaagagcaaagca

SEQ ID NO: 853470 - DNA, 33 bp, Homo sapien
ttgttagcaatctggagtcaaaagagcaaagca

SEQ ID NO: 853471 - DNA, 33 bp, Homo sapien
tgagagcagaacagaagaagatagaatcacaaa

SEQ ID NO: 853472 - DNA, 33 bp, Homo sapien
tgagagcagaacagaataagatagaatcacaaa

SEQ ID NO: 853473 - DNA, 33 bp, Homo sapien
caatctattctattcaatctattcagagcaaga

SEQ ID NO: 853474 - DNA, 33 bp, Homo sapien
caatctattctattcagtctattcagagcaaga

SEQ ID NO: 853475 - DNA, 33 bp, Homo sapien
tttattgcgtctaaagaactaatctcttaaaga

SEQ ID NO: 853476 - DNA, 33 bp, Homo sapien
tttattgcgtctaaagcactaatctcttaaaga

SEQ ID NO: 853477 - DNA, 33 bp, Homo sapien
cacaaatacactctcaagaactaaaggatggct

SEQ ID NO: 853478 - DNA, 33 bp, Homo sapien
cacaaatacactctcaggaactaaaggatggct

SEQ ID NO: 853479 - DNA, 33 bp, Homo sapien
tgaccaggaaagaccacggattcagacctcaaa

SEQ ID NO: 853480 - DNA, 33 bp, Homo sapien
tgaccaggaaagaccatggattcagacctcaaa

SEQ ID NO: 853481 - DNA, 33 bp, Homo sapien
gcaatagaacacaaaaaagtgagatgtccctaa

SEQ ID NO: 853482 - DNA, 33 bp, Homo sapien
gcaatagaacacaaaagagtgagatgtccctaa

SEQ ID NO: 853483 - DNA, 33 bp, Homo sapien
gtgtttgtacatgggaacgaattccaaagcctc

SEQ ID NO: 853484 - DNA, 33 bp, Homo sapien
gtgtttgtacatgggagcgaattccaaagcctc

SEQ ID NO: 853485 - DNA, 33 bp, Homo sapien
cccatttagacatctaacaacctatgattctca

SEQ ID NO: 853486 - DNA, 33 bp, Homo sapien
cccatttagacatctagcaacctatgattctca

SEQ ID NO: 853487 - DNA, 33 bp, Homo sapien
gacagtcatgtggaaacgcccagaagacattta

SEQ ID NO: 853488 - DNA, 33 bp, Homo sapien
gacagtcatgtggaaatgcccagaagacattta

SEQ ID NO: 853489 - DNA, 33 bp, Homo sapien
agtgaccacagggtagccaaaacacattctgga

SEQ ID NO: 853490 - DNA, 33 bp, Homo sapien
agtgaccacagggtaggcaaaacacattctgga

SEQ ID NO: 853491 - DNA, 33 bp, Homo sapien
aatattaatccacgtacactcagaggcataata

SEQ ID NO: 853492 - DNA, 33 bp, Homo sapien
aatattaatccacgtatactcagaggcataata

SEQ ID NO: 853493 - DNA, 33 bp, Homo sapien
agtccctggtggtacaaaggatccagatatcag

SEQ ID NO: 853494 - DNA, 33 bp, Homo sapien
agtccctggtggtacagaggatccagatatcag

SEQ ID NO: 853495 - DNA, 33 bp, Homo sapien
atggatcagggaaggacgttttcctagctacca

SEQ ID NO: 853496 - DNA, 33 bp, Homo sapien
atggatcagggaaggatgttttcctagctacca

SEQ ID NO: 853497 - DNA, 33 bp, Homo sapien
agctgatttttttttcacctggacattacagtt

SEQ ID NO: 853498 - DNA, 33 bp, Homo sapien
agctgatttttttttcgcctggacattacagtt

SEQ ID NO: 853499 - DNA, 33 bp, Homo sapien
tcacatgtgatacttcaaacttggaaacatcct

SEQ ID NO: 853500 - DNA, 33 bp, Homo sapien
tcacatgtgatacttcgaacttggaaacatcct

SEQ ID NO: 853501 - DNA, 33 bp, Homo sapien
gcagctaattttgcagaattgtcaagcttagct

SEQ ID NO: 853502 - DNA, 33 bp, Homo sapien
gcagctaattttgcagtattgtcaagcttagct

SEQ ID NO: 853503 - DNA, 33 bp, Homo sapien
ttgtctgggtcttaaacttctaaaactttgtga

SEQ ID NO: 853504 - DNA, 33 bp, Homo sapien
ttgtctgggtcttaaatttctaaaactttgtga

SEQ ID NO: 853505 - DNA, 33 bp, Homo sapien
ttttctgtgcaaaatacatcttccatctcaaat

SEQ ID NO: 853506 - DNA, 33 bp, Homo sapien
ttttctgtgcaaaatatatcttccatctcaaat

SEQ ID NO: 853507 - DNA, 33 bp, Homo sapien
gttcctgattttaggaatatttgggattgttgt

SEQ ID NO: 853508 - DNA, 33 bp, Homo sapien
gttcctgattttaggattatttgggattgttgt

SEQ ID NO: 853509 - DNA, 33 bp, Homo sapien
atggtacaaagacaccactgagaaaacaagtgg

SEQ ID NO: 853510 - DNA, 33 bp, Homo sapien
atggtacaaagacaccgctgagaaaacaagtgg

SEQ ID NO: 853511 - DNA, 33 bp, Homo sapien
actggagtatatgacacgtaggtaggaaggaaa

SEQ ID NO: 853512 - DNA, 33 bp, Homo sapien
actggagtatatgacatgtaggtaggaaggaaa

SEQ ID NO: 853513 - DNA, 33 bp, Homo sapien
gtggaaatggggtagaccatgcaaggcctcaca

SEQ ID NO: 853514 - DNA, 33 bp, Homo sapien
gtggaaatggggtagatcatgcaaggcctcaca

SEQ ID NO: 853515 - DNA, 33 bp, Homo sapien
atgaaacggggagtataaagaacttcagtcagg

SEQ ID NO: 853516 - DNA, 33 bp, Homo sapien
atgaaacggggagtatgaagaacttcagtcagg

SEQ ID NO: 853517 - DNA, 33 bp, Homo sapien
gcaggcacatcttgcacggcagcaggtgagaga

SEQ ID NO: 853518 - DNA, 33 bp, Homo sapien
gcaggcacatcttgcatggcagcaggtgagaga

SEQ ID NO: 853519 - DNA, 33 bp, Homo sapien
gatagtcaagctagccacagaaatctgcataca

SEQ ID NO: 853520 - DNA, 33 bp, Homo sapien
gatagtcaagctagccgcagaaatctgcataca

SEQ ID NO: 853521 - DNA, 33 bp, Homo sapien
gtgaaactgcagtatcaatgtacctggcctggg

SEQ ID NO: 853522 - DNA, 33 bp, Homo sapien
gtgaaactgcagtatcgatgtacctggcctggg

SEQ ID NO: 853523 - DNA, 33 bp, Homo sapien
aatacatagttatggacgatacattctgagcaa

SEQ ID NO: 853524 - DNA, 33 bp, Homo sapien
aatacatagttatggatgatacattctgagcaa

SEQ ID NO: 853525 - DNA, 33 bp, Homo sapien
gatgctgtctgtctcaagcttttccactaatcc

SEQ ID NO: 853526 - DNA, 33 bp, Homo sapien
gatgctgtctgtctcaggcttttccactaatcc

SEQ ID NO: 853527 - DNA, 33 bp, Homo sapien
agtccctctttctcgccccaacatgcaacaggc

SEQ ID NO: 853528 - DNA, 33 bp, Homo sapien
agtccctctttctcgcgccaacatgcaacaggc

SEQ ID NO: 853529 - DNA, 33 bp, Homo sapien
cttctagaatgaccctcagctttctggaactgg

SEQ ID NO: 853530 - DNA, 33 bp, Homo sapien
cttctagaatgaccctgagctttctggaactgg

SEQ ID NO: 853531 - DNA, 33 bp, Homo sapien
gaatcttaagaatggacgatattgatcagtttc

SEQ ID NO: 853532 - DNA, 33 bp, Homo sapien
gaatcttaagaatggatgatattgatcagtttc

SEQ ID NO: 853533 - DNA, 33 bp, Homo sapien
tctttccatcactccacgtggctttcccaaggg

SEQ ID NO: 853534 - DNA, 33 bp, Homo sapien
tctttccatcactccatgtggctttcccaaggg

SEQ ID NO: 853535 - DNA, 33 bp, Homo sapien
gtccattcaacattcagtcactcaacaactatg

SEQ ID NO: 853536 - DNA, 33 bp, Homo sapien
gtccattcaacattcattcactcaacaactatg

SEQ ID NO: 853537 - DNA, 33 bp, Homo sapien
ctatcccactatgagaagaagccagagttatca

SEQ ID NO: 853538 - DNA, 33 bp, Homo sapien
ctatcccactatgagaggaagccagagttatca

SEQ ID NO: 853539 - DNA, 33 bp, Homo sapien
ttccctcacagccaaaatgcttcccatctgaga

SEQ ID NO: 853540 - DNA, 33 bp, Homo sapien
ttccctcacagccaaagtgcttcccatctgaga

SEQ ID NO: 853541 - DNA, 33 bp, Homo sapien
ctctagtatccagttaactccaatatgcctttt

SEQ ID NO: 853542 - DNA, 33 bp, Homo sapien
ctctagtatccagttagctccaatatgcctttt

SEQ ID NO: 853543 - DNA, 33 bp, Homo sapien
gagtgttctaggtagaccagatgtggaaagcat

SEQ ID NO: 853544 - DNA, 33 bp, Homo sapien
gagtgttctaggtagatcagatgtggaaagcat

SEQ ID NO: 853545 - DNA, 33 bp, Homo sapien
ggttccttttactggggaatcgtattagaaact

SEQ ID NO: 853546 - DNA, 33 bp, Homo sapien
ggttccttttactgggtaatcgtattagaaact

SEQ ID NO: 853547 - DNA, 33 bp, Homo sapien
gcactacaagatactccagactcatttgtatgt

SEQ ID NO: 853548 - DNA, 33 bp, Homo sapien
gcactacaagatactctagactcatttgtatgt

SEQ ID NO: 853549 - DNA, 33 bp, Homo sapien
ctacagtgctctcacccgctatgtggccaggga

SEQ ID NO: 853550 - DNA, 33 bp, Homo sapien
ctacagtgctctcacctgctatgtggccaggga

SEQ ID NO: 853551 - DNA, 33 bp, Homo sapien
ggaaaagtgttgcgaactaagactcaaaaagaa

SEQ ID NO: 853552 - DNA, 33 bp, Homo sapien
ggaaaagtgttgcgaagtaagactcaaaaagaa

SEQ ID NO: 853553 - DNA, 33 bp, Homo sapien
atcggtgggttcagatcagtaggagtaaccaat

SEQ ID NO: 853554 - DNA, 33 bp, Homo sapien
atcggtgggttcagattagtaggagtaaccaat

SEQ ID NO: 853555 - DNA, 33 bp, Homo sapien
ttgaactctgtttccaagtgtccttatagttca

SEQ ID NO: 853556 - DNA, 33 bp, Homo sapien
ttgaactctgtttccacgtgtccttatagttca

SEQ ID NO: 853557 - DNA, 33 bp, Homo sapien
aaagatcacaagcttaagaatcagacctacctg

SEQ ID NO: 853558 - DNA, 33 bp, Homo sapien
aaagatcacaagcttaggaatcagacctacctg

SEQ ID NO: 853559 - DNA, 33 bp, Homo sapien
aacattaatggactgaagggcagtaccagacat

SEQ ID NO: 853560 - DNA, 33 bp, Homo sapien
aacattaatggactgatgggcagtaccagacat

SEQ ID NO: 853561 - DNA, 33 bp, Homo sapien
gtaaagtccactcacccgaagactttgaaattc

SEQ ID NO: 853562 - DNA, 33 bp, Homo sapien
gtaaagtccactcacctgaagactttgaaattc

SEQ ID NO: 853563 - DNA, 33 bp, Homo sapien
agggaccatgaggatcgctctaaatgctgattc

SEQ ID NO: 853564 - DNA, 33 bp, Homo sapien
agggaccatgaggatctctctaaatgctgattc

SEQ ID NO: 853565 - DNA, 33 bp, Homo sapien
aggtattttcatcaacaggaaatttcaaagcag

SEQ ID NO: 853566 - DNA, 33 bp, Homo sapien
aggtattttcatcaacgggaaatttcaaagcag

SEQ ID NO: 853567 - DNA, 33 bp, Homo sapien
tcaagttctttgtaaaaggattctggatatcag

SEQ ID NO: 853568 - DNA, 33 bp, Homo sapien
tcaagttctttgtaaagggattctggatatcag

SEQ ID NO: 853569 - DNA, 33 bp, Homo sapien
tttataactctctggcaaactaaatcttttttt

SEQ ID NO: 853570 - DNA, 33 bp, Homo sapien
tttataactctctggcgaactaaatcttttttt

SEQ ID NO: 853571 - DNA, 33 bp, Homo sapien
aaactataaatccatcacattttggtgtacttc

SEQ ID NO: 853572 - DNA, 33 bp, Homo sapien
aaactataaatccatctcattttggtgtacttc

SEQ ID NO: 853573 - DNA, 33 bp, Homo sapien
acatatagctagtgcacaacggaagttagctct

SEQ ID NO: 853574 - DNA, 33 bp, Homo sapien
acatatagctagtgcataacggaagttagctct

SEQ ID NO: 853575 - DNA, 33 bp, Homo sapien
tacctcctgccaggacaaaagtcttaatcacat

SEQ ID NO: 853576 - DNA, 33 bp, Homo sapien
tacctcctgccaggacgaaagtcttaatcacat

SEQ ID NO: 853577 - DNA, 33 bp, Homo sapien
ccctgtaaccacgaacaccatcttaaatttcca

SEQ ID NO: 853578 - DNA, 33 bp, Homo sapien
ccctgtaaccacgaacgccatcttaaatttcca

SEQ ID NO: 853579 - DNA, 33 bp, Homo sapien
tgttctcttcacgctgcagacataaccttcatt

SEQ ID NO: 853580 - DNA, 33 bp, Homo sapien
tgttctcttcacgctgtagacataaccttcatt

SEQ ID NO: 853581 - DNA, 33 bp, Homo sapien
gataagtaatatggtacatggtgccttgggcta

SEQ ID NO: 853582 - DNA, 33 bp, Homo sapien
gataagtaatatggtagatggtgccttgggcta

SEQ ID NO: 853583 - DNA, 33 bp, Homo sapien
gaaaatacaggtttaacctcacactatatcttc

SEQ ID NO: 853584 - DNA, 33 bp, Homo sapien
gaaaatacaggtttaatctcacactatatcttc

SEQ ID NO: 853585 - DNA, 33 bp, Homo sapien
ggtctatgtaacacttcaagccatgactgcctt

SEQ ID NO: 853586 - DNA, 33 bp, Homo sapien
ggtctatgtaacactttaagccatgactgcctt

SEQ ID NO: 853587 - DNA, 33 bp, Homo sapien
tttattgttctgcaaacatctgagttcagtgag

SEQ ID NO: 853588 - DNA, 33 bp, Homo sapien
tttattgttctgcaaatatctgagttcagtgag

SEQ ID NO: 853589 - DNA, 33 bp, Homo sapien
aggactaaacaaatgacagaggactttgcagca

SEQ ID NO: 853590 - DNA, 33 bp, Homo sapien
aggactaaacaaatgatagaggactttgcagca

SEQ ID NO: 853591 - DNA, 33 bp, Homo sapien
agagctaatgatgtccaatccttcttctcgcct

SEQ ID NO: 853592 - DNA, 33 bp, Homo sapien
agagctaatgatgtcccatccttcttctcgcct

SEQ ID NO: 853593 - DNA, 33 bp, Homo sapien
attgatgctagtattacagttaccagtggcgta

SEQ ID NO: 853594 - DNA, 33 bp, Homo sapien
attgatgctagtattatagttaccagtggcgta

SEQ ID NO: 853595 - DNA, 33 bp, Homo sapien
tagcaggggataaactaaaactcttgcttctgc

SEQ ID NO: 853596 - DNA, 33 bp, Homo sapien
tagcaggggataaactgaaactcttgcttctgc

SEQ ID NO: 853597 - DNA, 33 bp, Homo sapien
gcagagggcaaaggataactgtccagaggggat

SEQ ID NO: 853598 - DNA, 33 bp, Homo sapien
gcagagggcaaaggatgactgtccagaggggat

SEQ ID NO: 853599 - DNA, 33 bp, Homo sapien
cttctggtttacaaatcagtggactctggataa

SEQ ID NO: 853600 - DNA, 33 bp, Homo sapien
cttctggtttacaaatgagtggactctggataa

SEQ ID NO: 853601 - DNA, 33 bp, Homo sapien
ctcatattatctaaacacctgacttacaagaag

SEQ ID NO: 853602 - DNA, 33 bp, Homo sapien
ctcatattatctaaacgcctgacttacaagaag

SEQ ID NO: 853603 - DNA, 33 bp, Homo sapien
gtggatataacggaaacggagtaggatttaagg

SEQ ID NO: 853604 - DNA, 33 bp, Homo sapien
gtggatataacggaaatggagtaggatttaagg

SEQ ID NO: 853605 - DNA, 33 bp, Homo sapien
aaaagacgttatgctacatacaagggacagtga

SEQ ID NO: 853606 - DNA, 33 bp, Homo sapien
aaaagacgttatgctagatacaagggacagtga

SEQ ID NO: 853607 - DNA, 33 bp, Homo sapien
ttcctgaaatacagagccacctgtaaatccctt

SEQ ID NO: 853608 - DNA, 33 bp, Homo sapien
ttcctgaaatacagaggcacctgtaaatccctt

SEQ ID NO: 853609 - DNA, 33 bp, Homo sapien
gacccagcccttctatgactttggcaaaaggac

SEQ ID NO: 853610 - DNA, 33 bp, Homo sapien
gacccagcccttctattactttggcaaaaggac

SEQ ID NO: 853611 - DNA, 33 bp, Homo sapien
gagcatctagtcccaaaattcttcggagggctg

SEQ ID NO: 853612 - DNA, 33 bp, Homo sapien
gagcatctagtcccaagattcttcggagggctg

SEQ ID NO: 853613 - DNA, 33 bp, Homo sapien
gcacctaaaccactgaaatgaacactttgtttt

SEQ ID NO: 853614 - DNA, 33 bp, Homo sapien
gcacctaaaccactgacatgaacactttgtttt

SEQ ID NO: 853615 - DNA, 33 bp, Homo sapien
ccagcctagaatctgacattttcaagttggaga

SEQ ID NO: 853616 - DNA, 33 bp, Homo sapien
ccagcctagaatctgatattttcaagttggaga

SEQ ID NO: 853617 - DNA, 33 bp, Homo sapien
gattgcagcttgtctagctctgaatggaaaaca

SEQ ID NO: 853618 - DNA, 33 bp, Homo sapien
gattgcagcttgtctatctctgaatggaaaaca

SEQ ID NO: 853619 - DNA, 33 bp, Homo sapien
ctctaagtttggtagcaaagctcaagaacaaca

SEQ ID NO: 853620 - DNA, 33 bp, Homo sapien
ctctaagtttggtagcgaagctcaagaacaaca

SEQ ID NO: 853621 - DNA, 33 bp, Homo sapien
agccactggttatctcaatagcactcgtgttct

SEQ ID NO: 853622 - DNA, 33 bp, Homo sapien
agccactggttatctccatagcactcgtgttct

SEQ ID NO: 853623 - DNA, 33 bp, Homo sapien
tctggggtcatacaaaaaagaaaccatgcagtg

SEQ ID NO: 853624 - DNA, 33 bp, Homo sapien
tctggggtcatacaaagaagaaaccatgcagtg

SEQ ID NO: 853625 - DNA, 33 bp, Homo sapien
ggagaagtacttcgtaagaaatagcagcctgtt

SEQ ID NO: 853626 - DNA, 33 bp, Homo sapien
ggagaagtacttcgtaggaaatagcagcctgtt

SEQ ID NO: 853627 - DNA, 33 bp, Homo sapien
agaagtaatagaaaatgatgcatcgctggttca

SEQ ID NO: 853628 - DNA, 33 bp, Homo sapien
agaagtaatagaaaattatgcatcgctggttca

SEQ ID NO: 853629 - DNA, 33 bp, Homo sapien
aagaaaatgacaacccagaaacatattgtaaaa

SEQ ID NO: 853630 - DNA, 33 bp, Homo sapien
aagaaaatgacaacccggaaacatattgtaaaa

SEQ ID NO: 853631 - DNA, 33 bp, Homo sapien
cctttgaacttcattgcaaacaccatggaattt

SEQ ID NO: 853632 - DNA, 33 bp, Homo sapien
cctttgaacttcattgtaaacaccatggaattt

SEQ ID NO: 853633 - DNA, 33 bp, Homo sapien
caatagctaagatttcaaagtaacttaagtgtc

SEQ ID NO: 853634 - DNA, 33 bp, Homo sapien
caatagctaagatttcgaagtaacttaagtgtc

SEQ ID NO: 853635 - DNA, 33 bp, Homo sapien
agttgctggtgatgtaacatagaattctgatac

SEQ ID NO: 853636 - DNA, 33 bp, Homo sapien
agttgctggtgatgtagcatagaattctgatac

SEQ ID NO: 853637 - DNA, 33 bp, Homo sapien
gtaatatcacttatcaaaaactttagggcaact

SEQ ID NO: 853638 - DNA, 33 bp, Homo sapien
gtaatatcacttatcagaaactttagggcaact

SEQ ID NO: 853639 - DNA, 33 bp, Homo sapien
atcaatgaaaacttccccagccagctttgtgag

SEQ ID NO: 853640 - DNA, 33 bp, Homo sapien
atcaatgaaaacttcctcagccagctttgtgag

SEQ ID NO: 853641 - DNA, 33 bp, Homo sapien
tacattaagtaattcaatggaaacataccttct

SEQ ID NO: 853642 - DNA, 33 bp, Homo sapien
tacattaagtaattcagtggaaacataccttct

SEQ ID NO: 853643 - DNA, 33 bp, Homo sapien
aatacttttatctagaaacccgttgtgattttt

SEQ ID NO: 853644 - DNA, 33 bp, Homo sapien
aatacttttatctagagacccgttgtgattttt

SEQ ID NO: 853645 - DNA, 33 bp, Homo sapien
ctatcttcaagtttacaaattatttgctctaat

SEQ ID NO: 853646 - DNA, 33 bp, Homo sapien
ctatcttcaagtttacgaattatttgctctaat

SEQ ID NO: 853647 - DNA, 33 bp, Homo sapien
agccaagacttggagacaaactaagtgttcatc

SEQ ID NO: 853648 - DNA, 33 bp, Homo sapien
agccaagacttggagataaactaagtgttcatc

SEQ ID NO: 853649 - DNA, 33 bp, Homo sapien
tttttctgttcccttacaaaacatgagttaagt

SEQ ID NO: 853650 - DNA, 33 bp, Homo sapien
tttttctgttcccttagaaaacatgagttaagt

SEQ ID NO: 853651 - DNA, 33 bp, Homo sapien
gttggtcattgcggtgaaaggagttggagaagg

SEQ ID NO: 853652 - DNA, 33 bp, Homo sapien
gttggtcattgcggtggaaggagttggagaagg

SEQ ID NO: 853653 - DNA, 33 bp, Homo sapien
tgtggctattggcatacgaggaattagatattt

SEQ ID NO: 853654 - DNA, 33 bp, Homo sapien
tgtggctattggcatatgaggaattagatattt

SEQ ID NO: 853655 - DNA, 33 bp, Homo sapien
tttccaaaatccgtagacccaagttgttaattc

SEQ ID NO: 853656 - DNA, 33 bp, Homo sapien
tttccaaaatccgtaggcccaagttgttaattc

SEQ ID NO: 853657 - DNA, 33 bp, Homo sapien
gcagaagagaggcatgcaggaattaacaacttg

SEQ ID NO: 853658 - DNA, 33 bp, Homo sapien
gcagaagagaggcatgtaggaattaacaacttg

SEQ ID NO: 853659 - DNA, 33 bp, Homo sapien
aaggtggagaaggagacctacctcacacacaca

SEQ ID NO: 853660 - DNA, 33 bp, Homo sapien
aaggtggagaaggagatctacctcacacacaca

SEQ ID NO: 853661 - DNA, 33 bp, Homo sapien
ttggagataatgaatacgtatgtggcatgatgg

SEQ ID NO: 853662 - DNA, 33 bp, Homo sapien
ttggagataatgaatatgtatgtggcatgatgg

SEQ ID NO: 853663 - DNA, 33 bp, Homo sapien
tgacactaattcagaagtcctcatctctattca

SEQ ID NO: 853664 - DNA, 33 bp, Homo sapien
tgacactaattcagaattcctcatctctattca

SEQ ID NO: 853665 - DNA, 33 bp, Homo sapien
aaaaaggaaagtgggccactcttgacaaatgtt

SEQ ID NO: 853666 - DNA, 33 bp, Homo sapien
aaaaaggaaagtgggctactcttgacaaatgtt

SEQ ID NO: 853667 - DNA, 33 bp, Homo sapien
ctctgattcataatgcaagtcaatcatgaagct

SEQ ID NO: 853668 - DNA, 33 bp, Homo sapien
ctctgattcataatgcgagtcaatcatgaagct

SEQ ID NO: 853669 - DNA, 33 bp, Homo sapien
acatgggggaagcttccaatcatagctcagagt

SEQ ID NO: 853670 - DNA, 33 bp, Homo sapien
acatgggggaagcttcgaatcatagctcagagt

SEQ ID NO: 853671 - DNA, 33 bp, Homo sapien
agctgtcttcagaagaatactaactaaccaagc

SEQ ID NO: 853672 - DNA, 33 bp, Homo sapien
agctgtcttcagaagagtactaactaaccaagc

SEQ ID NO: 853673 - DNA, 33 bp, Homo sapien
taacagatcttcaatacgtgtaaaagactgaaa

SEQ ID NO: 853674 - DNA, 33 bp, Homo sapien
taacagatcttcaatatgtgtaaaagactgaaa

SEQ ID NO: 853675 - DNA, 33 bp, Homo sapien
agaccagatggctgtaaaggtgtgaatttattt

SEQ ID NO: 853676 - DNA, 33 bp, Homo sapien
agaccagatggctgtagaggtgtgaatttattt

SEQ ID NO: 853677 - DNA, 33 bp, Homo sapien
gctcagacatctctgcaagggttatttcttgac

SEQ ID NO: 853678 - DNA, 33 bp, Homo sapien
gctcagacatctctgcgagggttatttcttgac

SEQ ID NO: 853679 - DNA, 33 bp, Homo sapien
atcatgaaaacactggcatttgttctgagcctt

SEQ ID NO: 853680 - DNA, 33 bp, Homo sapien
atcatgaaaacactggtatttgttctgagcctt

SEQ ID NO: 853681 - DNA, 33 bp, Homo sapien
agaatgatcaggaaggaagtcaagtaggcccat

SEQ ID NO: 853682 - DNA, 33 bp, Homo sapien
agaatgatcaggaagggagtcaagtaggcccat

SEQ ID NO: 853683 - DNA, 33 bp, Homo sapien
atgtgttgtacagataaatatcagggtgaggtc

SEQ ID NO: 853684 - DNA, 33 bp, Homo sapien
atgtgttgtacagatagatatcagggtgaggtc

SEQ ID NO: 853685 - DNA, 33 bp, Homo sapien
ttccttttactattgccagagccagttgttccc

SEQ ID NO: 853686 - DNA, 33 bp, Homo sapien
ttccttttactattgctagagccagttgttccc

SEQ ID NO: 853687 - DNA, 33 bp, Homo sapien
tcatcaattatcatctgaacagacgaactgatc

SEQ ID NO: 853688 - DNA, 33 bp, Homo sapien
tcatcaattatcatcttaacagacgaactgatc

SEQ ID NO: 853689 - DNA, 33 bp, Homo sapien
aggaagtttgtgccaaaggactcagtttgactg

SEQ ID NO: 853690 - DNA, 33 bp, Homo sapien
aggaagtttgtgccaatggactcagtttgactg

SEQ ID NO: 853691 - DNA, 33 bp, Homo sapien
caattccagtcatcataaaacagaaatatccta

SEQ ID NO: 853692 - DNA, 33 bp, Homo sapien
caattccagtcatcatgaaacagaaatatccta

SEQ ID NO: 853693 - DNA, 33 bp, Homo sapien
tgaaattgaattgacacaaaccaccagtggctc

SEQ ID NO: 853694 - DNA, 33 bp, Homo sapien
tgaaattgaattgacagaaaccaccagtggctc

SEQ ID NO: 853695 - DNA, 33 bp, Homo sapien
tagaaactggttaaacaattgtgaccaaaatgc

SEQ ID NO: 853696 - DNA, 33 bp, Homo sapien
tagaaactggttaaaccattgtgaccaaaatgc

SEQ ID NO: 853697 - DNA, 33 bp, Homo sapien
tggcttaaaggaccccaaatatagcttaggcca

SEQ ID NO: 853698 - DNA, 33 bp, Homo sapien
tggcttaaaggaccccgaatatagcttaggcca

SEQ ID NO: 853699 - DNA, 33 bp, Homo sapien
agtaactcaatagttaccagtcgctttggggaa

SEQ ID NO: 853700 - DNA, 33 bp, Homo sapien
agtaactcaatagttatcagtcgctttggggaa

SEQ ID NO: 853701 - DNA, 33 bp, Homo sapien
atatgaaagaatttgaagcattagaaatagccc

SEQ ID NO: 853702 - DNA, 33 bp, Homo sapien
atatgaaagaatttgaggcattagaaatagccc

SEQ ID NO: 853703 - DNA, 33 bp, Homo sapien
aggctttttattctgcacttgctatggcaaaag

SEQ ID NO: 853704 - DNA, 33 bp, Homo sapien
aggctttttattctgcgcttgctatggcaaaag

SEQ ID NO: 853705 - DNA, 33 bp, Homo sapien
actaactaaaaatggaacatcctatataattgg

SEQ ID NO: 853706 - DNA, 33 bp, Homo sapien
actaactaaaaatggagcatcctatataattgg

SEQ ID NO: 853707 - DNA, 33 bp, Homo sapien
ttcttagactggttgccacagattgtgggtcat

SEQ ID NO: 853708 - DNA, 33 bp, Homo sapien
ttcttagactggttgctacagattgtgggtcat

SEQ ID NO: 853709 - DNA, 33 bp, Homo sapien
ctcatggatattatgaaagtcatctttttatcc

SEQ ID NO: 853710 - DNA, 33 bp, Homo sapien
ctcatggatattatgagagtcatctttttatcc

SEQ ID NO: 853711 - DNA, 33 bp, Homo sapien
aggttggtaagcaaaaacctagaagcataaaac

SEQ ID NO: 853712 - DNA, 33 bp, Homo sapien
aggttggtaagcaaaagcctagaagcataaaac

SEQ ID NO: 853713 - DNA, 33 bp, Homo sapien
gattctgaatgaaccactgaaggaggctagatc

SEQ ID NO: 853714 - DNA, 33 bp, Homo sapien
gattctgaatgaaccattgaaggaggctagatc

SEQ ID NO: 853715 - DNA, 33 bp, Homo sapien
accaccaaagtactaaatctaactacagttgtg

SEQ ID NO: 853716 - DNA, 33 bp, Homo sapien
accaccaaagtactaactctaactacagttgtg

SEQ ID NO: 853717 - DNA, 33 bp, Homo sapien
agtactttattaagaaacagataatttgtgtta

SEQ ID NO: 853718 - DNA, 33 bp, Homo sapien
agtactttattaagaaccagataatttgtgtta

SEQ ID NO: 853719 - DNA, 33 bp, Homo sapien
tcctttccaactagaaactccttcagagtcaag

SEQ ID NO: 853720 - DNA, 33 bp, Homo sapien
tcctttccaactagaagctccttcagagtcaag

SEQ ID NO: 853721 - DNA, 33 bp, Homo sapien
tatagcagtagcctgaattctggaatagagtta

SEQ ID NO: 853722 - DNA, 33 bp, Homo sapien
tatagcagtagcctgatttctggaatagagtta

SEQ ID NO: 853723 - DNA, 33 bp, Homo sapien
tcatcttattttcttacccacatttgattgaat

SEQ ID NO: 853724 - DNA, 33 bp, Homo sapien
tcatcttattttcttatccacatttgattgaat

SEQ ID NO: 853725 - DNA, 33 bp, Homo sapien
acaaatgcagttttgccagtgttgagcacaaga

SEQ ID NO: 853726 - DNA, 33 bp, Homo sapien
acaaatgcagttttgcgagtgttgagcacaaga

SEQ ID NO: 853727 - DNA, 33 bp, Homo sapien
tagttaaattgcagcacatacttcaaatcacac

SEQ ID NO: 853728 - DNA, 33 bp, Homo sapien
tagttaaattgcagcatatacttcaaatcacac

SEQ ID NO: 853729 - DNA, 33 bp, Homo sapien
cactgccaggaataccaattttcaagcaggaag

SEQ ID NO: 853730 - DNA, 33 bp, Homo sapien
cactgccaggaatacctattttcaagcaggaag

SEQ ID NO: 853731 - DNA, 33 bp, Homo sapien
caagggtaagaatccacgaaccaatgagcaaga

SEQ ID NO: 853732 - DNA, 33 bp, Homo sapien
caagggtaagaatccatgaaccaatgagcaaga

SEQ ID NO: 853733 - DNA, 33 bp, Homo sapien
taaaactaaccacttacgatagtttgcctctgc

SEQ ID NO: 853734 - DNA, 33 bp, Homo sapien
taaaactaaccacttatgatagtttgcctctgc

SEQ ID NO: 853735 - DNA, 33 bp, Homo sapien
gtatgccgtatagccacgtgtgtagcaagcgat

SEQ ID NO: 853736 - DNA, 33 bp, Homo sapien
gtatgccgtatagccatgtgtgtagcaagcgat

SEQ ID NO: 853737 - DNA, 33 bp, Homo sapien
agtctacagtagtttacagtaatgcccccaggc

SEQ ID NO: 853738 - DNA, 33 bp, Homo sapien
agtctacagtagtttatagtaatgcccccaggc

SEQ ID NO: 853739 - DNA, 33 bp, Homo sapien
cttagcttcaaacacaaatatatcgtacaacta

SEQ ID NO: 853740 - DNA, 33 bp, Homo sapien
cttagcttcaaacacatatatatcgtacaacta

SEQ ID NO: 853741 - DNA, 33 bp, Homo sapien
gaatcaattcctcttccacaaaggtatgaacac

SEQ ID NO: 853742 - DNA, 33 bp, Homo sapien
gaatcaattcctcttctacaaaggtatgaacac

SEQ ID NO: 853743 - DNA, 33 bp, Homo sapien
gtaccagaatttgtacacaatggtgactcaatt

SEQ ID NO: 853744 - DNA, 33 bp, Homo sapien
gtaccagaatttgtactcaatggtgactcaatt

SEQ ID NO: 853745 - DNA, 33 bp, Homo sapien
tgcaaagcctagcctacctctttttaatttggg

SEQ ID NO: 853746 - DNA, 33 bp, Homo sapien
tgcaaagcctagcctatctctttttaatttggg

SEQ ID NO: 853747 - DNA, 33 bp, Homo sapien
cttgcagcctgttctggcaacacaacaacttct

SEQ ID NO: 853748 - DNA, 33 bp, Homo sapien
cttgcagcctgttctgtcaacacaacaacttct

SEQ ID NO: 853749 - DNA, 33 bp, Homo sapien
tccccaaaatcttagcaaagcataaacatcttg

SEQ ID NO: 853750 - DNA, 33 bp, Homo sapien
tccccaaaatcttagcgaagcataaacatcttg

SEQ ID NO: 853751 - DNA, 33 bp, Homo sapien
acctccaatattttaaggtagcaaacagctcac

SEQ ID NO: 853752 - DNA, 33 bp, Homo sapien
acctccaatattttaatgtagcaaacagctcac

SEQ ID NO: 853753 - DNA, 33 bp, Homo sapien
gaccatccaagataacagtgatccagcattatg

SEQ ID NO: 853754 - DNA, 33 bp, Homo sapien
gaccatccaagataacggtgatccagcattatg

SEQ ID NO: 853755 - DNA, 33 bp, Homo sapien
ccactaaatggacccccgagatgacatttcaga

SEQ ID NO: 853756 - DNA, 33 bp, Homo sapien
ccactaaatggaccccggagatgacatttcaga

SEQ ID NO: 853757 - DNA, 33 bp, Homo sapien
atagagaaagcactcacgaaaatagacattcag

SEQ ID NO: 853758 - DNA, 33 bp, Homo sapien
atagagaaagcactcatgaaaatagacattcag

SEQ ID NO: 853759 - DNA, 33 bp, Homo sapien
ccaaagcaagaaaatacaaggatggtgaaggga

SEQ ID NO: 853760 - DNA, 33 bp, Homo sapien
ccaaagcaagaaaatagaaggatggtgaaggga

SEQ ID NO: 853761 - DNA, 33 bp, Homo sapien
gtccgatattaatataacaactccagctctctt

SEQ ID NO: 853762 - DNA, 33 bp, Homo sapien
gtccgatattaatatagcaactccagctctctt

SEQ ID NO: 853763 - DNA, 33 bp, Homo sapien
ctggctgttggagaccaaactcaatctgtagcc

SEQ ID NO: 853764 - DNA, 33 bp, Homo sapien
ctggctgttggagaccgaactcaatctgtagcc

SEQ ID NO: 853765 - DNA, 33 bp, Homo sapien
ggcagcctgcagtgaacggatgggagttgtgtg

SEQ ID NO: 853766 - DNA, 33 bp, Homo sapien
ggcagcctgcagtgaatggatgggagttgtgtg

SEQ ID NO: 853767 - DNA, 33 bp, Homo sapien
gccagcgtcatggaaaatgagttagtaaagagt

SEQ ID NO: 853768 - DNA, 33 bp, Homo sapien
gccagcgtcatggaaagtgagttagtaaagagt

SEQ ID NO: 853769 - DNA, 33 bp, Homo sapien
gcaaaacaatatccacaaccttaaactaataca

SEQ ID NO: 853770 - DNA, 33 bp, Homo sapien
gcaaaacaatatccaccaccttaaactaataca

SEQ ID NO: 853771 - DNA, 33 bp, Homo sapien
aaaaaagtagtaaaatcagtgcaggttgaaacc

SEQ ID NO: 853772 - DNA, 33 bp, Homo sapien
aaaaaagtagtaaaatgagtgcaggttgaaacc

SEQ ID NO: 853773 - DNA, 33 bp, Homo sapien
accttctggttctatcactatggcctgtttaaa

SEQ ID NO: 853774 - DNA, 33 bp, Homo sapien
accttctggttctatcgctatggcctgtttaaa

SEQ ID NO: 853775 - DNA, 33 bp, Homo sapien
gttttaaatctatccacgaagagggcaaactca

SEQ ID NO: 853776 - DNA, 33 bp, Homo sapien
gttttaaatctatccatgaagagggcaaactca

SEQ ID NO: 853777 - DNA, 33 bp, Homo sapien
gctaaattctggaaaacgaatgaaacatcatct

SEQ ID NO: 853778 - DNA, 33 bp, Homo sapien
gctaaattctggaaaaggaatgaaacatcatct

SEQ ID NO: 853779 - DNA, 33 bp, Homo sapien
acctttgatccagtgagattttgaagaaacaag

SEQ ID NO: 853780 - DNA, 33 bp, Homo sapien
acctttgatccagtgatattttgaagaaacaag

SEQ ID NO: 853781 - DNA, 33 bp, Homo sapien
gggaaatcagatcggaaaactagaggtttgcca

SEQ ID NO: 853782 - DNA, 33 bp, Homo sapien
gggaaatcagatcggagaactagaggtttgcca

SEQ ID NO: 853783 - DNA, 33 bp, Homo sapien
gcaacatagaaaaacactgtctctctctctttc

SEQ ID NO: 853784 - DNA, 33 bp, Homo sapien
gcaacatagaaaaacattgtctctctctctttc

SEQ ID NO: 853785 - DNA, 33 bp, Homo sapien
taagttaactggacaacagataatttaaatttc

SEQ ID NO: 853786 - DNA, 33 bp, Homo sapien
taagttaactggacaatagataatttaaatttc

SEQ ID NO: 853787 - DNA, 33 bp, Homo sapien
ccaaagcaccacatagccaacctgtttagtaag

SEQ ID NO: 853788 - DNA, 33 bp, Homo sapien
ccaaagcaccacatagtcaacctgtttagtaag

SEQ ID NO: 853789 - DNA, 33 bp, Homo sapien
gctccactgtgccactgaagacagcgccattgt

SEQ ID NO: 853790 - DNA, 33 bp, Homo sapien
gctccactgtgccacttaagacagcgccattgt

SEQ ID NO: 853791 - DNA, 33 bp, Homo sapien
ctacatatgtgatatacagtccaatcctttttt

SEQ ID NO: 853792 - DNA, 33 bp, Homo sapien
ctacatatgtgatatatagtccaatcctttttt

SEQ ID NO: 853793 - DNA, 33 bp, Homo sapien
ccaactgtaaatcttacgaatactccaagaaat

SEQ ID NO: 853794 - DNA, 33 bp, Homo sapien
ccaactgtaaatcttatgaatactccaagaaat

SEQ ID NO: 853795 - DNA, 33 bp, Homo sapien
aatttaaagcctgacacgagtgagatcatcaga

SEQ ID NO: 853796 - DNA, 33 bp, Homo sapien
aatttaaagcctgacatgagtgagatcatcaga

SEQ ID NO: 853797 - DNA, 33 bp, Homo sapien
tctctacctagtgacccatttctgccttcttac

SEQ ID NO: 853798 - DNA, 33 bp, Homo sapien
tctctacctagtgacctatttctgccttcttac

SEQ ID NO: 853799 - DNA, 33 bp, Homo sapien
cttccttccaatgatcaatttaccactctatct

SEQ ID NO: 853800 - DNA, 33 bp, Homo sapien
cttccttccaatgatcgatttaccactctatct

SEQ ID NO: 853801 - DNA, 33 bp, Homo sapien
tcaggtaggttgtcccaatgggttgaggagacc

SEQ ID NO: 853802 - DNA, 33 bp, Homo sapien
tcaggtaggttgtcccgatgggttgaggagacc

SEQ ID NO: 853803 - DNA, 33 bp, Homo sapien
tcggttccatcaccagcagctcggcaagcaggg

SEQ ID NO: 853804 - DNA, 33 bp, Homo sapien
tcggttccatcaccagtagctcggcaagcaggg

SEQ ID NO: 853805 - DNA, 33 bp, Homo sapien
aatgccataagttaagaataatcacaaatggct

SEQ ID NO: 853806 - DNA, 33 bp, Homo sapien
aatgccataagttaaggataatcacaaatggct

SEQ ID NO: 853807 - DNA, 33 bp, Homo sapien
gctaaatgtcattttacatttggcaatgcttct

SEQ ID NO: 853808 - DNA, 33 bp, Homo sapien
gctaaatgtcattttatatttggcaatgcttct

SEQ ID NO: 853809 - DNA, 33 bp, Homo sapien
ttctttgggaattgtcgagaatcccggcacttt

SEQ ID NO: 853810 - DNA, 33 bp, Homo sapien
ttctttgggaattgtctagaatcccggcacttt

SEQ ID NO: 853811 - DNA, 33 bp, Homo sapien
aactactttgctaagcacaatgtttaggtcagc

SEQ ID NO: 853812 - DNA, 33 bp, Homo sapien
aactactttgctaagcgcaatgtttaggtcagc

SEQ ID NO: 853813 - DNA, 33 bp, Homo sapien
acatttgaatgatacaagattgttttttccttc

SEQ ID NO: 853814 - DNA, 33 bp, Homo sapien
acatttgaatgatacaggattgttttttccttc

SEQ ID NO: 853815 - DNA, 33 bp, Homo sapien
catcgcaaagagcacaaggagttcctatatacc

SEQ ID NO: 853816 - DNA, 33 bp, Homo sapien
catcgcaaagagcacagggagttcctatatacc

SEQ ID NO: 853817 - DNA, 33 bp, Homo sapien
tagaccctaaatttaaaggcacgcattatttca

SEQ ID NO: 853818 - DNA, 33 bp, Homo sapien
tagaccctaaatttaagggcacgcattatttca

SEQ ID NO: 853819 - DNA, 33 bp, Homo sapien
aagatctggagtccaaaaagaatgcccactttc

SEQ ID NO: 853820 - DNA, 33 bp, Homo sapien
aagatctggagtccaacaagaatgcccactttc

SEQ ID NO: 853821 - DNA, 33 bp, Homo sapien
accattcattttttccaattctcagacatagat

SEQ ID NO: 853822 - DNA, 33 bp, Homo sapien
accattcattttttccgattctcagacatagat

SEQ ID NO: 853823 - DNA, 33 bp, Homo sapien
gactcaagaacacctccaagatttttaccctga

SEQ ID NO: 853824 - DNA, 33 bp, Homo sapien
gactcaagaacacctctaagatttttaccctga

SEQ ID NO: 853825 - DNA, 33 bp, Homo sapien
atcctttgttcctcaaagcagaaaatactatgg

SEQ ID NO: 853826 - DNA, 33 bp, Homo sapien
atcctttgttcctcaaggcagaaaatactatgg

SEQ ID NO: 853827 - DNA, 33 bp, Homo sapien
aacttcagtccttaacacctcagaagaaacaat

SEQ ID NO: 853828 - DNA, 33 bp, Homo sapien
aacttcagtccttaacgcctcagaagaaacaat

SEQ ID NO: 853829 - DNA, 33 bp, Homo sapien
ttgtccatatcgcgatcagcaatttggtcaaaa

SEQ ID NO: 853830 - DNA, 33 bp, Homo sapien
ttgtccatatcgcgatgagcaatttggtcaaaa

SEQ ID NO: 853831 - DNA, 33 bp, Homo sapien
cttgctcatcagagtaccagcaaaaccgaattg

SEQ ID NO: 853832 - DNA, 33 bp, Homo sapien
cttgctcatcagagtagcagcaaaaccgaattg

SEQ ID NO: 853833 - DNA, 33 bp, Homo sapien
tagaacttactgagaaactgccttctgggatgc

SEQ ID NO: 853834 - DNA, 33 bp, Homo sapien
tagaacttactgagaagctgccttctgggatgc

SEQ ID NO: 853835 - DNA, 33 bp, Homo sapien
aagatatacgaaagaccaacaagcatatgaaaa

SEQ ID NO: 853836 - DNA, 33 bp, Homo sapien
aagatatacgaaagactaacaagcatatgaaaa

SEQ ID NO: 853837 - DNA, 33 bp, Homo sapien
gctgaattttagcaagcaatgaagaagaactaa

SEQ ID NO: 853838 - DNA, 33 bp, Homo sapien
gctgaattttagcaaggaatgaagaagaactaa

SEQ ID NO: 853839 - DNA, 33 bp, Homo sapien
gcaatggagtcctaaacgtgaaccataaaggaa

SEQ ID NO: 853840 - DNA, 33 bp, Homo sapien
gcaatggagtcctaaatgtgaaccataaaggaa

SEQ ID NO: 853841 - DNA, 33 bp, Homo sapien
ttcctggtgactgctggagacttctgcccagat

SEQ ID NO: 853842 - DNA, 33 bp, Homo sapien
ttcctggtgactgctgtagacttctgcccagat

SEQ ID NO: 853843 - DNA, 33 bp, Homo sapien
cctctgatgggacaccacaattcagtgcttgga

SEQ ID NO: 853844 - DNA, 33 bp, Homo sapien
cctctgatgggacaccgcaattcagtgcttgga

SEQ ID NO: 853845 - DNA, 33 bp, Homo sapien
gttatcttcaggttagattgtcactgtggaagt

SEQ ID NO: 853846 - DNA, 33 bp, Homo sapien
gttatcttcaggttaggttgtcactgtggaagt

SEQ ID NO: 853847 - DNA, 33 bp, Homo sapien
tcatcattcatcacaactctaaaccactctaag

SEQ ID NO: 853848 - DNA, 33 bp, Homo sapien
tcatcattcatcacaagtctaaaccactctaag

SEQ ID NO: 853849 - DNA, 33 bp, Homo sapien
accacagccagaattacggaaagagtctcagca

SEQ ID NO: 853850 - DNA, 33 bp, Homo sapien
accacagccagaattatggaaagagtctcagca

SEQ ID NO: 853851 - DNA, 33 bp, Homo sapien
tgcactcatattaaaaatggcatcctgcacttg

SEQ ID NO: 853852 - DNA, 33 bp, Homo sapien
tgcactcatattaaaagtggcatcctgcacttg

SEQ ID NO: 853853 - DNA, 33 bp, Homo sapien
catgggttgctctgatcaccagtagagaggtga

SEQ ID NO: 853854 - DNA, 33 bp, Homo sapien
catgggttgctctgattaccagtagagaggtga

SEQ ID NO: 853855 - DNA, 33 bp, Homo sapien
acagtatgaatcaacccgcttctggatttcccc

SEQ ID NO: 853856 - DNA, 33 bp, Homo sapien
acagtatgaatcaacctgcttctggatttcccc

SEQ ID NO: 853857 - DNA, 33 bp, Homo sapien
ttttgtccttatttcaatcagtgcggtagtgag

SEQ ID NO: 853858 - DNA, 33 bp, Homo sapien
ttttgtccttatttcattcagtgcggtagtgag

SEQ ID NO: 853859 - DNA, 33 bp, Homo sapien
tctaagtctagacgaacatgtatgcattccagg

SEQ ID NO: 853860 - DNA, 33 bp, Homo sapien
tctaagtctagacgaagatgtatgcattccagg

SEQ ID NO: 853861 - DNA, 33 bp, Homo sapien
aaatagcagtaacatgaatgaggatttaataac

SEQ ID NO: 853862 - DNA, 33 bp, Homo sapien
aaatagcagtaacatggatgaggatttaataac

SEQ ID NO: 853863 - DNA, 33 bp, Homo sapien
aaaatcagtgccattacaatcttcctctgtcct

SEQ ID NO: 853864 - DNA, 33 bp, Homo sapien
aaaatcagtgccattataatcttcctctgtcct

SEQ ID NO: 853865 - DNA, 33 bp, Homo sapien
aaagtcaaaataattcccgtatgaactggaaca

SEQ ID NO: 853866 - DNA, 33 bp, Homo sapien
aaagtcaaaataattctcgtatgaactggaaca

SEQ ID NO: 853867 - DNA, 33 bp, Homo sapien
cctaagtgccacaataggtttgtcagactctga

SEQ ID NO: 853868 - DNA, 33 bp, Homo sapien
cctaagtgccacaatatgtttgtcagactctga

SEQ ID NO: 853869 - DNA, 33 bp, Homo sapien
gcattataaaagggagacattataaaaagaggg

SEQ ID NO: 853870 - DNA, 33 bp, Homo sapien
gcattataaaagggaggcattataaaaagaggg

SEQ ID NO: 853871 - DNA, 33 bp, Homo sapien
tcaaacaataatggcacccagtggagccacttc

SEQ ID NO: 853872 - DNA, 33 bp, Homo sapien
tcaaacaataatggcatccagtggagccacttc

SEQ ID NO: 853873 - DNA, 33 bp, Homo sapien
atatatgaaagaagagacattgcctatatatat

SEQ ID NO: 853874 - DNA, 33 bp, Homo sapien
atatatgaaagaagaggcattgcctatatatat

SEQ ID NO: 853875 - DNA, 33 bp, Homo sapien
tgccttaccactaaaacttccactggagctgat

SEQ ID NO: 853876 - DNA, 33 bp, Homo sapien
tgccttaccactaaaatttccactggagctgat

SEQ ID NO: 853877 - DNA, 33 bp, Homo sapien
gaggataatcctattacctggactttcttcagg

SEQ ID NO: 853878 - DNA, 33 bp, Homo sapien
gaggataatcctattagctggactttcttcagg

SEQ ID NO: 853879 - DNA, 33 bp, Homo sapien
tagtttagccaaaataacagctttgtgaatacc

SEQ ID NO: 853880 - DNA, 33 bp, Homo sapien
tagtttagccaaaatagcagctttgtgaatacc

SEQ ID NO: 853881 - DNA, 33 bp, Homo sapien
gttatagcttgcttgacacattcaaatattaac

SEQ ID NO: 853882 - DNA, 33 bp, Homo sapien
gttatagcttgcttgatacattcaaatattaac

SEQ ID NO: 853883 - DNA, 33 bp, Homo sapien
tgtatggtgtctttagcagtaatcaacattggc

SEQ ID NO: 853884 - DNA, 33 bp, Homo sapien
tgtatggtgtctttagtagtaatcaacattggc

SEQ ID NO: 853885 - DNA, 33 bp, Homo sapien
accaggtgaacttccacacagagattctctcct

SEQ ID NO: 853886 - DNA, 33 bp, Homo sapien
accaggtgaacttccatacagagattctctcct

SEQ ID NO: 853887 - DNA, 33 bp, Homo sapien
gaaaaatcagatcatacgtggatttggagaata

SEQ ID NO: 853888 - DNA, 33 bp, Homo sapien
gaaaaatcagatcatatgtggatttggagaata

SEQ ID NO: 853889 - DNA, 33 bp, Homo sapien
ttagaaagatttacaactcaaaaatggcacctg

SEQ ID NO: 853890 - DNA, 33 bp, Homo sapien
ttagaaagatttacaattcaaaaatggcacctg

SEQ ID NO: 853891 - DNA, 33 bp, Homo sapien
tctaatatcagggtgcaaacatggttggattct

SEQ ID NO: 853892 - DNA, 33 bp, Homo sapien
tctaatatcagggtgcgaacatggttggattct

SEQ ID NO: 853893 - DNA, 33 bp, Homo sapien
ctgtatgtgtgcagtccaatttctgggttcttt

SEQ ID NO: 853894 - DNA, 33 bp, Homo sapien
ctgtatgtgtgcagtctaatttctgggttcttt

SEQ ID NO: 853895 - DNA, 33 bp, Homo sapien
tttaggatgtatgctaactagcctattatttct

SEQ ID NO: 853896 - DNA, 33 bp, Homo sapien
tttaggatgtatgctatctagcctattatttct

SEQ ID NO: 853897 - DNA, 33 bp, Homo sapien
atccttttctcacacaataaatttgcaatctaa

SEQ ID NO: 853898 - DNA, 33 bp, Homo sapien
atccttttctcacacagtaaatttgcaatctaa

SEQ ID NO: 853899 - DNA, 33 bp, Homo sapien
agtccttcgataatgtcaaatagtggttgcagg

SEQ ID NO: 853900 - DNA, 33 bp, Homo sapien
agtccttcgataatgttaaatagtggttgcagg

SEQ ID NO: 853901 - DNA, 33 bp, Homo sapien
tatgcagaaataatgacgtagctgtctttctct

SEQ ID NO: 853902 - DNA, 33 bp, Homo sapien
tatgcagaaataatgatgtagctgtctttctct

SEQ ID NO: 853903 - DNA, 33 bp, Homo sapien
aacccttcacatagtaaaaaacattttctggtt

SEQ ID NO: 853904 - DNA, 33 bp, Homo sapien
aacccttcacatagtagaaaacattttctggtt

SEQ ID NO: 853905 - DNA, 33 bp, Homo sapien
tggagaatctctcaggacatctgggtactgttg

SEQ ID NO: 853906 - DNA, 33 bp, Homo sapien
tggagaatctctcagggcatctgggtactgttg

SEQ ID NO: 853907 - DNA, 33 bp, Homo sapien
agatgtaggacttaaccgggtttctgcataacg

SEQ ID NO: 853908 - DNA, 33 bp, Homo sapien
agatgtaggacttaactgggtttctgcataacg

SEQ ID NO: 853909 - DNA, 33 bp, Homo sapien
cagtgttcaacagtcaacggtttctaatggccc

SEQ ID NO: 853910 - DNA, 33 bp, Homo sapien
cagtgttcaacagtcagcggtttctaatggccc

SEQ ID NO: 853911 - DNA, 33 bp, Homo sapien
atgtactaactcacccagaaatgccattttaaa

SEQ ID NO: 853912 - DNA, 33 bp, Homo sapien
atgtactaactcacccggaaatgccattttaaa

SEQ ID NO: 853913 - DNA, 33 bp, Homo sapien
tcaatgagaactgagactagtaataatttcaga

SEQ ID NO: 853914 - DNA, 33 bp, Homo sapien
tcaatgagaactgagagtagtaataatttcaga

SEQ ID NO: 853915 - DNA, 33 bp, Homo sapien
ctctaatgctataaaaagggttagacgtaatgt

SEQ ID NO: 853916 - DNA, 33 bp, Homo sapien
ctctaatgctataaaacgggttagacgtaatgt

SEQ ID NO: 853917 - DNA, 33 bp, Homo sapien
cagctgtgaatgaaaaaggtttggttcttcctc

SEQ ID NO: 853918 - DNA, 33 bp, Homo sapien
cagctgtgaatgaaaagggtttggttcttcctc

SEQ ID NO: 853919 - DNA, 33 bp, Homo sapien
tggttcaagttgttacaaagttcagctggagat

SEQ ID NO: 853920 - DNA, 33 bp, Homo sapien
tggttcaagttgttacgaagttcagctggagat

SEQ ID NO: 853921 - DNA, 33 bp, Homo sapien
ctcccctacagttatacggcactatggagtccc

SEQ ID NO: 853922 - DNA, 33 bp, Homo sapien
ctcccctacagttatatggcactatggagtccc

SEQ ID NO: 853923 - DNA, 33 bp, Homo sapien
tctgttaccttaggaaatataaccaatagttaa

SEQ ID NO: 853924 - DNA, 33 bp, Homo sapien
tctgttaccttaggaagtataaccaatagttaa

SEQ ID NO: 853925 - DNA, 33 bp, Homo sapien
aaagaaaaatggatacactggactttattaaaa

SEQ ID NO: 853926 - DNA, 33 bp, Homo sapien
aaagaaaaatggatacgctggactttattaaaa

SEQ ID NO: 853927 - DNA, 33 bp, Homo sapien
caagaactcactaccacataagaaattgtcttg

SEQ ID NO: 853928 - DNA, 33 bp, Homo sapien
caagaactcactaccagataagaaattgtcttg

SEQ ID NO: 853929 - DNA, 33 bp, Homo sapien
tctagaggaaaaataacccattgctttcacaaa

SEQ ID NO: 853930 - DNA, 33 bp, Homo sapien
tctagaggaaaaataatccattgctttcacaaa

SEQ ID NO: 853931 - DNA, 33 bp, Homo sapien
agggtttaaggtccacagtcctaagaatggtgt

SEQ ID NO: 853932 - DNA, 33 bp, Homo sapien
agggtttaaggtccactgtcctaagaatggtgt

SEQ ID NO: 853933 - DNA, 33 bp, Homo sapien
gagagtacagccatcacgggattgcatccttcc

SEQ ID NO: 853934 - DNA, 33 bp, Homo sapien
gagagtacagccatcatgggattgcatccttcc

SEQ ID NO: 853935 - DNA, 33 bp, Homo sapien
gggcacttatttggaaatggcatagctaataaa

SEQ ID NO: 853936 - DNA, 33 bp, Homo sapien
gggcacttatttggaagtggcatagctaataaa

SEQ ID NO: 853937 - DNA, 33 bp, Homo sapien
aaactgggcaaagcgcactgcagtttggcaaag

SEQ ID NO: 853938 - DNA, 33 bp, Homo sapien
aaactgggcaaagcgcgctgcagtttggcaaag

SEQ ID NO: 853939 - DNA, 33 bp, Homo sapien
gacattacaaaagtagacataaaaaggtgtagg

SEQ ID NO: 853940 - DNA, 33 bp, Homo sapien
gacattacaaaagtaggcataaaaaggtgtagg

SEQ ID NO: 853941 - DNA, 33 bp, Homo sapien
agaacatccagccaaactttaatttcttactcc

SEQ ID NO: 853942 - DNA, 33 bp, Homo sapien
agaacatccagccaaattttaatttcttactcc

SEQ ID NO: 853943 - DNA, 33 bp, Homo sapien
actttgcagtccctctcagaaattactatacca

SEQ ID NO: 853944 - DNA, 33 bp, Homo sapien
actttgcagtccctcttagaaattactatacca

SEQ ID NO: 853945 - DNA, 33 bp, Homo sapien
gtccttcaacagaatcaattgtaaaatagtcat

SEQ ID NO: 853946 - DNA, 33 bp, Homo sapien
gtccttcaacagaatcgattgtaaaatagtcat

SEQ ID NO: 853947 - DNA, 33 bp, Homo sapien
ggatgcttaaatctataaagaggtttccaagag

SEQ ID NO: 853948 - DNA, 33 bp, Homo sapien
ggatgcttaaatctatgaagaggtttccaagag

SEQ ID NO: 853949 - DNA, 33 bp, Homo sapien
ttttctttgcactagacagaggatccatataat

SEQ ID NO: 853950 - DNA, 33 bp, Homo sapien
ttttctttgcactagatagaggatccatataat

SEQ ID NO: 853951 - DNA, 33 bp, Homo sapien
gctcatagacactttccaaatctcaccaaagtg

SEQ ID NO: 853952 - DNA, 33 bp, Homo sapien
gctcatagacactttctaaatctcaccaaagtg

SEQ ID NO: 853953 - DNA, 33 bp, Homo sapien
atttaccacatacaacaacagcttctttcctcc

SEQ ID NO: 853954 - DNA, 33 bp, Homo sapien
atttaccacatacaactacagcttctttcctcc

SEQ ID NO: 853955 - DNA, 33 bp, Homo sapien
cactgtctagggttgacggaggggtgatacaag

SEQ ID NO: 853956 - DNA, 33 bp, Homo sapien
cactgtctagggttgatggaggggtgatacaag

SEQ ID NO: 853957 - DNA, 33 bp, Homo sapien
agccccagcttccagacaacatttctagacaca

SEQ ID NO: 853958 - DNA, 33 bp, Homo sapien
agccccagcttccagataacatttctagacaca

SEQ ID NO: 853959 - DNA, 33 bp, Homo sapien
aagtcccaggcctgtcacaattcaccaaaaact

SEQ ID NO: 853960 - DNA, 33 bp, Homo sapien
aagtcccaggcctgtcgcaattcaccaaaaact

SEQ ID NO: 853961 - DNA, 33 bp, Homo sapien
tcctcgttcataggcagcaattctagaccaacc

SEQ ID NO: 853962 - DNA, 33 bp, Homo sapien
tcctcgttcataggcatcaattctagaccaacc

SEQ ID NO: 853963 - DNA, 33 bp, Homo sapien
acaatgttgatagactaaaagtataagggaatc

SEQ ID NO: 853964 - DNA, 33 bp, Homo sapien
acaatgttgatagacttaaagtataagggaatc

SEQ ID NO: 853965 - DNA, 33 bp, Homo sapien
tatgtttcctcacaaactttgcagtaaaataat

SEQ ID NO: 853966 - DNA, 33 bp, Homo sapien
tatgtttcctcacaaattttgcagtaaaataat

SEQ ID NO: 853967 - DNA, 33 bp, Homo sapien
tgaagataggccaataccaattactcaaactga

SEQ ID NO: 853968 - DNA, 33 bp, Homo sapien
tgaagataggccaatagcaattactcaaactga

SEQ ID NO: 853969 - DNA, 33 bp, Homo sapien
cttttcaccatgtcaacgttacttaattaatcc

SEQ ID NO: 853970 - DNA, 33 bp, Homo sapien
cttttcaccatgtcaatgttacttaattaatcc

SEQ ID NO: 853971 - DNA, 33 bp, Homo sapien
gtgtattctagccgaactggactttgactgcac

SEQ ID NO: 853972 - DNA, 33 bp, Homo sapien
gtgtattctagccgaagtggactttgactgcac

SEQ ID NO: 853973 - DNA, 33 bp, Homo sapien
aacctattgtttagggaataacaacagtaagag

SEQ ID NO: 853974 - DNA, 33 bp, Homo sapien
aacctattgtttaggggataacaacagtaagag

SEQ ID NO: 853975 - DNA, 33 bp, Homo sapien
tgcctagcatatgggaaaataaataacagtaac

SEQ ID NO: 853976 - DNA, 33 bp, Homo sapien
tgcctagcatatgggagaataaataacagtaac

SEQ ID NO: 853977 - DNA, 33 bp, Homo sapien
gagctctttctgggcaaaaccatttcttggcat

SEQ ID NO: 853978 - DNA, 33 bp, Homo sapien
gagctctttctgggcacaaccatttcttggcat

SEQ ID NO: 853979 - DNA, 33 bp, Homo sapien
agtgctaagactctgacagaaagaaaagcaaga

SEQ ID NO: 853980 - DNA, 33 bp, Homo sapien
agtgctaagactctgatagaaagaaaagcaaga

SEQ ID NO: 853981 - DNA, 33 bp, Homo sapien
ttatgaattcaactagaagtggacaagtcagta

SEQ ID NO: 853982 - DNA, 33 bp, Homo sapien
ttatgaattcaactaggagtggacaagtcagta

SEQ ID NO: 853983 - DNA, 33 bp, Homo sapien
tacaaacaactggaacaattaattgaacatgac

SEQ ID NO: 853984 - DNA, 33 bp, Homo sapien
tacaaacaactggaaccattaattgaacatgac

SEQ ID NO: 853985 - DNA, 33 bp, Homo sapien
caaggaacctgaagaagttacttaacatcactg

SEQ ID NO: 853986 - DNA, 33 bp, Homo sapien
caaggaacctgaagaatttacttaacatcactg

SEQ ID NO: 853987 - DNA, 33 bp, Homo sapien
ctttataaagacatcacataaacgctaattatt

SEQ ID NO: 853988 - DNA, 33 bp, Homo sapien
ctttataaagacatcatataaacgctaattatt

SEQ ID NO: 853989 - DNA, 33 bp, Homo sapien
cctttcaggtaatgccactggatctggtattct

SEQ ID NO: 853990 - DNA, 33 bp, Homo sapien
cctttcaggtaatgccgctggatctggtattct

SEQ ID NO: 853991 - DNA, 33 bp, Homo sapien
tttgacacagttaaaagatcttgcatacactgc

SEQ ID NO: 853992 - DNA, 33 bp, Homo sapien
tttgacacagttaaaatatcttgcatacactgc

SEQ ID NO: 853993 - DNA, 33 bp, Homo sapien
cagatggggtgcaaggacccatgaatctcttaa

SEQ ID NO: 853994 - DNA, 33 bp, Homo sapien
cagatggggtgcaagggcccatgaatctcttaa

SEQ ID NO: 853995 - DNA, 33 bp, Homo sapien
gatgtagtgacaaacaacttaaattggactctg

SEQ ID NO: 853996 - DNA, 33 bp, Homo sapien
gatgtagtgacaaacagcttaaattggactctg

SEQ ID NO: 853997 - DNA, 33 bp, Homo sapien
aaatagcaggccaaagacagagttttccaaatt

SEQ ID NO: 853998 - DNA, 33 bp, Homo sapien
aaatagcaggccaaaggcagagttttccaaatt

SEQ ID NO: 853999 - DNA, 33 bp, Homo sapien
attgaggagagttcacagaaaggactattgaca

SEQ ID NO: 854000 - DNA, 33 bp, Homo sapien
attgaggagagttcacggaaaggactattgaca

SEQ ID NO: 854001 - DNA, 33 bp, Homo sapien
cgtatgtgaatggacaactgacccaagcttgca

SEQ ID NO: 854002 - DNA, 33 bp, Homo sapien
cgtatgtgaatggacatctgacccaagcttgca

SEQ ID NO: 854003 - DNA, 33 bp, Homo sapien
catgtacaccagccaacttaaaaatgtagaata

SEQ ID NO: 854004 - DNA, 33 bp, Homo sapien
catgtacaccagccaatttaaaaatgtagaata

SEQ ID NO: 854005 - DNA, 33 bp, Homo sapien
ggctgcgtacaaagcaccttttgtcctacgttt

SEQ ID NO: 854006 - DNA, 33 bp, Homo sapien
ggctgcgtacaaagcatcttttgtcctacgttt

SEQ ID NO: 854007 - DNA, 33 bp, Homo sapien
aactaaaagacaaaaaggtttatcaacttgttt

SEQ ID NO: 854008 - DNA, 33 bp, Homo sapien
aactaaaagacaaaaatgtttatcaacttgttt

SEQ ID NO: 854009 - DNA, 33 bp, Homo sapien
aaactaggctgcctaactcctaaccactatgtt

SEQ ID NO: 854010 - DNA, 33 bp, Homo sapien
aaactaggctgcctaattcctaaccactatgtt

SEQ ID NO: 854011 - DNA, 33 bp, Homo sapien
agtaaaaaggagcccaatgctaattactaagac

SEQ ID NO: 854012 - DNA, 33 bp, Homo sapien
agtaaaaaggagcccattgctaattactaagac

SEQ ID NO: 854013 - DNA, 33 bp, Homo sapien
acagcatgcaacatcgcaaaccaaatcactata

SEQ ID NO: 854014 - DNA, 33 bp, Homo sapien
acagcatgcaacatcgtaaaccaaatcactata

SEQ ID NO: 854015 - DNA, 33 bp, Homo sapien
tgaaactatgatgcaagtaccctccctaaagtc

SEQ ID NO: 854016 - DNA, 33 bp, Homo sapien
tgaaactatgatgcaattaccctccctaaagtc

SEQ ID NO: 854017 - DNA, 33 bp, Homo sapien
cctctggaagacagtcactcttcagggacctga

SEQ ID NO: 854018 - DNA, 33 bp, Homo sapien
cctctggaagacagtcgctcttcagggacctga

SEQ ID NO: 854019 - DNA, 33 bp, Homo sapien
atctaccttgagaaagcaatagtagatctaagc

SEQ ID NO: 854020 - DNA, 33 bp, Homo sapien
atctaccttgagaaaggaatagtagatctaagc

SEQ ID NO: 854021 - DNA, 33 bp, Homo sapien
gcagttatatcacctgaaaaacgtgttaagatg

SEQ ID NO: 854022 - DNA, 33 bp, Homo sapien
gcagttatatcacctgtaaaacgtgttaagatg

SEQ ID NO: 854023 - DNA, 33 bp, Homo sapien
ttgactcgtatttaggacaattatttttatgtc

SEQ ID NO: 854024 - DNA, 33 bp, Homo sapien
ttgactcgtatttagggcaattatttttatgtc

SEQ ID NO: 854025 - DNA, 33 bp, Homo sapien
tctttaaaatcaggaccatacaggaaaggaaca

SEQ ID NO: 854026 - DNA, 33 bp, Homo sapien
tctttaaaatcaggacgatacaggaaaggaaca

SEQ ID NO: 854027 - DNA, 33 bp, Homo sapien
agaacaatagacactgcagataaccgagggggc

SEQ ID NO: 854028 - DNA, 33 bp, Homo sapien
agaacaatagacactgtagataaccgagggggc

SEQ ID NO: 854029 - DNA, 33 bp, Homo sapien
ggggcccaaagctttcccaggctatcagcactc

SEQ ID NO: 854030 - DNA, 33 bp, Homo sapien
ggggcccaaagctttctcaggctatcagcactc

SEQ ID NO: 854031 - DNA, 33 bp, Homo sapien
tgcaccattttttacacagacatttggaaggat

SEQ ID NO: 854032 - DNA, 33 bp, Homo sapien
tgcaccattttttacatagacatttggaaggat

SEQ ID NO: 854033 - DNA, 33 bp, Homo sapien
tgcttctaagttcaccaaggactatatctcatt

SEQ ID NO: 854034 - DNA, 33 bp, Homo sapien
tgcttctaagttcaccgaggactatatctcatt

SEQ ID NO: 854035 - DNA, 33 bp, Homo sapien
agttctctttgacctacactagagaatgagata

SEQ ID NO: 854036 - DNA, 33 bp, Homo sapien
agttctctttgacctatactagagaatgagata

SEQ ID NO: 854037 - DNA, 33 bp, Homo sapien
tgtgacttggaaaacaaacatgtggaaggctgt

SEQ ID NO: 854038 - DNA, 33 bp, Homo sapien
tgtgacttggaaaacagacatgtggaaggctgt

SEQ ID NO: 854039 - DNA, 33 bp, Homo sapien
ggagacaagctagaaaggtattaaagcaagtgt

SEQ ID NO: 854040 - DNA, 33 bp, Homo sapien
ggagacaagctagaaatgtattaaagcaagtgt

SEQ ID NO: 854041 - DNA, 33 bp, Homo sapien
acaattcacagtatccgctacgtccacatcttt

SEQ ID NO: 854042 - DNA, 33 bp, Homo sapien
acaattcacagtatcctctacgtccacatcttt

SEQ ID NO: 854043 - DNA, 33 bp, Homo sapien
tgagttaacaagtggccaacaaaacagtttaaa

SEQ ID NO: 854044 - DNA, 33 bp, Homo sapien
tgagttaacaagtggctaacaaaacagtttaaa

SEQ ID NO: 854045 - DNA, 33 bp, Homo sapien
gatttctgacctctacaactgtaagacaataaa

SEQ ID NO: 854046 - DNA, 33 bp, Homo sapien
gatttctgacctctacgactgtaagacaataaa

SEQ ID NO: 854047 - DNA, 33 bp, Homo sapien
tctgagtccaagtgcaatagtctttctcctttc

SEQ ID NO: 854048 - DNA, 33 bp, Homo sapien
tctgagtccaagtgcagtagtctttctcctttc

SEQ ID NO: 854049 - DNA, 33 bp, Homo sapien
aatatgtccatatgttcaacagatatttgcaga

SEQ ID NO: 854050 - DNA, 33 bp, Homo sapien
aatatgtccatatgtttaacagatatttgcaga

SEQ ID NO: 854051 - DNA, 33 bp, Homo sapien
gctaaatgcagaactgcagagtaggaaacaaaa

SEQ ID NO: 854052 - DNA, 33 bp, Homo sapien
gctaaatgcagaactgtagagtaggaaacaaaa

SEQ ID NO: 854053 - DNA, 33 bp, Homo sapien
actgctgtgatgaacacgaaaatgaaggtgtct

SEQ ID NO: 854054 - DNA, 33 bp, Homo sapien
actgctgtgatgaacatgaaaatgaaggtgtct

SEQ ID NO: 854055 - DNA, 33 bp, Homo sapien
tccagtcacgggaagaactgtaagagaaaaatc

SEQ ID NO: 854056 - DNA, 33 bp, Homo sapien
tccagtcacgggaagacctgtaagagaaaaatc

SEQ ID NO: 854057 - DNA, 33 bp, Homo sapien
taaaccaggtgcttaccctttcacatatccatg

SEQ ID NO: 854058 - DNA, 33 bp, Homo sapien
taaaccaggtgcttactctttcacatatccatg

SEQ ID NO: 854059 - DNA, 33 bp, Homo sapien
gtaacgatcagagtaaagatgacagaaaataaa

SEQ ID NO: 854060 - DNA, 33 bp, Homo sapien
gtaacgatcagagtaaggatgacagaaaataaa

SEQ ID NO: 854061 - DNA, 33 bp, Homo sapien
tacatttttatctatcaagactgagtcaaattt

SEQ ID NO: 854062 - DNA, 33 bp, Homo sapien
tacatttttatctatccagactgagtcaaattt

SEQ ID NO: 854063 - DNA, 33 bp, Homo sapien
caacctgagcaatttgcaatgaataaatgatag

SEQ ID NO: 854064 - DNA, 33 bp, Homo sapien
caacctgagcaatttgtaatgaataaatgatag

SEQ ID NO: 854065 - DNA, 33 bp, Homo sapien
ctggtgataatgcaaaagattcttgtccaggaa

SEQ ID NO: 854066 - DNA, 33 bp, Homo sapien
ctggtgataatgcaaacgattcttgtccaggaa

SEQ ID NO: 854067 - DNA, 33 bp, Homo sapien
ttgttctctatgtatgcatggttcttggaattc

SEQ ID NO: 854068 - DNA, 33 bp, Homo sapien
ttgttctctatgtatgtatggttcttggaattc

SEQ ID NO: 854069 - DNA, 33 bp, Homo sapien
acaggacaaaagggtacgaggtaagaggaggaa

SEQ ID NO: 854070 - DNA, 33 bp, Homo sapien
acaggacaaaagggtatgaggtaagaggaggaa

SEQ ID NO: 854071 - DNA, 33 bp, Homo sapien
gctgttataacagaaaagtttcaaagattcagt

SEQ ID NO: 854072 - DNA, 33 bp, Homo sapien
gctgttataacagaaaggtttcaaagattcagt

SEQ ID NO: 854073 - DNA, 33 bp, Homo sapien
aacattatctggcacacagaaaaagggcaatag

SEQ ID NO: 854074 - DNA, 33 bp, Homo sapien
aacattatctggcacagagaaaaagggcaatag

SEQ ID NO: 854075 - DNA, 33 bp, Homo sapien
aaggcatagtccctgacatgtaggcgcccataa

SEQ ID NO: 854076 - DNA, 33 bp, Homo sapien
aaggcatagtccctgatatgtaggcgcccataa

SEQ ID NO: 854077 - DNA, 33 bp, Homo sapien
caagcctggcactatactacaaagaccaaaaag

SEQ ID NO: 854078 - DNA, 33 bp, Homo sapien
caagcctggcactatattacaaagaccaaaaag

SEQ ID NO: 854079 - DNA, 33 bp, Homo sapien
tatccacataactgggaaaaagaagtcatacag

SEQ ID NO: 854080 - DNA, 33 bp, Homo sapien
tatccacataactggggaaaagaagtcatacag

SEQ ID NO: 854081 - DNA, 33 bp, Homo sapien
gcctctgtcttggcacactgatagcatcacctg

SEQ ID NO: 854082 - DNA, 33 bp, Homo sapien
gcctctgtcttggcacgctgatagcatcacctg

SEQ ID NO: 854083 - DNA, 33 bp, Homo sapien
gggacaagaaccataacccaggcaagatatcac

SEQ ID NO: 854084 - DNA, 33 bp, Homo sapien
gggacaagaaccataatccaggcaagatatcac

SEQ ID NO: 854085 - DNA, 33 bp, Homo sapien
acagaaagtgtgataacgactaagaaggagatg

SEQ ID NO: 854086 - DNA, 33 bp, Homo sapien
acagaaagtgtgataatgactaagaaggagatg

SEQ ID NO: 854087 - DNA, 33 bp, Homo sapien
gcagggagccagggtcaaagaactaagtgttgg

SEQ ID NO: 854088 - DNA, 33 bp, Homo sapien
gcagggagccagggtcgaagaactaagtgttgg

SEQ ID NO: 854089 - DNA, 33 bp, Homo sapien
gcactaaaggggctaaagtgtacgtcatctctg

SEQ ID NO: 854090 - DNA, 33 bp, Homo sapien
gcactaaaggggctaaggtgtacgtcatctctg

SEQ ID NO: 854091 - DNA, 33 bp, Homo sapien
tttataggccttcttcacagtgagaaccttggc

SEQ ID NO: 854092 - DNA, 33 bp, Homo sapien
tttataggccttcttcccagtgagaaccttggc

SEQ ID NO: 854093 - DNA, 33 bp, Homo sapien
atgtagatgtaaaagaaaagaaataatcacatc

SEQ ID NO: 854094 - DNA, 33 bp, Homo sapien
atgtagatgtaaaagagaagaaataatcacatc

SEQ ID NO: 854095 - DNA, 33 bp, Homo sapien
agcagggcagggatacaaaggcatgttgaattt

SEQ ID NO: 854096 - DNA, 33 bp, Homo sapien
agcagggcagggatacgaaggcatgttgaattt

SEQ ID NO: 854097 - DNA, 33 bp, Homo sapien
aaatgcctcattatccactccacagaagcacag

SEQ ID NO: 854098 - DNA, 33 bp, Homo sapien
aaatgcctcattatccgctccacagaagcacag

SEQ ID NO: 854099 - DNA, 33 bp, Homo sapien
gcttctggttaaaacaactggtatttttgcatg

SEQ ID NO: 854100 - DNA, 33 bp, Homo sapien
gcttctggttaaaacatctggtatttttgcatg

SEQ ID NO: 854101 - DNA, 33 bp, Homo sapien
aaagctgtgttaacagaagcatagcggacaagt

SEQ ID NO: 854102 - DNA, 33 bp, Homo sapien
aaagctgtgttaacagtagcatagcggacaagt

SEQ ID NO: 854103 - DNA, 33 bp, Homo sapien
ttgctaccagaccacaaatggcactaacagaaa

SEQ ID NO: 854104 - DNA, 33 bp, Homo sapien
ttgctaccagaccacagatggcactaacagaaa

SEQ ID NO: 854105 - DNA, 33 bp, Homo sapien
ggaatacagtgtaaagaaaggcaagctgggtca

SEQ ID NO: 854106 - DNA, 33 bp, Homo sapien
ggaatacagtgtaaaggaaggcaagctgggtca

SEQ ID NO: 854107 - DNA, 33 bp, Homo sapien
taatgtggaacttttacacctatgtccaaatac

SEQ ID NO: 854108 - DNA, 33 bp, Homo sapien
taatgtggaacttttagacctatgtccaaatac

SEQ ID NO: 854109 - DNA, 33 bp, Homo sapien
gcaggctccggagttacatggcctaagttcaaa

SEQ ID NO: 854110 - DNA, 33 bp, Homo sapien
gcaggctccggagttatatggcctaagttcaaa

SEQ ID NO: 854111 - DNA, 33 bp, Homo sapien
agtgacataaagtaaaaagacaggatgttgtga

SEQ ID NO: 854112 - DNA, 33 bp, Homo sapien
agtgacataaagtaaacagacaggatgttgtga

SEQ ID NO: 854113 - DNA, 33 bp, Homo sapien
atcccacgcttttaggccaaaaccaatgtgtaa

SEQ ID NO: 854114 - DNA, 33 bp, Homo sapien
atcccacgcttttaggtcaaaaccaatgtgtaa

SEQ ID NO: 854115 - DNA, 33 bp, Homo sapien
tcattcattaccaaaccacactcctctgtttaa

SEQ ID NO: 854116 - DNA, 33 bp, Homo sapien
tcattcattaccaaacgacactcctctgtttaa

SEQ ID NO: 854117 - DNA, 33 bp, Homo sapien
gtaacaaaatcatggaaaggctctagctaacct

SEQ ID NO: 854118 - DNA, 33 bp, Homo sapien
gtaacaaaatcatggagaggctctagctaacct

SEQ ID NO: 854119 - DNA, 33 bp, Homo sapien
ggcttggaataaaagacgacttcagatttggac

SEQ ID NO: 854120 - DNA, 33 bp, Homo sapien
ggcttggaataaaagatgacttcagatttggac

SEQ ID NO: 854121 - DNA, 33 bp, Homo sapien
tctactaccttgcccaatacctccatcagtgta

SEQ ID NO: 854122 - DNA, 33 bp, Homo sapien
tctactaccttgcccagtacctccatcagtgta

SEQ ID NO: 854123 - DNA, 33 bp, Homo sapien
ttagagccaaagtgcaatactcaccttgcctca

SEQ ID NO: 854124 - DNA, 33 bp, Homo sapien
ttagagccaaagtgcagtactcaccttgcctca

SEQ ID NO: 854125 - DNA, 33 bp, Homo sapien
agaaaaactagaacaccaaataatggcagccag

SEQ ID NO: 854126 - DNA, 33 bp, Homo sapien
agaaaaactagaacactaaataatggcagccag

SEQ ID NO: 854127 - DNA, 33 bp, Homo sapien
ttaaatgacatttggaatatgcatagagctcgt

SEQ ID NO: 854128 - DNA, 33 bp, Homo sapien
ttaaatgacatttggagtatgcatagagctcgt

SEQ ID NO: 854129 - DNA, 33 bp, Homo sapien
atgttgtgacctaaaaatggatcccaaaggctt

SEQ ID NO: 854130 - DNA, 33 bp, Homo sapien
atgttgtgacctaaaactggatcccaaaggctt

SEQ ID NO: 854131 - DNA, 33 bp, Homo sapien
acaggttttctcaaaccgttcatattatgcagc

SEQ ID NO: 854132 - DNA, 33 bp, Homo sapien
acaggttttctcaaactgttcatattatgcagc

SEQ ID NO: 854133 - DNA, 33 bp, Homo sapien
aggtgctctccatacacgattccactaaacaat

SEQ ID NO: 854134 - DNA, 33 bp, Homo sapien
aggtgctctccatacatgattccactaaacaat

SEQ ID NO: 854135 - DNA, 33 bp, Homo sapien
taaattcagcttaggacgatgtactgcttagag

SEQ ID NO: 854136 - DNA, 33 bp, Homo sapien
taaattcagcttaggatgatgtactgcttagag

SEQ ID NO: 854137 - DNA, 33 bp, Homo sapien
ctgctgaattaaatgacatgaccctgtcttcaa

SEQ ID NO: 854138 - DNA, 33 bp, Homo sapien
ctgctgaattaaatgagatgaccctgtcttcaa

SEQ ID NO: 854139 - DNA, 33 bp, Homo sapien
gaaatcagcatcacaaacatagtaaaatcaagt

SEQ ID NO: 854140 - DNA, 33 bp, Homo sapien
gaaatcagcatcacaagcatagtaaaatcaagt

SEQ ID NO: 854141 - DNA, 33 bp, Homo sapien
gaaagaataagagaacccagtaaggtggctagc

SEQ ID NO: 854142 - DNA, 33 bp, Homo sapien
gaaagaataagagaactcagtaaggtggctagc

SEQ ID NO: 854143 - DNA, 33 bp, Homo sapien
tggcaagcaagtagtagcccagctctgaccaag

SEQ ID NO: 854144 - DNA, 33 bp, Homo sapien
tggcaagcaagtagtatcccagctctgaccaag

SEQ ID NO: 854145 - DNA, 33 bp, Homo sapien
tgtcacttctagaaaacgactgcaacttcttaa

SEQ ID NO: 854146 - DNA, 33 bp, Homo sapien
tgtcacttctagaaaatgactgcaacttcttaa

SEQ ID NO: 854147 - DNA, 33 bp, Homo sapien
aatatgtagataacaaatccatcagcatataaa

SEQ ID NO: 854148 - DNA, 33 bp, Homo sapien
aatatgtagataacaagtccatcagcatataaa

SEQ ID NO: 854149 - DNA, 33 bp, Homo sapien
ttctggaagtgccttgaagagtctataatattt

SEQ ID NO: 854150 - DNA, 33 bp, Homo sapien
ttctggaagtgccttggagagtctataatattt

SEQ ID NO: 854151 - DNA, 33 bp, Homo sapien
atttactgtgaaagttaaaaatctgatttgaaa

SEQ ID NO: 854152 - DNA, 33 bp, Homo sapien
atttactgtgaaagtttaaaatctgatttgaaa

SEQ ID NO: 854153 - DNA, 33 bp, Homo sapien
aaacataaagcaaataacaagtcatctaaatct

SEQ ID NO: 854154 - DNA, 33 bp, Homo sapien
aaacataaagcaaatatcaagtcatctaaatct

SEQ ID NO: 854155 - DNA, 33 bp, Homo sapien
gagatgaaagtacttacaggatctgaacaaggt

SEQ ID NO: 854156 - DNA, 33 bp, Homo sapien
gagatgaaagtacttagaggatctgaacaaggt

SEQ ID NO: 854157 - DNA, 33 bp, Homo sapien
gaaactttcctgataccattcagctaataattt

SEQ ID NO: 854158 - DNA, 33 bp, Homo sapien
gaaactttcctgatacgattcagctaataattt

SEQ ID NO: 854159 - DNA, 33 bp, Homo sapien
tgcccagcacttttaacccaagttctgatttga

SEQ ID NO: 854160 - DNA, 33 bp, Homo sapien
tgcccagcacttttaatccaagttctgatttga

SEQ ID NO: 854161 - DNA, 33 bp, Homo sapien
gatagatttttttctacgacaacaaggttagaa

SEQ ID NO: 854162 - DNA, 33 bp, Homo sapien
gatagatttttttctatgacaacaaggttagaa

SEQ ID NO: 854163 - DNA, 33 bp, Homo sapien
tctgtattaagaaacacgactactcttatcagc

SEQ ID NO: 854164 - DNA, 33 bp, Homo sapien
tctgtattaagaaacatgactactcttatcagc

SEQ ID NO: 854165 - DNA, 33 bp, Homo sapien
catcctcattggctgaagagaaaaatatttcag

SEQ ID NO: 854166 - DNA, 33 bp, Homo sapien
catcctcattggctgatgagaaaaatatttcag

SEQ ID NO: 854167 - DNA, 33 bp, Homo sapien
gtcacatggtcaccaagaattcagaggcggttg

SEQ ID NO: 854168 - DNA, 33 bp, Homo sapien
gtcacatggtcaccaataattcagaggcggttg

SEQ ID NO: 854169 - DNA, 33 bp, Homo sapien
accaccacagttattccagtgactatgtttctg

SEQ ID NO: 854170 - DNA, 33 bp, Homo sapien
accaccacagttattctagtgactatgtttctg

SEQ ID NO: 854171 - DNA, 33 bp, Homo sapien
ccatggattactacagaaaatatgcagctatct

SEQ ID NO: 854172 - DNA, 33 bp, Homo sapien
ccatggattactacaggaaatatgcagctatct

SEQ ID NO: 854173 - DNA, 33 bp, Homo sapien
ttctatttatcttcacacataattaacactgaa

SEQ ID NO: 854174 - DNA, 33 bp, Homo sapien
ttctatttatcttcactcataattaacactgaa

SEQ ID NO: 854175 - DNA, 33 bp, Homo sapien
ttaccaagtgtatcaacgaaagtgcattatcaa

SEQ ID NO: 854176 - DNA, 33 bp, Homo sapien
ttaccaagtgtatcaatgaaagtgcattatcaa

SEQ ID NO: 854177 - DNA, 33 bp, Homo sapien
aagataaaaaggcatgcaagtatgagagtgtgg

SEQ ID NO: 854178 - DNA, 33 bp, Homo sapien
aagataaaaaggcatgtaagtatgagagtgtgg

SEQ ID NO: 854179 - DNA, 33 bp, Homo sapien
acatatacgcacataaaaatctgataactttca

SEQ ID NO: 854180 - DNA, 33 bp, Homo sapien
acatatacgcacataagaatctgataactttca

SEQ ID NO: 854181 - DNA, 33 bp, Homo sapien
cagattggcttagataagtaagcactcatataa

SEQ ID NO: 854182 - DNA, 33 bp, Homo sapien
cagattggcttagataggtaagcactcatataa

SEQ ID NO: 854183 - DNA, 33 bp, Homo sapien
tagctagaaggatcaaagacaagggtgacaccg

SEQ ID NO: 854184 - DNA, 33 bp, Homo sapien
tagctagaaggatcaatgacaagggtgacaccg

SEQ ID NO: 854185 - DNA, 33 bp, Homo sapien
attacttttggagaagaatcttgccctctgcaa

SEQ ID NO: 854186 - DNA, 33 bp, Homo sapien
attacttttggagaagtatcttgccctctgcaa

SEQ ID NO: 854187 - DNA, 33 bp, Homo sapien
tcgaggaaacgcattgcattcctattcactatt

SEQ ID NO: 854188 - DNA, 33 bp, Homo sapien
tcgaggaaacgcattgtattcctattcactatt

SEQ ID NO: 854189 - DNA, 33 bp, Homo sapien
tatggaaaacatccaaagtgtaaaataattggc

SEQ ID NO: 854190 - DNA, 33 bp, Homo sapien
tatggaaaacatccaacgtgtaaaataattggc

SEQ ID NO: 854191 - DNA, 33 bp, Homo sapien
gcctctgagtgaaagagtaagaggaactaataa

SEQ ID NO: 854192 - DNA, 33 bp, Homo sapien
gcctctgagtgaaagattaagaggaactaataa

SEQ ID NO: 854193 - DNA, 33 bp, Homo sapien
gagtggaaaatcaaagacggagctccagggaag

SEQ ID NO: 854194 - DNA, 33 bp, Homo sapien
gagtggaaaatcaaaggcggagctccagggaag

SEQ ID NO: 854195 - DNA, 33 bp, Homo sapien
ccaactagaggaagagccattgtagaactaggt

SEQ ID NO: 854196 - DNA, 33 bp, Homo sapien
ccaactagaggaagagtcattgtagaactaggt

SEQ ID NO: 854197 - DNA, 33 bp, Homo sapien
aacaaaacagagaaacagaaaatagtaaataca

SEQ ID NO: 854198 - DNA, 33 bp, Homo sapien
aacaaaacagagaaacggaaaatagtaaataca

SEQ ID NO: 854199 - DNA, 33 bp, Homo sapien
agaaagcaggaatgcgaatgacttttgccaatc

SEQ ID NO: 854200 - DNA, 33 bp, Homo sapien
agaaagcaggaatgcgcatgacttttgccaatc

SEQ ID NO: 854201 - DNA, 33 bp, Homo sapien
tctaccttgtatagtccaataatgacatcctag

SEQ ID NO: 854202 - DNA, 33 bp, Homo sapien
tctaccttgtatagtctaataatgacatcctag

SEQ ID NO: 854203 - DNA, 33 bp, Homo sapien
ttaactgtaaaaccaccatctagatgacaagaa

SEQ ID NO: 854204 - DNA, 33 bp, Homo sapien
ttaactgtaaaaccactatctagatgacaagaa

SEQ ID NO: 854205 - DNA, 33 bp, Homo sapien
ttctactgcttgcttcgctgtactaagatagtg

SEQ ID NO: 854206 - DNA, 33 bp, Homo sapien
ttctactgcttgcttctctgtactaagatagtg

SEQ ID NO: 854207 - DNA, 33 bp, Homo sapien
ttaatgggccttagtacgtaagacaagaataag

SEQ ID NO: 854208 - DNA, 33 bp, Homo sapien
ttaatgggccttagtatgtaagacaagaataag

SEQ ID NO: 854209 - DNA, 33 bp, Homo sapien
gaaccctatcaccctcaatgttttcttcctttc

SEQ ID NO: 854210 - DNA, 33 bp, Homo sapien
gaaccctatcaccctcgatgttttcttcctttc

SEQ ID NO: 854211 - DNA, 33 bp, Homo sapien
tccttccagcactctccactcacaaaattaaca

SEQ ID NO: 854212 - DNA, 33 bp, Homo sapien
tccttccagcactctctactcacaaaattaaca

SEQ ID NO: 854213 - DNA, 33 bp, Homo sapien
tgagttaaattacatactatccttgtgcttgaa

SEQ ID NO: 854214 - DNA, 33 bp, Homo sapien
tgagttaaattacatattatccttgtgcttgaa

SEQ ID NO: 854215 - DNA, 33 bp, Homo sapien
tttagggcccaggtgaaatgagttaggcatcca

SEQ ID NO: 854216 - DNA, 33 bp, Homo sapien
tttagggcccaggtgagatgagttaggcatcca

SEQ ID NO: 854217 - DNA, 33 bp, Homo sapien
gaaggctttgggtaaacatcaaagtaccagaag

SEQ ID NO: 854218 - DNA, 33 bp, Homo sapien
gaaggctttgggtaaatatcaaagtaccagaag

SEQ ID NO: 854219 - DNA, 33 bp, Homo sapien
agatatcaaacttccaactacttagtcactgca

SEQ ID NO: 854220 - DNA, 33 bp, Homo sapien
agatatcaaacttccagctacttagtcactgca

SEQ ID NO: 854221 - DNA, 33 bp, Homo sapien
caggagatagctatacagatataagatcctggg

SEQ ID NO: 854222 - DNA, 33 bp, Homo sapien
caggagatagctatacggatataagatcctggg

SEQ ID NO: 854223 - DNA, 33 bp, Homo sapien
catttcatgcaacaagaagcaaggtttttggac

SEQ ID NO: 854224 - DNA, 33 bp, Homo sapien
catttcatgcaacaagcagcaaggtttttggac

SEQ ID NO: 854225 - DNA, 33 bp, Homo sapien
atgattctctccacaaatgcagtaaatttgcag

SEQ ID NO: 854226 - DNA, 33 bp, Homo sapien
atgattctctccacaagtgcagtaaatttgcag

SEQ ID NO: 854227 - DNA, 33 bp, Homo sapien
ggcaataccgcaattacgctctacccccaagtc

SEQ ID NO: 854228 - DNA, 33 bp, Homo sapien
ggcaataccgcaattatgctctacccccaagtc

SEQ ID NO: 854229 - DNA, 33 bp, Homo sapien
ccatccattcataaaactgctcctcttcatctt

SEQ ID NO: 854230 - DNA, 33 bp, Homo sapien
ccatccattcataaaattgctcctcttcatctt

SEQ ID NO: 854231 - DNA, 33 bp, Homo sapien
atcatactcaatggtcaaaggccggaagcattc

SEQ ID NO: 854232 - DNA, 33 bp, Homo sapien
atcatactcaatggtcgaaggccggaagcattc

SEQ ID NO: 854233 - DNA, 33 bp, Homo sapien
ttctttaaaacttctccaatgatcaatgaccac

SEQ ID NO: 854234 - DNA, 33 bp, Homo sapien
ttctttaaaacttctctaatgatcaatgaccac

SEQ ID NO: 854235 - DNA, 33 bp, Homo sapien
aactgtactactcctaaaatcataaatttcaat

SEQ ID NO: 854236 - DNA, 33 bp, Homo sapien
aactgtactactcctataatcataaatttcaat

SEQ ID NO: 854237 - DNA, 33 bp, Homo sapien
taaaatggaccaaagtcaatctacatcgaattc

SEQ ID NO: 854238 - DNA, 33 bp, Homo sapien
taaaatggaccaaagttaatctacatcgaattc

SEQ ID NO: 854239 - DNA, 33 bp, Homo sapien
tcacaatattctggaactggaaaaaatcttcaa

SEQ ID NO: 854240 - DNA, 33 bp, Homo sapien
tcacaatattctggaattggaaaaaatcttcaa

SEQ ID NO: 854241 - DNA, 33 bp, Homo sapien
tcatgtaactaaccacagaaagattaggggtag

SEQ ID NO: 854242 - DNA, 33 bp, Homo sapien
tcatgtaactaaccaccgaaagattaggggtag

SEQ ID NO: 854243 - DNA, 33 bp, Homo sapien
ggttccagtcttcccaatggaatgaagccaatc

SEQ ID NO: 854244 - DNA, 33 bp, Homo sapien
ggttccagtcttcccagtggaatgaagccaatc

SEQ ID NO: 854245 - DNA, 33 bp, Homo sapien
atctgtacagaccacaagttctttaagagaagg

SEQ ID NO: 854246 - DNA, 33 bp, Homo sapien
atctgtacagaccacatgttctttaagagaagg

SEQ ID NO: 854247 - DNA, 33 bp, Homo sapien
ctttaattttagatgacctcatgcctagaaatg

SEQ ID NO: 854248 - DNA, 33 bp, Homo sapien
ctttaattttagatgatctcatgcctagaaatg

SEQ ID NO: 854249 - DNA, 33 bp, Homo sapien
gagtgatcactctatcaagaaagaccacagagt

SEQ ID NO: 854250 - DNA, 33 bp, Homo sapien
gagtgatcactctatcgagaaagaccacagagt

SEQ ID NO: 854251 - DNA, 33 bp, Homo sapien
aagttcagcaattataacatcaacagctaacat

SEQ ID NO: 854252 - DNA, 33 bp, Homo sapien
aagttcagcaattatagcatcaacagctaacat

SEQ ID NO: 854253 - DNA, 33 bp, Homo sapien
tcattttggactctgaggatttatattttaaac

SEQ ID NO: 854254 - DNA, 33 bp, Homo sapien
tcattttggactctgatgatttatattttaaac

SEQ ID NO: 854255 - DNA, 33 bp, Homo sapien
atcacgatatgcctcaataagttttcctttgtg

SEQ ID NO: 854256 - DNA, 33 bp, Homo sapien
atcacgatatgcctcagtaagttttcctttgtg

SEQ ID NO: 854257 - DNA, 33 bp, Homo sapien
attctctgaagatttaaatttctgacctagtga

SEQ ID NO: 854258 - DNA, 33 bp, Homo sapien
attctctgaagatttatatttctgacctagtga

SEQ ID NO: 854259 - DNA, 33 bp, Homo sapien
tcctcctgtccaaagcaatttgtcctgaaaaag

SEQ ID NO: 854260 - DNA, 33 bp, Homo sapien
tcctcctgtccaaagcgatttgtcctgaaaaag

SEQ ID NO: 854261 - DNA, 33 bp, Homo sapien
aaaaacaatttgcaacaacatagatggaaccgg

SEQ ID NO: 854262 - DNA, 33 bp, Homo sapien
aaaaacaatttgcaaccacatagatggaaccgg

SEQ ID NO: 854263 - DNA, 33 bp, Homo sapien
ggtagctggcttcaaagaatagatgtgaatgtc

SEQ ID NO: 854264 - DNA, 33 bp, Homo sapien
ggtagctggcttcaaataatagatgtgaatgtc

SEQ ID NO: 854265 - DNA, 33 bp, Homo sapien
ggttttctgccccaaacttcaagttagtttctt

SEQ ID NO: 854266 - DNA, 33 bp, Homo sapien
ggttttctgccccaaagttcaagttagtttctt

SEQ ID NO: 854267 - DNA, 33 bp, Homo sapien
tcaaaaatgtgaacaacgttggggtagtggtgt

SEQ ID NO: 854268 - DNA, 33 bp, Homo sapien
tcaaaaatgtgaacaatgttggggtagtggtgt

SEQ ID NO: 854269 - DNA, 33 bp, Homo sapien
tgaaagattgagccaacattgaagagaaagttt

SEQ ID NO: 854270 - DNA, 33 bp, Homo sapien
tgaaagattgagccaagattgaagagaaagttt

SEQ ID NO: 854271 - DNA, 33 bp, Homo sapien
gcaagaagagactaacacaattcctaaggttgg

SEQ ID NO: 854272 - DNA, 33 bp, Homo sapien
gcaagaagagactaacgcaattcctaaggttgg

SEQ ID NO: 854273 - DNA, 33 bp, Homo sapien
gtgttctctgagtataacttcttgaaactgctc

SEQ ID NO: 854274 - DNA, 33 bp, Homo sapien
gtgttctctgagtatatcttcttgaaactgctc

SEQ ID NO: 854275 - DNA, 33 bp, Homo sapien
aatagatgactacaaacattttgagataaatca

SEQ ID NO: 854276 - DNA, 33 bp, Homo sapien
aatagatgactacaaagattttgagataaatca

SEQ ID NO: 854277 - DNA, 33 bp, Homo sapien
gcatttactgtactgccaagagggacatctgag

SEQ ID NO: 854278 - DNA, 33 bp, Homo sapien
gcatttactgtactgctaagagggacatctgag

SEQ ID NO: 854279 - DNA, 33 bp, Homo sapien
gaatggcctctggctgcagcattatagcaggga

SEQ ID NO: 854280 - DNA, 33 bp, Homo sapien
gaatggcctctggctgtagcattatagcaggga

SEQ ID NO: 854281 - DNA, 33 bp, Homo sapien
taaattctcaacccccagacaaatatttcagga

SEQ ID NO: 854282 - DNA, 33 bp, Homo sapien
taaattctcaacccccggacaaatatttcagga

SEQ ID NO: 854283 - DNA, 33 bp, Homo sapien
gatgcaagtggttcacagacaagccctgagaag

SEQ ID NO: 854284 - DNA, 33 bp, Homo sapien
gatgcaagtggttcaccgacaagccctgagaag

SEQ ID NO: 854285 - DNA, 33 bp, Homo sapien
ttaacatcacgtaagactaatacctggtggtct

SEQ ID NO: 854286 - DNA, 33 bp, Homo sapien
ttaacatcacgtaagagtaatacctggtggtct

SEQ ID NO: 854287 - DNA, 33 bp, Homo sapien
cctgattgaaatagtactaacagtcctatagtt

SEQ ID NO: 854288 - DNA, 33 bp, Homo sapien
cctgattgaaatagtattaacagtcctatagtt

SEQ ID NO: 854289 - DNA, 33 bp, Homo sapien
aaataaactacggaaaatccatagtagcaattg

SEQ ID NO: 854290 - DNA, 33 bp, Homo sapien
aaataaactacggaaagtccatagtagcaattg

SEQ ID NO: 854291 - DNA, 33 bp, Homo sapien
atacaaagataaatgggcattgcaggtcacacc

SEQ ID NO: 854292 - DNA, 33 bp, Homo sapien
atacaaagataaatggtcattgcaggtcacacc

SEQ ID NO: 854293 - DNA, 33 bp, Homo sapien
gttgttcaatgtcacacaactgagcacgctggg

SEQ ID NO: 854294 - DNA, 33 bp, Homo sapien
gttgttcaatgtcacataactgagcacgctggg

SEQ ID NO: 854295 - DNA, 33 bp, Homo sapien
gagttatgtttctgaaatctcattgggaccctc

SEQ ID NO: 854296 - DNA, 33 bp, Homo sapien
gagttatgtttctgaattctcattgggaccctc

SEQ ID NO: 854297 - DNA, 33 bp, Homo sapien
agggtgagatggtctcaaatagagataaggaac

SEQ ID NO: 854298 - DNA, 33 bp, Homo sapien
agggtgagatggtctcgaatagagataaggaac

SEQ ID NO: 854299 - DNA, 33 bp, Homo sapien
agcagcactaaatagacgaagacaatgtgctaa

SEQ ID NO: 854300 - DNA, 33 bp, Homo sapien
agcagcactaaatagatgaagacaatgtgctaa

SEQ ID NO: 854301 - DNA, 33 bp, Homo sapien
ttgggcctcagaaggcaagatttgaacaaagac

SEQ ID NO: 854302 - DNA, 33 bp, Homo sapien
ttgggcctcagaaggcgagatttgaacaaagac

SEQ ID NO: 854303 - DNA, 33 bp, Homo sapien
atgtgtccatggttgaagagaatagctttgtca

SEQ ID NO: 854304 - DNA, 33 bp, Homo sapien
atgtgtccatggttgaggagaatagctttgtca

SEQ ID NO: 854305 - DNA, 33 bp, Homo sapien
ggtagagaatgtgccaatgatggaatatgggag

SEQ ID NO: 854306 - DNA, 33 bp, Homo sapien
ggtagagaatgtgccagtgatggaatatgggag

SEQ ID NO: 854307 - DNA, 33 bp, Homo sapien
ctggaacatttactaaagtccagggtaatagga

SEQ ID NO: 854308 - DNA, 33 bp, Homo sapien
ctggaacatttactaacgtccagggtaatagga

SEQ ID NO: 854309 - DNA, 33 bp, Homo sapien
gttatccatgccattactaaagttctagcataa

SEQ ID NO: 854310 - DNA, 33 bp, Homo sapien
gttatccatgccattattaaagttctagcataa

SEQ ID NO: 854311 - DNA, 33 bp, Homo sapien
atcgccggtcagagaaagtttcataggagagat

SEQ ID NO: 854312 - DNA, 33 bp, Homo sapien
atcgccggtcagagaacgtttcataggagagat

SEQ ID NO: 854313 - DNA, 33 bp, Homo sapien
gttcctagttttaacaaggcagcaatggcattt

SEQ ID NO: 854314 - DNA, 33 bp, Homo sapien
gttcctagttttaacacggcagcaatggcattt

SEQ ID NO: 854315 - DNA, 33 bp, Homo sapien
cgcttaaaacagcttagaatcagtactccaaga

SEQ ID NO: 854316 - DNA, 33 bp, Homo sapien
cgcttaaaacagcttataatcagtactccaaga

SEQ ID NO: 854317 - DNA, 33 bp, Homo sapien
ggtagataaagccaacccctcagcattattagc

SEQ ID NO: 854318 - DNA, 33 bp, Homo sapien
ggtagataaagccaactcctcagcattattagc

SEQ ID NO: 854319 - DNA, 33 bp, Homo sapien
aatggaagttggcatgcagagtataacaaaggc

SEQ ID NO: 854320 - DNA, 33 bp, Homo sapien
aatggaagttggcatgtagagtataacaaaggc

SEQ ID NO: 854321 - DNA, 33 bp, Homo sapien
tattttgattcctaaccctaccaaagcaatata

SEQ ID NO: 854322 - DNA, 33 bp, Homo sapien
tattttgattcctaactctaccaaagcaatata

SEQ ID NO: 854323 - DNA, 33 bp, Homo sapien
ggtggattcatgattgaaagctatgagaagatt

SEQ ID NO: 854324 - DNA, 33 bp, Homo sapien
ggtggattcatgattgcaagctatgagaagatt

SEQ ID NO: 854325 - DNA, 33 bp, Homo sapien
ccagggtaacactggcacttaccagtcagaatc

SEQ ID NO: 854326 - DNA, 33 bp, Homo sapien
ccagggtaacactggcgcttaccagtcagaatc

SEQ ID NO: 854327 - DNA, 33 bp, Homo sapien
attatgggtaactgacaagccttataatgaagt

SEQ ID NO: 854328 - DNA, 33 bp, Homo sapien
attatgggtaactgactagccttataatgaagt

SEQ ID NO: 854329 - DNA, 33 bp, Homo sapien
aacattcagaaccgaaatatgatgaaaatagct

SEQ ID NO: 854330 - DNA, 33 bp, Homo sapien
aacattcagaaccgaactatgatgaaaatagct

SEQ ID NO: 854331 - DNA, 33 bp, Homo sapien
caaaaatggctcagcaacatttgacccaccact

SEQ ID NO: 854332 - DNA, 33 bp, Homo sapien
caaaaatggctcagcagcatttgacccaccact

SEQ ID NO: 854333 - DNA, 33 bp, Homo sapien
atttgttccaaaaggcacttgtaagcctgcctc

SEQ ID NO: 854334 - DNA, 33 bp, Homo sapien
atttgttccaaaaggcccttgtaagcctgcctc

SEQ ID NO: 854335 - DNA, 33 bp, Homo sapien
ttgatgtaagctgacaatataatgatagtccaa

SEQ ID NO: 854336 - DNA, 33 bp, Homo sapien
ttgatgtaagctgacactataatgatagtccaa

SEQ ID NO: 854337 - DNA, 33 bp, Homo sapien
aaccggctggcaacctcaggtaaaggatcctca

SEQ ID NO: 854338 - DNA, 33 bp, Homo sapien
aaccggctggcaacctgaggtaaaggatcctca

SEQ ID NO: 854339 - DNA, 33 bp, Homo sapien
acagcaatctttaagggacatggagtcaaatga

SEQ ID NO: 854340 - DNA, 33 bp, Homo sapien
acagcaatctttaaggtacatggagtcaaatga

SEQ ID NO: 854341 - DNA, 33 bp, Homo sapien
cagggtaggtataactcaatcaagtgtgcaaat

SEQ ID NO: 854342 - DNA, 33 bp, Homo sapien
cagggtaggtataacttaatcaagtgtgcaaat

SEQ ID NO: 854343 - DNA, 33 bp, Homo sapien
aagtaattgacaatgacaggattagaagacaag

SEQ ID NO: 854344 - DNA, 33 bp, Homo sapien
aagtaattgacaatgataggattagaagacaag

SEQ ID NO: 854345 - DNA, 33 bp, Homo sapien
atcctagaatagataaggagtagtttcagaatt

SEQ ID NO: 854346 - DNA, 33 bp, Homo sapien
atcctagaatagataatgagtagtttcagaatt

SEQ ID NO: 854347 - DNA, 33 bp, Homo sapien
tccttttctttatactaacaatgacaggtttaa

SEQ ID NO: 854348 - DNA, 33 bp, Homo sapien
tccttttctttatactgacaatgacaggtttaa

SEQ ID NO: 854349 - DNA, 33 bp, Homo sapien
atattgccttggaacaaaggaacaaagtcaact

SEQ ID NO: 854350 - DNA, 33 bp, Homo sapien
atattgccttggaacagaggaacaaagtcaact

SEQ ID NO: 854351 - DNA, 33 bp, Homo sapien
cctgaataaatcaaaactcaaaaatgtaaaact

SEQ ID NO: 854352 - DNA, 33 bp, Homo sapien
cctgaataaatcaaaattcaaaaatgtaaaact

SEQ ID NO: 854353 - DNA, 33 bp, Homo sapien
attatgcattatcggactccacagctgatgaca

SEQ ID NO: 854354 - DNA, 33 bp, Homo sapien
attatgcattatcggattccacagctgatgaca

SEQ ID NO: 854355 - DNA, 33 bp, Homo sapien
aaagacaaatctaagaactgagctgtaaaacta

SEQ ID NO: 854356 - DNA, 33 bp, Homo sapien
aaagacaaatctaagacctgagctgtaaaacta

SEQ ID NO: 854357 - DNA, 33 bp, Homo sapien
acactgactcttacaaatgatagctggaatcag

SEQ ID NO: 854358 - DNA, 33 bp, Homo sapien
acactgactcttacaagtgatagctggaatcag

SEQ ID NO: 854359 - DNA, 33 bp, Homo sapien
gcctcacagtggaaacacggatacgaagtcagc

SEQ ID NO: 854360 - DNA, 33 bp, Homo sapien
gcctcacagtggaaacgcggatacgaagtcagc

SEQ ID NO: 854361 - DNA, 33 bp, Homo sapien
caaaagccaggaaaaggaggtgaaagatgtaaa

SEQ ID NO: 854362 - DNA, 33 bp, Homo sapien
caaaagccaggaaaagtaggtgaaagatgtaaa

SEQ ID NO: 854363 - DNA, 33 bp, Homo sapien
taataaaaatcagtgccatctattaagtctgac

SEQ ID NO: 854364 - DNA, 33 bp, Homo sapien
taataaaaatcagtgctatctattaagtctgac

SEQ ID NO: 854365 - DNA, 33 bp, Homo sapien
cacatgaataaaaccacgcaggccaggcaaggt

SEQ ID NO: 854366 - DNA, 33 bp, Homo sapien
cacatgaataaaaccatgcaggccaggcaaggt

SEQ ID NO: 854367 - DNA, 33 bp, Homo sapien
ttatttttctcatgtccgaaaagtactgttaac

SEQ ID NO: 854368 - DNA, 33 bp, Homo sapien
ttatttttctcatgtctgaaaagtactgttaac

SEQ ID NO: 854369 - DNA, 33 bp, Homo sapien
atagttgctatattaaaaacatcataagctaca

SEQ ID NO: 854370 - DNA, 33 bp, Homo sapien
atagttgctatattaagaacatcataagctaca

SEQ ID NO: 854371 - DNA, 33 bp, Homo sapien
aactagaatcactacaaggtcaaattctttcat

SEQ ID NO: 854372 - DNA, 33 bp, Homo sapien
aactagaatcactacagggtcaaattctttcat

SEQ ID NO: 854373 - DNA, 33 bp, Homo sapien
cctaagccagcttgcacagactgagaaggcaga

SEQ ID NO: 854374 - DNA, 33 bp, Homo sapien
cctaagccagcttgcagagactgagaaggcaga

SEQ ID NO: 854375 - DNA, 33 bp, Homo sapien
gaactgcaaggtttaaagcccaggtaaagagaa

SEQ ID NO: 854376 - DNA, 33 bp, Homo sapien
gaactgcaaggtttaatgcccaggtaaagagaa

SEQ ID NO: 854377 - DNA, 33 bp, Homo sapien
cttcagagtttctttaccacccaagtcaacagt

SEQ ID NO: 854378 - DNA, 33 bp, Homo sapien
cttcagagtttctttatcacccaagtcaacagt

SEQ ID NO: 854379 - DNA, 33 bp, Homo sapien
taggagtcagaggcttaaagaaggaacggcttt

SEQ ID NO: 854380 - DNA, 33 bp, Homo sapien
taggagtcagaggcttgaagaaggaacggcttt

SEQ ID NO: 854381 - DNA, 33 bp, Homo sapien
tatatgtcatgatttgaaagaacagttatcaaa

SEQ ID NO: 854382 - DNA, 33 bp, Homo sapien
tatatgtcatgatttggaagaacagttatcaaa

SEQ ID NO: 854383 - DNA, 33 bp, Homo sapien
gaccaactctaatatcaacaatttggcaggttt

SEQ ID NO: 854384 - DNA, 33 bp, Homo sapien
gaccaactctaatatcgacaatttggcaggttt

SEQ ID NO: 854385 - DNA, 33 bp, Homo sapien
ggcctatagagattccacaagtacctttaaagg

SEQ ID NO: 854386 - DNA, 33 bp, Homo sapien
ggcctatagagattccgcaagtacctttaaagg

SEQ ID NO: 854387 - DNA, 33 bp, Homo sapien
ctttgtagcccgagaacagaacaataaattatc

SEQ ID NO: 854388 - DNA, 33 bp, Homo sapien
ctttgtagcccgagaagagaacaataaattatc

SEQ ID NO: 854389 - DNA, 33 bp, Homo sapien
gccatattccctcccacagttacaaagtatcat

SEQ ID NO: 854390 - DNA, 33 bp, Homo sapien
gccatattccctcccatagttacaaagtatcat

SEQ ID NO: 854391 - DNA, 33 bp, Homo sapien
ttttagtcaggtgatcagagtgaatattatcag

SEQ ID NO: 854392 - DNA, 33 bp, Homo sapien
ttttagtcaggtgatcggagtgaatattatcag

SEQ ID NO: 854393 - DNA, 33 bp, Homo sapien
agtttcagagtccaggcagagtgggaggacatt

SEQ ID NO: 854394 - DNA, 33 bp, Homo sapien
agtttcagagtccaggtagagtgggaggacatt

SEQ ID NO: 854395 - DNA, 33 bp, Homo sapien
tttctcactctagttaacactataggaaagaca

SEQ ID NO: 854396 - DNA, 33 bp, Homo sapien
tttctcactctagttagcactataggaaagaca

SEQ ID NO: 854397 - DNA, 33 bp, Homo sapien
gctaagagttttagagcaagtagctaggcagac

SEQ ID NO: 854398 - DNA, 33 bp, Homo sapien
gctaagagttttagagtaagtagctaggcagac

SEQ ID NO: 854399 - DNA, 33 bp, Homo sapien
acatattatcccagcaccaggggagcattgttc

SEQ ID NO: 854400 - DNA, 33 bp, Homo sapien
acatattatcccagcatcaggggagcattgttc

SEQ ID NO: 854401 - DNA, 33 bp, Homo sapien
ggacaccttcagaaaaagataacacaggtgtgg

SEQ ID NO: 854402 - DNA, 33 bp, Homo sapien
ggacaccttcagaaaaggataacacaggtgtgg

SEQ ID NO: 854403 - DNA, 33 bp, Homo sapien
taatgaactgaaggaccgatgaagatttggtga

SEQ ID NO: 854404 - DNA, 33 bp, Homo sapien
taatgaactgaaggactgatgaagatttggtga

SEQ ID NO: 854405 - DNA, 33 bp, Homo sapien
aatacctggtttgagaaatcatagtttgtgcag

SEQ ID NO: 854406 - DNA, 33 bp, Homo sapien
aatacctggtttgagacatcatagtttgtgcag

SEQ ID NO: 854407 - DNA, 33 bp, Homo sapien
atgttgtaacaaacaaaatagaacatcctttaa

SEQ ID NO: 854408 - DNA, 33 bp, Homo sapien
atgttgtaacaaacaacatagaacatcctttaa

SEQ ID NO: 854409 - DNA, 33 bp, Homo sapien
aggttgacgagatcaaatattgtgtgagttaaa

SEQ ID NO: 854410 - DNA, 33 bp, Homo sapien
aggttgacgagatcaagtattgtgtgagttaaa

SEQ ID NO: 854411 - DNA, 33 bp, Homo sapien
ttacatgcagagtagcagaaaattaagacagaa

SEQ ID NO: 854412 - DNA, 33 bp, Homo sapien
ttacatgcagagtagcggaaaattaagacagaa

SEQ ID NO: 854413 - DNA, 33 bp, Homo sapien
tctgccttgaacagaacagaaagaggatttgtt

SEQ ID NO: 854414 - DNA, 33 bp, Homo sapien
tctgccttgaacagaagagaaagaggatttgtt

SEQ ID NO: 854415 - DNA, 33 bp, Homo sapien
agcttgcttatgcttccattagttctatctgac

SEQ ID NO: 854416 - DNA, 33 bp, Homo sapien
agcttgcttatgcttctattagttctatctgac

SEQ ID NO: 854417 - DNA, 33 bp, Homo sapien
cagagaggattgttcaggaggacattggagaca

SEQ ID NO: 854418 - DNA, 33 bp, Homo sapien
cagagaggattgttcatgaggacattggagaca

SEQ ID NO: 854419 - DNA, 33 bp, Homo sapien
ggttacggcctaatgccacccaatttgtatcct

SEQ ID NO: 854420 - DNA, 33 bp, Homo sapien
ggttacggcctaatgctacccaatttgtatcct

SEQ ID NO: 854421 - DNA, 33 bp, Homo sapien
atcaaaatgagggtgaaaactaagaaggaaaca

SEQ ID NO: 854422 - DNA, 33 bp, Homo sapien
atcaaaatgagggtgagaactaagaaggaaaca

SEQ ID NO: 854423 - DNA, 33 bp, Homo sapien
atctacacagtgtatgacaataaattacaacac

SEQ ID NO: 854424 - DNA, 33 bp, Homo sapien
atctacacagtgtatggcaataaattacaacac

SEQ ID NO: 854425 - DNA, 33 bp, Homo sapien
tttttgtatttctcatgactgaatagctccacc

SEQ ID NO: 854426 - DNA, 33 bp, Homo sapien
tttttgtatttctcattactgaatagctccacc

SEQ ID NO: 854427 - DNA, 33 bp, Homo sapien
tgatgtcaacttgtaaaggaacaaaatataatg

SEQ ID NO: 854428 - DNA, 33 bp, Homo sapien
tgatgtcaacttgtaatggaacaaaatataatg

SEQ ID NO: 854429 - DNA, 33 bp, Homo sapien
ctatatgagttgtatcaatggataaccgaaagt

SEQ ID NO: 854430 - DNA, 33 bp, Homo sapien
ctatatgagttgtatcgatggataaccgaaagt

SEQ ID NO: 854431 - DNA, 33 bp, Homo sapien
tgaagtacagattttcgaaagcatattttgttg

SEQ ID NO: 854432 - DNA, 33 bp, Homo sapien
tgaagtacagattttctaaagcatattttgttg

SEQ ID NO: 854433 - DNA, 33 bp, Homo sapien
actgggccaggacaccacatattggctgctgag

SEQ ID NO: 854434 - DNA, 33 bp, Homo sapien
actgggccaggacaccgcatattggctgctgag

SEQ ID NO: 854435 - DNA, 33 bp, Homo sapien
ccatagagtatcattaaagtgaagacttgaatt

SEQ ID NO: 854436 - DNA, 33 bp, Homo sapien
ccatagagtatcattacagtgaagacttgaatt

SEQ ID NO: 854437 - DNA, 33 bp, Homo sapien
aatcagactgggagaaaaaagtggaatgcttgt

SEQ ID NO: 854438 - DNA, 33 bp, Homo sapien
aatcagactgggagaacaaagtggaatgcttgt

SEQ ID NO: 854439 - DNA, 33 bp, Homo sapien
gtaaatttacagctgacgattctctgccagaag

SEQ ID NO: 854440 - DNA, 33 bp, Homo sapien
gtaaatttacagctgatgattctctgccagaag

SEQ ID NO: 854441 - DNA, 33 bp, Homo sapien
tcttctacaacctgccaaaacagccattaggag

SEQ ID NO: 854442 - DNA, 33 bp, Homo sapien
tcttctacaacctgccgaaacagccattaggag

SEQ ID NO: 854443 - DNA, 33 bp, Homo sapien
atggggtggccttatgaactgaaataagatttt

SEQ ID NO: 854444 - DNA, 33 bp, Homo sapien
atggggtggccttatgcactgaaataagatttt

SEQ ID NO: 854445 - DNA, 33 bp, Homo sapien
acacatttacagtgaaagcaagtttttcttctg

SEQ ID NO: 854446 - DNA, 33 bp, Homo sapien
acacatttacagtgaaggcaagtttttcttctg

SEQ ID NO: 854447 - DNA, 33 bp, Homo sapien
atagacatggcattataagagattcctacacct

SEQ ID NO: 854448 - DNA, 33 bp, Homo sapien
atagacatggcattatgagagattcctacacct

SEQ ID NO: 854449 - DNA, 33 bp, Homo sapien
atgttaatgctaaatgacagcttcatggttcaa

SEQ ID NO: 854450 - DNA, 33 bp, Homo sapien
atgttaatgctaaatgccagcttcatggttcaa

SEQ ID NO: 854451 - DNA, 33 bp, Homo sapien
tgagtgtcaacttctacaaccttggatgacata

SEQ ID NO: 854452 - DNA, 33 bp, Homo sapien
tgagtgtcaacttctataaccttggatgacata

SEQ ID NO: 854453 - DNA, 33 bp, Homo sapien
ttctccacattaaaccacattctctgactttca

SEQ ID NO: 854454 - DNA, 33 bp, Homo sapien
ttctccacattaaaccgcattctctgactttca

SEQ ID NO: 854455 - DNA, 33 bp, Homo sapien
tcaccaaaatttgcaacttctacatcacactac

SEQ ID NO: 854456 - DNA, 33 bp, Homo sapien
tcaccaaaatttgcaatttctacatcacactac

SEQ ID NO: 854457 - DNA, 33 bp, Homo sapien
ttttttatttctactacccagagcaatatgaca

SEQ ID NO: 854458 - DNA, 33 bp, Homo sapien
ttttttatttctactatccagagcaatatgaca

SEQ ID NO: 854459 - DNA, 33 bp, Homo sapien
agccatatgttccatcactctgactaatgctgc

SEQ ID NO: 854460 - DNA, 33 bp, Homo sapien
agccatatgttccatcgctctgactaatgctgc

SEQ ID NO: 854461 - DNA, 33 bp, Homo sapien
tttggcactgccttgaatagatgtaatctctac

SEQ ID NO: 854462 - DNA, 33 bp, Homo sapien
tttggcactgccttgagtagatgtaatctctac

SEQ ID NO: 854463 - DNA, 33 bp, Homo sapien
gtgcactaattttgagaagcagcgtgaagggat

SEQ ID NO: 854464 - DNA, 33 bp, Homo sapien
gtgcactaattttgagtagcagcgtgaagggat

SEQ ID NO: 854465 - DNA, 33 bp, Homo sapien
aataaagatgatcaaacagaagagtgtgatata

SEQ ID NO: 854466 - DNA, 33 bp, Homo sapien
aataaagatgatcaaatagaagagtgtgatata

SEQ ID NO: 854467 - DNA, 33 bp, Homo sapien
gtgatatatagtcgtaaattttgtgagagaaaa

SEQ ID NO: 854468 - DNA, 33 bp, Homo sapien
gtgatatatagtcgtacattttgtgagagaaaa

SEQ ID NO: 854469 - DNA, 33 bp, Homo sapien
acagagaactggatgaggtaatattgactgcct

SEQ ID NO: 854470 - DNA, 33 bp, Homo sapien
acagagaactggatgatgtaatattgactgcct

SEQ ID NO: 854471 - DNA, 33 bp, Homo sapien
actctgtgtccagtccaagcttcagagaaggaa

SEQ ID NO: 854472 - DNA, 33 bp, Homo sapien
actctgtgtccagtccgagcttcagagaaggaa

SEQ ID NO: 854473 - DNA, 33 bp, Homo sapien
aactaaagcatcattaacatttcttctctttta

SEQ ID NO: 854474 - DNA, 33 bp, Homo sapien
aactaaagcatcattatcatttcttctctttta

SEQ ID NO: 854475 - DNA, 33 bp, Homo sapien
accttcaacaacttccaatggtttactaaatta

SEQ ID NO: 854476 - DNA, 33 bp, Homo sapien
accttcaacaacttccgatggtttactaaatta

SEQ ID NO: 854477 - DNA, 33 bp, Homo sapien
aacccttggctgaaaacgcaggaaacctgcggc

SEQ ID NO: 854478 - DNA, 33 bp, Homo sapien
aacccttggctgaaaatgcaggaaacctgcggc

SEQ ID NO: 854479 - DNA, 33 bp, Homo sapien
aaaattttatctatcacaggctcgtaagattca

SEQ ID NO: 854480 - DNA, 33 bp, Homo sapien
aaaattttatctatcagaggctcgtaagattca

SEQ ID NO: 854481 - DNA, 33 bp, Homo sapien
caagagcaagaatgtaagaggagttgagggggg

SEQ ID NO: 854482 - DNA, 33 bp, Homo sapien
caagagcaagaatgtaggaggagttgagggggg

SEQ ID NO: 854483 - DNA, 33 bp, Homo sapien
ctctgttcttaactaactgactgatatagtttg

SEQ ID NO: 854484 - DNA, 33 bp, Homo sapien
ctctgttcttaactaattgactgatatagtttg

SEQ ID NO: 854485 - DNA, 33 bp, Homo sapien
ctggaactacaccaccagcttatctagatctcc

SEQ ID NO: 854486 - DNA, 33 bp, Homo sapien
ctggaactacaccaccggcttatctagatctcc

SEQ ID NO: 854487 - DNA, 33 bp, Homo sapien
tcaaccccagtggccaagtattaactccaccaa

SEQ ID NO: 854488 - DNA, 33 bp, Homo sapien
tcaaccccagtggccacgtattaactccaccaa

SEQ ID NO: 854489 - DNA, 33 bp, Homo sapien
tgttctctttatttcccagttagtctagctaag

SEQ ID NO: 854490 - DNA, 33 bp, Homo sapien
tgttctctttatttcctagttagtctagctaag

SEQ ID NO: 854491 - DNA, 33 bp, Homo sapien
ctagccattacgtgcacctagacctaaaagtgt

SEQ ID NO: 854492 - DNA, 33 bp, Homo sapien
ctagccattacgtgcatctagacctaaaagtgt

SEQ ID NO: 854493 - DNA, 33 bp, Homo sapien
cttactaggtaggcttcaacattgatttatttt

SEQ ID NO: 854494 - DNA, 33 bp, Homo sapien
cttactaggtaggcttgaacattgatttatttt

SEQ ID NO: 854495 - DNA, 33 bp, Homo sapien
tgttgtaacctgaagaaagtgactgtacctgta

SEQ ID NO: 854496 - DNA, 33 bp, Homo sapien
tgttgtaacctgaagagagtgactgtacctgta

SEQ ID NO: 854497 - DNA, 33 bp, Homo sapien
acaagtccaattacaagtgccatgccaaaagtt

SEQ ID NO: 854498 - DNA, 33 bp, Homo sapien
acaagtccaattacaattgccatgccaaaagtt

SEQ ID NO: 854499 - DNA, 33 bp, Homo sapien
aaaaaaaaaagcaacaacaatgatcaccaccac

SEQ ID NO: 854500 - DNA, 33 bp, Homo sapien
aaaaaaaaaagcaacagcaatgatcaccaccac

SEQ ID NO: 854501 - DNA, 33 bp, Homo sapien
acagcaatggccttcaactaagcaaaacataat

SEQ ID NO: 854502 - DNA, 33 bp, Homo sapien
acagcaatggccttcagctaagcaaaacataat

SEQ ID NO: 854503 - DNA, 33 bp, Homo sapien
tttgatccacagctgacgatggagcagaggaga

SEQ ID NO: 854504 - DNA, 33 bp, Homo sapien
tttgatccacagctgatgatggagcagaggaga

SEQ ID NO: 854505 - DNA, 33 bp, Homo sapien
cccaattgaaaaatagccaaaagttctgaatgg

SEQ ID NO: 854506 - DNA, 33 bp, Homo sapien
cccaattgaaaaataggcaaaagttctgaatgg

SEQ ID NO: 854507 - DNA, 33 bp, Homo sapien
cagaaaggcaagacaacttgaagtatgaagtgg

SEQ ID NO: 854508 - DNA, 33 bp, Homo sapien
cagaaaggcaagacaagttgaagtatgaagtgg

SEQ ID NO: 854509 - DNA, 33 bp, Homo sapien
tacagatggccaagaaatcacttacatcactat

SEQ ID NO: 854510 - DNA, 33 bp, Homo sapien
tacagatggccaagaagtcacttacatcactat

SEQ ID NO: 854511 - DNA, 33 bp, Homo sapien
gtgagaggataaaccacgaagtaggtagagata

SEQ ID NO: 854512 - DNA, 33 bp, Homo sapien
gtgagaggataaaccatgaagtaggtagagata

SEQ ID NO: 854513 - DNA, 33 bp, Homo sapien
gccaaagagtttgcaaaagtctccggagggcat

SEQ ID NO: 854514 - DNA, 33 bp, Homo sapien
gccaaagagtttgcaacagtctccggagggcat

SEQ ID NO: 854515 - DNA, 33 bp, Homo sapien
aagcaagttattggctcaaggcaaacaaatacc

SEQ ID NO: 854516 - DNA, 33 bp, Homo sapien
aagcaagttattggctgaaggcaaacaaatacc

SEQ ID NO: 854517 - DNA, 33 bp, Homo sapien
gtctcactgcattttacaaacagtaactaattg

SEQ ID NO: 854518 - DNA, 33 bp, Homo sapien
gtctcactgcattttataaacagtaactaattg

SEQ ID NO: 854519 - DNA, 33 bp, Homo sapien
aaatgtgacaagaactaaaccacatctttctct

SEQ ID NO: 854520 - DNA, 33 bp, Homo sapien
aaatgtgacaagaactgaaccacatctttctct

SEQ ID NO: 854521 - DNA, 33 bp, Homo sapien
cagcacagttcacttacatagaaattggcttat

SEQ ID NO: 854522 - DNA, 33 bp, Homo sapien
cagcacagttcacttatatagaaattggcttat

SEQ ID NO: 854523 - DNA, 33 bp, Homo sapien
aaataatactctgataaccagtgaagtgtaaat

SEQ ID NO: 854524 - DNA, 33 bp, Homo sapien
aaataatactctgatagccagtgaagtgtaaat

SEQ ID NO: 854525 - DNA, 33 bp, Homo sapien
gttaataatgtctataccagttctttagctagt

SEQ ID NO: 854526 - DNA, 33 bp, Homo sapien
gttaataatgtctatatcagttctttagctagt

SEQ ID NO: 854527 - DNA, 33 bp, Homo sapien
gaagaatctacttaacactgacaaattttaatt

SEQ ID NO: 854528 - DNA, 33 bp, Homo sapien
gaagaatctacttaaccctgacaaattttaatt

SEQ ID NO: 854529 - DNA, 33 bp, Homo sapien
accaacctgctcatgaaggggactatcaggagg

SEQ ID NO: 854530 - DNA, 33 bp, Homo sapien
accaacctgctcatgagggggactatcaggagg

SEQ ID NO: 854531 - DNA, 33 bp, Homo sapien
tcatttattgttagttcaacatttttaaaattt

SEQ ID NO: 854532 - DNA, 33 bp, Homo sapien
tcatttattgttagttgaacatttttaaaattt

SEQ ID NO: 854533 - DNA, 33 bp, Homo sapien
aggtgggccacatttaacactttatgcctgttc

SEQ ID NO: 854534 - DNA, 33 bp, Homo sapien
aggtgggccacatttagcactttatgcctgttc

SEQ ID NO: 854535 - DNA, 33 bp, Homo sapien
ctgtggcccattcctaagttcctggctggaatc

SEQ ID NO: 854536 - DNA, 33 bp, Homo sapien
ctgtggcccattcctatgttcctggctggaatc

SEQ ID NO: 854537 - DNA, 33 bp, Homo sapien
attgggcaccaggagacggtaacggtcactcat

SEQ ID NO: 854538 - DNA, 33 bp, Homo sapien
attgggcaccaggagatggtaacggtcactcat

SEQ ID NO: 854539 - DNA, 33 bp, Homo sapien
caaggtgttcatggtccgaagggtttagacaca

SEQ ID NO: 854540 - DNA, 33 bp, Homo sapien
caaggtgttcatggtctgaagggtttagacaca

SEQ ID NO: 854541 - DNA, 33 bp, Homo sapien
actatcttaatatgcactctgagatatggtaat

SEQ ID NO: 854542 - DNA, 33 bp, Homo sapien
actatcttaatatgcattctgagatatggtaat

SEQ ID NO: 854543 - DNA, 33 bp, Homo sapien
actaaaaggattggctaaaaagaaactgtctta

SEQ ID NO: 854544 - DNA, 33 bp, Homo sapien
actaaaaggattggctcaaaagaaactgtctta

SEQ ID NO: 854545 - DNA, 33 bp, Homo sapien
gaatgctgtgtcaaaaacaagagagttatgttc

SEQ ID NO: 854546 - DNA, 33 bp, Homo sapien
gaatgctgtgtcaaaaccaagagagttatgttc

SEQ ID NO: 854547 - DNA, 33 bp, Homo sapien
agcacttcatgttaaaattatgaatgctctcaa

SEQ ID NO: 854548 - DNA, 33 bp, Homo sapien
agcacttcatgttaaatttatgaatgctctcaa

SEQ ID NO: 854549 - DNA, 33 bp, Homo sapien
agagccactgaaaaacaaaatgcttcaagggag

SEQ ID NO: 854550 - DNA, 33 bp, Homo sapien
agagccactgaaaaaccaaatgcttcaagggag

SEQ ID NO: 854551 - DNA, 33 bp, Homo sapien
tgtagttcttgagaagcacgcagaagtggtgca

SEQ ID NO: 854552 - DNA, 33 bp, Homo sapien
tgtagttcttgagaagtacgcagaagtggtgca

SEQ ID NO: 854553 - DNA, 33 bp, Homo sapien
gccctttaattattcaagatacctgcagagccc

SEQ ID NO: 854554 - DNA, 33 bp, Homo sapien
gccctttaattattcaggatacctgcagagccc

SEQ ID NO: 854555 - DNA, 33 bp, Homo sapien
agtcactgaattagaaatgaaacttcccattta

SEQ ID NO: 854556 - DNA, 33 bp, Homo sapien
agtcactgaattagaactgaaacttcccattta

SEQ ID NO: 854557 - DNA, 33 bp, Homo sapien
tagatggatggacaaacgatgttattgagggat

SEQ ID NO: 854558 - DNA, 33 bp, Homo sapien
tagatggatggacaaatgatgttattgagggat

SEQ ID NO: 854559 - DNA, 33 bp, Homo sapien
attggggatacagtcacgtgatggcctcatgtg

SEQ ID NO: 854560 - DNA, 33 bp, Homo sapien
attggggatacagtcatgtgatggcctcatgtg

SEQ ID NO: 854561 - DNA, 33 bp, Homo sapien
atgaggggactcttcaaggcaataatatatcac

SEQ ID NO: 854562 - DNA, 33 bp, Homo sapien
atgaggggactcttcagggcaataatatatcac

SEQ ID NO: 854563 - DNA, 33 bp, Homo sapien
ttgtagcaaagactgaaggagaaaaggatgtgt

SEQ ID NO: 854564 - DNA, 33 bp, Homo sapien
ttgtagcaaagactgagggagaaaaggatgtgt

SEQ ID NO: 854565 - DNA, 33 bp, Homo sapien
ctgagtggcaactttcaccatggaatccagagt

SEQ ID NO: 854566 - DNA, 33 bp, Homo sapien
ctgagtggcaactttctccatggaatccagagt

SEQ ID NO: 854567 - DNA, 33 bp, Homo sapien
ggatttgtgaagaggaataagaaggtctgaagt

SEQ ID NO: 854568 - DNA, 33 bp, Homo sapien
ggatttgtgaagaggagtaagaaggtctgaagt

SEQ ID NO: 854569 - DNA, 33 bp, Homo sapien
ggcaagaatttgagtgcacaatgtttatttggg

SEQ ID NO: 854570 - DNA, 33 bp, Homo sapien
ggcaagaatttgagtgtacaatgtttatttggg

SEQ ID NO: 854571 - DNA, 33 bp, Homo sapien
aagcagagtgagtttacaggcagaaagaaagaa

SEQ ID NO: 854572 - DNA, 33 bp, Homo sapien
aagcagagtgagtttagaggcagaaagaaagaa

SEQ ID NO: 854573 - DNA, 33 bp, Homo sapien
ccaaggtgaaggtcataatccatagaggaaaaa

SEQ ID NO: 854574 - DNA, 33 bp, Homo sapien
ccaaggtgaaggtcattatccatagaggaaaaa

SEQ ID NO: 854575 - DNA, 33 bp, Homo sapien
gtacaggagcttgggaagtagcgaaaaggcaac

SEQ ID NO: 854576 - DNA, 33 bp, Homo sapien
gtacaggagcttgggatgtagcgaaaaggcaac

SEQ ID NO: 854577 - DNA, 33 bp, Homo sapien
ttgccaatcaccaggaataattgatatctgcat

SEQ ID NO: 854578 - DNA, 33 bp, Homo sapien
ttgccaatcaccaggagtaattgatatctgcat

SEQ ID NO: 854579 - DNA, 33 bp, Homo sapien
atcagcacagcttctcggaaaagcttttagtcc

SEQ ID NO: 854580 - DNA, 33 bp, Homo sapien
atcagcacagcttctctgaaaagcttttagtcc

SEQ ID NO: 854581 - DNA, 33 bp, Homo sapien
catgcagtgtctctacgcagaggtttggggacc

SEQ ID NO: 854582 - DNA, 33 bp, Homo sapien
catgcagtgtctctactcagaggtttggggacc

SEQ ID NO: 854583 - DNA, 33 bp, Homo sapien
aataaatgatagcttacagttgggttataatag

SEQ ID NO: 854584 - DNA, 33 bp, Homo sapien
aataaatgatagcttagagttgggttataatag

SEQ ID NO: 854585 - DNA, 33 bp, Homo sapien
acttctgattctccaacgagattttgcccactc

SEQ ID NO: 854586 - DNA, 33 bp, Homo sapien
acttctgattctccaatgagattttgcccactc

SEQ ID NO: 854587 - DNA, 33 bp, Homo sapien
cattgtgggtcatccaagaagcctgggggtggg

SEQ ID NO: 854588 - DNA, 33 bp, Homo sapien
cattgtgggtcatccaggaagcctgggggtggg

SEQ ID NO: 854589 - DNA, 33 bp, Homo sapien
caattactgcttgataataaaaaccagaggcta

SEQ ID NO: 854590 - DNA, 33 bp, Homo sapien
caattactgcttgatattaaaaaccagaggcta

SEQ ID NO: 854591 - DNA, 33 bp, Homo sapien
ataggaagcacaggtgcaaatggaaaactgcaa

SEQ ID NO: 854592 - DNA, 33 bp, Homo sapien
ataggaagcacaggtgtaaatggaaaactgcaa

SEQ ID NO: 854593 - DNA, 33 bp, Homo sapien
cttcttgctttgacaacatcaacctctccttac

SEQ ID NO: 854594 - DNA, 33 bp, Homo sapien
cttcttgctttgacaatatcaacctctccttac

SEQ ID NO: 854595 - DNA, 33 bp, Homo sapien
caaacatttagaagccagacaagtaggatgaga

SEQ ID NO: 854596 - DNA, 33 bp, Homo sapien
caaacatttagaagccggacaagtaggatgaga

SEQ ID NO: 854597 - DNA, 33 bp, Homo sapien
aaaaactccggaaagaagcataagaaactacaa

SEQ ID NO: 854598 - DNA, 33 bp, Homo sapien
aaaaactccggaaagatgcataagaaactacaa

SEQ ID NO: 854599 - DNA, 33 bp, Homo sapien
aacccatttcaatccaatctatagtcattgttg

SEQ ID NO: 854600 - DNA, 33 bp, Homo sapien
aacccatttcaatccagtctatagtcattgttg

SEQ ID NO: 854601 - DNA, 33 bp, Homo sapien
cacaagctcctcaatacaaaatagtctcagctt

SEQ ID NO: 854602 - DNA, 33 bp, Homo sapien
cacaagctcctcaatataaaatagtctcagctt

SEQ ID NO: 854603 - DNA, 33 bp, Homo sapien
tctcaggcatggccacagaataaggtggagagg

SEQ ID NO: 854604 - DNA, 33 bp, Homo sapien
tctcaggcatggccacggaataaggtggagagg

SEQ ID NO: 854605 - DNA, 33 bp, Homo sapien
gtaagaatctcaaggaaattaagctgtctttat

SEQ ID NO: 854606 - DNA, 33 bp, Homo sapien
gtaagaatctcaaggatattaagctgtctttat

SEQ ID NO: 854607 - DNA, 33 bp, Homo sapien
agtaacaggaatctaaaagcaaaggaagagtca

SEQ ID NO: 854608 - DNA, 33 bp, Homo sapien
agtaacaggaatctaatagcaaaggaagagtca

SEQ ID NO: 854609 - DNA, 33 bp, Homo sapien
ccatggaatttgtggacgctgcaattgacaata

SEQ ID NO: 854610 - DNA, 33 bp, Homo sapien
ccatggaatttgtggatgctgcaattgacaata

SEQ ID NO: 854611 - DNA, 33 bp, Homo sapien
atgcccttgtgtctgacctataccactcaatat

SEQ ID NO: 854612 - DNA, 33 bp, Homo sapien
atgcccttgtgtctgatctataccactcaatat

SEQ ID NO: 854613 - DNA, 33 bp, Homo sapien
aggacgtgaactgatacacactcacataaacct

SEQ ID NO: 854614 - DNA, 33 bp, Homo sapien
aggacgtgaactgatatacactcacataaacct

SEQ ID NO: 854615 - DNA, 33 bp, Homo sapien
tgttgtttgatagtagaagaaataatgctcaaa

SEQ ID NO: 854616 - DNA, 33 bp, Homo sapien
tgttgtttgatagtaggagaaataatgctcaaa

SEQ ID NO: 854617 - DNA, 33 bp, Homo sapien
gaatatcaaatatgtacggctcctaaaacagaa

SEQ ID NO: 854618 - DNA, 33 bp, Homo sapien
gaatatcaaatatgtatggctcctaaaacagaa

SEQ ID NO: 854619 - DNA, 33 bp, Homo sapien
gaaatagaaactaagaacttaggcgttaaaatg

SEQ ID NO: 854620 - DNA, 33 bp, Homo sapien
gaaatagaaactaagaccttaggcgttaaaatg

SEQ ID NO: 854621 - DNA, 33 bp, Homo sapien
ttttccattatgctggaatcttatagaaaatag

SEQ ID NO: 854622 - DNA, 33 bp, Homo sapien
ttttccattatgctggtatcttatagaaaatag

SEQ ID NO: 854623 - DNA, 33 bp, Homo sapien
gtgtttattccatccacatttgtgtaattatta

SEQ ID NO: 854624 - DNA, 33 bp, Homo sapien
gtgtttattccatccatatttgtgtaattatta

SEQ ID NO: 854625 - DNA, 33 bp, Homo sapien
ggtcttaaaaatgaagccccatgactagtagaa

SEQ ID NO: 854626 - DNA, 33 bp, Homo sapien
ggtcttaaaaatgaagtcccatgactagtagaa

SEQ ID NO: 854627 - DNA, 33 bp, Homo sapien
gagtatggatttaagaactctcgcaacctgtga

SEQ ID NO: 854628 - DNA, 33 bp, Homo sapien
gagtatggatttaagacctctcgcaacctgtga

SEQ ID NO: 854629 - DNA, 33 bp, Homo sapien
cagtcatctgaagaccagactagccatttccaa

SEQ ID NO: 854630 - DNA, 33 bp, Homo sapien
cagtcatctgaagaccggactagccatttccaa

SEQ ID NO: 854631 - DNA, 33 bp, Homo sapien
gaacattatgtttacaatatggcaaagcaaata

SEQ ID NO: 854632 - DNA, 33 bp, Homo sapien
gaacattatgtttacagtatggcaaagcaaata

SEQ ID NO: 854633 - DNA, 33 bp, Homo sapien
gtgtgaagaaagaagaaaacaaatgcaaataat

SEQ ID NO: 854634 - DNA, 33 bp, Homo sapien
gtgtgaagaaagaagagaacaaatgcaaataat

SEQ ID NO: 854635 - DNA, 33 bp, Homo sapien
cattccaaatacaatgcataagtcatcagaatc

SEQ ID NO: 854636 - DNA, 33 bp, Homo sapien
cattccaaatacaatggataagtcatcagaatc

SEQ ID NO: 854637 - DNA, 33 bp, Homo sapien
taggtttatctcctaaacgaaagaataatctgt

SEQ ID NO: 854638 - DNA, 33 bp, Homo sapien
taggtttatctcctaagcgaaagaataatctgt

SEQ ID NO: 854639 - DNA, 33 bp, Homo sapien
gtctttctgggggagacggaatttatatttggt

SEQ ID NO: 854640 - DNA, 33 bp, Homo sapien
gtctttctgggggagatggaatttatatttggt

SEQ ID NO: 854641 - DNA, 33 bp, Homo sapien
gctagttcatgttagaaatagcataatttcggc

SEQ ID NO: 854642 - DNA, 33 bp, Homo sapien
gctagttcatgttagacatagcataatttcggc

SEQ ID NO: 854643 - DNA, 33 bp, Homo sapien
gctgcacaagagaaatgaagtagacatggcgac

SEQ ID NO: 854644 - DNA, 33 bp, Homo sapien
gctgcacaagagaaattaagtagacatggcgac

SEQ ID NO: 854645 - DNA, 33 bp, Homo sapien
tgtggaggcgacaatcaagtaaatccacagttc

SEQ ID NO: 854646 - DNA, 33 bp, Homo sapien
tgtggaggcgacaatcgagtaaatccacagttc

SEQ ID NO: 854647 - DNA, 33 bp, Homo sapien
tgtttgattgagctgcaacatgggaaagtgctt

SEQ ID NO: 854648 - DNA, 33 bp, Homo sapien
tgtttgattgagctgcgacatgggaaagtgctt

SEQ ID NO: 854649 - DNA, 33 bp, Homo sapien
aaatacacagtactcaaataggtttaattcata

SEQ ID NO: 854650 - DNA, 33 bp, Homo sapien
aaatacacagtactcagataggtttaattcata

SEQ ID NO: 854651 - DNA, 33 bp, Homo sapien
aaaaagaagagctatacgtttggacctagagag

SEQ ID NO: 854652 - DNA, 33 bp, Homo sapien
aaaaagaagagctatatgtttggacctagagag

SEQ ID NO: 854653 - DNA, 33 bp, Homo sapien
atgttcctagttcttaccatttgtatcagtttg

SEQ ID NO: 854654 - DNA, 33 bp, Homo sapien
atgttcctagttcttatcatttgtatcagtttg

SEQ ID NO: 854655 - DNA, 33 bp, Homo sapien
actaaaccgccagccactgctaatgattgttcc

SEQ ID NO: 854656 - DNA, 33 bp, Homo sapien
actaaaccgccagccattgctaatgattgttcc

SEQ ID NO: 854657 - DNA, 33 bp, Homo sapien
agccgcttgtggagagaattttcacaaggatgt

SEQ ID NO: 854658 - DNA, 33 bp, Homo sapien
agccgcttgtggagagtattttcacaaggatgt

SEQ ID NO: 854659 - DNA, 33 bp, Homo sapien
tcatccagtacctgcacctatgctttgacagat

SEQ ID NO: 854660 - DNA, 33 bp, Homo sapien
tcatccagtacctgcatctatgctttgacagat

SEQ ID NO: 854661 - DNA, 33 bp, Homo sapien
actcagaaccaagataagattccatttgcctgc

SEQ ID NO: 854662 - DNA, 33 bp, Homo sapien
actcagaaccaagataggattccatttgcctgc

SEQ ID NO: 854663 - DNA, 33 bp, Homo sapien
cctaataatttaccccagagctgttaactccag

SEQ ID NO: 854664 - DNA, 33 bp, Homo sapien
cctaataatttaccccggagctgttaactccag

SEQ ID NO: 854665 - DNA, 33 bp, Homo sapien
aacacatttaaagataaaaactcactgcaaaca

SEQ ID NO: 854666 - DNA, 33 bp, Homo sapien
aacacatttaaagatagaaactcactgcaaaca

SEQ ID NO: 854667 - DNA, 33 bp, Homo sapien
ctctgattctccttgaaactggatgtctagtcc

SEQ ID NO: 854668 - DNA, 33 bp, Homo sapien
ctctgattctccttgagactggatgtctagtcc

SEQ ID NO: 854669 - DNA, 33 bp, Homo sapien
tagaagatagaggtaacgtgtccctttgagaca

SEQ ID NO: 854670 - DNA, 33 bp, Homo sapien
tagaagatagaggtaatgtgtccctttgagaca

SEQ ID NO: 854671 - DNA, 33 bp, Homo sapien
gaagtgccagatcatacagagctgttttaaaga

SEQ ID NO: 854672 - DNA, 33 bp, Homo sapien
gaagtgccagatcatagagagctgttttaaaga

SEQ ID NO: 854673 - DNA, 33 bp, Homo sapien
agaaggtgaataccatcagacctggtcttagaa

SEQ ID NO: 854674 - DNA, 33 bp, Homo sapien
agaaggtgaataccattagacctggtcttagaa

SEQ ID NO: 854675 - DNA, 33 bp, Homo sapien
atgttcgtctttatcaatagccccagtaccaaa

SEQ ID NO: 854676 - DNA, 33 bp, Homo sapien
atgttcgtctttatcagtagccccagtaccaaa

SEQ ID NO: 854677 - DNA, 33 bp, Homo sapien
ctcatttcttagatcaatgagtttttgagaagt

SEQ ID NO: 854678 - DNA, 33 bp, Homo sapien
ctcatttcttagatcagtgagtttttgagaagt

SEQ ID NO: 854679 - DNA, 33 bp, Homo sapien
attggttctaaactcaaaaaaggaagagagagc

SEQ ID NO: 854680 - DNA, 33 bp, Homo sapien
attggttctaaactcagaaaaggaagagagagc

SEQ ID NO: 854681 - DNA, 33 bp, Homo sapien
cataggtggtttcaacagattttggagattttt

SEQ ID NO: 854682 - DNA, 33 bp, Homo sapien
cataggtggtttcaaccgattttggagattttt

SEQ ID NO: 854683 - DNA, 33 bp, Homo sapien
tttggactagcctgagaccagtagcagagactt

SEQ ID NO: 854684 - DNA, 33 bp, Homo sapien
tttggactagcctgaggccagtagcagagactt

SEQ ID NO: 854685 - DNA, 33 bp, Homo sapien
ggactcaacctcagaacaggatgggcaacggca

SEQ ID NO: 854686 - DNA, 33 bp, Homo sapien
ggactcaacctcagaataggatgggcaacggca

SEQ ID NO: 854687 - DNA, 33 bp, Homo sapien
ttggtcaggatgcttacgtgacacttaccccag

SEQ ID NO: 854688 - DNA, 33 bp, Homo sapien
ttggtcaggatgcttatgtgacacttaccccag

SEQ ID NO: 854689 - DNA, 33 bp, Homo sapien
gagcacagagacatgaacctctgaagtataact

SEQ ID NO: 854690 - DNA, 33 bp, Homo sapien
gagcacagagacatgagcctctgaagtataact

SEQ ID NO: 854691 - DNA, 33 bp, Homo sapien
agatgaaaatccatgaacggttctagctataac

SEQ ID NO: 854692 - DNA, 33 bp, Homo sapien
agatgaaaatccatgagcggttctagctataac

SEQ ID NO: 854693 - DNA, 33 bp, Homo sapien
gaggaggactcaaggcacataatgaacaagagt

SEQ ID NO: 854694 - DNA, 33 bp, Homo sapien
gaggaggactcaaggcgcataatgaacaagagt

SEQ ID NO: 854695 - DNA, 33 bp, Homo sapien
acaaagtcttctgagacgtggggtgaacactca

SEQ ID NO: 854696 - DNA, 33 bp, Homo sapien
acaaagtcttctgagatgtggggtgaacactca

SEQ ID NO: 854697 - DNA, 33 bp, Homo sapien
cagaacaggccctgcaatatgtgggaaagtggg

SEQ ID NO: 854698 - DNA, 33 bp, Homo sapien
cagaacaggccctgcagtatgtgggaaagtggg

SEQ ID NO: 854699 - DNA, 33 bp, Homo sapien
acctaggtttgtagccagaaaccatcatgaaag

SEQ ID NO: 854700 - DNA, 33 bp, Homo sapien
acctaggtttgtagccggaaaccatcatgaaag

SEQ ID NO: 854701 - DNA, 33 bp, Homo sapien
tatgaattctcaagccacttcacaaattggaaa

SEQ ID NO: 854702 - DNA, 33 bp, Homo sapien
tatgaattctcaagccgcttcacaaattggaaa

SEQ ID NO: 854703 - DNA, 33 bp, Homo sapien
ggcgctggaaatgtaaagcatgatctcagcagt

SEQ ID NO: 854704 - DNA, 33 bp, Homo sapien
ggcgctggaaatgtaacgcatgatctcagcagt

SEQ ID NO: 854705 - DNA, 33 bp, Homo sapien
gactgagcctcctaaacacaaatcaaatcatac

SEQ ID NO: 854706 - DNA, 33 bp, Homo sapien
gactgagcctcctaaatacaaatcaaatcatac

SEQ ID NO: 854707 - DNA, 33 bp, Homo sapien
cattatacaggtgctacgcttgttaatccatgg

SEQ ID NO: 854708 - DNA, 33 bp, Homo sapien
cattatacaggtgctatgcttgttaatccatgg

SEQ ID NO: 854709 - DNA, 33 bp, Homo sapien
ccagacatgcacgtgcaataggaataggttaag

SEQ ID NO: 854710 - DNA, 33 bp, Homo sapien
ccagacatgcacgtgcgataggaataggttaag

SEQ ID NO: 854711 - DNA, 33 bp, Homo sapien
atatgcattcagtcaaatatcacccctttatcc

SEQ ID NO: 854712 - DNA, 33 bp, Homo sapien
atatgcattcagtcaagtatcacccctttatcc

SEQ ID NO: 854713 - DNA, 33 bp, Homo sapien
tgagaataacccaagacgtgtttcgtgctggga

SEQ ID NO: 854714 - DNA, 33 bp, Homo sapien
tgagaataacccaagatgtgtttcgtgctggga

SEQ ID NO: 854715 - DNA, 33 bp, Homo sapien
ctgggcaaaatacataaagcactaactactaga

SEQ ID NO: 854716 - DNA, 33 bp, Homo sapien
ctgggcaaaatacatagagcactaactactaga

SEQ ID NO: 854717 - DNA, 33 bp, Homo sapien
gggaaaatgagggcccaccagaatcagcagaat

SEQ ID NO: 854718 - DNA, 33 bp, Homo sapien
gggaaaatgagggcccgccagaatcagcagaat

SEQ ID NO: 854719 - DNA, 33 bp, Homo sapien
aatttatctcaaataccgcagcttctccatccc

SEQ ID NO: 854720 - DNA, 33 bp, Homo sapien
aatttatctcaaatactgcagcttctccatccc

SEQ ID NO: 854721 - DNA, 33 bp, Homo sapien
aagcctgcgcctcctcacatactctgctctctc

SEQ ID NO: 854722 - DNA, 33 bp, Homo sapien
aagcctgcgcctcctcccatactctgctctctc

SEQ ID NO: 854723 - DNA, 33 bp, Homo sapien
gctggaagggtgcttacggcagacttgggtctt

SEQ ID NO: 854724 - DNA, 33 bp, Homo sapien
gctggaagggtgcttatggcagacttgggtctt

SEQ ID NO: 854725 - DNA, 33 bp, Homo sapien
aacagatacatcaacaggccaactctgaatgag

SEQ ID NO: 854726 - DNA, 33 bp, Homo sapien
aacagatacatcaacatgccaactctgaatgag

SEQ ID NO: 854727 - DNA, 33 bp, Homo sapien
tcattctattcgggtacgtataagcattcggat

SEQ ID NO: 854728 - DNA, 33 bp, Homo sapien
tcattctattcgggtatgtataagcattcggat

SEQ ID NO: 854729 - DNA, 33 bp, Homo sapien
agtgtacagttcagcaatgctaagtgtatgtct

SEQ ID NO: 854730 - DNA, 33 bp, Homo sapien
agtgtacagttcagcactgctaagtgtatgtct

SEQ ID NO: 854731 - DNA, 33 bp, Homo sapien
tcctagtttgagttaacgagaccttgaaagtaa

SEQ ID NO: 854732 - DNA, 33 bp, Homo sapien
tcctagtttgagttaatgagaccttgaaagtaa

SEQ ID NO: 854733 - DNA, 33 bp, Homo sapien
ccataattattaaccagtggattgacaaatcaa

SEQ ID NO: 854734 - DNA, 33 bp, Homo sapien
ccataattattaaccattggattgacaaatcaa

SEQ ID NO: 854735 - DNA, 33 bp, Homo sapien
attacatttcacttggaagagtctaaaggtggg

SEQ ID NO: 854736 - DNA, 33 bp, Homo sapien
attacatttcacttgggagagtctaaaggtggg

SEQ ID NO: 854737 - DNA, 33 bp, Homo sapien
gccatggatgataacaaaagggtcctggattcc

SEQ ID NO: 854738 - DNA, 33 bp, Homo sapien
gccatggatgataacagaagggtcctggattcc

SEQ ID NO: 854739 - DNA, 33 bp, Homo sapien
gcattcagaagaggtgaatgttaactgtcctgg

SEQ ID NO: 854740 - DNA, 33 bp, Homo sapien
gcattcagaagaggtggatgttaactgtcctgg

SEQ ID NO: 854741 - DNA, 33 bp, Homo sapien
agaacagaaagtttcacaagtcttcctcataca

SEQ ID NO: 854742 - DNA, 33 bp, Homo sapien
agaacagaaagtttcagaagtcttcctcataca

SEQ ID NO: 854743 - DNA, 33 bp, Homo sapien
tagaataaacttagtccaacacctctacacagt

SEQ ID NO: 854744 - DNA, 33 bp, Homo sapien
tagaataaacttagtctaacacctctacacagt

SEQ ID NO: 854745 - DNA, 33 bp, Homo sapien
aaattaaatcaggatacgaaattgttcacttga

SEQ ID NO: 854746 - DNA, 33 bp, Homo sapien
aaattaaatcaggatatgaaattgttcacttga

SEQ ID NO: 854747 - DNA, 33 bp, Homo sapien
gttattgatttctagccgagttatgttctgagg

SEQ ID NO: 854748 - DNA, 33 bp, Homo sapien
gttattgatttctagctgagttatgttctgagg

SEQ ID NO: 854749 - DNA, 33 bp, Homo sapien
tctgccaatccttcatcaaacgacgaagacatt

SEQ ID NO: 854750 - DNA, 33 bp, Homo sapien
tctgccaatccttcattaaacgacgaagacatt

SEQ ID NO: 854751 - DNA, 33 bp, Homo sapien
tactgataaatacctaaacggataaactattaa

SEQ ID NO: 854752 - DNA, 33 bp, Homo sapien
tactgataaatacctacacggataaactattaa

SEQ ID NO: 854753 - DNA, 33 bp, Homo sapien
gctggtgtctccagtacccagtctgaaatacat

SEQ ID NO: 854754 - DNA, 33 bp, Homo sapien
gctggtgtctccagtatccagtctgaaatacat

SEQ ID NO: 854755 - DNA, 33 bp, Homo sapien
gtaggatcatcagaaacgtttagattatgaaat

SEQ ID NO: 854756 - DNA, 33 bp, Homo sapien
gtaggatcatcagaaatgtttagattatgaaat

SEQ ID NO: 854757 - DNA, 33 bp, Homo sapien
tttgcctaactgctaacgtcttcctttttccag

SEQ ID NO: 854758 - DNA, 33 bp, Homo sapien
tttgcctaactgctaatgtcttcctttttccag

SEQ ID NO: 854759 - DNA, 33 bp, Homo sapien
taaaaataggaatctacgagtccatactgccat

SEQ ID NO: 854760 - DNA, 33 bp, Homo sapien
taaaaataggaatctatgagtccatactgccat

SEQ ID NO: 854761 - DNA, 33 bp, Homo sapien
cattaaagtcccacacaaggtaggcactattat

SEQ ID NO: 854762 - DNA, 33 bp, Homo sapien
cattaaagtcccacacgaggtaggcactattat

SEQ ID NO: 854763 - DNA, 33 bp, Homo sapien
acaagcaacagagagagaacctgagtaaagagt

SEQ ID NO: 854764 - DNA, 33 bp, Homo sapien
acaagcaacagagagataacctgagtaaagagt

SEQ ID NO: 854765 - DNA, 33 bp, Homo sapien
aatatattgagctctacatgagtctgattataa

SEQ ID NO: 854766 - DNA, 33 bp, Homo sapien
aatatattgagctctatatgagtctgattataa

SEQ ID NO: 854767 - DNA, 33 bp, Homo sapien
ctgctttctacgactacagttgtaccttttcta

SEQ ID NO: 854768 - DNA, 33 bp, Homo sapien
ctgctttctacgactatagttgtaccttttcta

SEQ ID NO: 854769 - DNA, 33 bp, Homo sapien
actgtctatttccaaaaccttttcatcatccca

SEQ ID NO: 854770 - DNA, 33 bp, Homo sapien
actgtctatttccaaagccttttcatcatccca

SEQ ID NO: 854771 - DNA, 33 bp, Homo sapien
aagtgttacagttaggcatttgatctattttaa

SEQ ID NO: 854772 - DNA, 33 bp, Homo sapien
aagtgttacagttaggtatttgatctattttaa

SEQ ID NO: 854773 - DNA, 33 bp, Homo sapien
gttcttggaaaacacaatgtatttatggattat

SEQ ID NO: 854774 - DNA, 33 bp, Homo sapien
gttcttggaaaacacagtgtatttatggattat

SEQ ID NO: 854775 - DNA, 33 bp, Homo sapien
ttttccattagccctgaatttgacatctttttc

SEQ ID NO: 854776 - DNA, 33 bp, Homo sapien
ttttccattagccctggatttgacatctttttc

SEQ ID NO: 854777 - DNA, 33 bp, Homo sapien
cactctacctcattaaactctaccaacagacag

SEQ ID NO: 854778 - DNA, 33 bp, Homo sapien
cactctacctcattaatctctaccaacagacag

SEQ ID NO: 854779 - DNA, 33 bp, Homo sapien
gaaagaggcatttctacctacctgctacagctg

SEQ ID NO: 854780 - DNA, 33 bp, Homo sapien
gaaagaggcatttctatctacctgctacagctg

SEQ ID NO: 854781 - DNA, 33 bp, Homo sapien
gaatcatatgtggaacagtgttttagacttgga

SEQ ID NO: 854782 - DNA, 33 bp, Homo sapien
gaatcatatgtggaacggtgttttagacttgga

SEQ ID NO: 854783 - DNA, 33 bp, Homo sapien
ctatataccaggtgaaattcaaaatttaaaata

SEQ ID NO: 854784 - DNA, 33 bp, Homo sapien
ctatataccaggtgaatttcaaaatttaaaata

SEQ ID NO: 854785 - DNA, 33 bp, Homo sapien
aacattaatttgagacagataatacacccaaac

SEQ ID NO: 854786 - DNA, 33 bp, Homo sapien
aacattaatttgagacggataatacacccaaac

SEQ ID NO: 854787 - DNA, 33 bp, Homo sapien
agccataggattgacacagatcacatgactgta

SEQ ID NO: 854788 - DNA, 33 bp, Homo sapien
agccataggattgacatagatcacatgactgta

SEQ ID NO: 854789 - DNA, 33 bp, Homo sapien
gagtctttcagatacacagtcagtccagactga

SEQ ID NO: 854790 - DNA, 33 bp, Homo sapien
gagtctttcagatacagagtcagtccagactga

SEQ ID NO: 854791 - DNA, 33 bp, Homo sapien
taggctggcattttgcaaagctgatattcacca

SEQ ID NO: 854792 - DNA, 33 bp, Homo sapien
taggctggcattttgcgaagctgatattcacca

SEQ ID NO: 854793 - DNA, 33 bp, Homo sapien
gtaaggacacctccaaaagcaaaggacaactat

SEQ ID NO: 854794 - DNA, 33 bp, Homo sapien
gtaaggacacctccaatagcaaaggacaactat

SEQ ID NO: 854795 - DNA, 33 bp, Homo sapien
tcccagtggtaaaactcaacacgaagtaagctg

SEQ ID NO: 854796 - DNA, 33 bp, Homo sapien
tcccagtggtaaaacttaacacgaagtaagctg

SEQ ID NO: 854797 - DNA, 33 bp, Homo sapien
tacattctatcaggctaacataagatgtaaaag

SEQ ID NO: 854798 - DNA, 33 bp, Homo sapien
tacattctatcaggctgacataagatgtaaaag

SEQ ID NO: 854799 - DNA, 33 bp, Homo sapien
gtactgttgcactggaaattaagtttcaccatg

SEQ ID NO: 854800 - DNA, 33 bp, Homo sapien
gtactgttgcactggagattaagtttcaccatg

SEQ ID NO: 854801 - DNA, 33 bp, Homo sapien
aacccacgatattcctaagaagaaagagtaagc

SEQ ID NO: 854802 - DNA, 33 bp, Homo sapien
aacccacgatattcctgagaagaaagagtaagc

SEQ ID NO: 854803 - DNA, 33 bp, Homo sapien
acatacctacaactaaccgatcttcaacaaagt

SEQ ID NO: 854804 - DNA, 33 bp, Homo sapien
acatacctacaactaatcgatcttcaacaaagt

SEQ ID NO: 854805 - DNA, 33 bp, Homo sapien
tctattcaaatttttccaggcaagctaatataa

SEQ ID NO: 854806 - DNA, 33 bp, Homo sapien
tctattcaaatttttctaggcaagctaatataa

SEQ ID NO: 854807 - DNA, 33 bp, Homo sapien
taaggaagtagtcagaaatggacataaagagtt

SEQ ID NO: 854808 - DNA, 33 bp, Homo sapien
taaggaagtagtcagagatggacataaagagtt

SEQ ID NO: 854809 - DNA, 33 bp, Homo sapien
caattaacactcaaaaatgtatgaatgcaccca

SEQ ID NO: 854810 - DNA, 33 bp, Homo sapien
caattaacactcaaaagtgtatgaatgcaccca

SEQ ID NO: 854811 - DNA, 33 bp, Homo sapien
acaaacatttacctgacgaagagaacaaaaccc

SEQ ID NO: 854812 - DNA, 33 bp, Homo sapien
acaaacatttacctgatgaagagaacaaaaccc

SEQ ID NO: 854813 - DNA, 33 bp, Homo sapien
tcagcatttaaataagccctaaactctccctta

SEQ ID NO: 854814 - DNA, 33 bp, Homo sapien
tcagcatttaaataagtcctaaactctccctta

SEQ ID NO: 854815 - DNA, 33 bp, Homo sapien
caactaatcctgtttacatttctcttctggaca

SEQ ID NO: 854816 - DNA, 33 bp, Homo sapien
caactaatcctgtttatatttctcttctggaca

SEQ ID NO: 854817 - DNA, 33 bp, Homo sapien
tttctgatcatctccaagaactctaagcctgtt

SEQ ID NO: 854818 - DNA, 33 bp, Homo sapien
tttctgatcatctccaggaactctaagcctgtt

SEQ ID NO: 854819 - DNA, 33 bp, Homo sapien
gtttcttgtggagaggccacgttatggcaggct

SEQ ID NO: 854820 - DNA, 33 bp, Homo sapien
gtttcttgtggagaggtcacgttatggcaggct

SEQ ID NO: 854821 - DNA, 33 bp, Homo sapien
cacctggtcccataaacgtttcataacctctta

SEQ ID NO: 854822 - DNA, 33 bp, Homo sapien
cacctggtcccataaatgtttcataacctctta

SEQ ID NO: 854823 - DNA, 33 bp, Homo sapien
atttacaaacagaatggagagaaaaagcgttag

SEQ ID NO: 854824 - DNA, 33 bp, Homo sapien
atttacaaacagaatgtagagaaaaagcgttag

SEQ ID NO: 854825 - DNA, 33 bp, Homo sapien
ctataggaaagcacctaacagggtctgaaattc

SEQ ID NO: 854826 - DNA, 33 bp, Homo sapien
ctataggaaagcaccttacagggtctgaaattc

SEQ ID NO: 854827 - DNA, 33 bp, Homo sapien
atcagatcttactctaaatcttgtgcttacaat

SEQ ID NO: 854828 - DNA, 33 bp, Homo sapien
atcagatcttactctatatcttgtgcttacaat

SEQ ID NO: 854829 - DNA, 33 bp, Homo sapien
gagagagaagtgactacaactgaaagagtacct

SEQ ID NO: 854830 - DNA, 33 bp, Homo sapien
gagagagaagtgactataactgaaagagtacct

SEQ ID NO: 854831 - DNA, 33 bp, Homo sapien
caagaaacccaaaaacaaggcagatgtaggtca

SEQ ID NO: 854832 - DNA, 33 bp, Homo sapien
caagaaacccaaaaacgaggcagatgtaggtca

SEQ ID NO: 854833 - DNA, 33 bp, Homo sapien
ggccgcaagacaggtagatttctgcattgttac

SEQ ID NO: 854834 - DNA, 33 bp, Homo sapien
ggccgcaagacaggtatatttctgcattgttac

SEQ ID NO: 854835 - DNA, 33 bp, Homo sapien
aagcaatgagtcttataaggtccctcaagatga

SEQ ID NO: 854836 - DNA, 33 bp, Homo sapien
aagcaatgagtcttatgaggtccctcaagatga

SEQ ID NO: 854837 - DNA, 33 bp, Homo sapien
agagcattgttcattgcatcgaggagagacagc

SEQ ID NO: 854838 - DNA, 33 bp, Homo sapien
agagcattgttcattggatcgaggagagacagc

SEQ ID NO: 854839 - DNA, 33 bp, Homo sapien
ctgttttctctgtctgaaattcctatttgaaat

SEQ ID NO: 854840 - DNA, 33 bp, Homo sapien
ctgttttctctgtctggaattcctatttgaaat

SEQ ID NO: 854841 - DNA, 33 bp, Homo sapien
tcatgaggaacaatccaatgttgatccctgatg

SEQ ID NO: 854842 - DNA, 33 bp, Homo sapien
tcatgaggaacaatccgatgttgatccctgatg

SEQ ID NO: 854843 - DNA, 33 bp, Homo sapien
cacataattactccaacaatcacccaagaaata

SEQ ID NO: 854844 - DNA, 33 bp, Homo sapien
cacataattactccaataatcacccaagaaata

SEQ ID NO: 854845 - DNA, 33 bp, Homo sapien
aaatcatgtttagaaaaaaatgagagaatagaa

SEQ ID NO: 854846 - DNA, 33 bp, Homo sapien
aaatcatgtttagaaagaaatgagagaatagaa

SEQ ID NO: 854847 - DNA, 33 bp, Homo sapien
ttaagagctgtataacccagaccaaatatgcag

SEQ ID NO: 854848 - DNA, 33 bp, Homo sapien
ttaagagctgtataactcagaccaaatatgcag

SEQ ID NO: 854849 - DNA, 33 bp, Homo sapien
catggacaaaaaattacagaggctctgcatgac

SEQ ID NO: 854850 - DNA, 33 bp, Homo sapien
catggacaaaaaattatagaggctctgcatgac

SEQ ID NO: 854851 - DNA, 33 bp, Homo sapien
gtagttttccactgaacgatctttttatctgtt

SEQ ID NO: 854852 - DNA, 33 bp, Homo sapien
gtagttttccactgaatgatctttttatctgtt

SEQ ID NO: 854853 - DNA, 33 bp, Homo sapien
agattgctccaagctacaagttcgtgaccagct

SEQ ID NO: 854854 - DNA, 33 bp, Homo sapien
agattgctccaagctagaagttcgtgaccagct

SEQ ID NO: 854855 - DNA, 33 bp, Homo sapien
cagacattcagtgaggaattaagtctggccatt

SEQ ID NO: 854856 - DNA, 33 bp, Homo sapien
cagacattcagtgaggcattaagtctggccatt

SEQ ID NO: 854857 - DNA, 33 bp, Homo sapien
tccccagcacctaacaacttatggtcagcattt

SEQ ID NO: 854858 - DNA, 33 bp, Homo sapien
tccccagcacctaacatcttatggtcagcattt

SEQ ID NO: 854859 - DNA, 33 bp, Homo sapien
tttaattttgtgtttacagtcatctcttgtaca

SEQ ID NO: 854860 - DNA, 33 bp, Homo sapien
tttaattttgtgtttatagtcatctcttgtaca

SEQ ID NO: 854861 - DNA, 33 bp, Homo sapien
gttgggatttcaggtacgagacaccacacctgc

SEQ ID NO: 854862 - DNA, 33 bp, Homo sapien
gttgggatttcaggtatgagacaccacacctgc

SEQ ID NO: 854863 - DNA, 33 bp, Homo sapien
tcatttttaggaacaacgttttggaatgacatt

SEQ ID NO: 854864 - DNA, 33 bp, Homo sapien
tcatttttaggaacaatgttttggaatgacatt

SEQ ID NO: 854865 - DNA, 33 bp, Homo sapien
ccaaagcagttattcaactcagcataccaaact

SEQ ID NO: 854866 - DNA, 33 bp, Homo sapien
ccaaagcagttattcagctcagcataccaaact

SEQ ID NO: 854867 - DNA, 33 bp, Homo sapien
tgatgagttttttgaacgtggagagtccctgat

SEQ ID NO: 854868 - DNA, 33 bp, Homo sapien
tgatgagttttttgaatgtggagagtccctgat

SEQ ID NO: 854869 - DNA, 33 bp, Homo sapien
gtggtacttcgctatcacaactttagcacacta

SEQ ID NO: 854870 - DNA, 33 bp, Homo sapien
gtggtacttcgctatcgcaactttagcacacta

SEQ ID NO: 854871 - DNA, 33 bp, Homo sapien
tacagtaatctatccccacaataccaatcccca

SEQ ID NO: 854872 - DNA, 33 bp, Homo sapien
tacagtaatctatccctacaataccaatcccca

SEQ ID NO: 854873 - DNA, 33 bp, Homo sapien
gggttttgattacatccatgaattgtatagtgg

SEQ ID NO: 854874 - DNA, 33 bp, Homo sapien
gggttttgattacatcgatgaattgtatagtgg

SEQ ID NO: 854875 - DNA, 33 bp, Homo sapien
tttattgctcttctaaatgtaatttctgctgaa

SEQ ID NO: 854876 - DNA, 33 bp, Homo sapien
tttattgctcttctaattgtaatttctgctgaa

SEQ ID NO: 854877 - DNA, 33 bp, Homo sapien
tataagtctactgtgcaagcatccatgaaccct

SEQ ID NO: 854878 - DNA, 33 bp, Homo sapien
tataagtctactgtgcgagcatccatgaaccct

SEQ ID NO: 854879 - DNA, 33 bp, Homo sapien
gttgtttggtaataggaactcagaaccaaagtc

SEQ ID NO: 854880 - DNA, 33 bp, Homo sapien
gttgtttggtaataggcactcagaaccaaagtc

SEQ ID NO: 854881 - DNA, 33 bp, Homo sapien
gtggatcaaagttaaaatgtacacatccttaag

SEQ ID NO: 854882 - DNA, 33 bp, Homo sapien
gtggatcaaagttaaagtgtacacatccttaag

SEQ ID NO: 854883 - DNA, 33 bp, Homo sapien
ggtattgagggtccacagggatccaacactgtg

SEQ ID NO: 854884 - DNA, 33 bp, Homo sapien
ggtattgagggtccacggggatccaacactgtg

SEQ ID NO: 854885 - DNA, 33 bp, Homo sapien
agaagacggatgaataaaatacagttatagtct

SEQ ID NO: 854886 - DNA, 33 bp, Homo sapien
agaagacggatgaatagaatacagttatagtct

SEQ ID NO: 854887 - DNA, 33 bp, Homo sapien
tgttaataaacaattacgataaggctgagattc

SEQ ID NO: 854888 - DNA, 33 bp, Homo sapien
tgttaataaacaattatgataaggctgagattc

SEQ ID NO: 854889 - DNA, 33 bp, Homo sapien
tcgccttcagccaacacgactagagcagcgaag

SEQ ID NO: 854890 - DNA, 33 bp, Homo sapien
tcgccttcagccaacaggactagagcagcgaag

SEQ ID NO: 854891 - DNA, 33 bp, Homo sapien
agtaggcttgacgatacagtgagtaaagaagca

SEQ ID NO: 854892 - DNA, 33 bp, Homo sapien
agtaggcttgacgatatagtgagtaaagaagca

SEQ ID NO: 854893 - DNA, 33 bp, Homo sapien
tgagacaaggcagaaacggcttccctgggaccc

SEQ ID NO: 854894 - DNA, 33 bp, Homo sapien
tgagacaaggcagaaatggcttccctgggaccc

SEQ ID NO: 854895 - DNA, 33 bp, Homo sapien
aaggctttaataatcaatgagacatatttattt

SEQ ID NO: 854896 - DNA, 33 bp, Homo sapien
aaggctttaataatcagtgagacatatttattt

SEQ ID NO: 854897 - DNA, 33 bp, Homo sapien
aaataccactggtacacggacaaagagagctcc

SEQ ID NO: 854898 - DNA, 33 bp, Homo sapien
aaataccactggtacatggacaaagagagctcc

SEQ ID NO: 854899 - DNA, 33 bp, Homo sapien
atctgagttgtcatcaaaatgtcctgttgggca

SEQ ID NO: 854900 - DNA, 33 bp, Homo sapien
atctgagttgtcatcacaatgtcctgttgggca

SEQ ID NO: 854901 - DNA, 33 bp, Homo sapien
aacatctatcccacctaaaatagtcatgattct

SEQ ID NO: 854902 - DNA, 33 bp, Homo sapien
aacatctatcccacctgaaatagtcatgattct

SEQ ID NO: 854903 - DNA, 33 bp, Homo sapien
gaatgatctgaaaggacgttggtagaagaagac

SEQ ID NO: 854904 - DNA, 33 bp, Homo sapien
gaatgatctgaaaggatgttggtagaagaagac

SEQ ID NO: 854905 - DNA, 33 bp, Homo sapien
tctaatatgcagccacagtagaggatcgttgga

SEQ ID NO: 854906 - DNA, 33 bp, Homo sapien
tctaatatgcagccacggtagaggatcgttgga

SEQ ID NO: 854907 - DNA, 33 bp, Homo sapien
gtgatgtggctgacaaagagaggacctattctc

SEQ ID NO: 854908 - DNA, 33 bp, Homo sapien
gtgatgtggctgacaaggagaggacctattctc

SEQ ID NO: 854909 - DNA, 33 bp, Homo sapien
ttgctgaggagagccaagtcagtgaaagacggg

SEQ ID NO: 854910 - DNA, 33 bp, Homo sapien
ttgctgaggagagccatgtcagtgaaagacggg

SEQ ID NO: 854911 - DNA, 33 bp, Homo sapien
gtcagtcaccgaacacagattaaagctctccgg

SEQ ID NO: 854912 - DNA, 33 bp, Homo sapien
gtcagtcaccgaacacggattaaagctctccgg

SEQ ID NO: 854913 - DNA, 33 bp, Homo sapien
ctttaaatatcgtgacacttaaaatatcaaatt

SEQ ID NO: 854914 - DNA, 33 bp, Homo sapien
ctttaaatatcgtgacccttaaaatatcaaatt

SEQ ID NO: 854915 - DNA, 33 bp, Homo sapien
aactgactctgtttcaagacacatcacagaagt

SEQ ID NO: 854916 - DNA, 33 bp, Homo sapien
aactgactctgtttcaggacacatcacagaagt

SEQ ID NO: 854917 - DNA, 33 bp, Homo sapien
tgctggcgcaagggaactgttgttactgggggt

SEQ ID NO: 854918 - DNA, 33 bp, Homo sapien
tgctggcgcaagggaattgttgttactgggggt

SEQ ID NO: 854919 - DNA, 33 bp, Homo sapien
ttgccactcagcaaggacattggggaaggaggg

SEQ ID NO: 854920 - DNA, 33 bp, Homo sapien
ttgccactcagcaagggcattggggaaggaggg

SEQ ID NO: 854921 - DNA, 33 bp, Homo sapien
ggcttagagccaagaaaccttccctgcaggtgc

SEQ ID NO: 854922 - DNA, 33 bp, Homo sapien
ggcttagagccaagaagccttccctgcaggtgc

SEQ ID NO: 854923 - DNA, 33 bp, Homo sapien
gtggtcacaccacaagaagtccactttcctcct

SEQ ID NO: 854924 - DNA, 33 bp, Homo sapien
gtggtcacaccacaaggagtccactttcctcct

SEQ ID NO: 854925 - DNA, 33 bp, Homo sapien
ttcctagccactgtacccctctatgctcttaac

SEQ ID NO: 854926 - DNA, 33 bp, Homo sapien
ttcctagccactgtacgcctctatgctcttaac

SEQ ID NO: 854927 - DNA, 33 bp, Homo sapien
ggcgtccccaaaagcaagaagctccacttttct

SEQ ID NO: 854928 - DNA, 33 bp, Homo sapien
ggcgtccccaaaagcaggaagctccacttttct

SEQ ID NO: 854929 - DNA, 33 bp, Homo sapien
ttttttgtcctacaaaaataagagcaggcaagg

SEQ ID NO: 854930 - DNA, 33 bp, Homo sapien
ttttttgtcctacaaatataagagcaggcaagg

SEQ ID NO: 854931 - DNA, 33 bp, Homo sapien
cgcccagtatgagggagatcctgcacattcagg

SEQ ID NO: 854932 - DNA, 33 bp, Homo sapien
cgcccagtatgagggatatcctgcacattcagg

SEQ ID NO: 854933 - DNA, 33 bp, Homo sapien
ccaacactagaatgtacgttcctgatttactta

SEQ ID NO: 854934 - DNA, 33 bp, Homo sapien
ccaacactagaatgtaggttcctgatttactta

SEQ ID NO: 854935 - DNA, 33 bp, Homo sapien
tttaactcttacaatacgtttatcactgcacta

SEQ ID NO: 854936 - DNA, 33 bp, Homo sapien
tttaactcttacaatatgtttatcactgcacta

SEQ ID NO: 854937 - DNA, 33 bp, Homo sapien
ttggtcaaataaaatggcatgagttatctagat

SEQ ID NO: 854938 - DNA, 33 bp, Homo sapien
ttggtcaaataaaatgtcatgagttatctagat

SEQ ID NO: 854939 - DNA, 33 bp, Homo sapien
tagtagtgcagtttagaatggagaactggtgga

SEQ ID NO: 854940 - DNA, 33 bp, Homo sapien
tagtagtgcagtttaggatggagaactggtgga

SEQ ID NO: 854941 - DNA, 33 bp, Homo sapien
gtgtctcacaaattataagaattgtttagggtc

SEQ ID NO: 854942 - DNA, 33 bp, Homo sapien
gtgtctcacaaattatgagaattgtttagggtc

SEQ ID NO: 854943 - DNA, 33 bp, Homo sapien
gtggttctcatattcaatcttgaaaaactaaac

SEQ ID NO: 854944 - DNA, 33 bp, Homo sapien
gtggttctcatattcagtcttgaaaaactaaac

SEQ ID NO: 854945 - DNA, 33 bp, Homo sapien
tctgatggtaaatgcaaaactctttcacatcat

SEQ ID NO: 854946 - DNA, 33 bp, Homo sapien
tctgatggtaaatgcagaactctttcacatcat

SEQ ID NO: 854947 - DNA, 33 bp, Homo sapien
aatatcacttccagaactggatttaataaaaag

SEQ ID NO: 854948 - DNA, 33 bp, Homo sapien
aatatcacttccagaattggatttaataaaaag

SEQ ID NO: 854949 - DNA, 33 bp, Homo sapien
ttcatggtagtaagtgcactctttgattaatca

SEQ ID NO: 854950 - DNA, 33 bp, Homo sapien
ttcatggtagtaagtgtactctttgattaatca

SEQ ID NO: 854951 - DNA, 33 bp, Homo sapien
tggcaaaggtccaacacgatatagctctggaaa

SEQ ID NO: 854952 - DNA, 33 bp, Homo sapien
tggcaaaggtccaacaggatatagctctggaaa

SEQ ID NO: 854953 - DNA, 33 bp, Homo sapien
agatttctaaaaataagtaaggtgccctaactc

SEQ ID NO: 854954 - DNA, 33 bp, Homo sapien
agatttctaaaaataattaaggtgccctaactc

SEQ ID NO: 854955 - DNA, 33 bp, Homo sapien
acttgttcccaccttacgattaagccaagctca

SEQ ID NO: 854956 - DNA, 33 bp, Homo sapien
acttgttcccaccttatgattaagccaagctca

SEQ ID NO: 854957 - DNA, 33 bp, Homo sapien
ccaaaatggtgccgaaaactggagagaagtaag

SEQ ID NO: 854958 - DNA, 33 bp, Homo sapien
ccaaaatggtgccgaacactggagagaagtaag

SEQ ID NO: 854959 - DNA, 33 bp, Homo sapien
tcatgactacacaaaactgaatgccattcttaa

SEQ ID NO: 854960 - DNA, 33 bp, Homo sapien
tcatgactacacaaaattgaatgccattcttaa

SEQ ID NO: 854961 - DNA, 33 bp, Homo sapien
aaaatataactactcaaatgcattcctgcactt

SEQ ID NO: 854962 - DNA, 33 bp, Homo sapien
aaaatataactactcagatgcattcctgcactt

SEQ ID NO: 854963 - DNA, 33 bp, Homo sapien
tttcacactggaattacaagaagccagcttgtt

SEQ ID NO: 854964 - DNA, 33 bp, Homo sapien
tttcacactggaattataagaagccagcttgtt

SEQ ID NO: 854965 - DNA, 33 bp, Homo sapien
aatagagataaatacacaggtgttcattatata

SEQ ID NO: 854966 - DNA, 33 bp, Homo sapien
aatagagataaatacagaggtgttcattatata

SEQ ID NO: 854967 - DNA, 33 bp, Homo sapien
gaattactaggtcatacggtgactgtatgttta

SEQ ID NO: 854968 - DNA, 33 bp, Homo sapien
gaattactaggtcatatggtgactgtatgttta

SEQ ID NO: 854969 - DNA, 33 bp, Homo sapien
tcagcaatgtgttgaactggattcagttgaact

SEQ ID NO: 854970 - DNA, 33 bp, Homo sapien
tcagcaatgtgttgaattggattcagttgaact

SEQ ID NO: 854971 - DNA, 33 bp, Homo sapien
agtatttaatgtgacacacagctgattggtggt

SEQ ID NO: 854972 - DNA, 33 bp, Homo sapien
agtatttaatgtgacagacagctgattggtggt

SEQ ID NO: 854973 - DNA, 33 bp, Homo sapien
ttatgtctgtggaatactataaggcaacaaagt

SEQ ID NO: 854974 - DNA, 33 bp, Homo sapien
ttatgtctgtggaatattataaggcaacaaagt

SEQ ID NO: 854975 - DNA, 33 bp, Homo sapien
gctgatcctcttgataaccagttccaagtgctg

SEQ ID NO: 854976 - DNA, 33 bp, Homo sapien
gctgatcctcttgatacccagttccaagtgctg

SEQ ID NO: 854977 - DNA, 33 bp, Homo sapien
gagctgtaactgatgacgaagctgctgctgcca

SEQ ID NO: 854978 - DNA, 33 bp, Homo sapien
gagctgtaactgatgaggaagctgctgctgcca

SEQ ID NO: 854979 - DNA, 33 bp, Homo sapien
actagaatgaagtctcagaactgtcacttacac

SEQ ID NO: 854980 - DNA, 33 bp, Homo sapien
actagaatgaagtctcggaactgtcacttacac

SEQ ID NO: 854981 - DNA, 33 bp, Homo sapien
agcagggaaaatcagacacttaaactccaagac

SEQ ID NO: 854982 - DNA, 33 bp, Homo sapien
agcagggaaaatcagatacttaaactccaagac

SEQ ID NO: 854983 - DNA, 33 bp, Homo sapien
tttgtttcattttccaatcttatgcagtcaagg

SEQ ID NO: 854984 - DNA, 33 bp, Homo sapien
tttgtttcattttccagtcttatgcagtcaagg

SEQ ID NO: 854985 - DNA, 33 bp, Homo sapien
aaaagttaacacaacaaccagaatagtggttcc

SEQ ID NO: 854986 - DNA, 33 bp, Homo sapien
aaaagttaacacaacatccagaatagtggttcc

SEQ ID NO: 854987 - DNA, 33 bp, Homo sapien
cttgtctatcaaaataactaggctgtttaccac

SEQ ID NO: 854988 - DNA, 33 bp, Homo sapien
cttgtctatcaaaatagctaggctgtttaccac

SEQ ID NO: 854989 - DNA, 33 bp, Homo sapien
ctctcccatcaactaacgtactcttatatcata

SEQ ID NO: 854990 - DNA, 33 bp, Homo sapien
ctctcccatcaactaatgtactcttatatcata

SEQ ID NO: 854991 - DNA, 33 bp, Homo sapien
ctcatactctattcacaaaagtctgggttgaat

SEQ ID NO: 854992 - DNA, 33 bp, Homo sapien
ctcatactctattcacgaaagtctgggttgaat

SEQ ID NO: 854993 - DNA, 33 bp, Homo sapien
tccctggaagcttgtccaataaattgagtagtt

SEQ ID NO: 854994 - DNA, 33 bp, Homo sapien
tccctggaagcttgtctaataaattgagtagtt

SEQ ID NO: 854995 - DNA, 33 bp, Homo sapien
agtttttaagcctaaactctcaccattaactgg

SEQ ID NO: 854996 - DNA, 33 bp, Homo sapien
agtttttaagcctaaattctcaccattaactgg

SEQ ID NO: 854997 - DNA, 33 bp, Homo sapien
atggaaaaaggctttacgcaaaaaatgtatgct

SEQ ID NO: 854998 - DNA, 33 bp, Homo sapien
atggaaaaaggctttatgcaaaaaatgtatgct

SEQ ID NO: 854999 - DNA, 33 bp, Homo sapien
tgtgaattgtgaaatacgtgatgcgcttaccac

SEQ ID NO: 855000 - DNA, 33 bp, Homo sapien
tgtgaattgtgaaatatgtgatgcgcttaccac

SEQ ID NO: 855001 - DNA, 33 bp, Homo sapien
gcttagatgccattggaaaaaataaaaggtgac

SEQ ID NO: 855002 - DNA, 33 bp, Homo sapien
gcttagatgccattgggaaaaataaaaggtgac

SEQ ID NO: 855003 - DNA, 33 bp, Homo sapien
ctggcaaggatggggactaatactgaagccaag

SEQ ID NO: 855004 - DNA, 33 bp, Homo sapien
ctggcaaggatggggagtaatactgaagccaag

SEQ ID NO: 855005 - DNA, 33 bp, Homo sapien
atcccagattgtcataggtagtgccttaaacat

SEQ ID NO: 855006 - DNA, 33 bp, Homo sapien
atcccagattgtcatatgtagtgccttaaacat

SEQ ID NO: 855007 - DNA, 33 bp, Homo sapien
ctgttctgtgctaggacaaaacaaacagcaact

SEQ ID NO: 855008 - DNA, 33 bp, Homo sapien
ctgttctgtgctaggataaaacaaacagcaact

SEQ ID NO: 855009 - DNA, 33 bp, Homo sapien
aattgaactcatatgcaattggctaaaaggtga

SEQ ID NO: 855010 - DNA, 33 bp, Homo sapien
aattgaactcatatgccattggctaaaaggtga

SEQ ID NO: 855011 - DNA, 33 bp, Homo sapien
ttgcaagtagtagttacgatacttgtacgaaaa

SEQ ID NO: 855012 - DNA, 33 bp, Homo sapien
ttgcaagtagtagttatgatacttgtacgaaaa

SEQ ID NO: 855013 - DNA, 33 bp, Homo sapien
gctaatctgttaaggtcaagactctatcatgtg

SEQ ID NO: 855014 - DNA, 33 bp, Homo sapien
gctaatctgttaaggttaagactctatcatgtg

SEQ ID NO: 855015 - DNA, 33 bp, Homo sapien
gtatgtatgcctatgtaaagtcaacaagaggct

SEQ ID NO: 855016 - DNA, 33 bp, Homo sapien
gtatgtatgcctatgtgaagtcaacaagaggct

SEQ ID NO: 855017 - DNA, 33 bp, Homo sapien
aaaagccattctgccacgttactctccctgcct

SEQ ID NO: 855018 - DNA, 33 bp, Homo sapien
aaaagccattctgccatgttactctccctgcct

SEQ ID NO: 855019 - DNA, 33 bp, Homo sapien
agacctagcaaacaccaccagcagtctgccccc

SEQ ID NO: 855020 - DNA, 33 bp, Homo sapien
agacctagcaaacaccgccagcagtctgccccc

SEQ ID NO: 855021 - DNA, 33 bp, Homo sapien
gtgagcagcatttacacagtcacaataattata

SEQ ID NO: 855022 - DNA, 33 bp, Homo sapien
gtgagcagcatttacatagtcacaataattata

SEQ ID NO: 855023 - DNA, 33 bp, Homo sapien
tagttctgcacagtcaccttgagaagtcctttc

SEQ ID NO: 855024 - DNA, 33 bp, Homo sapien
tagttctgcacagtcatcttgagaagtcctttc

SEQ ID NO: 855025 - DNA, 33 bp, Homo sapien
cctaagaacttcaaacacagtgcctcatctttg

SEQ ID NO: 855026 - DNA, 33 bp, Homo sapien
cctaagaacttcaaacgcagtgcctcatctttg

SEQ ID NO: 855027 - DNA, 33 bp, Homo sapien
ttctgctgcttattaaaggcttattaatgtagg

SEQ ID NO: 855028 - DNA, 33 bp, Homo sapien
ttctgctgcttattaatggcttattaatgtagg

SEQ ID NO: 855029 - DNA, 33 bp, Homo sapien
ctctaaggtttgtgagaaaatagagactcctgt

SEQ ID NO: 855030 - DNA, 33 bp, Homo sapien
ctctaaggtttgtgaggaaatagagactcctgt

SEQ ID NO: 855031 - DNA, 33 bp, Homo sapien
ttcctagaactgttaaaaagctggttagcctgg

SEQ ID NO: 855032 - DNA, 33 bp, Homo sapien
ttcctagaactgttaagaagctggttagcctgg

SEQ ID NO: 855033 - DNA, 33 bp, Homo sapien
ctcagggaattcgccaataagaccacctgcact

SEQ ID NO: 855034 - DNA, 33 bp, Homo sapien
ctcagggaattcgccagtaagaccacctgcact

SEQ ID NO: 855035 - DNA, 33 bp, Homo sapien
aactagtgaaggtcaagtctaccttctccactc

SEQ ID NO: 855036 - DNA, 33 bp, Homo sapien
aactagtgaaggtcaattctaccttctccactc

SEQ ID NO: 855037 - DNA, 33 bp, Homo sapien
cagagatggcattagcactccaatgagagttga

SEQ ID NO: 855038 - DNA, 33 bp, Homo sapien
cagagatggcattagcgctccaatgagagttga

SEQ ID NO: 855039 - DNA, 33 bp, Homo sapien
ctggcatggtttcagccagtcagccaagctgct

SEQ ID NO: 855040 - DNA, 33 bp, Homo sapien
ctggcatggtttcagcgagtcagccaagctgct

SEQ ID NO: 855041 - DNA, 33 bp, Homo sapien
ttggctcctgctttaacgagcagcttggctgac

SEQ ID NO: 855042 - DNA, 33 bp, Homo sapien
ttggctcctgctttaatgagcagcttggctgac

SEQ ID NO: 855043 - DNA, 33 bp, Homo sapien
ttaacagtggaaagcactattttcaaaactacg

SEQ ID NO: 855044 - DNA, 33 bp, Homo sapien
ttaacagtggaaagcattattttcaaaactacg

SEQ ID NO: 855045 - DNA, 33 bp, Homo sapien
tactaactaaaagccagccttttcaaatgctca

SEQ ID NO: 855046 - DNA, 33 bp, Homo sapien
tactaactaaaagccatccttttcaaatgctca

SEQ ID NO: 855047 - DNA, 33 bp, Homo sapien
agggaggacatattagcaacatgcttccgcaca

SEQ ID NO: 855048 - DNA, 33 bp, Homo sapien
agggaggacatattagtaacatgcttccgcaca

SEQ ID NO: 855049 - DNA, 33 bp, Homo sapien
tcagtaggacctgctcactatagatgctgggca

SEQ ID NO: 855050 - DNA, 33 bp, Homo sapien
tcagtaggacctgctcgctatagatgctgggca

SEQ ID NO: 855051 - DNA, 33 bp, Homo sapien
ttctttgtgaagaagcaatacccatgtgacctt

SEQ ID NO: 855052 - DNA, 33 bp, Homo sapien
ttctttgtgaagaagcgatacccatgtgacctt

SEQ ID NO: 855053 - DNA, 33 bp, Homo sapien
atgctgttggtcttaagtcagtatactactgac

SEQ ID NO: 855054 - DNA, 33 bp, Homo sapien
atgctgttggtcttaattcagtatactactgac

SEQ ID NO: 855055 - DNA, 33 bp, Homo sapien
gaagccggagcagatacgaccattgttaacaat

SEQ ID NO: 855056 - DNA, 33 bp, Homo sapien
gaagccggagcagatatgaccattgttaacaat

SEQ ID NO: 855057 - DNA, 33 bp, Homo sapien
tgtccagttaaactgacgagtggatgttaccca

SEQ ID NO: 855058 - DNA, 33 bp, Homo sapien
tgtccagttaaactgatgagtggatgttaccca

SEQ ID NO: 855059 - DNA, 33 bp, Homo sapien
cattctgggaaagaaacgctgtgtccagaactc

SEQ ID NO: 855060 - DNA, 33 bp, Homo sapien
cattctgggaaagaaatgctgtgtccagaactc

SEQ ID NO: 855061 - DNA, 33 bp, Homo sapien
taatgggagagcagtcaacgaacaggggaaaaa

SEQ ID NO: 855062 - DNA, 33 bp, Homo sapien
taatgggagagcagtcgacgaacaggggaaaaa

SEQ ID NO: 855063 - DNA, 33 bp, Homo sapien
aggaagaaaaaacaatcatcacactcaatccaa

SEQ ID NO: 855064 - DNA, 33 bp, Homo sapien
aggaagaaaaaacaattatcacactcaatccaa

SEQ ID NO: 855065 - DNA, 33 bp, Homo sapien
tctagagaaccagtcgcaggataaggtttccgt

SEQ ID NO: 855066 - DNA, 33 bp, Homo sapien
tctagagaaccagtcgtaggataaggtttccgt

SEQ ID NO: 855067 - DNA, 33 bp, Homo sapien
ccagaactagccactacagaaggaagttctcac

SEQ ID NO: 855068 - DNA, 33 bp, Homo sapien
ccagaactagccactagagaaggaagttctcac

SEQ ID NO: 855069 - DNA, 33 bp, Homo sapien
tgttttggactccacactgaaggtttgttggtc

SEQ ID NO: 855070 - DNA, 33 bp, Homo sapien
tgttttggactccacattgaaggtttgttggtc

SEQ ID NO: 855071 - DNA, 33 bp, Homo sapien
ctaggtgtctcctgaaaaaattacatctttgtg

SEQ ID NO: 855072 - DNA, 33 bp, Homo sapien
ctaggtgtctcctgaagaaattacatctttgtg

SEQ ID NO: 855073 - DNA, 33 bp, Homo sapien
ctttgtactggggataacatttaaattctagat

SEQ ID NO: 855074 - DNA, 33 bp, Homo sapien
ctttgtactggggataccatttaaattctagat

SEQ ID NO: 855075 - DNA, 33 bp, Homo sapien
taatacactcttcaatcaaaaacacaagtcaaa

SEQ ID NO: 855076 - DNA, 33 bp, Homo sapien
taatacactcttcaatgaaaaacacaagtcaaa

SEQ ID NO: 855077 - DNA, 33 bp, Homo sapien
caaattgaaatccagccgccttaaatggatttg

SEQ ID NO: 855078 - DNA, 33 bp, Homo sapien
caaattgaaatccagctgccttaaatggatttg

SEQ ID NO: 855079 - DNA, 33 bp, Homo sapien
agatttaaaatcggtcaccaaccatgggcaaat

SEQ ID NO: 855080 - DNA, 33 bp, Homo sapien
agatttaaaatcggtcgccaaccatgggcaaat

SEQ ID NO: 855081 - DNA, 33 bp, Homo sapien
tcgctgaatgctcacaatagctataggcaggag

SEQ ID NO: 855082 - DNA, 33 bp, Homo sapien
tcgctgaatgctcacagtagctataggcaggag

SEQ ID NO: 855083 - DNA, 33 bp, Homo sapien
gtcctttctcacccacaggaaatcaactttcag

SEQ ID NO: 855084 - DNA, 33 bp, Homo sapien
gtcctttctcacccacgggaaatcaactttcag

SEQ ID NO: 855085 - DNA, 33 bp, Homo sapien
aaaaggtgagtttcacacttggtatttgtattt

SEQ ID NO: 855086 - DNA, 33 bp, Homo sapien
aaaaggtgagtttcacgcttggtatttgtattt

SEQ ID NO: 855087 - DNA, 33 bp, Homo sapien
ctgaacaaaatctccaacgggtttcaaagtcag

SEQ ID NO: 855088 - DNA, 33 bp, Homo sapien
ctgaacaaaatctccagcgggtttcaaagtcag

SEQ ID NO: 855089 - DNA, 33 bp, Homo sapien
gtttgtactctttgaaaggtgattggcacacag

SEQ ID NO: 855090 - DNA, 33 bp, Homo sapien
gtttgtactctttgaagggtgattggcacacag

SEQ ID NO: 855091 - DNA, 33 bp, Homo sapien
actaaaactcactgaaatatacattttatgata

SEQ ID NO: 855092 - DNA, 33 bp, Homo sapien
actaaaactcactgaattatacattttatgata

SEQ ID NO: 855093 - DNA, 33 bp, Homo sapien
ggagaatatgaaacaacagaaactctcatacgc

SEQ ID NO: 855094 - DNA, 33 bp, Homo sapien
ggagaatatgaaacaatagaaactctcatacgc

SEQ ID NO: 855095 - DNA, 33 bp, Homo sapien
gtaaggcagacaaaaaacctggttcttctcatt

SEQ ID NO: 855096 - DNA, 33 bp, Homo sapien
gtaaggcagacaaaaatcctggttcttctcatt

SEQ ID NO: 855097 - DNA, 33 bp, Homo sapien
cacacactctttccccagagacacacatggtga

SEQ ID NO: 855098 - DNA, 33 bp, Homo sapien
cacacactctttccccggagacacacatggtga

SEQ ID NO: 855099 - DNA, 33 bp, Homo sapien
caacacaaatattcaacgggaaccaacctgaca

SEQ ID NO: 855100 - DNA, 33 bp, Homo sapien
caacacaaatattcaatgggaaccaacctgaca

SEQ ID NO: 855101 - DNA, 33 bp, Homo sapien
ggaagtgtaaaatcaaggtttcgacagggccat

SEQ ID NO: 855102 - DNA, 33 bp, Homo sapien
ggaagtgtaaaatcaatgtttcgacagggccat

SEQ ID NO: 855103 - DNA, 33 bp, Homo sapien
aattgaacatttctagaaaaaaggtatgtgtgc

SEQ ID NO: 855104 - DNA, 33 bp, Homo sapien
aattgaacatttctaggaaaaaggtatgtgtgc

SEQ ID NO: 855105 - DNA, 33 bp, Homo sapien
gtgctgaggtaatatcaaaagactgctttctaa

SEQ ID NO: 855106 - DNA, 33 bp, Homo sapien
gtgctgaggtaatatccaaagactgctttctaa

SEQ ID NO: 855107 - DNA, 33 bp, Homo sapien
ctaccagtgagccaacaagttatgtcttctgat

SEQ ID NO: 855108 - DNA, 33 bp, Homo sapien
ctaccagtgagccaaccagttatgtcttctgat

SEQ ID NO: 855109 - DNA, 33 bp, Homo sapien
tctaacaataacctcaactctgattatttttta

SEQ ID NO: 855110 - DNA, 33 bp, Homo sapien
tctaacaataacctcacctctgattatttttta

SEQ ID NO: 855111 - DNA, 33 bp, Homo sapien
gttagttggaagtgataacaggtctaaccttct

SEQ ID NO: 855112 - DNA, 33 bp, Homo sapien
gttagttggaagtgatgacaggtctaaccttct

SEQ ID NO: 855113 - DNA, 33 bp, Homo sapien
ctcctggttgcaaaaaactgaaatccaggtgcc

SEQ ID NO: 855114 - DNA, 33 bp, Homo sapien
ctcctggttgcaaaaacctgaaatccaggtgcc

SEQ ID NO: 855115 - DNA, 33 bp, Homo sapien
gtccaaactggggtcaatatgcaggtgggaacg

SEQ ID NO: 855116 - DNA, 33 bp, Homo sapien
gtccaaactggggtcagtatgcaggtgggaacg

SEQ ID NO: 855117 - DNA, 33 bp, Homo sapien
taaacaaaggcaagcacactcttattacatcat

SEQ ID NO: 855118 - DNA, 33 bp, Homo sapien
taaacaaaggcaagcagactcttattacatcat

SEQ ID NO: 855119 - DNA, 33 bp, Homo sapien
taagaagcaggatctcaaagttctcaatgtaca

SEQ ID NO: 855120 - DNA, 33 bp, Homo sapien
taagaagcaggatctctaagttctcaatgtaca

SEQ ID NO: 855121 - DNA, 33 bp, Homo sapien
atggtggagcctgaagactattcaggagcctga

SEQ ID NO: 855122 - DNA, 33 bp, Homo sapien
atggtggagcctgaagcctattcaggagcctga

SEQ ID NO: 855123 - DNA, 33 bp, Homo sapien
tgtttacatttccccaatgatctcaaaggtatc

SEQ ID NO: 855124 - DNA, 33 bp, Homo sapien
tgtttacatttccccagtgatctcaaaggtatc

SEQ ID NO: 855125 - DNA, 33 bp, Homo sapien
tacagagtggtataacagagattggagactcag

SEQ ID NO: 855126 - DNA, 33 bp, Homo sapien
tacagagtggtataacggagattggagactcag

SEQ ID NO: 855127 - DNA, 33 bp, Homo sapien
atcaacataatggcgaatagaggagatcaagga

SEQ ID NO: 855128 - DNA, 33 bp, Homo sapien
atcaacataatggcgagtagaggagatcaagga

SEQ ID NO: 855129 - DNA, 33 bp, Homo sapien
agacataaaaatgccaaacttaaaattgaggta

SEQ ID NO: 855130 - DNA, 33 bp, Homo sapien
agacataaaaatgccacacttaaaattgaggta

SEQ ID NO: 855131 - DNA, 33 bp, Homo sapien
ttccaattcactttacagagtcagcataacttg

SEQ ID NO: 855132 - DNA, 33 bp, Homo sapien
ttccaattcactttacggagtcagcataacttg

SEQ ID NO: 855133 - DNA, 33 bp, Homo sapien
accaccgatcttttaccgaatctaacgccttgc

SEQ ID NO: 855134 - DNA, 33 bp, Homo sapien
accaccgatcttttactgaatctaacgccttgc

SEQ ID NO: 855135 - DNA, 33 bp, Homo sapien
tgtcatctctgtaaaaagcttgggaaaaggtga

SEQ ID NO: 855136 - DNA, 33 bp, Homo sapien
tgtcatctctgtaaaaggcttgggaaaaggtga

SEQ ID NO: 855137 - DNA, 33 bp, Homo sapien
tttcctgctgtaaagaaagaactcagctggaaa

SEQ ID NO: 855138 - DNA, 33 bp, Homo sapien
tttcctgctgtaaagagagaactcagctggaaa

SEQ ID NO: 855139 - DNA, 33 bp, Homo sapien
agctcatgctgtgttccacacactaccaagccc

SEQ ID NO: 855140 - DNA, 33 bp, Homo sapien
agctcatgctgtgttctacacactaccaagccc

SEQ ID NO: 855141 - DNA, 33 bp, Homo sapien
gggaggagctgtacaccgtcagaggagatctag

SEQ ID NO: 855142 - DNA, 33 bp, Homo sapien
gggaggagctgtacactgtcagaggagatctag

SEQ ID NO: 855143 - DNA, 33 bp, Homo sapien
cactcaagagcatgacaccttctgtctccacac

SEQ ID NO: 855144 - DNA, 33 bp, Homo sapien
cactcaagagcatgacgccttctgtctccacac

SEQ ID NO: 855145 - DNA, 33 bp, Homo sapien
ttgtatcacaagagcaaatgtcagggttgaagg

SEQ ID NO: 855146 - DNA, 33 bp, Homo sapien
ttgtatcacaagagcagatgtcagggttgaagg

SEQ ID NO: 855147 - DNA, 33 bp, Homo sapien
gagtgtttgcacagtacagtaacatttggttgt

SEQ ID NO: 855148 - DNA, 33 bp, Homo sapien
gagtgtttgcacagtatagtaacatttggttgt

SEQ ID NO: 855149 - DNA, 33 bp, Homo sapien
agaaaacttcagagtcaatgttttggtttcctg

SEQ ID NO: 855150 - DNA, 33 bp, Homo sapien
agaaaacttcagagtccatgttttggtttcctg

SEQ ID NO: 855151 - DNA, 33 bp, Homo sapien
ttcactctcggtgttgcacgttctatggttttg

SEQ ID NO: 855152 - DNA, 33 bp, Homo sapien
ttcactctcggtgttgtacgttctatggttttg

SEQ ID NO: 855153 - DNA, 33 bp, Homo sapien
acacacagcctcccccactgtcagcatccccca

SEQ ID NO: 855154 - DNA, 33 bp, Homo sapien
acacacagcctcccccgctgtcagcatccccca

SEQ ID NO: 855155 - DNA, 33 bp, Homo sapien
cacagcaaaactgaacacactatacagagagtt

SEQ ID NO: 855156 - DNA, 33 bp, Homo sapien
cacagcaaaactgaacgcactatacagagagtt

SEQ ID NO: 855157 - DNA, 33 bp, Homo sapien
ttaactacctaagcccagcaggctttcagaaga

SEQ ID NO: 855158 - DNA, 33 bp, Homo sapien
ttaactacctaagcccggcaggctttcagaaga

SEQ ID NO: 855159 - DNA, 33 bp, Homo sapien
ctgtaaaattttggtccaagaaagcaaaatcgc

SEQ ID NO: 855160 - DNA, 33 bp, Homo sapien
ctgtaaaattttggtcgaagaaagcaaaatcgc

SEQ ID NO: 855161 - DNA, 33 bp, Homo sapien
ttttttcacctgggagaaagtctatagttgacc

SEQ ID NO: 855162 - DNA, 33 bp, Homo sapien
ttttttcacctgggaggaagtctatagttgacc

SEQ ID NO: 855163 - DNA, 33 bp, Homo sapien
atgatttagcagttccactcctaggaatattat

SEQ ID NO: 855164 - DNA, 33 bp, Homo sapien
atgatttagcagttcctctcctaggaatattat

SEQ ID NO: 855165 - DNA, 33 bp, Homo sapien
acagctgaatgaactacgatttacgagaacgag

SEQ ID NO: 855166 - DNA, 33 bp, Homo sapien
acagctgaatgaactatgatttacgagaacgag

SEQ ID NO: 855167 - DNA, 33 bp, Homo sapien
agctgtctggcctgcccagtacatctcagcagc

SEQ ID NO: 855168 - DNA, 33 bp, Homo sapien
agctgtctggcctgcctagtacatctcagcagc

SEQ ID NO: 855169 - DNA, 33 bp, Homo sapien
gggttgcagagttaaacaaaccggctctcattt

SEQ ID NO: 855170 - DNA, 33 bp, Homo sapien
gggttgcagagttaaataaaccggctctcattt

SEQ ID NO: 855171 - DNA, 33 bp, Homo sapien
gtagtatgttaggacacagtttgactcatgaca

SEQ ID NO: 855172 - DNA, 33 bp, Homo sapien
gtagtatgttaggacatagtttgactcatgaca

SEQ ID NO: 855173 - DNA, 33 bp, Homo sapien
tagccataagaaagaaaaaagttctctgtgaac

SEQ ID NO: 855174 - DNA, 33 bp, Homo sapien
tagccataagaaagaagaaagttctctgtgaac

SEQ ID NO: 855175 - DNA, 33 bp, Homo sapien
tgctataatggatctgcacctgtaaggctcacg

SEQ ID NO: 855176 - DNA, 33 bp, Homo sapien
tgctataatggatctgtacctgtaaggctcacg

SEQ ID NO: 855177 - DNA, 33 bp, Homo sapien
ttccatagtaaggccccatgtagtgagaccata

SEQ ID NO: 855178 - DNA, 33 bp, Homo sapien
ttccatagtaaggcccgatgtagtgagaccata

SEQ ID NO: 855179 - DNA, 33 bp, Homo sapien
ttctattcagctttcaacctaaatgatcctgca

SEQ ID NO: 855180 - DNA, 33 bp, Homo sapien
ttctattcagctttcagcctaaatgatcctgca

SEQ ID NO: 855181 - DNA, 33 bp, Homo sapien
gatagtgagcacaagcaagcacaaacctgaaat

SEQ ID NO: 855182 - DNA, 33 bp, Homo sapien
gatagtgagcacaagcgagcacaaacctgaaat

SEQ ID NO: 855183 - DNA, 33 bp, Homo sapien
gtggaaacaggagaagcagaattcagtttggca

SEQ ID NO: 855184 - DNA, 33 bp, Homo sapien
gtggaaacaggagaagtagaattcagtttggca

SEQ ID NO: 855185 - DNA, 33 bp, Homo sapien
agtcttgatgcattagaaagtgtttccaatcca

SEQ ID NO: 855186 - DNA, 33 bp, Homo sapien
agtcttgatgcattaggaagtgtttccaatcca

SEQ ID NO: 855187 - DNA, 33 bp, Homo sapien
ccaattccaagttgtaagttttcagtaataatc

SEQ ID NO: 855188 - DNA, 33 bp, Homo sapien
ccaattccaagttgtacgttttcagtaataatc

SEQ ID NO: 855189 - DNA, 33 bp, Homo sapien
ttgaatgccttaagtacctgactaacttcatgt

SEQ ID NO: 855190 - DNA, 33 bp, Homo sapien
ttgaatgccttaagtatctgactaacttcatgt

SEQ ID NO: 855191 - DNA, 33 bp, Homo sapien
taaatgagttccttgcagagtcttttgtgtgtc

SEQ ID NO: 855192 - DNA, 33 bp, Homo sapien
taaatgagttccttgcggagtcttttgtgtgtc

SEQ ID NO: 855193 - DNA, 33 bp, Homo sapien
tctcaaaagtcaaaaccaagtcagtgggttcac

SEQ ID NO: 855194 - DNA, 33 bp, Homo sapien
tctcaaaagtcaaaacgaagtcagtgggttcac

SEQ ID NO: 855195 - DNA, 33 bp, Homo sapien
cgttcatccatgtcaacgtatccagagctctca

SEQ ID NO: 855196 - DNA, 33 bp, Homo sapien
cgttcatccatgtcaaggtatccagagctctca

SEQ ID NO: 855197 - DNA, 33 bp, Homo sapien
cacagacctatagagacgcttttgtaaacaagt

SEQ ID NO: 855198 - DNA, 33 bp, Homo sapien
cacagacctatagagatgcttttgtaaacaagt

SEQ ID NO: 855199 - DNA, 33 bp, Homo sapien
gacaagtcaaggtctacagaaaagtttccgcta

SEQ ID NO: 855200 - DNA, 33 bp, Homo sapien
gacaagtcaaggtctatagaaaagtttccgcta

SEQ ID NO: 855201 - DNA, 33 bp, Homo sapien
aagtagattgcagttacgataataatatcttgg

SEQ ID NO: 855202 - DNA, 33 bp, Homo sapien
aagtagattgcagttatgataataatatcttgg

SEQ ID NO: 855203 - DNA, 33 bp, Homo sapien
taggttactaatgccaactgggggattgttgtt

SEQ ID NO: 855204 - DNA, 33 bp, Homo sapien
taggttactaatgccatctgggggattgttgtt

SEQ ID NO: 855205 - DNA, 33 bp, Homo sapien
cacaacatgatgattcacaaagtttttcagtct

SEQ ID NO: 855206 - DNA, 33 bp, Homo sapien
cacaacatgatgattcgcaaagtttttcagtct

SEQ ID NO: 855207 - DNA, 33 bp, Homo sapien
tgacttatgtctcagaaaagagttttaaggttc

SEQ ID NO: 855208 - DNA, 33 bp, Homo sapien
tgacttatgtctcagagaagagttttaaggttc

SEQ ID NO: 855209 - DNA, 33 bp, Homo sapien
caggcgtttctaccacaggctatggtgtcttat

SEQ ID NO: 855210 - DNA, 33 bp, Homo sapien
caggcgtttctaccacgggctatggtgtcttat

SEQ ID NO: 855211 - DNA, 33 bp, Homo sapien
atgtcactaaatcctgaactgcaaaacaccgca

SEQ ID NO: 855212 - DNA, 33 bp, Homo sapien
atgtcactaaatcctgtactgcaaaacaccgca

SEQ ID NO: 855213 - DNA, 33 bp, Homo sapien
tcttgtgttcttttccaaactatgaaatggcga

SEQ ID NO: 855214 - DNA, 33 bp, Homo sapien
tcttgtgttcttttccgaactatgaaatggcga

SEQ ID NO: 855215 - DNA, 33 bp, Homo sapien
catgcctaggttgatactacaaacagggcactg

SEQ ID NO: 855216 - DNA, 33 bp, Homo sapien
catgcctaggttgatagtacaaacagggcactg

SEQ ID NO: 855217 - DNA, 33 bp, Homo sapien
taaacccttctcggaactatgctgcactccaag

SEQ ID NO: 855218 - DNA, 33 bp, Homo sapien
taaacccttctcggaattatgctgcactccaag

SEQ ID NO: 855219 - DNA, 33 bp, Homo sapien
caatgtagtgtgactagcaaatggccattcccc

SEQ ID NO: 855220 - DNA, 33 bp, Homo sapien
caatgtagtgtgactatcaaatggccattcccc

SEQ ID NO: 855221 - DNA, 33 bp, Homo sapien
gaggacaaatttcagaatactgtgagggtcaaa

SEQ ID NO: 855222 - DNA, 33 bp, Homo sapien
gaggacaaatttcagagtactgtgagggtcaaa

SEQ ID NO: 855223 - DNA, 33 bp, Homo sapien
tcagtattggacctatcacttatttaccttgtg

SEQ ID NO: 855224 - DNA, 33 bp, Homo sapien
tcagtattggacctatgacttatttaccttgtg

SEQ ID NO: 855225 - DNA, 33 bp, Homo sapien
gataatgatatcatttaaaaaagtgccaggcaa

SEQ ID NO: 855226 - DNA, 33 bp, Homo sapien
gataatgatatcattttaaaaagtgccaggcaa

SEQ ID NO: 855227 - DNA, 33 bp, Homo sapien
acttaagaaaccaaaacagccctaagtcaaacc

SEQ ID NO: 855228 - DNA, 33 bp, Homo sapien
acttaagaaaccaaaagagccctaagtcaaacc

SEQ ID NO: 855229 - DNA, 33 bp, Homo sapien
aggagaatcttcaagaacttcctcgcactgtga

SEQ ID NO: 855230 - DNA, 33 bp, Homo sapien
aggagaatcttcaagagcttcctcgcactgtga

SEQ ID NO: 855231 - DNA, 33 bp, Homo sapien
ggataaatagcttgcaataaactgattacggat

SEQ ID NO: 855232 - DNA, 33 bp, Homo sapien
ggataaatagcttgcactaaactgattacggat

SEQ ID NO: 855233 - DNA, 33 bp, Homo sapien
ggatggaagttcctaaccaatgattcatttatt

SEQ ID NO: 855234 - DNA, 33 bp, Homo sapien
ggatggaagttcctaatcaatgattcatttatt

SEQ ID NO: 855235 - DNA, 33 bp, Homo sapien
caataagttgtcctacgaccagtactgtcagca

SEQ ID NO: 855236 - DNA, 33 bp, Homo sapien
caataagttgtcctactaccagtactgtcagca

SEQ ID NO: 855237 - DNA, 33 bp, Homo sapien
taaaaatgatgacccacgtaaaatcaacattta

SEQ ID NO: 855238 - DNA, 33 bp, Homo sapien
taaaaatgatgacccatgtaaaatcaacattta

SEQ ID NO: 855239 - DNA, 33 bp, Homo sapien
gagatagcaaagagacacaatgaggaataaaat

SEQ ID NO: 855240 - DNA, 33 bp, Homo sapien
gagatagcaaagagacgcaatgaggaataaaat

SEQ ID NO: 855241 - DNA, 33 bp, Homo sapien
gaaagaaaggagaaagcaaagtatggacaactg

SEQ ID NO: 855242 - DNA, 33 bp, Homo sapien
gaaagaaaggagaaaggaaagtatggacaactg

SEQ ID NO: 855243 - DNA, 33 bp, Homo sapien
aaaatattaaatcctaacgaagaaggaggcttt

SEQ ID NO: 855244 - DNA, 33 bp, Homo sapien
aaaatattaaatcctaccgaagaaggaggcttt

SEQ ID NO: 855245 - DNA, 33 bp, Homo sapien
gatgaaacgttttacacatgtattgctgtggta

SEQ ID NO: 855246 - DNA, 33 bp, Homo sapien
gatgaaacgttttacatatgtattgctgtggta

SEQ ID NO: 855247 - DNA, 33 bp, Homo sapien
tgcttagcgtaatctgcaggcaaaagaatttgc

SEQ ID NO: 855248 - DNA, 33 bp, Homo sapien
tgcttagcgtaatctgtaggcaaaagaatttgc

SEQ ID NO: 855249 - DNA, 33 bp, Homo sapien
actgacgttatatcacccaggtttctcttacag

SEQ ID NO: 855250 - DNA, 33 bp, Homo sapien
actgacgttatatcactcaggtttctcttacag

SEQ ID NO: 855251 - DNA, 33 bp, Homo sapien
aaagttaggttgcttaggtatttgggcacctat

SEQ ID NO: 855252 - DNA, 33 bp, Homo sapien
aaagttaggttgcttatgtatttgggcacctat

SEQ ID NO: 855253 - DNA, 33 bp, Homo sapien
ctgtagttccaatgaccagaatgaaggatgatg

SEQ ID NO: 855254 - DNA, 33 bp, Homo sapien
ctgtagttccaatgactagaatgaaggatgatg

SEQ ID NO: 855255 - DNA, 33 bp, Homo sapien
caccttgcaccactccaccttgaagctacctat

SEQ ID NO: 855256 - DNA, 33 bp, Homo sapien
caccttgcaccactccgccttgaagctacctat

SEQ ID NO: 855257 - DNA, 33 bp, Homo sapien
ccatgtgtttccttacaattactcccctgacct

SEQ ID NO: 855258 - DNA, 33 bp, Homo sapien
ccatgtgtttccttaccattactcccctgacct

SEQ ID NO: 855259 - DNA, 33 bp, Homo sapien
accctggtccaatcaacttaccagcttgaggtg

SEQ ID NO: 855260 - DNA, 33 bp, Homo sapien
accctggtccaatcaatttaccagcttgaggtg

SEQ ID NO: 855261 - DNA, 33 bp, Homo sapien
aaggcctgggtgaccacgatttgttccttggga

SEQ ID NO: 855262 - DNA, 33 bp, Homo sapien
aaggcctgggtgaccatgatttgttccttggga

SEQ ID NO: 855263 - DNA, 33 bp, Homo sapien
agtgttttaaaagcaactgaagtcttattatga

SEQ ID NO: 855264 - DNA, 33 bp, Homo sapien
agtgttttaaaagcaattgaagtcttattatga

SEQ ID NO: 855265 - DNA, 33 bp, Homo sapien
ggatgcctgcctgtgaggtgggaggtaaggaaa

SEQ ID NO: 855266 - DNA, 33 bp, Homo sapien
ggatgcctgcctgtgatgtgggaggtaaggaaa

SEQ ID NO: 855267 - DNA, 33 bp, Homo sapien
tgaggttatgataaagcacagccatcatatcct

SEQ ID NO: 855268 - DNA, 33 bp, Homo sapien
tgaggttatgataaaggacagccatcatatcct

SEQ ID NO: 855269 - DNA, 33 bp, Homo sapien
gttttcttacataccacctacaaagatacagca

SEQ ID NO: 855270 - DNA, 33 bp, Homo sapien
gttttcttacataccagctacaaagatacagca

SEQ ID NO: 855271 - DNA, 33 bp, Homo sapien
tccctcactctccttccatgcatcaccacgcat

SEQ ID NO: 855272 - DNA, 33 bp, Homo sapien
tccctcactctccttctatgcatcaccacgcat

SEQ ID NO: 855273 - DNA, 33 bp, Homo sapien
aaaatatgttcccactcacactgaccaacaggt

SEQ ID NO: 855274 - DNA, 33 bp, Homo sapien
aaaatatgttcccactgacactgaccaacaggt

SEQ ID NO: 855275 - DNA, 33 bp, Homo sapien
atgagggtaatggcaacagcagttttctccaca

SEQ ID NO: 855276 - DNA, 33 bp, Homo sapien
atgagggtaatggcaatagcagttttctccaca

SEQ ID NO: 855277 - DNA, 33 bp, Homo sapien
ggtctgtaagggcgtacgaagaagagattagca

SEQ ID NO: 855278 - DNA, 33 bp, Homo sapien
ggtctgtaagggcgtatgaagaagagattagca

SEQ ID NO: 855279 - DNA, 33 bp, Homo sapien
agttcctagaagtcacagcattcagattaatgt

SEQ ID NO: 855280 - DNA, 33 bp, Homo sapien
agttcctagaagtcacggcattcagattaatgt

SEQ ID NO: 855281 - DNA, 33 bp, Homo sapien
tatctaaggcttatagaaagcaacaataaacca

SEQ ID NO: 855282 - DNA, 33 bp, Homo sapien
tatctaaggcttataggaagcaacaataaacca

SEQ ID NO: 855283 - DNA, 33 bp, Homo sapien
gatcagtcttcttagaacaacatttttatagcc

SEQ ID NO: 855284 - DNA, 33 bp, Homo sapien
gatcagtcttcttagagcaacatttttatagcc

SEQ ID NO: 855285 - DNA, 33 bp, Homo sapien
aaaggcaataacttcacacatggatgtgcaaag

SEQ ID NO: 855286 - DNA, 33 bp, Homo sapien
aaaggcaataacttcatacatggatgtgcaaag

SEQ ID NO: 855287 - DNA, 33 bp, Homo sapien
gcaaacagaattggtacatttgaaggaatcagt

SEQ ID NO: 855288 - DNA, 33 bp, Homo sapien
gcaaacagaattggtatatttgaaggaatcagt

SEQ ID NO: 855289 - DNA, 33 bp, Homo sapien
attctacaatgacttcccatgataaacataaaa

SEQ ID NO: 855290 - DNA, 33 bp, Homo sapien
attctacaatgacttctcatgataaacataaaa

SEQ ID NO: 855291 - DNA, 33 bp, Homo sapien
tgagggtatcctcttaaatattcaaatcaaatt

SEQ ID NO: 855292 - DNA, 33 bp, Homo sapien
tgagggtatcctcttatatattcaaatcaaatt

SEQ ID NO: 855293 - DNA, 33 bp, Homo sapien
caaagaagatcaaagaagaatagccagagaggt

SEQ ID NO: 855294 - DNA, 33 bp, Homo sapien
caaagaagatcaaagaggaatagccagagaggt

SEQ ID NO: 855295 - DNA, 33 bp, Homo sapien
gtagcaaatggtataactggataagggacctgg

SEQ ID NO: 855296 - DNA, 33 bp, Homo sapien
gtagcaaatggtataattggataagggacctgg

SEQ ID NO: 855297 - DNA, 33 bp, Homo sapien
atgccctctaaaaatacgtgaaagtactcaaag

SEQ ID NO: 855298 - DNA, 33 bp, Homo sapien
atgccctctaaaaatatgtgaaagtactcaaag

SEQ ID NO: 855299 - DNA, 33 bp, Homo sapien
ctgacaatcacctctacgagagcagcttggatg

SEQ ID NO: 855300 - DNA, 33 bp, Homo sapien
ctgacaatcacctctatgagagcagcttggatg

SEQ ID NO: 855301 - DNA, 33 bp, Homo sapien
agattcaggatgcacaagtttcttctaggaaca

SEQ ID NO: 855302 - DNA, 33 bp, Homo sapien
agattcaggatgcacaggtttcttctaggaaca

SEQ ID NO: 855303 - DNA, 33 bp, Homo sapien
tggggtgaagagatgaaaagtctcagacaagag

SEQ ID NO: 855304 - DNA, 33 bp, Homo sapien
tggggtgaagagatgagaagtctcagacaagag

SEQ ID NO: 855305 - DNA, 33 bp, Homo sapien
tcttctcaatggcatacctgaattcactagttg

SEQ ID NO: 855306 - DNA, 33 bp, Homo sapien
tcttctcaatggcatatctgaattcactagttg

SEQ ID NO: 855307 - DNA, 33 bp, Homo sapien
ttataaactagaataactggcaaagatggaatg

SEQ ID NO: 855308 - DNA, 33 bp, Homo sapien
ttataaactagaataattggcaaagatggaatg

SEQ ID NO: 855309 - DNA, 33 bp, Homo sapien
ttcttattcgggacaccgagaaatgggcttttc

SEQ ID NO: 855310 - DNA, 33 bp, Homo sapien
ttcttattcgggacactgagaaatgggcttttc

SEQ ID NO: 855311 - DNA, 33 bp, Homo sapien
atctatgaaggtagctcaaggaacatggtgttc

SEQ ID NO: 855312 - DNA, 33 bp, Homo sapien
atctatgaaggtagctgaaggaacatggtgttc

SEQ ID NO: 855313 - DNA, 33 bp, Homo sapien
cttagcaacagcggctaaattccacagtcctta

SEQ ID NO: 855314 - DNA, 33 bp, Homo sapien
cttagcaacagcggctgaattccacagtcctta

SEQ ID NO: 855315 - DNA, 33 bp, Homo sapien
tacgtcctattcacctaagctattttcatacag

SEQ ID NO: 855316 - DNA, 33 bp, Homo sapien
tacgtcctattcacctgagctattttcatacag

SEQ ID NO: 855317 - DNA, 33 bp, Homo sapien
catgtcagctgctcacaggtctatgttttttgt

SEQ ID NO: 855318 - DNA, 33 bp, Homo sapien
catgtcagctgctcacgggtctatgttttttgt

SEQ ID NO: 855319 - DNA, 33 bp, Homo sapien
aatgattacagagaaacgtttgaaaaatataga

SEQ ID NO: 855320 - DNA, 33 bp, Homo sapien
aatgattacagagaaaggtttgaaaaatataga

SEQ ID NO: 855321 - DNA, 33 bp, Homo sapien
ccactccactcttcagcagcaactacataaaat

SEQ ID NO: 855322 - DNA, 33 bp, Homo sapien
ccactccactcttcagtagcaactacataaaat

SEQ ID NO: 855323 - DNA, 33 bp, Homo sapien
caagcaacaacatacaatatataagcgatgaat

SEQ ID NO: 855324 - DNA, 33 bp, Homo sapien
caagcaacaacatacagtatataagcgatgaat

SEQ ID NO: 855325 - DNA, 33 bp, Homo sapien
ggaattagttggcaaggagattgagggtctcag

SEQ ID NO: 855326 - DNA, 33 bp, Homo sapien
ggaattagttggcaagtagattgagggtctcag

SEQ ID NO: 855327 - DNA, 33 bp, Homo sapien
agcactgctttttgcacaatgtgtgtggtctgt

SEQ ID NO: 855328 - DNA, 33 bp, Homo sapien
agcactgctttttgcataatgtgtgtggtctgt

SEQ ID NO: 855329 - DNA, 33 bp, Homo sapien
gaacagcttcagtcaaatgcaaccacatcagag

SEQ ID NO: 855330 - DNA, 33 bp, Homo sapien
gaacagcttcagtcaagtgcaaccacatcagag

SEQ ID NO: 855331 - DNA, 33 bp, Homo sapien
ctgttactgaagttcaatcataatcaccatgtc

SEQ ID NO: 855332 - DNA, 33 bp, Homo sapien
ctgttactgaagttcagtcataatcaccatgtc

SEQ ID NO: 855333 - DNA, 33 bp, Homo sapien
gcagacggagaaaatgccatgatggtccaggtg

SEQ ID NO: 855334 - DNA, 33 bp, Homo sapien
gcagacggagaaaatgtcatgatggtccaggtg

SEQ ID NO: 855335 - DNA, 33 bp, Homo sapien
tggcatttatgagatgcagccatcgtttctggg

SEQ ID NO: 855336 - DNA, 33 bp, Homo sapien
tggcatttatgagatgtagccatcgtttctggg

SEQ ID NO: 855337 - DNA, 33 bp, Homo sapien
aacccttacctcaagccgacttcaacttttcag

SEQ ID NO: 855338 - DNA, 33 bp, Homo sapien
aacccttacctcaagctgacttcaacttttcag

SEQ ID NO: 855339 - DNA, 33 bp, Homo sapien
ggttgccataaattgcaccaacagatattatat

SEQ ID NO: 855340 - DNA, 33 bp, Homo sapien
ggttgccataaattgctccaacagatattatat

SEQ ID NO: 855341 - DNA, 33 bp, Homo sapien
ttttgaaaggttgctacagtgtgttgcatccct

SEQ ID NO: 855342 - DNA, 33 bp, Homo sapien
ttttgaaaggttgctatagtgtgttgcatccct

SEQ ID NO: 855343 - DNA, 33 bp, Homo sapien
ctgggcttcccttccacggtttgaagcagatcc

SEQ ID NO: 855344 - DNA, 33 bp, Homo sapien
ctgggcttcccttccatggtttgaagcagatcc

SEQ ID NO: 855345 - DNA, 33 bp, Homo sapien
acactgaagatttgcacgagtcaaaattaggaa

SEQ ID NO: 855346 - DNA, 33 bp, Homo sapien
acactgaagatttgcatgagtcaaaattaggaa

SEQ ID NO: 855347 - DNA, 33 bp, Homo sapien
cttgtttcctgaatgaaagtgaaaaaccctagg

SEQ ID NO: 855348 - DNA, 33 bp, Homo sapien
cttgtttcctgaatgagagtgaaaaaccctagg

SEQ ID NO: 855349 - DNA, 33 bp, Homo sapien
taaactatacagctacagggatgaattttaagg

SEQ ID NO: 855350 - DNA, 33 bp, Homo sapien
taaactatacagctacggggatgaattttaagg

SEQ ID NO: 855351 - DNA, 33 bp, Homo sapien
gctaagaggaaggatcaactgtgaatggcaaaa

SEQ ID NO: 855352 - DNA, 33 bp, Homo sapien
gctaagaggaaggatcgactgtgaatggcaaaa

SEQ ID NO: 855353 - DNA, 33 bp, Homo sapien
ttaagtatgtgcaaagaatgatatttgagagct

SEQ ID NO: 855354 - DNA, 33 bp, Homo sapien
ttaagtatgtgcaaagcatgatatttgagagct

SEQ ID NO: 855355 - DNA, 33 bp, Homo sapien
agggttcaggactgacaaagatgaaggcgtctc

SEQ ID NO: 855356 - DNA, 33 bp, Homo sapien
agggttcaggactgacgaagatgaaggcgtctc

SEQ ID NO: 855357 - DNA, 33 bp, Homo sapien
aaccggtacagaaagaaattccaagagtgcaaa

SEQ ID NO: 855358 - DNA, 33 bp, Homo sapien
aaccggtacagaaagagattccaagagtgcaaa

SEQ ID NO: 855359 - DNA, 33 bp, Homo sapien
cagaaggttgcacacccatgttctggttcagaa

SEQ ID NO: 855360 - DNA, 33 bp, Homo sapien
cagaaggttgcacaccgatgttctggttcagaa

SEQ ID NO: 855361 - DNA, 33 bp, Homo sapien
tgtaactgttgctatgacaaggagaaaagcacc

SEQ ID NO: 855362 - DNA, 33 bp, Homo sapien
tgtaactgttgctatgtcaaggagaaaagcacc

SEQ ID NO: 855363 - DNA, 33 bp, Homo sapien
ccaaggtcttgatacaaaaaatttgggtgttgt

SEQ ID NO: 855364 - DNA, 33 bp, Homo sapien
ccaaggtcttgatacacaaaatttgggtgttgt

SEQ ID NO: 855365 - DNA, 33 bp, Homo sapien
tcttctatagcaattacggtactggatttgggg

SEQ ID NO: 855366 - DNA, 33 bp, Homo sapien
tcttctatagcaattatggtactggatttgggg

SEQ ID NO: 855367 - DNA, 33 bp, Homo sapien
gcccatttttgtgctacgttactacaggagtgt

SEQ ID NO: 855368 - DNA, 33 bp, Homo sapien
gcccatttttgtgctatgttactacaggagtgt

SEQ ID NO: 855369 - DNA, 33 bp, Homo sapien
ggaccgagcaagatgacgcgtgtgaaagagggg

SEQ ID NO: 855370 - DNA, 33 bp, Homo sapien
ggaccgagcaagatgatgcgtgtgaaagagggg

SEQ ID NO: 855371 - DNA, 33 bp, Homo sapien
taaagatggatgagacaggacgttatgccctag

SEQ ID NO: 855372 - DNA, 33 bp, Homo sapien
taaagatggatgagacgggacgttatgccctag

SEQ ID NO: 855373 - DNA, 33 bp, Homo sapien
aatataaaatggggcaactacaataggaaacag

SEQ ID NO: 855374 - DNA, 33 bp, Homo sapien
aatataaaatggggcagctacaataggaaacag

SEQ ID NO: 855375 - DNA, 33 bp, Homo sapien
gagtaaaataaaacaacacgaagctgattataa

SEQ ID NO: 855376 - DNA, 33 bp, Homo sapien
gagtaaaataaaacaatacgaagctgattataa

SEQ ID NO: 855377 - DNA, 33 bp, Homo sapien
ttctccagatccataaaggacatttaaacaaca

SEQ ID NO: 855378 - DNA, 33 bp, Homo sapien
ttctccagatccataagggacatttaaacaaca

SEQ ID NO: 855379 - DNA, 33 bp, Homo sapien
ggtctgactctcataaagcttacattagaatgt

SEQ ID NO: 855380 - DNA, 33 bp, Homo sapien
ggtctgactctcataaggcttacattagaatgt

SEQ ID NO: 855381 - DNA, 33 bp, Homo sapien
attaatgtgaatggagaaacagatactagctat

SEQ ID NO: 855382 - DNA, 33 bp, Homo sapien
attaatgtgaatggaggaacagatactagctat

SEQ ID NO: 855383 - DNA, 33 bp, Homo sapien
ttgagaatctactataagctttggcaatgttga

SEQ ID NO: 855384 - DNA, 33 bp, Homo sapien
ttgagaatctactatatgctttggcaatgttga

SEQ ID NO: 855385 - DNA, 33 bp, Homo sapien
attctgctaaggcatcactttcttccagatgtt

SEQ ID NO: 855386 - DNA, 33 bp, Homo sapien
attctgctaaggcatcgctttcttccagatgtt

SEQ ID NO: 855387 - DNA, 33 bp, Homo sapien
cacagcttgctttatccccctgaattttttcca

SEQ ID NO: 855388 - DNA, 33 bp, Homo sapien
cacagcttgctttatctccctgaattttttcca

SEQ ID NO: 855389 - DNA, 33 bp, Homo sapien
cttgtgatgaggtgaacacattggacaaaggga

SEQ ID NO: 855390 - DNA, 33 bp, Homo sapien
cttgtgatgaggtgaatacattggacaaaggga

SEQ ID NO: 855391 - DNA, 33 bp, Homo sapien
tttatggatagttgtaaggaagtatgtctggag

SEQ ID NO: 855392 - DNA, 33 bp, Homo sapien
tttatggatagttgtacggaagtatgtctggag

SEQ ID NO: 855393 - DNA, 33 bp, Homo sapien
gtaattgcatcagcaacaaatcccatctgagga

SEQ ID NO: 855394 - DNA, 33 bp, Homo sapien
gtaattgcatcagcaagaaatcccatctgagga

SEQ ID NO: 855395 - DNA, 33 bp, Homo sapien
gccaaatgactttatcacttacatggcttctag

SEQ ID NO: 855396 - DNA, 33 bp, Homo sapien
gccaaatgactttatcccttacatggcttctag

SEQ ID NO: 855397 - DNA, 33 bp, Homo sapien
ctattaccagttaaggaaattcttgccttattg

SEQ ID NO: 855398 - DNA, 33 bp, Homo sapien
ctattaccagttaagggaattcttgccttattg

SEQ ID NO: 855399 - DNA, 33 bp, Homo sapien
taaatgctgaaaagaccagtccctgaagcctaa

SEQ ID NO: 855400 - DNA, 33 bp, Homo sapien
taaatgctgaaaagacgagtccctgaagcctaa

SEQ ID NO: 855401 - DNA, 33 bp, Homo sapien
aagcctaaaatggtaccaaaaacagctgagcaa

SEQ ID NO: 855402 - DNA, 33 bp, Homo sapien
aagcctaaaatggtactaaaaacagctgagcaa

SEQ ID NO: 855403 - DNA, 33 bp, Homo sapien
taaaaccataaatgtacgctacgactaaatgag

SEQ ID NO: 855404 - DNA, 33 bp, Homo sapien
taaaaccataaatgtatgctacgactaaatgag

SEQ ID NO: 855405 - DNA, 33 bp, Homo sapien
taaacctgagggacaccgagaaaaacagctgct

SEQ ID NO: 855406 - DNA, 33 bp, Homo sapien
taaacctgagggacactgagaaaaacagctgct

SEQ ID NO: 855407 - DNA, 33 bp, Homo sapien
gtgttaatgataaaaaagtatcaaatggtggga

SEQ ID NO: 855408 - DNA, 33 bp, Homo sapien
gtgttaatgataaaaatgtatcaaatggtggga

SEQ ID NO: 855409 - DNA, 33 bp, Homo sapien
tctcaaaatcagcttaaaagagggacagtcttg

SEQ ID NO: 855410 - DNA, 33 bp, Homo sapien
tctcaaaatcagcttagaagagggacagtcttg

SEQ ID NO: 855411 - DNA, 33 bp, Homo sapien
cctttgttccaaattcccttatactgctggcag

SEQ ID NO: 855412 - DNA, 33 bp, Homo sapien
cctttgttccaaattctcttatactgctggcag

SEQ ID NO: 855413 - DNA, 33 bp, Homo sapien
atctgaagcacgcaaggaaagctacaggaagtg

SEQ ID NO: 855414 - DNA, 33 bp, Homo sapien
atctgaagcacgcaagtaaagctacaggaagtg

SEQ ID NO: 855415 - DNA, 33 bp, Homo sapien
ctcctgcactaagtgaccttcctatcaaagcct

SEQ ID NO: 855416 - DNA, 33 bp, Homo sapien
ctcctgcactaagtgatcttcctatcaaagcct

SEQ ID NO: 855417 - DNA, 33 bp, Homo sapien
gaagagggaaagggtaagaattgtgaaggtgca

SEQ ID NO: 855418 - DNA, 33 bp, Homo sapien
gaagagggaaagggtaggaattgtgaaggtgca

SEQ ID NO: 855419 - DNA, 33 bp, Homo sapien
accatgaatgcaaagacagtaaaactgaaatct

SEQ ID NO: 855420 - DNA, 33 bp, Homo sapien
accatgaatgcaaagatagtaaaactgaaatct

SEQ ID NO: 855421 - DNA, 33 bp, Homo sapien
tggcccattccttgcagtctggttagagtcata

SEQ ID NO: 855422 - DNA, 33 bp, Homo sapien
tggcccattccttgcattctggttagagtcata

SEQ ID NO: 855423 - DNA, 33 bp, Homo sapien
tagaagcaacatatgaagcagaaatgtagcagt

SEQ ID NO: 855424 - DNA, 33 bp, Homo sapien
tagaagcaacatatgaggcagaaatgtagcagt

SEQ ID NO: 855425 - DNA, 33 bp, Homo sapien
tcacctaaagataatacggcgtagtgcacaggg

SEQ ID NO: 855426 - DNA, 33 bp, Homo sapien
tcacctaaagataatatggcgtagtgcacaggg

SEQ ID NO: 855427 - DNA, 33 bp, Homo sapien
gaatactaggcagaaaacaagaattaactgtat

SEQ ID NO: 855428 - DNA, 33 bp, Homo sapien
gaatactaggcagaaatcaagaattaactgtat

SEQ ID NO: 855429 - DNA, 33 bp, Homo sapien
catcaccattgcaataacaacaaaaactgaact

SEQ ID NO: 855430 - DNA, 33 bp, Homo sapien
catcaccattgcaatagcaacaaaaactgaact

SEQ ID NO: 855431 - DNA, 33 bp, Homo sapien
agatctggcaagttctcacctagcacagatagt

SEQ ID NO: 855432 - DNA, 33 bp, Homo sapien
agatctggcaagttcttacctagcacagatagt

SEQ ID NO: 855433 - DNA, 33 bp, Homo sapien
actgctttatttcttacggtgatcatttcatag

SEQ ID NO: 855434 - DNA, 33 bp, Homo sapien
actgctttatttcttatggtgatcatttcatag

SEQ ID NO: 855435 - DNA, 33 bp, Homo sapien
aaaaagtaaagctaaaagagatgtgctgttttg

SEQ ID NO: 855436 - DNA, 33 bp, Homo sapien
aaaaagtaaagctaaatgagatgtgctgttttg

SEQ ID NO: 855437 - DNA, 33 bp, Homo sapien
gaaattctgccaaaaccagaatattttggggat

SEQ ID NO: 855438 - DNA, 33 bp, Homo sapien
gaaattctgccaaaacgagaatattttggggat

SEQ ID NO: 855439 - DNA, 33 bp, Homo sapien
gaaactaccatggccaaaaaggcttatatacat

SEQ ID NO: 855440 - DNA, 33 bp, Homo sapien
gaaactaccatggccataaaggcttatatacat

SEQ ID NO: 855441 - DNA, 33 bp, Homo sapien
ttacgttgtaagtaacaaaaattatggataacc

SEQ ID NO: 855442 - DNA, 33 bp, Homo sapien
ttacgttgtaagtaacgaaaattatggataacc

SEQ ID NO: 855443 - DNA, 33 bp, Homo sapien
gcaacattatatactgaaggcacaaaatgagat

SEQ ID NO: 855444 - DNA, 33 bp, Homo sapien
gcaacattatatactgcaggcacaaaatgagat

SEQ ID NO: 855445 - DNA, 33 bp, Homo sapien
aggtacctatgcaaataagctaatcaaaggata

SEQ ID NO: 855446 - DNA, 33 bp, Homo sapien
aggtacctatgcaaatgagctaatcaaaggata

SEQ ID NO: 855447 - DNA, 33 bp, Homo sapien
tctgttttgttggcaccatgaaacatacctgaa

SEQ ID NO: 855448 - DNA, 33 bp, Homo sapien
tctgttttgttggcacgatgaaacatacctgaa

SEQ ID NO: 855449 - DNA, 33 bp, Homo sapien
catcacaaagtacaacagagagcatctcttggt

SEQ ID NO: 855450 - DNA, 33 bp, Homo sapien
catcacaaagtacaaccgagagcatctcttggt

SEQ ID NO: 855451 - DNA, 33 bp, Homo sapien
tgaatgatttagaaataaactatccacatatag

SEQ ID NO: 855452 - DNA, 33 bp, Homo sapien
tgaatgatttagaaatgaactatccacatatag

SEQ ID NO: 855453 - DNA, 33 bp, Homo sapien
cttgacttcttgaagccgacattcttgttgtat

SEQ ID NO: 855454 - DNA, 33 bp, Homo sapien
cttgacttcttgaagctgacattcttgttgtat

SEQ ID NO: 855455 - DNA, 33 bp, Homo sapien
gtctgagacagattaacgttagaggaaagggaa

SEQ ID NO: 855456 - DNA, 33 bp, Homo sapien
gtctgagacagattaatgttagaggaaagggaa

SEQ ID NO: 855457 - DNA, 33 bp, Homo sapien
ggctgtcaaaagattacgaggggagggaaacac

SEQ ID NO: 855458 - DNA, 33 bp, Homo sapien
ggctgtcaaaagattatgaggggagggaaacac

SEQ ID NO: 855459 - DNA, 33 bp, Homo sapien
aaatcagaatcaaaagaccttgctaaatttccc

SEQ ID NO: 855460 - DNA, 33 bp, Homo sapien
aaatcagaatcaaaagtccttgctaaatttccc

SEQ ID NO: 855461 - DNA, 33 bp, Homo sapien
gtttagtggcggctgcaataacagtagggttgg

SEQ ID NO: 855462 - DNA, 33 bp, Homo sapien
gtttagtggcggctgcgataacagtagggttgg

SEQ ID NO: 855463 - DNA, 33 bp, Homo sapien
agggtactgagcatacagaaggcatttagcaaa

SEQ ID NO: 855464 - DNA, 33 bp, Homo sapien
agggtactgagcataccgaaggcatttagcaaa

SEQ ID NO: 855465 - DNA, 33 bp, Homo sapien
ttctctttctaaggaactgatatggagatacag

SEQ ID NO: 855466 - DNA, 33 bp, Homo sapien
ttctctttctaaggaattgatatggagatacag

SEQ ID NO: 855467 - DNA, 33 bp, Homo sapien
ttctttcagctcattgcaacaatcacacaatta

SEQ ID NO: 855468 - DNA, 33 bp, Homo sapien
ttctttcagctcattgtaacaatcacacaatta

SEQ ID NO: 855469 - DNA, 33 bp, Homo sapien
ttaatttaaccttaaaaattatgtcatcctcca

SEQ ID NO: 855470 - DNA, 33 bp, Homo sapien
ttaatttaaccttaaacattatgtcatcctcca

SEQ ID NO: 855471 - DNA, 33 bp, Homo sapien
cagcaaacatttttgaacacttattacgtgcca

SEQ ID NO: 855472 - DNA, 33 bp, Homo sapien
cagcaaacatttttgaccacttattacgtgcca

SEQ ID NO: 855473 - DNA, 33 bp, Homo sapien
ctatcaaagactgcacggagttagtgatggaag

SEQ ID NO: 855474 - DNA, 33 bp, Homo sapien
ctatcaaagactgcactgagttagtgatggaag

SEQ ID NO: 855475 - DNA, 33 bp, Homo sapien
taactttaaaatcaagaatctgaaccaattaat

SEQ ID NO: 855476 - DNA, 33 bp, Homo sapien
taactttaaaatcaaggatctgaaccaattaat

SEQ ID NO: 855477 - DNA, 33 bp, Homo sapien
gataggcaaaaggaagccattaggttagttctt

SEQ ID NO: 855478 - DNA, 33 bp, Homo sapien
gataggcaaaaggaagtcattaggttagttctt

SEQ ID NO: 855479 - DNA, 33 bp, Homo sapien
aaatttaaattctgaacgtaggctggcctgtct

SEQ ID NO: 855480 - DNA, 33 bp, Homo sapien
aaatttaaattctgaatgtaggctggcctgtct

SEQ ID NO: 855481 - DNA, 33 bp, Homo sapien
aagtttttcttgaacaaatggaaaccacaaggt

SEQ ID NO: 855482 - DNA, 33 bp, Homo sapien
aagtttttcttgaacagatggaaaccacaaggt

SEQ ID NO: 855483 - DNA, 33 bp, Homo sapien
atttgtaaccctatgcaatccacttactagcca

SEQ ID NO: 855484 - DNA, 33 bp, Homo sapien
atttgtaaccctatgccatccacttactagcca

SEQ ID NO: 855485 - DNA, 33 bp, Homo sapien
tgtcaccaaacagtataaagtatctaaacaatg

SEQ ID NO: 855486 - DNA, 33 bp, Homo sapien
tgtcaccaaacagtatgaagtatctaaacaatg

SEQ ID NO: 855487 - DNA, 33 bp, Homo sapien
aaactaagcctgaacacagaagttgctgctagt

SEQ ID NO: 855488 - DNA, 33 bp, Homo sapien
aaactaagcctgaacatagaagttgctgctagt

SEQ ID NO: 855489 - DNA, 33 bp, Homo sapien
cctgattccacaaccacgtttcttaacctgtct

SEQ ID NO: 855490 - DNA, 33 bp, Homo sapien
cctgattccacaaccatgtttcttaacctgtct

SEQ ID NO: 855491 - DNA, 33 bp, Homo sapien
tctaacacacttggaaagtaattaaaatcttgt

SEQ ID NO: 855492 - DNA, 33 bp, Homo sapien
tctaacacacttggaaggtaattaaaatcttgt

SEQ ID NO: 855493 - DNA, 33 bp, Homo sapien
agctgagattggaggaacatactaggttatcgc

SEQ ID NO: 855494 - DNA, 33 bp, Homo sapien
agctgagattggaggatcatactaggttatcgc

SEQ ID NO: 855495 - DNA, 33 bp, Homo sapien
aagatggtgcttgaaaaggttgccaaaatctta

SEQ ID NO: 855496 - DNA, 33 bp, Homo sapien
aagatggtgcttgaaagggttgccaaaatctta

SEQ ID NO: 855497 - DNA, 33 bp, Homo sapien
tgtgggtgctattcaccacaattccatggcttg

SEQ ID NO: 855498 - DNA, 33 bp, Homo sapien
tgtgggtgctattcactacaattccatggcttg

SEQ ID NO: 855499 - DNA, 33 bp, Homo sapien
ttacataattgtttcccaaacagatagtgaaaa

SEQ ID NO: 855500 - DNA, 33 bp, Homo sapien
ttacataattgtttccgaaacagatagtgaaaa

SEQ ID NO: 855501 - DNA, 33 bp, Homo sapien
tgtggaatataaataccaggaataatgggaatt

SEQ ID NO: 855502 - DNA, 33 bp, Homo sapien
tgtggaatataaatacgaggaataatgggaatt

SEQ ID NO: 855503 - DNA, 33 bp, Homo sapien
aagcaaaagtagatgaagtgaaatggaatgaca

SEQ ID NO: 855504 - DNA, 33 bp, Homo sapien
aagcaaaagtagatgaggtgaaatggaatgaca

SEQ ID NO: 855505 - DNA, 33 bp, Homo sapien
ttaagcctcacatcctaaaaacggtactggtgc

SEQ ID NO: 855506 - DNA, 33 bp, Homo sapien
ttaagcctcacatcctgaaaacggtactggtgc

SEQ ID NO: 855507 - DNA, 33 bp, Homo sapien
tttgttcatcactttaccgccagaatctagaat

SEQ ID NO: 855508 - DNA, 33 bp, Homo sapien
tttgttcatcactttatcgccagaatctagaat

SEQ ID NO: 855509 - DNA, 33 bp, Homo sapien
caacattgtaatttgcaatatatccattttggt

SEQ ID NO: 855510 - DNA, 33 bp, Homo sapien
caacattgtaatttgctatatatccattttggt

SEQ ID NO: 855511 - DNA, 33 bp, Homo sapien
tgctagctaaaaatgaaggattgagccacacat

SEQ ID NO: 855512 - DNA, 33 bp, Homo sapien
tgctagctaaaaatgagggattgagccacacat

SEQ ID NO: 855513 - DNA, 33 bp, Homo sapien
agcttggtgcaatgacggactccaatattttat

SEQ ID NO: 855514 - DNA, 33 bp, Homo sapien
agcttggtgcaatgactgactccaatattttat

SEQ ID NO: 855515 - DNA, 33 bp, Homo sapien
tttcagggggtgaaagcatgatggctagcattg

SEQ ID NO: 855516 - DNA, 33 bp, Homo sapien
tttcagggggtgaaaggatgatggctagcattg

SEQ ID NO: 855517 - DNA, 33 bp, Homo sapien
atccgtgttttaaaatcaggttccatgattatt

SEQ ID NO: 855518 - DNA, 33 bp, Homo sapien
atccgtgttttaaaatgaggttccatgattatt

SEQ ID NO: 855519 - DNA, 33 bp, Homo sapien
tatatgccaggatcttcaaaacagttatgctag

SEQ ID NO: 855520 - DNA, 33 bp, Homo sapien
tatatgccaggatctttaaaacagttatgctag

SEQ ID NO: 855521 - DNA, 33 bp, Homo sapien
tgctagatctctctgtcaaaaatcacagttccg

SEQ ID NO: 855522 - DNA, 33 bp, Homo sapien
tgctagatctctctgttaaaaatcacagttccg

SEQ ID NO: 855523 - DNA, 33 bp, Homo sapien
ggatgggttccatgaccgcattaattgggaact

SEQ ID NO: 855524 - DNA, 33 bp, Homo sapien
ggatgggttccatgactgcattaattgggaact

SEQ ID NO: 855525 - DNA, 33 bp, Homo sapien
atggagacaggcaagcaagtaggatccagtggc

SEQ ID NO: 855526 - DNA, 33 bp, Homo sapien
atggagacaggcaagctagtaggatccagtggc

SEQ ID NO: 855527 - DNA, 33 bp, Homo sapien
ttgaacagttgatgaacatttgggttgtgtctt

SEQ ID NO: 855528 - DNA, 33 bp, Homo sapien
ttgaacagttgatgaatatttgggttgtgtctt

SEQ ID NO: 855529 - DNA, 33 bp, Homo sapien
gatgtagacagggtaaatagacagaatgttatc

SEQ ID NO: 855530 - DNA, 33 bp, Homo sapien
gatgtagacagggtaagtagacagaatgttatc

SEQ ID NO: 855531 - DNA, 33 bp, Homo sapien
agacaggcaaaaattcacataaataaaacaatt

SEQ ID NO: 855532 - DNA, 33 bp, Homo sapien
agacaggcaaaaattcgcataaataaaacaatt

SEQ ID NO: 855533 - DNA, 33 bp, Homo sapien
tatattttacagtatcacggttataaaaaatgc

SEQ ID NO: 855534 - DNA, 33 bp, Homo sapien
tatattttacagtatcgcggttataaaaaatgc

SEQ ID NO: 855535 - DNA, 33 bp, Homo sapien
gtgtatactttaaaaacgtgaggagaaagagaa

SEQ ID NO: 855536 - DNA, 33 bp, Homo sapien
gtgtatactttaaaaatgtgaggagaaagagaa

SEQ ID NO: 855537 - DNA, 33 bp, Homo sapien
ctcccccaaaagctaacaggcaaaccaagagag

SEQ ID NO: 855538 - DNA, 33 bp, Homo sapien
ctcccccaaaagctaagaggcaaaccaagagag

SEQ ID NO: 855539 - DNA, 33 bp, Homo sapien
gctctatctgtgggccaagccattataagaacc

SEQ ID NO: 855540 - DNA, 33 bp, Homo sapien
gctctatctgtgggccgagccattataagaacc

SEQ ID NO: 855541 - DNA, 33 bp, Homo sapien
agcttaggtgccatccgctttgcctttatttcc

SEQ ID NO: 855542 - DNA, 33 bp, Homo sapien
agcttaggtgccatcctctttgcctttatttcc

SEQ ID NO: 855543 - DNA, 33 bp, Homo sapien
tggaagtgcctccgcaaatctaaacaactagca

SEQ ID NO: 855544 - DNA, 33 bp, Homo sapien
tggaagtgcctccgcagatctaaacaactagca

SEQ ID NO: 855545 - DNA, 33 bp, Homo sapien
gttaccatgcatagaaataagggcaaggtgcag

SEQ ID NO: 855546 - DNA, 33 bp, Homo sapien
gttaccatgcatagaagtaagggcaaggtgcag

SEQ ID NO: 855547 - DNA, 33 bp, Homo sapien
ggagtgggaatttgacagaggaattatcttttc

SEQ ID NO: 855548 - DNA, 33 bp, Homo sapien
ggagtgggaatttgaccgaggaattatcttttc

SEQ ID NO: 855549 - DNA, 33 bp, Homo sapien
gcaagaatataaggaacggctagtattgtgcaa

SEQ ID NO: 855550 - DNA, 33 bp, Homo sapien
gcaagaatataaggaatggctagtattgtgcaa

SEQ ID NO: 855551 - DNA, 33 bp, Homo sapien
agtttataagcaacacaggtatacatttttaaa

SEQ ID NO: 855552 - DNA, 33 bp, Homo sapien
agtttataagcaacactggtatacatttttaaa

SEQ ID NO: 855553 - DNA, 33 bp, Homo sapien
cactttacaaaggaaaatactgaagcaaagaga

SEQ ID NO: 855554 - DNA, 33 bp, Homo sapien
cactttacaaaggaaagtactgaagcaaagaga

SEQ ID NO: 855555 - DNA, 33 bp, Homo sapien
tgtggttttcagcacaccgtcccatctccagca

SEQ ID NO: 855556 - DNA, 33 bp, Homo sapien
tgtggttttcagcacatcgtcccatctccagca

SEQ ID NO: 855557 - DNA, 33 bp, Homo sapien
tctccctcatatgcaccctttcttcaccaagaa

SEQ ID NO: 855558 - DNA, 33 bp, Homo sapien
tctccctcatatgcacgctttcttcaccaagaa

SEQ ID NO: 855559 - DNA, 33 bp, Homo sapien
agctaagacattgacactgaatttttatcatta

SEQ ID NO: 855560 - DNA, 33 bp, Homo sapien
agctaagacattgacattgaatttttatcatta

SEQ ID NO: 855561 - DNA, 33 bp, Homo sapien
cctttggatgatgaagaaacactacgcaaaaca

SEQ ID NO: 855562 - DNA, 33 bp, Homo sapien
cctttggatgatgaaggaacactacgcaaaaca

SEQ ID NO: 855563 - DNA, 33 bp, Homo sapien
cacatcgcctctttaaaaaggagcataataaca

SEQ ID NO: 855564 - DNA, 33 bp, Homo sapien
cacatcgcctctttaacaaggagcataataaca

SEQ ID NO: 855565 - DNA, 33 bp, Homo sapien
ttcaattcaccaactcaaatgctaagaaatgat

SEQ ID NO: 855566 - DNA, 33 bp, Homo sapien
ttcaattcaccaactcgaatgctaagaaatgat

SEQ ID NO: 855567 - DNA, 33 bp, Homo sapien
caggcgtggcttgccgcagcagacagcttctga

SEQ ID NO: 855568 - DNA, 33 bp, Homo sapien
caggcgtggcttgccgtagcagacagcttctga

SEQ ID NO: 855569 - DNA, 33 bp, Homo sapien
gcaaccttaacctctccaaatccagcaacgtca

SEQ ID NO: 855570 - DNA, 33 bp, Homo sapien
gcaaccttaacctctctaaatccagcaacgtca

SEQ ID NO: 855571 - DNA, 33 bp, Homo sapien
tgtgaagttcttgtcaataaatgataaccacaa

SEQ ID NO: 855572 - DNA, 33 bp, Homo sapien
tgtgaagttcttgtcagtaaatgataaccacaa

SEQ ID NO: 855573 - DNA, 33 bp, Homo sapien
tgatttcaactttcaacgtgtaaatgagacata

SEQ ID NO: 855574 - DNA, 33 bp, Homo sapien
tgatttcaactttcaatgtgtaaatgagacata

SEQ ID NO: 855575 - DNA, 33 bp, Homo sapien
attgtgatttaaatagccattactccagtgtgg

SEQ ID NO: 855576 - DNA, 33 bp, Homo sapien
attgtgatttaaatagtcattactccagtgtgg

SEQ ID NO: 855577 - DNA, 33 bp, Homo sapien
gaacagtgatactagacagaaaggaggagatcc

SEQ ID NO: 855578 - DNA, 33 bp, Homo sapien
gaacagtgatactagatagaaaggaggagatcc

SEQ ID NO: 855579 - DNA, 33 bp, Homo sapien
ttcaatgagtctcaaaagattctaggatccccg

SEQ ID NO: 855580 - DNA, 33 bp, Homo sapien
ttcaatgagtctcaaacgattctaggatccccg

SEQ ID NO: 855581 - DNA, 33 bp, Homo sapien
tgcactaattcccaaaatgatgttcaaattaaa

SEQ ID NO: 855582 - DNA, 33 bp, Homo sapien
tgcactaattcccaaactgatgttcaaattaaa

SEQ ID NO: 855583 - DNA, 33 bp, Homo sapien
tagagcctattcacgaacacagatacttaatta

SEQ ID NO: 855584 - DNA, 33 bp, Homo sapien
tagagcctattcacgagcacagatacttaatta

SEQ ID NO: 855585 - DNA, 33 bp, Homo sapien
tatattcttcacctagcaaataagaccagtacc

SEQ ID NO: 855586 - DNA, 33 bp, Homo sapien
tatattcttcacctagtaaataagaccagtacc

SEQ ID NO: 855587 - DNA, 33 bp, Homo sapien
gctacagcaggatagaacaccagtgagagtcat

SEQ ID NO: 855588 - DNA, 33 bp, Homo sapien
gctacagcaggatagagcaccagtgagagtcat

SEQ ID NO: 855589 - DNA, 33 bp, Homo sapien
agtaccttacatttgaaaactgaacagaagcct

SEQ ID NO: 855590 - DNA, 33 bp, Homo sapien
agtaccttacatttgataactgaacagaagcct

SEQ ID NO: 855591 - DNA, 33 bp, Homo sapien
tactcaactactccatcagggaaaacttctacc

SEQ ID NO: 855592 - DNA, 33 bp, Homo sapien
tactcaactactccattagggaaaacttctacc

SEQ ID NO: 855593 - DNA, 33 bp, Homo sapien
agtcacaggatacatacgcctacacattcttta

SEQ ID NO: 855594 - DNA, 33 bp, Homo sapien
agtcacaggatacatatgcctacacattcttta

SEQ ID NO: 855595 - DNA, 33 bp, Homo sapien
tgttcttatgtttcctaaaaatgaaagctgaac

SEQ ID NO: 855596 - DNA, 33 bp, Homo sapien
tgttcttatgtttcctgaaaatgaaagctgaac

SEQ ID NO: 855597 - DNA, 33 bp, Homo sapien
tgcatcagagagacccagaaaaacagtagctcc

SEQ ID NO: 855598 - DNA, 33 bp, Homo sapien
tgcatcagagagacccggaaaaacagtagctcc

SEQ ID NO: 855599 - DNA, 33 bp, Homo sapien
tatccttacatttgtaataaagaggttttgatt

SEQ ID NO: 855600 - DNA, 33 bp, Homo sapien
tatccttacatttgtagtaaagaggttttgatt

SEQ ID NO: 855601 - DNA, 33 bp, Homo sapien
gcgattcctatgagacccaaaagctgagcatag

SEQ ID NO: 855602 - DNA, 33 bp, Homo sapien
gcgattcctatgagacgcaaaagctgagcatag

SEQ ID NO: 855603 - DNA, 33 bp, Homo sapien
ttctcagtctagatcaagtttttagccctgtga

SEQ ID NO: 855604 - DNA, 33 bp, Homo sapien
ttctcagtctagatcaggtttttagccctgtga

SEQ ID NO: 855605 - DNA, 33 bp, Homo sapien
taaagaaattgttaagaaatatgcaaaagtaga

SEQ ID NO: 855606 - DNA, 33 bp, Homo sapien
taaagaaattgttaagcaatatgcaaaagtaga

SEQ ID NO: 855607 - DNA, 33 bp, Homo sapien
tcagcattcagctaacaagaattttttgttcta

SEQ ID NO: 855608 - DNA, 33 bp, Homo sapien
tcagcattcagctaacgagaattttttgttcta

SEQ ID NO: 855609 - DNA, 33 bp, Homo sapien
aactacccttgtgaataaactgtggctatatac

SEQ ID NO: 855610 - DNA, 33 bp, Homo sapien
aactacccttgtgaattaactgtggctatatac

SEQ ID NO: 855611 - DNA, 33 bp, Homo sapien
aatggaaatgacacagaaacatatgagtgaact

SEQ ID NO: 855612 - DNA, 33 bp, Homo sapien
aatggaaatgacacaggaacatatgagtgaact

SEQ ID NO: 855613 - DNA, 33 bp, Homo sapien
cagctaaagttccatcccttctatgacacttct

SEQ ID NO: 855614 - DNA, 33 bp, Homo sapien
cagctaaagttccatctcttctatgacacttct

SEQ ID NO: 855615 - DNA, 33 bp, Homo sapien
gttaagaatcaactcacgtgcagatggtagaat

SEQ ID NO: 855616 - DNA, 33 bp, Homo sapien
gttaagaatcaactcatgtgcagatggtagaat

SEQ ID NO: 855617 - DNA, 33 bp, Homo sapien
gaatttggtagaaaaacattctgtcagaaaggg

SEQ ID NO: 855618 - DNA, 33 bp, Homo sapien
gaatttggtagaaaaatattctgtcagaaaggg

SEQ ID NO: 855619 - DNA, 33 bp, Homo sapien
tcaacggtatttgaaacctgacaaaaggcacat

SEQ ID NO: 855620 - DNA, 33 bp, Homo sapien
tcaacggtatttgaaatctgacaaaaggcacat

SEQ ID NO: 855621 - DNA, 33 bp, Homo sapien
aatatttttctctacccgaatccatcagctacc

SEQ ID NO: 855622 - DNA, 33 bp, Homo sapien
aatatttttctctaccggaatccatcagctacc

SEQ ID NO: 855623 - DNA, 33 bp, Homo sapien
aattaagtttccagtacgtgcccattttactta

SEQ ID NO: 855624 - DNA, 33 bp, Homo sapien
aattaagtttccagtaggtgcccattttactta

SEQ ID NO: 855625 - DNA, 33 bp, Homo sapien
attgtaaggcttgatgaaaatgaaaagagtcta

SEQ ID NO: 855626 - DNA, 33 bp, Homo sapien
attgtaaggcttgatggaaatgaaaagagtcta

SEQ ID NO: 855627 - DNA, 33 bp, Homo sapien
tatgaaataatcaccagtcttttaacttcacca

SEQ ID NO: 855628 - DNA, 33 bp, Homo sapien
tatgaaataatcaccattcttttaacttcacca

SEQ ID NO: 855629 - DNA, 33 bp, Homo sapien
aaaattgtccatgttaaaaggtaagattcgatg

SEQ ID NO: 855630 - DNA, 33 bp, Homo sapien
aaaattgtccatgttagaaggtaagattcgatg

SEQ ID NO: 855631 - DNA, 33 bp, Homo sapien
gtctgttgcagatgaccatatcggcgggtggag

SEQ ID NO: 855632 - DNA, 33 bp, Homo sapien
gtctgttgcagatgacgatatcggcgggtggag

SEQ ID NO: 855633 - DNA, 33 bp, Homo sapien
gagtatttcttcatacgggagctgtggagctgt

SEQ ID NO: 855634 - DNA, 33 bp, Homo sapien
gagtatttcttcatactggagctgtggagctgt

SEQ ID NO: 855635 - DNA, 33 bp, Homo sapien
aagtttgtggtttttacagaatgtgagaccagt

SEQ ID NO: 855636 - DNA, 33 bp, Homo sapien
aagtttgtggtttttagagaatgtgagaccagt

SEQ ID NO: 855637 - DNA, 33 bp, Homo sapien
ggtcacagcttctgtaaagagaagatattgcat

SEQ ID NO: 855638 - DNA, 33 bp, Homo sapien
ggtcacagcttctgtagagagaagatattgcat

SEQ ID NO: 855639 - DNA, 33 bp, Homo sapien
aacatctggtccactccattccctaaattattt

SEQ ID NO: 855640 - DNA, 33 bp, Homo sapien
aacatctggtccactctattccctaaattattt

SEQ ID NO: 855641 - DNA, 33 bp, Homo sapien
ctaatgtgtgcatccaatcactaggaggacttg

SEQ ID NO: 855642 - DNA, 33 bp, Homo sapien
ctaatgtgtgcatccactcactaggaggacttg

SEQ ID NO: 855643 - DNA, 33 bp, Homo sapien
tttcaaattgaaagtcacttatcctcttagcgc

SEQ ID NO: 855644 - DNA, 33 bp, Homo sapien
tttcaaattgaaagtcgcttatcctcttagcgc

SEQ ID NO: 855645 - DNA, 33 bp, Homo sapien
ggccgggactcgcacaaatacgtgtacacccat

SEQ ID NO: 855646 - DNA, 33 bp, Homo sapien
ggccgggactcgcacagatacgtgtacacccat

SEQ ID NO: 855647 - DNA, 33 bp, Homo sapien
cttcagaaaccaattcaatcattgatccatttg

SEQ ID NO: 855648 - DNA, 33 bp, Homo sapien
cttcagaaaccaattcgatcattgatccatttg

SEQ ID NO: 855649 - DNA, 33 bp, Homo sapien
cttgttcagtatcataagtaaacagagatattg

SEQ ID NO: 855650 - DNA, 33 bp, Homo sapien
cttgttcagtatcataggtaaacagagatattg

SEQ ID NO: 855651 - DNA, 33 bp, Homo sapien
caaaatgttaataagaaacagggcaggagatgg

SEQ ID NO: 855652 - DNA, 33 bp, Homo sapien
caaaatgttaataagagacagggcaggagatgg

SEQ ID NO: 855653 - DNA, 33 bp, Homo sapien
gcctgtgcaccatgacagctttcaggccaaaag

SEQ ID NO: 855654 - DNA, 33 bp, Homo sapien
gcctgtgcaccatgacggctttcaggccaaaag

SEQ ID NO: 855655 - DNA, 33 bp, Homo sapien
agtcagtgaaaggaccaaaggcagtgtatgtac

SEQ ID NO: 855656 - DNA, 33 bp, Homo sapien
agtcagtgaaaggaccgaaggcagtgtatgtac

SEQ ID NO: 855657 - DNA, 33 bp, Homo sapien
gggcaaagaggtgatacggatagcagcccagca

SEQ ID NO: 855658 - DNA, 33 bp, Homo sapien
gggcaaagaggtgatatggatagcagcccagca

SEQ ID NO: 855659 - DNA, 33 bp, Homo sapien
tagtattctgtgcaaaaatagatattaagaaag

SEQ ID NO: 855660 - DNA, 33 bp, Homo sapien
tagtattctgtgcaaacatagatattaagaaag

SEQ ID NO: 855661 - DNA, 33 bp, Homo sapien
ctgaacaaaagtggacagcaataattagattct

SEQ ID NO: 855662 - DNA, 33 bp, Homo sapien
ctgaacaaaagtggacggcaataattagattct

SEQ ID NO: 855663 - DNA, 33 bp, Homo sapien
ctcaggttcatgtaaccgaaaatttccagaatg

SEQ ID NO: 855664 - DNA, 33 bp, Homo sapien
ctcaggttcatgtaactgaaaatttccagaatg

SEQ ID NO: 855665 - DNA, 33 bp, Homo sapien
actgcaatctccatacagacagggaccacttat

SEQ ID NO: 855666 - DNA, 33 bp, Homo sapien
actgcaatctccatacggacagggaccacttat

SEQ ID NO: 855667 - DNA, 33 bp, Homo sapien
taggtctatgaagttaggttttcaggagggcta

SEQ ID NO: 855668 - DNA, 33 bp, Homo sapien
taggtctatgaagttatgttttcaggagggcta

SEQ ID NO: 855669 - DNA, 33 bp, Homo sapien
gaatagttgaattcacacagtagaaatgataag

SEQ ID NO: 855670 - DNA, 33 bp, Homo sapien
gaatagttgaattcacgcagtagaaatgataag

SEQ ID NO: 855671 - DNA, 33 bp, Homo sapien
aatttgaaaatcttccaagttcttagtcataca

SEQ ID NO: 855672 - DNA, 33 bp, Homo sapien
aatttgaaaatcttccgagttcttagtcataca

SEQ ID NO: 855673 - DNA, 33 bp, Homo sapien
gcttcctagttggtcaatatatcaatgtatgag

SEQ ID NO: 855674 - DNA, 33 bp, Homo sapien
gcttcctagttggtcagtatatcaatgtatgag

SEQ ID NO: 855675 - DNA, 33 bp, Homo sapien
acaagtgtaacagaaaaggaatgacagaaaaaa

SEQ ID NO: 855676 - DNA, 33 bp, Homo sapien
acaagtgtaacagaaatggaatgacagaaaaaa

SEQ ID NO: 855677 - DNA, 33 bp, Homo sapien
tccttttgcttattaaaacccagtaggtagttc

SEQ ID NO: 855678 - DNA, 33 bp, Homo sapien
tccttttgcttattaacacccagtaggtagttc

SEQ ID NO: 855679 - DNA, 33 bp, Homo sapien
tgatgcctgggcactaggctactggttccagct

SEQ ID NO: 855680 - DNA, 33 bp, Homo sapien
tgatgcctgggcactatgctactggttccagct

SEQ ID NO: 855681 - DNA, 33 bp, Homo sapien
ctccagggcaatggtaactttctctccacatgg

SEQ ID NO: 855682 - DNA, 33 bp, Homo sapien
ctccagggcaatggtacctttctctccacatgg

SEQ ID NO: 855683 - DNA, 33 bp, Homo sapien
ttgcctcctaattatagcatatcaccagctgag

SEQ ID NO: 855684 - DNA, 33 bp, Homo sapien
ttgcctcctaattatatcatatcaccagctgag

SEQ ID NO: 855685 - DNA, 33 bp, Homo sapien
agtcgtggttatgctcgaagtgtttgccttcta

SEQ ID NO: 855686 - DNA, 33 bp, Homo sapien
agtcgtggttatgctctaagtgtttgccttcta

SEQ ID NO: 855687 - DNA, 33 bp, Homo sapien
cccttaggcgttaaaacttgatgatatagaaat

SEQ ID NO: 855688 - DNA, 33 bp, Homo sapien
cccttaggcgttaaaagttgatgatatagaaat

SEQ ID NO: 855689 - DNA, 33 bp, Homo sapien
tgagcaagtaacagatcagtttcaggaagaggc

SEQ ID NO: 855690 - DNA, 33 bp, Homo sapien
tgagcaagtaacagattagtttcaggaagaggc

SEQ ID NO: 855691 - DNA, 33 bp, Homo sapien
tggcaagaattatgacagggaaaaaattctgac

SEQ ID NO: 855692 - DNA, 33 bp, Homo sapien
tggcaagaattatgacggggaaaaaattctgac

SEQ ID NO: 855693 - DNA, 33 bp, Homo sapien
tcataattcttgccaaggcagtttcactattac

SEQ ID NO: 855694 - DNA, 33 bp, Homo sapien
tcataattcttgccaatgcagtttcactattac

SEQ ID NO: 855695 - DNA, 33 bp, Homo sapien
caagtgacctagctgacaagatcatacatttgc

SEQ ID NO: 855696 - DNA, 33 bp, Homo sapien
caagtgacctagctgagaagatcatacatttgc

SEQ ID NO: 855697 - DNA, 33 bp, Homo sapien
agagaaatagtgatgaactaaatcaagttactc

SEQ ID NO: 855698 - DNA, 33 bp, Homo sapien
agagaaatagtgatgatctaaatcaagttactc

SEQ ID NO: 855699 - DNA, 33 bp, Homo sapien
ggcatttcagggcaataagaagttttacacaca

SEQ ID NO: 855700 - DNA, 33 bp, Homo sapien
ggcatttcagggcaatgagaagttttacacaca

SEQ ID NO: 855701 - DNA, 33 bp, Homo sapien
tatactctacaagcaacgtattttaataacccc

SEQ ID NO: 855702 - DNA, 33 bp, Homo sapien
tatactctacaagcaaggtattttaataacccc

SEQ ID NO: 855703 - DNA, 33 bp, Homo sapien
gaacaatgagatagctaagcactattttaaagg

SEQ ID NO: 855704 - DNA, 33 bp, Homo sapien
gaacaatgagatagctcagcactattttaaagg

SEQ ID NO: 855705 - DNA, 33 bp, Homo sapien
attctaagttggacataaagttatttgtattaa

SEQ ID NO: 855706 - DNA, 33 bp, Homo sapien
attctaagttggacatcaagttatttgtattaa

SEQ ID NO: 855707 - DNA, 33 bp, Homo sapien
gcaaaactgagtggaactgagagtaaaaataac

SEQ ID NO: 855708 - DNA, 33 bp, Homo sapien
gcaaaactgagtggaattgagagtaaaaataac

SEQ ID NO: 855709 - DNA, 33 bp, Homo sapien
atcttctcattttttgcattgcttgtgtatgat

SEQ ID NO: 855710 - DNA, 33 bp, Homo sapien
atcttctcattttttgtattgcttgtgtatgat

SEQ ID NO: 855711 - DNA, 33 bp, Homo sapien
acatatcaacaatttcaacttggtctctggtct

SEQ ID NO: 855712 - DNA, 33 bp, Homo sapien
acatatcaacaatttcgacttggtctctggtct

SEQ ID NO: 855713 - DNA, 33 bp, Homo sapien
tgcagtaattacacacagaaaaaaatgcttcta

SEQ ID NO: 855714 - DNA, 33 bp, Homo sapien
tgcagtaattacacacggaaaaaaatgcttcta

SEQ ID NO: 855715 - DNA, 33 bp, Homo sapien
gaaacaggtgctgagacagatgatagagcttag

SEQ ID NO: 855716 - DNA, 33 bp, Homo sapien
gaaacaggtgctgagatagatgatagagcttag

SEQ ID NO: 855717 - DNA, 33 bp, Homo sapien
gatcacgaactaaacccacaaaagtcaagggaa

SEQ ID NO: 855718 - DNA, 33 bp, Homo sapien
gatcacgaactaaacctacaaaagtcaagggaa

SEQ ID NO: 855719 - DNA, 33 bp, Homo sapien
ggtagtgttgcaaaaaatacagtgatgctgaaa

SEQ ID NO: 855720 - DNA, 33 bp, Homo sapien
ggtagtgttgcaaaaagtacagtgatgctgaaa

SEQ ID NO: 855721 - DNA, 33 bp, Homo sapien
cttcttgtttaaagaacgtggaaaggtcacaat

SEQ ID NO: 855722 - DNA, 33 bp, Homo sapien
cttcttgtttaaagaatgtggaaaggtcacaat

SEQ ID NO: 855723 - DNA, 33 bp, Homo sapien
gagagacttagatatcaatggttaactcaaatt

SEQ ID NO: 855724 - DNA, 33 bp, Homo sapien
gagagacttagatatcgatggttaactcaaatt

SEQ ID NO: 855725 - DNA, 33 bp, Homo sapien
ggtaatttttacggccaccataagaaactgaga

SEQ ID NO: 855726 - DNA, 33 bp, Homo sapien
ggtaatttttacggccgccataagaaactgaga

SEQ ID NO: 855727 - DNA, 33 bp, Homo sapien
cacacttaggttatgcaagatattggaaggctg

SEQ ID NO: 855728 - DNA, 33 bp, Homo sapien
cacacttaggttatgcgagatattggaaggctg

SEQ ID NO: 855729 - DNA, 33 bp, Homo sapien
catatgatgccacttcactgcattctatcagtc

SEQ ID NO: 855730 - DNA, 33 bp, Homo sapien
catatgatgccacttcgctgcattctatcagtc

SEQ ID NO: 855731 - DNA, 33 bp, Homo sapien
aaaggcagatttaaataaatgagtcaatttgat

SEQ ID NO: 855732 - DNA, 33 bp, Homo sapien
aaaggcagatttaaattaatgagtcaatttgat

SEQ ID NO: 855733 - DNA, 33 bp, Homo sapien
tgaaaattctgctaaaatctccatgctaacacc

SEQ ID NO: 855734 - DNA, 33 bp, Homo sapien
tgaaaattctgctaaagtctccatgctaacacc

SEQ ID NO: 855735 - DNA, 33 bp, Homo sapien
gcaagtgactccaagaccgagaccaaaaagcgg

SEQ ID NO: 855736 - DNA, 33 bp, Homo sapien
gcaagtgactccaagatcgagaccaaaaagcgg

SEQ ID NO: 855737 - DNA, 33 bp, Homo sapien
ctattgtatcgaaaaaagtgtgatggatagcag

SEQ ID NO: 855738 - DNA, 33 bp, Homo sapien
ctattgtatcgaaaaacgtgtgatggatagcag

SEQ ID NO: 855739 - DNA, 33 bp, Homo sapien
gccaggtaagagtgaacgcctgtgaaatcccaa

SEQ ID NO: 855740 - DNA, 33 bp, Homo sapien
gccaggtaagagtgaaggcctgtgaaatcccaa

SEQ ID NO: 855741 - DNA, 33 bp, Homo sapien
tctttgatttaattgaaaagtcactccagaaga

SEQ ID NO: 855742 - DNA, 33 bp, Homo sapien
tctttgatttaattgagaagtcactccagaaga

SEQ ID NO: 855743 - DNA, 33 bp, Homo sapien
gactgtccatgtcaaaagagttaccaggaacaa

SEQ ID NO: 855744 - DNA, 33 bp, Homo sapien
gactgtccatgtcaaatgagttaccaggaacaa

SEQ ID NO: 855745 - DNA, 33 bp, Homo sapien
agactacaagattcaaaaggctttatcataagc

SEQ ID NO: 855746 - DNA, 33 bp, Homo sapien
agactacaagattcaataggctttatcataagc

SEQ ID NO: 855747 - DNA, 33 bp, Homo sapien
cttttgaaatataaagaagagtggtcgctttaa

SEQ ID NO: 855748 - DNA, 33 bp, Homo sapien
cttttgaaatataaaggagagtggtcgctttaa

SEQ ID NO: 855749 - DNA, 33 bp, Homo sapien
aaaaacaaatgcaaaaatgagtcattattggac

SEQ ID NO: 855750 - DNA, 33 bp, Homo sapien
aaaaacaaatgcaaaagtgagtcattattggac

SEQ ID NO: 855751 - DNA, 33 bp, Homo sapien
atacccaaacaggcaaatgtgatcattctaagg

SEQ ID NO: 855752 - DNA, 33 bp, Homo sapien
atacccaaacaggcaactgtgatcattctaagg

SEQ ID NO: 855753 - DNA, 33 bp, Homo sapien
acaacatcaataaatacggtccagaacatttaa

SEQ ID NO: 855754 - DNA, 33 bp, Homo sapien
acaacatcaataaatatggtccagaacatttaa

SEQ ID NO: 855755 - DNA, 33 bp, Homo sapien
aacatactacatctgaaacaattcgattttaga

SEQ ID NO: 855756 - DNA, 33 bp, Homo sapien
aacatactacatctgagacaattcgattttaga

SEQ ID NO: 855757 - DNA, 33 bp, Homo sapien
tccctaataagatcaaataactggcttaatcat

SEQ ID NO: 855758 - DNA, 33 bp, Homo sapien
tccctaataagatcaagtaactggcttaatcat

SEQ ID NO: 855759 - DNA, 33 bp, Homo sapien
aacatgaagtacttaaggatgggccaataaagt

SEQ ID NO: 855760 - DNA, 33 bp, Homo sapien
aacatgaagtacttaatgatgggccaataaagt

SEQ ID NO: 855761 - DNA, 33 bp, Homo sapien
tagtggtcacagcaaaatcctctttccttttcc

SEQ ID NO: 855762 - DNA, 33 bp, Homo sapien
tagtggtcacagcaaactcctctttccttttcc

SEQ ID NO: 855763 - DNA, 33 bp, Homo sapien
tggctgagagaatgacaacgaatagaaaagagt

SEQ ID NO: 855764 - DNA, 33 bp, Homo sapien
tggctgagagaatgacgacgaatagaaaagagt

SEQ ID NO: 855765 - DNA, 33 bp, Homo sapien
tttattgggttttacagaaatagatgcttagtt

SEQ ID NO: 855766 - DNA, 33 bp, Homo sapien
tttattgggttttacataaatagatgcttagtt

SEQ ID NO: 855767 - DNA, 33 bp, Homo sapien
ttactgaaaaagatcaagccagagttttaaata

SEQ ID NO: 855768 - DNA, 33 bp, Homo sapien
ttactgaaaaagatcaggccagagttttaaata

SEQ ID NO: 855769 - DNA, 33 bp, Homo sapien
gccctacctcgcagaacgaattttttaaactat

SEQ ID NO: 855770 - DNA, 33 bp, Homo sapien
gccctacctcgcagaaggaattttttaaactat

SEQ ID NO: 855771 - DNA, 33 bp, Homo sapien
gttcacagagtttgccagcccaatggatattac

SEQ ID NO: 855772 - DNA, 33 bp, Homo sapien
gttcacagagtttgccggcccaatggatattac

SEQ ID NO: 855773 - DNA, 33 bp, Homo sapien
agtattagaggaagaacagagttagaagaattc

SEQ ID NO: 855774 - DNA, 33 bp, Homo sapien
agtattagaggaagaatagagttagaagaattc

SEQ ID NO: 855775 - DNA, 33 bp, Homo sapien
caagctctgacagaacacatacagggatttcac

SEQ ID NO: 855776 - DNA, 33 bp, Homo sapien
caagctctgacagaacgcatacagggatttcac

SEQ ID NO: 855777 - DNA, 33 bp, Homo sapien
gcctaaatattttgtaccaaaggttgaattgtc

SEQ ID NO: 855778 - DNA, 33 bp, Homo sapien
gcctaaatattttgtatcaaaggttgaattgtc

SEQ ID NO: 855779 - DNA, 33 bp, Homo sapien
tatttttaagttgtcacgtcaattatattacct

SEQ ID NO: 855780 - DNA, 33 bp, Homo sapien
tatttttaagttgtcatgtcaattatattacct

SEQ ID NO: 855781 - DNA, 33 bp, Homo sapien
aatatgtgaaaagaagcctccagatctttctag

SEQ ID NO: 855782 - DNA, 33 bp, Homo sapien
aatatgtgaaaagaagtctccagatctttctag

SEQ ID NO: 855783 - DNA, 33 bp, Homo sapien
agggcacaatgccacaaaattctttgctaacac

SEQ ID NO: 855784 - DNA, 33 bp, Homo sapien
agggcacaatgccacagaattctttgctaacac

SEQ ID NO: 855785 - DNA, 33 bp, Homo sapien
cctaacccttgttttaaaagtcatcctctaaac

SEQ ID NO: 855786 - DNA, 33 bp, Homo sapien
cctaacccttgttttataagtcatcctctaaac

SEQ ID NO: 855787 - DNA, 33 bp, Homo sapien
tactcaagtcattccaactttcctgtcataagg

SEQ ID NO: 855788 - DNA, 33 bp, Homo sapien
tactcaagtcattccatctttcctgtcataagg

SEQ ID NO: 855789 - DNA, 33 bp, Homo sapien
agacacagtggagaacaatacagacataggcat

SEQ ID NO: 855790 - DNA, 33 bp, Homo sapien
agacacagtggagaaccatacagacataggcat

SEQ ID NO: 855791 - DNA, 33 bp, Homo sapien
cagttatttgaggagacaaatgtaagactcata

SEQ ID NO: 855792 - DNA, 33 bp, Homo sapien
cagttatttgaggagataaatgtaagactcata

SEQ ID NO: 855793 - DNA, 33 bp, Homo sapien
aaggcaacttcaggaaaattccaaacatggaac

SEQ ID NO: 855794 - DNA, 33 bp, Homo sapien
aaggcaacttcaggaacattccaaacatggaac

SEQ ID NO: 855795 - DNA, 33 bp, Homo sapien
tccagttgtactctccccgtgcagttatggaca

SEQ ID NO: 855796 - DNA, 33 bp, Homo sapien
tccagttgtactctccgcgtgcagttatggaca

SEQ ID NO: 855797 - DNA, 33 bp, Homo sapien
tttgtttcaaaacccacaatttggatgcaatag

SEQ ID NO: 855798 - DNA, 33 bp, Homo sapien
tttgtttcaaaacccataatttggatgcaatag

SEQ ID NO: 855799 - DNA, 33 bp, Homo sapien
tattacagggtctttaagttacggcaatttagc

SEQ ID NO: 855800 - DNA, 33 bp, Homo sapien
tattacagggtctttatgttacggcaatttagc

SEQ ID NO: 855801 - DNA, 33 bp, Homo sapien
aagataagttgagtaacgtgcttaggatcacat

SEQ ID NO: 855802 - DNA, 33 bp, Homo sapien
aagataagttgagtaatgtgcttaggatcacat

SEQ ID NO: 855803 - DNA, 33 bp, Homo sapien
ataataataataaaagaacgacctgtgtatgtt

SEQ ID NO: 855804 - DNA, 33 bp, Homo sapien
ataataataataaaaggacgacctgtgtatgtt

SEQ ID NO: 855805 - DNA, 33 bp, Homo sapien
gactccagcaattacactaacatatacagatgc

SEQ ID NO: 855806 - DNA, 33 bp, Homo sapien
gactccagcaattacattaacatatacagatgc

SEQ ID NO: 855807 - DNA, 33 bp, Homo sapien
taatgtgacttaccaaaacaaaatacaataaaa

SEQ ID NO: 855808 - DNA, 33 bp, Homo sapien
taatgtgacttaccaacacaaaatacaataaaa

SEQ ID NO: 855809 - DNA, 33 bp, Homo sapien
tcagtttcaggtaccaaaatgacatccaagaca

SEQ ID NO: 855810 - DNA, 33 bp, Homo sapien
tcagtttcaggtaccacaatgacatccaagaca

SEQ ID NO: 855811 - DNA, 33 bp, Homo sapien
ccttgtttcttgataacagaagtttagttctgc

SEQ ID NO: 855812 - DNA, 33 bp, Homo sapien
ccttgtttcttgataagagaagtttagttctgc

SEQ ID NO: 855813 - DNA, 33 bp, Homo sapien
agtttgttgatttccaataggggcacactcctt

SEQ ID NO: 855814 - DNA, 33 bp, Homo sapien
agtttgttgatttccagtaggggcacactcctt

SEQ ID NO: 855815 - DNA, 33 bp, Homo sapien
tccaaaattgtgagaaataagttagtgttattt

SEQ ID NO: 855816 - DNA, 33 bp, Homo sapien
tccaaaattgtgagaagtaagttagtgttattt

SEQ ID NO: 855817 - DNA, 33 bp, Homo sapien
aaggacatttcagtcaatgacaggcgacatata

SEQ ID NO: 855818 - DNA, 33 bp, Homo sapien
aaggacatttcagtcagtgacaggcgacatata

SEQ ID NO: 855819 - DNA, 33 bp, Homo sapien
ttaatttgaatcctgaaataacaaaaaggaaga

SEQ ID NO: 855820 - DNA, 33 bp, Homo sapien
ttaatttgaatcctgagataacaaaaaggaaga

SEQ ID NO: 855821 - DNA, 33 bp, Homo sapien
aagaggttcaaaagaaagacctcagcagtgttt

SEQ ID NO: 855822 - DNA, 33 bp, Homo sapien
aagaggttcaaaagaaggacctcagcagtgttt

SEQ ID NO: 855823 - DNA, 33 bp, Homo sapien
caattccctgctaaaacggctctaatcctattt

SEQ ID NO: 855824 - DNA, 33 bp, Homo sapien
caattccctgctaaaatggctctaatcctattt

SEQ ID NO: 855825 - DNA, 33 bp, Homo sapien
ctaacaagtaactcatcatcttttcctcccact

SEQ ID NO: 855826 - DNA, 33 bp, Homo sapien
ctaacaagtaactcatgatcttttcctcccact

SEQ ID NO: 855827 - DNA, 33 bp, Homo sapien
gtttgtgtcaggaagaagtacaactttggcaaa

SEQ ID NO: 855828 - DNA, 33 bp, Homo sapien
gtttgtgtcaggaagatgtacaactttggcaaa

SEQ ID NO: 855829 - DNA, 33 bp, Homo sapien
aatgtggtttgggataaggatagaaactccact

SEQ ID NO: 855830 - DNA, 33 bp, Homo sapien
aatgtggtttgggatacggatagaaactccact

SEQ ID NO: 855831 - DNA, 33 bp, Homo sapien
ctttgtagtcagaattaaaaaaacagaaatcaa

SEQ ID NO: 855832 - DNA, 33 bp, Homo sapien
ctttgtagtcagaatttaaaaaacagaaatcaa

SEQ ID NO: 855833 - DNA, 33 bp, Homo sapien
ttgtgtttctgtatcccaaaaagacagcttatg

SEQ ID NO: 855834 - DNA, 33 bp, Homo sapien
ttgtgtttctgtatcctaaaaagacagcttatg

SEQ ID NO: 855835 - DNA, 33 bp, Homo sapien
tatatggacagaggtacaaaagaaattcagctt

SEQ ID NO: 855836 - DNA, 33 bp, Homo sapien
tatatggacagaggtataaaagaaattcagctt

SEQ ID NO: 855837 - DNA, 33 bp, Homo sapien
ctctcagggttgtcaacggagaacacataacat

SEQ ID NO: 855838 - DNA, 33 bp, Homo sapien
ctctcagggttgtcaatggagaacacataacat

SEQ ID NO: 855839 - DNA, 33 bp, Homo sapien
ccaccaacatataataactgatctaccaggctc

SEQ ID NO: 855840 - DNA, 33 bp, Homo sapien
ccaccaacatataatacctgatctaccaggctc

SEQ ID NO: 855841 - DNA, 33 bp, Homo sapien
tgaagcaaagcatataccaaacctaatctattg

SEQ ID NO: 855842 - DNA, 33 bp, Homo sapien
tgaagcaaagcatatatcaaacctaatctattg

SEQ ID NO: 855843 - DNA, 33 bp, Homo sapien
gctctcactgtctaaggcctgaaagctgaaaat

SEQ ID NO: 855844 - DNA, 33 bp, Homo sapien
gctctcactgtctaagtcctgaaagctgaaaat

SEQ ID NO: 855845 - DNA, 33 bp, Homo sapien
tagtacttgcacataggagactaatcaataaat

SEQ ID NO: 855846 - DNA, 33 bp, Homo sapien
tagtacttgcacatagtagactaatcaataaat

SEQ ID NO: 855847 - DNA, 33 bp, Homo sapien
cccagatggtttgtaaatacaaggccaaatatc

SEQ ID NO: 855848 - DNA, 33 bp, Homo sapien
cccagatggtttgtaagtacaaggccaaatatc

SEQ ID NO: 855849 - DNA, 33 bp, Homo sapien
tctagattctctccaactctggatttgatgctc

SEQ ID NO: 855850 - DNA, 33 bp, Homo sapien
tctagattctctccaattctggatttgatgctc

SEQ ID NO: 855851 - DNA, 33 bp, Homo sapien
ccacttaaccttccgaccaaaaatgtatgggga

SEQ ID NO: 855852 - DNA, 33 bp, Homo sapien
ccacttaaccttccgatcaaaaatgtatgggga

SEQ ID NO: 855853 - DNA, 33 bp, Homo sapien
agaaaattgaggccctcagaggattgttttgac

SEQ ID NO: 855854 - DNA, 33 bp, Homo sapien
agaaaattgaggcccttagaggattgttttgac

SEQ ID NO: 855855 - DNA, 33 bp, Homo sapien
accctgaactcctgccccatgttgcttaccatt

SEQ ID NO: 855856 - DNA, 33 bp, Homo sapien
accctgaactcctgccgcatgttgcttaccatt

SEQ ID NO: 855857 - DNA, 33 bp, Homo sapien
caaatatcagatcttacatactatgcaaaaagg

SEQ ID NO: 855858 - DNA, 33 bp, Homo sapien
caaatatcagatcttatatactatgcaaaaagg

SEQ ID NO: 855859 - DNA, 33 bp, Homo sapien
attgtactgtgggccaagacaatgaatgccagg

SEQ ID NO: 855860 - DNA, 33 bp, Homo sapien
attgtactgtgggccaggacaatgaatgccagg

SEQ ID NO: 855861 - DNA, 33 bp, Homo sapien
catcaaatgaatcaccacatatcttgaaaaatt

SEQ ID NO: 855862 - DNA, 33 bp, Homo sapien
catcaaatgaatcaccgcatatcttgaaaaatt

SEQ ID NO: 855863 - DNA, 33 bp, Homo sapien
cttgtcagttatgatccagttcttaataccatg

SEQ ID NO: 855864 - DNA, 33 bp, Homo sapien
cttgtcagttatgatctagttcttaataccatg

SEQ ID NO: 855865 - DNA, 33 bp, Homo sapien
gccatctgggttttgaatagttttgaaatggga

SEQ ID NO: 855866 - DNA, 33 bp, Homo sapien
gccatctgggttttgactagttttgaaatggga

SEQ ID NO: 855867 - DNA, 33 bp, Homo sapien
ggtcctttgagagttaaataagttggaatcaac

SEQ ID NO: 855868 - DNA, 33 bp, Homo sapien
ggtcctttgagagttagataagttggaatcaac

SEQ ID NO: 855869 - DNA, 33 bp, Homo sapien
tcatttattcaaaccacgcattatagaagtgtt

SEQ ID NO: 855870 - DNA, 33 bp, Homo sapien
tcatttattcaaaccatgcattatagaagtgtt

SEQ ID NO: 855871 - DNA, 33 bp, Homo sapien
gaaaactgtgactgaagcctcgactttggcacc

SEQ ID NO: 855872 - DNA, 33 bp, Homo sapien
gaaaactgtgactgaatcctcgactttggcacc

SEQ ID NO: 855873 - DNA, 33 bp, Homo sapien
agacaagcatttccaacatagagatagcaccag

SEQ ID NO: 855874 - DNA, 33 bp, Homo sapien
agacaagcatttccaatatagagatagcaccag

SEQ ID NO: 855875 - DNA, 33 bp, Homo sapien
atttgtttgtgtattaggtaattcacggaactc

SEQ ID NO: 855876 - DNA, 33 bp, Homo sapien
atttgtttgtgtattatgtaattcacggaactc

SEQ ID NO: 855877 - DNA, 33 bp, Homo sapien
aaatataaaacatggaagatagagtaataagct

SEQ ID NO: 855878 - DNA, 33 bp, Homo sapien
aaatataaaacatggaggatagagtaataagct

SEQ ID NO: 855879 - DNA, 33 bp, Homo sapien
ctgcattaagcagagcaataaaaaagtggaggt

SEQ ID NO: 855880 - DNA, 33 bp, Homo sapien
ctgcattaagcagagcgataaaaaagtggaggt

SEQ ID NO: 855881 - DNA, 33 bp, Homo sapien
catatagcctaagccacattaccttgctagata

SEQ ID NO: 855882 - DNA, 33 bp, Homo sapien
catatagcctaagccatattaccttgctagata

SEQ ID NO: 855883 - DNA, 33 bp, Homo sapien
gccctgattaatcacaagaatcattatctatgg

SEQ ID NO: 855884 - DNA, 33 bp, Homo sapien
gccctgattaatcacaggaatcattatctatgg

SEQ ID NO: 855885 - DNA, 33 bp, Homo sapien
ccttgagtcaacctccactagcctctaactttt

SEQ ID NO: 855886 - DNA, 33 bp, Homo sapien
ccttgagtcaacctccgctagcctctaactttt

SEQ ID NO: 855887 - DNA, 33 bp, Homo sapien
atgaggtgttttcagacggttcacatgagtatg

SEQ ID NO: 855888 - DNA, 33 bp, Homo sapien
atgaggtgttttcagatggttcacatgagtatg

SEQ ID NO: 855889 - DNA, 33 bp, Homo sapien
aggtattatgcaagaaatctgcatctgcagtta

SEQ ID NO: 855890 - DNA, 33 bp, Homo sapien
aggtattatgcaagaagtctgcatctgcagtta

SEQ ID NO: 855891 - DNA, 33 bp, Homo sapien
tgcatcagcactaacaccaaaaaccagaattta

SEQ ID NO: 855892 - DNA, 33 bp, Homo sapien
tgcatcagcactaacatcaaaaaccagaattta

SEQ ID NO: 855893 - DNA, 33 bp, Homo sapien
ctttgttctctgatgcaaaaaatcttcagaaac

SEQ ID NO: 855894 - DNA, 33 bp, Homo sapien
ctttgttctctgatgcgaaaaatcttcagaaac

SEQ ID NO: 855895 - DNA, 33 bp, Homo sapien
aaacccctcttaaggacgtaagatggaacaatt

SEQ ID NO: 855896 - DNA, 33 bp, Homo sapien
aaacccctcttaaggatgtaagatggaacaatt

SEQ ID NO: 855897 - DNA, 33 bp, Homo sapien
atagcactcatcacaccgtattggaacttgcct

SEQ ID NO: 855898 - DNA, 33 bp, Homo sapien
atagcactcatcacactgtattggaacttgcct

SEQ ID NO: 855899 - DNA, 33 bp, Homo sapien
aaaaataggaaatggccatcactttgaatgaga

SEQ ID NO: 855900 - DNA, 33 bp, Homo sapien
aaaaataggaaatggctatcactttgaatgaga

SEQ ID NO: 855901 - DNA, 33 bp, Homo sapien
atcttttgaaaaactacgctattgagtagagac

SEQ ID NO: 855902 - DNA, 33 bp, Homo sapien
atcttttgaaaaactatgctattgagtagagac

SEQ ID NO: 855903 - DNA, 33 bp, Homo sapien
agtccagtgttctttacatggcgttatccaatg

SEQ ID NO: 855904 - DNA, 33 bp, Homo sapien
agtccagtgttctttatatggcgttatccaatg

SEQ ID NO: 855905 - DNA, 33 bp, Homo sapien
caatgtgacatacaggaaaatagataagtaatt

SEQ ID NO: 855906 - DNA, 33 bp, Homo sapien
caatgtgacatacagggaaatagataagtaatt

SEQ ID NO: 855907 - DNA, 33 bp, Homo sapien
ctaagttaagtctctcaaaaatttatgtgttga

SEQ ID NO: 855908 - DNA, 33 bp, Homo sapien
ctaagttaagtctctccaaaatttatgtgttga

SEQ ID NO: 855909 - DNA, 33 bp, Homo sapien
gataaaacttaacaaaaagcctgtggattagat

SEQ ID NO: 855910 - DNA, 33 bp, Homo sapien
gataaaacttaacaaagagcctgtggattagat

SEQ ID NO: 855911 - DNA, 33 bp, Homo sapien
ggtaactaaaacagaaagatggctgcaaataat

SEQ ID NO: 855912 - DNA, 33 bp, Homo sapien
ggtaactaaaacagaaggatggctgcaaataat

SEQ ID NO: 855913 - DNA, 33 bp, Homo sapien
caaaaaagttgaattaataagactcactgtttt

SEQ ID NO: 855914 - DNA, 33 bp, Homo sapien
caaaaaagttgaattagtaagactcactgtttt

SEQ ID NO: 855915 - DNA, 33 bp, Homo sapien
gcacacattgtcatcaataacatcttatcagga

SEQ ID NO: 855916 - DNA, 33 bp, Homo sapien
gcacacattgtcatcattaacatcttatcagga

SEQ ID NO: 855917 - DNA, 33 bp, Homo sapien
ttctagaaataacaagacttaactgttacaatg

SEQ ID NO: 855918 - DNA, 33 bp, Homo sapien
ttctagaaataacaagccttaactgttacaatg

SEQ ID NO: 855919 - DNA, 33 bp, Homo sapien
tcatttttgatcttaaaagtcttcctagaaaac

SEQ ID NO: 855920 - DNA, 33 bp, Homo sapien
tcatttttgatcttaagagtcttcctagaaaac

SEQ ID NO: 855921 - DNA, 33 bp, Homo sapien
atatgttgattaccctaacatcctctgtgctct

SEQ ID NO: 855922 - DNA, 33 bp, Homo sapien
atatgttgattaccctgacatcctctgtgctct

SEQ ID NO: 855923 - DNA, 33 bp, Homo sapien
tgggagaaaagtgggacacaataaggtaggagg

SEQ ID NO: 855924 - DNA, 33 bp, Homo sapien
tgggagaaaagtgggagacaataaggtaggagg

SEQ ID NO: 855925 - DNA, 33 bp, Homo sapien
atttctggcctccccacattagacaaaagggct

SEQ ID NO: 855926 - DNA, 33 bp, Homo sapien
atttctggcctccccatattagacaaaagggct

SEQ ID NO: 855927 - DNA, 33 bp, Homo sapien
tcagagtggtatgcaaacacagtcctctgcagt

SEQ ID NO: 855928 - DNA, 33 bp, Homo sapien
tcagagtggtatgcaagcacagtcctctgcagt

SEQ ID NO: 855929 - DNA, 33 bp, Homo sapien
aaaaaaaaaatggtaccaggcatctcaggattt

SEQ ID NO: 855930 - DNA, 33 bp, Homo sapien
aaaaaaaaaatggtactaggcatctcaggattt

SEQ ID NO: 855931 - DNA, 33 bp, Homo sapien
tttaacagctcttttacatttacaagtctttat

SEQ ID NO: 855932 - DNA, 33 bp, Homo sapien
tttaacagctcttttatatttacaagtctttat

SEQ ID NO: 855933 - DNA, 33 bp, Homo sapien
gtcaatagccgtgaacagtagaaatgtgtgtgt

SEQ ID NO: 855934 - DNA, 33 bp, Homo sapien
gtcaatagccgtgaacggtagaaatgtgtgtgt

SEQ ID NO: 855935 - DNA, 33 bp, Homo sapien
tgtgtctactcactcaactatggaggcttggca

SEQ ID NO: 855936 - DNA, 33 bp, Homo sapien
tgtgtctactcactcagctatggaggcttggca

SEQ ID NO: 855937 - DNA, 33 bp, Homo sapien
tggcatttgagaagaaacttaatgtttgttttg

SEQ ID NO: 855938 - DNA, 33 bp, Homo sapien
tggcatttgagaagaatcttaatgtttgttttg

SEQ ID NO: 855939 - DNA, 33 bp, Homo sapien
tgcttcttcataaaacggagttctgtgactatc

SEQ ID NO: 855940 - DNA, 33 bp, Homo sapien
tgcttcttcataaaactgagttctgtgactatc

SEQ ID NO: 855941 - DNA, 33 bp, Homo sapien
aaaaggcttgtgtgaaaaaagtctggattttgc

SEQ ID NO: 855942 - DNA, 33 bp, Homo sapien
aaaaggcttgtgtgaacaaagtctggattttgc

SEQ ID NO: 855943 - DNA, 33 bp, Homo sapien
atttcactcagagaaactgttcttagtgactcg

SEQ ID NO: 855944 - DNA, 33 bp, Homo sapien
atttcactcagagaaagtgttcttagtgactcg

SEQ ID NO: 855945 - DNA, 33 bp, Homo sapien
tgaatcacatgccactaaatatccatatgatca

SEQ ID NO: 855946 - DNA, 33 bp, Homo sapien
tgaatcacatgccactcaatatccatatgatca

SEQ ID NO: 855947 - DNA, 33 bp, Homo sapien
aattggtggaatacagaataccttgaattctca

SEQ ID NO: 855948 - DNA, 33 bp, Homo sapien
aattggtggaatacagtataccttgaattctca

SEQ ID NO: 855949 - DNA, 33 bp, Homo sapien
tgaatggctttgcctaaaatactggtagaggta

SEQ ID NO: 855950 - DNA, 33 bp, Homo sapien
tgaatggctttgcctacaatactggtagaggta

SEQ ID NO: 855951 - DNA, 33 bp, Homo sapien
ctgagacaatattataaactgagacaaaagtta

SEQ ID NO: 855952 - DNA, 33 bp, Homo sapien
ctgagacaatattatagactgagacaaaagtta

SEQ ID NO: 855953 - DNA, 33 bp, Homo sapien
atataaagggagtaaaggtcttgcctattgcct

SEQ ID NO: 855954 - DNA, 33 bp, Homo sapien
atataaagggagtaaatgtcttgcctattgcct

SEQ ID NO: 855955 - DNA, 33 bp, Homo sapien
atagcatttagcacagaaaagttgaaaatagta

SEQ ID NO: 855956 - DNA, 33 bp, Homo sapien
atagcatttagcacagcaaagttgaaaatagta

SEQ ID NO: 855957 - DNA, 33 bp, Homo sapien
ctgtgctgtaccttgaataacttttttctgaac

SEQ ID NO: 855958 - DNA, 33 bp, Homo sapien
ctgtgctgtaccttgagtaacttttttctgaac

SEQ ID NO: 855959 - DNA, 33 bp, Homo sapien
cttgattcctgggatgaaaacattttgtgtttt

SEQ ID NO: 855960 - DNA, 33 bp, Homo sapien
cttgattcctgggatgcaaacattttgtgtttt

SEQ ID NO: 855961 - DNA, 33 bp, Homo sapien
tgcagcatgaaagttccatttgtcagccctcac

SEQ ID NO: 855962 - DNA, 33 bp, Homo sapien
tgcagcatgaaagttctatttgtcagccctcac

SEQ ID NO: 855963 - DNA, 33 bp, Homo sapien
aataattcacattcacaccatggaagcttggct

SEQ ID NO: 855964 - DNA, 33 bp, Homo sapien
aataattcacattcacgccatggaagcttggct

SEQ ID NO: 855965 - DNA, 33 bp, Homo sapien
tacatatatgaacatacaagggtcaggtgtatc

SEQ ID NO: 855966 - DNA, 33 bp, Homo sapien
tacatatatgaacatagaagggtcaggtgtatc

SEQ ID NO: 855967 - DNA, 33 bp, Homo sapien
caccatcatctgcaaccgagactaaaacaaata

SEQ ID NO: 855968 - DNA, 33 bp, Homo sapien
caccatcatctgcaactgagactaaaacaaata

SEQ ID NO: 855969 - DNA, 33 bp, Homo sapien
aagcaaaacattattcaaaaacagcaacacaaa

SEQ ID NO: 855970 - DNA, 33 bp, Homo sapien
aagcaaaacattattcgaaaacagcaacacaaa

SEQ ID NO: 855971 - DNA, 33 bp, Homo sapien
ggacacagacaacagggaaatgcaaagttgggc

SEQ ID NO: 855972 - DNA, 33 bp, Homo sapien
ggacacagacaacaggtaaatgcaaagttgggc

SEQ ID NO: 855973 - DNA, 33 bp, Homo sapien
ttgctccacctactaactagctgtttacttatt

SEQ ID NO: 855974 - DNA, 33 bp, Homo sapien
ttgctccacctactaattagctgtttacttatt

SEQ ID NO: 855975 - DNA, 33 bp, Homo sapien
aatctgatgcttggataacttcatggattagaa

SEQ ID NO: 855976 - DNA, 33 bp, Homo sapien
aatctgatgcttggatgacttcatggattagaa

SEQ ID NO: 855977 - DNA, 33 bp, Homo sapien
attgaatagataacctaaattaaaagtgcaatc

SEQ ID NO: 855978 - DNA, 33 bp, Homo sapien
attgaatagataacctcaattaaaagtgcaatc

SEQ ID NO: 855979 - DNA, 33 bp, Homo sapien
ggctgtagctcctatacatctggcataggtgaa

SEQ ID NO: 855980 - DNA, 33 bp, Homo sapien
ggctgtagctcctatatatctggcataggtgaa

SEQ ID NO: 855981 - DNA, 33 bp, Homo sapien
ataaagtgttttggtacacaagtctggcttatg

SEQ ID NO: 855982 - DNA, 33 bp, Homo sapien
ataaagtgttttggtatacaagtctggcttatg

SEQ ID NO: 855983 - DNA, 33 bp, Homo sapien
aaagcgtggtgacgaaaataaatctgcataaaa

SEQ ID NO: 855984 - DNA, 33 bp, Homo sapien
aaagcgtggtgacgaatataaatctgcataaaa

SEQ ID NO: 855985 - DNA, 33 bp, Homo sapien
gcataaaatatataacagactagatggtatgca

SEQ ID NO: 855986 - DNA, 33 bp, Homo sapien
gcataaaatatataacggactagatggtatgca

SEQ ID NO: 855987 - DNA, 33 bp, Homo sapien
ataaaataggaaatgacataggaaaagccaaat

SEQ ID NO: 855988 - DNA, 33 bp, Homo sapien
ataaaataggaaatgatataggaaaagccaaat

SEQ ID NO: 855989 - DNA, 33 bp, Homo sapien
agcaaaacaaacagaacgaaagttagcatgagg

SEQ ID NO: 855990 - DNA, 33 bp, Homo sapien
agcaaaacaaacagaatgaaagttagcatgagg

SEQ ID NO: 855991 - DNA, 33 bp, Homo sapien
agcctgtggaatcctagactagaggagttaagt

SEQ ID NO: 855992 - DNA, 33 bp, Homo sapien
agcctgtggaatcctatactagaggagttaagt

SEQ ID NO: 855993 - DNA, 33 bp, Homo sapien
ctctagtcttgcttcactccttttactttttca

SEQ ID NO: 855994 - DNA, 33 bp, Homo sapien
ctctagtcttgcttcattccttttactttttca

SEQ ID NO: 855995 - DNA, 33 bp, Homo sapien
cacatggccttttgtcaagatagagttagtata

SEQ ID NO: 855996 - DNA, 33 bp, Homo sapien
cacatggccttttgtcgagatagagttagtata

SEQ ID NO: 855997 - DNA, 33 bp, Homo sapien
caatctccagagtaagccattctcattgaaatc

SEQ ID NO: 855998 - DNA, 33 bp, Homo sapien
caatctccagagtaaggcattctcattgaaatc

SEQ ID NO: 855999 - DNA, 33 bp, Homo sapien
gaacaattatgatgtagaggcattcagaattta

SEQ ID NO: 856000 - DNA, 33 bp, Homo sapien
gaacaattatgatgtataggcattcagaattta

SEQ ID NO: 856001 - DNA, 33 bp, Homo sapien
gtatatgtgcttgataaataagctttaagaaaa

SEQ ID NO: 856002 - DNA, 33 bp, Homo sapien
gtatatgtgcttgatagataagctttaagaaaa

SEQ ID NO: 856003 - DNA, 33 bp, Homo sapien
caaaattagaacaatgacacctctttaaaaact

SEQ ID NO: 856004 - DNA, 33 bp, Homo sapien
caaaattagaacaatgtcacctctttaaaaact

SEQ ID NO: 856005 - DNA, 33 bp, Homo sapien
gaaaatgtgatgtttgatatggacgtgaaggca

SEQ ID NO: 856006 - DNA, 33 bp, Homo sapien
gaaaatgtgatgtttggtatggacgtgaaggca

SEQ ID NO: 856007 - DNA, 33 bp, Homo sapien
cttgatcaactttaggacatgtcagtataccta

SEQ ID NO: 856008 - DNA, 33 bp, Homo sapien
cttgatcaactttaggtcatgtcagtataccta

SEQ ID NO: 856009 - DNA, 33 bp, Homo sapien
tgtgtgtacgtgttccaatggagaaaaagcact

SEQ ID NO: 856010 - DNA, 33 bp, Homo sapien
tgtgtgtacgtgttccgatggagaaaaagcact

SEQ ID NO: 856011 - DNA, 33 bp, Homo sapien
tgggatatttggaaagcctacaaagctggaggg

SEQ ID NO: 856012 - DNA, 33 bp, Homo sapien
tgggatatttggaaagtctacaaagctggaggg

SEQ ID NO: 856013 - DNA, 33 bp, Homo sapien
tagtaggttagaaacaatatggaagccactgta

SEQ ID NO: 856014 - DNA, 33 bp, Homo sapien
tagtaggttagaaacagtatggaagccactgta

SEQ ID NO: 856015 - DNA, 33 bp, Homo sapien
tctaggattccttagcccagtcttgttgacaca

SEQ ID NO: 856016 - DNA, 33 bp, Homo sapien
tctaggattccttagctcagtcttgttgacaca

SEQ ID NO: 856017 - DNA, 33 bp, Homo sapien
ctaatacatctcaaataatgaagttgctcctca

SEQ ID NO: 856018 - DNA, 33 bp, Homo sapien
ctaatacatctcaaatcatgaagttgctcctca

SEQ ID NO: 856019 - DNA, 33 bp, Homo sapien
atgtgatgaagctacaatataccttcccaccaa

SEQ ID NO: 856020 - DNA, 33 bp, Homo sapien
atgtgatgaagctacagtataccttcccaccaa

SEQ ID NO: 856021 - DNA, 33 bp, Homo sapien
agaggaaacatttggaagtaattgcccgaattc

SEQ ID NO: 856022 - DNA, 33 bp, Homo sapien
agaggaaacatttggaggtaattgcccgaattc

SEQ ID NO: 856023 - DNA, 33 bp, Homo sapien
gggattgagacaatatgagaagcattcagagct

SEQ ID NO: 856024 - DNA, 33 bp, Homo sapien
gggattgagacaatattagaagcattcagagct

SEQ ID NO: 856025 - DNA, 33 bp, Homo sapien
agtttttcatccatttaaaatccagtgttcaag

SEQ ID NO: 856026 - DNA, 33 bp, Homo sapien
agtttttcatccattttaaatccagtgttcaag

SEQ ID NO: 856027 - DNA, 33 bp, Homo sapien
gtcagtcatttctttacgtttggttgcatatat

SEQ ID NO: 856028 - DNA, 33 bp, Homo sapien
gtcagtcatttctttatgtttggttgcatatat

SEQ ID NO: 856029 - DNA, 33 bp, Homo sapien
tattgattttgaaatacggagtgatagttgata

SEQ ID NO: 856030 - DNA, 33 bp, Homo sapien
tattgattttgaaatatggagtgatagttgata

SEQ ID NO: 856031 - DNA, 33 bp, Homo sapien
aaataggcactgaaaaatcaatagttggatgtc

SEQ ID NO: 856032 - DNA, 33 bp, Homo sapien
aaataggcactgaaaagtcaatagttggatgtc

SEQ ID NO: 856033 - DNA, 33 bp, Homo sapien
ctacatactaatttgacgttgtttctaatgaac

SEQ ID NO: 856034 - DNA, 33 bp, Homo sapien
ctacatactaatttgatgttgtttctaatgaac

SEQ ID NO: 856035 - DNA, 33 bp, Homo sapien
gactactatagtcaaccctctccatgtaggttt

SEQ ID NO: 856036 - DNA, 33 bp, Homo sapien
gactactatagtcaactctctccatgtaggttt

SEQ ID NO: 856037 - DNA, 33 bp, Homo sapien
ttctttcaattctccacatccatacttccatgt

SEQ ID NO: 856038 - DNA, 33 bp, Homo sapien
ttctttcaattctccatatccatacttccatgt

SEQ ID NO: 856039 - DNA, 33 bp, Homo sapien
tgggagagatgtggagaactgggccaaagcaga

SEQ ID NO: 856040 - DNA, 33 bp, Homo sapien
tgggagagatgtggagtactgggccaaagcaga

SEQ ID NO: 856041 - DNA, 33 bp, Homo sapien
tacagacaattcgctaagtctcttgtgcagtct

SEQ ID NO: 856042 - DNA, 33 bp, Homo sapien
tacagacaattcgctaggtctcttgtgcagtct

SEQ ID NO: 856043 - DNA, 33 bp, Homo sapien
tgacaatgcatgaaaaccagagactaagacacc

SEQ ID NO: 856044 - DNA, 33 bp, Homo sapien
tgacaatgcatgaaaatcagagactaagacacc

SEQ ID NO: 856045 - DNA, 33 bp, Homo sapien
gtgggagacatagtacagcctgtttgtttagaa

SEQ ID NO: 856046 - DNA, 33 bp, Homo sapien
gtgggagacatagtacggcctgtttgtttagaa

SEQ ID NO: 856047 - DNA, 33 bp, Homo sapien
ctagaacagagacaaactgaaaaagtgggtaag

SEQ ID NO: 856048 - DNA, 33 bp, Homo sapien
ctagaacagagacaaattgaaaaagtgggtaag

SEQ ID NO: 856049 - DNA, 33 bp, Homo sapien
ctgatatttgttgaaaattaagagccatttgtt

SEQ ID NO: 856050 - DNA, 33 bp, Homo sapien
ctgatatttgttgaaatttaagagccatttgtt

SEQ ID NO: 856051 - DNA, 33 bp, Homo sapien
gcagtgtttgaatttaactggcagaaagaaagg

SEQ ID NO: 856052 - DNA, 33 bp, Homo sapien
gcagtgtttgaatttatctggcagaaagaaagg

SEQ ID NO: 856053 - DNA, 33 bp, Homo sapien
aatggtcaccctagagaatgagaaatttagaaa

SEQ ID NO: 856054 - DNA, 33 bp, Homo sapien
aatggtcaccctagaggatgagaaatttagaaa

SEQ ID NO: 856055 - DNA, 33 bp, Homo sapien
ctttggaactaggttacggccttgagttctcaa

SEQ ID NO: 856056 - DNA, 33 bp, Homo sapien
ctttggaactaggttatggccttgagttctcaa

SEQ ID NO: 856057 - DNA, 33 bp, Homo sapien
aaatgagatcaacaaaagaagtcaactcagtac

SEQ ID NO: 856058 - DNA, 33 bp, Homo sapien
aaatgagatcaacaaaggaagtcaactcagtac

SEQ ID NO: 856059 - DNA, 33 bp, Homo sapien
tgctaagagttaggatcaagaatggcatcctac

SEQ ID NO: 856060 - DNA, 33 bp, Homo sapien
tgctaagagttaggatgaagaatggcatcctac

SEQ ID NO: 856061 - DNA, 33 bp, Homo sapien
tctgtgttgcagactaaaagcaaaatgcagtaa

SEQ ID NO: 856062 - DNA, 33 bp, Homo sapien
tctgtgttgcagactagaagcaaaatgcagtaa

SEQ ID NO: 856063 - DNA, 33 bp, Homo sapien
ccatttccactattaccaagtagccaaaaatat

SEQ ID NO: 856064 - DNA, 33 bp, Homo sapien
ccatttccactattactaagtagccaaaaatat

SEQ ID NO: 856065 - DNA, 33 bp, Homo sapien
agtggatcttctaacaacttaactgaccacagt

SEQ ID NO: 856066 - DNA, 33 bp, Homo sapien
agtggatcttctaacatcttaactgaccacagt

SEQ ID NO: 856067 - DNA, 33 bp, Homo sapien
cacaactccaccaaataactctcttcactctcc

SEQ ID NO: 856068 - DNA, 33 bp, Homo sapien
cacaactccaccaaatgactctcttcactctcc

SEQ ID NO: 856069 - DNA, 33 bp, Homo sapien
ttgtggacttttgagaatctatggaaattttca

SEQ ID NO: 856070 - DNA, 33 bp, Homo sapien
ttgtggacttttgagagtctatggaaattttca

SEQ ID NO: 856071 - DNA, 33 bp, Homo sapien
atagttgagtattttccagataggttgataatg

SEQ ID NO: 856072 - DNA, 33 bp, Homo sapien
atagttgagtattttctagataggttgataatg

SEQ ID NO: 856073 - DNA, 33 bp, Homo sapien
aactaattcattctcaaaagaaccaatccagtt

SEQ ID NO: 856074 - DNA, 33 bp, Homo sapien
aactaattcattctcacaagaaccaatccagtt

SEQ ID NO: 856075 - DNA, 33 bp, Homo sapien
cacccctgagagagaactagtctattcatgaaa

SEQ ID NO: 856076 - DNA, 33 bp, Homo sapien
cacccctgagagagaattagtctattcatgaaa

SEQ ID NO: 856077 - DNA, 33 bp, Homo sapien
ggctggactttagagccagctagacttgggttc

SEQ ID NO: 856078 - DNA, 33 bp, Homo sapien
ggctggactttagagctagctagacttgggttc

SEQ ID NO: 856079 - DNA, 33 bp, Homo sapien
gtttcaattttttgaggaatgtactaatttaca

SEQ ID NO: 856080 - DNA, 33 bp, Homo sapien
gtttcaattttttgagtaatgtactaatttaca

SEQ ID NO: 856081 - DNA, 33 bp, Homo sapien
ttaaatgattcagtgacgaggtcagcctatcag

SEQ ID NO: 856082 - DNA, 33 bp, Homo sapien
ttaaatgattcagtgatgaggtcagcctatcag

SEQ ID NO: 856083 - DNA, 33 bp, Homo sapien
ttcactggtacatatcacaaagattacagactt

SEQ ID NO: 856084 - DNA, 33 bp, Homo sapien
ttcactggtacatatcgcaaagattacagactt

SEQ ID NO: 856085 - DNA, 33 bp, Homo sapien
atactctcatatgcccacagattgtcagatatt

SEQ ID NO: 856086 - DNA, 33 bp, Homo sapien
atactctcatatgccctcagattgtcagatatt

SEQ ID NO: 856087 - DNA, 33 bp, Homo sapien
cttgactcagtttgagaataaaggccagagaag

SEQ ID NO: 856088 - DNA, 33 bp, Homo sapien
cttgactcagtttgaggataaaggccagagaag

SEQ ID NO: 856089 - DNA, 33 bp, Homo sapien
catgtgaaaacacaaaacaatattgaaagacct

SEQ ID NO: 856090 - DNA, 33 bp, Homo sapien
catgtgaaaacacaaagcaatattgaaagacct

SEQ ID NO: 856091 - DNA, 33 bp, Homo sapien
tcaatgagttatctaaatagttgcaactgcata

SEQ ID NO: 856092 - DNA, 33 bp, Homo sapien
tcaatgagttatctaagtagttgcaactgcata

SEQ ID NO: 856093 - DNA, 33 bp, Homo sapien
agaatatgacgaaaaactgctggaaactctgtt

SEQ ID NO: 856094 - DNA, 33 bp, Homo sapien
agaatatgacgaaaaattgctggaaactctgtt

SEQ ID NO: 856095 - DNA, 33 bp, Homo sapien
tctctctgtggctatgcacttcctggaacttga

SEQ ID NO: 856096 - DNA, 33 bp, Homo sapien
tctctctgtggctatgtacttcctggaacttga

SEQ ID NO: 856097 - DNA, 33 bp, Homo sapien
agtagagaacgggtgaaagaatgaaaactaact

SEQ ID NO: 856098 - DNA, 33 bp, Homo sapien
agtagagaacgggtgagagaatgaaaactaact

SEQ ID NO: 856099 - DNA, 33 bp, Homo sapien
tacagtgtgagttgggaaatgataactagagtc

SEQ ID NO: 856100 - DNA, 33 bp, Homo sapien
tacagtgtgagttgggcaatgataactagagtc

SEQ ID NO: 856101 - DNA, 33 bp, Homo sapien
aaggcttacgtcctcccaaacattgcactccaa

SEQ ID NO: 856102 - DNA, 33 bp, Homo sapien
aaggcttacgtcctcctaaacattgcactccaa

SEQ ID NO: 856103 - DNA, 33 bp, Homo sapien
aagctgtctgaagatacagcttagcgtatgtca

SEQ ID NO: 856104 - DNA, 33 bp, Homo sapien
aagctgtctgaagatatagcttagcgtatgtca

SEQ ID NO: 856105 - DNA, 33 bp, Homo sapien
aaaaattgtaaacatacgtgatggcctgagcag

SEQ ID NO: 856106 - DNA, 33 bp, Homo sapien
aaaaattgtaaacatatgtgatggcctgagcag

SEQ ID NO: 856107 - DNA, 33 bp, Homo sapien
agatttctccaaggtgaactttttattttcata

SEQ ID NO: 856108 - DNA, 33 bp, Homo sapien
agatttctccaaggtgtactttttattttcata

SEQ ID NO: 856109 - DNA, 33 bp, Homo sapien
tatgcctacttcgttcactttgtcctttttctt

SEQ ID NO: 856110 - DNA, 33 bp, Homo sapien
tatgcctacttcgttcgctttgtcctttttctt

SEQ ID NO: 856111 - DNA, 33 bp, Homo sapien
gccttcaaattgggtcaaatccaaattcagttg

SEQ ID NO: 856112 - DNA, 33 bp, Homo sapien
gccttcaaattgggtccaatccaaattcagttg

SEQ ID NO: 856113 - DNA, 33 bp, Homo sapien
ctacaattttaggaagaaaaatgttgaaggaaa

SEQ ID NO: 856114 - DNA, 33 bp, Homo sapien
ctacaattttaggaagcaaaatgttgaaggaaa

SEQ ID NO: 856115 - DNA, 33 bp, Homo sapien
atatcaaaaagttgaacgtcccaatggacaatt

SEQ ID NO: 856116 - DNA, 33 bp, Homo sapien
atatcaaaaagttgaatgtcccaatggacaatt

SEQ ID NO: 856117 - DNA, 33 bp, Homo sapien
tgtgaagttcttttgcgaagggagataatatat

SEQ ID NO: 856118 - DNA, 33 bp, Homo sapien
tgtgaagttcttttgctaagggagataatatat

SEQ ID NO: 856119 - DNA, 33 bp, Homo sapien
cttttgtaacctgatcaaatcttcagaatctaa

SEQ ID NO: 856120 - DNA, 33 bp, Homo sapien
cttttgtaacctgatccaatcttcagaatctaa

SEQ ID NO: 856121 - DNA, 33 bp, Homo sapien
attttgtggtattctccaatcttccaaaaattt

SEQ ID NO: 856122 - DNA, 33 bp, Homo sapien
attttgtggtattctctaatcttccaaaaattt

SEQ ID NO: 856123 - DNA, 33 bp, Homo sapien
ctgatgttaaagggtacgtcagagatttccaag

SEQ ID NO: 856124 - DNA, 33 bp, Homo sapien
ctgatgttaaagggtatgtcagagatttccaag

SEQ ID NO: 856125 - DNA, 33 bp, Homo sapien
atattttcccttgaaaagagcaagatcattttt

SEQ ID NO: 856126 - DNA, 33 bp, Homo sapien
atattttcccttgaaaggagcaagatcattttt

SEQ ID NO: 856127 - DNA, 33 bp, Homo sapien
catcacagctccagtgacacacatgctcccaag

SEQ ID NO: 856128 - DNA, 33 bp, Homo sapien
catcacagctccagtgtcacacatgctcccaag

SEQ ID NO: 856129 - DNA, 33 bp, Homo sapien
aaagtaagataagaaacggcaaacttatatctc

SEQ ID NO: 856130 - DNA, 33 bp, Homo sapien
aaagtaagataagaaatggcaaacttatatctc

SEQ ID NO: 856131 - DNA, 33 bp, Homo sapien
cgcattctaggccccaagactgtgaagtgttta

SEQ ID NO: 856132 - DNA, 33 bp, Homo sapien
cgcattctaggccccaggactgtgaagtgttta

SEQ ID NO: 856133 - DNA, 33 bp, Homo sapien
actctacagacaatctcaaaagtattttatatg

SEQ ID NO: 856134 - DNA, 33 bp, Homo sapien
actctacagacaatctgaaaagtattttatatg

SEQ ID NO: 856135 - DNA, 33 bp, Homo sapien
aacaaaatggacatgaacataaaagatgtagga

SEQ ID NO: 856136 - DNA, 33 bp, Homo sapien
aacaaaatggacatgaccataaaagatgtagga

SEQ ID NO: 856137 - DNA, 33 bp, Homo sapien
tcaggatagcttgttaacatcaacacttttgct

SEQ ID NO: 856138 - DNA, 33 bp, Homo sapien
tcaggatagcttgttagcatcaacacttttgct

SEQ ID NO: 856139 - DNA, 33 bp, Homo sapien
gagtacccatggaaacggtttattagtagtaga

SEQ ID NO: 856140 - DNA, 33 bp, Homo sapien
gagtacccatggaaactgtttattagtagtaga

SEQ ID NO: 856141 - DNA, 33 bp, Homo sapien
ctagtcaccacaattaaatcaggtgtataaaca

SEQ ID NO: 856142 - DNA, 33 bp, Homo sapien
ctagtcaccacaattagatcaggtgtataaaca

SEQ ID NO: 856143 - DNA, 33 bp, Homo sapien
acagaatgtgaaaaccagctatcagatcacagg

SEQ ID NO: 856144 - DNA, 33 bp, Homo sapien
acagaatgtgaaaaccggctatcagatcacagg

SEQ ID NO: 856145 - DNA, 33 bp, Homo sapien
ctacagagattgagcacaggtttcatggttttt

SEQ ID NO: 856146 - DNA, 33 bp, Homo sapien
ctacagagattgagcagaggtttcatggttttt

SEQ ID NO: 856147 - DNA, 33 bp, Homo sapien
taagtgccagtaaataacataatgactatgaaa

SEQ ID NO: 856148 - DNA, 33 bp, Homo sapien
taagtgccagtaaatagcataatgactatgaaa

SEQ ID NO: 856149 - DNA, 33 bp, Homo sapien
ctacatccaattgtcaagattttttggtataaa

SEQ ID NO: 856150 - DNA, 33 bp, Homo sapien
ctacatccaattgtcatgattttttggtataaa

SEQ ID NO: 856151 - DNA, 33 bp, Homo sapien
ctagcacctgcactaacgcttcccagtgtgaac

SEQ ID NO: 856152 - DNA, 33 bp, Homo sapien
ctagcacctgcactaatgcttcccagtgtgaac

SEQ ID NO: 856153 - DNA, 33 bp, Homo sapien
agacagcagtcagcctaagcggtttccatttat

SEQ ID NO: 856154 - DNA, 33 bp, Homo sapien
agacagcagtcagcctgagcggtttccatttat

SEQ ID NO: 856155 - DNA, 33 bp, Homo sapien
tcacatatgttttagaactaagaagagcaagca

SEQ ID NO: 856156 - DNA, 33 bp, Homo sapien
tcacatatgttttagagctaagaagagcaagca

SEQ ID NO: 856157 - DNA, 33 bp, Homo sapien
cttatgacaagagttacaatgtgtactgctgtt

SEQ ID NO: 856158 - DNA, 33 bp, Homo sapien
cttatgacaagagttataatgtgtactgctgtt

SEQ ID NO: 856159 - DNA, 33 bp, Homo sapien
atcagaatctttaaaaagttgccgttagtatca

SEQ ID NO: 856160 - DNA, 33 bp, Homo sapien
atcagaatctttaaaatgttgccgttagtatca

SEQ ID NO: 856161 - DNA, 33 bp, Homo sapien
aaataagccttttcaccgtattagagaactttc

SEQ ID NO: 856162 - DNA, 33 bp, Homo sapien
aaataagccttttcactgtattagagaactttc

SEQ ID NO: 856163 - DNA, 33 bp, Homo sapien
cttagtgtgagaatgtaaatccctttccaaacg

SEQ ID NO: 856164 - DNA, 33 bp, Homo sapien
cttagtgtgagaatgtgaatccctttccaaacg

SEQ ID NO: 856165 - DNA, 33 bp, Homo sapien
ggaatattttgaaacaatggttaatcgggtttg

SEQ ID NO: 856166 - DNA, 33 bp, Homo sapien
ggaatattttgaaacagtggttaatcgggtttg

SEQ ID NO: 856167 - DNA, 33 bp, Homo sapien
gtaccaagcaccaacaagagatttatcaagggt

SEQ ID NO: 856168 - DNA, 33 bp, Homo sapien
gtaccaagcaccaacaggagatttatcaagggt

SEQ ID NO: 856169 - DNA, 33 bp, Homo sapien
tgttgtttttctcctacgcaattgttgtttaag

SEQ ID NO: 856170 - DNA, 33 bp, Homo sapien
tgttgtttttctcctaggcaattgttgtttaag

SEQ ID NO: 856171 - DNA, 33 bp, Homo sapien
ggtgagcacattcaaaacatagaaccatacaaa

SEQ ID NO: 856172 - DNA, 33 bp, Homo sapien
ggtgagcacattcaaagcatagaaccatacaaa

SEQ ID NO: 856173 - DNA, 33 bp, Homo sapien
gaatctatcctgcaaactatgttttagattaat

SEQ ID NO: 856174 - DNA, 33 bp, Homo sapien
gaatctatcctgcaaattatgttttagattaat

SEQ ID NO: 856175 - DNA, 33 bp, Homo sapien
tgagatggagaagaacacagtcaattacagcaa

SEQ ID NO: 856176 - DNA, 33 bp, Homo sapien
tgagatggagaagaacccagtcaattacagcaa

SEQ ID NO: 856177 - DNA, 33 bp, Homo sapien
gcaaactggaggaagaacattttatttcattta

SEQ ID NO: 856178 - DNA, 33 bp, Homo sapien
gcaaactggaggaagatcattttatttcattta

SEQ ID NO: 856179 - DNA, 33 bp, Homo sapien
tcttgccttttcagctgcttctggctataggta

SEQ ID NO: 856180 - DNA, 33 bp, Homo sapien
tcttgccttttcagcttcttctggctataggta

SEQ ID NO: 856181 - DNA, 33 bp, Homo sapien
tgggtgacaacacaacagacgtttattctctcg

SEQ ID NO: 856182 - DNA, 33 bp, Homo sapien
tgggtgacaacacaaccgacgtttattctctcg

SEQ ID NO: 856183 - DNA, 33 bp, Homo sapien
aatgtttgcagggagaatatcattttactattg

SEQ ID NO: 856184 - DNA, 33 bp, Homo sapien
aatgtttgcagggagattatcattttactattg

SEQ ID NO: 856185 - DNA, 33 bp, Homo sapien
aaaactctttgtgaacgaaaaggagacaggtgt

SEQ ID NO: 856186 - DNA, 33 bp, Homo sapien
aaaactctttgtgaactaaaaggagacaggtgt

SEQ ID NO: 856187 - DNA, 33 bp, Homo sapien
agaagttcaggagcaacgtattgttaatgttaa

SEQ ID NO: 856188 - DNA, 33 bp, Homo sapien
agaagttcaggagcaaggtattgttaatgttaa

SEQ ID NO: 856189 - DNA, 33 bp, Homo sapien
tatttagcacagtaccaaaatataggtagctct

SEQ ID NO: 856190 - DNA, 33 bp, Homo sapien
tatttagcacagtaccgaaatataggtagctct

SEQ ID NO: 856191 - DNA, 33 bp, Homo sapien
tgattcagcatgtctgaagtgggagcaaaccca

SEQ ID NO: 856192 - DNA, 33 bp, Homo sapien
tgattcagcatgtctggagtgggagcaaaccca

SEQ ID NO: 856193 - DNA, 33 bp, Homo sapien
gtgaatgcacgggaaaagaccaagagtctagaa

SEQ ID NO: 856194 - DNA, 33 bp, Homo sapien
gtgaatgcacgggaaaggaccaagagtctagaa

SEQ ID NO: 856195 - DNA, 33 bp, Homo sapien
tttgactgtggaatgacgttaacactatctgta

SEQ ID NO: 856196 - DNA, 33 bp, Homo sapien
tttgactgtggaatgatgttaacactatctgta

SEQ ID NO: 856197 - DNA, 33 bp, Homo sapien
gagaataccagaatgacacattgatgaagaaag

SEQ ID NO: 856198 - DNA, 33 bp, Homo sapien
gagaataccagaatgagacattgatgaagaaag

SEQ ID NO: 856199 - DNA, 33 bp, Homo sapien
aagccccttctcaggaaaatagttcactcaact

SEQ ID NO: 856200 - DNA, 33 bp, Homo sapien
aagccccttctcaggacaatagttcactcaact

SEQ ID NO: 856201 - DNA, 33 bp, Homo sapien
ttccacattctgaagcagcagcccaaactgtat

SEQ ID NO: 856202 - DNA, 33 bp, Homo sapien
ttccacattctgaagcggcagcccaaactgtat

SEQ ID NO: 856203 - DNA, 33 bp, Homo sapien
atacctgtgagactccaatgtgtctcgcatttt

SEQ ID NO: 856204 - DNA, 33 bp, Homo sapien
atacctgtgagactccgatgtgtctcgcatttt

SEQ ID NO: 856205 - DNA, 33 bp, Homo sapien
atcacagctcttaacaaaagggatcattcttgc

SEQ ID NO: 856206 - DNA, 33 bp, Homo sapien
atcacagctcttaacagaagggatcattcttgc

SEQ ID NO: 856207 - DNA, 33 bp, Homo sapien
atcaagagtcgatagaagtgcaagctttcctct

SEQ ID NO: 856208 - DNA, 33 bp, Homo sapien
atcaagagtcgatagaggtgcaagctttcctct

SEQ ID NO: 856209 - DNA, 33 bp, Homo sapien
atgccagaaaagtgatgaagttgattccttctt

SEQ ID NO: 856210 - DNA, 33 bp, Homo sapien
atgccagaaaagtgattaagttgattccttctt

SEQ ID NO: 856211 - DNA, 33 bp, Homo sapien
ctaacacaaaaattgaacatcaagatttctaag

SEQ ID NO: 856212 - DNA, 33 bp, Homo sapien
ctaacacaaaaattgatcatcaagatttctaag

SEQ ID NO: 856213 - DNA, 33 bp, Homo sapien
tagatagtgtagttgaaaggcaatttatgagaa

SEQ ID NO: 856214 - DNA, 33 bp, Homo sapien
tagatagtgtagttgagaggcaatttatgagaa

SEQ ID NO: 856215 - DNA, 33 bp, Homo sapien
cttgtcctctgttctacattcaagcttcacaaa

SEQ ID NO: 856216 - DNA, 33 bp, Homo sapien
cttgtcctctgttctatattcaagcttcacaaa

SEQ ID NO: 856217 - DNA, 33 bp, Homo sapien
ctaaaaagtttgacaacgccacttaaagaaact

SEQ ID NO: 856218 - DNA, 33 bp, Homo sapien
ctaaaaagtttgacaatgccacttaaagaaact

SEQ ID NO: 856219 - DNA, 33 bp, Homo sapien
ttttccaatttgcgtacgctttgaaactttact

SEQ ID NO: 856220 - DNA, 33 bp, Homo sapien
ttttccaatttgcgtatgctttgaaactttact

SEQ ID NO: 856221 - DNA, 33 bp, Homo sapien
accaagcagaaaaaagaatatgtgattttgaag

SEQ ID NO: 856222 - DNA, 33 bp, Homo sapien
accaagcagaaaaaagtatatgtgattttgaag

SEQ ID NO: 856223 - DNA, 33 bp, Homo sapien
ttctcattgaaaaccagtacaagaccaggatgc

SEQ ID NO: 856224 - DNA, 33 bp, Homo sapien
ttctcattgaaaaccattacaagaccaggatgc

SEQ ID NO: 856225 - DNA, 33 bp, Homo sapien
atttgattgtataataacttgataagtagtcta

SEQ ID NO: 856226 - DNA, 33 bp, Homo sapien
atttgattgtataataccttgataagtagtcta

SEQ ID NO: 856227 - DNA, 33 bp, Homo sapien
gtacatgaatgaagtacggtgattttgtaacat

SEQ ID NO: 856228 - DNA, 33 bp, Homo sapien
gtacatgaatgaagtatggtgattttgtaacat

SEQ ID NO: 856229 - DNA, 33 bp, Homo sapien
cctcatcttcctggtacaagcaagggcacatct

SEQ ID NO: 856230 - DNA, 33 bp, Homo sapien
cctcatcttcctggtataagcaagggcacatct

SEQ ID NO: 856231 - DNA, 33 bp, Homo sapien
ttttacatgatattaaggtcataagatgatgag

SEQ ID NO: 856232 - DNA, 33 bp, Homo sapien
ttttacatgatattaatgtcataagatgatgag

SEQ ID NO: 856233 - DNA, 33 bp, Homo sapien
atatcagacttgctaaatcatgttctctacagg

SEQ ID NO: 856234 - DNA, 33 bp, Homo sapien
atatcagacttgctaattcatgttctctacagg

SEQ ID NO: 856235 - DNA, 33 bp, Homo sapien
gcaggtagaatcctgacgttcgtgttaaatatc

SEQ ID NO: 856236 - DNA, 33 bp, Homo sapien
gcaggtagaatcctgatgttcgtgttaaatatc

SEQ ID NO: 856237 - DNA, 33 bp, Homo sapien
tcctgatgctctccctcaagatattataggaag

SEQ ID NO: 856238 - DNA, 33 bp, Homo sapien
tcctgatgctctcccttaagatattataggaag

SEQ ID NO: 856239 - DNA, 33 bp, Homo sapien
tcagtgaagaaactcacgatggtaggattgaga

SEQ ID NO: 856240 - DNA, 33 bp, Homo sapien
tcagtgaagaaactcatgatggtaggattgaga

SEQ ID NO: 856241 - DNA, 33 bp, Homo sapien
taacaaggcaacccaaagcttggtgacatcaac

SEQ ID NO: 856242 - DNA, 33 bp, Homo sapien
taacaaggcaacccaaggcttggtgacatcaac

SEQ ID NO: 856243 - DNA, 33 bp, Homo sapien
agtaagttttttgctgcacatttaatggttata

SEQ ID NO: 856244 - DNA, 33 bp, Homo sapien
agtaagttttttgctggacatttaatggttata

SEQ ID NO: 856245 - DNA, 33 bp, Homo sapien
ggggaaaagctttataccactaattgtgaactt

SEQ ID NO: 856246 - DNA, 33 bp, Homo sapien
ggggaaaagctttatagcactaattgtgaactt

SEQ ID NO: 856247 - DNA, 33 bp, Homo sapien
ggtttgttatgtaggtaaactaaatgtcacagg

SEQ ID NO: 856248 - DNA, 33 bp, Homo sapien
ggtttgttatgtaggtgaactaaatgtcacagg

SEQ ID NO: 856249 - DNA, 33 bp, Homo sapien
gtactcctttgaagccactttctgtagtgtagg

SEQ ID NO: 856250 - DNA, 33 bp, Homo sapien
gtactcctttgaagccgctttctgtagtgtagg

SEQ ID NO: 856251 - DNA, 33 bp, Homo sapien
tatagctctgtattaactggttttttaaatatt

SEQ ID NO: 856252 - DNA, 33 bp, Homo sapien
tatagctctgtattaattggttttttaaatatt

SEQ ID NO: 856253 - DNA, 33 bp, Homo sapien
acacacatacacatacacatcagaattttacta

SEQ ID NO: 856254 - DNA, 33 bp, Homo sapien
acacacatacacatacgcatcagaattttacta

SEQ ID NO: 856255 - DNA, 33 bp, Homo sapien
aaatgttttttcccacagtgaaatcatacccaa

SEQ ID NO: 856256 - DNA, 33 bp, Homo sapien
aaatgttttttcccacggtgaaatcatacccaa

SEQ ID NO: 856257 - DNA, 33 bp, Homo sapien
tccagaaacaactctgaatcacaagaagttaag

SEQ ID NO: 856258 - DNA, 33 bp, Homo sapien
tccagaaacaactctgcatcacaagaagttaag

SEQ ID NO: 856259 - DNA, 33 bp, Homo sapien
cacgaaagttgcaaacacttctagccttattat

SEQ ID NO: 856260 - DNA, 33 bp, Homo sapien
cacgaaagttgcaaacgcttctagccttattat

SEQ ID NO: 856261 - DNA, 33 bp, Homo sapien
attaccccctcaaccactaaactctagttcaca

SEQ ID NO: 856262 - DNA, 33 bp, Homo sapien
attaccccctcaaccagtaaactctagttcaca

SEQ ID NO: 856263 - DNA, 33 bp, Homo sapien
tagaaatcagaattataagtaggctcaacctct

SEQ ID NO: 856264 - DNA, 33 bp, Homo sapien
tagaaatcagaattatgagtaggctcaacctct

SEQ ID NO: 856265 - DNA, 33 bp, Homo sapien
ggaagaatcatagtgccaaatttcaaactggat

SEQ ID NO: 856266 - DNA, 33 bp, Homo sapien
ggaagaatcatagtgctaaatttcaaactggat

SEQ ID NO: 856267 - DNA, 33 bp, Homo sapien
tttgtactgtgttagaatattttgagttgagtt

SEQ ID NO: 856268 - DNA, 33 bp, Homo sapien
tttgtactgtgttagactattttgagttgagtt

SEQ ID NO: 856269 - DNA, 33 bp, Homo sapien
cttgttaacacgtgcaagtaattctgattcagc

SEQ ID NO: 856270 - DNA, 33 bp, Homo sapien
cttgttaacacgtgcaggtaattctgattcagc

SEQ ID NO: 856271 - DNA, 33 bp, Homo sapien
ctgctctttacatgaacgtcacctagtcaggga

SEQ ID NO: 856272 - DNA, 33 bp, Homo sapien
ctgctctttacatgaatgtcacctagtcaggga

SEQ ID NO: 856273 - DNA, 33 bp, Homo sapien
cctgtgacaacaaacactaactgagtacttact

SEQ ID NO: 856274 - DNA, 33 bp, Homo sapien
cctgtgacaacaaacattaactgagtacttact

SEQ ID NO: 856275 - DNA, 33 bp, Homo sapien
ctaagagacatcatcaccttattacaaatctta

SEQ ID NO: 856276 - DNA, 33 bp, Homo sapien
ctaagagacatcatcatcttattacaaatctta

SEQ ID NO: 856277 - DNA, 33 bp, Homo sapien
ccggttgtagtagtaacgtaatgggtgtgggag

SEQ ID NO: 856278 - DNA, 33 bp, Homo sapien
ccggttgtagtagtaatgtaatgggtgtgggag

SEQ ID NO: 856279 - DNA, 33 bp, Homo sapien
agaagcctgaactatccaagatttgaaagatga

SEQ ID NO: 856280 - DNA, 33 bp, Homo sapien
agaagcctgaactatcgaagatttgaaagatga

SEQ ID NO: 856281 - DNA, 33 bp, Homo sapien
tttcttcttcatctaactgacttacctaatttg

SEQ ID NO: 856282 - DNA, 33 bp, Homo sapien
tttcttcttcatctaattgacttacctaatttg

SEQ ID NO: 856283 - DNA, 33 bp, Homo sapien
tgagtatatagggctcaagaaaaatggcaggat

SEQ ID NO: 856284 - DNA, 33 bp, Homo sapien
tgagtatatagggctctagaaaaatggcaggat

SEQ ID NO: 856285 - DNA, 33 bp, Homo sapien
tttatgagaaataactaagacagtagccaatgt

SEQ ID NO: 856286 - DNA, 33 bp, Homo sapien
tttatgagaaataactgagacagtagccaatgt

SEQ ID NO: 856287 - DNA, 33 bp, Homo sapien
catttgcctgaaaaacacataggcactcagcac

SEQ ID NO: 856288 - DNA, 33 bp, Homo sapien
catttgcctgaaaaacccataggcactcagcac

SEQ ID NO: 856289 - DNA, 33 bp, Homo sapien
gagatctgactgggtcaaaagcaaagagggccc

SEQ ID NO: 856290 - DNA, 33 bp, Homo sapien
gagatctgactgggtcgaaagcaaagagggccc

SEQ ID NO: 856291 - DNA, 33 bp, Homo sapien
tgcataaaggccagataaaaaaagacttatggg

SEQ ID NO: 856292 - DNA, 33 bp, Homo sapien
tgcataaaggccagattaaaaaagacttatggg

SEQ ID NO: 856293 - DNA, 33 bp, Homo sapien
gagcctacagggcagacgaaaatgactttgtga

SEQ ID NO: 856294 - DNA, 33 bp, Homo sapien
gagcctacagggcagatgaaaatgactttgtga

SEQ ID NO: 856295 - DNA, 33 bp, Homo sapien
gtctctttctgattcaagcagttttcatctttc

SEQ ID NO: 856296 - DNA, 33 bp, Homo sapien
gtctctttctgattcatgcagttttcatctttc

SEQ ID NO: 856297 - DNA, 33 bp, Homo sapien
gactatgtttaggagaacatccctgcagaaaat

SEQ ID NO: 856298 - DNA, 33 bp, Homo sapien
gactatgtttaggagatcatccctgcagaaaat

SEQ ID NO: 856299 - DNA, 33 bp, Homo sapien
gttaaattcatcagtgaaagttaagcattttaa

SEQ ID NO: 856300 - DNA, 33 bp, Homo sapien
gttaaattcatcagtggaagttaagcattttaa

SEQ ID NO: 856301 - DNA, 33 bp, Homo sapien
gtggctccaataaacgaaaacttagtaatgagt

SEQ ID NO: 856302 - DNA, 33 bp, Homo sapien
gtggctccaataaacggaaacttagtaatgagt

SEQ ID NO: 856303 - DNA, 33 bp, Homo sapien
tgtaggtagctcttacactttgaaaggaaacta

SEQ ID NO: 856304 - DNA, 33 bp, Homo sapien
tgtaggtagctcttacgctttgaaaggaaacta

SEQ ID NO: 856305 - DNA, 33 bp, Homo sapien
ggctcttctccagggcaaataaaggtatgggtc

SEQ ID NO: 856306 - DNA, 33 bp, Homo sapien
ggctcttctccagggcgaataaaggtatgggtc

SEQ ID NO: 856307 - DNA, 33 bp, Homo sapien
tgctgccaccagaggccgacggtatagtgagaa

SEQ ID NO: 856308 - DNA, 33 bp, Homo sapien
tgctgccaccagaggctgacggtatagtgagaa

SEQ ID NO: 856309 - DNA, 33 bp, Homo sapien
aagtcctgggaaaaataatttcaactcagcttt

SEQ ID NO: 856310 - DNA, 33 bp, Homo sapien
aagtcctgggaaaaattatttcaactcagcttt

SEQ ID NO: 856311 - DNA, 33 bp, Homo sapien
ctattcaaacagatcaaaattcgttataatttc

SEQ ID NO: 856312 - DNA, 33 bp, Homo sapien
ctattcaaacagatcacaattcgttataatttc

SEQ ID NO: 856313 - DNA, 33 bp, Homo sapien
ttaaaaatgccaacaaaggtagttatttacagt

SEQ ID NO: 856314 - DNA, 33 bp, Homo sapien
ttaaaaatgccaacaagggtagttatttacagt

SEQ ID NO: 856315 - DNA, 33 bp, Homo sapien
gtatggaaaatgaacactgatcaagtaatcagt

SEQ ID NO: 856316 - DNA, 33 bp, Homo sapien
gtatggaaaatgaacattgatcaagtaatcagt

SEQ ID NO: 856317 - DNA, 33 bp, Homo sapien
ataaactcctagtcgaatatgatttacagtatt

SEQ ID NO: 856318 - DNA, 33 bp, Homo sapien
ataaactcctagtcgattatgatttacagtatt

SEQ ID NO: 856319 - DNA, 33 bp, Homo sapien
tcaggagaacaatacagcactgttttcataatc

SEQ ID NO: 856320 - DNA, 33 bp, Homo sapien
tcaggagaacaatacatcactgttttcataatc

SEQ ID NO: 856321 - DNA, 33 bp, Homo sapien
aacatactgatttgagcctaccatcatggatta

SEQ ID NO: 856322 - DNA, 33 bp, Homo sapien
aacatactgatttgagtctaccatcatggatta

SEQ ID NO: 856323 - DNA, 33 bp, Homo sapien
attcgtatgttctgcaataagttctttcatttc

SEQ ID NO: 856324 - DNA, 33 bp, Homo sapien
attcgtatgttctgcagtaagttctttcatttc

SEQ ID NO: 856325 - DNA, 33 bp, Homo sapien
ttagtagttacaaagactctggagatagaactg

SEQ ID NO: 856326 - DNA, 33 bp, Homo sapien
ttagtagttacaaagattctggagatagaactg

SEQ ID NO: 856327 - DNA, 33 bp, Homo sapien
atgtccagaacaatacactgtttgtagaatagc

SEQ ID NO: 856328 - DNA, 33 bp, Homo sapien
atgtccagaacaatacgctgtttgtagaatagc

SEQ ID NO: 856329 - DNA, 33 bp, Homo sapien
aagactgacttgggcaccaactaatgatttaag

SEQ ID NO: 856330 - DNA, 33 bp, Homo sapien
aagactgacttgggcagcaactaatgatttaag

SEQ ID NO: 856331 - DNA, 33 bp, Homo sapien
gaaaaattattccaaaatggatattaacagtaa

SEQ ID NO: 856332 - DNA, 33 bp, Homo sapien
gaaaaattattccaaagtggatattaacagtaa

SEQ ID NO: 856333 - DNA, 33 bp, Homo sapien
cttgtatcaccatcaaaagctgtaagaagaaag

SEQ ID NO: 856334 - DNA, 33 bp, Homo sapien
cttgtatcaccatcaacagctgtaagaagaaag

SEQ ID NO: 856335 - DNA, 33 bp, Homo sapien
ctttatcctgaagttcacagtatataaaaaata

SEQ ID NO: 856336 - DNA, 33 bp, Homo sapien
ctttatcctgaagttcgcagtatataaaaaata

SEQ ID NO: 856337 - DNA, 33 bp, Homo sapien
ttattaacagacacaaactagtgagtgaaagct

SEQ ID NO: 856338 - DNA, 33 bp, Homo sapien
ttattaacagacacaagctagtgagtgaaagct

SEQ ID NO: 856339 - DNA, 33 bp, Homo sapien
ttcccctctggagtgacacatttgttcaattga

SEQ ID NO: 856340 - DNA, 33 bp, Homo sapien
ttcccctctggagtgatacatttgttcaattga

SEQ ID NO: 856341 - DNA, 33 bp, Homo sapien
cttgcttatactcacacaaaaaagatggtctta

SEQ ID NO: 856342 - DNA, 33 bp, Homo sapien
cttgcttatactcacagaaaaaagatggtctta

SEQ ID NO: 856343 - DNA, 33 bp, Homo sapien
accattccaaaatggtcaatcctagaggcctta

SEQ ID NO: 856344 - DNA, 33 bp, Homo sapien
accattccaaaatggtgaatcctagaggcctta

SEQ ID NO: 856345 - DNA, 33 bp, Homo sapien
aaaaagctgtgaatgacggcacccagaaactat

SEQ ID NO: 856346 - DNA, 33 bp, Homo sapien
aaaaagctgtgaatgatggcacccagaaactat

SEQ ID NO: 856347 - DNA, 33 bp, Homo sapien
gaatatctgtactcaaatgaagatcaaagtata

SEQ ID NO: 856348 - DNA, 33 bp, Homo sapien
gaatatctgtactcaactgaagatcaaagtata

SEQ ID NO: 856349 - DNA, 33 bp, Homo sapien
ccacagattaattccactcaaagtgtccttcag

SEQ ID NO: 856350 - DNA, 33 bp, Homo sapien
ccacagattaattccattcaaagtgtccttcag

SEQ ID NO: 856351 - DNA, 33 bp, Homo sapien
ttacagatctacatttaaaatcaaccgttaata

SEQ ID NO: 856352 - DNA, 33 bp, Homo sapien
ttacagatctacatttgaaatcaaccgttaata

SEQ ID NO: 856353 - DNA, 33 bp, Homo sapien
tgttccatttaaaaggcagttatgttgacaaga

SEQ ID NO: 856354 - DNA, 33 bp, Homo sapien
tgttccatttaaaaggtagttatgttgacaaga

SEQ ID NO: 856355 - DNA, 33 bp, Homo sapien
aaatagatcactacacagaaaagacacatgctt

SEQ ID NO: 856356 - DNA, 33 bp, Homo sapien
aaatagatcactacaccgaaaagacacatgctt

SEQ ID NO: 856357 - DNA, 33 bp, Homo sapien
catgctattccatgtcaccatgacatcccttac

SEQ ID NO: 856358 - DNA, 33 bp, Homo sapien
catgctattccatgtcgccatgacatcccttac

SEQ ID NO: 856359 - DNA, 33 bp, Homo sapien
tgtagtaaattagtgacagagttagaattaggg

SEQ ID NO: 856360 - DNA, 33 bp, Homo sapien
tgtagtaaattagtgatagagttagaattaggg

SEQ ID NO: 856361 - DNA, 33 bp, Homo sapien
caaattagatagtacacaaagcaaaataatcaa

SEQ ID NO: 856362 - DNA, 33 bp, Homo sapien
caaattagatagtacataaagcaaaataatcaa

SEQ ID NO: 856363 - DNA, 33 bp, Homo sapien
ttcaataaaatgagcccatatacacatttattt

SEQ ID NO: 856364 - DNA, 33 bp, Homo sapien
ttcaataaaatgagcctatatacacatttattt

SEQ ID NO: 856365 - DNA, 33 bp, Homo sapien
tacacaagataatcctcaagctgcctttttttt

SEQ ID NO: 856366 - DNA, 33 bp, Homo sapien
tacacaagataatcctgaagctgcctttttttt

SEQ ID NO: 856367 - DNA, 33 bp, Homo sapien
attcctcatatcctcacctattaaacttacata

SEQ ID NO: 856368 - DNA, 33 bp, Homo sapien
attcctcatatcctcatctattaaacttacata

SEQ ID NO: 856369 - DNA, 33 bp, Homo sapien
gatgagatagtcaagacgatagtcaaaagtaac

SEQ ID NO: 856370 - DNA, 33 bp, Homo sapien
gatgagatagtcaagatgatagtcaaaagtaac

SEQ ID NO: 856371 - DNA, 33 bp, Homo sapien
gctagaaggtggtactcaattattttgtagtga

SEQ ID NO: 856372 - DNA, 33 bp, Homo sapien
gctagaaggtggtacttaattattttgtagtga

SEQ ID NO: 856373 - DNA, 33 bp, Homo sapien
aagaatgtgaacctataaatattgatatggagt

SEQ ID NO: 856374 - DNA, 33 bp, Homo sapien
aagaatgtgaacctattaatattgatatggagt

SEQ ID NO: 856375 - DNA, 33 bp, Homo sapien
catatacaaatgtgtgaagtttaaggaatgatc

SEQ ID NO: 856376 - DNA, 33 bp, Homo sapien
catatacaaatgtgtgcagtttaaggaatgatc

SEQ ID NO: 856377 - DNA, 33 bp, Homo sapien
gagcaatcatggcaaaccacctacctggctact

SEQ ID NO: 856378 - DNA, 33 bp, Homo sapien
gagcaatcatggcaaatcacctacctggctact

SEQ ID NO: 856379 - DNA, 33 bp, Homo sapien
aatgtatcgcacttccaaaactagtatagacat

SEQ ID NO: 856380 - DNA, 33 bp, Homo sapien
aatgtatcgcacttccgaaactagtatagacat

SEQ ID NO: 856381 - DNA, 33 bp, Homo sapien
aagactatggtcacataaacaaggctttcttaa

SEQ ID NO: 856382 - DNA, 33 bp, Homo sapien
aagactatggtcacatgaacaaggctttcttaa

SEQ ID NO: 856383 - DNA, 33 bp, Homo sapien
aagctcaagtatttgtaaatgtctagcttgctc

SEQ ID NO: 856384 - DNA, 33 bp, Homo sapien
aagctcaagtatttgtgaatgtctagcttgctc

SEQ ID NO: 856385 - DNA, 33 bp, Homo sapien
gtgagtggccaccaaaatcttttaaactaggca

SEQ ID NO: 856386 - DNA, 33 bp, Homo sapien
gtgagtggccaccaaagtcttttaaactaggca

SEQ ID NO: 856387 - DNA, 33 bp, Homo sapien
attgtcttaaaaacacagataagaagagcaatt

SEQ ID NO: 856388 - DNA, 33 bp, Homo sapien
attgtcttaaaaacacggataagaagagcaatt

SEQ ID NO: 856389 - DNA, 33 bp, Homo sapien
gctgaatgctggataaagtgaggtttttgtaac

SEQ ID NO: 856390 - DNA, 33 bp, Homo sapien
gctgaatgctggataaggtgaggtttttgtaac

SEQ ID NO: 856391 - DNA, 33 bp, Homo sapien
tttctaaaatccctgacaaattcctagcaacta

SEQ ID NO: 856392 - DNA, 33 bp, Homo sapien
tttctaaaatccctgagaaattcctagcaacta

SEQ ID NO: 856393 - DNA, 33 bp, Homo sapien
gaggtgtatgaagaccaatcaaatggactcact

SEQ ID NO: 856394 - DNA, 33 bp, Homo sapien
gaggtgtatgaagaccgatcaaatggactcact

SEQ ID NO: 856395 - DNA, 33 bp, Homo sapien
acaacaataaagttccaaattgaaagatgtagg

SEQ ID NO: 856396 - DNA, 33 bp, Homo sapien
acaacaataaagttccgaattgaaagatgtagg

SEQ ID NO: 856397 - DNA, 33 bp, Homo sapien
acagttaaaaaacttaccatttcaattgctcca

SEQ ID NO: 856398 - DNA, 33 bp, Homo sapien
acagttaaaaaacttatcatttcaattgctcca

SEQ ID NO: 856399 - DNA, 33 bp, Homo sapien
ctcttgccacatatgaagttccggctttattcc

SEQ ID NO: 856400 - DNA, 33 bp, Homo sapien
ctcttgccacatatgatgttccggctttattcc

SEQ ID NO: 856401 - DNA, 33 bp, Homo sapien
gaaatacaataatctaacaggattggccttgag

SEQ ID NO: 856402 - DNA, 33 bp, Homo sapien
gaaatacaataatctagcaggattggccttgag

SEQ ID NO: 856403 - DNA, 33 bp, Homo sapien
acagagtcaacaagatgagcacactgaatgtgg

SEQ ID NO: 856404 - DNA, 33 bp, Homo sapien
acagagtcaacaagattagcacactgaatgtgg

SEQ ID NO: 856405 - DNA, 33 bp, Homo sapien
ctctgtattcaaaatggattcagaattcactac

SEQ ID NO: 856406 - DNA, 33 bp, Homo sapien
ctctgtattcaaaatgtattcagaattcactac

SEQ ID NO: 856407 - DNA, 33 bp, Homo sapien
gtattcaggagttgcaaaatttggaaagggatt

SEQ ID NO: 856408 - DNA, 33 bp, Homo sapien
gtattcaggagttgcagaatttggaaagggatt

SEQ ID NO: 856409 - DNA, 33 bp, Homo sapien
gagaaattggacactgaatttagaatcaaaatg

SEQ ID NO: 856410 - DNA, 33 bp, Homo sapien
gagaaattggacactggatttagaatcaaaatg

SEQ ID NO: 856411 - DNA, 33 bp, Homo sapien
tgccagcaataaaggccgaaattggatacttgg

SEQ ID NO: 856412 - DNA, 33 bp, Homo sapien
tgccagcaataaaggctgaaattggatacttgg

SEQ ID NO: 856413 - DNA, 33 bp, Homo sapien
ggatgtgagaaaatagcatgagatgtcaaaaca

SEQ ID NO: 856414 - DNA, 33 bp, Homo sapien
ggatgtgagaaaataggatgagatgtcaaaaca

SEQ ID NO: 856415 - DNA, 33 bp, Homo sapien
tgctaatactcttaaactcagcacccttaactc

SEQ ID NO: 856416 - DNA, 33 bp, Homo sapien
tgctaatactcttaaattcagcacccttaactc

SEQ ID NO: 856417 - DNA, 33 bp, Homo sapien
agtatagagtgttttaagttgcgtctcatattt

SEQ ID NO: 856418 - DNA, 33 bp, Homo sapien
agtatagagtgttttaggttgcgtctcatattt

SEQ ID NO: 856419 - DNA, 33 bp, Homo sapien
cagatgctcttaacatgagaaattgtgataaga

SEQ ID NO: 856420 - DNA, 33 bp, Homo sapien
cagatgctcttaacattagaaattgtgataaga

SEQ ID NO: 856421 - DNA, 33 bp, Homo sapien
attgcctggatttccaagtagcttttctgggag

SEQ ID NO: 856422 - DNA, 33 bp, Homo sapien
attgcctggatttccatgtagcttttctgggag

SEQ ID NO: 856423 - DNA, 33 bp, Homo sapien
ggtgaaagcgagaggtaaaccggttggcagacg

SEQ ID NO: 856424 - DNA, 33 bp, Homo sapien
ggtgaaagcgagaggtgaaccggttggcagacg

SEQ ID NO: 856425 - DNA, 33 bp, Homo sapien
caatgaggctaatgaacgatctggcaatataag

SEQ ID NO: 856426 - DNA, 33 bp, Homo sapien
caatgaggctaatgaaggatctggcaatataag

SEQ ID NO: 856427 - DNA, 33 bp, Homo sapien
acttaacaagactgataaaaactcagagaggcc

SEQ ID NO: 856428 - DNA, 33 bp, Homo sapien
acttaacaagactgatgaaaactcagagaggcc

SEQ ID NO: 856429 - DNA, 33 bp, Homo sapien
ccaccaccacaaccaccattacaactactaaca

SEQ ID NO: 856430 - DNA, 33 bp, Homo sapien
ccaccaccacaaccacgattacaactactaaca

SEQ ID NO: 856431 - DNA, 33 bp, Homo sapien
taccgtgtcagataatcaccttccgtgaaactc

SEQ ID NO: 856432 - DNA, 33 bp, Homo sapien
taccgtgtcagataattaccttccgtgaaactc

SEQ ID NO: 856433 - DNA, 33 bp, Homo sapien
atagattaagaacaagaagaatggtaccgccag

SEQ ID NO: 856434 - DNA, 33 bp, Homo sapien
atagattaagaacaaggagaatggtaccgccag

SEQ ID NO: 856435 - DNA, 33 bp, Homo sapien
ttagacctgtgctatacagtactgaacccagca

SEQ ID NO: 856436 - DNA, 33 bp, Homo sapien
ttagacctgtgctatatagtactgaacccagca

SEQ ID NO: 856437 - DNA, 33 bp, Homo sapien
tatacacagtctaataccatcaaaggtactcaa

SEQ ID NO: 856438 - DNA, 33 bp, Homo sapien
tatacacagtctaatatcatcaaaggtactcaa

SEQ ID NO: 856439 - DNA, 33 bp, Homo sapien
aaattataaatcaatgacaaccattttacagat

SEQ ID NO: 856440 - DNA, 33 bp, Homo sapien
aaattataaatcaatggcaaccattttacagat

SEQ ID NO: 856441 - DNA, 33 bp, Homo sapien
tgaaaaacctaaaaatcagtatcactgtgcagc

SEQ ID NO: 856442 - DNA, 33 bp, Homo sapien
tgaaaaacctaaaaatgagtatcactgtgcagc

SEQ ID NO: 856443 - DNA, 33 bp, Homo sapien
ttcttcaaagagaacaactgcatgccaagtcta

SEQ ID NO: 856444 - DNA, 33 bp, Homo sapien
ttcttcaaagagaacagctgcatgccaagtcta

SEQ ID NO: 856445 - DNA, 33 bp, Homo sapien
tactgtaagggaaatacaattgagcttaaaatt

SEQ ID NO: 856446 - DNA, 33 bp, Homo sapien
tactgtaagggaaatagaattgagcttaaaatt

SEQ ID NO: 856447 - DNA, 33 bp, Homo sapien
aatgcttggatctgtaagtgatggaagtagcct

SEQ ID NO: 856448 - DNA, 33 bp, Homo sapien
aatgcttggatctgtaggtgatggaagtagcct

SEQ ID NO: 856449 - DNA, 33 bp, Homo sapien
gaaatacacaattaacagatactgccttttaat

SEQ ID NO: 856450 - DNA, 33 bp, Homo sapien
gaaatacacaattaacggatactgccttttaat

SEQ ID NO: 856451 - DNA, 33 bp, Homo sapien
tcttctttctgtctcacgtatttgcttaccctt

SEQ ID NO: 856452 - DNA, 33 bp, Homo sapien
tcttctttctgtctcatgtatttgcttaccctt

SEQ ID NO: 856453 - DNA, 33 bp, Homo sapien
cacttccctcagatccactcaattgtcccttct

SEQ ID NO: 856454 - DNA, 33 bp, Homo sapien
cacttccctcagatccgctcaattgtcccttct

SEQ ID NO: 856455 - DNA, 33 bp, Homo sapien
catagggaaatgaccaaattgtaagaggatgga

SEQ ID NO: 856456 - DNA, 33 bp, Homo sapien
catagggaaatgaccatattgtaagaggatgga

SEQ ID NO: 856457 - DNA, 33 bp, Homo sapien
ttatgggaaagtaaaacggatcaggcactatgg

SEQ ID NO: 856458 - DNA, 33 bp, Homo sapien
ttatgggaaagtaaaatggatcaggcactatgg

SEQ ID NO: 856459 - DNA, 33 bp, Homo sapien
tagtagttgccaacctaaaagtacagaagagtg

SEQ ID NO: 856460 - DNA, 33 bp, Homo sapien
tagtagttgccaacctgaaagtacagaagagtg

SEQ ID NO: 856461 - DNA, 33 bp, Homo sapien
catgtagttggaaataacctctcttcttctagc

SEQ ID NO: 856462 - DNA, 33 bp, Homo sapien
catgtagttggaaatatcctctcttcttctagc

SEQ ID NO: 856463 - DNA, 33 bp, Homo sapien
ggtttatttcaagtccacatctatcctcatatt

SEQ ID NO: 856464 - DNA, 33 bp, Homo sapien
ggtttatttcaagtcctcatctatcctcatatt

SEQ ID NO: 856465 - DNA, 33 bp, Homo sapien
ggtttggaatggtccaagagcacataaaggctg

SEQ ID NO: 856466 - DNA, 33 bp, Homo sapien
ggtttggaatggtccaggagcacataaaggctg

SEQ ID NO: 856467 - DNA, 33 bp, Homo sapien
ccgttccagtgagggcaacttttcacattactg

SEQ ID NO: 856468 - DNA, 33 bp, Homo sapien
ccgttccagtgagggccacttttcacattactg

SEQ ID NO: 856469 - DNA, 33 bp, Homo sapien
tatttaaagcatacaggagaagatgtgtaggca

SEQ ID NO: 856470 - DNA, 33 bp, Homo sapien
tatttaaagcatacagtagaagatgtgtaggca

SEQ ID NO: 856471 - DNA, 33 bp, Homo sapien
tgctgtcgtccctctcaaaatttccttgccttg

SEQ ID NO: 856472 - DNA, 33 bp, Homo sapien
tgctgtcgtccctctcgaaatttccttgccttg

SEQ ID NO: 856473 - DNA, 33 bp, Homo sapien
acataatggatcacaaacaggaacactggttaa

SEQ ID NO: 856474 - DNA, 33 bp, Homo sapien
acataatggatcacaagcaggaacactggttaa

SEQ ID NO: 856475 - DNA, 33 bp, Homo sapien
tgtgtagtcgtttggaagtcctaattcaaagga

SEQ ID NO: 856476 - DNA, 33 bp, Homo sapien
tgtgtagtcgtttggaggtcctaattcaaagga

SEQ ID NO: 856477 - DNA, 33 bp, Homo sapien
caaagctgggcttctacctctgtaaaagtcagg

SEQ ID NO: 856478 - DNA, 33 bp, Homo sapien
caaagctgggcttctatctctgtaaaagtcagg

SEQ ID NO: 856479 - DNA, 33 bp, Homo sapien
ctcattttcacctctcaataagacagagccttt

SEQ ID NO: 856480 - DNA, 33 bp, Homo sapien
ctcattttcacctctcgataagacagagccttt

SEQ ID NO: 856481 - DNA, 33 bp, Homo sapien
gttaaaaaagaaacaacgatgcaagagagtgca

SEQ ID NO: 856482 - DNA, 33 bp, Homo sapien
gttaaaaaagaaacaatgatgcaagagagtgca

SEQ ID NO: 856483 - DNA, 33 bp, Homo sapien
atcagacggtgaggtcccatcaagatatgataa

SEQ ID NO: 856484 - DNA, 33 bp, Homo sapien
atcagacggtgaggtcgcatcaagatatgataa

SEQ ID NO: 856485 - DNA, 33 bp, Homo sapien
tactggtagtgagtctcaacacatatatgtccc

SEQ ID NO: 856486 - DNA, 33 bp, Homo sapien
tactggtagtgagtcttaacacatatatgtccc

SEQ ID NO: 856487 - DNA, 33 bp, Homo sapien
tcacaacaagcttccacgaaaagcatcaataat

SEQ ID NO: 856488 - DNA, 33 bp, Homo sapien
tcacaacaagcttccatgaaaagcatcaataat

SEQ ID NO: 856489 - DNA, 33 bp, Homo sapien
gacatcataaaaggtaacattcctagtggctaa

SEQ ID NO: 856490 - DNA, 33 bp, Homo sapien
gacatcataaaaggtagcattcctagtggctaa

SEQ ID NO: 856491 - DNA, 33 bp, Homo sapien
atgagggtagtgatcaaatttcttttagccaga

SEQ ID NO: 856492 - DNA, 33 bp, Homo sapien
atgagggtagtgatcatatttcttttagccaga

SEQ ID NO: 856493 - DNA, 33 bp, Homo sapien
taagccaggataatgaagtcctgcactaattca

SEQ ID NO: 856494 - DNA, 33 bp, Homo sapien
taagccaggataatgaggtcctgcactaattca

SEQ ID NO: 856495 - DNA, 33 bp, Homo sapien
gatggttatgttaatgcaatcgttctcatagtt

SEQ ID NO: 856496 - DNA, 33 bp, Homo sapien
gatggttatgttaatgtaatcgttctcatagtt

SEQ ID NO: 856497 - DNA, 33 bp, Homo sapien
cacctgttctttaccacgcacttctcttcacca

SEQ ID NO: 856498 - DNA, 33 bp, Homo sapien
cacctgttctttaccatgcacttctcttcacca

SEQ ID NO: 856499 - DNA, 33 bp, Homo sapien
tgcacatagctccagtaaaaacatgacaaaaac

SEQ ID NO: 856500 - DNA, 33 bp, Homo sapien
tgcacatagctccagtcaaaacatgacaaaaac

SEQ ID NO: 856501 - DNA, 33 bp, Homo sapien
gttgtcatgaaataaggctcctatatcagtggt

SEQ ID NO: 856502 - DNA, 33 bp, Homo sapien
gttgtcatgaaataagtctcctatatcagtggt

SEQ ID NO: 856503 - DNA, 33 bp, Homo sapien
tctttctctgtatgtacattctgcttctcattt

SEQ ID NO: 856504 - DNA, 33 bp, Homo sapien
tctttctctgtatgtatattctgcttctcattt

SEQ ID NO: 856505 - DNA, 33 bp, Homo sapien
acactgatgacctatagaagaaagaggaatgtt

SEQ ID NO: 856506 - DNA, 33 bp, Homo sapien
acactgatgacctatataagaaagaggaatgtt

SEQ ID NO: 856507 - DNA, 33 bp, Homo sapien
accagcattagtgaataaggcatatccaatttg

SEQ ID NO: 856508 - DNA, 33 bp, Homo sapien
accagcattagtgaatgaggcatatccaatttg

SEQ ID NO: 856509 - DNA, 33 bp, Homo sapien
atatacacatgcagtcgctatttgaagggtata

SEQ ID NO: 856510 - DNA, 33 bp, Homo sapien
atatacacatgcagtctctatttgaagggtata

SEQ ID NO: 856511 - DNA, 33 bp, Homo sapien
agaattagaactatcaagtcttcctgaacatac

SEQ ID NO: 856512 - DNA, 33 bp, Homo sapien
agaattagaactatcaggtcttcctgaacatac

SEQ ID NO: 856513 - DNA, 33 bp, Homo sapien
tcatggtgtacatccaatctttctactccttta

SEQ ID NO: 856514 - DNA, 33 bp, Homo sapien
tcatggtgtacatccagtctttctactccttta

SEQ ID NO: 856515 - DNA, 33 bp, Homo sapien
ttttcatacctacttccacattcggtctgttgc

SEQ ID NO: 856516 - DNA, 33 bp, Homo sapien
ttttcatacctacttctacattcggtctgttgc

SEQ ID NO: 856517 - DNA, 33 bp, Homo sapien
taaagcctacccacctaaagtcacacaaatata

SEQ ID NO: 856518 - DNA, 33 bp, Homo sapien
taaagcctacccacctcaagtcacacaaatata

SEQ ID NO: 856519 - DNA, 33 bp, Homo sapien
tgtagttttcttgaccaacaaaatgtggtgtaa

SEQ ID NO: 856520 - DNA, 33 bp, Homo sapien
tgtagttttcttgaccgacaaaatgtggtgtaa

SEQ ID NO: 856521 - DNA, 33 bp, Homo sapien
attttcctcattctaactgttactcacagatta

SEQ ID NO: 856522 - DNA, 33 bp, Homo sapien
attttcctcattctaattgttactcacagatta

SEQ ID NO: 856523 - DNA, 33 bp, Homo sapien
cataggtggccagggaaaaaaatagcaacaggg

SEQ ID NO: 856524 - DNA, 33 bp, Homo sapien
cataggtggccagggagaaaaatagcaacaggg

SEQ ID NO: 856525 - DNA, 33 bp, Homo sapien
cacctatgttggcaatcatgctttgcagtttct

SEQ ID NO: 856526 - DNA, 33 bp, Homo sapien
cacctatgttggcaattatgctttgcagtttct

SEQ ID NO: 856527 - DNA, 33 bp, Homo sapien
cttcacctcctcaaacccagattattttctgta

SEQ ID NO: 856528 - DNA, 33 bp, Homo sapien
cttcacctcctcaaacgcagattattttctgta

SEQ ID NO: 856529 - DNA, 33 bp, Homo sapien
ggaagatctcaacactcaaagaataatcctgct

SEQ ID NO: 856530 - DNA, 33 bp, Homo sapien
ggaagatctcaacactgaaagaataatcctgct

SEQ ID NO: 856531 - DNA, 33 bp, Homo sapien
tggtagcccttggaaactagtagattgaagagg

SEQ ID NO: 856532 - DNA, 33 bp, Homo sapien
tggtagcccttggaaagtagtagattgaagagg

SEQ ID NO: 856533 - DNA, 33 bp, Homo sapien
atactctatagcacaaagtgaagatacaaatat

SEQ ID NO: 856534 - DNA, 33 bp, Homo sapien
atactctatagcacaaggtgaagatacaaatat

SEQ ID NO: 856535 - DNA, 33 bp, Homo sapien
tggtggcataaaattgcacacataccacgagaa

SEQ ID NO: 856536 - DNA, 33 bp, Homo sapien
tggtggcataaaattgtacacataccacgagaa

SEQ ID NO: 856537 - DNA, 33 bp, Homo sapien
gggcaatagggcgaaactccatctccaaaaaaa

SEQ ID NO: 856538 - DNA, 33 bp, Homo sapien
gggcaatagggcgaaattccatctccaaaaaaa

SEQ ID NO: 856539 - DNA, 33 bp, Homo sapien
cctttagtgagtcgtaacatttcctggtggggt

SEQ ID NO: 856540 - DNA, 33 bp, Homo sapien
cctttagtgagtcgtagcatttcctggtggggt

SEQ ID NO: 856541 - DNA, 33 bp, Homo sapien
agagagaaaagagacactcaggtaaattcttca

SEQ ID NO: 856542 - DNA, 33 bp, Homo sapien
agagagaaaagagacattcaggtaaattcttca

SEQ ID NO: 856543 - DNA, 33 bp, Homo sapien
acagagagcctattacaaaattcacaaagaaac

SEQ ID NO: 856544 - DNA, 33 bp, Homo sapien
acagagagcctattacgaaattcacaaagaaac

SEQ ID NO: 856545 - DNA, 33 bp, Homo sapien
gagattttgataaagcagagaagaacaagaaat

SEQ ID NO: 856546 - DNA, 33 bp, Homo sapien
gagattttgataaagcggagaagaacaagaaat

SEQ ID NO: 856547 - DNA, 33 bp, Homo sapien
aactcacagtatcctacgataatttttgcttta

SEQ ID NO: 856548 - DNA, 33 bp, Homo sapien
aactcacagtatcctatgataatttttgcttta

SEQ ID NO: 856549 - DNA, 33 bp, Homo sapien
tcaaatttgattaaaaacattagcaccttcatt

SEQ ID NO: 856550 - DNA, 33 bp, Homo sapien
tcaaatttgattaaaagcattagcaccttcatt

SEQ ID NO: 856551 - DNA, 33 bp, Homo sapien
cttatctttgttttaacctgatgctttttcaaa

SEQ ID NO: 856552 - DNA, 33 bp, Homo sapien
cttatctttgttttaatctgatgctttttcaaa

SEQ ID NO: 856553 - DNA, 33 bp, Homo sapien
aagaaggggtcaaatgaacaattattaaaaatg

SEQ ID NO: 856554 - DNA, 33 bp, Homo sapien
aagaaggggtcaaatggacaattattaaaaatg

SEQ ID NO: 856555 - DNA, 33 bp, Homo sapien
gcaaataggttttgaggaatgatagcatcagtg

SEQ ID NO: 856556 - DNA, 33 bp, Homo sapien
gcaaataggttttgagtaatgatagcatcagtg

SEQ ID NO: 856557 - DNA, 33 bp, Homo sapien
agagcagggattacccagaaaccagcaccggga

SEQ ID NO: 856558 - DNA, 33 bp, Homo sapien
agagcagggattacccggaaaccagcaccggga

SEQ ID NO: 856559 - DNA, 33 bp, Homo sapien
ggagagaatttaaagagcagtgataaaaagaca

SEQ ID NO: 856560 - DNA, 33 bp, Homo sapien
ggagagaatttaaagatcagtgataaaaagaca

SEQ ID NO: 856561 - DNA, 33 bp, Homo sapien
ttgtcaactacctaacaagcaaattttgggaaa

SEQ ID NO: 856562 - DNA, 33 bp, Homo sapien
ttgtcaactacctaacgagcaaattttgggaaa

SEQ ID NO: 856563 - DNA, 33 bp, Homo sapien
aaattatgaggttaaaaaattgcctgttgtttg

SEQ ID NO: 856564 - DNA, 33 bp, Homo sapien
aaattatgaggttaaagaattgcctgttgtttg

SEQ ID NO: 856565 - DNA, 33 bp, Homo sapien
tattggaactgtattccctctattcctagctgt

SEQ ID NO: 856566 - DNA, 33 bp, Homo sapien
tattggaactgtattctctctattcctagctgt

SEQ ID NO: 856567 - DNA, 33 bp, Homo sapien
aaaatttggaatcagacagatttgcactcaaat

SEQ ID NO: 856568 - DNA, 33 bp, Homo sapien
aaaatttggaatcagagagatttgcactcaaat

SEQ ID NO: 856569 - DNA, 33 bp, Homo sapien
atgttactccacataaatgggctttaaataaag

SEQ ID NO: 856570 - DNA, 33 bp, Homo sapien
atgttactccacataagtgggctttaaataaag

SEQ ID NO: 856571 - DNA, 33 bp, Homo sapien
gctcaggctagacttaagtgatgtaatcccagc

SEQ ID NO: 856572 - DNA, 33 bp, Homo sapien
gctcaggctagacttacgtgatgtaatcccagc

SEQ ID NO: 856573 - DNA, 33 bp, Homo sapien
taatgatctgtgggagaaaagcaattctattat

SEQ ID NO: 856574 - DNA, 33 bp, Homo sapien
taatgatctgtgggaggaaagcaattctattat

SEQ ID NO: 856575 - DNA, 33 bp, Homo sapien
gctagacatgaaagaacgtgtgggaactcaaca

SEQ ID NO: 856576 - DNA, 33 bp, Homo sapien
gctagacatgaaagaatgtgtgggaactcaaca

SEQ ID NO: 856577 - DNA, 33 bp, Homo sapien
ttcagttcttgcttgaaccaggaaaaaaaaatt

SEQ ID NO: 856578 - DNA, 33 bp, Homo sapien
ttcagttcttgcttgatccaggaaaaaaaaatt

SEQ ID NO: 856579 - DNA, 33 bp, Homo sapien
ttcatctttaacaccaacttgtctcttcttaaa

SEQ ID NO: 856580 - DNA, 33 bp, Homo sapien
ttcatctttaacaccatcttgtctcttcttaaa

SEQ ID NO: 856581 - DNA, 33 bp, Homo sapien
ttttctttggaatttgaatgagtgggagacaca

SEQ ID NO: 856582 - DNA, 33 bp, Homo sapien
ttttctttggaatttggatgagtgggagacaca

SEQ ID NO: 856583 - DNA, 33 bp, Homo sapien
atctgcctaagatccaaaaccaccaaagagaac

SEQ ID NO: 856584 - DNA, 33 bp, Homo sapien
atctgcctaagatccagaaccaccaaagagaac

SEQ ID NO: 856585 - DNA, 33 bp, Homo sapien
ataaaaaaggctatcacgttgttcaataaattc

SEQ ID NO: 856586 - DNA, 33 bp, Homo sapien
ataaaaaaggctatcatgttgttcaataaattc

SEQ ID NO: 856587 - DNA, 33 bp, Homo sapien
cgagaatatttactaaccacgactcagccccat

SEQ ID NO: 856588 - DNA, 33 bp, Homo sapien
cgagaatatttactaatcacgactcagccccat

SEQ ID NO: 856589 - DNA, 33 bp, Homo sapien
taagattagtaccaaaatctgttgcctgcaata

SEQ ID NO: 856590 - DNA, 33 bp, Homo sapien
taagattagtaccaaagtctgttgcctgcaata

SEQ ID NO: 856591 - DNA, 33 bp, Homo sapien
tttgttgtctaatcaccgcttccttagatgagg

SEQ ID NO: 856592 - DNA, 33 bp, Homo sapien
tttgttgtctaatcactgcttccttagatgagg

SEQ ID NO: 856593 - DNA, 33 bp, Homo sapien
tgtatgtattcgaactgagaactcaaaatttta

SEQ ID NO: 856594 - DNA, 33 bp, Homo sapien
tgtatgtattcgaacttagaactcaaaatttta

SEQ ID NO: 856595 - DNA, 33 bp, Homo sapien
actgagacacgaattacaaacaaaaagtggcat

SEQ ID NO: 856596 - DNA, 33 bp, Homo sapien
actgagacacgaattagaaacaaaaagtggcat

SEQ ID NO: 856597 - DNA, 33 bp, Homo sapien
tgactgagctccagtaagtggcaactgactttt

SEQ ID NO: 856598 - DNA, 33 bp, Homo sapien
tgactgagctccagtaggtggcaactgactttt

SEQ ID NO: 856599 - DNA, 33 bp, Homo sapien
ggagttctaacaattagatacctcagtggtaac

SEQ ID NO: 856600 - DNA, 33 bp, Homo sapien
ggagttctaacaattatatacctcagtggtaac

SEQ ID NO: 856601 - DNA, 33 bp, Homo sapien
atgcatggaaacaaaacgtctgcttcttcagat

SEQ ID NO: 856602 - DNA, 33 bp, Homo sapien
atgcatggaaacaaaatgtctgcttcttcagat

SEQ ID NO: 856603 - DNA, 33 bp, Homo sapien
gctgctaataagcttccccttggttacacagcc

SEQ ID NO: 856604 - DNA, 33 bp, Homo sapien
gctgctaataagcttctccttggttacacagcc

SEQ ID NO: 856605 - DNA, 33 bp, Homo sapien
aacagcctttaatatcacttgcttcctctcaaa

SEQ ID NO: 856606 - DNA, 33 bp, Homo sapien
aacagcctttaatatcgcttgcttcctctcaaa

SEQ ID NO: 856607 - DNA, 33 bp, Homo sapien
ctagccagtgctaaaactattaaaaataactta

SEQ ID NO: 856608 - DNA, 33 bp, Homo sapien
ctagccagtgctaaaattattaaaaataactta

SEQ ID NO: 856609 - DNA, 33 bp, Homo sapien
ttaagtatgggaataacctgtacatatttacat

SEQ ID NO: 856610 - DNA, 33 bp, Homo sapien
ttaagtatgggaataatctgtacatatttacat

SEQ ID NO: 856611 - DNA, 33 bp, Homo sapien
aaagagaaaaaaatacaaatgctggagaaaagg

SEQ ID NO: 856612 - DNA, 33 bp, Homo sapien
aaagagaaaaaaatactaatgctggagaaaagg

SEQ ID NO: 856613 - DNA, 33 bp, Homo sapien
caaccaaagattcctaagccagaacaaaatgtt

SEQ ID NO: 856614 - DNA, 33 bp, Homo sapien
caaccaaagattcctaggccagaacaaaatgtt

SEQ ID NO: 856615 - DNA, 33 bp, Homo sapien
acacatctctttaataggcaccagtatatattg

SEQ ID NO: 856616 - DNA, 33 bp, Homo sapien
acacatctctttaatatgcaccagtatatattg

SEQ ID NO: 856617 - DNA, 33 bp, Homo sapien
gactatagtgctatcaaatactaagcatttagt

SEQ ID NO: 856618 - DNA, 33 bp, Homo sapien
gactatagtgctatcatatactaagcatttagt

SEQ ID NO: 856619 - DNA, 33 bp, Homo sapien
agaagaaggaaatcaccataggaaaattaggta

SEQ ID NO: 856620 - DNA, 33 bp, Homo sapien
agaagaaggaaatcactataggaaaattaggta

SEQ ID NO: 856621 - DNA, 33 bp, Homo sapien
tcttaggattcaataacatttcaggatacatcc

SEQ ID NO: 856622 - DNA, 33 bp, Homo sapien
tcttaggattcaataatatttcaggatacatcc

SEQ ID NO: 856623 - DNA, 33 bp, Homo sapien
tgaatgtgtggacctactacagggtgacttttt

SEQ ID NO: 856624 - DNA, 33 bp, Homo sapien
tgaatgtgtggacctattacagggtgacttttt

SEQ ID NO: 856625 - DNA, 33 bp, Homo sapien
aacttaagatcaacaacccagtacgagaaaact

SEQ ID NO: 856626 - DNA, 33 bp, Homo sapien
aacttaagatcaacaatccagtacgagaaaact

SEQ ID NO: 856627 - DNA, 33 bp, Homo sapien
tttctgggccagagagcatcttgaaatgtcatc

SEQ ID NO: 856628 - DNA, 33 bp, Homo sapien
tttctgggccagagagtatcttgaaatgtcatc

SEQ ID NO: 856629 - DNA, 33 bp, Homo sapien
agctatccaccatgaaagaaggaacagtgagct

SEQ ID NO: 856630 - DNA, 33 bp, Homo sapien
agctatccaccatgaaggaaggaacagtgagct

SEQ ID NO: 856631 - DNA, 33 bp, Homo sapien
ctaaatgcccatcaaaagatgtgtggataaaga

SEQ ID NO: 856632 - DNA, 33 bp, Homo sapien
ctaaatgcccatcaaaggatgtgtggataaaga

SEQ ID NO: 856633 - DNA, 33 bp, Homo sapien
ttcatacgtggctcaaccagaacattcaggtaa

SEQ ID NO: 856634 - DNA, 33 bp, Homo sapien
ttcatacgtggctcaatcagaacattcaggtaa

SEQ ID NO: 856635 - DNA, 33 bp, Homo sapien
gggtattatccactccaagctgaatgctctgtt

SEQ ID NO: 856636 - DNA, 33 bp, Homo sapien
gggtattatccactccgagctgaatgctctgtt

SEQ ID NO: 856637 - DNA, 33 bp, Homo sapien
atttggcatcatttaaggtctctatgcaataat

SEQ ID NO: 856638 - DNA, 33 bp, Homo sapien
atttggcatcatttaatgtctctatgcaataat

SEQ ID NO: 856639 - DNA, 33 bp, Homo sapien
gttttggcaagccaaacgtcacacaatattgaa

SEQ ID NO: 856640 - DNA, 33 bp, Homo sapien
gttttggcaagccaaatgtcacacaatattgaa

SEQ ID NO: 856641 - DNA, 33 bp, Homo sapien
tactctactccattgaaataagacaggcatttt

SEQ ID NO: 856642 - DNA, 33 bp, Homo sapien
tactctactccattgatataagacaggcatttt

SEQ ID NO: 856643 - DNA, 33 bp, Homo sapien
agactcttcactgttaaaaatctactttttcat

SEQ ID NO: 856644 - DNA, 33 bp, Homo sapien
agactcttcactgttagaaatctactttttcat

SEQ ID NO: 856645 - DNA, 33 bp, Homo sapien
acttttatgttcagagcccctctagccagctgt

SEQ ID NO: 856646 - DNA, 33 bp, Homo sapien
acttttatgttcagagtccctctagccagctgt

SEQ ID NO: 856647 - DNA, 33 bp, Homo sapien
aatagatttgatgtcacaagtaataggattatt

SEQ ID NO: 856648 - DNA, 33 bp, Homo sapien
aatagatttgatgtcataagtaataggattatt

SEQ ID NO: 856649 - DNA, 33 bp, Homo sapien
ttatgcctgctatacacggtagtatctgtaaat

SEQ ID NO: 856650 - DNA, 33 bp, Homo sapien
ttatgcctgctatacatggtagtatctgtaaat

SEQ ID NO: 856651 - DNA, 33 bp, Homo sapien
gaatattatacaacaacgaaaatgagccacaat

SEQ ID NO: 856652 - DNA, 33 bp, Homo sapien
gaatattatacaacaatgaaaatgagccacaat

SEQ ID NO: 856653 - DNA, 33 bp, Homo sapien
gctataattgctgataaatgtttcatgtaaaaa

SEQ ID NO: 856654 - DNA, 33 bp, Homo sapien
gctataattgctgatatatgtttcatgtaaaaa

SEQ ID NO: 856655 - DNA, 33 bp, Homo sapien
cagcaggtggattttcgaggcattgtgcttgga

SEQ ID NO: 856656 - DNA, 33 bp, Homo sapien
cagcaggtggattttctaggcattgtgcttgga

SEQ ID NO: 856657 - DNA, 33 bp, Homo sapien
acactgttcttatatccgaacccaggctccaac

SEQ ID NO: 856658 - DNA, 33 bp, Homo sapien
acactgttcttatatctgaacccaggctccaac

SEQ ID NO: 856659 - DNA, 33 bp, Homo sapien
ttatacagtgaattcgaaagcgtagtagtttca

SEQ ID NO: 856660 - DNA, 33 bp, Homo sapien
ttatacagtgaattcggaagcgtagtagtttca

SEQ ID NO: 856661 - DNA, 33 bp, Homo sapien
agagatagatgacttacaggaaacttgggctac

SEQ ID NO: 856662 - DNA, 33 bp, Homo sapien
agagatagatgacttataggaaacttgggctac

SEQ ID NO: 856663 - DNA, 33 bp, Homo sapien
agatcaaattctgtaaaaatagttgtacatgaa

SEQ ID NO: 856664 - DNA, 33 bp, Homo sapien
agatcaaattctgtaataatagttgtacatgaa

SEQ ID NO: 856665 - DNA, 33 bp, Homo sapien
aaatagaagtgtttaaaagactatgacactctc

SEQ ID NO: 856666 - DNA, 33 bp, Homo sapien
aaatagaagtgtttaacagactatgacactctc

SEQ ID NO: 856667 - DNA, 33 bp, Homo sapien
tgaataaacttcaaagacatggttttcaaaagg

SEQ ID NO: 856668 - DNA, 33 bp, Homo sapien
tgaataaacttcaaaggcatggttttcaaaagg

SEQ ID NO: 856669 - DNA, 33 bp, Homo sapien
tcccaaaattgatcacaaaacttcatatactct

SEQ ID NO: 856670 - DNA, 33 bp, Homo sapien
tcccaaaattgatcacgaaacttcatatactct

SEQ ID NO: 856671 - DNA, 33 bp, Homo sapien
aggggaagaagactatcacatcctggagaccaa

SEQ ID NO: 856672 - DNA, 33 bp, Homo sapien
aggggaagaagactattacatcctggagaccaa

SEQ ID NO: 856673 - DNA, 33 bp, Homo sapien
aactcgaatctcaaaaagccagtgtgttccctt

SEQ ID NO: 856674 - DNA, 33 bp, Homo sapien
aactcgaatctcaaaaggccagtgtgttccctt

SEQ ID NO: 856675 - DNA, 33 bp, Homo sapien
atacagttagaagcatcaacattagactagatc

SEQ ID NO: 856676 - DNA, 33 bp, Homo sapien
atacagttagaagcatgaacattagactagatc

SEQ ID NO: 856677 - DNA, 33 bp, Homo sapien
gatgggaagaaaatgaacatatggcccatatta

SEQ ID NO: 856678 - DNA, 33 bp, Homo sapien
gatgggaagaaaatgaccatatggcccatatta

SEQ ID NO: 856679 - DNA, 33 bp, Homo sapien
tagttcctgcattttccctagtaatcaattgat

SEQ ID NO: 856680 - DNA, 33 bp, Homo sapien
tagttcctgcattttctctagtaatcaattgat

SEQ ID NO: 856681 - DNA, 33 bp, Homo sapien
tggaacctgaaaccaagttaggcaaaaaagacc

SEQ ID NO: 856682 - DNA, 33 bp, Homo sapien
tggaacctgaaaccaatttaggcaaaaaagacc

SEQ ID NO: 856683 - DNA, 33 bp, Homo sapien
cattcatcctgacaatcaaaagtggttcttaaa

SEQ ID NO: 856684 - DNA, 33 bp, Homo sapien
cattcatcctgacaatgaaaagtggttcttaaa

SEQ ID NO: 856685 - DNA, 33 bp, Homo sapien
cttggatggtatcttacactctactcagtatct

SEQ ID NO: 856686 - DNA, 33 bp, Homo sapien
cttggatggtatcttatactctactcagtatct

SEQ ID NO: 856687 - DNA, 33 bp, Homo sapien
gaagacaatagctatgcagagtcaacataagga

SEQ ID NO: 856688 - DNA, 33 bp, Homo sapien
gaagacaatagctatggagagtcaacataagga

SEQ ID NO: 856689 - DNA, 33 bp, Homo sapien
ctaacctatagggaacaacaagcaactgtttgt

SEQ ID NO: 856690 - DNA, 33 bp, Homo sapien
ctaacctatagggaacgacaagcaactgtttgt

SEQ ID NO: 856691 - DNA, 33 bp, Homo sapien
tcctaggtttcacaaagagcacctcacttacaa

SEQ ID NO: 856692 - DNA, 33 bp, Homo sapien
tcctaggtttcacaaatagcacctcacttacaa

SEQ ID NO: 856693 - DNA, 33 bp, Homo sapien
atgacactagaagtcaaaaagtaaagaagacag

SEQ ID NO: 856694 - DNA, 33 bp, Homo sapien
atgacactagaagtcacaaagtaaagaagacag

SEQ ID NO: 856695 - DNA, 33 bp, Homo sapien
tttaggcttgttatcacgcggactatcaaatta

SEQ ID NO: 856696 - DNA, 33 bp, Homo sapien
tttaggcttgttatcatgcggactatcaaatta

SEQ ID NO: 856697 - DNA, 33 bp, Homo sapien
aagatttaatttcaagaatcagaacatagaaat

SEQ ID NO: 856698 - DNA, 33 bp, Homo sapien
aagatttaatttcaaggatcagaacatagaaat

SEQ ID NO: 856699 - DNA, 33 bp, Homo sapien
gcttactaaagaaggagagaagtcaggaaaaaa

SEQ ID NO: 856700 - DNA, 33 bp, Homo sapien
gcttactaaagaaggatagaagtcaggaaaaaa

SEQ ID NO: 856701 - DNA, 33 bp, Homo sapien
tagatacaagggacgacgagtctttgaactaag

SEQ ID NO: 856702 - DNA, 33 bp, Homo sapien
tagatacaagggacgatgagtctttgaactaag

SEQ ID NO: 856703 - DNA, 33 bp, Homo sapien
ctttggaattaggcataagttctcaaatagcag

SEQ ID NO: 856704 - DNA, 33 bp, Homo sapien
ctttggaattaggcattagttctcaaatagcag

SEQ ID NO: 856705 - DNA, 33 bp, Homo sapien
tgcagcttttactcagaagaagaacactgcatg

SEQ ID NO: 856706 - DNA, 33 bp, Homo sapien
tgcagcttttactcagcagaagaacactgcatg

SEQ ID NO: 856707 - DNA, 33 bp, Homo sapien
tgttttcctgccctaagactggcatttacacaa

SEQ ID NO: 856708 - DNA, 33 bp, Homo sapien
tgttttcctgccctaatactggcatttacacaa

SEQ ID NO: 856709 - DNA, 33 bp, Homo sapien
cacatacatgcacattaaaattaagttgatgtt

SEQ ID NO: 856710 - DNA, 33 bp, Homo sapien
cacatacatgcacattgaaattaagttgatgtt

SEQ ID NO: 856711 - DNA, 33 bp, Homo sapien
tttatcttcttgcctaacaaatattttccccat

SEQ ID NO: 856712 - DNA, 33 bp, Homo sapien
tttatcttcttgcctagcaaatattttccccat

SEQ ID NO: 856713 - DNA, 33 bp, Homo sapien
ttgtagtcttagccaaagtgtatgtccctaatt

SEQ ID NO: 856714 - DNA, 33 bp, Homo sapien
ttgtagtcttagccaaggtgtatgtccctaatt

SEQ ID NO: 856715 - DNA, 33 bp, Homo sapien
aacccccattacattacacaagagatgcagcac

SEQ ID NO: 856716 - DNA, 33 bp, Homo sapien
aacccccattacattatacaagagatgcagcac

SEQ ID NO: 856717 - DNA, 33 bp, Homo sapien
tcctctcatctctaggccatacccagacttgaa

SEQ ID NO: 856718 - DNA, 33 bp, Homo sapien
tcctctcatctctaggtcatacccagacttgaa

SEQ ID NO: 856719 - DNA, 33 bp, Homo sapien
ttatattacagcaacactaccatttgcaattat

SEQ ID NO: 856720 - DNA, 33 bp, Homo sapien
ttatattacagcaacagtaccatttgcaattat

SEQ ID NO: 856721 - DNA, 33 bp, Homo sapien
agaggaatgagctgtacccttagttggcacact

SEQ ID NO: 856722 - DNA, 33 bp, Homo sapien
agaggaatgagctgtatccttagttggcacact

SEQ ID NO: 856723 - DNA, 33 bp, Homo sapien
cattaaaattgtctcaacttgcattgttatgca

SEQ ID NO: 856724 - DNA, 33 bp, Homo sapien
cattaaaattgtctcagcttgcattgttatgca

SEQ ID NO: 856725 - DNA, 33 bp, Homo sapien
aaaggtatagaaatgcactctggtcaattattt

SEQ ID NO: 856726 - DNA, 33 bp, Homo sapien
aaaggtatagaaatgctctctggtcaattattt

SEQ ID NO: 856727 - DNA, 33 bp, Homo sapien
taagcaatacaccaaaaacttcagagggacatg

SEQ ID NO: 856728 - DNA, 33 bp, Homo sapien
taagcaatacaccaaagacttcagagggacatg

SEQ ID NO: 856729 - DNA, 33 bp, Homo sapien
gaagtgcagtatcttagccttgtgtgctgaatt

SEQ ID NO: 856730 - DNA, 33 bp, Homo sapien
gaagtgcagtatcttatccttgtgtgctgaatt

SEQ ID NO: 856731 - DNA, 33 bp, Homo sapien
ttaacctgaagtttgcaacccagtaggatattt

SEQ ID NO: 856732 - DNA, 33 bp, Homo sapien
ttaacctgaagtttgccacccagtaggatattt

SEQ ID NO: 856733 - DNA, 33 bp, Homo sapien
attgttcatctttggacatcttagttcagggca

SEQ ID NO: 856734 - DNA, 33 bp, Homo sapien
attgttcatctttggagatcttagttcagggca

SEQ ID NO: 856735 - DNA, 33 bp, Homo sapien
ggaaaagtccagtcacactgtccaagagtcaag

SEQ ID NO: 856736 - DNA, 33 bp, Homo sapien
ggaaaagtccagtcacgctgtccaagagtcaag

SEQ ID NO: 856737 - DNA, 33 bp, Homo sapien
tataatgttttcattaagactttgagtagataa

SEQ ID NO: 856738 - DNA, 33 bp, Homo sapien
tataatgttttcattaggactttgagtagataa

SEQ ID NO: 856739 - DNA, 33 bp, Homo sapien
ctgtcttgggtgctcacgcctcttactatgtat

SEQ ID NO: 856740 - DNA, 33 bp, Homo sapien
ctgtcttgggtgctcatgcctcttactatgtat

SEQ ID NO: 856741 - DNA, 33 bp, Homo sapien
ggcaagacactctttaacactctgcattgtaaa

SEQ ID NO: 856742 - DNA, 33 bp, Homo sapien
ggcaagacactctttatcactctgcattgtaaa

SEQ ID NO: 856743 - DNA, 33 bp, Homo sapien
tatatccaacaccgaccgaaacaaatggaatgt

SEQ ID NO: 856744 - DNA, 33 bp, Homo sapien
tatatccaacaccgactgaaacaaatggaatgt

SEQ ID NO: 856745 - DNA, 33 bp, Homo sapien
tatgggtcagaggcaaaggattgtaatatttat

SEQ ID NO: 856746 - DNA, 33 bp, Homo sapien
tatgggtcagaggcaacggattgtaatatttat

SEQ ID NO: 856747 - DNA, 33 bp, Homo sapien
ttacagatgcggaatcggatgatgtattttgtt

SEQ ID NO: 856748 - DNA, 33 bp, Homo sapien
ttacagatgcggaatctgatgatgtattttgtt

SEQ ID NO: 856749 - DNA, 33 bp, Homo sapien
agcggactcttactggaattaaagaaacaatat

SEQ ID NO: 856750 - DNA, 33 bp, Homo sapien
agcggactcttactgggattaaagaaacaatat

SEQ ID NO: 856751 - DNA, 33 bp, Homo sapien
tgagatggcatagctaaaaatgtgcattaagtt

SEQ ID NO: 856752 - DNA, 33 bp, Homo sapien
tgagatggcatagctacaaatgtgcattaagtt

SEQ ID NO: 856753 - DNA, 33 bp, Homo sapien
aagtcagaggttcatacgtaggtgaccaaagtg

SEQ ID NO: 856754 - DNA, 33 bp, Homo sapien
aagtcagaggttcatatgtaggtgaccaaagtg

SEQ ID NO: 856755 - DNA, 33 bp, Homo sapien
ggtgctgttaggcatcaatttcacttgcaacta

SEQ ID NO: 856756 - DNA, 33 bp, Homo sapien
ggtgctgttaggcatcgatttcacttgcaacta

SEQ ID NO: 856757 - DNA, 33 bp, Homo sapien
cttttgacatatccctaactcaaagattactac

SEQ ID NO: 856758 - DNA, 33 bp, Homo sapien
cttttgacatatcccttactcaaagattactac

SEQ ID NO: 856759 - DNA, 33 bp, Homo sapien
atccagtatgtaagcaaatcttatctgctccac

SEQ ID NO: 856760 - DNA, 33 bp, Homo sapien
atccagtatgtaagcacatcttatctgctccac

SEQ ID NO: 856761 - DNA, 33 bp, Homo sapien
acagtaatagtaatgaacaaaactttatgctgt

SEQ ID NO: 856762 - DNA, 33 bp, Homo sapien
acagtaatagtaatgaccaaaactttatgctgt

SEQ ID NO: 856763 - DNA, 33 bp, Homo sapien
gaagctttactagcaaatctctttcaggaatca

SEQ ID NO: 856764 - DNA, 33 bp, Homo sapien
gaagctttactagcaagtctctttcaggaatca

SEQ ID NO: 856765 - DNA, 33 bp, Homo sapien; identical to SEQ ID NO: 856763

SEQ ID NO: 856766 - DNA, 33 bp, Homo sapien; identical to SEQ ID NO: 856764

SEQ ID NO: 856767 - DNA, 33 bp, Homo sapien
aattagcatttcctgacgatttgtgatgttgac

SEQ ID NO: 856768 - DNA, 33 bp, Homo sapien
aattagcatttcctgatgatttgtgatgttgac

SEQ ID NO: 856769 - DNA, 33 bp, Homo sapien
aacagatgaatgacaaagaaactatgatatata

SEQ ID NO: 856770 - DNA, 33 bp, Homo sapien
aacagatgaatgacaacgaaactatgatatata

SEQ ID NO: 856771 - DNA, 33 bp, Homo sapien
gtgggtctgtgggccaagcttcgtattttttaa

SEQ ID NO: 856772 - DNA, 33 bp, Homo sapien
gtgggtctgtgggccacgcttcgtattttttaa

SEQ ID NO: 856773 - DNA, 33 bp, Homo sapien
ggggaaaggtagaacaagaaatagtagcttctt

SEQ ID NO: 856774 - DNA, 33 bp, Homo sapien
ggggaaaggtagaacatgaaatagtagcttctt

SEQ ID NO: 856775 - DNA, 33 bp, Homo sapien
ttctaaaagtagaacaaaaaatgaatatggaca

SEQ ID NO: 856776 - DNA, 33 bp, Homo sapien
ttctaaaagtagaacataaaatgaatatggaca

SEQ ID NO: 856777 - DNA, 33 bp, Homo sapien
cagagactgagggaaacccagactttcgtgaaa

SEQ ID NO: 856778 - DNA, 33 bp, Homo sapien
cagagactgagggaaagccagactttcgtgaaa

SEQ ID NO: 856779 - DNA, 33 bp, Homo sapien
atgtttgattgcaggccctaagaataaagggag

SEQ ID NO: 856780 - DNA, 33 bp, Homo sapien
atgtttgattgcaggctctaagaataaagggag

SEQ ID NO: 856781 - DNA, 33 bp, Homo sapien
atacttgacattagcaaaggaagtccagctgtg

SEQ ID NO: 856782 - DNA, 33 bp, Homo sapien
atacttgacattagcagaggaagtccagctgtg

SEQ ID NO: 856783 - DNA, 33 bp, Homo sapien
actgaaagagtccaaactttcccacataaaatt

SEQ ID NO: 856784 - DNA, 33 bp, Homo sapien
actgaaagagtccaaattttcccacataaaatt

SEQ ID NO: 856785 - DNA, 33 bp, Homo sapien
cctctttattcatggaaggctccaaaagagaaa

SEQ ID NO: 856786 - DNA, 33 bp, Homo sapien
cctctttattcatggagggctccaaaagagaaa

SEQ ID NO: 856787 - DNA, 33 bp, Homo sapien
ccacagagagacttcaacgtgtaagcaaaaaag

SEQ ID NO: 856788 - DNA, 33 bp, Homo sapien
ccacagagagacttcaccgtgtaagcaaaaaag

SEQ ID NO: 856789 - DNA, 33 bp, Homo sapien
gtaaatgatctatacacgcataacattttttta

SEQ ID NO: 856790 - DNA, 33 bp, Homo sapien
gtaaatgatctatacaggcataacattttttta

SEQ ID NO: 856791 - DNA, 33 bp, Homo sapien
aatgataaactatcaacgcaaacgatagctcat

SEQ ID NO: 856792 - DNA, 33 bp, Homo sapien
aatgataaactatcaaggcaaacgatagctcat

SEQ ID NO: 856793 - DNA, 33 bp, Homo sapien
aaataggggatgagaacagtagaagtcaaataa

SEQ ID NO: 856794 - DNA, 33 bp, Homo sapien
aaataggggatgagaagagtagaagtcaaataa

SEQ ID NO: 856795 - DNA, 33 bp, Homo sapien
atcctggctagaaagactattccaccataagca

SEQ ID NO: 856796 - DNA, 33 bp, Homo sapien
atcctggctagaaagagtattccaccataagca

SEQ ID NO: 856797 - DNA, 33 bp, Homo sapien
gcaaagtccattcaaagatggttagatgtagtt

SEQ ID NO: 856798 - DNA, 33 bp, Homo sapien
gcaaagtccattcaaatatggttagatgtagtt

SEQ ID NO: 856799 - DNA, 33 bp, Homo sapien
tttgggccacaagtcacatattgttataacaaa

SEQ ID NO: 856800 - DNA, 33 bp, Homo sapien
tttgggccacaagtcagatattgttataacaaa

SEQ ID NO: 856801 - DNA, 33 bp, Homo sapien
ggtcattaaatcacaaagattagatatctagac

SEQ ID NO: 856802 - DNA, 33 bp, Homo sapien
ggtcattaaatcacaaggattagatatctagac

SEQ ID NO: 856803 - DNA, 33 bp, Homo sapien
gacatatgccagaaacaacctcaggaattttga

SEQ ID NO: 856804 - DNA, 33 bp, Homo sapien
gacatatgccagaaacgacctcaggaattttga

SEQ ID NO: 856805 - DNA, 33 bp, Homo sapien
tgtgtagaaaggagaaacctcatatgctgttgg

SEQ ID NO: 856806 - DNA, 33 bp, Homo sapien
tgtgtagaaaggagaaccctcatatgctgttgg

SEQ ID NO: 856807 - DNA, 33 bp, Homo sapien
taattagtgacaagtcccagtattcacatttgc

SEQ ID NO: 856808 - DNA, 33 bp, Homo sapien
taattagtgacaagtctcagtattcacatttgc

SEQ ID NO: 856809 - DNA, 33 bp, Homo sapien
gggaaatatcaaggcaagggatagctatacttg

SEQ ID NO: 856810 - DNA, 33 bp, Homo sapien
gggaaatatcaaggcatgggatagctatacttg

SEQ ID NO: 856811 - DNA, 33 bp, Homo sapien
ttaggagaaaatcactgaagtcttctaaaaaca

SEQ ID NO: 856812 - DNA, 33 bp, Homo sapien
ttaggagaaaatcacttaagtcttctaaaaaca

SEQ ID NO: 856813 - DNA, 33 bp, Homo sapien
acatgactctcttttaacaatttacaaaaggct

SEQ ID NO: 856814 - DNA, 33 bp, Homo sapien
acatgactctcttttagcaatttacaaaaggct

SEQ ID NO: 856815 - DNA, 33 bp, Homo sapien
gctaataattagccaaagagttaataatgagat

SEQ ID NO: 856816 - DNA, 33 bp, Homo sapien
gctaataattagccaatgagttaataatgagat

SEQ ID NO: 856817 - DNA, 33 bp, Homo sapien
cctttgcacacagggacaaggctgccaccaact

SEQ ID NO: 856818 - DNA, 33 bp, Homo sapien
cctttgcacacagggagaaggctgccaccaact

SEQ ID NO: 856819 - DNA, 33 bp, Homo sapien
ttttataaccaatcaacagcatcttacgaaggc

SEQ ID NO: 856820 - DNA, 33 bp, Homo sapien
ttttataaccaatcaatagcatcttacgaaggc

SEQ ID NO: 856821 - DNA, 33 bp, Homo sapien
atcacctgggatttaactgtcatcttgattgta

SEQ ID NO: 856822 - DNA, 33 bp, Homo sapien
atcacctgggatttaagtgtcatcttgattgta

SEQ ID NO: 856823 - DNA, 33 bp, Homo sapien
ttaatttgagtaatcacggcaaccagacttgag

SEQ ID NO: 856824 - DNA, 33 bp, Homo sapien
ttaatttgagtaatcatggcaaccagacttgag

SEQ ID NO: 856825 - DNA, 33 bp, Homo sapien
cataaaaataaatgcacacatctgaggtcagga

SEQ ID NO: 856826 - DNA, 33 bp, Homo sapien
cataaaaataaatgcatacatctgaggtcagga

SEQ ID NO: 856827 - DNA, 33 bp, Homo sapien
tggaaacaacctaaagacccaccatcagtggaa

SEQ ID NO: 856828 - DNA, 33 bp, Homo sapien
tggaaacaacctaaaggcccaccatcagtggaa

SEQ ID NO: 856829 - DNA, 33 bp, Homo sapien
atgaaggatttatgtacctctggcatcactctc

SEQ ID NO: 856830 - DNA, 33 bp, Homo sapien
atgaaggatttatgtatctctggcatcactctc

SEQ ID NO: 856831 - DNA, 33 bp, Homo sapien
cccaacctgcccaacaaattttagactagactt

SEQ ID NO: 856832 - DNA, 33 bp, Homo sapien
cccaacctgcccaacagattttagactagactt

SEQ ID NO: 856833 - DNA, 33 bp, Homo sapien
agacttgattcattaaatgttgaaagcacaaac

SEQ ID NO: 856834 - DNA, 33 bp, Homo sapien
agacttgattcattaagtgttgaaagcacaaac

SEQ ID NO: 856835 - DNA, 33 bp, Homo sapien
gccatatgtggagaacaggaataccaattgatt

SEQ ID NO: 856836 - DNA, 33 bp, Homo sapien
gccatatgtggagaacgggaataccaattgatt

SEQ ID NO: 856837 - DNA, 33 bp, Homo sapien
actttgtgttctgaggacatcaaaatgcaataa

SEQ ID NO: 856838 - DNA, 33 bp, Homo sapien
actttgtgttctgaggtcatcaaaatgcaataa

SEQ ID NO: 856839 - DNA, 33 bp, Homo sapien
actttacggctattctaactattctcagtgcca

SEQ ID NO: 856840 - DNA, 33 bp, Homo sapien
actttacggctattctgactattctcagtgcca

SEQ ID NO: 856841 - DNA, 33 bp, Homo sapien
taacattgagttcatacatcttaaaagcaacat

SEQ ID NO: 856842 - DNA, 33 bp, Homo sapien
taacattgagttcatatatcttaaaagcaacat

SEQ ID NO: 856843 - DNA, 33 bp, Homo sapien
atttttccaacaacacgcacttcactaagctat

SEQ ID NO: 856844 - DNA, 33 bp, Homo sapien
atttttccaacaacactcacttcactaagctat

SEQ ID NO: 856845 - DNA, 33 bp, Homo sapien
accacaggatcttatccacttactctgtaaaat

SEQ ID NO: 856846 - DNA, 33 bp, Homo sapien
accacaggatcttatctacttactctgtaaaat

SEQ ID NO: 856847 - DNA, 33 bp, Homo sapien
taaccaaagtaaacaaaggaagacttgctgggt

SEQ ID NO: 856848 - DNA, 33 bp, Homo sapien
taaccaaagtaaacaacggaagacttgctgggt

SEQ ID NO: 856849 - DNA, 33 bp, Homo sapien
tgtctgtttatgtccactgcaatttttcttcaa

SEQ ID NO: 856850 - DNA, 33 bp, Homo sapien
tgtctgtttatgtccagtgcaatttttcttcaa

SEQ ID NO: 856851 - DNA, 33 bp, Homo sapien
gtaactcagatcatcagaatgaccacctccaat

SEQ ID NO: 856852 - DNA, 33 bp, Homo sapien
gtaactcagatcatcataatgaccacctccaat

SEQ ID NO: 856853 - DNA, 33 bp, Homo sapien
aatgattcaacaatgaaggtatacaaacaaaca

SEQ ID NO: 856854 - DNA, 33 bp, Homo sapien
aatgattcaacaatgagggtatacaaacaaaca

SEQ ID NO: 856855 - DNA, 33 bp, Homo sapien
gttcataatctgtaagacccagatacgaagttt

SEQ ID NO: 856856 - DNA, 33 bp, Homo sapien
gttcataatctgtaaggcccagatacgaagttt

SEQ ID NO: 856857 - DNA, 33 bp, Homo sapien
attacaggcctagacactcatgccccactctta

SEQ ID NO: 856858 - DNA, 33 bp, Homo sapien
attacaggcctagacattcatgccccactctta

SEQ ID NO: 856859 - DNA, 33 bp, Homo sapien
actcataagatcaataccaatgtatctcatata

SEQ ID NO: 856860 - DNA, 33 bp, Homo sapien
actcataagatcaatatcaatgtatctcatata

SEQ ID NO: 856861 - DNA, 33 bp, Homo sapien
gccttttttcgtttccaacatagaaatcataat

SEQ ID NO: 856862 - DNA, 33 bp, Homo sapien
gccttttttcgtttccgacatagaaatcataat

SEQ ID NO: 856863 - DNA, 33 bp, Homo sapien
gcaggtgcaaagctagccaggtttttgttcttc

SEQ ID NO: 856864 - DNA, 33 bp, Homo sapien
gcaggtgcaaagctagtcaggtttttgttcttc

SEQ ID NO: 856865 - DNA, 33 bp, Homo sapien
tccaatagtccaggccaggaatcaaggacccca

SEQ ID NO: 856866 - DNA, 33 bp, Homo sapien
tccaatagtccaggccgggaatcaaggacccca

SEQ ID NO: 856867 - DNA, 33 bp, Homo sapien
aaatggtagagatacaaactaacttttctacaa

SEQ ID NO: 856868 - DNA, 33 bp, Homo sapien
aaatggtagagatacagactaacttttctacaa

SEQ ID NO: 856869 - DNA, 33 bp, Homo sapien
ttcacaatggaaaaaaagtgacattaaaatgta

SEQ ID NO: 856870 - DNA, 33 bp, Homo sapien
ttcacaatggaaaaaatgtgacattaaaatgta

SEQ ID NO: 856871 - DNA, 33 bp, Homo sapien
ctttctcttgtggggaaaaaggatagtggtcat

SEQ ID NO: 856872 - DNA, 33 bp, Homo sapien
ctttctcttgtggggacaaaggatagtggtcat

SEQ ID NO: 856873 - DNA, 33 bp, Homo sapien
tagttttttcacctacaaaatagagatgtttta

SEQ ID NO: 856874 - DNA, 33 bp, Homo sapien
tagttttttcacctacgaaatagagatgtttta

SEQ ID NO: 856875 - DNA, 33 bp, Homo sapien
ttttacagcataggaacaggacacctccaactt

SEQ ID NO: 856876 - DNA, 33 bp, Homo sapien
ttttacagcataggaagaggacacctccaactt

SEQ ID NO: 856877 - DNA, 33 bp, Homo sapien
gcagtaaatatgctaaaatcatcagtggttacc

SEQ ID NO: 856878 - DNA, 33 bp, Homo sapien
gcagtaaatatgctaatatcatcagtggttacc

SEQ ID NO: 856879 - DNA, 33 bp, Homo sapien
ctctacaacatgagtcaatagattagaaaccat

SEQ ID NO: 856880 - DNA, 33 bp, Homo sapien
ctctacaacatgagtccatagattagaaaccat

SEQ ID NO: 856881 - DNA, 33 bp, Homo sapien
ctcttccttggactatcagaaacaagtctcagg

SEQ ID NO: 856882 - DNA, 33 bp, Homo sapien
ctcttccttggactatgagaaacaagtctcagg

SEQ ID NO: 856883 - DNA, 33 bp, Homo sapien
ctaatagtatattcacagaattgtaaaccttac

SEQ ID NO: 856884 - DNA, 33 bp, Homo sapien
ctaatagtatattcaccgaattgtaaaccttac

SEQ ID NO: 856885 - DNA, 33 bp, Homo sapien
atttacctgaataatcagaacagttgctccagt

SEQ ID NO: 856886 - DNA, 33 bp, Homo sapien
atttacctgaataatccgaacagttgctccagt

SEQ ID NO: 856887 - DNA, 33 bp, Homo sapien
aaatataagaaacaggaaagtttgtaacataat

SEQ ID NO: 856888 - DNA, 33 bp, Homo sapien
aaatataagaaacaggtaagtttgtaacataat

SEQ ID NO: 856889 - DNA, 33 bp, Homo sapien
tgacaatcaagcaacactaagcagaaaagatat

SEQ ID NO: 856890 - DNA, 33 bp, Homo sapien
tgacaatcaagcaacattaagcagaaaagatat

SEQ ID NO: 856891 - DNA, 33 bp, Homo sapien
agcaaagttgatcttacgaagtgggaagggtat

SEQ ID NO: 856892 - DNA, 33 bp, Homo sapien
agcaaagttgatcttatgaagtgggaagggtat

SEQ ID NO: 856893 - DNA, 33 bp, Homo sapien
tatgggatgtccaataccaaactatttgaaaat

SEQ ID NO: 856894 - DNA, 33 bp, Homo sapien
tatgggatgtccaatatcaaactatttgaaaat

SEQ ID NO: 856895 - DNA, 33 bp, Homo sapien
gaataaattgtgagacaaaaggaaatgttttac

SEQ ID NO: 856896 - DNA, 33 bp, Homo sapien
gaataaattgtgagaccaaaggaaatgttttac

SEQ ID NO: 856897 - DNA, 33 bp, Homo sapien
tttcaggtgtgcattacatcagggaataatttc

SEQ ID NO: 856898 - DNA, 33 bp, Homo sapien
tttcaggtgtgcattatatcagggaataatttc

SEQ ID NO: 856899 - DNA, 33 bp, Homo sapien
ggaggtcagaatatcaacattactcagaatttg

SEQ ID NO: 856900 - DNA, 33 bp, Homo sapien
ggaggtcagaatatcaccattactcagaatttg

SEQ ID NO: 856901 - DNA, 33 bp, Homo sapien
tgccttctgaaggtgacgtacaaagagattagc

SEQ ID NO: 856902 - DNA, 33 bp, Homo sapien
tgccttctgaaggtgatgtacaaagagattagc

SEQ ID NO: 856903 - DNA, 33 bp, Homo sapien
ttaccagactgtgacaaagagatatgtagtgag

SEQ ID NO: 856904 - DNA, 33 bp, Homo sapien
ttaccagactgtgacacagagatatgtagtgag

SEQ ID NO: 856905 - DNA, 33 bp, Homo sapien
cctaatatttatcgagcactgactttgcatgca

SEQ ID NO: 856906 - DNA, 33 bp, Homo sapien
cctaatatttatcgagtactgactttgcatgca

SEQ ID NO: 856907 - DNA, 33 bp, Homo sapien
ctcaaaagtctccaaaagtgcctctctgagacc

SEQ ID NO: 856908 - DNA, 33 bp, Homo sapien
ctcaaaagtctccaaatgtgcctctctgagacc

SEQ ID NO: 856909 - DNA, 33 bp, Homo sapien
aacaaatgtgtattcccacgaacagttcatggg

SEQ ID NO: 856910 - DNA, 33 bp, Homo sapien
aacaaatgtgtattcctacgaacagttcatggg

SEQ ID NO: 856911 - DNA, 33 bp, Homo sapien
tacttatcccgaacaacattgtgtgcaacctta

SEQ ID NO: 856912 - DNA, 33 bp, Homo sapien
tacttatcccgaacaatattgtgtgcaacctta

SEQ ID NO: 856913 - DNA, 33 bp, Homo sapien
acaatgctaaaatcccacaagctgtcatttgtc

SEQ ID NO: 856914 - DNA, 33 bp, Homo sapien
acaatgctaaaatcccgcaagctgtcatttgtc

SEQ ID NO: 856915 - DNA, 33 bp, Homo sapien
tttcttgtattttaaacgtccccagaggcagca

SEQ ID NO: 856916 - DNA, 33 bp, Homo sapien
tttcttgtattttaaatgtccccagaggcagca

SEQ ID NO: 856917 - DNA, 33 bp, Homo sapien
atgtatcatatcttccaattaatctttcctaag

SEQ ID NO: 856918 - DNA, 33 bp, Homo sapien
atgtatcatatcttcccattaatctttcctaag

SEQ ID NO: 856919 - DNA, 33 bp, Homo sapien
tcatttttttttttcaatatgccctgctcccaa

SEQ ID NO: 856920 - DNA, 33 bp, Homo sapien
tcatttttttttttcagtatgccctgctcccaa

SEQ ID NO: 856921 - DNA, 33 bp, Homo sapien
agccttcatagaattgaaatgagtgtcagggcc

SEQ ID NO: 856922 - DNA, 33 bp, Homo sapien
agccttcatagaattggaatgagtgtcagggcc

SEQ ID NO: 856923 - DNA, 33 bp, Homo sapien
caacctttatcagtgaacttagctagatcttac

SEQ ID NO: 856924 - DNA, 33 bp, Homo sapien
caacctttatcagtgaccttagctagatcttac

SEQ ID NO: 856925 - DNA, 33 bp, Homo sapien
tgcattgtcaatgagcaataacatttcaaaaga

SEQ ID NO: 856926 - DNA, 33 bp, Homo sapien
tgcattgtcaatgagcgataacatttcaaaaga

SEQ ID NO: 856927 - DNA, 33 bp, Homo sapien
caaaattcatttgactcaggcataggatgacca

SEQ ID NO: 856928 - DNA, 33 bp, Homo sapien
caaaattcatttgacttaggcataggatgacca

SEQ ID NO: 856929 - DNA, 33 bp, Homo sapien
aaatactttgtacatcaaaaggcactaaaatga

SEQ ID NO: 856930 - DNA, 33 bp, Homo sapien
aaatactttgtacatcgaaaggcactaaaatga

SEQ ID NO: 856931 - DNA, 33 bp, Homo sapien
atgggtcatggaataaaattgttaaattgatcc

SEQ ID NO: 856932 - DNA, 33 bp, Homo sapien
atgggtcatggaataagattgttaaattgatcc

SEQ ID NO: 856933 - DNA, 33 bp, Homo sapien
taaattcgagtagttaccagtgcctgtatttat

SEQ ID NO: 856934 - DNA, 33 bp, Homo sapien
taaattcgagtagttatcagtgcctgtatttat

SEQ ID NO: 856935 - DNA, 33 bp, Homo sapien
cttttctgctggataaaaatgaacttctcacac

SEQ ID NO: 856936 - DNA, 33 bp, Homo sapien
cttttctgctggataataatgaacttctcacac

SEQ ID NO: 856937 - DNA, 33 bp, Homo sapien
tgaatcatcttctagaacttgtcaaatatcttc

SEQ ID NO: 856938 - DNA, 33 bp, Homo sapien
tgaatcatcttctagagcttgtcaaatatcttc

SEQ ID NO: 856939 - DNA, 33 bp, Homo sapien
aaattgcagcttataactgactcttttggagag

SEQ ID NO: 856940 - DNA, 33 bp, Homo sapien
aaattgcagcttataattgactcttttggagag

SEQ ID NO: 856941 - DNA, 33 bp, Homo sapien
taaaatatgctagaaaaaatattagatgattca

SEQ ID NO: 856942 - DNA, 33 bp, Homo sapien
taaaatatgctagaaacaatattagatgattca

SEQ ID NO: 856943 - DNA, 33 bp, Homo sapien
tcttcaccctttaatcacttcatgcacactctt

SEQ ID NO: 856944 - DNA, 33 bp, Homo sapien
tcttcaccctttaatcgcttcatgcacactctt

SEQ ID NO: 856945 - DNA, 33 bp, Homo sapien
cttagaagcctactgggcatctctcatcaatat

SEQ ID NO: 856946 - DNA, 33 bp, Homo sapien
cttagaagcctactggtcatctctcatcaatat

SEQ ID NO: 856947 - DNA, 33 bp, Homo sapien
ttttatacagtataaaactggtccctggtcctg

SEQ ID NO: 856948 - DNA, 33 bp, Homo sapien
ttttatacagtataaacctggtccctggtcctg

SEQ ID NO: 856949 - DNA, 33 bp, Homo sapien
tcccatgagatactaagggaactaagaggacat

SEQ ID NO: 856950 - DNA, 33 bp, Homo sapien
tcccatgagatactaatggaactaagaggacat

SEQ ID NO: 856951 - DNA, 33 bp, Homo sapien
caagatctcacaaaaacttattggccagaaaca

SEQ ID NO: 856952 - DNA, 33 bp, Homo sapien
caagatctcacaaaaatttattggccagaaaca

SEQ ID NO: 856953 - DNA, 33 bp, Homo sapien
taatcagtgagacaatcaagatataatcactcc

SEQ ID NO: 856954 - DNA, 33 bp, Homo sapien
taatcagtgagacaatgaagatataatcactcc

SEQ ID NO: 856955 - DNA, 33 bp, Homo sapien
acttcaggatttgtcaagttgtgatcttttgta

SEQ ID NO: 856956 - DNA, 33 bp, Homo sapien
acttcaggatttgtcaggttgtgatcttttgta

SEQ ID NO: 856957 - DNA, 33 bp, Homo sapien
atgagagcatgagaaaagtcataggatattaga

SEQ ID NO: 856958 - DNA, 33 bp, Homo sapien
atgagagcatgagaaaggtcataggatattaga

SEQ ID NO: 856959 - DNA, 33 bp, Homo sapien
catgattccatttcacagtcatatcctttaagt

SEQ ID NO: 856960 - DNA, 33 bp, Homo sapien
catgattccatttcacggtcatatcctttaagt

SEQ ID NO: 856961 - DNA, 33 bp, Homo sapien
atatctaagaaggagcaactattatcttactct

SEQ ID NO: 856962 - DNA, 33 bp, Homo sapien
atatctaagaaggagccactattatcttactct

SEQ ID NO: 856963 - DNA, 33 bp, Homo sapien
agaacttgagtcttaaaagtggggatacatgga

SEQ ID NO: 856964 - DNA, 33 bp, Homo sapien
agaacttgagtcttaatagtggggatacatgga

SEQ ID NO: 856965 - DNA, 33 bp, Homo sapien
atataactcatttcccaaaagcttaccattgta

SEQ ID NO: 856966 - DNA, 33 bp, Homo sapien
atataactcatttcccgaaagcttaccattgta

SEQ ID NO: 856967 - DNA, 33 bp, Homo sapien
gctgccaatatgaataaaaaatgagaaaactgg

SEQ ID NO: 856968 - DNA, 33 bp, Homo sapien
gctgccaatatgaatacaaaatgagaaaactgg

SEQ ID NO: 856969 - DNA, 33 bp, Homo sapien
cttggctgaaatgcagcatgctaaaacaggaac

SEQ ID NO: 856970 - DNA, 33 bp, Homo sapien
cttggctgaaatgcagtatgctaaaacaggaac

SEQ ID NO: 856971 - DNA, 33 bp, Homo sapien
aagaattagagtctcaataacggcacaccaaat

SEQ ID NO: 856972 - DNA, 33 bp, Homo sapien
aagaattagagtctcattaacggcacaccaaat

SEQ ID NO: 856973 - DNA, 33 bp, Homo sapien
gtccccgcttacactgaacttaacggcaatctc

SEQ ID NO: 856974 - DNA, 33 bp, Homo sapien
gtccccgcttacactgcacttaacggcaatctc

SEQ ID NO: 856975 - DNA, 33 bp, Homo sapien
atcaaattaaatgaacccaaactgcaagagaaa

SEQ ID NO: 856976 - DNA, 33 bp, Homo sapien
atcaaattaaatgaactcaaactgcaagagaaa

SEQ ID NO: 856977 - DNA, 33 bp, Homo sapien
tgacaggtgttgtttaaatcaggtgcaaaatgt

SEQ ID NO: 856978 - DNA, 33 bp, Homo sapien
tgacaggtgttgtttacatcaggtgcaaaatgt

SEQ ID NO: 856979 - DNA, 33 bp, Homo sapien
tggccagaagggcagacgtatagaaaccagggt

SEQ ID NO: 856980 - DNA, 33 bp, Homo sapien
tggccagaagggcagatgtatagaaaccagggt

SEQ ID NO: 856981 - DNA, 33 bp, Homo sapien
cgggctgtaatttctacgatttgtatgagtata

SEQ ID NO: 856982 - DNA, 33 bp, Homo sapien
cgggctgtaatttctatgatttgtatgagtata

SEQ ID NO: 856983 - DNA, 33 bp, Homo sapien
gtgttgtgcacctgcactatctaatccttcaat

SEQ ID NO: 856984 - DNA, 33 bp, Homo sapien
gtgttgtgcacctgcattatctaatccttcaat

SEQ ID NO: 856985 - DNA, 33 bp, Homo sapien
gctttagcattatagtaaccttctttcacctaa

SEQ ID NO: 856986 - DNA, 33 bp, Homo sapien
gctttagcattatagtgaccttctttcacctaa

SEQ ID NO: 856987 - DNA, 33 bp, Homo sapien
gggtgccttcactggaaataattcagagccacc

SEQ ID NO: 856988 - DNA, 33 bp, Homo sapien
gggtgccttcactggacataattcagagccacc

SEQ ID NO: 856989 - DNA, 33 bp, Homo sapien
caaatcccaaataaaacgaactcaaaacaacaa

SEQ ID NO: 856990 - DNA, 33 bp, Homo sapien
caaatcccaaataaaatgaactcaaaacaacaa

SEQ ID NO: 856991 - DNA, 33 bp, Homo sapien
aacaggcacatttctcaaataacttcctggaaa

SEQ ID NO: 856992 - DNA, 33 bp, Homo sapien
aacaggcacatttctcgaataacttcctggaaa

SEQ ID NO: 856993 - DNA, 33 bp, Homo sapien
catttgcctgtctgacactgcaacacagtccta

SEQ ID NO: 856994 - DNA, 33 bp, Homo sapien
catttgcctgtctgaccctgcaacacagtccta

SEQ ID NO: 856995 - DNA, 33 bp, Homo sapien
acaagaactctctccacgaggaaaaaattactg

SEQ ID NO: 856996 - DNA, 33 bp, Homo sapien
acaagaactctctccatgaggaaaaaattactg

SEQ ID NO: 856997 - DNA, 33 bp, Homo sapien
agtttatggacctgcaaagtctctatcaaaatt

SEQ ID NO: 856998 - DNA, 33 bp, Homo sapien
agtttatggacctgcagagtctctatcaaaatt

SEQ ID NO: 856999 - DNA, 33 bp, Homo sapien
atataagagggcaccaaaattgtttagaccaaa

SEQ ID NO: 857000 - DNA, 33 bp, Homo sapien
atataagagggcaccacaattgtttagaccaaa

SEQ ID NO: 857001 - DNA, 33 bp, Homo sapien
gtggaataatgggcccccaaatatgtacacatc

SEQ ID NO: 857002 - DNA, 33 bp, Homo sapien
gtggaataatgggcccgcaaatatgtacacatc

SEQ ID NO: 857003 - DNA, 33 bp, Homo sapien
tttattggtgggaatactaattggtagaacctt

SEQ ID NO: 857004 - DNA, 33 bp, Homo sapien
tttattggtgggaatattaattggtagaacctt

SEQ ID NO: 857005 - DNA, 33 bp, Homo sapien
catcataatagtatcacctgcagaggcaatagt

SEQ ID NO: 857006 - DNA, 33 bp, Homo sapien
catcataatagtatcagctgcagaggcaatagt

SEQ ID NO: 857007 - DNA, 33 bp, Homo sapien
aatctttagtggcctacaatgtgctaaagtttt

SEQ ID NO: 857008 - DNA, 33 bp, Homo sapien
aatctttagtggcctagaatgtgctaaagtttt

SEQ ID NO: 857009 - DNA, 33 bp, Homo sapien
taacagcgatttttaaaacagcgataaagtctg

SEQ ID NO: 857010 - DNA, 33 bp, Homo sapien
taacagcgatttttaagacagcgataaagtctg

SEQ ID NO: 857011 - DNA, 33 bp, Homo sapien
aagaagttcatgagccaaagaatgtggtagcct

SEQ ID NO: 857012 - DNA, 33 bp, Homo sapien
aagaagttcatgagccgaagaatgtggtagcct

SEQ ID NO: 857013 - DNA, 33 bp, Homo sapien
ccaaattgtgttaggaaggcctgctatctacag

SEQ ID NO: 857014 - DNA, 33 bp, Homo sapien
ccaaattgtgttaggacggcctgctatctacag

SEQ ID NO: 857015 - DNA, 33 bp, Homo sapien
gttggtttaaatgggccacttccagaatttctg

SEQ ID NO: 857016 - DNA, 33 bp, Homo sapien
gttggtttaaatgggctacttccagaatttctg

SEQ ID NO: 857017 - DNA, 33 bp, Homo sapien
gagtaccctgagcttacatgagtcctcagtgct

SEQ ID NO: 857018 - DNA, 33 bp, Homo sapien
gagtaccctgagcttatatgagtcctcagtgct

SEQ ID NO: 857019 - DNA, 33 bp, Homo sapien
atataaagaaaactacaagtgatggcatgttgg

SEQ ID NO: 857020 - DNA, 33 bp, Homo sapien
atataaagaaaactaccagtgatggcatgttgg

SEQ ID NO: 857021 - DNA, 33 bp, Homo sapien
cagattctgttcctccagaatggttgagacctc

SEQ ID NO: 857022 - DNA, 33 bp, Homo sapien
cagattctgttcctccggaatggttgagacctc

SEQ ID NO: 857023 - DNA, 33 bp, Homo sapien
tcaggctagcttggagcagaagacagcctgtct

SEQ ID NO: 857024 - DNA, 33 bp, Homo sapien
tcaggctagcttggagtagaagacagcctgtct

SEQ ID NO: 857025 - DNA, 33 bp, Homo sapien
atgtggatttgagagaacacagagtgcatcgaa

SEQ ID NO: 857026 - DNA, 33 bp, Homo sapien
atgtggatttgagagagcacagagtgcatcgaa

SEQ ID NO: 857027 - DNA, 33 bp, Homo sapien
ctcctaatgctataagaacattctatacgtctt

SEQ ID NO: 857028 - DNA, 33 bp, Homo sapien
ctcctaatgctataaggacattctatacgtctt

SEQ ID NO: 857029 - DNA, 33 bp, Homo sapien
atgccacattttttctaacatcaactgtacaat

SEQ ID NO: 857030 - DNA, 33 bp, Homo sapien
atgccacattttttcttacatcaactgtacaat

SEQ ID NO: 857031 - DNA, 33 bp, Homo sapien
aagaaaggttaaggccaaagagtgacaaatctc

SEQ ID NO: 857032 - DNA, 33 bp, Homo sapien
aagaaaggttaaggccgaagagtgacaaatctc

SEQ ID NO: 857033 - DNA, 33 bp, Homo sapien
aattggagagtggcgccaggaactattttaggc

SEQ ID NO: 857034 - DNA, 33 bp, Homo sapien
aattggagagtggcgctaggaactattttaggc

SEQ ID NO: 857035 - DNA, 33 bp, Homo sapien
aaattcacatcatcagaagaaaatatttaaatt

SEQ ID NO: 857036 - DNA, 33 bp, Homo sapien
aaattcacatcatcaggagaaaatatttaaatt

SEQ ID NO: 857037 - DNA, 33 bp, Homo sapien
taggaaatataactagaagagcaacaaccagag

SEQ ID NO: 857038 - DNA, 33 bp, Homo sapien
taggaaatataactaggagagcaacaaccagag

SEQ ID NO: 857039 - DNA, 33 bp, Homo sapien
ttcccaggatgctagacagatcagaaacaaaat

SEQ ID NO: 857040 - DNA, 33 bp, Homo sapien
ttcccaggatgctagagagatcagaaacaaaat

SEQ ID NO: 857041 - DNA, 33 bp, Homo sapien
tttacctctgctaacaatgggcttattcttctt

SEQ ID NO: 857042 - DNA, 33 bp, Homo sapien
tttacctctgctaacattgggcttattcttctt

SEQ ID NO: 857043 - DNA, 33 bp, Homo sapien
ggcaatgtgatgttgccaaaatggtatttatct

SEQ ID NO: 857044 - DNA, 33 bp, Homo sapien
ggcaatgtgatgttgctaaaatggtatttatct

SEQ ID NO: 857045 - DNA, 33 bp, Homo sapien
gagattagagtccaagcctctgaattactaaac

SEQ ID NO: 857046 - DNA, 33 bp, Homo sapien
gagattagagtccaagtctctgaattactaaac

SEQ ID NO: 857047 - DNA, 33 bp, Homo sapien
agttaatgtagatttcccaggttctccttaagt

SEQ ID NO: 857048 - DNA, 33 bp, Homo sapien
agttaatgtagatttctcaggttctccttaagt

SEQ ID NO: 857049 - DNA, 33 bp, Homo sapien
aatgtcacttctatagacaaagcttgagcttca

SEQ ID NO: 857050 - DNA, 33 bp, Homo sapien
aatgtcacttctatagccaaagcttgagcttca

SEQ ID NO: 857051 - DNA, 33 bp, Homo sapien
gaaaattagaaattgtcaataagcaagatcttt

SEQ ID NO: 857052 - DNA, 33 bp, Homo sapien
gaaaattagaaattgtgaataagcaagatcttt

SEQ ID NO: 857053 - DNA, 33 bp, Homo sapien
aggtcagatagttgtaagtgcccaattacaatc

SEQ ID NO: 857054 - DNA, 33 bp, Homo sapien
aggtcagatagttgtaggtgcccaattacaatc

SEQ ID NO: 857055 - DNA, 33 bp, Homo sapien
gtgtttggaatacacaaatgaataggacttatt

SEQ ID NO: 857056 - DNA, 33 bp, Homo sapien
gtgtttggaatacacagatgaataggacttatt

SEQ ID NO: 857057 - DNA, 33 bp, Homo sapien
caattgtatttctgtgcaagctcaatgaacaaa

SEQ ID NO: 857058 - DNA, 33 bp, Homo sapien
caattgtatttctgtgtaagctcaatgaacaaa

SEQ ID NO: 857059 - DNA, 33 bp, Homo sapien
atgataagaatggatgaaaaatattgtgaacag

SEQ ID NO: 857060 - DNA, 33 bp, Homo sapien
atgataagaatggatggaaaatattgtgaacag

SEQ ID NO: 857061 - DNA, 33 bp, Homo sapien
agtgtggccttcctaaactattgcaaacatagc

SEQ ID NO: 857062 - DNA, 33 bp, Homo sapien
agtgtggccttcctaagctattgcaaacatagc

SEQ ID NO: 857063 - DNA, 33 bp, Homo sapien
ctttgactgctataagactcagttgtaacaaat

SEQ ID NO: 857064 - DNA, 33 bp, Homo sapien
ctttgactgctataagtctcagttgtaacaaat

SEQ ID NO: 857065 - DNA, 33 bp, Homo sapien
gcagtgatctctcaaacctaaatttccataggg

SEQ ID NO: 857066 - DNA, 33 bp, Homo sapien
gcagtgatctctcaaatctaaatttccataggg

SEQ ID NO: 857067 - DNA, 33 bp, Homo sapien
agaaaatacagttccaaaagcgctgacttcact

SEQ ID NO: 857068 - DNA, 33 bp, Homo sapien
agaaaatacagttccagaagcgctgacttcact

SEQ ID NO: 857069 - DNA, 33 bp, Homo sapien
tgacagattctacagactccctattgcatggag

SEQ ID NO: 857070 - DNA, 33 bp, Homo sapien
tgacagattctacagattccctattgcatggag

SEQ ID NO: 857071 - DNA, 33 bp, Homo sapien
gcatgcggcataaataatatcctgtaaaatctc

SEQ ID NO: 857072 - DNA, 33 bp, Homo sapien
gcatgcggcataaatagtatcctgtaaaatctc

SEQ ID NO: 857073 - DNA, 33 bp, Homo sapien
attgaatggttaagtaaattgattgtgaataaa

SEQ ID NO: 857074 - DNA, 33 bp, Homo sapien
attgaatggttaagtagattgattgtgaataaa

SEQ ID NO: 857075 - DNA, 33 bp, Homo sapien
actcacttggtcttagaaaggggtgagagccct

SEQ ID NO: 857076 - DNA, 33 bp, Homo sapien
actcacttggtcttaggaaggggtgagagccct

SEQ ID NO: 857077 - DNA, 33 bp, Homo sapien
gagtttccagtgattcacggaccaattaacttt

SEQ ID NO: 857078 - DNA, 33 bp, Homo sapien
gagtttccagtgattctcggaccaattaacttt

SEQ ID NO: 857079 - DNA, 33 bp, Homo sapien
agaatgatactgagaagagcaatataaagtaga

SEQ ID NO: 857080 - DNA, 33 bp, Homo sapien
agaatgatactgagaatagcaatataaagtaga

SEQ ID NO: 857081 - DNA, 33 bp, Homo sapien
aggagtgctctttacactgagaattttttttcg

SEQ ID NO: 857082 - DNA, 33 bp, Homo sapien
aggagtgctctttacattgagaattttttttcg

SEQ ID NO: 857083 - DNA, 33 bp, Homo sapien
ttaatggcttgtggtagcaagtgacatttgaaa

SEQ ID NO: 857084 - DNA, 33 bp, Homo sapien
ttaatggcttgtggtatcaagtgacatttgaaa

SEQ ID NO: 857085 - DNA, 33 bp, Homo sapien
gctcagttccttccaaatcctttagaaactggc

SEQ ID NO: 857086 - DNA, 33 bp, Homo sapien
gctcagttccttccaattcctttagaaactggc

SEQ ID NO: 857087 - DNA, 33 bp, Homo sapien
agacagactctatgcactcaaatttctggctca

SEQ ID NO: 857088 - DNA, 33 bp, Homo sapien
agacagactctatgcattcaaatttctggctca

SEQ ID NO: 857089 - DNA, 33 bp, Homo sapien
gagattacatggccagaattttgaccaatgtgt

SEQ ID NO: 857090 - DNA, 33 bp, Homo sapien
gagattacatggccaggattttgaccaatgtgt

SEQ ID NO: 857091 - DNA, 33 bp, Homo sapien
tacttttcatttcacacgataggcttcaggcta

SEQ ID NO: 857092 - DNA, 33 bp, Homo sapien
tacttttcatttcacatgataggcttcaggcta

SEQ ID NO: 857093 - DNA, 33 bp, Homo sapien
agaaggttagttgaaaacttcagactcatgatg

SEQ ID NO: 857094 - DNA, 33 bp, Homo sapien
agaaggttagttgaaagcttcagactcatgatg

SEQ ID NO: 857095 - DNA, 33 bp, Homo sapien
ttgtggaggttagggaacagatacatgggcaaa

SEQ ID NO: 857096 - DNA, 33 bp, Homo sapien
ttgtggaggttagggatcagatacatgggcaaa

SEQ ID NO: 857097 - DNA, 33 bp, Homo sapien
aattaatgttctgttcaaaaatcacacatttct

SEQ ID NO: 857098 - DNA, 33 bp, Homo sapien
aattaatgttctgttcgaaaatcacacatttct

SEQ ID NO: 857099 - DNA, 33 bp, Homo sapien
tagaaaagaaagggaaatcaatagcagaagtaa

SEQ ID NO: 857100 - DNA, 33 bp, Homo sapien
tagaaaagaaagggaactcaatagcagaagtaa

SEQ ID NO: 857101 - DNA, 33 bp, Homo sapien
atctgtgggatgtcaaatgactgtatataaagg

SEQ ID NO: 857102 - DNA, 33 bp, Homo sapien
atctgtgggatgtcaagtgactgtatataaagg

SEQ ID NO: 857103 - DNA, 33 bp, Homo sapien
gagtagccaactggaaactagaagaggcagagg

SEQ ID NO: 857104 - DNA, 33 bp, Homo sapien
gagtagccaactggaacctagaagaggcagagg

SEQ ID NO: 857105 - DNA, 33 bp, Homo sapien
gaataacttggttaaacagaagactagacacat

SEQ ID NO: 857106 - DNA, 33 bp, Homo sapien
gaataacttggttaaatagaagactagacacat

SEQ ID NO: 857107 - DNA, 33 bp, Homo sapien
ctattgctcatagaacactgtatctgcttttat

SEQ ID NO: 857108 - DNA, 33 bp, Homo sapien
ctattgctcatagaacgctgtatctgcttttat

SEQ ID NO: 857109 - DNA, 33 bp, Homo sapien
atgcagcttttcaaaaattctagctttatgcat

SEQ ID NO: 857110 - DNA, 33 bp, Homo sapien
atgcagcttttcaaaagttctagctttatgcat

SEQ ID NO: 857111 - DNA, 33 bp, Homo sapien
ctctgatctcctgatacgtatggcctattttgc

SEQ ID NO: 857112 - DNA, 33 bp, Homo sapien
ctctgatctcctgatatgtatggcctattttgc

SEQ ID NO: 857113 - DNA, 33 bp, Homo sapien
tacacactggagatcaacattagcataactcct

SEQ ID NO: 857114 - DNA, 33 bp, Homo sapien
tacacactggagatcaccattagcataactcct

SEQ ID NO: 857115 - DNA, 33 bp, Homo sapien
ctgtacttgttctatacaggattctgaatgaat

SEQ ID NO: 857116 - DNA, 33 bp, Homo sapien
ctgtacttgttctatagaggattctgaatgaat

SEQ ID NO: 857117 - DNA, 33 bp, Homo sapien
tgctacaaatattctacacatacttcaccttgt

SEQ ID NO: 857118 - DNA, 33 bp, Homo sapien
tgctacaaatattctatacatacttcaccttgt

SEQ ID NO: 857119 - DNA, 33 bp, Homo sapien
atccctttgccacttacggatccagtttacacc

SEQ ID NO: 857120 - DNA, 33 bp, Homo sapien
atccctttgccacttatggatccagtttacacc

SEQ ID NO: 857121 - DNA, 33 bp, Homo sapien
gtgaccttgtgacccacgaataccactcttaga

SEQ ID NO: 857122 - DNA, 33 bp, Homo sapien
gtgaccttgtgacccaggaataccactcttaga

SEQ ID NO: 857123 - DNA, 33 bp, Homo sapien
ttgctgagtttttaaaaatcaataccatttctc

SEQ ID NO: 857124 - DNA, 33 bp, Homo sapien
ttgctgagtttttaaagatcaataccatttctc

SEQ ID NO: 857125 - DNA, 33 bp, Homo sapien
cttcaccaaaaagggcgcttatacacttttaga

SEQ ID NO: 857126 - DNA, 33 bp, Homo sapien
cttcaccaaaaagggctcttatacacttttaga

SEQ ID NO: 857127 - DNA, 33 bp, Homo sapien
agaacacttatgggaacgtcaactgatccaggg

SEQ ID NO: 857128 - DNA, 33 bp, Homo sapien
agaacacttatgggaatgtcaactgatccaggg

SEQ ID NO: 857129 - DNA, 33 bp, Homo sapien
gatatataaatggagacatgagtacatctgttt

SEQ ID NO: 857130 - DNA, 33 bp, Homo sapien
gatatataaatggagatatgagtacatctgttt

SEQ ID NO: 857131 - DNA, 33 bp, Homo sapien
tttgattttccattcccgacttaattcactgag

SEQ ID NO: 857132 - DNA, 33 bp, Homo sapien
tttgattttccattcctgacttaattcactgag

SEQ ID NO: 857133 - DNA, 33 bp, Homo sapien
catcaagatattggccgaaagttttctttcttt

SEQ ID NO: 857134 - DNA, 33 bp, Homo sapien
catcaagatattggcctaaagttttctttcttt

SEQ ID NO: 857135 - DNA, 33 bp, Homo sapien
ggtcacagaatattaactgttttattatgttct

SEQ ID NO: 857136 - DNA, 33 bp, Homo sapien
ggtcacagaatattaagtgttttattatgttct

SEQ ID NO: 857137 - DNA, 33 bp, Homo sapien
tttcatttaagcaccacagttctgttagtggca

SEQ ID NO: 857138 - DNA, 33 bp, Homo sapien
tttcatttaagcaccatagttctgttagtggca

SEQ ID NO: 857139 - DNA, 33 bp, Homo sapien
ctatccccaattaccacgtgaaaattataaaat

SEQ ID NO: 857140 - DNA, 33 bp, Homo sapien
ctatccccaattaccaggtgaaaattataaaat

SEQ ID NO: 857141 - DNA, 33 bp, Homo sapien
gtgggaacgcagggacagtaacagtagagatga

SEQ ID NO: 857142 - DNA, 33 bp, Homo sapien
gtgggaacgcagggacggtaacagtagagatga

SEQ ID NO: 857143 - DNA, 33 bp, Homo sapien
aatgtgagcctaaaccacaaaatatattaagca

SEQ ID NO: 857144 - DNA, 33 bp, Homo sapien
aatgtgagcctaaaccgcaaaatatattaagca

SEQ ID NO: 857145 - DNA, 33 bp, Homo sapien
atgactataagtaaaacaatggtcattaagaaa

SEQ ID NO: 857146 - DNA, 33 bp, Homo sapien
atgactataagtaaaagaatggtcattaagaaa

SEQ ID NO: 857147 - DNA, 33 bp, Homo sapien
attgaagagagcctcaaaaaattaaatgtaaga

SEQ ID NO: 857148 - DNA, 33 bp, Homo sapien
attgaagagagcctcacaaaattaaatgtaaga

SEQ ID NO: 857149 - DNA, 33 bp, Homo sapien
tgcctactttcacgtaaagacaatagtattaaa

SEQ ID NO: 857150 - DNA, 33 bp, Homo sapien
tgcctactttcacgtatagacaatagtattaaa

SEQ ID NO: 857151 - DNA, 33 bp, Homo sapien
ttatacagaatttcaaatctcattgtagagagc

SEQ ID NO: 857152 - DNA, 33 bp, Homo sapien
ttatacagaatttcaactctcattgtagagagc

SEQ ID NO: 857153 - DNA, 33 bp, Homo sapien
tagataataagcaacaagagagattttcagatg

SEQ ID NO: 857154 - DNA, 33 bp, Homo sapien
tagataataagcaacatgagagattttcagatg

SEQ ID NO: 857155 - DNA, 33 bp, Homo sapien
tgcttggactcttgtaaatgaaggagacatagt

SEQ ID NO: 857156 - DNA, 33 bp, Homo sapien
tgcttggactcttgtagatgaaggagacatagt

SEQ ID NO: 857157 - DNA, 33 bp, Homo sapien
gaaccagcaacaatcaaaccagaagaaagaaaa

SEQ ID NO: 857158 - DNA, 33 bp, Homo sapien
gaaccagcaacaatcagaccagaagaaagaaaa

SEQ ID NO: 857159 - DNA, 33 bp, Homo sapien
tattctcatggaacggaagcgaagaaaagagat

SEQ ID NO: 857160 - DNA, 33 bp, Homo sapien
tattctcatggaacggcagcgaagaaaagagat

SEQ ID NO: 857161 - DNA, 33 bp, Homo sapien
tttagatatgttgagtctctgctgctacttgaa

SEQ ID NO: 857162 - DNA, 33 bp, Homo sapien
tttagatatgttgagtttctgctgctacttgaa

SEQ ID NO: 857163 - DNA, 33 bp, Homo sapien
cacacactgatctacactgaaaaaaatacaaac

SEQ ID NO: 857164 - DNA, 33 bp, Homo sapien
cacacactgatctacattgaaaaaaatacaaac

SEQ ID NO: 857165 - DNA, 33 bp, Homo sapien
ctggtgacatagtctgaacaatgcagcttgtgt

SEQ ID NO: 857166 - DNA, 33 bp, Homo sapien
ctggtgacatagtctggacaatgcagcttgtgt

SEQ ID NO: 857167 - DNA, 33 bp, Homo sapien
cttcaagggttgaaaaatttctgctaaagaata

SEQ ID NO: 857168 - DNA, 33 bp, Homo sapien
cttcaagggttgaaaagtttctgctaaagaata

SEQ ID NO: 857169 - DNA, 33 bp, Homo sapien
tatagaaaaatatcaccgcacttcaagggttga

SEQ ID NO: 857170 - DNA, 33 bp, Homo sapien
tatagaaaaatatcactgcacttcaagggttga

SEQ ID NO: 857171 - DNA, 33 bp, Homo sapien
aattagaagcaatgaaatagagtacattgtgga

SEQ ID NO: 857172 - DNA, 33 bp, Homo sapien
aattagaagcaatgaagtagagtacattgtgga

SEQ ID NO: 857173 - DNA, 33 bp, Homo sapien
gctggctatttggatacggcaaagagaacacat

SEQ ID NO: 857174 - DNA, 33 bp, Homo sapien
gctggctatttggatatggcaaagagaacacat

SEQ ID NO: 857175 - DNA, 33 bp, Homo sapien
atatttgtcaaacagacgagtaaataataggag

SEQ ID NO: 857176 - DNA, 33 bp, Homo sapien
atatttgtcaaacagatgagtaaataataggag

SEQ ID NO: 857177 - DNA, 33 bp, Homo sapien
ggacaagaactctggaaatagctaaagaaattt

SEQ ID NO: 857178 - DNA, 33 bp, Homo sapien
ggacaagaactctggagatagctaaagaaattt

SEQ ID NO: 857179 - DNA, 33 bp, Homo sapien
ctactgaacagtttgaactttggaatgggttga

SEQ ID NO: 857180 - DNA, 33 bp, Homo sapien
ctactgaacagtttgacctttggaatgggttga

SEQ ID NO: 857181 - DNA, 33 bp, Homo sapien
accctgctttatcttaccttgacgtcatttaac

SEQ ID NO: 857182 - DNA, 33 bp, Homo sapien
accctgctttatcttatcttgacgtcatttaac

SEQ ID NO: 857183 - DNA, 33 bp, Homo sapien
cattgtcttcaactcaaacatgacctccttcat

SEQ ID NO: 857184 - DNA, 33 bp, Homo sapien
cattgtcttcaactcatacatgacctccttcat

SEQ ID NO: 857185 - DNA, 33 bp, Homo sapien
atcatattttgtgtcacaatgcattcagagttc

SEQ ID NO: 857186 - DNA, 33 bp, Homo sapien
atcatattttgtgtcataatgcattcagagttc

SEQ ID NO: 857187 - DNA, 33 bp, Homo sapien
ctgcatgttgaaagtaaggatatatcattataa

SEQ ID NO: 857188 - DNA, 33 bp, Homo sapien
ctgcatgttgaaagtatggatatatcattataa

SEQ ID NO: 857189 - DNA, 33 bp, Homo sapien
attttgccagctgaacactctggaagttagtaa

SEQ ID NO: 857190 - DNA, 33 bp, Homo sapien
attttgccagctgaacgctctggaagttagtaa

SEQ ID NO: 857191 - DNA, 33 bp, Homo sapien
cacatatgttctttcaacctttgtttttcggtc

SEQ ID NO: 857192 - DNA, 33 bp, Homo sapien
cacatatgttctttcagcctttgtttttcggtc

SEQ ID NO: 857193 - DNA, 33 bp, Homo sapien
tttacttgagagtctactaatttagcaagtaat

SEQ ID NO: 857194 - DNA, 33 bp, Homo sapien
tttacttgagagtctagtaatttagcaagtaat

SEQ ID NO: 857195 - DNA, 33 bp, Homo sapien
tacacatgataatttaacttccacattgtctcc

SEQ ID NO: 857196 - DNA, 33 bp, Homo sapien
tacacatgataatttatcttccacattgtctcc

SEQ ID NO: 857197 - DNA, 33 bp, Homo sapien
gaaaacttaagcttcaagatacttataactgta

SEQ ID NO: 857198 - DNA, 33 bp, Homo sapien
gaaaacttaagcttcaggatacttataactgta

SEQ ID NO: 857199 - DNA, 33 bp, Homo sapien
aagaactaaaaactcaacattaacagatcacca

SEQ ID NO: 857200 - DNA, 33 bp, Homo sapien
aagaactaaaaactcagcattaacagatcacca

SEQ ID NO: 857201 - DNA, 33 bp, Homo sapien
tatgatttttcttagactccaacagtaatataa

SEQ ID NO: 857202 - DNA, 33 bp, Homo sapien
tatgatttttcttagattccaacagtaatataa

SEQ ID NO: 857203 - DNA, 33 bp, Homo sapien
aacagttttggagatcaaggttctttttttttt

SEQ ID NO: 857204 - DNA, 33 bp, Homo sapien
aacagttttggagatccaggttctttttttttt

SEQ ID NO: 857205 - DNA, 33 bp, Homo sapien
gtgactgtcacttgtgcatttaaaacttgagtc

SEQ ID NO: 857206 - DNA, 33 bp, Homo sapien
gtgactgtcacttgtggatttaaaacttgagtc

SEQ ID NO: 857207 - DNA, 33 bp, Homo sapien
ttttaatattaaagaacgtcatataagtgtcag

SEQ ID NO: 857208 - DNA, 33 bp, Homo sapien
ttttaatattaaagaaggtcatataagtgtcag

SEQ ID NO: 857209 - DNA, 33 bp, Homo sapien
taaaattagaggtttaccattttgcctttgatc

SEQ ID NO: 857210 - DNA, 33 bp, Homo sapien
taaaattagaggtttatcattttgcctttgatc

SEQ ID NO: 857211 - DNA, 33 bp, Homo sapien
actataccattttacaacagactcttgagcatg

SEQ ID NO: 857212 - DNA, 33 bp, Homo sapien
actataccattttacatcagactcttgagcatg

SEQ ID NO: 857213 - DNA, 33 bp, Homo sapien
aatattctcaatccaccgtcagttgaatccatg

SEQ ID NO: 857214 - DNA, 33 bp, Homo sapien
aatattctcaatccactgtcagttgaatccatg

SEQ ID NO: 857215 - DNA, 33 bp, Homo sapien
gttaatgtacagtcaaacccctgtatccatggt

SEQ ID NO: 857216 - DNA, 33 bp, Homo sapien
gttaatgtacagtcaaccccctgtatccatggt

SEQ ID NO: 857217 - DNA, 33 bp, Homo sapien
cactttgcagcaaaacactctgaactaattgtc

SEQ ID NO: 857218 - DNA, 33 bp, Homo sapien
cactttgcagcaaaactctctgaactaattgtc

SEQ ID NO: 857219 - DNA, 33 bp, Homo sapien
ttcactttgccattcgaaacttttcttacctat

SEQ ID NO: 857220 - DNA, 33 bp, Homo sapien
ttcactttgccattcgtaacttttcttacctat

SEQ ID NO: 857221 - DNA, 33 bp, Homo sapien
ctttgcaactgttaaccggaatcttcattttct

SEQ ID NO: 857222 - DNA, 33 bp, Homo sapien
ctttgcaactgttaactggaatcttcattttct

SEQ ID NO: 857223 - DNA, 33 bp, Homo sapien
ccttggtcagtcataaaacatacgttgagagca

SEQ ID NO: 857224 - DNA, 33 bp, Homo sapien
ccttggtcagtcataacacatacgttgagagca

SEQ ID NO: 857225 - DNA, 33 bp, Homo sapien
aagaaatttgcagtacaggaaaagcggtagttg

SEQ ID NO: 857226 - DNA, 33 bp, Homo sapien
aagaaatttgcagtacgggaaaagcggtagttg

SEQ ID NO: 857227 - DNA, 33 bp, Homo sapien
agataaaatttacaagcagatatggtaggaatc

SEQ ID NO: 857228 - DNA, 33 bp, Homo sapien
agataaaatttacaagtagatatggtaggaatc

SEQ ID NO: 857229 - DNA, 33 bp, Homo sapien
atagttcctccaagacaagaactggtgatttcc

SEQ ID NO: 857230 - DNA, 33 bp, Homo sapien
atagttcctccaagacgagaactggtgatttcc

SEQ ID NO: 857231 - DNA, 33 bp, Homo sapien
ggccaatctgagactgaagatgtgatattgtaa

SEQ ID NO: 857232 - DNA, 33 bp, Homo sapien
ggccaatctgagactggagatgtgatattgtaa

SEQ ID NO: 857233 - DNA, 33 bp, Homo sapien
cttcagttccttaaataagataatcctgaagat

SEQ ID NO: 857234 - DNA, 33 bp, Homo sapien
cttcagttccttaaatgagataatcctgaagat

SEQ ID NO: 857235 - DNA, 33 bp, Homo sapien
tattaaggctggaacggagctcttagtgactta

SEQ ID NO: 857236 - DNA, 33 bp, Homo sapien
tattaaggctggaacgtagctcttagtgactta

SEQ ID NO: 857237 - DNA, 33 bp, Homo sapien
gaaagatagatttctacgtaagccaaacctatc

SEQ ID NO: 857238 - DNA, 33 bp, Homo sapien
gaaagatagatttctaggtaagccaaacctatc

SEQ ID NO: 857239 - DNA, 33 bp, Homo sapien
tattaactccaagccaatgattatacttagtag

SEQ ID NO: 857240 - DNA, 33 bp, Homo sapien
tattaactccaagccagtgattatacttagtag

SEQ ID NO: 857241 - DNA, 33 bp, Homo sapien
gatgtgcagtgaatgacagatgatggaaactat

SEQ ID NO: 857242 - DNA, 33 bp, Homo sapien
gatgtgcagtgaatgatagatgatggaaactat

SEQ ID NO: 857243 - DNA, 33 bp, Homo sapien
aaattgacagctgcgacgagtgctatgaagaaa

SEQ ID NO: 857244 - DNA, 33 bp, Homo sapien
aaattgacagctgcgatgagtgctatgaagaaa

SEQ ID NO: 857245 - DNA, 33 bp, Homo sapien
agttccataattcagaaacatttggtttaagta

SEQ ID NO: 857246 - DNA, 33 bp, Homo sapien
agttccataattcagatacatttggtttaagta

SEQ ID NO: 857247 - DNA, 33 bp, Homo sapien
ctcatagtttttgagagtcaggaatacaagaat

SEQ ID NO: 857248 - DNA, 33 bp, Homo sapien
ctcatagtttttgagattcaggaatacaagaat

SEQ ID NO: 857249 - DNA, 33 bp, Homo sapien
tctttctgacatactgacaaatttccctctctt

SEQ ID NO: 857250 - DNA, 33 bp, Homo sapien
tctttctgacatactggcaaatttccctctctt

SEQ ID NO: 857251 - DNA, 33 bp, Homo sapien
ggttacttcttgtgagactagtatcaaattacc

SEQ ID NO: 857252 - DNA, 33 bp, Homo sapien
ggttacttcttgtgagtctagtatcaaattacc

SEQ ID NO: 857253 - DNA, 33 bp, Homo sapien
cacatcatcttatgtcaaaagtcatgttaacaa

SEQ ID NO: 857254 - DNA, 33 bp, Homo sapien
cacatcatcttatgtcgaaagtcatgttaacaa

SEQ ID NO: 857255 - DNA, 33 bp, Homo sapien
tgaagtagatgctcaacatatttgtagaataca

SEQ ID NO: 857256 - DNA, 33 bp, Homo sapien
tgaagtagatgctcaatatatttgtagaataca

SEQ ID NO: 857257 - DNA, 33 bp, Homo sapien
taatatcctgtatctacaagtaattcagacaaa

SEQ ID NO: 857258 - DNA, 33 bp, Homo sapien
taatatcctgtatctataagtaattcagacaaa

SEQ ID NO: 857259 - DNA, 33 bp, Homo sapien
ttgttcagatgcaatcacctggtaagtttcagt

SEQ ID NO: 857260 - DNA, 33 bp, Homo sapien
ttgttcagatgcaatcgcctggtaagtttcagt

SEQ ID NO: 857261 - DNA, 33 bp, Homo sapien
gcttttactcacagtgaaaggcaaatagggagc

SEQ ID NO: 857262 - DNA, 33 bp, Homo sapien
gcttttactcacagtggaaggcaaatagggagc

SEQ ID NO: 857263 - DNA, 33 bp, Homo sapien
aagcaataagtatagcaaacttgaatttattgg

SEQ ID NO: 857264 - DNA, 33 bp, Homo sapien
aagcaataagtatagcgaacttgaatttattgg

SEQ ID NO: 857265 - DNA, 33 bp, Homo sapien
atcttccccttccagacgttcatgcaaaaatct

SEQ ID NO: 857266 - DNA, 33 bp, Homo sapien
atcttccccttccagatgttcatgcaaaaatct

SEQ ID NO: 857267 - DNA, 33 bp, Homo sapien
ctgtcagcagataccgaagaaaataatatatgt

SEQ ID NO: 857268 - DNA, 33 bp, Homo sapien
ctgtcagcagataccgcagaaaataatatatgt

SEQ ID NO: 857269 - DNA, 33 bp, Homo sapien
attaggttgatggaaacgtgatcgtggttttcc

SEQ ID NO: 857270 - DNA, 33 bp, Homo sapien
attaggttgatggaaatgtgatcgtggttttcc

SEQ ID NO: 857271 - DNA, 33 bp, Homo sapien
taaacatagcatggaaaaaagctcctctttacc

SEQ ID NO: 857272 - DNA, 33 bp, Homo sapien
taaacatagcatggaagaaagctcctctttacc

SEQ ID NO: 857273 - DNA, 33 bp, Homo sapien
ggataatttactgttacaattttttcagttact

SEQ ID NO: 857274 - DNA, 33 bp, Homo sapien
ggataatttactgttagaattttttcagttact

SEQ ID NO: 857275 - DNA, 33 bp, Homo sapien
acagtttatgcatccagcgttaagtcatagcct

SEQ ID NO: 857276 - DNA, 33 bp, Homo sapien
acagtttatgcatccatcgttaagtcatagcct

SEQ ID NO: 857277 - DNA, 33 bp, Homo sapien
agataacctcccatgcaaaatgagtaggtttta

SEQ ID NO: 857278 - DNA, 33 bp, Homo sapien
agataacctcccatgcgaaatgagtaggtttta

SEQ ID NO: 857279 - DNA, 33 bp, Homo sapien
tggaccccaagttggacgagaactgcagaaagc

SEQ ID NO: 857280 - DNA, 33 bp, Homo sapien
tggaccccaagttggatgagaactgcagaaagc

SEQ ID NO: 857281 - DNA, 33 bp, Homo sapien
gtaattactgggaatcagactgtccacttttta

SEQ ID NO: 857282 - DNA, 33 bp, Homo sapien
gtaattactgggaatcggactgtccacttttta

SEQ ID NO: 857283 - DNA, 33 bp, Homo sapien
catttgcaacatcataagtgaaactggaagtca

SEQ ID NO: 857284 - DNA, 33 bp, Homo sapien
catttgcaacatcataggtgaaactggaagtca

SEQ ID NO: 857285 - DNA, 33 bp, Homo sapien
ttggccatcttggaaccgggcactttcaagaca

SEQ ID NO: 857286 - DNA, 33 bp, Homo sapien
ttggccatcttggaactgggcactttcaagaca

SEQ ID NO: 857287 - DNA, 33 bp, Homo sapien
agtcaaaagaactatccagaccgaaacaaagag

SEQ ID NO: 857288 - DNA, 33 bp, Homo sapien
agtcaaaagaactatctagaccgaaacaaagag

SEQ ID NO: 857289 - DNA, 33 bp, Homo sapien
caatactaagaaactcactagaatgcagagcag

SEQ ID NO: 857290 - DNA, 33 bp, Homo sapien
caatactaagaaactcgctagaatgcagagcag

SEQ ID NO: 857291 - DNA, 33 bp, Homo sapien
gcctaaaaagaatagcaccatcgagctttttaa

SEQ ID NO: 857292 - DNA, 33 bp, Homo sapien
gcctaaaaagaatagcgccatcgagctttttaa

SEQ ID NO: 857293 - DNA, 33 bp, Homo sapien
ctaggaataaaataaacgggcagctatgaaaat

SEQ ID NO: 857294 - DNA, 33 bp, Homo sapien
ctaggaataaaataaatgggcagctatgaaaat

SEQ ID NO: 857295 - DNA, 33 bp, Homo sapien
atccactgcaactgtacacccattctgtggtta

SEQ ID NO: 857296 - DNA, 33 bp, Homo sapien
atccactgcaactgtatacccattctgtggtta

SEQ ID NO: 857297 - DNA, 33 bp, Homo sapien
aatctggcttcttacaataatagctctgacacc

SEQ ID NO: 857298 - DNA, 33 bp, Homo sapien
aatctggcttcttacagtaatagctctgacacc

SEQ ID NO: 857299 - DNA, 33 bp, Homo sapien
gacatagctctgagttaaaagagtgacagcgaa

SEQ ID NO: 857300 - DNA, 33 bp, Homo sapien
gacatagctctgagttgaaagagtgacagcgaa

SEQ ID NO: 857301 - DNA, 33 bp, Homo sapien
tctggtttcaaatgaaagatagttgcgggaaga

SEQ ID NO: 857302 - DNA, 33 bp, Homo sapien
tctggtttcaaatgaaggatagttgcgggaaga

SEQ ID NO: 857303 - DNA, 33 bp, Homo sapien
tggttgtagacattacacagcaccattgttagt

SEQ ID NO: 857304 - DNA, 33 bp, Homo sapien
tggttgtagacattacgcagcaccattgttagt

SEQ ID NO: 857305 - DNA, 33 bp, Homo sapien
actctacagtatagcacggtagataagaaaaaa

SEQ ID NO: 857306 - DNA, 33 bp, Homo sapien
actctacagtatagcatggtagataagaaaaaa

SEQ ID NO: 857307 - DNA, 33 bp, Homo sapien
aatgtgctctgttcaaccagtcacaccttcctt

SEQ ID NO: 857308 - DNA, 33 bp, Homo sapien
aatgtgctctgttcaatcagtcacaccttcctt

SEQ ID NO: 857309 - DNA, 33 bp, Homo sapien
gctctttggctgtcaggatctcaaattcaacat

SEQ ID NO: 857310 - DNA, 33 bp, Homo sapien
gctctttggctgtcagtatctcaaattcaacat

SEQ ID NO: 857311 - DNA, 33 bp, Homo sapien
gagtgagatacatgaactccaaatatctgagac

SEQ ID NO: 857312 - DNA, 33 bp, Homo sapien
gagtgagatacatgaattccaaatatctgagac

SEQ ID NO: 857313 - DNA, 33 bp, Homo sapien
gtcaagtcaaataaacagaaagtatccattaga

SEQ ID NO: 857314 - DNA, 33 bp, Homo sapien
gtcaagtcaaataaacggaaagtatccattaga

SEQ ID NO: 857315 - DNA, 33 bp, Homo sapien
ctttgggactttcataaccaaaacagagaattt

SEQ ID NO: 857316 - DNA, 33 bp, Homo sapien
ctttgggactttcatatccaaaacagagaattt

SEQ ID NO: 857317 - DNA, 33 bp, Homo sapien
acatagttcgtttttcccacaaagtcacaaaca

SEQ ID NO: 857318 - DNA, 33 bp, Homo sapien
acatagttcgtttttctcacaaagtcacaaaca

SEQ ID NO: 857319 - DNA, 33 bp, Homo sapien
atgataacaacgatgaagtatttccaagttcgg

SEQ ID NO: 857320 - DNA, 33 bp, Homo sapien
atgataacaacgatgacgtatttccaagttcgg

SEQ ID NO: 857321 - DNA, 33 bp, Homo sapien
atttcttcagttccgacaaagcactaacagcac

SEQ ID NO: 857322 - DNA, 33 bp, Homo sapien
atttcttcagttccgataaagcactaacagcac

SEQ ID NO: 857323 - DNA, 33 bp, Homo sapien
aataagattttttccaagatcatagaaagcaaa

SEQ ID NO: 857324 - DNA, 33 bp, Homo sapien
aataagattttttccatgatcatagaaagcaaa

SEQ ID NO: 857325 - DNA, 33 bp, Homo sapien
ggtaaattccactcagcaacttgttacagtatt

SEQ ID NO: 857326 - DNA, 33 bp, Homo sapien
ggtaaattccactcaggaacttgttacagtatt

SEQ ID NO: 857327 - DNA, 33 bp, Homo sapien
aaaagaaaaatatctcacactttctacaagtat

SEQ ID NO: 857328 - DNA, 33 bp, Homo sapien
aaaagaaaaatatctcgcactttctacaagtat

SEQ ID NO: 857329 - DNA, 33 bp, Homo sapien
aaagatcttttgacaaagaaggtaaaagcattt

SEQ ID NO: 857330 - DNA, 33 bp, Homo sapien
aaagatcttttgacaatgaaggtaaaagcattt

SEQ ID NO: 857331 - DNA, 33 bp, Homo sapien
cggagtgctattctaacgagtgctcctccaagt

SEQ ID NO: 857332 - DNA, 33 bp, Homo sapien
cggagtgctattctaatgagtgctcctccaagt

SEQ ID NO: 857333 - DNA, 33 bp, Homo sapien
tatgtaaactgttccaaaaggaatatgtttact

SEQ ID NO: 857334 - DNA, 33 bp, Homo sapien
tatgtaaactgttccagaaggaatatgtttact

SEQ ID NO: 857335 - DNA, 33 bp, Homo sapien
aagaagaaaactaaaactcattacaacattgga

SEQ ID NO: 857336 - DNA, 33 bp, Homo sapien
aagaagaaaactaaaagtcattacaacattgga

SEQ ID NO: 857337 - DNA, 33 bp, Homo sapien
ctaaaacttaagtcaaaaataagaccgcaactg

SEQ ID NO: 857338 - DNA, 33 bp, Homo sapien
ctaaaacttaagtcaacaataagaccgcaactg

SEQ ID NO: 857339 - DNA, 33 bp, Homo sapien
gtaacaagtattgttaaggatgtagagggacag

SEQ ID NO: 857340 - DNA, 33 bp, Homo sapien
gtaacaagtattgttacggatgtagagggacag

SEQ ID NO: 857341 - DNA, 33 bp, Homo sapien
tgaagccataatcagaagctaattaagaaatat

SEQ ID NO: 857342 - DNA, 33 bp, Homo sapien
tgaagccataatcagatgctaattaagaaatat

SEQ ID NO: 857343 - DNA, 33 bp, Homo sapien
ctgatagagtagcctacgaagagccatgaggcc

SEQ ID NO: 857344 - DNA, 33 bp, Homo sapien
ctgatagagtagcctatgaagagccatgaggcc

SEQ ID NO: 857345 - DNA, 33 bp, Homo sapien
ccaaatataagcacaactgatccttattacagg

SEQ ID NO: 857346 - DNA, 33 bp, Homo sapien
ccaaatataagcacaattgatccttattacagg

SEQ ID NO: 857347 - DNA, 33 bp, Homo sapien
aatgtttgcctacttaaaggcctgtaataagga

SEQ ID NO: 857348 - DNA, 33 bp, Homo sapien
aatgtttgcctacttagaggcctgtaataagga

SEQ ID NO: 857349 - DNA, 33 bp, Homo sapien
aactatgacttctaaggatcctgccactttttt

SEQ ID NO: 857350 - DNA, 33 bp, Homo sapien
aactatgacttctaagtatcctgccactttttt

SEQ ID NO: 857351 - DNA, 33 bp, Homo sapien
gttgctttgtagttctaaatgatttgcctttga

SEQ ID NO: 857352 - DNA, 33 bp, Homo sapien
gttgctttgtagttctgaatgatttgcctttga

SEQ ID NO: 857353 - DNA, 33 bp, Homo sapien
ttggatttgcttcaaaataatgcttgtgttagt

SEQ ID NO: 857354 - DNA, 33 bp, Homo sapien
ttggatttgcttcaaagtaatgcttgtgttagt

SEQ ID NO: 857355 - DNA, 33 bp, Homo sapien
atttcatacactgaccactatagtctggccaat

SEQ ID NO: 857356 - DNA, 33 bp, Homo sapien
atttcatacactgaccgctatagtctggccaat

SEQ ID NO: 857357 - DNA, 33 bp, Homo sapien
tccccaaaatatcactcaattctcaaactggag

SEQ ID NO: 857358 - DNA, 33 bp, Homo sapien
tccccaaaatatcactgaattctcaaactggag

SEQ ID NO: 857359 - DNA, 33 bp, Homo sapien
gaactcatacaagaaacacagatcacagtattt

SEQ ID NO: 857360 - DNA, 33 bp, Homo sapien
gaactcatacaagaaagacagatcacagtattt

SEQ ID NO: 857361 - DNA, 33 bp, Homo sapien
tgatctcaggatgtgaaaaaaggcatttcttat

SEQ ID NO: 857362 - DNA, 33 bp, Homo sapien
tgatctcaggatgtgacaaaaggcatttcttat

SEQ ID NO: 857363 - DNA, 33 bp, Homo sapien
acccacttagttgctaaagccaagggacctgtc

SEQ ID NO: 857364 - DNA, 33 bp, Homo sapien
acccacttagttgctacagccaagggacctgtc

SEQ ID NO: 857365 - DNA, 33 bp, Homo sapien
ggaagatactaaactccattctggaatgtggcg

SEQ ID NO: 857366 - DNA, 33 bp, Homo sapien
ggaagatactaaactctattctggaatgtggcg

SEQ ID NO: 857367 - DNA, 33 bp, Homo sapien
tttattctgcaccaggcagtttgttacttttcc

SEQ ID NO: 857368 - DNA, 33 bp, Homo sapien
tttattctgcaccagggagtttgttacttttcc

SEQ ID NO: 857369 - DNA, 33 bp, Homo sapien
atcaggttaagaaatacgttatcaatcagagaa

SEQ ID NO: 857370 - DNA, 33 bp, Homo sapien
atcaggttaagaaatatgttatcaatcagagaa

SEQ ID NO: 857371 - DNA, 33 bp, Homo sapien
caatgaactattagccaaaatagcatatctatg

SEQ ID NO: 857372 - DNA, 33 bp, Homo sapien
caatgaactattagccgaaatagcatatctatg

SEQ ID NO: 857373 - DNA, 33 bp, Homo sapien
acctctgcaggatacacgtttggttgccagcaa

SEQ ID NO: 857374 - DNA, 33 bp, Homo sapien
acctctgcaggatacatgtttggttgccagcaa

SEQ ID NO: 857375 - DNA, 33 bp, Homo sapien
aggagctactatattcaacgtgattcttcatat

SEQ ID NO: 857376 - DNA, 33 bp, Homo sapien
aggagctactatattcgacgtgattcttcatat

SEQ ID NO: 857377 - DNA, 33 bp, Homo sapien
taggtatgtgacctaaaagactcaaacctaaag

SEQ ID NO: 857378 - DNA, 33 bp, Homo sapien
taggtatgtgacctaagagactcaaacctaaag

SEQ ID NO: 857379 - DNA, 33 bp, Homo sapien
atgtgtctagagacaacagatgaaagatttgtt

SEQ ID NO: 857380 - DNA, 33 bp, Homo sapien
atgtgtctagagacaatagatgaaagatttgtt

SEQ ID NO: 857381 - DNA, 33 bp, Homo sapien
agggtgtggtcttccaaatgaagctatttttaa

SEQ ID NO: 857382 - DNA, 33 bp, Homo sapien
agggtgtggtcttccacatgaagctatttttaa

SEQ ID NO: 857383 - DNA, 33 bp, Homo sapien
cagggaaggatgagaaatctggaacaataattc

SEQ ID NO: 857384 - DNA, 33 bp, Homo sapien
cagggaaggatgagaagtctggaacaataattc

SEQ ID NO: 857385 - DNA, 33 bp, Homo sapien
ctatccttaaggtgtagcatctaacaacactgc

SEQ ID NO: 857386 - DNA, 33 bp, Homo sapien
ctatccttaaggtgtatcatctaacaacactgc

SEQ ID NO: 857387 - DNA, 33 bp, Homo sapien
gttcaactacatcctcactgattttttgcctac

SEQ ID NO: 857388 - DNA, 33 bp, Homo sapien
gttcaactacatcctcgctgattttttgcctac

SEQ ID NO: 857389 - DNA, 33 bp, Homo sapien
aacagtgctggcttgaagggtttatgggtactg

SEQ ID NO: 857390 - DNA, 33 bp, Homo sapien
aacagtgctggcttgaggggtttatgggtactg

SEQ ID NO: 857391 - DNA, 33 bp, Homo sapien
tttccactgattcttgaataaaggtcaaagtag

SEQ ID NO: 857392 - DNA, 33 bp, Homo sapien
tttccactgattcttggataaaggtcaaagtag

SEQ ID NO: 857393 - DNA, 33 bp, Homo sapien
agcaacttcataagaaccaaaaatcagatgagc

SEQ ID NO: 857394 - DNA, 33 bp, Homo sapien
agcaacttcataagaatcaaaaatcagatgagc

SEQ ID NO: 857395 - DNA, 33 bp, Homo sapien
gtataaaacatggaacaaaagatgactgatttg

SEQ ID NO: 857396 - DNA, 33 bp, Homo sapien
gtataaaacatggaacgaaagatgactgatttg

SEQ ID NO: 857397 - DNA, 33 bp, Homo sapien
tcctctcatcctgttccactcacatcctctctc

SEQ ID NO: 857398 - DNA, 33 bp, Homo sapien
tcctctcatcctgttctactcacatcctctctc

SEQ ID NO: 857399 - DNA, 33 bp, Homo sapien
tatactctaaatgaaaagttgccaattgctttc

SEQ ID NO: 857400 - DNA, 33 bp, Homo sapien
tatactctaaatgaaaggttgccaattgctttc

SEQ ID NO: 857401 - DNA, 33 bp, Homo sapien
atgacaaactcctttacgaaacatgaattattt

SEQ ID NO: 857402 - DNA, 33 bp, Homo sapien
atgacaaactcctttatgaaacatgaattattt

SEQ ID NO: 857403 - DNA, 33 bp, Homo sapien
atatctctgcaccatacaaagagaaaagtaaat

SEQ ID NO: 857404 - DNA, 33 bp, Homo sapien
atatctctgcaccatataaagagaaaagtaaat

SEQ ID NO: 857405 - DNA, 33 bp, Homo sapien
gagccatcagaagaataagggatttcctgactt

SEQ ID NO: 857406 - DNA, 33 bp, Homo sapien
gagccatcagaagaatgagggatttcctgactt

SEQ ID NO: 857407 - DNA, 33 bp, Homo sapien
caaaaaaaaggaaacggagaggccaatctcact

SEQ ID NO: 857408 - DNA, 33 bp, Homo sapien
caaaaaaaaggaaacgtagaggccaatctcact

SEQ ID NO: 857409 - DNA, 33 bp, Homo sapien
gagagtgctacatcaacctaaaatggcttcctt

SEQ ID NO: 857410 - DNA, 33 bp, Homo sapien
gagagtgctacatcaatctaaaatggcttcctt

SEQ ID NO: 857411 - DNA, 33 bp, Homo sapien
catacagcagatgtaaacttagcattggtttct

SEQ ID NO: 857412 - DNA, 33 bp, Homo sapien
catacagcagatgtaaccttagcattggtttct

SEQ ID NO: 857413 - DNA, 33 bp, Homo sapien
ctgggttactagcagcaagtgtgtacaggtctg

SEQ ID NO: 857414 - DNA, 33 bp, Homo sapien
ctgggttactagcagcgagtgtgtacaggtctg

SEQ ID NO: 857415 - DNA, 33 bp, Homo sapien
gagaggttggggtgcaatacggttatctgggtt

SEQ ID NO: 857416 - DNA, 33 bp, Homo sapien
gagaggttggggtgcagtacggttatctgggtt

SEQ ID NO: 857417 - DNA, 33 bp, Homo sapien
cagctgcggtaggagtcaccagtaattctcctc

SEQ ID NO: 857418 - DNA, 33 bp, Homo sapien
cagctgcggtaggagtgaccagtaattctcctc

SEQ ID NO: 857419 - DNA, 33 bp, Homo sapien
caaactgtcattgaaaataaatgtcctaagttg

SEQ ID NO: 857420 - DNA, 33 bp, Homo sapien
caaactgtcattgaaagtaaatgtcctaagttg

SEQ ID NO: 857421 - DNA, 33 bp, Homo sapien
gagggcaacaaaggtaaattttcttcaaatgac

SEQ ID NO: 857422 - DNA, 33 bp, Homo sapien
gagggcaacaaaggtatattttcttcaaatgac

SEQ ID NO: 857423 - DNA, 33 bp, Homo sapien
aggcataaaagaactacgtaaaaccagataact

SEQ ID NO: 857424 - DNA, 33 bp, Homo sapien
aggcataaaagaactatgtaaaaccagataact

SEQ ID NO: 857425 - DNA, 33 bp, Homo sapien
cacccctgagcaatgcacaatagaagcttcagc

SEQ ID NO: 857426 - DNA, 33 bp, Homo sapien
cacccctgagcaatgcgcaatagaagcttcagc

SEQ ID NO: 857427 - DNA, 33 bp, Homo sapien
gacatagtactatggacgttagaagggttagga

SEQ ID NO: 857428 - DNA, 33 bp, Homo sapien
gacatagtactatggatgttagaagggttagga

SEQ ID NO: 857429 - DNA, 33 bp, Homo sapien
ttactttaggtcacaaagtggatatgcatgttt

SEQ ID NO: 857430 - DNA, 33 bp, Homo sapien
ttactttaggtcacaatgtggatatgcatgttt

SEQ ID NO: 857431 - DNA, 33 bp, Homo sapien
atatacatatgtcgaacgccattttgaacactt

SEQ ID NO: 857432 - DNA, 33 bp, Homo sapien
atatacatatgtcgaatgccattttgaacactt

SEQ ID NO: 857433 - DNA, 33 bp, Homo sapien
ctgcccagaacacttacaactaacacagatgga

SEQ ID NO: 857434 - DNA, 33 bp, Homo sapien
ctgcccagaacacttagaactaacacagatgga

SEQ ID NO: 857435 - DNA, 33 bp, Homo sapien
gtacaaagccaaagagacaacttgaatagagat

SEQ ID NO: 857436 - DNA, 33 bp, Homo sapien
gtacaaagccaaagaggcaacttgaatagagat

SEQ ID NO: 857437 - DNA, 33 bp, Homo sapien
cagaccagatctttagaattttggaacaaagct

SEQ ID NO: 857438 - DNA, 33 bp, Homo sapien
cagaccagatctttagtattttggaacaaagct

SEQ ID NO: 857439 - DNA, 33 bp, Homo sapien
attctctgttttacagcatagcgtagtggctaa

SEQ ID NO: 857440 - DNA, 33 bp, Homo sapien
attctctgttttacagtatagcgtagtggctaa

SEQ ID NO: 857441 - DNA, 33 bp, Homo sapien
aactactcattttacaagatttggaaagtaagg

SEQ ID NO: 857442 - DNA, 33 bp, Homo sapien
aactactcattttacaggatttggaaagtaagg

SEQ ID NO: 857443 - DNA, 33 bp, Homo sapien
gctaagggaacaggttaaaaaagtgagtggcat

SEQ ID NO: 857444 - DNA, 33 bp, Homo sapien
gctaagggaacaggtttaaaaagtgagtggcat

SEQ ID NO: 857445 - DNA, 33 bp, Homo sapien
cacacacaaaattgtacgtaacgcatataccag

SEQ ID NO: 857446 - DNA, 33 bp, Homo sapien
cacacacaaaattgtatgtaacgcatataccag

SEQ ID NO: 857447 - DNA, 33 bp, Homo sapien
attaaaaataggcatcagaaaatgagacactat

SEQ ID NO: 857448 - DNA, 33 bp, Homo sapien
attaaaaataggcatcggaaaatgagacactat

SEQ ID NO: 857449 - DNA, 33 bp, Homo sapien
actccaagtcatgaagccattttactaagtttt

SEQ ID NO: 857450 - DNA, 33 bp, Homo sapien
actccaagtcatgaagtcattttactaagtttt

SEQ ID NO: 857451 - DNA, 33 bp, Homo sapien
tcctgatttgagaaaaagaattacacattaact

SEQ ID NO: 857452 - DNA, 33 bp, Homo sapien
tcctgatttgagaaaaggaattacacattaact

SEQ ID NO: 857453 - DNA, 33 bp, Homo sapien
tactgcatggaatcaacgaaggagtattttcat

SEQ ID NO: 857454 - DNA, 33 bp, Homo sapien
tactgcatggaatcaatgaaggagtattttcat

SEQ ID NO: 857455 - DNA, 33 bp, Homo sapien
tttaaaaagtgatctcaaagaaagcagttattt

SEQ ID NO: 857456 - DNA, 33 bp, Homo sapien
tttaaaaagtgatctctaagaaagcagttattt

SEQ ID NO: 857457 - DNA, 33 bp, Homo sapien
ccacaggatgtctcaaatgtttcagcattaatt

SEQ ID NO: 857458 - DNA, 33 bp, Homo sapien
ccacaggatgtctcaagtgtttcagcattaatt

SEQ ID NO: 857459 - DNA, 33 bp, Homo sapien
aaaccagactctttcccatcattttaaacctct

SEQ ID NO: 857460 - DNA, 33 bp, Homo sapien
aaaccagactctttccgatcattttaaacctct

SEQ ID NO: 857461 - DNA, 33 bp, Homo sapien
cttaacctcccacatgaatgagaataacagcac

SEQ ID NO: 857462 - DNA, 33 bp, Homo sapien
cttaacctcccacatggatgagaataacagcac

SEQ ID NO: 857463 - DNA, 33 bp, Homo sapien
ctttgactgcctttgcggaagagtaacccacaa

SEQ ID NO: 857464 - DNA, 33 bp, Homo sapien
ctttgactgcctttgctgaagagtaacccacaa

SEQ ID NO: 857465 - DNA, 33 bp, Homo sapien
ggtgctaggaaaagagcaaacttattgactaaa

SEQ ID NO: 857466 - DNA, 33 bp, Homo sapien
ggtgctaggaaaagaggaaacttattgactaaa

SEQ ID NO: 857467 - DNA, 33 bp, Homo sapien
taaaaagaaagaataaatgtcacttgtgcctcc

SEQ ID NO: 857468 - DNA, 33 bp, Homo sapien
taaaaagaaagaataagtgtcacttgtgcctcc

SEQ ID NO: 857469 - DNA, 33 bp, Homo sapien
agacactgacatatgaacaaaaaatttcagtaa

SEQ ID NO: 857470 - DNA, 33 bp, Homo sapien
agacactgacatatgagcaaaaaatttcagtaa

SEQ ID NO: 857471 - DNA, 33 bp, Homo sapien
ttaaaagtagacttaactgaggaattttattac

SEQ ID NO: 857472 - DNA, 33 bp, Homo sapien
ttaaaagtagacttaattgaggaattttattac

SEQ ID NO: 857473 - DNA, 33 bp, Homo sapien
gttacgaattcacaaacgtattcctgttctggt

SEQ ID NO: 857474 - DNA, 33 bp, Homo sapien
gttacgaattcacaaatgtattcctgttctggt

SEQ ID NO: 857475 - DNA, 33 bp, Homo sapien
agtactataacccatacaaatggcaccaacatt

SEQ ID NO: 857476 - DNA, 33 bp, Homo sapien
agtactataacccatataaatggcaccaacatt

SEQ ID NO: 857477 - DNA, 33 bp, Homo sapien
agaacagataataagccgagttacagaaaacag

SEQ ID NO: 857478 - DNA, 33 bp, Homo sapien
agaacagataataagctgagttacagaaaacag

SEQ ID NO: 857479 - DNA, 33 bp, Homo sapien
tctaaatgctgtatagccattcatttagcagac

SEQ ID NO: 857480 - DNA, 33 bp, Homo sapien
tctaaatgctgtatagtcattcatttagcagac

SEQ ID NO: 857481 - DNA, 33 bp, Homo sapien
actctcaggacattaaatccttctcaacctgtg

SEQ ID NO: 857482 - DNA, 33 bp, Homo sapien
actctcaggacattaattccttctcaacctgtg

SEQ ID NO: 857483 - DNA, 33 bp, Homo sapien
gcacctagttaattcacgtttaaaatggtgtcc

SEQ ID NO: 857484 - DNA, 33 bp, Homo sapien
gcacctagttaattcatgtttaaaatggtgtcc

SEQ ID NO: 857485 - DNA, 33 bp, Homo sapien
taggtttgacaaataactaggtcacagcagtta

SEQ ID NO: 857486 - DNA, 33 bp, Homo sapien
taggtttgacaaataagtaggtcacagcagtta

SEQ ID NO: 857487 - DNA, 33 bp, Homo sapien
tagctgagcctaacaactaactgaacttccttc

SEQ ID NO: 857488 - DNA, 33 bp, Homo sapien
tagctgagcctaacaattaactgaacttccttc

SEQ ID NO: 857489 - DNA, 33 bp, Homo sapien
ttccctcttgcttagaacattccagtagccatt

SEQ ID NO: 857490 - DNA, 33 bp, Homo sapien
ttccctcttgcttagagcattccagtagccatt

SEQ ID NO: 857491 - DNA, 33 bp, Homo sapien
aagaacagccagaggaagagaaaagttaaatgg

SEQ ID NO: 857492 - DNA, 33 bp, Homo sapien
aagaacagccagaggaggagaaaagttaaatgg

SEQ ID NO: 857493 - DNA, 33 bp, Homo sapien
gatcaccctctgccaccgcgttaagttcatatg

SEQ ID NO: 857494 - DNA, 33 bp, Homo sapien
gatcaccctctgccactgcgttaagttcatatg

SEQ ID NO: 857495 - DNA, 33 bp, Homo sapien
ttaaaatatgtaaatgaaatcaatgttggattc

SEQ ID NO: 857496 - DNA, 33 bp, Homo sapien
ttaaaatatgtaaatggaatcaatgttggattc

SEQ ID NO: 857497 - DNA, 33 bp, Homo sapien
tatgtggaactctctacactttctactcagttt

SEQ ID NO: 857498 - DNA, 33 bp, Homo sapien
tatgtggaactctctatactttctactcagttt

SEQ ID NO: 857499 - DNA, 33 bp, Homo sapien
taatgaattcctgtaccatttgcttgtctgaaa

SEQ ID NO: 857500 - DNA, 33 bp, Homo sapien
taatgaattcctgtacgatttgcttgtctgaaa

SEQ ID NO: 857501 - DNA, 33 bp, Homo sapien
attaaaattaagcatccgagtcattacaaactt

SEQ ID NO: 857502 - DNA, 33 bp, Homo sapien
attaaaattaagcatctgagtcattacaaactt

SEQ ID NO: 857503 - DNA, 33 bp, Homo sapien
agctgtgtggaactgaatactccctgttcatgt

SEQ ID NO: 857504 - DNA, 33 bp, Homo sapien
agctgtgtggaactgagtactccctgttcatgt

SEQ ID NO: 857505 - DNA, 33 bp, Homo sapien
catgtaattttgtgagaaaaggatacttacccc

SEQ ID NO: 857506 - DNA, 33 bp, Homo sapien
catgtaattttgtgagtaaaggatacttacccc

SEQ ID NO: 857507 - DNA, 33 bp, Homo sapien
aacatttgaaggcataagactggttagcaaaag

SEQ ID NO: 857508 - DNA, 33 bp, Homo sapien
aacatttgaaggcataggactggttagcaaaag

SEQ ID NO: 857509 - DNA, 33 bp, Homo sapien
atcgtctttgtaaaaaactgatttggaacgaat

SEQ ID NO: 857510 - DNA, 33 bp, Homo sapien
atcgtctttgtaaaaatctgatttggaacgaat

SEQ ID NO: 857511 - DNA, 33 bp, Homo sapien
gcagctttggagttacactgaacacaggcaaaa

SEQ ID NO: 857512 - DNA, 33 bp, Homo sapien
gcagctttggagttactctgaacacaggcaaaa

SEQ ID NO: 857513 - DNA, 33 bp, Homo sapien
accttacgacacaaaactgacaaaaattctact

SEQ ID NO: 857514 - DNA, 33 bp, Homo sapien
accttacgacacaaaattgacaaaaattctact

SEQ ID NO: 857515 - DNA, 33 bp, Homo sapien
gagaagacgagagaccacttttattcaacttag

SEQ ID NO: 857516 - DNA, 33 bp, Homo sapien
gagaagacgagagaccgcttttattcaacttag

SEQ ID NO: 857517 - DNA, 33 bp, Homo sapien
aatctcactggcaaaagtaaatatacagacaaa

SEQ ID NO: 857518 - DNA, 33 bp, Homo sapien
aatctcactggcaaaattaaatatacagacaaa

SEQ ID NO: 857519 - DNA, 33 bp, Homo sapien
ggatggcattcctcaccatatacagtacttcta

SEQ ID NO: 857520 - DNA, 33 bp, Homo sapien
ggatggcattcctcactatatacagtacttcta

SEQ ID NO: 857521 - DNA, 33 bp, Homo sapien
tggtcaggtgtggctaccagtacacaattttac

SEQ ID NO: 857522 - DNA, 33 bp, Homo sapien
tggtcaggtgtggctatcagtacacaattttac

SEQ ID NO: 857523 - DNA, 33 bp, Homo sapien
agcatcagccttttcacgaagaatcaatcaaca

SEQ ID NO: 857524 - DNA, 33 bp, Homo sapien
agcatcagccttttcatgaagaatcaatcaaca

SEQ ID NO: 857525 - DNA, 33 bp, Homo sapien
ggtttcttcaccttcaaaaagtcagctcccttt

SEQ ID NO: 857526 - DNA, 33 bp, Homo sapien
ggtttcttcaccttcagaaagtcagctcccttt

SEQ ID NO: 857527 - DNA, 33 bp, Homo sapien
ttatgagaaaaagaaaaccaaatgagatgaaaa

SEQ ID NO: 857528 - DNA, 33 bp, Homo sapien
ttatgagaaaaagaaagccaaatgagatgaaaa

SEQ ID NO: 857529 - DNA, 33 bp, Homo sapien
tattacagcagaaccaatggtggagggcataga

SEQ ID NO: 857530 - DNA, 33 bp, Homo sapien
tattacagcagaaccagtggtggagggcataga

SEQ ID NO: 857531 - DNA, 33 bp, Homo sapien
cctcttgtctagtttggactgggatccatctcc

SEQ ID NO: 857532 - DNA, 33 bp, Homo sapien
cctcttgtctagtttgtactgggatccatctcc

SEQ ID NO: 857533 - DNA, 33 bp, Homo sapien
aaatttcagaggcagaaagaaagtgacggttca

SEQ ID NO: 857534 - DNA, 33 bp, Homo sapien
aaatttcagaggcagagagaaagtgacggttca

SEQ ID NO: 857535 - DNA, 33 bp, Homo sapien
agaactagagatgaaaaacttttccaattgttt

SEQ ID NO: 857536 - DNA, 33 bp, Homo sapien
agaactagagatgaaagacttttccaattgttt

SEQ ID NO: 857537 - DNA, 33 bp, Homo sapien
agacagctggagggaaatgagacacatggatag

SEQ ID NO: 857538 - DNA, 33 bp, Homo sapien
agacagctggagggaagtgagacacatggatag

SEQ ID NO: 857539 - DNA, 33 bp, Homo sapien
actactaataaatgaccaaagttcatacaagaa

SEQ ID NO: 857540 - DNA, 33 bp, Homo sapien
actactaataaatgacgaaagttcatacaagaa

SEQ ID NO: 857541 - DNA, 33 bp, Homo sapien
catctccctgaaatcccaccatcatcctgtttt

SEQ ID NO: 857542 - DNA, 33 bp, Homo sapien
catctccctgaaatcctaccatcatcctgtttt

SEQ ID NO: 857543 - DNA, 33 bp, Homo sapien
tttgtttcccatccacagtactattgttgggca

SEQ ID NO: 857544 - DNA, 33 bp, Homo sapien
tttgtttcccatccaccgtactattgttgggca

SEQ ID NO: 857545 - DNA, 33 bp, Homo sapien
attgcctgccatatgacgggtgctgggtagtca

SEQ ID NO: 857546 - DNA, 33 bp, Homo sapien
attgcctgccatatgatgggtgctgggtagtca

SEQ ID NO: 857547 - DNA, 33 bp, Homo sapien
cccatgacagcaggaccctgttggtgcttccca

SEQ ID NO: 857548 - DNA, 33 bp, Homo sapien
cccatgacagcaggactctgttggtgcttccca

SEQ ID NO: 857549 - DNA, 33 bp, Homo sapien
cagcagtgggcagaataagaaattgattacagt

SEQ ID NO: 857550 - DNA, 33 bp, Homo sapien
cagcagtgggcagaatgagaaattgattacagt

SEQ ID NO: 857551 - DNA, 33 bp, Homo sapien
tgatgaatggaatatacacgcttggagtggtga

SEQ ID NO: 857552 - DNA, 33 bp, Homo sapien
tgatgaatggaatatatacgcttggagtggtga

SEQ ID NO: 857553 - DNA, 33 bp, Homo sapien
tacagacatctaataacgctggtgtttacaatg

SEQ ID NO: 857554 - DNA, 33 bp, Homo sapien
tacagacatctaataatgctggtgtttacaatg

SEQ ID NO: 857555 - DNA, 33 bp, Homo sapien
tgacacaaggaaaagaatacaggacttgatgtc

SEQ ID NO: 857556 - DNA, 33 bp, Homo sapien
tgacacaaggaaaagactacaggacttgatgtc

SEQ ID NO: 857557 - DNA, 33 bp, Homo sapien
ccttctctaggatatacgtcacctatggatcca

SEQ ID NO: 857558 - DNA, 33 bp, Homo sapien
ccttctctaggatatatgtcacctatggatcca

SEQ ID NO: 857559 - DNA, 33 bp, Homo sapien
ccataaatgaggctcactgaaaaatactaccaa

SEQ ID NO: 857560 - DNA, 33 bp, Homo sapien
ccataaatgaggctcattgaaaaatactaccaa

SEQ ID NO: 857561 - DNA, 33 bp, Homo sapien
taaaagttgaaagttacatgaaatctatgagaa

SEQ ID NO: 857562 - DNA, 33 bp, Homo sapien
taaaagttgaaagttatatgaaatctatgagaa

SEQ ID NO: 857563 - DNA, 33 bp, Homo sapien
tttatctttatctttccagcaagcagtgttact

SEQ ID NO: 857564 - DNA, 33 bp, Homo sapien
tttatctttatctttctagcaagcagtgttact

SEQ ID NO: 857565 - DNA, 33 bp, Homo sapien
gtgttcagagatgggccagaagattgattatgg

SEQ ID NO: 857566 - DNA, 33 bp, Homo sapien
gtgttcagagatgggctagaagattgattatgg

SEQ ID NO: 857567 - DNA, 33 bp, Homo sapien
tattgaagtgattggaccatgaagttcaagtgt

SEQ ID NO: 857568 - DNA, 33 bp, Homo sapien
tattgaagtgattggatcatgaagttcaagtgt

SEQ ID NO: 857569 - DNA, 33 bp, Homo sapien
actaaaatatgtgaacaactaaaaacaacacat

SEQ ID NO: 857570 - DNA, 33 bp, Homo sapien
actaaaatatgtgaacgactaaaaacaacacat

SEQ ID NO: 857571 - DNA, 33 bp, Homo sapien
aagaccttccagtgaaataagatgtagaggtgg

SEQ ID NO: 857572 - DNA, 33 bp, Homo sapien
aagaccttccagtgaagtaagatgtagaggtgg

SEQ ID NO: 857573 - DNA, 33 bp, Homo sapien
gtcaaatggctggcaacagtttccttgccaggt

SEQ ID NO: 857574 - DNA, 33 bp, Homo sapien
gtcaaatggctggcaatagtttccttgccaggt

SEQ ID NO: 857575 - DNA, 33 bp, Homo sapien
gttgctaggatgcccaaatgcaaattaacaatc

SEQ ID NO: 857576 - DNA, 33 bp, Homo sapien
gttgctaggatgcccagatgcaaattaacaatc

SEQ ID NO: 857577 - DNA, 33 bp, Homo sapien
ctcatgagtgaccacactgtaatcttcccctct

SEQ ID NO: 857578 - DNA, 33 bp, Homo sapien
ctcatgagtgaccacattgtaatcttcccctct

SEQ ID NO: 857579 - DNA, 33 bp, Homo sapien
gaagtgggtggatgaaataggggagaagtgaaa

SEQ ID NO: 857580 - DNA, 33 bp, Homo sapien
gaagtgggtggatgaagtaggggagaagtgaaa

SEQ ID NO: 857581 - DNA, 33 bp, Homo sapien
gaaagcaggtattcagcataagccatattattt

SEQ ID NO: 857582 - DNA, 33 bp, Homo sapien
gaaagcaggtattcagtataagccatattattt

SEQ ID NO: 857583 - DNA, 33 bp, Homo sapien
aagaaaaacattctaacatccctgcaactcctt

SEQ ID NO: 857584 - DNA, 33 bp, Homo sapien
aagaaaaacattctaatatccctgcaactcctt

SEQ ID NO: 857585 - DNA, 33 bp, Homo sapien
atttaaaatgctgacaagaatgctccaaagtga

SEQ ID NO: 857586 - DNA, 33 bp, Homo sapien
atttaaaatgctgacaggaatgctccaaagtga

SEQ ID NO: 857587 - DNA, 33 bp, Homo sapien
actagccctattctaaatgtttgaccttttata

SEQ ID NO: 857588 - DNA, 33 bp, Homo sapien
actagccctattctaagtgtttgaccttttata

SEQ ID NO: 857589 - DNA, 33 bp, Homo sapien
tattgttcgagggaataagctaagactgatatt

SEQ ID NO: 857590 - DNA, 33 bp, Homo sapien
tattgttcgagggaatcagctaagactgatatt

SEQ ID NO: 857591 - DNA, 33 bp, Homo sapien
ttgaagcaagtctctacctaatctacccagagc

SEQ ID NO: 857592 - DNA, 33 bp, Homo sapien
ttgaagcaagtctctatctaatctacccagagc

SEQ ID NO: 857593 - DNA, 33 bp, Homo sapien
aaaccctgaagttagaaaatcctttcttcaccc

SEQ ID NO: 857594 - DNA, 33 bp, Homo sapien
aaaccctgaagttagagaatcctttcttcaccc

SEQ ID NO: 857595 - DNA, 33 bp, Homo sapien
tcaggacaagtataaaacattagcaagtagtat

SEQ ID NO: 857596 - DNA, 33 bp, Homo sapien
tcaggacaagtataaaccattagcaagtagtat

SEQ ID NO: 857597 - DNA, 33 bp, Homo sapien
attatatataatgaaacagcagacattttgagc

SEQ ID NO: 857598 - DNA, 33 bp, Homo sapien
attatatataatgaaagagcagacattttgagc

SEQ ID NO: 857599 - DNA, 33 bp, Homo sapien
tatttataatcttactaaagcaccactgttaca

SEQ ID NO: 857600 - DNA, 33 bp, Homo sapien
tatttataatcttactgaagcaccactgttaca

SEQ ID NO: 857601 - DNA, 33 bp, Homo sapien
attagtcattatattaactgcaatggtactact

SEQ ID NO: 857602 - DNA, 33 bp, Homo sapien
attagtcattatattacctgcaatggtactact

SEQ ID NO: 857603 - DNA, 33 bp, Homo sapien
gggaagaaattagctacgcaaaagatttgggaa

SEQ ID NO: 857604 - DNA, 33 bp, Homo sapien
gggaagaaattagctaggcaaaagatttgggaa

SEQ ID NO: 857605 - DNA, 33 bp, Homo sapien
tacattcctttatcaccgtaccttttcatttac

SEQ ID NO: 857606 - DNA, 33 bp, Homo sapien
tacattcctttatcacggtaccttttcatttac

SEQ ID NO: 857607 - DNA, 33 bp, Homo sapien
cgcgagagtccgtcagcccgggacgaggtactg

SEQ ID NO: 857608 - DNA, 33 bp, Homo sapien
cgcgagagtccgtcagtccgggacgaggtactg

SEQ ID NO: 857609 - DNA, 33 bp, Homo sapien
aaagcagctgatcaaacgtgtatgggggcctgt

SEQ ID NO: 857610 - DNA, 33 bp, Homo sapien
aaagcagctgatcaaatgtgtatgggggcctgt

SEQ ID NO: 857611 - DNA, 33 bp, Homo sapien
taacatgcctgcataacgaggacccactaaaaa

SEQ ID NO: 857612 - DNA, 33 bp, Homo sapien
taacatgcctgcataatgaggacccactaaaaa

SEQ ID NO: 857613 - DNA, 33 bp, Homo sapien
agaagtaaaagtgaccactcttgaaataaatag

SEQ ID NO: 857614 - DNA, 33 bp, Homo sapien
agaagtaaaagtgacccctcttgaaataaatag

SEQ ID NO: 857615 - DNA, 33 bp, Homo sapien
aacaacctgaagctaactagaccaattaattcc

SEQ ID NO: 857616 - DNA, 33 bp, Homo sapien
aacaacctgaagctaagtagaccaattaattcc

SEQ ID NO: 857617 - DNA, 33 bp, Homo sapien
tccttaagcagaataacatcagatcaagtgtac

SEQ ID NO: 857618 - DNA, 33 bp, Homo sapien
tccttaagcagaataatatcagatcaagtgtac

SEQ ID NO: 857619 - DNA, 33 bp, Homo sapien
tttgcccctctgcccaaaaccttctaacatttt

SEQ ID NO: 857620 - DNA, 33 bp, Homo sapien
tttgcccctctgcccagaaccttctaacatttt

SEQ ID NO: 857621 - DNA, 33 bp, Homo sapien
ggggttggggagaagacgcaatagctctgtttt

SEQ ID NO: 857622 - DNA, 33 bp, Homo sapien
ggggttggggagaagatgcaatagctctgtttt

SEQ ID NO: 857623 - DNA, 33 bp, Homo sapien
atggagaaacagataactggaaaactcactcag

SEQ ID NO: 857624 - DNA, 33 bp, Homo sapien
atggagaaacagataattggaaaactcactcag

SEQ ID NO: 857625 - DNA, 33 bp, Homo sapien
aaattccaaagttgcactgacaattcggatcta

SEQ ID NO: 857626 - DNA, 33 bp, Homo sapien
aaattccaaagttgcagtgacaattcggatcta

SEQ ID NO: 857627 - DNA, 33 bp, Homo sapien
gtttgagaagcatccaagcctagttctggatga

SEQ ID NO: 857628 - DNA, 33 bp, Homo sapien
gtttgagaagcatccatgcctagttctggatga

SEQ ID NO: 857629 - DNA, 33 bp, Homo sapien
ggtcctgacttacttacgtattactgaggtctc

SEQ ID NO: 857630 - DNA, 33 bp, Homo sapien
ggtcctgacttacttatgtattactgaggtctc

SEQ ID NO: 857631 - DNA, 33 bp, Homo sapien
aattgcaacttaaaagcccattgaaattcagtg

SEQ ID NO: 857632 - DNA, 33 bp, Homo sapien
aattgcaacttaaaaggccattgaaattcagtg

SEQ ID NO: 857633 - DNA, 33 bp, Homo sapien
atgtgacaatagtaaccatttggaaagcacact

SEQ ID NO: 857634 - DNA, 33 bp, Homo sapien
atgtgacaatagtaacgatttggaaagcacact

SEQ ID NO: 857635 - DNA, 33 bp, Homo sapien
aatcttgaagtagagcaatgttgaagaactcag

SEQ ID NO: 857636 - DNA, 33 bp, Homo sapien
aatcttgaagtagagcgatgttgaagaactcag

SEQ ID NO: 857637 - DNA, 33 bp, Homo sapien
agaattataatccatcaaaccccaagtgctaag

SEQ ID NO: 857638 - DNA, 33 bp, Homo sapien
agaattataatccatcgaaccccaagtgctaag

SEQ ID NO: 857639 - DNA, 33 bp, Homo sapien
atctgaattggtttacaaagaggaaatctgcta

SEQ ID NO: 857640 - DNA, 33 bp, Homo sapien
atctgaattggtttacgaagaggaaatctgcta

SEQ ID NO: 857641 - DNA, 33 bp, Homo sapien
tctgtgtgtcaggtaccgcaaatataatcatga

SEQ ID NO: 857642 - DNA, 33 bp, Homo sapien
tctgtgtgtcaggtactgcaaatataatcatga

SEQ ID NO: 857643 - DNA, 33 bp, Homo sapien
tgctgttagttggaagcatgatttcagtaggaa

SEQ ID NO: 857644 - DNA, 33 bp, Homo sapien
tgctgttagttggaagtatgatttcagtaggaa

SEQ ID NO: 857645 - DNA, 33 bp, Homo sapien
tgaatccatgaggatgaagtgatatgtagacat

SEQ ID NO: 857646 - DNA, 33 bp, Homo sapien
tgaatccatgaggatgtagtgatatgtagacat

SEQ ID NO: 857647 - DNA, 33 bp, Homo sapien
atgaagttgagtccctaaaatctgagttcatat

SEQ ID NO: 857648 - DNA, 33 bp, Homo sapien
atgaagttgagtccctgaaatctgagttcatat

SEQ ID NO: 857649 - DNA, 33 bp, Homo sapien
gaatcatccagaattacctgtaaaagcatcttt

SEQ ID NO: 857650 - DNA, 33 bp, Homo sapien
gaatcatccagaattatctgtaaaagcatcttt

SEQ ID NO: 857651 - DNA, 33 bp, Homo sapien
actcattgataaaactcacttgtaactgtgcta

SEQ ID NO: 857652 - DNA, 33 bp, Homo sapien
actcattgataaaacttacttgtaactgtgcta

SEQ ID NO: 857653 - DNA, 33 bp, Homo sapien
ttaaagtaaaataaaagaccccagtcaggagac

SEQ ID NO: 857654 - DNA, 33 bp, Homo sapien
ttaaagtaaaataaaataccccagtcaggagac

SEQ ID NO: 857655 - DNA, 33 bp, Homo sapien
tgttaggttgacattcaataatatggatgagta

SEQ ID NO: 857656 - DNA, 33 bp, Homo sapien
tgttaggttgacattcgataatatggatgagta

SEQ ID NO: 857657 - DNA, 33 bp, Homo sapien
attactcttatgggtaagtctaagaacagcagt

SEQ ID NO: 857658 - DNA, 33 bp, Homo sapien
attactcttatgggtaggtctaagaacagcagt

SEQ ID NO: 857659 - DNA, 33 bp, Homo sapien
actcttatttgccagcaatgcaatgtatgtgtg

SEQ ID NO: 857660 - DNA, 33 bp, Homo sapien
actcttatttgccagcgatgcaatgtatgtgtg

SEQ ID NO: 857661 - DNA, 33 bp, Homo sapien
ttagagtattggaacactgtgttactgtttgaa

SEQ ID NO: 857662 - DNA, 33 bp, Homo sapien
ttagagtattggaacattgtgttactgtttgaa

SEQ ID NO: 857663 - DNA, 33 bp, Homo sapien
ggtgtttaaaaatgtagagaaaccacttgcata

SEQ ID NO: 857664 - DNA, 33 bp, Homo sapien
ggtgtttaaaaatgtatagaaaccacttgcata

SEQ ID NO: 857665 - DNA, 33 bp, Homo sapien
aggcattaaaaggtaccacttgtgtatataact

SEQ ID NO: 857666 - DNA, 33 bp, Homo sapien
aggcattaaaaggtactacttgtgtatataact

SEQ ID NO: 857667 - DNA, 33 bp, Homo sapien
gttcaaaatttataaacttacatctgaagtcat

SEQ ID NO: 857668 - DNA, 33 bp, Homo sapien
gttcaaaatttataaagttacatctgaagtcat

SEQ ID NO: 857669 - DNA, 33 bp, Homo sapien
ttaccactaaaggatacgttttccaatattgac

SEQ ID NO: 857670 - DNA, 33 bp, Homo sapien
ttaccactaaaggataggttttccaatattgac

SEQ ID NO: 857671 - DNA, 33 bp, Homo sapien
gatgagtaaatcagcacagaagaagataaaaca

SEQ ID NO: 857672 - DNA, 33 bp, Homo sapien
gatgagtaaatcagcatagaagaagataaaaca

SEQ ID NO: 857673 - DNA, 33 bp, Homo sapien
ttaagtagatctttcacgtgtatgttttattca

SEQ ID NO: 857674 - DNA, 33 bp, Homo sapien
ttaagtagatctttcaggtgtatgttttattca

SEQ ID NO: 857675 - DNA, 33 bp, Homo sapien
agggaaggagtaccaaaagactgaaccatttac

SEQ ID NO: 857676 - DNA, 33 bp, Homo sapien
agggaaggagtaccaacagactgaaccatttac

SEQ ID NO: 857677 - DNA, 33 bp, Homo sapien
tattttcttgtcacaacgagaaattttaaagtt

SEQ ID NO: 857678 - DNA, 33 bp, Homo sapien
tattttcttgtcacaatgagaaattttaaagtt

SEQ ID NO: 857679 - DNA, 33 bp, Homo sapien
ggcttccaaaccagagaatttatctaggtaaaa

SEQ ID NO: 857680 - DNA, 33 bp, Homo sapien
ggcttccaaaccagagtatttatctaggtaaaa

SEQ ID NO: 857681 - DNA, 33 bp, Homo sapien
ttttggattgtggaagacttaatatcacaaata

SEQ ID NO: 857682 - DNA, 33 bp, Homo sapien
ttttggattgtggaaggcttaatatcacaaata

SEQ ID NO: 857683 - DNA, 33 bp, Homo sapien
tcaagaaatatgctctaaaaaatgtacaaggac

SEQ ID NO: 857684 - DNA, 33 bp, Homo sapien
tcaagaaatatgctctgaaaaatgtacaaggac

SEQ ID NO: 857685 - DNA, 33 bp, Homo sapien
gatgtgaatgagaaaacttacaggaatatagat

SEQ ID NO: 857686 - DNA, 33 bp, Homo sapien
gatgtgaatgagaaaagttacaggaatatagat

SEQ ID NO: 857687 - DNA, 33 bp, Homo sapien
gtaaaacaatagggccaagttgacaatgtaaat

SEQ ID NO: 857688 - DNA, 33 bp, Homo sapien
gtaaaacaatagggccgagttgacaatgtaaat

SEQ ID NO: 857689 - DNA, 33 bp, Homo sapien
atcagcgtcctctaccagagtggtacttttgtt

SEQ ID NO: 857690 - DNA, 33 bp, Homo sapien
atcagcgtcctctaccggagtggtacttttgtt

SEQ ID NO: 857691 - DNA, 33 bp, Homo sapien
tatttgaactaagactaaacgtggaaacactgc

SEQ ID NO: 857692 - DNA, 33 bp, Homo sapien
tatttgaactaagactgaacgtggaaacactgc

SEQ ID NO: 857693 - DNA, 33 bp, Homo sapien
catagtacttgacaaacaagagtttcataaatg

SEQ ID NO: 857694 - DNA, 33 bp, Homo sapien
catagtacttgacaaataagagtttcataaatg

SEQ ID NO: 857695 - DNA, 33 bp, Homo sapien
ctatgttagcaaaaggcataatctatagtgtta

SEQ ID NO: 857696 - DNA, 33 bp, Homo sapien
ctatgttagcaaaaggtataatctatagtgtta

SEQ ID NO: 857697 - DNA, 33 bp, Homo sapien
taatattacaaaacagaacaatgagttacaaaa

SEQ ID NO: 857698 - DNA, 33 bp, Homo sapien
taatattacaaaacaggacaatgagttacaaaa

SEQ ID NO: 857699 - DNA, 33 bp, Homo sapien
agagggtgtctgaggaagagatgaagtttggtc

SEQ ID NO: 857700 - DNA, 33 bp, Homo sapien
agagggtgtctgaggaggagatgaagtttggtc

SEQ ID NO: 857701 - DNA, 33 bp, Homo sapien
gaagctgaggagaaacaacaagactattcaatt

SEQ ID NO: 857702 - DNA, 33 bp, Homo sapien
gaagctgaggagaaacgacaagactattcaatt

SEQ ID NO: 857703 - DNA, 33 bp, Homo sapien
aatatttattacaacactgaggctttaactcca

SEQ ID NO: 857704 - DNA, 33 bp, Homo sapien
aatatttattacaacagtgaggctttaactcca

SEQ ID NO: 857705 - DNA, 33 bp, Homo sapien
aatatatactttagacggtcatgtgtgttatct

SEQ ID NO: 857706 - DNA, 33 bp, Homo sapien
aatatatactttagactgtcatgtgtgttatct

SEQ ID NO: 857707 - DNA, 33 bp, Homo sapien
agaaagtaacttcaccaagaatgactttcagaa

SEQ ID NO: 857708 - DNA, 33 bp, Homo sapien
agaaagtaacttcacccagaatgactttcagaa

SEQ ID NO: 857709 - DNA, 33 bp, Homo sapien
atagtcagtatgctaaaacctgttcttgaagcc

SEQ ID NO: 857710 - DNA, 33 bp, Homo sapien
atagtcagtatgctaagacctgttcttgaagcc

SEQ ID NO: 857711 - DNA, 33 bp, Homo sapien
aataaagacggcatacaaatacaagacactcca

SEQ ID NO: 857712 - DNA, 33 bp, Homo sapien
aataaagacggcatacgaatacaagacactcca

SEQ ID NO: 857713 - DNA, 33 bp, Homo sapien
attcaacactcaaaaacttagacaaggatgcca

SEQ ID NO: 857714 - DNA, 33 bp, Homo sapien
attcaacactcaaaaatttagacaaggatgcca

SEQ ID NO: 857715 - DNA, 33 bp, Homo sapien
tatatataaaatctcccacattactgagttaat

SEQ ID NO: 857716 - DNA, 33 bp, Homo sapien
tatatataaaatctcctacattactgagttaat

SEQ ID NO: 857717 - DNA, 33 bp, Homo sapien
caaggcatgtctgaaccctcctttctatcatgg

SEQ ID NO: 857718 - DNA, 33 bp, Homo sapien
caaggcatgtctgaacgctcctttctatcatgg

SEQ ID NO: 857719 - DNA, 33 bp, Homo sapien
gctctcttttctgttcaattgatgtgttatctg

SEQ ID NO: 857720 - DNA, 33 bp, Homo sapien
gctctcttttctgttccattgatgtgttatctg

SEQ ID NO: 857721 - DNA, 33 bp, Homo sapien
gaactacacaatttcaagcaataacttactggt

SEQ ID NO: 857722 - DNA, 33 bp, Homo sapien
gaactacacaatttcaggcaataacttactggt

SEQ ID NO: 857723 - DNA, 33 bp, Homo sapien
gtaattttttgaaagcaaatgttttatggtctc

SEQ ID NO: 857724 - DNA, 33 bp, Homo sapien
gtaattttttgaaagcgaatgttttatggtctc

SEQ ID NO: 857725 - DNA, 33 bp, Homo sapien
gacaagtgaaccagtagggacaatgtaaaaagc

SEQ ID NO: 857726 - DNA, 33 bp, Homo sapien
gacaagtgaaccagtatggacaatgtaaaaagc

SEQ ID NO: 857727 - DNA, 33 bp, Homo sapien
tacttttaggatagtgaatgtaaatcctgcatc

SEQ ID NO: 857728 - DNA, 33 bp, Homo sapien
tacttttaggatagtggatgtaaatcctgcatc

SEQ ID NO: 857729 - DNA, 33 bp, Homo sapien
atctgtaacataaccccgatcctcatttttatt

SEQ ID NO: 857730 - DNA, 33 bp, Homo sapien
atctgtaacataaccctgatcctcatttttatt

SEQ ID NO: 857731 - DNA, 33 bp, Homo sapien
atttcattgcctattacagtgtttctatcaaaa

SEQ ID NO: 857732 - DNA, 33 bp, Homo sapien
atttcattgcctattatagtgtttctatcaaaa

SEQ ID NO: 857733 - DNA, 33 bp, Homo sapien
ttgctatttctttcccaattactccaaatgtaa

SEQ ID NO: 857734 - DNA, 33 bp, Homo sapien
ttgctatttctttcccgattactccaaatgtaa

SEQ ID NO: 857735 - DNA, 33 bp, Homo sapien
tcctaccctcaaaaaacttatattccaatacag

SEQ ID NO: 857736 - DNA, 33 bp, Homo sapien
tcctaccctcaaaaaagttatattccaatacag

SEQ ID NO: 857737 - DNA, 33 bp, Homo sapien
tgagaataatgcttaacacagaggtctgttgtg

SEQ ID NO: 857738 - DNA, 33 bp, Homo sapien
tgagaataatgcttaatacagaggtctgttgtg

SEQ ID NO: 857739 - DNA, 33 bp, Homo sapien
atatttttttgcccccagatgttctaaagtgtt

SEQ ID NO: 857740 - DNA, 33 bp, Homo sapien
atatttttttgcccccggatgttctaaagtgtt

SEQ ID NO: 857741 - DNA, 33 bp, Homo sapien
aaattgcatttgcaacaagttcccaggtaatag

SEQ ID NO: 857742 - DNA, 33 bp, Homo sapien
aaattgcatttgcaacgagttcccaggtaatag

SEQ ID NO: 857743 - DNA, 33 bp, Homo sapien
agtcaatgcttatactaaaaatccgctgaagga

SEQ ID NO: 857744 - DNA, 33 bp, Homo sapien
agtcaatgcttatactgaaaatccgctgaagga

SEQ ID NO: 857745 - DNA, 33 bp, Homo sapien
aaggagctcctcagaccggaaaagagtccagag

SEQ ID NO: 857746 - DNA, 33 bp, Homo sapien
aaggagctcctcagactggaaaagagtccagag

SEQ ID NO: 857747 - DNA, 33 bp, Homo sapien
gaataccaagaagaccagccttttttgggagag

SEQ ID NO: 857748 - DNA, 33 bp, Homo sapien
gaataccaagaagaccggccttttttgggagag

SEQ ID NO: 857749 - DNA, 33 bp, Homo sapien
taagtagtattttgaacatcatgggtcaaatat

SEQ ID NO: 857750 - DNA, 33 bp, Homo sapien
taagtagtattttgaatatcatgggtcaaatat

SEQ ID NO: 857751 - DNA, 33 bp, Homo sapien
cacacaactcccaaaccgctctagacactctgg

SEQ ID NO: 857752 - DNA, 33 bp, Homo sapien
cacacaactcccaaactgctctagacactctgg

SEQ ID NO: 857753 - DNA, 33 bp, Homo sapien
gaaaattgtgttggctaagaagaggccaaagtg

SEQ ID NO: 857754 - DNA, 33 bp, Homo sapien
gaaaattgtgttggctgagaagaggccaaagtg

SEQ ID NO: 857755 - DNA, 33 bp, Homo sapien
attgaaagcattgggaaaaggaaaccaccaatc

SEQ ID NO: 857756 - DNA, 33 bp, Homo sapien
attgaaagcattgggagaaggaaaccaccaatc

SEQ ID NO: 857757 - DNA, 33 bp, Homo sapien
ggaggagtgaatatgacgcagaattgtaatcag

SEQ ID NO: 857758 - DNA, 33 bp, Homo sapien
ggaggagtgaatatgatgcagaattgtaatcag

SEQ ID NO: 857759 - DNA, 33 bp, Homo sapien
ggtgaacaaaaacaatcagatgctctggaaaga

SEQ ID NO: 857760 - DNA, 33 bp, Homo sapien
ggtgaacaaaaacaatgagatgctctggaaaga

SEQ ID NO: 857761 - DNA, 33 bp, Homo sapien
gttctctgttttaaatgatccatgtagtgtaac

SEQ ID NO: 857762 - DNA, 33 bp, Homo sapien
gttctctgttttaaattatccatgtagtgtaac

SEQ ID NO: 857763 - DNA, 33 bp, Homo sapien
atgtgggtatttatgaactatcaaagtcagtga

SEQ ID NO: 857764 - DNA, 33 bp, Homo sapien
atgtgggtatttatgagctatcaaagtcagtga

SEQ ID NO: 857765 - DNA, 33 bp, Homo sapien
agtttgttttttcctacagcaccaataaccaga

SEQ ID NO: 857766 - DNA, 33 bp, Homo sapien
agtttgttttttcctatagcaccaataaccaga

SEQ ID NO: 857767 - DNA, 33 bp, Homo sapien
cacagttctgtaaaccacagtaattctgcccag

SEQ ID NO: 857768 - DNA, 33 bp, Homo sapien
cacagttctgtaaaccgcagtaattctgcccag

SEQ ID NO: 857769 - DNA, 33 bp, Homo sapien
gtaattataggtaggaacaaaaatgtaacatat

SEQ ID NO: 857770 - DNA, 33 bp, Homo sapien
gtaattataggtaggagcaaaaatgtaacatat

SEQ ID NO: 857771 - DNA, 33 bp, Homo sapien
tatttctctactagtaacccccttcacctctca

SEQ ID NO: 857772 - DNA, 33 bp, Homo sapien
tatttctctactagtagcccccttcacctctca

SEQ ID NO: 857773 - DNA, 33 bp, Homo sapien
ttaagatgacaataaaaatcaaccttcatgatt

SEQ ID NO: 857774 - DNA, 33 bp, Homo sapien
ttaagatgacaataaatatcaaccttcatgatt

SEQ ID NO: 857775 - DNA, 33 bp, Homo sapien
aacagaatcattttaccagatgtgctattagag

SEQ ID NO: 857776 - DNA, 33 bp, Homo sapien
aacagaatcattttactagatgtgctattagag

SEQ ID NO: 857777 - DNA, 33 bp, Homo sapien
gaagaaatcaattacccgcagattgcttaaacc

SEQ ID NO: 857778 - DNA, 33 bp, Homo sapien
gaagaaatcaattacctgcagattgcttaaacc

SEQ ID NO: 857779 - DNA, 33 bp, Homo sapien
tttcaccataaacaaaagttaactcaagaagga

SEQ ID NO: 857780 - DNA, 33 bp, Homo sapien
tttcaccataaacaaacgttaactcaagaagga

SEQ ID NO: 857781 - DNA, 33 bp, Homo sapien
agaacaatgagagatgaagggttgttaacaagg

SEQ ID NO: 857782 - DNA, 33 bp, Homo sapien
agaacaatgagagatggagggttgttaacaagg

SEQ ID NO: 857783 - DNA, 33 bp, Homo sapien
aaaacaggtgggaaacagtgtctacaaatcaga

SEQ ID NO: 857784 - DNA, 33 bp, Homo sapien
aaaacaggtgggaaacggtgtctacaaatcaga

SEQ ID NO: 857785 - DNA, 33 bp, Homo sapien
ctgacacatagtagccacctaaacaatatttgt

SEQ ID NO: 857786 - DNA, 33 bp, Homo sapien
ctgacacatagtagccgcctaaacaatatttgt

SEQ ID NO: 857787 - DNA, 33 bp, Homo sapien
aaccattgtagaaaacagtacagcaattcctca

SEQ ID NO: 857788 - DNA, 33 bp, Homo sapien
aaccattgtagaaaacggtacagcaattcctca

SEQ ID NO: 857789 - DNA, 33 bp, Homo sapien
ggattctctgctgaagaccatgcgctgtgttgc

SEQ ID NO: 857790 - DNA, 33 bp, Homo sapien
ggattctctgctgaaggccatgcgctgtgttgc

SEQ ID NO: 857791 - DNA, 33 bp, Homo sapien
gaagtacagaacaatcaagcactaaaaaaaatt

SEQ ID NO: 857792 - DNA, 33 bp, Homo sapien
gaagtacagaacaatcgagcactaaaaaaaatt

SEQ ID NO: 857793 - DNA, 33 bp, Homo sapien
ttggtgacaatgcagcaacgtaggttcagttgt

SEQ ID NO: 857794 - DNA, 33 bp, Homo sapien
ttggtgacaatgcagccacgtaggttcagttgt

SEQ ID NO: 857795 - DNA, 33 bp, Homo sapien
cttgtaagcaatatcaacttccgtgaaagacag

SEQ ID NO: 857796 - DNA, 33 bp, Homo sapien
cttgtaagcaatatcagcttccgtgaaagacag

SEQ ID NO: 857797 - DNA, 33 bp, Homo sapien
caagtctctaaatgacactgtaaattaaggcaa

SEQ ID NO: 857798 - DNA, 33 bp, Homo sapien
caagtctctaaatgacgctgtaaattaaggcaa

SEQ ID NO: 857799 - DNA, 33 bp, Homo sapien
tgatgactaggcacatcataccacagtcagaaa

SEQ ID NO: 857800 - DNA, 33 bp, Homo sapien
tgatgactaggcacattataccacagtcagaaa

SEQ ID NO: 857801 - DNA, 33 bp, Homo sapien
tgaccattatctaaaaagttaactgtgacgtag

SEQ ID NO: 857802 - DNA, 33 bp, Homo sapien
tgaccattatctaaaaggttaactgtgacgtag

SEQ ID NO: 857803 - DNA, 33 bp, Homo sapien
taagaaacttcctctaaaagctggatactgcaa

SEQ ID NO: 857804 - DNA, 33 bp, Homo sapien
taagaaacttcctctacaagctggatactgcaa

SEQ ID NO: 857805 - DNA, 33 bp, Homo sapien
agattgaaattttgaacggacatggtggtgagg

SEQ ID NO: 857806 - DNA, 33 bp, Homo sapien
agattgaaattttgaatggacatggtggtgagg

SEQ ID NO: 857807 - DNA, 33 bp, Homo sapien
gcagaagaatttcaaaaaatttatgcagatact

SEQ ID NO: 857808 - DNA, 33 bp, Homo sapien
gcagaagaatttcaaataatttatgcagatact

SEQ ID NO: 857809 - DNA, 33 bp, Homo sapien
ttaaaatcagaatgggaatacattaagcagaca

SEQ ID NO: 857810 - DNA, 33 bp, Homo sapien
ttaaaatcagaatggggatacattaagcagaca

SEQ ID NO: 857811 - DNA, 33 bp, Homo sapien
aaaactttttctatcacggagctagttctatca

SEQ ID NO: 857812 - DNA, 33 bp, Homo sapien
aaaactttttctatcatggagctagttctatca

SEQ ID NO: 857813 - DNA, 33 bp, Homo sapien
aagaaaagtgtgagcacgaggagggttaggagg

SEQ ID NO: 857814 - DNA, 33 bp, Homo sapien
aagaaaagtgtgagcatgaggagggttaggagg

SEQ ID NO: 857815 - DNA, 33 bp, Homo sapien
gcagtccagaccttcccctgttattgttagtaa

SEQ ID NO: 857816 - DNA, 33 bp, Homo sapien
gcagtccagaccttcctctgttattgttagtaa

SEQ ID NO: 857817 - DNA, 33 bp, Homo sapien
tcaatgtgaggaattaggctaggtttcatggag

SEQ ID NO: 857818 - DNA, 33 bp, Homo sapien
tcaatgtgaggaattatgctaggtttcatggag

SEQ ID NO: 857819 - DNA, 33 bp, Homo sapien
agggaagtggacacaaagcaacctccattctct

SEQ ID NO: 857820 - DNA, 33 bp, Homo sapien
agggaagtggacacaaggcaacctccattctct

SEQ ID NO: 857821 - DNA, 33 bp, Homo sapien
gacttccaaaccaagtaacacaggacaaactgg

SEQ ID NO: 857822 - DNA, 33 bp, Homo sapien
gacttccaaaccaagttacacaggacaaactgg

SEQ ID NO: 857823 - DNA, 33 bp, Homo sapien
tccaaagttgctttacgaagttgtaagaccaaa

SEQ ID NO: 857824 - DNA, 33 bp, Homo sapien
tccaaagttgctttactaagttgtaagaccaaa

SEQ ID NO: 857825 - DNA, 33 bp, Homo sapien
tgaagctaatcaaagacgttatgataaagattt

SEQ ID NO: 857826 - DNA, 33 bp, Homo sapien
tgaagctaatcaaagaggttatgataaagattt

SEQ ID NO: 857827 - DNA, 33 bp, Homo sapien
tattatccattctctcaaagatgctctttttat

SEQ ID NO: 857828 - DNA, 33 bp, Homo sapien
tattatccattctctcgaagatgctctttttat

SEQ ID NO: 857829 - DNA, 33 bp, Homo sapien
ggtactcagagaagtaagaaaccagtaaatggg

SEQ ID NO: 857830 - DNA, 33 bp, Homo sapien
ggtactcagagaagtatgaaaccagtaaatggg

SEQ ID NO: 857831 - DNA, 33 bp, Homo sapien
aaatcaaagaagaaaacgtccagttggtactca

SEQ ID NO: 857832 - DNA, 33 bp, Homo sapien
aaatcaaagaagaaaaggtccagttggtactca

SEQ ID NO: 857833 - DNA, 33 bp, Homo sapien
tacaagaaacctgacaatgacttcacaaatata

SEQ ID NO: 857834 - DNA, 33 bp, Homo sapien
tacaagaaacctgacagtgacttcacaaatata

SEQ ID NO: 857835 - DNA, 33 bp, Homo sapien
agcatatgcagtagtaagtcagtattagacagc

SEQ ID NO: 857836 - DNA, 33 bp, Homo sapien
agcatatgcagtagtacgtcagtattagacagc

SEQ ID NO: 857837 - DNA, 33 bp, Homo sapien
cttttctttcatcaccaatcttgatccatcccc

SEQ ID NO: 857838 - DNA, 33 bp, Homo sapien
cttttctttcatcaccgatcttgatccatcccc

SEQ ID NO: 857839 - DNA, 33 bp, Homo sapien
aatgtgctgattcttccgaacagaggcgtgttg

SEQ ID NO: 857840 - DNA, 33 bp, Homo sapien
aatgtgctgattcttctgaacagaggcgtgttg

SEQ ID NO: 857841 - DNA, 33 bp, Homo sapien
tgaactcctcactctccaaagttccattggtaa

SEQ ID NO: 857842 - DNA, 33 bp, Homo sapien
tgaactcctcactctctaaagttccattggtaa

SEQ ID NO: 857843 - DNA, 33 bp, Homo sapien
attgaataagtttcaaaaagagcactacgtctg

SEQ ID NO: 857844 - DNA, 33 bp, Homo sapien
attgaataagtttcaacaagagcactacgtctg

SEQ ID NO: 857845 - DNA, 33 bp, Homo sapien
ttcaatccgatttaaccgctgctattgataagt

SEQ ID NO: 857846 - DNA, 33 bp, Homo sapien
ttcaatccgatttaactgctgctattgataagt

SEQ ID NO: 857847 - DNA, 33 bp, Homo sapien
gccacatttacgcagactagttgaggctaaact

SEQ ID NO: 857848 - DNA, 33 bp, Homo sapien
gccacatttacgcagagtagttgaggctaaact

SEQ ID NO: 857849 - DNA, 33 bp, Homo sapien
aggctcatttgtaacacctggactataacatct

SEQ ID NO: 857850 - DNA, 33 bp, Homo sapien
aggctcatttgtaacatctggactataacatct

SEQ ID NO: 857851 - DNA, 33 bp, Homo sapien
gcctcatttcttttaaacctcacatttatagct

SEQ ID NO: 857852 - DNA, 33 bp, Homo sapien
gcctcatttcttttaagcctcacatttatagct

SEQ ID NO: 857853 - DNA, 33 bp, Homo sapien
atgttttgtcttatccagatacaatgtggtgtc

SEQ ID NO: 857854 - DNA, 33 bp, Homo sapien
atgttttgtcttatcccgatacaatgtggtgtc

SEQ ID NO: 857855 - DNA, 33 bp, Homo sapien
aattttatcagaaacaatgagttgaagttgggc

SEQ ID NO: 857856 - DNA, 33 bp, Homo sapien
aattttatcagaaacagtgagttgaagttgggc

SEQ ID NO: 857857 - DNA, 33 bp, Homo sapien
tattgtttgttagctacatatctttagacaatc

SEQ ID NO: 857858 - DNA, 33 bp, Homo sapien
tattgtttgttagctatatatctttagacaatc

SEQ ID NO: 857859 - DNA, 33 bp, Homo sapien
ttggctgctgtatttgcaacgatacattcttgg

SEQ ID NO: 857860 - DNA, 33 bp, Homo sapien
ttggctgctgtatttggaacgatacattcttgg

SEQ ID NO: 857861 - DNA, 33 bp, Homo sapien
ctgtacagaaaaactaccaacttttgccattta

SEQ ID NO: 857862 - DNA, 33 bp, Homo sapien
ctgtacagaaaaactatcaacttttgccattta

SEQ ID NO: 857863 - DNA, 33 bp, Homo sapien
gatgatattaacattcaaataagtagagtgagt

SEQ ID NO: 857864 - DNA, 33 bp, Homo sapien
gatgatattaacattcgaataagtagagtgagt

SEQ ID NO: 857865 - DNA, 33 bp, Homo sapien
ctgatgatcagctggcaaaagaagacatctagg

SEQ ID NO: 857866 - DNA, 33 bp, Homo sapien
ctgatgatcagctggcgaaagaagacatctagg

SEQ ID NO: 857867 - DNA, 33 bp, Homo sapien
ctaataatagaggtaaactaaagagatcatatt

SEQ ID NO: 857868 - DNA, 33 bp, Homo sapien
ctaataatagaggtaagctaaagagatcatatt

SEQ ID NO: 857869 - DNA, 33 bp, Homo sapien
gagagaaatagggcaccgaggtaaagctggaga

SEQ ID NO: 857870 - DNA, 33 bp, Homo sapien
gagagaaatagggcactgaggtaaagctggaga

SEQ ID NO: 857871 - DNA, 33 bp, Homo sapien
gatataaacattatccaatgagctgtgactaga

SEQ ID NO: 857872 - DNA, 33 bp, Homo sapien
gatataaacattatcccatgagctgtgactaga

SEQ ID NO: 857873 - DNA, 33 bp, Homo sapien
atgcaagtaaagtcaaattgaaattcttccata

SEQ ID NO: 857874 - DNA, 33 bp, Homo sapien
atgcaagtaaagtcaagttgaaattcttccata

SEQ ID NO: 857875 - DNA, 33 bp, Homo sapien
attatcttatccttgaacattttaccatgtcat

SEQ ID NO: 857876 - DNA, 33 bp, Homo sapien
attatcttatccttgatcattttaccatgtcat

SEQ ID NO: 857877 - DNA, 33 bp, Homo sapien
ctcttaaacatttgcactcccacagtttttttt

SEQ ID NO: 857878 - DNA, 33 bp, Homo sapien
ctcttaaacatttgcattcccacagtttttttt

SEQ ID NO: 857879 - DNA, 33 bp, Homo sapien
cctgagacttctagaacgccagagtatctagga

SEQ ID NO: 857880 - DNA, 33 bp, Homo sapien
cctgagacttctagaatgccagagtatctagga

SEQ ID NO: 857881 - DNA, 33 bp, Homo sapien
gaggagaagggccacaactctcaccaaatcttc

SEQ ID NO: 857882 - DNA, 33 bp, Homo sapien
gaggagaagggccacatctctcaccaaatcttc

SEQ ID NO: 857883 - DNA, 33 bp, Homo sapien
ccagtgcactttgtaaacttcgctcaattttgt

SEQ ID NO: 857884 - DNA, 33 bp, Homo sapien
ccagtgcactttgtaagcttcgctcaattttgt

SEQ ID NO: 857885 - DNA, 33 bp, Homo sapien
ttatttcttggataacaaactggagaacagaat

SEQ ID NO: 857886 - DNA, 33 bp, Homo sapien
ttatttcttggataaccaactggagaacagaat

SEQ ID NO: 857887 - DNA, 33 bp, Homo sapien
atgtgctagagaaaacagagtcctatgtatctg

SEQ ID NO: 857888 - DNA, 33 bp, Homo sapien
atgtgctagagaaaacggagtcctatgtatctg

SEQ ID NO: 857889 - DNA, 33 bp, Homo sapien
tgctctattgtaacaaccttgtaactggctttc

SEQ ID NO: 857890 - DNA, 33 bp, Homo sapien
tgctctattgtaacaatcttgtaactggctttc

SEQ ID NO: 857891 - DNA, 33 bp, Homo sapien
gactaagcttctgtaaactagcgcccagatcca

SEQ ID NO: 857892 - DNA, 33 bp, Homo sapien
gactaagcttctgtaacctagcgcccagatcca

SEQ ID NO: 857893 - DNA, 33 bp, Homo sapien
ggctatttttcactcactctatcaaggaacgtg

SEQ ID NO: 857894 - DNA, 33 bp, Homo sapien
ggctatttttcactcattctatcaaggaacgtg

SEQ ID NO: 857895 - DNA, 33 bp, Homo sapien
ttgagtatctaggacaactgagagatgaaagga

SEQ ID NO: 857896 - DNA, 33 bp, Homo sapien
ttgagtatctaggacacctgagagatgaaagga

SEQ ID NO: 857897 - DNA, 33 bp, Homo sapien
tctaatacatgaaggacaagaaggcagacacat

SEQ ID NO: 857898 - DNA, 33 bp, Homo sapien
tctaatacatgaaggataagaaggcagacacat

SEQ ID NO: 857899 - DNA, 33 bp, Homo sapien
tagtgatatttgctatgaaatccatggaattcg

SEQ ID NO: 857900 - DNA, 33 bp, Homo sapien
tagtgatatttgctattaaatccatggaattcg

SEQ ID NO: 857901 - DNA, 33 bp, Homo sapien
aaagtaaaaaatatgaatatctggttcccaagt

SEQ ID NO: 857902 - DNA, 33 bp, Homo sapien
aaagtaaaaaatatgagtatctggttcccaagt

SEQ ID NO: 857903 - DNA, 33 bp, Homo sapien
ggagctgagtctagcacctggaggaaagccagc

SEQ ID NO: 857904 - DNA, 33 bp, Homo sapien
ggagctgagtctagcatctggaggaaagccagc

SEQ ID NO: 857905 - DNA, 33 bp, Homo sapien
tcatcaagcgattcatcaaatctgtgatagaac

SEQ ID NO: 857906 - DNA, 33 bp, Homo sapien
tcatcaagcgattcattaaatctgtgatagaac

SEQ ID NO: 857907 - DNA, 33 bp, Homo sapien
ctgttgtaagtaagcacccactttgctaaagtg

SEQ ID NO: 857908 - DNA, 33 bp, Homo sapien
ctgttgtaagtaagcatccactttgctaaagtg

SEQ ID NO: 857909 - DNA, 33 bp, Homo sapien
ccattcattatgtaaccacacctcatgaagtgc

SEQ ID NO: 857910 - DNA, 33 bp, Homo sapien
ccattcattatgtaacgacacctcatgaagtgc

SEQ ID NO: 857911 - DNA, 33 bp, Homo sapien
gccaagcacgagctcacgtgggtaatcacctaa

SEQ ID NO: 857912 - DNA, 33 bp, Homo sapien
gccaagcacgagctcatgtgggtaatcacctaa

SEQ ID NO: 857913 - DNA, 33 bp, Homo sapien
agagtaaatcaatgtcaaaactttctacgattc

SEQ ID NO: 857914 - DNA, 33 bp, Homo sapien
agagtaaatcaatgtcgaaactttctacgattc

SEQ ID NO: 857915 - DNA, 33 bp, Homo sapien
tagtgatctccattcacagatgaactgtcacca

SEQ ID NO: 857916 - DNA, 33 bp, Homo sapien
tagtgatctccattcatagatgaactgtcacca

SEQ ID NO: 857917 - DNA, 33 bp, Homo sapien
cttcctatctatcaaaaacacaaaggaatacaa

SEQ ID NO: 857918 - DNA, 33 bp, Homo sapien
cttcctatctatcaaacacacaaaggaatacaa

SEQ ID NO: 857919 - DNA, 33 bp, Homo sapien
cttgttttgtgtttcccagtggaaggcaggatc

SEQ ID NO: 857920 - DNA, 33 bp, Homo sapien
cttgttttgtgtttccgagtggaaggcaggatc

SEQ ID NO: 857921 - DNA, 33 bp, Homo sapien
gaaatactaaaagatacccagacattgaaattt

SEQ ID NO: 857922 - DNA, 33 bp, Homo sapien
gaaatactaaaagatatccagacattgaaattt

SEQ ID NO: 857923 - DNA, 33 bp, Homo sapien
ttctgatctaaaggtacactctgccatgacata

SEQ ID NO: 857924 - DNA, 33 bp, Homo sapien
ttctgatctaaaggtatactctgccatgacata

SEQ ID NO: 857925 - DNA, 33 bp, Homo sapien
tgtctcaggttcctcacataagctgcattctct

SEQ ID NO: 857926 - DNA, 33 bp, Homo sapien
tgtctcaggttcctcagataagctgcattctct

SEQ ID NO: 857927 - DNA, 33 bp, Homo sapien
cagaatcagtgctgaaagtagggaaacaaagtt

SEQ ID NO: 857928 - DNA, 33 bp, Homo sapien
cagaatcagtgctgaaggtagggaaacaaagtt

SEQ ID NO: 857929 - DNA, 33 bp, Homo sapien
tggaacagcatcccagaaaaaaataagtgctaa

SEQ ID NO: 857930 - DNA, 33 bp, Homo sapien
tggaacagcatcccagcaaaaaataagtgctaa

SEQ ID NO: 857931 - DNA, 33 bp, Homo sapien
caaacttttagtcacactgaatttttggaatac

SEQ ID NO: 857932 - DNA, 33 bp, Homo sapien
caaacttttagtcacattgaatttttggaatac

SEQ ID NO: 857933 - DNA, 33 bp, Homo sapien
aataatttgccacatacagaagaagggaaaagg

SEQ ID NO: 857934 - DNA, 33 bp, Homo sapien
aataatttgccacatagagaagaagggaaaagg

SEQ ID NO: 857935 - DNA, 33 bp, Homo sapien
caatacatgttgaatcaataaatgaatggacca

SEQ ID NO: 857936 - DNA, 33 bp, Homo sapien
caatacatgttgaatccataaatgaatggacca

SEQ ID NO: 857937 - DNA, 33 bp, Homo sapien
gtgtgacagaaaccaaatgtgactctttacaga

SEQ ID NO: 857938 - DNA, 33 bp, Homo sapien
gtgtgacagaaaccaagtgtgactctttacaga

SEQ ID NO: 857939 - DNA, 33 bp, Homo sapien
attgggagagctttagcaagaaattttaagtcc

SEQ ID NO: 857940 - DNA, 33 bp, Homo sapien
attgggagagctttaggaagaaattttaagtcc

SEQ ID NO: 857941 - DNA, 33 bp, Homo sapien
aggatcctagtacagacggacacagttgagtta

SEQ ID NO: 857942 - DNA, 33 bp, Homo sapien
aggatcctagtacagatggacacagttgagtta

SEQ ID NO: 857943 - DNA, 33 bp, Homo sapien
ttggctgatacatttacaacttttttgtttatc

SEQ ID NO: 857944 - DNA, 33 bp, Homo sapien
ttggctgatacatttataacttttttgtttatc

SEQ ID NO: 857945 - DNA, 33 bp, Homo sapien
tttagtattgtaagaaaccactaaattgtcttc

SEQ ID NO: 857946 - DNA, 33 bp, Homo sapien
tttagtattgtaagaagccactaaattgtcttc

SEQ ID NO: 857947 - DNA, 33 bp, Homo sapien
cagaaggtagacagataaattgtggtacatcca

SEQ ID NO: 857948 - DNA, 33 bp, Homo sapien
cagaaggtagacagatgaattgtggtacatcca

SEQ ID NO: 857949 - DNA, 33 bp, Homo sapien
gtctagagaaataatagctgacacttgattgga

SEQ ID NO: 857950 - DNA, 33 bp, Homo sapien
gtctagagaaataatatctgacacttgattgga

SEQ ID NO: 857951 - DNA, 33 bp, Homo sapien
gtgtttctagcagggaaaaattggtatgcgaat

SEQ ID NO: 857952 - DNA, 33 bp, Homo sapien
gtgtttctagcagggagaaattggtatgcgaat

SEQ ID NO: 857953 - DNA, 33 bp, Homo sapien
ctggaatttccaggctcaccacatggtcttcat

SEQ ID NO: 857954 - DNA, 33 bp, Homo sapien
ctggaatttccaggcttaccacatggtcttcat

SEQ ID NO: 857955 - DNA, 33 bp, Homo sapien
tgttacagtactttacccactcacaaacacata

SEQ ID NO: 857956 - DNA, 33 bp, Homo sapien
tgttacagtactttactcactcacaaacacata

SEQ ID NO: 857957 - DNA, 33 bp, Homo sapien
ttaacccctagcacctcagaatatgaccttatt

SEQ ID NO: 857958 - DNA, 33 bp, Homo sapien
ttaacccctagcaccttagaatatgaccttatt

SEQ ID NO: 857959 - DNA, 33 bp, Homo sapien
tctttgtcagtggacacataattggcagagaaa

SEQ ID NO: 857960 - DNA, 33 bp, Homo sapien
tctttgtcagtggacagataattggcagagaaa

SEQ ID NO: 857961 - DNA, 33 bp, Homo sapien
agtcaagtttgatgcccactagttttcttgtga

SEQ ID NO: 857962 - DNA, 33 bp, Homo sapien
agtcaagtttgatgcctactagttttcttgtga

SEQ ID NO: 857963 - DNA, 33 bp, Homo sapien
cattgatgctctctaaaggattctgtctccata

SEQ ID NO: 857964 - DNA, 33 bp, Homo sapien
cattgatgctctctaagggattctgtctccata

SEQ ID NO: 857965 - DNA, 33 bp, Homo sapien
gagaattactttggagaacgtagactaaatcac

SEQ ID NO: 857966 - DNA, 33 bp, Homo sapien
gagaattactttggaggacgtagactaaatcac

SEQ ID NO: 857967 - DNA, 33 bp, Homo sapien
cccatcttttaaataactgaaggtggtcgcatt

SEQ ID NO: 857968 - DNA, 33 bp, Homo sapien
cccatcttttaaataattgaaggtggtcgcatt

SEQ ID NO: 857969 - DNA, 33 bp, Homo sapien
gactattcttgacacaaaagatgtaacaacaca

SEQ ID NO: 857970 - DNA, 33 bp, Homo sapien
gactattcttgacacagaagatgtaacaacaca

SEQ ID NO: 857971 - DNA, 33 bp, Homo sapien
gtgcagcaagcactaaaatttagaagcatgata

SEQ ID NO: 857972 - DNA, 33 bp, Homo sapien
gtgcagcaagcactaacatttagaagcatgata

SEQ ID NO: 857973 - DNA, 33 bp, Homo sapien
ttccagatgtcatttaaatcctaggtagggaga

SEQ ID NO: 857974 - DNA, 33 bp, Homo sapien
ttccagatgtcatttatatcctaggtagggaga

SEQ ID NO: 857975 - DNA, 33 bp, Homo sapien
gatttaagagcttaaaaccctcacatgatgaca

SEQ ID NO: 857976 - DNA, 33 bp, Homo sapien
gatttaagagcttaaagccctcacatgatgaca

SEQ ID NO: 857977 - DNA, 33 bp, Homo sapien
tgacctagttagcatacgtggttaaaaatgccg

SEQ ID NO: 857978 - DNA, 33 bp, Homo sapien
tgacctagttagcatatgtggttaaaaatgccg

SEQ ID NO: 857979 - DNA, 33 bp, Homo sapien
tgtgtcagcacagataactttgtaccactgaac

SEQ ID NO: 857980 - DNA, 33 bp, Homo sapien
tgtgtcagcacagatatctttgtaccactgaac

SEQ ID NO: 857981 - DNA, 33 bp, Homo sapien
caattaggcagaaggcaattttatttattttta

SEQ ID NO: 857982 - DNA, 33 bp, Homo sapien
caattaggcagaaggcgattttatttattttta

SEQ ID NO: 857983 - DNA, 33 bp, Homo sapien
ggcagaggaattatccagatgcgtaaggggttg

SEQ ID NO: 857984 - DNA, 33 bp, Homo sapien
ggcagaggaattatcccgatgcgtaaggggttg

SEQ ID NO: 857985 - DNA, 33 bp, Homo sapien
aacgcattgatatttcacacttcagagttgatg

SEQ ID NO: 857986 - DNA, 33 bp, Homo sapien
aacgcattgatatttcgcacttcagagttgatg

SEQ ID NO: 857987 - DNA, 33 bp, Homo sapien
ccttgtggtataattcaaagtcgagtaatatga

SEQ ID NO: 857988 - DNA, 33 bp, Homo sapien
ccttgtggtataattcgaagtcgagtaatatga

SEQ ID NO: 857989 - DNA, 33 bp, Homo sapien
ccacattgcagtttcaacactctaaaagccagc

SEQ ID NO: 857990 - DNA, 33 bp, Homo sapien
ccacattgcagtttcatcactctaaaagccagc

SEQ ID NO: 857991 - DNA, 33 bp, Homo sapien
acacatattcaatccaagaggtaatctctgaga

SEQ ID NO: 857992 - DNA, 33 bp, Homo sapien
acacatattcaatccaggaggtaatctctgaga

SEQ ID NO: 857993 - DNA, 33 bp, Homo sapien
agtgtgtgtctccttacgggagatgcttgggct

SEQ ID NO: 857994 - DNA, 33 bp, Homo sapien
agtgtgtgtctccttatgggagatgcttgggct

SEQ ID NO: 857995 - DNA, 33 bp, Homo sapien
gtggatttctaagccacgaataattgaataaga

SEQ ID NO: 857996 - DNA, 33 bp, Homo sapien
gtggatttctaagccatgaataattgaataaga

SEQ ID NO: 857997 - DNA, 33 bp, Homo sapien
cttccctttaatctacacaagtcttctatcctg

SEQ ID NO: 857998 - DNA, 33 bp, Homo sapien
cttccctttaatctacccaagtcttctatcctg

SEQ ID NO: 857999 - DNA, 33 bp, Homo sapien
gtaagacttttttttcacattttcactgtttct

SEQ ID NO: 858000 - DNA, 33 bp, Homo sapien
gtaagacttttttttcgcattttcactgtttct

SEQ ID NO: 858001 - DNA, 33 bp, Homo sapien
tggataaacaattgcactgactctgtccaccct

SEQ ID NO: 858002 - DNA, 33 bp, Homo sapien
tggataaacaattgcagtgactctgtccaccct

SEQ ID NO: 858003 - DNA, 33 bp, Homo sapien
aagtgtctctttcaggccatctgcttattcccc

SEQ ID NO: 858004 - DNA, 33 bp, Homo sapien
aagtgtctctttcagggcatctgcttattcccc

SEQ ID NO: 858005 - DNA, 33 bp, Homo sapien
tgttcactggacacaaaggtggttctcaggtat

SEQ ID NO: 858006 - DNA, 33 bp, Homo sapien
tgttcactggacacaagggtggttctcaggtat

SEQ ID NO: 858007 - DNA, 33 bp, Homo sapien
tttttgcccatgttaaatctgagatgcttacta

SEQ ID NO: 858008 - DNA, 33 bp, Homo sapien
tttttgcccatgttaagtctgagatgcttacta

SEQ ID NO: 858009 - DNA, 33 bp, Homo sapien
agtttctgatctcttcactgtacatacaaatgg

SEQ ID NO: 858010 - DNA, 33 bp, Homo sapien
agtttctgatctcttcgctgtacatacaaatgg

SEQ ID NO: 858011 - DNA, 33 bp, Homo sapien
ctttcatatagcaagacctaatacttaagactc

SEQ ID NO: 858012 - DNA, 33 bp, Homo sapien
ctttcatatagcaagatctaatacttaagactc

SEQ ID NO: 858013 - DNA, 33 bp, Homo sapien
gagagcaatcaagtcaacaaacctcctccgctg

SEQ ID NO: 858014 - DNA, 33 bp, Homo sapien
gagagcaatcaagtcaccaaacctcctccgctg

SEQ ID NO: 858015 - DNA, 33 bp, Homo sapien
tggaatcgtggttttaaaaatccctggagacaa

SEQ ID NO: 858016 - DNA, 33 bp, Homo sapien
tggaatcgtggttttagaaatccctggagacaa

SEQ ID NO: 858017 - DNA, 33 bp, Homo sapien
aaggaaatctgtattccattcggagtgtgtgat

SEQ ID NO: 858018 - DNA, 33 bp, Homo sapien
aaggaaatctgtattctattcggagtgtgtgat

SEQ ID NO: 858019 - DNA, 33 bp, Homo sapien
tgacactgcacatagaatcatccgtgaccaggt

SEQ ID NO: 858020 - DNA, 33 bp, Homo sapien
tgacactgcacatagattcatccgtgaccaggt

SEQ ID NO: 858021 - DNA, 33 bp, Homo sapien
tcaggagtgcattttgatcatgttaaattttaa

SEQ ID NO: 858022 - DNA, 33 bp, Homo sapien
tcaggagtgcattttggtcatgttaaattttaa

SEQ ID NO: 858023 - DNA, 33 bp, Homo sapien
cctccaagcaaccttccacttcaggatcttcat

SEQ ID NO: 858024 - DNA, 33 bp, Homo sapien
cctccaagcaaccttctacttcaggatcttcat

SEQ ID NO: 858025 - DNA, 33 bp, Homo sapien
ttaaaagagtatttaactggagacctgaagaag

SEQ ID NO: 858026 - DNA, 33 bp, Homo sapien
ttaaaagagtatttaattggagacctgaagaag

SEQ ID NO: 858027 - DNA, 33 bp, Homo sapien
ctcaactcttccaggacagtccaagaaagtcca

SEQ ID NO: 858028 - DNA, 33 bp, Homo sapien
ctcaactcttccaggagagtccaagaaagtcca

SEQ ID NO: 858029 - DNA, 33 bp, Homo sapien
agagtcactggtttcaactactggaattttgac

SEQ ID NO: 858030 - DNA, 33 bp, Homo sapien
agagtcactggtttcacctactggaattttgac

SEQ ID NO: 858031 - DNA, 33 bp, Homo sapien
ctcttcacgaaggaaaggagggctgttgtcttg

SEQ ID NO: 858032 - DNA, 33 bp, Homo sapien
ctcttcacgaaggaaatgagggctgttgtcttg

SEQ ID NO: 858033 - DNA, 33 bp, Homo sapien
cagtcgaggaaagaaaagaaaacagtggagatg

SEQ ID NO: 858034 - DNA, 33 bp, Homo sapien
cagtcgaggaaagaaaggaaaacagtggagatg

SEQ ID NO: 858035 - DNA, 33 bp, Homo sapien
gaagtgtctgatgaaaactgggctgggttaaaa

SEQ ID NO: 858036 - DNA, 33 bp, Homo sapien
gaagtgtctgatgaaacctgggctgggttaaaa

SEQ ID NO: 858037 - DNA, 33 bp, Homo sapien
aatgtttatttgtttccaagacagctaaagaaa

SEQ ID NO: 858038 - DNA, 33 bp, Homo sapien
aatgtttatttgtttctaagacagctaaagaaa

SEQ ID NO: 858039 - DNA, 33 bp, Homo sapien
tattatgaaatggtaccgcatgggaggctaaat

SEQ ID NO: 858040 - DNA, 33 bp, Homo sapien
tattatgaaatggtactgcatgggaggctaaat

SEQ ID NO: 858041 - DNA, 33 bp, Homo sapien
aagttgcatgatctaaaaaatcttctttgcttg

SEQ ID NO: 858042 - DNA, 33 bp, Homo sapien
aagttgcatgatctaataaatcttctttgcttg

SEQ ID NO: 858043 - DNA, 33 bp, Homo sapien
aaattgtgtttgattccatcggctgaaggactg

SEQ ID NO: 858044 - DNA, 33 bp, Homo sapien
aaattgtgtttgattctatcggctgaaggactg

SEQ ID NO: 858045 - DNA, 33 bp, Homo sapien
tactgaactactggtagcaatggtgaacttcat

SEQ ID NO: 858046 - DNA, 33 bp, Homo sapien
tactgaactactggtatcaatggtgaacttcat

SEQ ID NO: 858047 - DNA, 33 bp, Homo sapien
atgttgctccagtttaaggggaggtaaataaca

SEQ ID NO: 858048 - DNA, 33 bp, Homo sapien
atgttgctccagtttacggggaggtaaataaca

SEQ ID NO: 858049 - DNA, 33 bp, Homo sapien
atcaaatgtcatcgggcccatcaagaagagtca

SEQ ID NO: 858050 - DNA, 33 bp, Homo sapien
atcaaatgtcatcgggtccatcaagaagagtca

SEQ ID NO: 858051 - DNA, 33 bp, Homo sapien
ggtagcactgaggtgactaagcacaaattaaca

SEQ ID NO: 858052 - DNA, 33 bp, Homo sapien
ggtagcactgaggtgagtaagcacaaattaaca

SEQ ID NO: 858053 - DNA, 33 bp, Homo sapien
agtctgagtatttggaagcttcactaaaggaca

SEQ ID NO: 858054 - DNA, 33 bp, Homo sapien
agtctgagtatttggaggcttcactaaaggaca

SEQ ID NO: 858055 - DNA, 33 bp, Homo sapien
gcagctaacaaagtcaaactataagaccaaact

SEQ ID NO: 858056 - DNA, 33 bp, Homo sapien
gcagctaacaaagtcagactataagaccaaact

SEQ ID NO: 858057 - DNA, 33 bp, Homo sapien
actgtatacccgtccactctgtcttttattgat

SEQ ID NO: 858058 - DNA, 33 bp, Homo sapien
actgtatacccgtccattctgtcttttattgat

SEQ ID NO: 858059 - DNA, 33 bp, Homo sapien
tcattacttcatttaaatctaacaatatcaaat

SEQ ID NO: 858060 - DNA, 33 bp, Homo sapien
tcattacttcatttaagtctaacaatatcaaat

SEQ ID NO: 858061 - DNA, 33 bp, Homo sapien
actataatgcctctccaacatattacagttaaa

SEQ ID NO: 858062 - DNA, 33 bp, Homo sapien
actataatgcctctccgacatattacagttaaa

SEQ ID NO: 858063 - DNA, 33 bp, Homo sapien
ataaataaaaattcccactctcattctagcctg

SEQ ID NO: 858064 - DNA, 33 bp, Homo sapien
ataaataaaaattcccgctctcattctagcctg

SEQ ID NO: 858065 - DNA, 33 bp, Homo sapien
tcatatttcgtactaacgtcccagaatggccca

SEQ ID NO: 858066 - DNA, 33 bp, Homo sapien
tcatatttcgtactaatgtcccagaatggccca

SEQ ID NO: 858067 - DNA, 33 bp, Homo sapien
gatttgcagaacaagcaagaattctaatgactg

SEQ ID NO: 858068 - DNA, 33 bp, Homo sapien
gatttgcagaacaagcgagaattctaatgactg

SEQ ID NO: 858069 - DNA, 33 bp, Homo sapien
agttggcattcatccaggtaccctgaactttgc

SEQ ID NO: 858070 - DNA, 33 bp, Homo sapien
agttggcattcatccatgtaccctgaactttgc

SEQ ID NO: 858071 - DNA, 33 bp, Homo sapien
gctcaatgctctcagaacctaatggaaacatcc

SEQ ID NO: 858072 - DNA, 33 bp, Homo sapien
gctcaatgctctcagaccctaatggaaacatcc

SEQ ID NO: 858073 - DNA, 33 bp, Homo sapien
gggactgcaattctgcacttatcatctagctga

SEQ ID NO: 858074 - DNA, 33 bp, Homo sapien
gggactgcaattctgcccttatcatctagctga

SEQ ID NO: 858075 - DNA, 33 bp, Homo sapien
atactatcccttaaaactggctacaatatatat

SEQ ID NO: 858076 - DNA, 33 bp, Homo sapien
atactatcccttaaaattggctacaatatatat

SEQ ID NO: 858077 - DNA, 33 bp, Homo sapien
taagccactcagtttacggcatcttgtgatagc

SEQ ID NO: 858078 - DNA, 33 bp, Homo sapien
taagccactcagtttatggcatcttgtgatagc

SEQ ID NO: 858079 - DNA, 33 bp, Homo sapien
tctgtataggtctgaggagtaaaatggtcagga

SEQ ID NO: 858080 - DNA, 33 bp, Homo sapien
tctgtataggtctgagtagtaaaatggtcagga

SEQ ID NO: 858081 - DNA, 33 bp, Homo sapien
acacttgaatagctcaatataagtgaggacatt

SEQ ID NO: 858082 - DNA, 33 bp, Homo sapien
acacttgaatagctcagtataagtgaggacatt

SEQ ID NO: 858083 - DNA, 33 bp, Homo sapien
ttaaatagattaactgacacattgcaccttctt

SEQ ID NO: 858084 - DNA, 33 bp, Homo sapien
ttaaatagattaactggcacattgcaccttctt

SEQ ID NO: 858085 - DNA, 33 bp, Homo sapien
ggtgttccaggtgttcaacaatgagggttcttg

SEQ ID NO: 858086 - DNA, 33 bp, Homo sapien
ggtgttccaggtgttcgacaatgagggttcttg

SEQ ID NO: 858087 - DNA, 33 bp, Homo sapien
ctcactccaggaaatgacattcagcttgaaaca

SEQ ID NO: 858088 - DNA, 33 bp, Homo sapien
ctcactccaggaaatgccattcagcttgaaaca

SEQ ID NO: 858089 - DNA, 33 bp, Homo sapien
catcccataggtgatacgtattttgctgatatg

SEQ ID NO: 858090 - DNA, 33 bp, Homo sapien
catcccataggtgatatgtattttgctgatatg

SEQ ID NO: 858091 - DNA, 33 bp, Homo sapien
gagcccataatgagataaagaggataatatggt

SEQ ID NO: 858092 - DNA, 33 bp, Homo sapien
gagcccataatgagatgaagaggataatatggt

SEQ ID NO: 858093 - DNA, 33 bp, Homo sapien
agaaaaagagaaaccccacaaggagcattaatt

SEQ ID NO: 858094 - DNA, 33 bp, Homo sapien
agaaaaagagaaacccgacaaggagcattaatt

SEQ ID NO: 858095 - DNA, 33 bp, Homo sapien
tatatttttccaactacgtacccagagatagta

SEQ ID NO: 858096 - DNA, 33 bp, Homo sapien
tatatttttccaactatgtacccagagatagta

SEQ ID NO: 858097 - DNA, 33 bp, Homo sapien
tatttgattgacagtgaagtaaatttgtttaca

SEQ ID NO: 858098 - DNA, 33 bp, Homo sapien
tatttgattgacagtgcagtaaatttgtttaca

SEQ ID NO: 858099 - DNA, 33 bp, Homo sapien
ggggagacccggagaaatagcctctgagtagct

SEQ ID NO: 858100 - DNA, 33 bp, Homo sapien
ggggagacccggagaagtagcctctgagtagct

SEQ ID NO: 858101 - DNA, 33 bp, Homo sapien
atcccaaatgcatacaataagtgcctgcctggc

SEQ ID NO: 858102 - DNA, 33 bp, Homo sapien
atcccaaatgcatacagtaagtgcctgcctggc

SEQ ID NO: 858103 - DNA, 33 bp, Homo sapien
ttggcagcggttatcacgtctaaggccattcag

SEQ ID NO: 858104 - DNA, 33 bp, Homo sapien
ttggcagcggttatcatgtctaaggccattcag

SEQ ID NO: 858105 - DNA, 33 bp, Homo sapien
ggttaatattgagtatcaacttgattggattga

SEQ ID NO: 858106 - DNA, 33 bp, Homo sapien
ggttaatattgagtatgaacttgattggattga

SEQ ID NO: 858107 - DNA, 33 bp, Homo sapien
catggtggatccttggaacacaacccagcaaac

SEQ ID NO: 858108 - DNA, 33 bp, Homo sapien
catggtggatccttgggacacaacccagcaaac

SEQ ID NO: 858109 - DNA, 33 bp, Homo sapien
tggggacgaaaagtaacctgtttttgcctgctc

SEQ ID NO: 858110 - DNA, 33 bp, Homo sapien
tggggacgaaaagtaatctgtttttgcctgctc

SEQ ID NO: 858111 - DNA, 33 bp, Homo sapien
ctgttgtatcagtttaacccccgcatgtcccag

SEQ ID NO: 858112 - DNA, 33 bp, Homo sapien
ctgttgtatcagtttaccccccgcatgtcccag

SEQ ID NO: 858113 - DNA, 33 bp, Homo sapien
ttatcatgtgtcagaccgtaagcctttggccac

SEQ ID NO: 858114 - DNA, 33 bp, Homo sapien
ttatcatgtgtcagactgtaagcctttggccac

SEQ ID NO: 858115 - DNA, 33 bp, Homo sapien; identical to SEQ ID NO: 858113

SEQ ID NO: 858116 - DNA, 33 bp, Homo sapien; identical to SEQ ID NO: 858114

SEQ ID NO: 858117 - DNA, 33 bp, Homo sapien
tggctgtggtttgtaacaccaggccatgtaaaa

SEQ ID NO: 858118 - DNA, 33 bp, Homo sapien
tggctgtggtttgtaataccaggccatgtaaaa

SEQ ID NO: 858119 - DNA, 33 bp, Homo sapien
atacactatatataaacggggagccaaatggca

SEQ ID NO: 858120 - DNA, 33 bp, Homo sapien
atacactatatataaatggggagccaaatggca

SEQ ID NO: 858121 - DNA, 33 bp, Homo sapien
gtgagcttcttgaaggcaggcactgagtctttg

SEQ ID NO: 858122 - DNA, 33 bp, Homo sapien
gtgagcttcttgaaggtaggcactgagtctttg

SEQ ID NO: 858123 - DNA, 33 bp, Homo sapien
gtagaacagtggaaaacagtgaacaaatagata

SEQ ID NO: 858124 - DNA, 33 bp, Homo sapien
gtagaacagtggaaaatagtgaacaaatagata

SEQ ID NO: 858125 - DNA, 33 bp, Homo sapien
attagatgagaaaatgcatgtaaagcacttacc

SEQ ID NO: 858126 - DNA, 33 bp, Homo sapien
attagatgagaaaatgtatgtaaagcacttacc

SEQ ID NO: 858127 - DNA, 33 bp, Homo sapien
tacaagtgcagtccataagctatcagttagcaa

SEQ ID NO: 858128 - DNA, 33 bp, Homo sapien
tacaagtgcagtccatcagctatcagttagcaa

SEQ ID NO: 858129 - DNA, 33 bp, Homo sapien
aaatgctgtgacttaacgaacatataaatttta

SEQ ID NO: 858130 - DNA, 33 bp, Homo sapien
aaatgctgtgacttaatgaacatataaatttta

SEQ ID NO: 858131 - DNA, 33 bp, Homo sapien
gctttaggtgacacaccgtactctgacaattta

SEQ ID NO: 858132 - DNA, 33 bp, Homo sapien
gctttaggtgacacactgtactctgacaattta

SEQ ID NO: 858133 - DNA, 33 bp, Homo sapien
taagggcttttacacaacagattagcaacctcc

SEQ ID NO: 858134 - DNA, 33 bp, Homo sapien
taagggcttttacacatcagattagcaacctcc

SEQ ID NO: 858135 - DNA, 33 bp, Homo sapien
agttgccagaggttggaagagagaagaattaat

SEQ ID NO: 858136 - DNA, 33 bp, Homo sapien
agttgccagaggttgggagagagaagaattaat

SEQ ID NO: 858137 - DNA, 33 bp, Homo sapien
cagaagcaaatactgacggagtaagattctcta

SEQ ID NO: 858138 - DNA, 33 bp, Homo sapien
cagaagcaaatactgatggagtaagattctcta

SEQ ID NO: 858139 - DNA, 33 bp, Homo sapien
ggtggggcatactttcacaccatatttgttctt

SEQ ID NO: 858140 - DNA, 33 bp, Homo sapien
ggtggggcatactttcgcaccatatttgttctt

SEQ ID NO: 858141 - DNA, 33 bp, Homo sapien
ttattggctatgaagacaatagtcaacaaagaa

SEQ ID NO: 858142 - DNA, 33 bp, Homo sapien
ttattggctatgaagataatagtcaacaaagaa

SEQ ID NO: 858143 - DNA, 33 bp, Homo sapien
ttcctccctttctctacgactccagattaatca

SEQ ID NO: 858144 - DNA, 33 bp, Homo sapien
ttcctccctttctctatgactccagattaatca

SEQ ID NO: 858145 - DNA, 33 bp, Homo sapien
aacaaggcagcttaaaagatcccttgtactgct

SEQ ID NO: 858146 - DNA, 33 bp, Homo sapien
aacaaggcagcttaaacgatcccttgtactgct

SEQ ID NO: 858147 - DNA, 33 bp, Homo sapien
atgcaaagattagaaaataagaggccatcagat

SEQ ID NO: 858148 - DNA, 33 bp, Homo sapien
atgcaaagattagaaagtaagaggccatcagat

SEQ ID NO: 858149 - DNA, 33 bp, Homo sapien
atgaggcacaatgggagcctgaaatcagggact

SEQ ID NO: 858150 - DNA, 33 bp, Homo sapien
atgaggcacaatgggatcctgaaatcagggact

SEQ ID NO: 858151 - DNA, 33 bp, Homo sapien
taaacagcatcaatgaaaaacacaacttggtga

SEQ ID NO: 858152 - DNA, 33 bp, Homo sapien
taaacagcatcaatgacaaacacaacttggtga

SEQ ID NO: 858153 - DNA, 33 bp, Homo sapien
aaaaccaaaagccatacagtctactcttttatt

SEQ ID NO: 858154 - DNA, 33 bp, Homo sapien
aaaaccaaaagccatatagtctactcttttatt

SEQ ID NO: 858155 - DNA, 33 bp, Homo sapien
ctaactgcaggctgaacatctccattcaagaac

SEQ ID NO: 858156 - DNA, 33 bp, Homo sapien
ctaactgcaggctgaatatctccattcaagaac

SEQ ID NO: 858157 - DNA, 33 bp, Homo sapien
gcctgcagcggggccaaggcaaaattgagttgc

SEQ ID NO: 858158 - DNA, 33 bp, Homo sapien
gcctgcagcggggccagggcaaaattgagttgc

SEQ ID NO: 858159 - DNA, 33 bp, Homo sapien
attgacaagactataacaatcctggctgtaatt

SEQ ID NO: 858160 - DNA, 33 bp, Homo sapien
attgacaagactataataatcctggctgtaatt

SEQ ID NO: 858161 - DNA, 33 bp, Homo sapien
ataacaaaatacaggcaaaaatgacagacaaca

SEQ ID NO: 858162 - DNA, 33 bp, Homo sapien
ataacaaaatacaggcgaaaatgacagacaaca

SEQ ID NO: 858163 - DNA, 33 bp, Homo sapien
tgtctgctccgtcgtgaatccataggaccatga

SEQ ID NO: 858164 - DNA, 33 bp, Homo sapien
tgtctgctccgtcgtggatccataggaccatga

SEQ ID NO: 858165 - DNA, 33 bp, Homo sapien
tacttattgaataaacaaatagcagtcttacag

SEQ ID NO: 858166 - DNA, 33 bp, Homo sapien
tacttattgaataaacgaatagcagtcttacag

SEQ ID NO: 858167 - DNA, 33 bp, Homo sapien
aaagtattgtagagtaagaattcctgaagatat

SEQ ID NO: 858168 - DNA, 33 bp, Homo sapien
aaagtattgtagagtaggaattcctgaagatat

SEQ ID NO: 858169 - DNA, 33 bp, Homo sapien
cagatcctcatcttcaaaatggggtgttatgag

SEQ ID NO: 858170 - DNA, 33 bp, Homo sapien
cagatcctcatcttcacaatggggtgttatgag

SEQ ID NO: 858171 - DNA, 33 bp, Homo sapien
tgatacggccgtgataaccaggcatgggatcaa

SEQ ID NO: 858172 - DNA, 33 bp, Homo sapien
tgatacggccgtgatatccaggcatgggatcaa

SEQ ID NO: 858173 - DNA, 33 bp, Homo sapien
cagtagaataatcctcgccatgacctgtaacca

SEQ ID NO: 858174 - DNA, 33 bp, Homo sapien
cagtagaataatcctctccatgacctgtaacca

SEQ ID NO: 858175 - DNA, 33 bp, Homo sapien
acccagtgacttttccagatgcatttaaagttt

SEQ ID NO: 858176 - DNA, 33 bp, Homo sapien
acccagtgacttttccggatgcatttaaagttt

SEQ ID NO: 858177 - DNA, 33 bp, Homo sapien
ggtaaatttaacactcaagtaaccaatgctctg

SEQ ID NO: 858178 - DNA, 33 bp, Homo sapien
ggtaaatttaacactcgagtaaccaatgctctg

SEQ ID NO: 858179 - DNA, 33 bp, Homo sapien
gggagataaaggtggaaggaagaaagagattca

SEQ ID NO: 858180 - DNA, 33 bp, Homo sapien
gggagataaaggtggacggaagaaagagattca

SEQ ID NO: 858181 - DNA, 33 bp, Homo sapien
cttgaggatactttaacaatgcaggtgaaagag

SEQ ID NO: 858182 - DNA, 33 bp, Homo sapien
cttgaggatactttaagaatgcaggtgaaagag

SEQ ID NO: 858183 - DNA, 33 bp, Homo sapien
ctataatggtgatgacaagaggctgtggtactc

SEQ ID NO: 858184 - DNA, 33 bp, Homo sapien
ctataatggtgatgacgagaggctgtggtactc

SEQ ID NO: 858185 - DNA, 33 bp, Homo sapien
ggccaaagttctctctaaacccaagcactttca

SEQ ID NO: 858186 - DNA, 33 bp, Homo sapien
ggccaaagttctctcttaacccaagcactttca

SEQ ID NO: 858187 - DNA, 33 bp, Homo sapien
tcagggaatcataccacgcttgttacttaaaag

SEQ ID NO: 858188 - DNA, 33 bp, Homo sapien
tcagggaatcataccatgcttgttacttaaaag

SEQ ID NO: 858189 - DNA, 33 bp, Homo sapien
ggaagtagcagataaaacctacgtgattaagac

SEQ ID NO: 858190 - DNA, 33 bp, Homo sapien
ggaagtagcagataaagcctacgtgattaagac

SEQ ID NO: 858191 - DNA, 33 bp, Homo sapien
caacacagaatcaaaccctctggagcagtcaca

SEQ ID NO: 858192 - DNA, 33 bp, Homo sapien
caacacagaatcaaactctctggagcagtcaca

SEQ ID NO: 858193 - DNA, 33 bp, Homo sapien
acattaaatgcctccccctttgcaatcttatgg

SEQ ID NO: 858194 - DNA, 33 bp, Homo sapien
acattaaatgcctcccgctttgcaatcttatgg

SEQ ID NO: 858195 - DNA, 33 bp, Homo sapien
gtgaaccagtataaacccaattctaccaagagt

SEQ ID NO: 858196 - DNA, 33 bp, Homo sapien
gtgaaccagtataaactcaattctaccaagagt

SEQ ID NO: 858197 - DNA, 33 bp, Homo sapien
caccgaccccgcaaaaagatgcttatttaagat

SEQ ID NO: 858198 - DNA, 33 bp, Homo sapien
caccgaccccgcaaaaggatgcttatttaagat

SEQ ID NO: 858199 - DNA, 33 bp, Homo sapien
tgtatcaggatgtatcacttgtagtgtaacagg

SEQ ID NO: 858200 - DNA, 33 bp, Homo sapien
tgtatcaggatgtatctcttgtagtgtaacagg

SEQ ID NO: 858201 - DNA, 33 bp, Homo sapien
ggaagcagtatagtcactaagagaaagagatcc

SEQ ID NO: 858202 - DNA, 33 bp, Homo sapien
ggaagcagtatagtcattaagagaaagagatcc

SEQ ID NO: 858203 - DNA, 33 bp, Homo sapien
ctcagtcttgttttctaaagtacatagtctgcc

SEQ ID NO: 858204 - DNA, 33 bp, Homo sapien
ctcagtcttgttttctgaagtacatagtctgcc

SEQ ID NO: 858205 - DNA, 33 bp, Homo sapien
tgtcagcttcggatccacctgagacacactcac

SEQ ID NO: 858206 - DNA, 33 bp, Homo sapien
tgtcagcttcggatccgcctgagacacactcac

SEQ ID NO: 858207 - DNA, 33 bp, Homo sapien
ccagactcaattgaccacctaactggtaaaagg

SEQ ID NO: 858208 - DNA, 33 bp, Homo sapien
ccagactcaattgaccgcctaactggtaaaagg

SEQ ID NO: 858209 - DNA, 33 bp, Homo sapien
ggttccatgatgggtcaacttgatgggaaagtc

SEQ ID NO: 858210 - DNA, 33 bp, Homo sapien
ggttccatgatgggtcgacttgatgggaaagtc

SEQ ID NO: 858211 - DNA, 33 bp, Homo sapien
ttttttttttctgcaaaagatgaattccctaag

SEQ ID NO: 858212 - DNA, 33 bp, Homo sapien
ttttttttttctgcaagagatgaattccctaag

SEQ ID NO: 858213 - DNA, 33 bp, Homo sapien
ctttcctgcctccttcacattgagttcctttca

SEQ ID NO: 858214 - DNA, 33 bp, Homo sapien
ctttcctgcctccttcgcattgagttcctttca

SEQ ID NO: 858215 - DNA, 33 bp, Homo sapien
gaaaaatttaattccaacaatagaagggtagtt

SEQ ID NO: 858216 - DNA, 33 bp, Homo sapien
gaaaaatttaattccagcaatagaagggtagtt

SEQ ID NO: 858217 - DNA, 33 bp, Homo sapien
agaacgtaacaaaataagacaatggtgaaaaca

SEQ ID NO: 858218 - DNA, 33 bp, Homo sapien
agaacgtaacaaaataggacaatggtgaaaaca

SEQ ID NO: 858219 - DNA, 33 bp, Homo sapien
tgtgccctggctgtaaatgaatccaggtctgtt

SEQ ID NO: 858220 - DNA, 33 bp, Homo sapien
tgtgccctggctgtaagtgaatccaggtctgtt

SEQ ID NO: 858221 - DNA, 33 bp, Homo sapien
ggaagtttctccctatcagatggtgtgaatggc

SEQ ID NO: 858222 - DNA, 33 bp, Homo sapien
ggaagtttctccctatgagatggtgtgaatggc

SEQ ID NO: 858223 - DNA, 33 bp, Homo sapien
gtccttaactttatcacatctgtaaggtctagt

SEQ ID NO: 858224 - DNA, 33 bp, Homo sapien
gtccttaactttatcatatctgtaaggtctagt

SEQ ID NO: 858225 - DNA, 33 bp, Homo sapien
ttttagtggcgtgaaaaaaaagcatttttggct

SEQ ID NO: 858226 - DNA, 33 bp, Homo sapien
ttttagtggcgtgaaagaaaagcatttttggct

SEQ ID NO: 858227 - DNA, 33 bp, Homo sapien
taaactaatgaatgaacgacaaagttccctccc

SEQ ID NO: 858228 - DNA, 33 bp, Homo sapien
taaactaatgaatgaatgacaaagttccctccc

SEQ ID NO: 858229 - DNA, 33 bp, Homo sapien
tgagaagagtcttaacaaaagaataggatgtgg

SEQ ID NO: 858230 - DNA, 33 bp, Homo sapien
tgagaagagtcttaacgaaagaataggatgtgg

SEQ ID NO: 858231 - DNA, 33 bp, Homo sapien
aatcaatattggaggccacttgcagatactatt

SEQ ID NO: 858232 - DNA, 33 bp, Homo sapien
aatcaatattggaggctacttgcagatactatt

SEQ ID NO: 858233 - DNA, 33 bp, Homo sapien
aaaattcacactacaaatgagttcttattttac

SEQ ID NO: 858234 - DNA, 33 bp, Homo sapien
aaaattcacactacaagtgagttcttattttac

SEQ ID NO: 858235 - DNA, 33 bp, Homo sapien
tatgaaatgggcagacaacattctcaacatccc

SEQ ID NO: 858236 - DNA, 33 bp, Homo sapien
tatgaaatgggcagaccacattctcaacatccc

SEQ ID NO: 858237 - DNA, 33 bp, Homo sapien
ggtttgttatgcaaaacagtaaagtggtagaaa

SEQ ID NO: 858238 - DNA, 33 bp, Homo sapien
ggtttgttatgcaaaagagtaaagtggtagaaa

SEQ ID NO: 858239 - DNA, 33 bp, Homo sapien
ttgatgtgtaatgaagcacccaaagcttagggg

SEQ ID NO: 858240 - DNA, 33 bp, Homo sapien
ttgatgtgtaatgaagtacccaaagcttagggg

SEQ ID NO: 858241 - DNA, 33 bp, Homo sapien
tctaactgcctttagaatatggacgatgacagg

SEQ ID NO: 858242 - DNA, 33 bp, Homo sapien
tctaactgcctttagagtatggacgatgacagg

SEQ ID NO: 858243 - DNA, 33 bp, Homo sapien
ctgtctgatttgtgaaatatatgtggtcagttc

SEQ ID NO: 858244 - DNA, 33 bp, Homo sapien
ctgtctgatttgtgaattatatgtggtcagttc

SEQ ID NO: 858245 - DNA, 33 bp, Homo sapien
ccctctgttttgcaatcacaatgattagcatct

SEQ ID NO: 858246 - DNA, 33 bp, Homo sapien
ccctctgttttgcaattacaatgattagcatct

SEQ ID NO: 858247 - DNA, 33 bp, Homo sapien
attctctaatcaattacaggcatctgggtgcta

SEQ ID NO: 858248 - DNA, 33 bp, Homo sapien
attctctaatcaattataggcatctgggtgcta

SEQ ID NO: 858249 - DNA, 33 bp, Homo sapien
tttctgattctgaacaatggaagaggaaagtca

SEQ ID NO: 858250 - DNA, 33 bp, Homo sapien
tttctgattctgaacagtggaagaggaaagtca

SEQ ID NO: 858251 - DNA, 33 bp, Homo sapien
tgtaatcatctctaacaggcaaggctaacgttg

SEQ ID NO: 858252 - DNA, 33 bp, Homo sapien
tgtaatcatctctaactggcaaggctaacgttg

SEQ ID NO: 858253 - DNA, 33 bp, Homo sapien
agtccaagttgttccaagtccgtgattagtctc

SEQ ID NO: 858254 - DNA, 33 bp, Homo sapien
agtccaagttgttccaggtccgtgattagtctc

SEQ ID NO: 858255 - DNA, 33 bp, Homo sapien
acaggtgctaattataagaaaaaactataagaa

SEQ ID NO: 858256 - DNA, 33 bp, Homo sapien
acaggtgctaattataggaaaaaactataagaa

SEQ ID NO: 858257 - DNA, 33 bp, Homo sapien
cagtcttcaattctaccatgtatttgcagaaaa

SEQ ID NO: 858258 - DNA, 33 bp, Homo sapien
cagtcttcaattctacgatgtatttgcagaaaa

SEQ ID NO: 858259 - DNA, 33 bp, Homo sapien
aataacttggaaaacagaggccaacatccaaac

SEQ ID NO: 858260 - DNA, 33 bp, Homo sapien
aataacttggaaaacataggccaacatccaaac

SEQ ID NO: 858261 - DNA, 33 bp, Homo sapien
attcacagatctccaaatacaaaaacaggccaa

SEQ ID NO: 858262 - DNA, 33 bp, Homo sapien
attcacagatctccaagtacaaaaacaggccaa

SEQ ID NO: 858263 - DNA, 33 bp, Homo sapien
tattctcatgagcaaactctgaaagtacttcca

SEQ ID NO: 858264 - DNA, 33 bp, Homo sapien
tattctcatgagcaaagtctgaaagtacttcca

SEQ ID NO: 858265 - DNA, 33 bp, Homo sapien
aaagtacatacaacaacgtgccaaaagccccgt

SEQ ID NO: 858266 - DNA, 33 bp, Homo sapien
aaagtacatacaacaatgtgccaaaagccccgt

SEQ ID NO: 858267 - DNA, 33 bp, Homo sapien
ttctctaaactaaataagttatcacattggtga

SEQ ID NO: 858268 - DNA, 33 bp, Homo sapien
ttctctaaactaaatatgttatcacattggtga

SEQ ID NO: 858269 - DNA, 33 bp, Homo sapien
caccactctgggcaggacctaaacagtgctggt

SEQ ID NO: 858270 - DNA, 33 bp, Homo sapien
caccactctgggcaggtcctaaacagtgctggt

SEQ ID NO: 858271 - DNA, 33 bp, Homo sapien
ctgattttagcaggaggattctcatcttggctg

SEQ ID NO: 858272 - DNA, 33 bp, Homo sapien
ctgattttagcaggagtattctcatcttggctg

SEQ ID NO: 858273 - DNA, 33 bp, Homo sapien
ctagtctgcatttcaaagtaaccactcttagtg

SEQ ID NO: 858274 - DNA, 33 bp, Homo sapien
ctagtctgcatttcaaggtaaccactcttagtg

SEQ ID NO: 858275 - DNA, 33 bp, Homo sapien
tcctactttacacaagaaaattcaggcccagag

SEQ ID NO: 858276 - DNA, 33 bp, Homo sapien
tcctactttacacaaggaaattcaggcccagag

SEQ ID NO: 858277 - DNA, 33 bp, Homo sapien
actggcaataagctaacgtcctggaattgtgtg

SEQ ID NO: 858278 - DNA, 33 bp, Homo sapien
actggcaataagctaatgtcctggaattgtgtg

SEQ ID NO: 858279 - DNA, 33 bp, Homo sapien
caaagagatgtgcctacggaaaatgaagaaggg

SEQ ID NO: 858280 - DNA, 33 bp, Homo sapien
caaagagatgtgcctatggaaaatgaagaaggg

SEQ ID NO: 858281 - DNA, 33 bp, Homo sapien
ggctgtatttacctgccaggacaagctggatgg

SEQ ID NO: 858282 - DNA, 33 bp, Homo sapien
ggctgtatttacctgctaggacaagctggatgg

SEQ ID NO: 858283 - DNA, 33 bp, Homo sapien
acgtggccagtaggaaacagggcttggatttga

SEQ ID NO: 858284 - DNA, 33 bp, Homo sapien
acgtggccagtaggaagcagggcttggatttga

SEQ ID NO: 858285 - DNA, 33 bp, Homo sapien
tttaaatggaatgttcaagaagtcaggtattaa

SEQ ID NO: 858286 - DNA, 33 bp, Homo sapien
tttaaatggaatgttcgagaagtcaggtattaa

SEQ ID NO: 858287 - DNA, 33 bp, Homo sapien
cataaccttggatatgacagtaagctcttgatg

SEQ ID NO: 858288 - DNA, 33 bp, Homo sapien
cataaccttggatatggcagtaagctcttgatg

SEQ ID NO: 858289 - DNA, 33 bp, Homo sapien
actattcccggggctaacgataccacagatgaa

SEQ ID NO: 858290 - DNA, 33 bp, Homo sapien
actattcccggggctaccgataccacagatgaa

SEQ ID NO: 858291 - DNA, 33 bp, Homo sapien
gaagcagagtagttaaatctgggaccaaagctg

SEQ ID NO: 858292 - DNA, 33 bp, Homo sapien
gaagcagagtagttaagtctgggaccaaagctg

SEQ ID NO: 858293 - DNA, 33 bp, Homo sapien
ttgtgttcctacaccacgtgtaaaaatgatctc

SEQ ID NO: 858294 - DNA, 33 bp, Homo sapien
ttgtgttcctacaccatgtgtaaaaatgatctc

SEQ ID NO: 858295 - DNA, 33 bp, Homo sapien
gtcagcatccattcctcaaattatgcctgagtg

SEQ ID NO: 858296 - DNA, 33 bp, Homo sapien
gtcagcatccattccttaaattatgcctgagtg

SEQ ID NO: 858297 - DNA, 33 bp, Homo sapien
ctggatttcacagcataagctgcatagttaagg

SEQ ID NO: 858298 - DNA, 33 bp, Homo sapien
ctggatttcacagcatgagctgcatagttaagg

SEQ ID NO: 858299 - DNA, 33 bp, Homo sapien
ggacacatactccaacacagtctgcctggattc

SEQ ID NO: 858300 - DNA, 33 bp, Homo sapien
ggacacatactccaacgcagtctgcctggattc

SEQ ID NO: 858301 - DNA, 33 bp, Homo sapien
catgtaataggtacccaagctgggatttgaatc

SEQ ID NO: 858302 - DNA, 33 bp, Homo sapien
catgtaataggtacccgagctgggatttgaatc

SEQ ID NO: 858303 - DNA, 33 bp, Homo sapien
gtaacaagccattgaaaaaacagcaatcatttc

SEQ ID NO: 858304 - DNA, 33 bp, Homo sapien
gtaacaagccattgaataaacagcaatcatttc

SEQ ID NO: 858305 - DNA, 33 bp, Homo sapien
ttagctgtggtttaaacaatggatcgacttcat

SEQ ID NO: 858306 - DNA, 33 bp, Homo sapien
ttagctgtggtttaaagaatggatcgacttcat

SEQ ID NO: 858307 - DNA, 33 bp, Homo sapien
gattatgtttcattcaccttagagtcttttaca

SEQ ID NO: 858308 - DNA, 33 bp, Homo sapien
gattatgtttcattcatcttagagtcttttaca

SEQ ID NO: 858309 - DNA, 33 bp, Homo sapien
tatcatgacggcttttaaaaaaactacagactt

SEQ ID NO: 858310 - DNA, 33 bp, Homo sapien
tatcatgacggctttttaaaaaactacagactt

SEQ ID NO: 858311 - DNA, 33 bp, Homo sapien
tacagatatacctgtcaacattttttctcatta

SEQ ID NO: 858312 - DNA, 33 bp, Homo sapien
tacagatatacctgtcgacattttttctcatta

SEQ ID NO: 858313 - DNA, 33 bp, Homo sapien
aactgcctattctttaagaagcattaatttcca

SEQ ID NO: 858314 - DNA, 33 bp, Homo sapien
aactgcctattctttatgaagcattaatttcca

SEQ ID NO: 858315 - DNA, 33 bp, Homo sapien
aatacacctcccataactcacagtgttcttcat

SEQ ID NO: 858316 - DNA, 33 bp, Homo sapien
aatacacctcccataattcacagtgttcttcat

SEQ ID NO: 858317 - DNA, 33 bp, Homo sapien
ggcactacatagcacaaatgaggccaacaactg

SEQ ID NO: 858318 - DNA, 33 bp, Homo sapien
ggcactacatagcacagatgaggccaacaactg

SEQ ID NO: 858319 - DNA, 33 bp, Homo sapien
ttgctgtgctttccaacgctttaacagcttatc

SEQ ID NO: 858320 - DNA, 33 bp, Homo sapien
ttgctgtgctttccaatgctttaacagcttatc

SEQ ID NO: 858321 - DNA, 33 bp, Homo sapien
ctgttttccgtatttcaaatgattacaagatta

SEQ ID NO: 858322 - DNA, 33 bp, Homo sapien
ctgttttccgtatttcgaatgattacaagatta

SEQ ID NO: 858323 - DNA, 33 bp, Homo sapien
gtatactgccaggaagcaataaagtgctaaaaa

SEQ ID NO: 858324 - DNA, 33 bp, Homo sapien
gtatactgccaggaagtaataaagtgctaaaaa

SEQ ID NO: 858325 - DNA, 33 bp, Homo sapien
caaaagattttaggtaagaacaggcagtcattg

SEQ ID NO: 858326 - DNA, 33 bp, Homo sapien
caaaagattttaggtacgaacaggcagtcattg

SEQ ID NO: 858327 - DNA, 33 bp, Homo sapien
ctcagtagatagaacgcacaatcgggttttata

SEQ ID NO: 858328 - DNA, 33 bp, Homo sapien
ctcagtagatagaacgtacaatcgggttttata

SEQ ID NO: 858329 - DNA, 33 bp, Homo sapien
accaaaataacgctcaataagttacacagctgt

SEQ ID NO: 858330 - DNA, 33 bp, Homo sapien
accaaaataacgctcagtaagttacacagctgt

SEQ ID NO: 858331 - DNA, 33 bp, Homo sapien
aatatgtgcaataaaactgagcctttagatagt

SEQ ID NO: 858332 - DNA, 33 bp, Homo sapien
aatatgtgcaataaaattgagcctttagatagt

SEQ ID NO: 858333 - DNA, 33 bp, Homo sapien
aataagagaacaggcaacaactattctttgaat

SEQ ID NO: 858334 - DNA, 33 bp, Homo sapien
aataagagaacaggcatcaactattctttgaat

SEQ ID NO: 858335 - DNA, 33 bp, Homo sapien
agaagagggaagactacaaaggcacattatata

SEQ ID NO: 858336 - DNA, 33 bp, Homo sapien
agaagagggaagactagaaaggcacattatata

SEQ ID NO: 858337 - DNA, 33 bp, Homo sapien
aattttacctgagaagcctgttttttcttgggt

SEQ ID NO: 858338 - DNA, 33 bp, Homo sapien
aattttacctgagaagtctgttttttcttgggt

SEQ ID NO: 858339 - DNA, 33 bp, Homo sapien
aggcacctgataactaaagacagctcctatatc

SEQ ID NO: 858340 - DNA, 33 bp, Homo sapien
aggcacctgataactagagacagctcctatatc

SEQ ID NO: 858341 - DNA, 33 bp, Homo sapien
caggtacggtgaggctaaaagatcaggagataa

SEQ ID NO: 858342 - DNA, 33 bp, Homo sapien
caggtacggtgaggctgaaagatcaggagataa

SEQ ID NO: 858343 - DNA, 33 bp, Homo sapien
tcaaatgcttcccctccaaaaaacataaattat

SEQ ID NO: 858344 - DNA, 33 bp, Homo sapien
tcaaatgcttcccctctaaaaaacataaattat

SEQ ID NO: 858345 - DNA, 33 bp, Homo sapien
tgtcaaaatcttgatccccagttacagtgctgc

SEQ ID NO: 858346 - DNA, 33 bp, Homo sapien
tgtcaaaatcttgatctccagttacagtgctgc

SEQ ID NO: 858347 - DNA, 33 bp, Homo sapien
ggccttagttgatctacctacctcagcctccca

SEQ ID NO: 858348 - DNA, 33 bp, Homo sapien
ggccttagttgatctatctacctcagcctccca

SEQ ID NO: 858349 - DNA, 33 bp, Homo sapien
ggtatgtccctagtaaaataatagatctagaca

SEQ ID NO: 858350 - DNA, 33 bp, Homo sapien
ggtatgtccctagtaacataatagatctagaca

SEQ ID NO: 858351 - DNA, 33 bp, Homo sapien
taacctgaggttgggacaaaatggattaaacat

SEQ ID NO: 858352 - DNA, 33 bp, Homo sapien
taacctgaggttgggagaaaatggattaaacat

SEQ ID NO: 858353 - DNA, 33 bp, Homo sapien
tgatttctagactctacgatggagcctatctga

SEQ ID NO: 858354 - DNA, 33 bp, Homo sapien
tgatttctagactctatgatggagcctatctga

SEQ ID NO: 858355 - DNA, 33 bp, Homo sapien
ttattttgtgtgttcaatctctgtgctttttag

SEQ ID NO: 858356 - DNA, 33 bp, Homo sapien
ttattttgtgtgttcagtctctgtgctttttag

SEQ ID NO: 858357 - DNA, 33 bp, Homo sapien
gatcaggccagtgcataagtcaccttgagggtc

SEQ ID NO: 858358 - DNA, 33 bp, Homo sapien
gatcaggccagtgcatgagtcaccttgagggtc

SEQ ID NO: 858359 - DNA, 33 bp, Homo sapien
tggctaagcaacatcgcaattttcatggttgct

SEQ ID NO: 858360 - DNA, 33 bp, Homo sapien
tggctaagcaacatcgtaattttcatggttgct

SEQ ID NO: 858361 - DNA, 33 bp, Homo sapien
atgtttgttaaatgaacggtccttgttaagtac

SEQ ID NO: 858362 - DNA, 33 bp, Homo sapien
atgtttgttaaatgaatggtccttgttaagtac

SEQ ID NO: 858363 - DNA, 33 bp, Homo sapien
tgtgtatcaagccatacctggggagaagagtgg

SEQ ID NO: 858364 - DNA, 33 bp, Homo sapien
tgtgtatcaagccatatctggggagaagagtgg

SEQ ID NO: 858365 - DNA, 33 bp, Homo sapien
caaatgtcatacatgaataggtagtataagtaa

SEQ ID NO: 858366 - DNA, 33 bp, Homo sapien
caaatgtcatacatgagtaggtagtataagtaa

SEQ ID NO: 858367 - DNA, 33 bp, Homo sapien
tggataaccagaccacagagtataacttaagct

SEQ ID NO: 858368 - DNA, 33 bp, Homo sapien
tggataaccagaccacggagtataacttaagct

SEQ ID NO: 858369 - DNA, 33 bp, Homo sapien
tgacaggaagaccaccaagataaagtaccatct

SEQ ID NO: 858370 - DNA, 33 bp, Homo sapien
tgacaggaagaccaccgagataaagtaccatct

SEQ ID NO: 858371 - DNA, 33 bp, Homo sapien
attcccgctccaacaacgagaaacccggctctc

SEQ ID NO: 858372 - DNA, 33 bp, Homo sapien
attcccgctccaacaatgagaaacccggctctc

SEQ ID NO: 858373 - DNA, 33 bp, Homo sapien
tcttattcacaaattcaactgttttaccataga

SEQ ID NO: 858374 - DNA, 33 bp, Homo sapien
tcttattcacaaattcgactgttttaccataga

SEQ ID NO: 858375 - DNA, 33 bp, Homo sapien
catgtaataatttaaaatctcttaagcacaggc

SEQ ID NO: 858376 - DNA, 33 bp, Homo sapien
catgtaataatttaaagtctcttaagcacaggc

SEQ ID NO: 858377 - DNA, 33 bp, Homo sapien
ctgccaattaaaacacaaaggcatcacagattg

SEQ ID NO: 858378 - DNA, 33 bp, Homo sapien
ctgccaattaaaacacgaaggcatcacagattg

SEQ ID NO: 858379 - DNA, 33 bp, Homo sapien
tgacgacctgtatttccatcagtagagattggc

SEQ ID NO: 858380 - DNA, 33 bp, Homo sapien
tgacgacctgtatttcgatcagtagagattggc

SEQ ID NO: 858381 - DNA, 33 bp, Homo sapien
ttaaacttatgctcaacatgccttgatttcccc

SEQ ID NO: 858382 - DNA, 33 bp, Homo sapien
ttaaacttatgctcaatatgccttgatttcccc

SEQ ID NO: 858383 - DNA, 33 bp, Homo sapien
aaaggggcacccagaccgtccaacaattaaaaa

SEQ ID NO: 858384 - DNA, 33 bp, Homo sapien
aaaggggcacccagactgtccaacaattaaaaa

SEQ ID NO: 858385 - DNA, 33 bp, Homo sapien
tctgggatttgctttacgtaattctaaggtgag

SEQ ID NO: 858386 - DNA, 33 bp, Homo sapien
tctgggatttgctttatgtaattctaaggtgag

SEQ ID NO: 858387 - DNA, 33 bp, Homo sapien
cgccagaaatcaatagaagttaacaagtcctcc

SEQ ID NO: 858388 - DNA, 33 bp, Homo sapien
cgccagaaatcaatagtagttaacaagtcctcc

SEQ ID NO: 858389 - DNA, 33 bp, Homo sapien
caataccaagctagaaatattcctaagattcat

SEQ ID NO: 858390 - DNA, 33 bp, Homo sapien
caataccaagctagaagtattcctaagattcat

SEQ ID NO: 858391 - DNA, 33 bp, Homo sapien
gtcacctgatgaaagaagtttccagaaattcga

SEQ ID NO: 858392 - DNA, 33 bp, Homo sapien
gtcacctgatgaaagaggtttccagaaattcga

SEQ ID NO: 858393 - DNA, 33 bp, Homo sapien
ttgtcactattctacagctggtgtgggttgtgc

SEQ ID NO: 858394 - DNA, 33 bp, Homo sapien
ttgtcactattctacatctggtgtgggttgtgc

SEQ ID NO: 858395 - DNA, 33 bp, Homo sapien
tgctcttgaattctataagatcagctgtttcct

SEQ ID NO: 858396 - DNA, 33 bp, Homo sapien
tgctcttgaattctatcagatcagctgtttcct

SEQ ID NO: 858397 - DNA, 33 bp, Homo sapien
cttccatttgggtctacattctttcatcaacaa

SEQ ID NO: 858398 - DNA, 33 bp, Homo sapien
cttccatttgggtctatattctttcatcaacaa

SEQ ID NO: 858399 - DNA, 33 bp, Homo sapien
aggattttaatcctaccaagttgttacaaacaa

SEQ ID NO: 858400 - DNA, 33 bp, Homo sapien
aggattttaatcctacgaagttgttacaaacaa

SEQ ID NO: 858401 - DNA, 33 bp, Homo sapien
ctggaaatagacaataataatcctcaaaaatta

SEQ ID NO: 858402 - DNA, 33 bp, Homo sapien
ctggaaatagacaatactaatcctcaaaaatta

SEQ ID NO: 858403 - DNA, 33 bp, Homo sapien
ttctctatctgtcacacagcccatttggatgac

SEQ ID NO: 858404 - DNA, 33 bp, Homo sapien
ttctctatctgtcacatagcccatttggatgac

SEQ ID NO: 858405 - DNA, 33 bp, Homo sapien
acctataacaacaacaatgcccagaaagagaca

SEQ ID NO: 858406 - DNA, 33 bp, Homo sapien
acctataacaacaacactgcccagaaagagaca

SEQ ID NO: 858407 - DNA, 33 bp, Homo sapien
tagtaaacagtcatgacagaaactgcaattcca

SEQ ID NO: 858408 - DNA, 33 bp, Homo sapien
tagtaaacagtcatgatagaaactgcaattcca

SEQ ID NO: 858409 - DNA, 33 bp, Homo sapien
ggggacagtactaaacaattcacaagaaatctg

SEQ ID NO: 858410 - DNA, 33 bp, Homo sapien
ggggacagtactaaaccattcacaagaaatctg

SEQ ID NO: 858411 - DNA, 33 bp, Homo sapien
ttcatggcctataccactggaagaagcatcagg

SEQ ID NO: 858412 - DNA, 33 bp, Homo sapien
ttcatggcctataccagtggaagaagcatcagg

SEQ ID NO: 858413 - DNA, 33 bp, Homo sapien
ttgctgcaggacttctcagaacctttgttatgt

SEQ ID NO: 858414 - DNA, 33 bp, Homo sapien
ttgctgcaggacttctgagaacctttgttatgt

SEQ ID NO: 858415 - DNA, 33 bp, Homo sapien
gaatctctatgacaatgaactctttttgctgac

SEQ ID NO: 858416 - DNA, 33 bp, Homo sapien
gaatctctatgacaattaactctttttgctgac

SEQ ID NO: 858417 - DNA, 33 bp, Homo sapien
aagggctcaaagcatcaagcataaaaatcttca

SEQ ID NO: 858418 - DNA, 33 bp, Homo sapien
aagggctcaaagcatcgagcataaaaatcttca

SEQ ID NO: 858419 - DNA, 33 bp, Homo sapien
aggccaaaaagactctcaaggcctcatgtaggc

SEQ ID NO: 858420 - DNA, 33 bp, Homo sapien
aggccaaaaagactctgaaggcctcatgtaggc

SEQ ID NO: 858421 - DNA, 33 bp, Homo sapien
aaacgacctgaagtgacacttgaaggacaaata

SEQ ID NO: 858422 - DNA, 33 bp, Homo sapien
aaacgacctgaagtgagacttgaaggacaaata

SEQ ID NO: 858423 - DNA, 33 bp, Homo sapien
caaagttcatacttcaacaataccaaattacct

SEQ ID NO: 858424 - DNA, 33 bp, Homo sapien
caaagttcatacttcagcaataccaaattacct

SEQ ID NO: 858425 - DNA, 33 bp, Homo sapien
accccggacaactgacaattaaaatatgatatg

SEQ ID NO: 858426 - DNA, 33 bp, Homo sapien
accccggacaactgacgattaaaatatgatatg

SEQ ID NO: 858427 - DNA, 33 bp, Homo sapien
tgctaacaaaagactgaaaattgctcaaaggcc

SEQ ID NO: 858428 - DNA, 33 bp, Homo sapien
tgctaacaaaagactgcaaattgctcaaaggcc

SEQ ID NO: 858429 - DNA, 33 bp, Homo sapien
aatacttccagttgagaagccaagataattctc

SEQ ID NO: 858430 - DNA, 33 bp, Homo sapien
aatacttccagttgaggagccaagataattctc

SEQ ID NO: 858431 - DNA, 33 bp, Homo sapien
ttattctctaggatccagataatggctgaccgt

SEQ ID NO: 858432 - DNA, 33 bp, Homo sapien
ttattctctaggatccggataatggctgaccgt

SEQ ID NO: 858433 - DNA, 33 bp, Homo sapien
agcattaaaaatactacgctgatggtgttgact

SEQ ID NO: 858434 - DNA, 33 bp, Homo sapien
agcattaaaaatactatgctgatggtgttgact

SEQ ID NO: 858435 - DNA, 33 bp, Homo sapien
taacaaaaagctctgaagttgggagaaatgcag

SEQ ID NO: 858436 - DNA, 33 bp, Homo sapien
taacaaaaagctctgaggttgggagaaatgcag

SEQ ID NO: 858437 - DNA, 33 bp, Homo sapien
ctgctatgtgagtttacgatgtgaagctgaggc

SEQ ID NO: 858438 - DNA, 33 bp, Homo sapien
ctgctatgtgagtttatgatgtgaagctgaggc

SEQ ID NO: 858439 - DNA, 33 bp, Homo sapien
tctcaccagcagtggactaatgataagcagatt

SEQ ID NO: 858440 - DNA, 33 bp, Homo sapien
tctcaccagcagtggattaatgataagcagatt

SEQ ID NO: 858441 - DNA, 33 bp, Homo sapien
agtctatctcaagaggccatgttcttacctcta

SEQ ID NO: 858442 - DNA, 33 bp, Homo sapien
agtctatctcaagaggtcatgttcttacctcta

SEQ ID NO: 858443 - DNA, 33 bp, Homo sapien
ttaaaaaaaagtacaaataatcatcaagtagct

SEQ ID NO: 858444 - DNA, 33 bp, Homo sapien
ttaaaaaaaagtacaagtaatcatcaagtagct

SEQ ID NO: 858445 - DNA, 33 bp, Homo sapien
gaattattgttagtgaaaagagggtattgaaac

SEQ ID NO: 858446 - DNA, 33 bp, Homo sapien
gaattattgttagtgagaagagggtattgaaac

SEQ ID NO: 858447 - DNA, 33 bp, Homo sapien
tcattagcttctttccactttattttgtagttt

SEQ ID NO: 858448 - DNA, 33 bp, Homo sapien
tcattagcttctttccgctttattttgtagttt

SEQ ID NO: 858449 - DNA, 33 bp, Homo sapien
tgtagattttggatatcacccctttgtcagatg

SEQ ID NO: 858450 - DNA, 33 bp, Homo sapien
tgtagattttggatattacccctttgtcagatg

SEQ ID NO: 858451 - DNA, 33 bp, Homo sapien
agacaagcctccaacagcatggcggtgacatgg

SEQ ID NO: 858452 - DNA, 33 bp, Homo sapien
agacaagcctccaacatcatggcggtgacatgg

SEQ ID NO: 858453 - DNA, 33 bp, Homo sapien
gcacaaaaactactctaacaattgggcctaatt

SEQ ID NO: 858454 - DNA, 33 bp, Homo sapien
gcacaaaaactactctcacaattgggcctaatt

SEQ ID NO: 858455 - DNA, 33 bp, Homo sapien
attataactggcataaaataggccaccacttta

SEQ ID NO: 858456 - DNA, 33 bp, Homo sapien
attataactggcataagataggccaccacttta

SEQ ID NO: 858457 - DNA, 33 bp, Homo sapien
gtctgtggaactctggacatcagctttattaac

SEQ ID NO: 858458 - DNA, 33 bp, Homo sapien
gtctgtggaactctggtcatcagctttattaac

SEQ ID NO: 858459 - DNA, 33 bp, Homo sapien
tgcaaactgtactcccaacaagaggttaatatc

SEQ ID NO: 858460 - DNA, 33 bp, Homo sapien
tgcaaactgtactcccgacaagaggttaatatc

SEQ ID NO: 858461 - DNA, 33 bp, Homo sapien
aaacagacacatagacaagggaaacagaataca

SEQ ID NO: 858462 - DNA, 33 bp, Homo sapien
aaacagacacatagacgagggaaacagaataca

SEQ ID NO: 858463 - DNA, 33 bp, Homo sapien
aaacattggacttaaagtgtaccatagacaaaa

SEQ ID NO: 858464 - DNA, 33 bp, Homo sapien
aaacattggacttaaattgtaccatagacaaaa

SEQ ID NO: 858465 - DNA, 33 bp, Homo sapien
aaaatctggctgtgatcaggttaacatcaaaaa

SEQ ID NO: 858466 - DNA, 33 bp, Homo sapien
aaaatctggctgtgattaggttaacatcaaaaa

SEQ ID NO: 858467 - DNA, 33 bp, Homo sapien
caattccatgctaagaaataaactatggatatg

SEQ ID NO: 858468 - DNA, 33 bp, Homo sapien
caattccatgctaagagataaactatggatatg

SEQ ID NO: 858469 - DNA, 33 bp, Homo sapien
cttttttccaatttcaacacctatataactcaa

SEQ ID NO: 858470 - DNA, 33 bp, Homo sapien
cttttttccaatttcatcacctatataactcaa

SEQ ID NO: 858471 - DNA, 33 bp, Homo sapien
tcttcacagtaatcaacgctgctagtaaaaaga

SEQ ID NO: 858472 - DNA, 33 bp, Homo sapien
tcttcacagtaatcaatgctgctagtaaaaaga

SEQ ID NO: 858473 - DNA, 33 bp, Homo sapien
gtaattttgtgctcagcccaaagatgttacgaa

SEQ ID NO: 858474 - DNA, 33 bp, Homo sapien
gtaattttgtgctcagtccaaagatgttacgaa

SEQ ID NO: 858475 - DNA, 33 bp, Homo sapien
gattaggaacgtagaaggtactgtaggtttttt

SEQ ID NO: 858476 - DNA, 33 bp, Homo sapien
gattaggaacgtagaatgtactgtaggtttttt

SEQ ID NO: 858477 - DNA, 33 bp, Homo sapien
cagtgattagttcagagaattaatagcctgggt

SEQ ID NO: 858478 - DNA, 33 bp, Homo sapien
cagtgattagttcagataattaatagcctgggt

SEQ ID NO: 858479 - DNA, 33 bp, Homo sapien
atactgctttggccaaatcttggatttttttcc

SEQ ID NO: 858480 - DNA, 33 bp, Homo sapien
atactgctttggccaattcttggatttttttcc

SEQ ID NO: 858481 - DNA, 33 bp, Homo sapien
gcaattcctaccaaaccgccaattacatggaat

SEQ ID NO: 858482 - DNA, 33 bp, Homo sapien
gcaattcctaccaaactgccaattacatggaat

SEQ ID NO: 858483 - DNA, 33 bp, Homo sapien
aagtgtctgtaatagtcaaggagtctcctcatg

SEQ ID NO: 858484 - DNA, 33 bp, Homo sapien
aagtgtctgtaatagttaaggagtctcctcatg

SEQ ID NO: 858485 - DNA, 33 bp, Homo sapien
ctttctggtgtgctgactaaaatcctggtattt

SEQ ID NO: 858486 - DNA, 33 bp, Homo sapien
ctttctggtgtgctgattaaaatcctggtattt

SEQ ID NO: 858487 - DNA, 33 bp, Homo sapien
tatttgaaagtttgccacacatgcacacaagaa

SEQ ID NO: 858488 - DNA, 33 bp, Homo sapien
tatttgaaagtttgccgcacatgcacacaagaa

SEQ ID NO: 858489 - DNA, 33 bp, Homo sapien
ttcttggttgttctcactaaaatcctgagttaa

SEQ ID NO: 858490 - DNA, 33 bp, Homo sapien
ttcttggttgttctcattaaaatcctgagttaa

SEQ ID NO: 858491 - DNA, 33 bp, Homo sapien
gtgtactgggcaatcacgttttccttttctaat

SEQ ID NO: 858492 - DNA, 33 bp, Homo sapien
gtgtactgggcaatcatgttttccttttctaat

SEQ ID NO: 858493 - DNA, 33 bp, Homo sapien
aggaggagaaacaggaaagagtagtaatgatag

SEQ ID NO: 858494 - DNA, 33 bp, Homo sapien
aggaggagaaacaggagagagtagtaatgatag

SEQ ID NO: 858495 - DNA, 33 bp, Homo sapien
tgtcccaagagaaattcaaagactgccatggca

SEQ ID NO: 858496 - DNA, 33 bp, Homo sapien
tgtcccaagagaaattgaaagactgccatggca

SEQ ID NO: 858497 - DNA, 33 bp, Homo sapien
gaaggataccaaagacaaattaagtccatctta

SEQ ID NO: 858498 - DNA, 33 bp, Homo sapien
gaaggataccaaagaccaattaagtccatctta

SEQ ID NO: 858499 - DNA, 33 bp, Homo sapien
ctacctctttatccctaagaaaatggaaattat

SEQ ID NO: 858500 - DNA, 33 bp, Homo sapien
ctacctctttatccctgagaaaatggaaattat

SEQ ID NO: 858501 - DNA, 33 bp, Homo sapien
ccaagcacctgaaagacagcacacttcagaaat

SEQ ID NO: 858502 - DNA, 33 bp, Homo sapien
ccaagcacctgaaagagagcacacttcagaaat

SEQ ID NO: 858503 - DNA, 33 bp, Homo sapien
acactgtcactatccacagctctaccaggaaga

SEQ ID NO: 858504 - DNA, 33 bp, Homo sapien
acactgtcactatccatagctctaccaggaaga

SEQ ID NO: 858505 - DNA, 33 bp, Homo sapien
agctcttcagtaagaacggtctctccctaaagt

SEQ ID NO: 858506 - DNA, 33 bp, Homo sapien
agctcttcagtaagaatggtctctccctaaagt

SEQ ID NO: 858507 - DNA, 33 bp, Homo sapien
ctgttgaatatggaaaatgctatacttgccaca

SEQ ID NO: 858508 - DNA, 33 bp, Homo sapien
ctgttgaatatggaaagtgctatacttgccaca

SEQ ID NO: 858509 - DNA, 33 bp, Homo sapien
gggtgtggagtatataaaaaatctctgtactaa

SEQ ID NO: 858510 - DNA, 33 bp, Homo sapien
gggtgtggagtatatagaaaatctctgtactaa

SEQ ID NO: 858511 - DNA, 33 bp, Homo sapien
tccttcttggctgtaacggtttctcagactttt

SEQ ID NO: 858512 - DNA, 33 bp, Homo sapien
tccttcttggctgtaatggtttctcagactttt

SEQ ID NO: 858513 - DNA, 33 bp, Homo sapien
gaagacaaactaaggaacttttctgctttaaac

SEQ ID NO: 858514 - DNA, 33 bp, Homo sapien
gaagacaaactaaggagcttttctgctttaaac

SEQ ID NO: 858515 - DNA, 33 bp, Homo sapien
attaagtagatgaaaaatctggcatttcaaaca

SEQ ID NO: 858516 - DNA, 33 bp, Homo sapien
attaagtagatgaaaactctggcatttcaaaca

SEQ ID NO: 858517 - DNA, 33 bp, Homo sapien
caatccaatttagaaaaatgttgcctttggtat

SEQ ID NO: 858518 - DNA, 33 bp, Homo sapien
caatccaatttagaaatatgttgcctttggtat

SEQ ID NO: 858519 - DNA, 33 bp, Homo sapien
gaaatgttagctcctcaaaaaggcctcaaaaag

SEQ ID NO: 858520 - DNA, 33 bp, Homo sapien
gaaatgttagctcctcgaaaaggcctcaaaaag

SEQ ID NO: 858521 - DNA, 33 bp, Homo sapien
caagcttgtcatggaacgatggtgcagggaatg

SEQ ID NO: 858522 - DNA, 33 bp, Homo sapien
caagcttgtcatggaatgatggtgcagggaatg

SEQ ID NO: 858523 - DNA, 33 bp, Homo sapien
tggaggatgagaaacccagtccgatgtctagat

SEQ ID NO: 858524 - DNA, 33 bp, Homo sapien
tggaggatgagaaacctagtccgatgtctagat

SEQ ID NO: 858525 - DNA, 33 bp, Homo sapien
gacttgggaagtcgataaggaaatgattttaaa

SEQ ID NO: 858526 - DNA, 33 bp, Homo sapien
gacttgggaagtcgatgaggaaatgattttaaa

SEQ ID NO: 858527 - DNA, 33 bp, Homo sapien
ataatggcttggggcacgaaaacatttagtgga

SEQ ID NO: 858528 - DNA, 33 bp, Homo sapien
ataatggcttggggcatgaaaacatttagtgga

SEQ ID NO: 858529 - DNA, 33 bp, Homo sapien
aatccatttttccaagcataggtttgcatttcc

SEQ ID NO: 858530 - DNA, 33 bp, Homo sapien
aatccatttttccaaggataggtttgcatttcc

SEQ ID NO: 858531 - DNA, 33 bp, Homo sapien
tcctgtcttgaggttacgtgctatagtctatct

SEQ ID NO: 858532 - DNA, 33 bp, Homo sapien
tcctgtcttgaggttatgtgctatagtctatct

SEQ ID NO: 858533 - DNA, 33 bp, Homo sapien
ccagtcatttggtccaatagtgcaacagctgga

SEQ ID NO: 858534 - DNA, 33 bp, Homo sapien
ccagtcatttggtccactagtgcaacagctgga

SEQ ID NO: 858535 - DNA, 33 bp, Homo sapien
tgggacctgggaattccaaacgtcttcttcatt

SEQ ID NO: 858536 - DNA, 33 bp, Homo sapien
tgggacctgggaattctaaacgtcttcttcatt

SEQ ID NO: 858537 - DNA, 33 bp, Homo sapien
agcagtcattacttcacggttcacattatagta

SEQ ID NO: 858538 - DNA, 33 bp, Homo sapien
agcagtcattacttcatggttcacattatagta

SEQ ID NO: 858539 - DNA, 33 bp, Homo sapien
cttgccctgagagttaagtgacactccctccaa

SEQ ID NO: 858540 - DNA, 33 bp, Homo sapien
cttgccctgagagttaggtgacactccctccaa

SEQ ID NO: 858541 - DNA, 33 bp, Homo sapien
ttctgcacctgtcaaaaaaccaatatccctaac

SEQ ID NO: 858542 - DNA, 33 bp, Homo sapien
ttctgcacctgtcaaagaaccaatatccctaac

SEQ ID NO: 858543 - DNA, 33 bp, Homo sapien
agactccatcaacagaaacaaaatgatggtaaa

SEQ ID NO: 858544 - DNA, 33 bp, Homo sapien
agactccatcaacagagacaaaatgatggtaaa

SEQ ID NO: 858545 - DNA, 33 bp, Homo sapien
tttacctagagttttacgctcagaaaacctaga

SEQ ID NO: 858546 - DNA, 33 bp, Homo sapien
tttacctagagttttatgctcagaaaacctaga

SEQ ID NO: 858547 - DNA, 33 bp, Homo sapien
aggacctgaagatgttaaaaagaatgccttgcc

SEQ ID NO: 858548 - DNA, 33 bp, Homo sapien
aggacctgaagatgttgaaaagaatgccttgcc

SEQ ID NO: 858549 - DNA, 33 bp, Homo sapien
cctctttctctgtagacgcttagggttcagcct

SEQ ID NO: 858550 - DNA, 33 bp, Homo sapien
cctctttctctgtagatgcttagggttcagcct

SEQ ID NO: 858551 - DNA, 33 bp, Homo sapien
ttatttaatataacagcattctacatcattaaa

SEQ ID NO: 858552 - DNA, 33 bp, Homo sapien
ttatttaatataacaggattctacatcattaaa

SEQ ID NO: 858553 - DNA, 33 bp, Homo sapien
agcacagttgtgcaaacaatatacgtttccagg

SEQ ID NO: 858554 - DNA, 33 bp, Homo sapien
agcacagttgtgcaaataatatacgtttccagg

SEQ ID NO: 858555 - DNA, 33 bp, Homo sapien
actgaacccagacttcacaaatgataacttact

SEQ ID NO: 858556 - DNA, 33 bp, Homo sapien
actgaacccagacttcgcaaatgataacttact

SEQ ID NO: 858557 - DNA, 33 bp, Homo sapien
tgaatcgaattcctgtaaatgttatcaagctaa

SEQ ID NO: 858558 - DNA, 33 bp, Homo sapien
tgaatcgaattcctgtgaatgttatcaagctaa

SEQ ID NO: 858559 - DNA, 33 bp, Homo sapien
agctgtcaacaaaaaactgggggcagtaaaaga

SEQ ID NO: 858560 - DNA, 33 bp, Homo sapien
agctgtcaacaaaaaattgggggcagtaaaaga

SEQ ID NO: 858561 - DNA, 33 bp, Homo sapien
ggaagttactgccatgaagtccttattcagcaa

SEQ ID NO: 858562 - DNA, 33 bp, Homo sapien
ggaagttactgccatggagtccttattcagcaa

SEQ ID NO: 858563 - DNA, 33 bp, Homo sapien
ctgatatgcagtttcaccccagacccattaact

SEQ ID NO: 858564 - DNA, 33 bp, Homo sapien
ctgatatgcagtttcatcccagacccattaact

SEQ ID NO: 858565 - DNA, 33 bp, Homo sapien
tttattaaaacaagacactctaccactatcaac

SEQ ID NO: 858566 - DNA, 33 bp, Homo sapien
tttattaaaacaagacgctctaccactatcaac

SEQ ID NO: 858567 - DNA, 33 bp, Homo sapien
aatgctagcaaatttcaacaacaaacaactctc

SEQ ID NO: 858568 - DNA, 33 bp, Homo sapien
aatgctagcaaatttcgacaacaaacaactctc

SEQ ID NO: 858569 - DNA, 33 bp, Homo sapien
agagagtgtttcgaggaagaaatttgcaatgat

SEQ ID NO: 858570 - DNA, 33 bp, Homo sapien
agagagtgtttcgagggagaaatttgcaatgat

SEQ ID NO: 858571 - DNA, 33 bp, Homo sapien
ttgacttccttgacatcatgctcacttgttatt

SEQ ID NO: 858572 - DNA, 33 bp, Homo sapien
ttgacttccttgacatgatgctcacttgttatt

SEQ ID NO: 858573 - DNA, 33 bp, Homo sapien
gcatttaccagatacaccttcgcctatattttt

SEQ ID NO: 858574 - DNA, 33 bp, Homo sapien
gcatttaccagatacatcttcgcctatattttt

SEQ ID NO: 858575 - DNA, 33 bp, Homo sapien
ccaatccttccttccacagctaaaaacaaacac

SEQ ID NO: 858576 - DNA, 33 bp, Homo sapien
ccaatccttccttccagagctaaaaacaaacac

SEQ ID NO: 858577 - DNA, 33 bp, Homo sapien
ggaagaaccagtatcaccaaaatgaccatactg

SEQ ID NO: 858578 - DNA, 33 bp, Homo sapien
ggaagaaccagtatcatcaaaatgaccatactg

SEQ ID NO: 858579 - DNA, 33 bp, Homo sapien
tgggttctaagagagacaatcaccacgattcac

SEQ ID NO: 858580 - DNA, 33 bp, Homo sapien
tgggttctaagagagataatcaccacgattcac

SEQ ID NO: 858581 - DNA, 33 bp, Homo sapien
ccaagaaagatattaaagtgcacacaggaaatt

SEQ ID NO: 858582 - DNA, 33 bp, Homo sapien
ccaagaaagatattaatgtgcacacaggaaatt

SEQ ID NO: 858583 - DNA, 33 bp, Homo sapien
aaaactttaagaagccaatagagccaccctctt

SEQ ID NO: 858584 - DNA, 33 bp, Homo sapien
aaaactttaagaagccgatagagccaccctctt

SEQ ID NO: 858585 - DNA, 33 bp, Homo sapien
taatggaactgataaacgttattttgtctacac

SEQ ID NO: 858586 - DNA, 33 bp, Homo sapien
taatggaactgataaatgttattttgtctacac

SEQ ID NO: 858587 - DNA, 33 bp, Homo sapien
ctttttgaattaatgaggcataaagctcaaaat

SEQ ID NO: 858588 - DNA, 33 bp, Homo sapien
ctttttgaattaatgatgcataaagctcaaaat

SEQ ID NO: 858589 - DNA, 33 bp, Homo sapien
tggccatatgattaaactccaggcaatgagatg

SEQ ID NO: 858590 - DNA, 33 bp, Homo sapien
tggccatatgattaaattccaggcaatgagatg

SEQ ID NO: 858591 - DNA, 33 bp, Homo sapien
gcctctatagccagcagtatactctacccaaaa

SEQ ID NO: 858592 - DNA, 33 bp, Homo sapien
gcctctatagccagcattatactctacccaaaa

SEQ ID NO: 858593 - DNA, 33 bp, Homo sapien
ccaggaattcaagcaacgtagcacttctcacct

SEQ ID NO: 858594 - DNA, 33 bp, Homo sapien
ccaggaattcaagcaatgtagcacttctcacct

SEQ ID NO: 858595 - DNA, 33 bp, Homo sapien
ctatgcctgtataagactagcaacctgtacagc

SEQ ID NO: 858596 - DNA, 33 bp, Homo sapien
ctatgcctgtataagattagcaacctgtacagc

SEQ ID NO: 858597 - DNA, 33 bp, Homo sapien
ggggtagatagcattaaaattacacagttttac

SEQ ID NO: 858598 - DNA, 33 bp, Homo sapien
ggggtagatagcattacaattacacagttttac

SEQ ID NO: 858599 - DNA, 33 bp, Homo sapien
gctctgtcctaccttaaagtcatcctcctgtcc

SEQ ID NO: 858600 - DNA, 33 bp, Homo sapien
gctctgtcctaccttatagtcatcctcctgtcc

SEQ ID NO: 858601 - DNA, 33 bp, Homo sapien
tggagtcttagtcacaaattctctgcataggcc

SEQ ID NO: 858602 - DNA, 33 bp, Homo sapien
tggagtcttagtcacagattctctgcataggcc

SEQ ID NO: 858603 - DNA, 33 bp, Homo sapien
tcatcaggctagatggcatcttcctggagctgg

SEQ ID NO: 858604 - DNA, 33 bp, Homo sapien
tcatcaggctagatggtatcttcctggagctgg

SEQ ID NO: 858605 - DNA, 33 bp, Homo sapien
actgtttgaaagctgaagaacaaaatcattagg

SEQ ID NO: 858606 - DNA, 33 bp, Homo sapien
actgtttgaaagctgaggaacaaaatcattagg

SEQ ID NO: 858607 - DNA, 33 bp, Homo sapien
tctttccatgtgtaaaactctcacataattaat

SEQ ID NO: 858608 - DNA, 33 bp, Homo sapien
tctttccatgtgtaaagctctcacataattaat

SEQ ID NO: 858609 - DNA, 33 bp, Homo sapien
gaaaacatttgccaacagtgtcaagtagactga

SEQ ID NO: 858610 - DNA, 33 bp, Homo sapien
gaaaacatttgccaacggtgtcaagtagactga

SEQ ID NO: 858611 - DNA, 33 bp, Homo sapien
cacgatagacatgtagaaatgaggtagtttctg

SEQ ID NO: 858612 - DNA, 33 bp, Homo sapien
cacgatagacatgtaggaatgaggtagtttctg

SEQ ID NO: 858613 - DNA, 33 bp, Homo sapien
aaagaaagcaacagagactacagaggcattcct

SEQ ID NO: 858614 - DNA, 33 bp, Homo sapien
aaagaaagcaacagaggctacagaggcattcct

SEQ ID NO: 858615 - DNA, 33 bp, Homo sapien
ttagagcctacaaaaacggattgcgtaaatgaa

SEQ ID NO: 858616 - DNA, 33 bp, Homo sapien
ttagagcctacaaaaatggattgcgtaaatgaa

SEQ ID NO: 858617 - DNA, 33 bp, Homo sapien
tttatttatgttcatacggtgtgaaaattgcaa

SEQ ID NO: 858618 - DNA, 33 bp, Homo sapien
tttatttatgttcatatggtgtgaaaattgcaa

SEQ ID NO: 858619 - DNA, 33 bp, Homo sapien
aataataataactgtacgaattagatgcccaga

SEQ ID NO: 858620 - DNA, 33 bp, Homo sapien
aataataataactgtatgaattagatgcccaga

SEQ ID NO: 858621 - DNA, 33 bp, Homo sapien
ccagataagcacttaacacctgtcctctcaaat

SEQ ID NO: 858622 - DNA, 33 bp, Homo sapien
ccagataagcacttaatacctgtcctctcaaat

SEQ ID NO: 858623 - DNA, 33 bp, Homo sapien
agtaaggccgaaagaaatataatatgcacataa

SEQ ID NO: 858624 - DNA, 33 bp, Homo sapien
agtaaggccgaaagaactataatatgcacataa

SEQ ID NO: 858625 - DNA, 33 bp, Homo sapien
ctccaagattgctacactgattgaaattctaat

SEQ ID NO: 858626 - DNA, 33 bp, Homo sapien
ctccaagattgctacattgattgaaattctaat

SEQ ID NO: 858627 - DNA, 33 bp, Homo sapien
aataaagccctatccccgagtctatcttgtgat

SEQ ID NO: 858628 - DNA, 33 bp, Homo sapien
aataaagccctatccctgagtctatcttgtgat

SEQ ID NO: 858629 - DNA, 33 bp, Homo sapien
tcagtatcttcgtagcagcaatattttttttaa

SEQ ID NO: 858630 - DNA, 33 bp, Homo sapien
tcagtatcttcgtagcggcaatattttttttaa

SEQ ID NO: 858631 - DNA, 33 bp, Homo sapien
tgtttttctgtggtaaagtagaccaagaatttc

SEQ ID NO: 858632 - DNA, 33 bp, Homo sapien
tgtttttctgtggtaaggtagaccaagaatttc

SEQ ID NO: 858633 - DNA, 33 bp, Homo sapien
caggaagaggctgcaacgtagagaattttttaa

SEQ ID NO: 858634 - DNA, 33 bp, Homo sapien
caggaagaggctgcaatgtagagaattttttaa

SEQ ID NO: 858635 - DNA, 33 bp, Homo sapien
gcttcttcccaaaatacgttctctaagttccaa

SEQ ID NO: 858636 - DNA, 33 bp, Homo sapien
gcttcttcccaaaatatgttctctaagttccaa

SEQ ID NO: 858637 - DNA, 33 bp, Homo sapien
tgtatgaattcatgtacagagacagacatttta

SEQ ID NO: 858638 - DNA, 33 bp, Homo sapien
tgtatgaattcatgtatagagacagacatttta

SEQ ID NO: 858639 - DNA, 33 bp, Homo sapien
gtgccgggatccattacgggcctcatttgactc

SEQ ID NO: 858640 - DNA, 33 bp, Homo sapien
gtgccgggatccattatgggcctcatttgactc

SEQ ID NO: 858641 - DNA, 33 bp, Homo sapien
accttgaggaccttacgccaggtataataagcc

SEQ ID NO: 858642 - DNA, 33 bp, Homo sapien
accttgaggaccttactccaggtataataagcc

SEQ ID NO: 858643 - DNA, 33 bp, Homo sapien
gtgctaattctactttaaaaatcttgaggatct

SEQ ID NO: 858644 - DNA, 33 bp, Homo sapien
gtgctaattctacttttaaaatcttgaggatct

SEQ ID NO: 858645 - DNA, 33 bp, Homo sapien
tactacactccattcacatcactcttctttccc

SEQ ID NO: 858646 - DNA, 33 bp, Homo sapien
tactacactccattcatatcactcttctttccc

SEQ ID NO: 858647 - DNA, 33 bp, Homo sapien
ccacagtctgtcataacctaatgcttcttcact

SEQ ID NO: 858648 - DNA, 33 bp, Homo sapien
ccacagtctgtcataatctaatgcttcttcact

SEQ ID NO: 858649 - DNA, 33 bp, Homo sapien
tgaggtagaaagcacaagatttggaaataggaa

SEQ ID NO: 858650 - DNA, 33 bp, Homo sapien
tgaggtagaaagcacaggatttggaaataggaa

SEQ ID NO: 858651 - DNA, 33 bp, Homo sapien
actatacattgatggcagatataatcactgaat

SEQ ID NO: 858652 - DNA, 33 bp, Homo sapien
actatacattgatggccgatataatcactgaat

SEQ ID NO: 858653 - DNA, 33 bp, Homo sapien
acataaaaaatgaccaacagatatatgaaaatg

SEQ ID NO: 858654 - DNA, 33 bp, Homo sapien
acataaaaaatgaccagcagatatatgaaaatg

SEQ ID NO: 858655 - DNA, 33 bp, Homo sapien
tggtatcagaagtaaccgtaggctatgtctgct

SEQ ID NO: 858656 - DNA, 33 bp, Homo sapien
tggtatcagaagtaactgtaggctatgtctgct

SEQ ID NO: 858657 - DNA, 33 bp, Homo sapien
acctcaagaagaactaaccctgtcagcccacag

SEQ ID NO: 858658 - DNA, 33 bp, Homo sapien
acctcaagaagaactacccctgtcagcccacag

SEQ ID NO: 858659 - DNA, 33 bp, Homo sapien
agtatccagttgtcccaaataagctctttatag

SEQ ID NO: 858660 - DNA, 33 bp, Homo sapien
agtatccagttgtccccaataagctctttatag

SEQ ID NO: 858661 - DNA, 33 bp, Homo sapien
taaataaaatcatgcaaatcttagctgtgtgcc

SEQ ID NO: 858662 - DNA, 33 bp, Homo sapien
taaataaaatcatgcagatcttagctgtgtgcc

SEQ ID NO: 858663 - DNA, 33 bp, Homo sapien
taggccttttctgctacaccaaattgcttccct

SEQ ID NO: 858664 - DNA, 33 bp, Homo sapien
taggccttttctgctataccaaattgcttccct

SEQ ID NO: 858665 - DNA, 33 bp, Homo sapien
gtcattgggcatatatcagagtataaaacaggc

SEQ ID NO: 858666 - DNA, 33 bp, Homo sapien
gtcattgggcatatatgagagtataaaacaggc

SEQ ID NO: 858667 - DNA, 33 bp, Homo sapien
ttcaaagtcttttgaaaggctgtaagtctggag

SEQ ID NO: 858668 - DNA, 33 bp, Homo sapien
ttcaaagtcttttgaacggctgtaagtctggag

SEQ ID NO: 858669 - DNA, 33 bp, Homo sapien
aaaaagtcaaaaaccaagagacgttagtgtgga

SEQ ID NO: 858670 - DNA, 33 bp, Homo sapien
aaaaagtcaaaaaccacgagacgttagtgtgga

SEQ ID NO: 858671 - DNA, 33 bp, Homo sapien
gggccagagtaaacagaaaatgaatgactatct

SEQ ID NO: 858672 - DNA, 33 bp, Homo sapien
gggccagagtaaacagtaaatgaatgactatct

SEQ ID NO: 858673 - DNA, 33 bp, Homo sapien
ttaatttctcagataactgacttcctgtattta

SEQ ID NO: 858674 - DNA, 33 bp, Homo sapien
ttaatttctcagataagtgacttcctgtattta

SEQ ID NO: 858675 - DNA, 33 bp, Homo sapien
ggtagtttgatacgaacagtgttaaatctctag

SEQ ID NO: 858676 - DNA, 33 bp, Homo sapien
ggtagtttgatacgaatagtgttaaatctctag

SEQ ID NO: 858677 - DNA, 33 bp, Homo sapien
ctgtttgcggattaccaaagggaataaagcata

SEQ ID NO: 858678 - DNA, 33 bp, Homo sapien
ctgtttgcggattaccgaagggaataaagcata

SEQ ID NO: 858679 - DNA, 33 bp, Homo sapien
acagtttccttaaaagactcattcattcccatc

SEQ ID NO: 858680 - DNA, 33 bp, Homo sapien
acagtttccttaaaagtctcattcattcccatc

SEQ ID NO: 858681 - DNA, 33 bp, Homo sapien
ttatacctcatagtgccaactgaacatcctcat

SEQ ID NO: 858682 - DNA, 33 bp, Homo sapien
ttatacctcatagtgcgaactgaacatcctcat

SEQ ID NO: 858683 - DNA, 33 bp, Homo sapien
agggaatggctcaagacgccagatgtgacatct

SEQ ID NO: 858684 - DNA, 33 bp, Homo sapien
agggaatggctcaagatgccagatgtgacatct

SEQ ID NO: 858685 - DNA, 33 bp, Homo sapien
aaatagtaccatgatacatcagtggaggcctgg

SEQ ID NO: 858686 - DNA, 33 bp, Homo sapien
aaatagtaccatgatagatcagtggaggcctgg

SEQ ID NO: 858687 - DNA, 33 bp, Homo sapien
taatactaataatggaaaggcacgatgagcaaa

SEQ ID NO: 858688 - DNA, 33 bp, Homo sapien
taatactaataatggacaggcacgatgagcaaa

SEQ ID NO: 858689 - DNA, 33 bp, Homo sapien
ataatgtcagacctacactatgaatatcttcct

SEQ ID NO: 858690 - DNA, 33 bp, Homo sapien
ataatgtcagacctacgctatgaatatcttcct

SEQ ID NO: 858691 - DNA, 33 bp, Homo sapien
acagagtctaccctttgaaaacatggtcttaca

SEQ ID NO: 858692 - DNA, 33 bp, Homo sapien
acagagtctacccttttaaaacatggtcttaca

SEQ ID NO: 858693 - DNA, 33 bp, Homo sapien
cacacaaggctcacaactgaggaaggtggtgag

SEQ ID NO: 858694 - DNA, 33 bp, Homo sapien
cacacaaggctcacaattgaggaaggtggtgag

SEQ ID NO: 858695 - DNA, 33 bp, Homo sapien
gttagatggcactcaactaagattcccatatgg

SEQ ID NO: 858696 - DNA, 33 bp, Homo sapien
gttagatggcactcaagtaagattcccatatgg

SEQ ID NO: 858697 - DNA, 33 bp, Homo sapien
gacaaagattcttggcacctatcccatttggga

SEQ ID NO: 858698 - DNA, 33 bp, Homo sapien
gacaaagattcttggcgcctatcccatttggga

SEQ ID NO: 858699 - DNA, 33 bp, Homo sapien
aaaaagactgtcaactaaaagagtgctataaag

SEQ ID NO: 858700 - DNA, 33 bp, Homo sapien
aaaaagactgtcaactgaaagagtgctataaag

SEQ ID NO: 858701 - DNA, 33 bp, Homo sapien
ggttccctagttcactcaaatcatagatgttga

SEQ ID NO: 858702 - DNA, 33 bp, Homo sapien
ggttccctagttcactgaaatcatagatgttga

SEQ ID NO: 858703 - DNA, 33 bp, Homo sapien
cttgtggaccgaagcacacctaaatatctgacc

SEQ ID NO: 858704 - DNA, 33 bp, Homo sapien
cttgtggaccgaagcatacctaaatatctgacc

SEQ ID NO: 858705 - DNA, 33 bp, Homo sapien
atggtgtccatttcgacgtgtttataaagccat

SEQ ID NO: 858706 - DNA, 33 bp, Homo sapien
atggtgtccatttcgatgtgtttataaagccat

SEQ ID NO: 858707 - DNA, 33 bp, Homo sapien
ccaatgggattaaaaaaaaagttcactcagtta

SEQ ID NO: 858708 - DNA, 33 bp, Homo sapien
ccaatgggattaaaaacaaagttcactcagtta

SEQ ID NO: 858709 - DNA, 33 bp, Homo sapien
gtatgtcctctaatcactcaaacagtctcatac

SEQ ID NO: 858710 - DNA, 33 bp, Homo sapien
gtatgtcctctaatcattcaaacagtctcatac

SEQ ID NO: 858711 - DNA, 33 bp, Homo sapien
caaacagtctcataccacaagtacacccataga

SEQ ID NO: 858712 - DNA, 33 bp, Homo sapien
caaacagtctcataccgcaagtacacccataga

SEQ ID NO: 858713 - DNA, 33 bp, Homo sapien
gagtcagagcatcagcaaaaggatcaaagtgat

SEQ ID NO: 858714 - DNA, 33 bp, Homo sapien
gagtcagagcatcagcgaaaggatcaaagtgat

SEQ ID NO: 858715 - DNA, 33 bp, Homo sapien
tatacagcaccataaacttaatgtacgtataca

SEQ ID NO: 858716 - DNA, 33 bp, Homo sapien
tatacagcaccataaatttaatgtacgtataca

SEQ ID NO: 858717 - DNA, 33 bp, Homo sapien
tcactattatacattacgctttttgctctaata

SEQ ID NO: 858718 - DNA, 33 bp, Homo sapien
tcactattatacattaggctttttgctctaata

SEQ ID NO: 858719 - DNA, 33 bp, Homo sapien
tagaatttcaaccataagtctcatttgaaattg

SEQ ID NO: 858720 - DNA, 33 bp, Homo sapien
tagaatttcaaccatacgtctcatttgaaattg

SEQ ID NO: 858721 - DNA, 33 bp, Homo sapien
tgcagtatggccagaacactttttaaggtaaat

SEQ ID NO: 858722 - DNA, 33 bp, Homo sapien
tgcagtatggccagaatactttttaaggtaaat

SEQ ID NO: 858723 - DNA, 33 bp, Homo sapien
cagagtggaaatgtcacgtaagcagttgaatct

SEQ ID NO: 858724 - DNA, 33 bp, Homo sapien
cagagtggaaatgtcatgtaagcagttgaatct

SEQ ID NO: 858725 - DNA, 33 bp, Homo sapien
tgatgtctttccagataagcaggtgatcataga

SEQ ID NO: 858726 - DNA, 33 bp, Homo sapien
tgatgtctttccagatgagcaggtgatcataga

SEQ ID NO: 858727 - DNA, 33 bp, Homo sapien
acccatataaatgatccaaatgcaagttagacc

SEQ ID NO: 858728 - DNA, 33 bp, Homo sapien
acccatataaatgatcgaaatgcaagttagacc

SEQ ID NO: 858729 - DNA, 33 bp, Homo sapien
ttaagaggaggttttccattcgactgtgttcta

SEQ ID NO: 858730 - DNA, 33 bp, Homo sapien
ttaagaggaggttttctattcgactgtgttcta

SEQ ID NO: 858731 - DNA, 33 bp, Homo sapien
ttaactaatatacttgaaactagaaaatgttaa

SEQ ID NO: 858732 - DNA, 33 bp, Homo sapien
ttaactaatatacttggaactagaaaatgttaa

SEQ ID NO: 858733 - DNA, 33 bp, Homo sapien
ctgtatagcattccagaaaataccagtataaat

SEQ ID NO: 858734 - DNA, 33 bp, Homo sapien
ctgtatagcattccaggaaataccagtataaat

SEQ ID NO: 858735 - DNA, 33 bp, Homo sapien
gaggagccggtttagaaacaaatggattccatg

SEQ ID NO: 858736 - DNA, 33 bp, Homo sapien
gaggagccggtttagatacaaatggattccatg

SEQ ID NO: 858737 - DNA, 33 bp, Homo sapien
tccagacctgtgttcacatcgcatgctagacac

SEQ ID NO: 858738 - DNA, 33 bp, Homo sapien
tccagacctgtgttcatatcgcatgctagacac

SEQ ID NO: 858739 - DNA, 33 bp, Homo sapien
tgttgactttgatcaaattgagaccatgaactg

SEQ ID NO: 858740 - DNA, 33 bp, Homo sapien
tgttgactttgatcaagttgagaccatgaactg

SEQ ID NO: 858741 - DNA, 33 bp, Homo sapien
ttcaaaagtgcatgaccattaaggttatcaagt

SEQ ID NO: 858742 - DNA, 33 bp, Homo sapien
ttcaaaagtgcatgactattaaggttatcaagt

SEQ ID NO: 858743 - DNA, 33 bp, Homo sapien
tcccagttggttctcccaaatgccccgtgaggt

SEQ ID NO: 858744 - DNA, 33 bp, Homo sapien
tcccagttggttctcctaaatgccccgtgaggt

SEQ ID NO: 858745 - DNA, 33 bp, Homo sapien
ccagccaaggtcaacccgagaacaattcgaagt

SEQ ID NO: 858746 - DNA, 33 bp, Homo sapien
ccagccaaggtcaacctgagaacaattcgaagt

SEQ ID NO: 858747 - DNA, 33 bp, Homo sapien
ttggagtttcaattcaacaatcatttattcagt

SEQ ID NO: 858748 - DNA, 33 bp, Homo sapien
ttggagtttcaattcagcaatcatttattcagt

SEQ ID NO: 858749 - DNA, 33 bp, Homo sapien
tggaggtgattggaaacagtgtgtctctccttg

SEQ ID NO: 858750 - DNA, 33 bp, Homo sapien
tggaggtgattggaaatagtgtgtctctccttg

SEQ ID NO: 858751 - DNA, 33 bp, Homo sapien
tctctctgggcacaacaatttttctgtttgggg

SEQ ID NO: 858752 - DNA, 33 bp, Homo sapien
tctctctgggcacaacgatttttctgtttgggg

SEQ ID NO: 858753 - DNA, 33 bp, Homo sapien
gtaagatttaggacaacgtatctgatcaacttt

SEQ ID NO: 858754 - DNA, 33 bp, Homo sapien
gtaagatttaggacaatgtatctgatcaacttt

SEQ ID NO: 858755 - DNA, 33 bp, Homo sapien
tttctcagaactcaaccctgttatgtgatgcat

SEQ ID NO: 858756 - DNA, 33 bp, Homo sapien
tttctcagaactcaactctgttatgtgatgcat

SEQ ID NO: 858757 - DNA, 33 bp, Homo sapien
tagttatgtagcactgaagttaaggttgttcac

SEQ ID NO: 858758 - DNA, 33 bp, Homo sapien
tagttatgtagcactgcagttaaggttgttcac

SEQ ID NO: 858759 - DNA, 33 bp, Homo sapien; identical to SEQ ID NO: 858757

SEQ ID NO: 858760 - DNA, 33 bp, Homo sapien; identical to SEQ ID NO: 858758

SEQ ID NO: 858761 - DNA, 33 bp, Homo sapien
tgggtgaggttgattaaaactggtcagatattg

SEQ ID NO: 858762 - DNA, 33 bp, Homo sapien
tgggtgaggttgattagaactggtcagatattg

SEQ ID NO: 858763 - DNA, 33 bp, Homo sapien
acattcaatccaacccactataagcagagccct

SEQ ID NO: 858764 - DNA, 33 bp, Homo sapien
acattcaatccaacccgctataagcagagccct

SEQ ID NO: 858765 - DNA, 33 bp, Homo sapien
ttgatggctactactacgttgagttccctaaat

SEQ ID NO: 858766 - DNA, 33 bp, Homo sapien
ttgatggctactactatgttgagttccctaaat

SEQ ID NO: 858767 - DNA, 33 bp, Homo sapien
cactaccttttccttacagatttgcctaatctg

SEQ ID NO: 858768 - DNA, 33 bp, Homo sapien
cactaccttttccttatagatttgcctaatctg

SEQ ID NO: 858769 - DNA, 33 bp, Homo sapien
gttaagatttacatagaagaccctggaagccta

SEQ ID NO: 858770 - DNA, 33 bp, Homo sapien
gttaagatttacatagcagaccctggaagccta

SEQ ID NO: 858771 - DNA, 33 bp, Homo sapien
actgtaaagaatcaaacagaagatcaataagaa

SEQ ID NO: 858772 - DNA, 33 bp, Homo sapien
actgtaaagaatcaaagagaagatcaataagaa

SEQ ID NO: 858773 - DNA, 33 bp, Homo sapien
taatccatcagcacaagtaaggcattatattcc

SEQ ID NO: 858774 - DNA, 33 bp, Homo sapien
taatccatcagcacaattaaggcattatattcc

SEQ ID NO: 858775 - DNA, 33 bp, Homo sapien
gttagagaatctgatccagacccatggtgttag

SEQ ID NO: 858776 - DNA, 33 bp, Homo sapien
gttagagaatctgatctagacccatggtgttag

SEQ ID NO: 858777 - DNA, 33 bp, Homo sapien
ttaaagagcaggactaagcacttcaattataac

SEQ ID NO: 858778 - DNA, 33 bp, Homo sapien
ttaaagagcaggactaggcacttcaattataac

SEQ ID NO: 858779 - DNA, 33 bp, Homo sapien
agttatttgatagaggaagtactagaagaataa

SEQ ID NO: 858780 - DNA, 33 bp, Homo sapien
agttatttgatagaggtagtactagaagaataa

SEQ ID NO: 858781 - DNA, 33 bp, Homo sapien
catagtaagtgatcaacaaatgttagcagttgt

SEQ ID NO: 858782 - DNA, 33 bp, Homo sapien
catagtaagtgatcaataaatgttagcagttgt

SEQ ID NO: 858783 - DNA, 33 bp, Homo sapien
aaaaggccttgtgatactaaagacaaaaaaagt

SEQ ID NO: 858784 - DNA, 33 bp, Homo sapien
aaaaggccttgtgatattaaagacaaaaaaagt

SEQ ID NO: 858785 - DNA, 33 bp, Homo sapien
aatattaccaataacaatggtcaacgatagcgc

SEQ ID NO: 858786 - DNA, 33 bp, Homo sapien
aatattaccaataacagtggtcaacgatagcgc

SEQ ID NO: 858787 - DNA, 33 bp, Homo sapien
gcaaagaaggctatacaggacattccattagaa

SEQ ID NO: 858788 - DNA, 33 bp, Homo sapien
gcaaagaaggctatacgggacattccattagaa

SEQ ID NO: 858789 - DNA, 33 bp, Homo sapien
gaatttaacaacctaaaggccaggaaaacactt

SEQ ID NO: 858790 - DNA, 33 bp, Homo sapien
gaatttaacaacctaagggccaggaaaacactt

SEQ ID NO: 858791 - DNA, 33 bp, Homo sapien
gtgaggtagatggccacgtttgtatttattatt

SEQ ID NO: 858792 - DNA, 33 bp, Homo sapien
gtgaggtagatggccatgtttgtatttattatt

SEQ ID NO: 858793 - DNA, 33 bp, Homo sapien
tataataaagctaaagcacaaagagtgtcacct

SEQ ID NO: 858794 - DNA, 33 bp, Homo sapien
tataataaagctaaaggacaaagagtgtcacct

SEQ ID NO: 858795 - DNA, 33 bp, Homo sapien
gttagagtgatgaacaagggctttatggtttgt

SEQ ID NO: 858796 - DNA, 33 bp, Homo sapien
gttagagtgatgaacacgggctttatggtttgt

SEQ ID NO: 858797 - DNA, 33 bp, Homo sapien
tttttactgaattagcaaaagagtgttccagtg

SEQ ID NO: 858798 - DNA, 33 bp, Homo sapien
tttttactgaattagccaaagagtgttccagtg

SEQ ID NO: 858799 - DNA, 33 bp, Homo sapien
ttaaacaatgggcagacgttgatttaaaatgtg

SEQ ID NO: 858800 - DNA, 33 bp, Homo sapien
ttaaacaatgggcagatgttgatttaaaatgtg

SEQ ID NO: 858801 - DNA, 33 bp, Homo sapien
aaaattaaaatcacaactatgcacctgttaaaa

SEQ ID NO: 858802 - DNA, 33 bp, Homo sapien
aaaattaaaatcacaattatgcacctgttaaaa

SEQ ID NO: 858803 - DNA, 33 bp, Homo sapien
ttttcttcctttaaacaacaaactagggccagg

SEQ ID NO: 858804 - DNA, 33 bp, Homo sapien
ttttcttcctttaaacgacaaactagggccagg

SEQ ID NO: 858805 - DNA, 33 bp, Homo sapien
aatgtctatggtttgaatatcttaaacttaagc

SEQ ID NO: 858806 - DNA, 33 bp, Homo sapien
aatgtctatggtttgattatcttaaacttaagc

SEQ ID NO: 858807 - DNA, 33 bp, Homo sapien
atactgacaatactcaatatgcctgtaagtgtc

SEQ ID NO: 858808 - DNA, 33 bp, Homo sapien
atactgacaatactcagtatgcctgtaagtgtc

SEQ ID NO: 858809 - DNA, 33 bp, Homo sapien
ttggagcagggtggcaatccacaaaccagataa

SEQ ID NO: 858810 - DNA, 33 bp, Homo sapien
ttggagcagggtggcagtccacaaaccagataa

SEQ ID NO: 858811 - DNA, 33 bp, Homo sapien
tactggcccaaacataacacttgatttagaaaa

SEQ ID NO: 858812 - DNA, 33 bp, Homo sapien
tactggcccaaacatagcacttgatttagaaaa

SEQ ID NO: 858813 - DNA, 33 bp, Homo sapien
ataatccaagtgcctcactactatttaagtcct

SEQ ID NO: 858814 - DNA, 33 bp, Homo sapien
ataatccaagtgcctcgctactatttaagtcct

SEQ ID NO: 858815 - DNA, 33 bp, Homo sapien
ggatgtgtgtttttcaataaatttcagaagatt

SEQ ID NO: 858816 - DNA, 33 bp, Homo sapien
ggatgtgtgtttttcagtaaatttcagaagatt

SEQ ID NO: 858817 - DNA, 33 bp, Homo sapien
aatgcatcagtgcctacccaataagccttcgag

SEQ ID NO: 858818 - DNA, 33 bp, Homo sapien
aatgcatcagtgcctagccaataagccttcgag

SEQ ID NO: 858819 - DNA, 33 bp, Homo sapien
aacataagaaaatgaccatgaaaattatgacag

SEQ ID NO: 858820 - DNA, 33 bp, Homo sapien
aacataagaaaatgacgatgaaaattatgacag

SEQ ID NO: 858821 - DNA, 33 bp, Homo sapien
tttagtgataggagtacattcaaaaagtttata

SEQ ID NO: 858822 - DNA, 33 bp, Homo sapien
tttagtgataggagtatattcaaaaagtttata

SEQ ID NO: 858823 - DNA, 33 bp, Homo sapien
actgactacataaaaccatacagaactaccact

SEQ ID NO: 858824 - DNA, 33 bp, Homo sapien
actgactacataaaactatacagaactaccact

SEQ ID NO: 858825 - DNA, 33 bp, Homo sapien
ttttgggtgactaaaacgtatgaaaagtttgta

SEQ ID NO: 858826 - DNA, 33 bp, Homo sapien
ttttgggtgactaaaatgtatgaaaagtttgta

SEQ ID NO: 858827 - DNA, 33 bp, Homo sapien
gttcgttttttgataagtctttgaactgtatgt

SEQ ID NO: 858828 - DNA, 33 bp, Homo sapien
gttcgttttttgataattctttgaactgtatgt

SEQ ID NO: 858829 - DNA, 33 bp, Homo sapien
attaagccagggaaacacataaaaggatggatt

SEQ ID NO: 858830 - DNA, 33 bp, Homo sapien
attaagccagggaaacgcataaaaggatggatt

SEQ ID NO: 858831 - DNA, 33 bp, Homo sapien
actatgcttgtccttacctggtgttaaaatatt

SEQ ID NO: 858832 - DNA, 33 bp, Homo sapien
actatgcttgtccttatctggtgttaaaatatt

SEQ ID NO: 858833 - DNA, 33 bp, Homo sapien
ggtactaattttcctgcatatgtactgtttttt

SEQ ID NO: 858834 - DNA, 33 bp, Homo sapien
ggtactaattttcctggatatgtactgtttttt

SEQ ID NO: 858835 - DNA, 33 bp, Homo sapien
ggcaccgaaggtggagcactcggattattccaa

SEQ ID NO: 858836 - DNA, 33 bp, Homo sapien
ggcaccgaaggtggagtactcggattattccaa

SEQ ID NO: 858837 - DNA, 33 bp, Homo sapien
caggactcagggatacagtaacagaggaaagaa

SEQ ID NO: 858838 - DNA, 33 bp, Homo sapien
caggactcagggatacggtaacagaggaaagaa

SEQ ID NO: 858839 - DNA, 33 bp, Homo sapien
tcctgatcttttctcaatcccccaactattaag

SEQ ID NO: 858840 - DNA, 33 bp, Homo sapien
tcctgatcttttctcagtcccccaactattaag

SEQ ID NO: 858841 - DNA, 33 bp, Homo sapien
gatcaggaaattaggaaatatagcaagcttctc

SEQ ID NO: 858842 - DNA, 33 bp, Homo sapien
gatcaggaaattaggagatatagcaagcttctc

SEQ ID NO: 858843 - DNA, 33 bp, Homo sapien
tgtagttgagaaacttcaaggagtcctcaaaag

SEQ ID NO: 858844 - DNA, 33 bp, Homo sapien
tgtagttgagaaactttaaggagtcctcaaaag

SEQ ID NO: 858845 - DNA, 33 bp, Homo sapien
cctgcatttctctggccgatgcatctttccttc

SEQ ID NO: 858846 - DNA, 33 bp, Homo sapien
cctgcatttctctggctgatgcatctttccttc

SEQ ID NO: 858847 - DNA, 33 bp, Homo sapien
ttttttaatcttatggaaaaatgcaaaatactg

SEQ ID NO: 858848 - DNA, 33 bp, Homo sapien
ttttttaatcttatggcaaaatgcaaaatactg

SEQ ID NO: 858849 - DNA, 33 bp, Homo sapien
ctgagaacctaagataatatacaagatgaccat

SEQ ID NO: 858850 - DNA, 33 bp, Homo sapien
ctgagaacctaagatactatacaagatgaccat

SEQ ID NO: 858851 - DNA, 33 bp, Homo sapien
gaattaatgtgttcaccggggtaattgatagtg

SEQ ID NO: 858852 - DNA, 33 bp, Homo sapien
gaattaatgtgttcactggggtaattgatagtg

SEQ ID NO: 858853 - DNA, 33 bp, Homo sapien
ggtatgggggagtgaagtatttttgtaggcaaa

SEQ ID NO: 858854 - DNA, 33 bp, Homo sapien
ggtatgggggagtgaattatttttgtaggcaaa

SEQ ID NO: 858855 - DNA, 33 bp, Homo sapien
agtttgaggactcctgaaactaagactgttaaa

SEQ ID NO: 858856 - DNA, 33 bp, Homo sapien
agtttgaggactcctgcaactaagactgttaaa

SEQ ID NO: 858857 - DNA, 33 bp, Homo sapien
aaaatttgcagtactgaagttccttgttaagca

SEQ ID NO: 858858 - DNA, 33 bp, Homo sapien
aaaatttgcagtactggagttccttgttaagca

SEQ ID NO: 858859 - DNA, 33 bp, Homo sapien
agtaacttagacaggaacttatctttgtaaatt

SEQ ID NO: 858860 - DNA, 33 bp, Homo sapien
agtaacttagacaggagcttatctttgtaaatt

SEQ ID NO: 858861 - DNA, 33 bp, Homo sapien
ataagtccccaagctcaaagttacatagtctta

SEQ ID NO: 858862 - DNA, 33 bp, Homo sapien
ataagtccccaagctccaagttacatagtctta

SEQ ID NO: 858863 - DNA, 33 bp, Homo sapien
tttagctgaaatgtggccaattactgtttaagg

SEQ ID NO: 858864 - DNA, 33 bp, Homo sapien
tttagctgaaatgtgggcaattactgtttaagg

SEQ ID NO: 858865 - DNA, 33 bp, Homo sapien
tgggaaactaaccataaaaagctgagtttgggt

SEQ ID NO: 858866 - DNA, 33 bp, Homo sapien
tgggaaactaaccatagaaagctgagtttgggt

SEQ ID NO: 858867 - DNA, 33 bp, Homo sapien
cttcgttaccattcctaaaaagaaacttaggta

SEQ ID NO: 858868 - DNA, 33 bp, Homo sapien
cttcgttaccattcctgaaaagaaacttaggta

SEQ ID NO: 858869 - DNA, 33 bp, Homo sapien
ctatctaatgaatacaactcagcaataaagagg

SEQ ID NO: 858870 - DNA, 33 bp, Homo sapien
ctatctaatgaatacagctcagcaataaagagg

SEQ ID NO: 858871 - DNA, 33 bp, Homo sapien
gggtgatacttttctaaagctggattgaagcag

SEQ ID NO: 858872 - DNA, 33 bp, Homo sapien
gggtgatacttttctacagctggattgaagcag

SEQ ID NO: 858873 - DNA, 33 bp, Homo sapien
ttctgtgtggtaataccataggtaatagggtgc

SEQ ID NO: 858874 - DNA, 33 bp, Homo sapien
ttctgtgtggtaatactataggtaatagggtgc

SEQ ID NO: 858875 - DNA, 33 bp, Homo sapien
tccctctctagaacaacaccatcacacagactc

SEQ ID NO: 858876 - DNA, 33 bp, Homo sapien
tccctctctagaacaataccatcacacagactc

SEQ ID NO: 858877 - DNA, 33 bp, Homo sapien
aagtccaagctaacaaagtctcagatggaaatt

SEQ ID NO: 858878 - DNA, 33 bp, Homo sapien
aagtccaagctaacaaggtctcagatggaaatt

SEQ ID NO: 858879 - DNA, 33 bp, Homo sapien
gaatttaattcctttggattggaaacgtgtcct

SEQ ID NO: 858880 - DNA, 33 bp, Homo sapien
gaatttaattcctttgtattggaaacgtgtcct

SEQ ID NO: 858881 - DNA, 33 bp, Homo sapien
gtttccaaatactatcacacagacaggtcttcc

SEQ ID NO: 858882 - DNA, 33 bp, Homo sapien
gtttccaaatactatcgcacagacaggtcttcc

SEQ ID NO: 858883 - DNA, 33 bp, Homo sapien
gcatttatcacaacccaaaattatcctgtttaa

SEQ ID NO: 858884 - DNA, 33 bp, Homo sapien
gcatttatcacaacccgaaattatcctgtttaa

SEQ ID NO: 858885 - DNA, 33 bp, Homo sapien
gatgactataaaaatactactgtgttcagagag

SEQ ID NO: 858886 - DNA, 33 bp, Homo sapien
gatgactataaaaatattactgtgttcagagag

SEQ ID NO: 858887 - DNA, 33 bp, Homo sapien
ctgaagatggaatataagcagacatcacagcac

SEQ ID NO: 858888 - DNA, 33 bp, Homo sapien
ctgaagatggaatataggcagacatcacagcac

SEQ ID NO: 858889 - DNA, 33 bp, Homo sapien
aaatcatagatctcacagagccaaaattttagt

SEQ ID NO: 858890 - DNA, 33 bp, Homo sapien
aaatcatagatctcacggagccaaaattttagt

SEQ ID NO: 858891 - DNA, 33 bp, Homo sapien
acttgcacaacagagaaaaggagagtcacatag

SEQ ID NO: 858892 - DNA, 33 bp, Homo sapien
acttgcacaacagagagaaggagagtcacatag

SEQ ID NO: 858893 - DNA, 33 bp, Homo sapien
tcgggaatggaatcaggctaaccatatatgctt

SEQ ID NO: 858894 - DNA, 33 bp, Homo sapien
tcgggaatggaatcagtctaaccatatatgctt

SEQ ID NO: 858895 - DNA, 33 bp, Homo sapien
ccattcccgattctgagaaaaataataaaatgg

SEQ ID NO: 858896 - DNA, 33 bp, Homo sapien
ccattcccgattctgataaaaataataaaatgg

SEQ ID NO: 858897 - DNA, 33 bp, Homo sapien
gctgttaccttagtcagtaggtcttaggatagc

SEQ ID NO: 858898 - DNA, 33 bp, Homo sapien
gctgttaccttagtcattaggtcttaggatagc

SEQ ID NO: 858899 - DNA, 33 bp, Homo sapien
tattcatttcagaaggaaagtgacgtgtattca

SEQ ID NO: 858900 - DNA, 33 bp, Homo sapien
tattcatttcagaaggtaagtgacgtgtattca

SEQ ID NO: 858901 - DNA, 33 bp, Homo sapien
tagttctgaccatctaactgtatcctggactga

SEQ ID NO: 858902 - DNA, 33 bp, Homo sapien
tagttctgaccatctacctgtatcctggactga

SEQ ID NO: 858903 - DNA, 33 bp, Homo sapien
gaaagctcacttgctacatataaagtgtcaacc

SEQ ID NO: 858904 - DNA, 33 bp, Homo sapien
gaaagctcacttgctagatataaagtgtcaacc

SEQ ID NO: 858905 - DNA, 33 bp, Homo sapien
aaatcagaatgggtaaaaatcaaatatgaaaga

SEQ ID NO: 858906 - DNA, 33 bp, Homo sapien
aaatcagaatgggtaagaatcaaatatgaaaga

SEQ ID NO: 858907 - DNA, 33 bp, Homo sapien
ttagcgaaagctcacaatgaaagaaaaaaacat

SEQ ID NO: 858908 - DNA, 33 bp, Homo sapien
ttagcgaaagctcacagtgaaagaaaaaaacat

SEQ ID NO: 858909 - DNA, 33 bp, Homo sapien
ttaaattgagcatttacgtgaccttgtaaattt

SEQ ID NO: 858910 - DNA, 33 bp, Homo sapien
ttaaattgagcatttaggtgaccttgtaaattt

SEQ ID NO: 858911 - DNA, 33 bp, Homo sapien
agtgatcatttttgggaactagaaatcggggat

SEQ ID NO: 858912 - DNA, 33 bp, Homo sapien
agtgatcatttttggggactagaaatcggggat

SEQ ID NO: 858913 - DNA, 33 bp, Homo sapien
tactgtctctcttcctcaaaagtgttggtggga

SEQ ID NO: 858914 - DNA, 33 bp, Homo sapien
tactgtctctcttcctgaaaagtgttggtggga

SEQ ID NO: 858915 - DNA, 33 bp, Homo sapien
gttgtcataaatggaaacaagagtgttgagtct

SEQ ID NO: 858916 - DNA, 33 bp, Homo sapien
gttgtcataaatggaagcaagagtgttgagtct

SEQ ID NO: 858917 - DNA, 33 bp, Homo sapien
cttcaactccatctaactgttgggaatgccatt

SEQ ID NO: 858918 - DNA, 33 bp, Homo sapien
cttcaactccatctaattgttgggaatgccatt

SEQ ID NO: 858919 - DNA, 33 bp, Homo sapien
ttccattttcacttacaacttgcaaaagattga

SEQ ID NO: 858920 - DNA, 33 bp, Homo sapien
ttccattttcacttactacttgcaaaagattga

SEQ ID NO: 858921 - DNA, 33 bp, Homo sapien
tgcaaagaagtccaaaataagaagaacatcagg

SEQ ID NO: 858922 - DNA, 33 bp, Homo sapien
tgcaaagaagtccaaagtaagaagaacatcagg

SEQ ID NO: 858923 - DNA, 33 bp, Homo sapien
tgtccatcaagaaatccagagtaaaggcaggag

SEQ ID NO: 858924 - DNA, 33 bp, Homo sapien
tgtccatcaagaaatctagagtaaaggcaggag

SEQ ID NO: 858925 - DNA, 33 bp, Homo sapien
tctcctaaagcgccagacattcgttctccctct

SEQ ID NO: 858926 - DNA, 33 bp, Homo sapien
tctcctaaagcgccaggcattcgttctccctct

SEQ ID NO: 858927 - DNA, 33 bp, Homo sapien
ttgcctgaggaacagagagttgactgattgata

SEQ ID NO: 858928 - DNA, 33 bp, Homo sapien
ttgcctgaggaacagatagttgactgattgata

SEQ ID NO: 858929 - DNA, 33 bp, Homo sapien
caaattcgtggacttcactgtatcctaaccctc

SEQ ID NO: 858930 - DNA, 33 bp, Homo sapien
caaattcgtggacttcgctgtatcctaaccctc

SEQ ID NO: 858931 - DNA, 33 bp, Homo sapien
ccaaaaacaagacagaaatcagtaaaataaagt

SEQ ID NO: 858932 - DNA, 33 bp, Homo sapien
ccaaaaacaagacagagatcagtaaaataaagt

SEQ ID NO: 858933 - DNA, 33 bp, Homo sapien
tgaggaaggtagggagaatagtttagagggaca

SEQ ID NO: 858934 - DNA, 33 bp, Homo sapien
tgaggaaggtagggaggatagtttagagggaca

SEQ ID NO: 858935 - DNA, 33 bp, Homo sapien
gaaaaactcattagaaagattcaacagcagact

SEQ ID NO: 858936 - DNA, 33 bp, Homo sapien
gaaaaactcattagaaggattcaacagcagact

SEQ ID NO: 858937 - DNA, 33 bp, Homo sapien
acagatcacatgataaaaaactggctttaggat

SEQ ID NO: 858938 - DNA, 33 bp, Homo sapien
acagatcacatgataacaaactggctttaggat

SEQ ID NO: 858939 - DNA, 33 bp, Homo sapien
gctttccataccaaaccaattccaagaggaaaa

SEQ ID NO: 858940 - DNA, 33 bp, Homo sapien
gctttccataccaaactaattccaagaggaaaa

SEQ ID NO: 858941 - DNA, 33 bp, Homo sapien
atttcataattcactaaaaatgatgtgacttca

SEQ ID NO: 858942 - DNA, 33 bp, Homo sapien
atttcataattcactacaaatgatgtgacttca

SEQ ID NO: 858943 - DNA, 33 bp, Homo sapien
tgcttctgagaaaggaactatcacatttgaaca

SEQ ID NO: 858944 - DNA, 33 bp, Homo sapien
tgcttctgagaaaggagctatcacatttgaaca

SEQ ID NO: 858945 - DNA, 33 bp, Homo sapien
aaacaggagcttctggaagtgtagaagtaaagc

SEQ ID NO: 858946 - DNA, 33 bp, Homo sapien
aaacaggagcttctggcagtgtagaagtaaagc

SEQ ID NO: 858947 - DNA, 33 bp, Homo sapien
atgaaaagaggcaaaaagcagggagcagtggtg

SEQ ID NO: 858948 - DNA, 33 bp, Homo sapien
atgaaaagaggcaaaacgcagggagcagtggtg

SEQ ID NO: 858949 - DNA, 33 bp, Homo sapien
gacagcttctggtttacacataccttctcccac

SEQ ID NO: 858950 - DNA, 33 bp, Homo sapien
gacagcttctggtttatacataccttctcccac

SEQ ID NO: 858951 - DNA, 33 bp, Homo sapien
aatagaaagctgcataacctgttttccagcctc

SEQ ID NO: 858952 - DNA, 33 bp, Homo sapien
aatagaaagctgcataccctgttttccagcctc

SEQ ID NO: 858953 - DNA, 33 bp, Homo sapien
actcctcttgaagacacagacaaaccatagttc

SEQ ID NO: 858954 - DNA, 33 bp, Homo sapien
actcctcttgaagacatagacaaaccatagttc

SEQ ID NO: 858955 - DNA, 33 bp, Homo sapien
agggggtataaatgagaatagaagaaaaacttg

SEQ ID NO: 858956 - DNA, 33 bp, Homo sapien
agggggtataaatgaggatagaagaaaaacttg

SEQ ID NO: 858957 - DNA, 33 bp, Homo sapien
aggatggagagaccaacgttatctgctcaattc

SEQ ID NO: 858958 - DNA, 33 bp, Homo sapien
aggatggagagaccaatgttatctgctcaattc

SEQ ID NO: 858959 - DNA, 33 bp, Homo sapien
ttatagatctggagcccaaacagtttcttcttt

SEQ ID NO: 858960 - DNA, 33 bp, Homo sapien
ttatagatctggagccgaaacagtttcttcttt

SEQ ID NO: 858961 - DNA, 33 bp, Homo sapien
cttctatttcagtatagggacaaccaggtctat

SEQ ID NO: 858962 - DNA, 33 bp, Homo sapien
cttctatttcagtatatggacaaccaggtctat

SEQ ID NO: 858963 - DNA, 33 bp, Homo sapien
atatctgctaacattacgttggcaaagcaagtc

SEQ ID NO: 858964 - DNA, 33 bp, Homo sapien
atatctgctaacattatgttggcaaagcaagtc

SEQ ID NO: 858965 - DNA, 33 bp, Homo sapien
tttctgtgttagtgaagatacccacaggatggg

SEQ ID NO: 858966 - DNA, 33 bp, Homo sapien
tttctgtgttagtgaatatacccacaggatggg

SEQ ID NO: 858967 - DNA, 33 bp, Homo sapien
ttaatgtgtccaatatcacaggattagtatgcc

SEQ ID NO: 858968 - DNA, 33 bp, Homo sapien
ttaatgtgtccaatattacaggattagtatgcc

SEQ ID NO: 858969 - DNA, 33 bp, Homo sapien
atgtatgagagcaacaataacattatcaagaaa

SEQ ID NO: 858970 - DNA, 33 bp, Homo sapien
atgtatgagagcaacagtaacattatcaagaaa

SEQ ID NO: 858971 - DNA, 33 bp, Homo sapien
actaagggatcttcaactgtttcagaaatgttt

SEQ ID NO: 858972 - DNA, 33 bp, Homo sapien
actaagggatcttcaattgtttcagaaatgttt

SEQ ID NO: 858973 - DNA, 33 bp, Homo sapien
atcatacttctataacaagaagtaggtctcctt

SEQ ID NO: 858974 - DNA, 33 bp, Homo sapien
atcatacttctataacgagaagtaggtctcctt

SEQ ID NO: 858975 - DNA, 33 bp, Homo sapien
aagagaaggaaagatgaaatagtagctttagga

SEQ ID NO: 858976 - DNA, 33 bp, Homo sapien
aagagaaggaaagatggaatagtagctttagga

SEQ ID NO: 858977 - DNA, 33 bp, Homo sapien
tcaagctgtggaaaccacattcagggagaaaaa

SEQ ID NO: 858978 - DNA, 33 bp, Homo sapien
tcaagctgtggaaaccgcattcagggagaaaaa

SEQ ID NO: 858979 - DNA, 33 bp, Homo sapien
tgagttctataacctacgttgtttctctgctgg

SEQ ID NO: 858980 - DNA, 33 bp, Homo sapien
tgagttctataacctatgttgtttctctgctgg

SEQ ID NO: 858981 - DNA, 33 bp, Homo sapien
ggaaccatagaaaacacggtgcttcacagatag

SEQ ID NO: 858982 - DNA, 33 bp, Homo sapien
ggaaccatagaaaacatggtgcttcacagatag

SEQ ID NO: 858983 - DNA, 33 bp, Homo sapien
gtggcattcattataaatcctgtgtttgaggag

SEQ ID NO: 858984 - DNA, 33 bp, Homo sapien
gtggcattcattataagtcctgtgtttgaggag

SEQ ID NO: 858985 - DNA, 33 bp, Homo sapien
tttaagttaatcataccgatcgtgttctcactc

SEQ ID NO: 858986 - DNA, 33 bp, Homo sapien
tttaagttaatcatactgatcgtgttctcactc

SEQ ID NO: 858987 - DNA, 33 bp, Homo sapien
tgcctttgaagaaaaacgaagctatgacttggt

SEQ ID NO: 858988 - DNA, 33 bp, Homo sapien
tgcctttgaagaaaaatgaagctatgacttggt

SEQ ID NO: 858989 - DNA, 33 bp, Homo sapien
ctaggaaatacttgtaggttctgagaatgtctg

SEQ ID NO: 858990 - DNA, 33 bp, Homo sapien
ctaggaaatacttgtatgttctgagaatgtctg

SEQ ID NO: 858991 - DNA, 33 bp, Homo sapien
ggaaaagggctggtgaaaattaaatcatacctc

SEQ ID NO: 858992 - DNA, 33 bp, Homo sapien
ggaaaagggctggtgagaattaaatcatacctc

SEQ ID NO: 858993 - DNA, 33 bp, Homo sapien
tgaacagacgtcttgaacaatatgtattgaaga

SEQ ID NO: 858994 - DNA, 33 bp, Homo sapien
tgaacagacgtcttgagcaatatgtattgaaga

SEQ ID NO: 858995 - DNA, 33 bp, Homo sapien
gtgtacctcaattgcacagttagaaagttacta

SEQ ID NO: 858996 - DNA, 33 bp, Homo sapien
gtgtacctcaattgcatagttagaaagttacta

SEQ ID NO: 858997 - DNA, 33 bp, Homo sapien
ccatttctgctgcttagattttgatcttcagct

SEQ ID NO: 858998 - DNA, 33 bp, Homo sapien
ccatttctgctgcttatattttgatcttcagct

SEQ ID NO: 858999 - DNA, 33 bp, Homo sapien
aagaagaaaatgaaacaagataacacgatgagc

SEQ ID NO: 859000 - DNA, 33 bp, Homo sapien
aagaagaaaatgaaacgagataacacgatgagc

SEQ ID NO: 859001 - DNA, 33 bp, Homo sapien
ggttactttctccccaatggcttccctggccat

SEQ ID NO: 859002 - DNA, 33 bp, Homo sapien
ggttactttctccccagtggcttccctggccat

SEQ ID NO: 859003 - DNA, 33 bp, Homo sapien
agataagaataactcaactacatgaagatttac

SEQ ID NO: 859004 - DNA, 33 bp, Homo sapien
agataagaataactcagctacatgaagatttac

SEQ ID NO: 859005 - DNA, 33 bp, Homo sapien
aaacgaaagcataagagaattaactgacttacc

SEQ ID NO: 859006 - DNA, 33 bp, Homo sapien
aaacgaaagcataagataattaactgacttacc

SEQ ID NO: 859007 - DNA, 33 bp, Homo sapien
ctcttctaagccaacacattgataattttagag

SEQ ID NO: 859008 - DNA, 33 bp, Homo sapien
ctcttctaagccaacagattgataattttagag

SEQ ID NO: 859009 - DNA, 33 bp, Homo sapien
ttaaccggcacccgtaataagagcttctgaaaa

SEQ ID NO: 859010 - DNA, 33 bp, Homo sapien
ttaaccggcacccgtattaagagcttctgaaaa

SEQ ID NO: 859011 - DNA, 33 bp, Homo sapien
ctactacacagagtaaaggaattggaattattg

SEQ ID NO: 859012 - DNA, 33 bp, Homo sapien
ctactacacagagtaagggaattggaattattg

SEQ ID NO: 859013 - DNA, 33 bp, Homo sapien
gtggatttagagggacagagcaatagtgtggct

SEQ ID NO: 859014 - DNA, 33 bp, Homo sapien
gtggatttagagggacggagcaatagtgtggct

SEQ ID NO: 859015 - DNA, 33 bp, Homo sapien
aaactgagactgtctcactacacaagtagataa

SEQ ID NO: 859016 - DNA, 33 bp, Homo sapien
aaactgagactgtctctctacacaagtagataa

SEQ ID NO: 859017 - DNA, 33 bp, Homo sapien
attgaattttcttgcaatcaactcatgtatcac

SEQ ID NO: 859018 - DNA, 33 bp, Homo sapien
attgaattttcttgcagtcaactcatgtatcac

SEQ ID NO: 859019 - DNA, 33 bp, Homo sapien
cagaagacaggacagaactctcctcaggaataa

SEQ ID NO: 859020 - DNA, 33 bp, Homo sapien
cagaagacaggacagagctctcctcaggaataa

SEQ ID NO: 859021 - DNA, 33 bp, Homo sapien
tcagttttcctctccaagatttgaagggcatac

SEQ ID NO: 859022 - DNA, 33 bp, Homo sapien
tcagttttcctctccaggatttgaagggcatac

SEQ ID NO: 859023 - DNA, 33 bp, Homo sapien
acactctgtaatcttcaccataaccatgttggt

SEQ ID NO: 859024 - DNA, 33 bp, Homo sapien
acactctgtaatcttccccataaccatgttggt

SEQ ID NO: 859025 - DNA, 33 bp, Homo sapien
ttctccttgatgtcgcacactatctcccactag

SEQ ID NO: 859026 - DNA, 33 bp, Homo sapien
ttctccttgatgtcgcgcactatctcccactag

SEQ ID NO: 859027 - DNA, 33 bp, Homo sapien
acctccaattggagcacgggctgaaggcctcta

SEQ ID NO: 859028 - DNA, 33 bp, Homo sapien
acctccaattggagcatgggctgaaggcctcta

SEQ ID NO: 859029 - DNA, 33 bp, Homo sapien
tatttacaggaggcatcatcttttagaattata

SEQ ID NO: 859030 - DNA, 33 bp, Homo sapien
tatttacaggaggcattatcttttagaattata

SEQ ID NO: 859031 - DNA, 33 bp, Homo sapien
cacacagatgacaattaaattcctgagaacaga

SEQ ID NO: 859032 - DNA, 33 bp, Homo sapien
cacacagatgacaattgaattcctgagaacaga

SEQ ID NO: 859033 - DNA, 33 bp, Homo sapien
ttgataatcagcatagcatggttccttgattta

SEQ ID NO: 859034 - DNA, 33 bp, Homo sapien
ttgataatcagcatagtatggttccttgattta

SEQ ID NO: 859035 - DNA, 33 bp, Homo sapien
accgtagactgaaggaagaaggccgattttcct

SEQ ID NO: 859036 - DNA, 33 bp, Homo sapien
accgtagactgaaggacgaaggccgattttcct

SEQ ID NO: 859037 - DNA, 33 bp, Homo sapien
cctgagaaacagaaaacatgctgtcaactttaa

SEQ ID NO: 859038 - DNA, 33 bp, Homo sapien
cctgagaaacagaaaatatgctgtcaactttaa

SEQ ID NO: 859039 - DNA, 33 bp, Homo sapien
gttatactaggatccagtaaggccagttgtaca

SEQ ID NO: 859040 - DNA, 33 bp, Homo sapien
gttatactaggatccattaaggccagttgtaca

SEQ ID NO: 859041 - DNA, 33 bp, Homo sapien
gagaacagaaaacatacccagaaaataaggcaa

SEQ ID NO: 859042 - DNA, 33 bp, Homo sapien
gagaacagaaaacatatccagaaaataaggcaa

SEQ ID NO: 859043 - DNA, 33 bp, Homo sapien
gtatatattgaatgtacagttatgcaacttaag

SEQ ID NO: 859044 - DNA, 33 bp, Homo sapien
gtatatattgaatgtatagttatgcaacttaag

SEQ ID NO: 859045 - DNA, 33 bp, Homo sapien
taaaccttgcataaataaaacattttcttgtct

SEQ ID NO: 859046 - DNA, 33 bp, Homo sapien
taaaccttgcataaatgaaacattttcttgtct

SEQ ID NO: 859047 - DNA, 33 bp, Homo sapien
ttcttctgaattcccaaaggactttgtccaggc

SEQ ID NO: 859048 - DNA, 33 bp, Homo sapien
ttcttctgaattcccataggactttgtccaggc

SEQ ID NO: 859049 - DNA, 33 bp, Homo sapien
catacaaatatgaaaccacagtcttgtgcagtt

SEQ ID NO: 859050 - DNA, 33 bp, Homo sapien
catacaaatatgaaactacagtcttgtgcagtt

SEQ ID NO: 859051 - DNA, 33 bp, Homo sapien
gtgttttaaaactgagacatctacaaatagtct

SEQ ID NO: 859052 - DNA, 33 bp, Homo sapien
gtgttttaaaactgaggcatctacaaatagtct

SEQ ID NO: 859053 - DNA, 33 bp, Homo sapien
atatacacagctcaaactctggtgccaggtcac

SEQ ID NO: 859054 - DNA, 33 bp, Homo sapien
atatacacagctcaaattctggtgccaggtcac

SEQ ID NO: 859055 - DNA, 33 bp, Homo sapien
aagaatagagacccaaggtgagaccaaccaggc

SEQ ID NO: 859056 - DNA, 33 bp, Homo sapien
aagaatagagacccaatgtgagaccaaccaggc

SEQ ID NO: 859057 - DNA, 33 bp, Homo sapien
atatcctggtagtgacactctaacacacatatc

SEQ ID NO: 859058 - DNA, 33 bp, Homo sapien
atatcctggtagtgacgctctaacacacatatc

SEQ ID NO: 859059 - DNA, 33 bp, Homo sapien
tacaacaattgcactacgtaatatattggtaat

SEQ ID NO: 859060 - DNA, 33 bp, Homo sapien
tacaacaattgcactatgtaatatattggtaat

SEQ ID NO: 859061 - DNA, 33 bp, Homo sapien
tttggacaagttatctcaaacatcaaacacata

SEQ ID NO: 859062 - DNA, 33 bp, Homo sapien
tttggacaagttatctgaaacatcaaacacata

SEQ ID NO: 859063 - DNA, 33 bp, Homo sapien
gcatccttcaatccaactaatattacccaccac

SEQ ID NO: 859064 - DNA, 33 bp, Homo sapien
gcatccttcaatccaattaatattacccaccac

SEQ ID NO: 859065 - DNA, 33 bp, Homo sapien
atacagtatgtagtataaagcaaagacaaaaat

SEQ ID NO: 859066 - DNA, 33 bp, Homo sapien
atacagtatgtagtatgaagcaaagacaaaaat

SEQ ID NO: 859067 - DNA, 33 bp, Homo sapien
aaagatgtattgaaacacaaccacactcattgc

SEQ ID NO: 859068 - DNA, 33 bp, Homo sapien
aaagatgtattgaaacgcaaccacactcattgc

SEQ ID NO: 859069 - DNA, 33 bp, Homo sapien
gacctagaatgctagaacctagttaaaaaagaa

SEQ ID NO: 859070 - DNA, 33 bp, Homo sapien
gacctagaatgctagaccctagttaaaaaagaa

SEQ ID NO: 859071 - DNA, 33 bp, Homo sapien
ttaactgagtgtaacacagtaggtgctcaataa

SEQ ID NO: 859072 - DNA, 33 bp, Homo sapien
ttaactgagtgtaacatagtaggtgctcaataa

SEQ ID NO: 859073 - DNA, 33 bp, Homo sapien
aaagcaggtcactgaccaaaatgtttacagtga

SEQ ID NO: 859074 - DNA, 33 bp, Homo sapien
aaagcaggtcactgacgaaaatgtttacagtga

SEQ ID NO: 859075 - DNA, 33 bp, Homo sapien
gttgtagaaattgatcaaatggccattattttc

SEQ ID NO: 859076 - DNA, 33 bp, Homo sapien
gttgtagaaattgatctaatggccattattttc

SEQ ID NO: 859077 - DNA, 33 bp, Homo sapien
attatgaaagtatagcaaagtgtcctaaaataa

SEQ ID NO: 859078 - DNA, 33 bp, Homo sapien
attatgaaagtatagcgaagtgtcctaaaataa

SEQ ID NO: 859079 - DNA, 33 bp, Homo sapien
ttaaagcaggaatagaacaaatacatgaggctg

SEQ ID NO: 859080 - DNA, 33 bp, Homo sapien
ttaaagcaggaatagatcaaatacatgaggctg

SEQ ID NO: 859081 - DNA, 33 bp, Homo sapien
taccttgagactttgaaacataaacaaaaagac

SEQ ID NO: 859082 - DNA, 33 bp, Homo sapien
taccttgagactttgacacataaacaaaaagac

SEQ ID NO: 859083 - DNA, 33 bp, Homo sapien
ctttatgatggacttacgtatctgcttttactg

SEQ ID NO: 859084 - DNA, 33 bp, Homo sapien
ctttatgatggacttatgtatctgcttttactg

SEQ ID NO: 859085 - DNA, 33 bp, Homo sapien
aaatatatgccaacacggaaagacaaaaatcaa

SEQ ID NO: 859086 - DNA, 33 bp, Homo sapien
aaatatatgccaacactgaaagacaaaaatcaa

SEQ ID NO: 859087 - DNA, 33 bp, Homo sapien
atatcatttagtgctgaaacaacgccctgcctg

SEQ ID NO: 859088 - DNA, 33 bp, Homo sapien
atatcatttagtgctggaacaacgccctgcctg

SEQ ID NO: 859089 - DNA, 33 bp, Homo sapien
tgattggtcctgaatcacaacgaatttgactgg

SEQ ID NO: 859090 - DNA, 33 bp, Homo sapien
tgattggtcctgaatcccaacgaatttgactgg

SEQ ID NO: 859091 - DNA, 33 bp, Homo sapien
actaggtggtgtcttaaatataaccagaagttt

SEQ ID NO: 859092 - DNA, 33 bp, Homo sapien
actaggtggtgtcttagatataaccagaagttt

SEQ ID NO: 859093 - DNA, 33 bp, Homo sapien
tctagcaaattatcaaacttgagagtaatcttt

SEQ ID NO: 859094 - DNA, 33 bp, Homo sapien
tctagcaaattatcaaccttgagagtaatcttt

SEQ ID NO: 859095 - DNA, 33 bp, Homo sapien
tcactgttgttcaataactagtaaaagctcaat

SEQ ID NO: 859096 - DNA, 33 bp, Homo sapien
tcactgttgttcaatacctagtaaaagctcaat

SEQ ID NO: 859097 - DNA, 33 bp, Homo sapien
tctcctctgtttcttaaattgcaactatataca

SEQ ID NO: 859098 - DNA, 33 bp, Homo sapien
tctcctctgtttcttacattgcaactatataca

SEQ ID NO: 859099 - DNA, 33 bp, Homo sapien
aacaaagctatttaaactcaatcatcctcttta

SEQ ID NO: 859100 - DNA, 33 bp, Homo sapien
aacaaagctatttaaattcaatcatcctcttta

SEQ ID NO: 859101 - DNA, 33 bp, Homo sapien
aaaatcaaatattaccactaagtcatgtatata

SEQ ID NO: 859102 - DNA, 33 bp, Homo sapien
aaaatcaaatattacctctaagtcatgtatata

SEQ ID NO: 859103 - DNA, 33 bp, Homo sapien
tctgcccattttaaaaacatcatatttagaaat

SEQ ID NO: 859104 - DNA, 33 bp, Homo sapien
tctgcccattttaaaagcatcatatttagaaat

SEQ ID NO: 859105 - DNA, 33 bp, Homo sapien
atacttctctctaattaaatgcataatcatgga

SEQ ID NO: 859106 - DNA, 33 bp, Homo sapien
atacttctctctaattgaatgcataatcatgga

SEQ ID NO: 859107 - DNA, 33 bp, Homo sapien
ttattatggttctctacgtttttgcccttacta

SEQ ID NO: 859108 - DNA, 33 bp, Homo sapien
ttattatggttctctaggtttttgcccttacta

SEQ ID NO: 859109 - DNA, 33 bp, Homo sapien
aagggcatcagtggaaacgtatggaaagtttat

SEQ ID NO: 859110 - DNA, 33 bp, Homo sapien
aagggcatcagtggaagcgtatggaaagtttat

SEQ ID NO: 859111 - DNA, 33 bp, Homo sapien
agcagaatttaaagctcaaaatctgagaagtta

SEQ ID NO: 859112 - DNA, 33 bp, Homo sapien
agcagaatttaaagctgaaaatctgagaagtta

SEQ ID NO: 859113 - DNA, 33 bp, Homo sapien
gaggcaactttaggtaagatatttatcatagaa

SEQ ID NO: 859114 - DNA, 33 bp, Homo sapien
gaggcaactttaggtacgatatttatcatagaa

SEQ ID NO: 859115 - DNA, 33 bp, Homo sapien
cagctactaactttccaaaatcaaggagtcaga

SEQ ID NO: 859116 - DNA, 33 bp, Homo sapien
cagctactaactttcccaaatcaaggagtcaga

SEQ ID NO: 859117 - DNA, 33 bp, Homo sapien
tggctatttcattcaccgctttttaacttacat

SEQ ID NO: 859118 - DNA, 33 bp, Homo sapien
tggctatttcattcactgctttttaacttacat

SEQ ID NO: 859119 - DNA, 33 bp, Homo sapien
ctcttttaccatgtaccaactgtaaatttgtaa

SEQ ID NO: 859120 - DNA, 33 bp, Homo sapien
ctcttttaccatgtactaactgtaaatttgtaa

SEQ ID NO: 859121 - DNA, 33 bp, Homo sapien
tagccatggaattcaaagatagtggccctagag

SEQ ID NO: 859122 - DNA, 33 bp, Homo sapien
tagccatggaattcaatgatagtggccctagag

SEQ ID NO: 859123 - DNA, 33 bp, Homo sapien
tctctccctctccacgaagcggaaattaatttt

SEQ ID NO: 859124 - DNA, 33 bp, Homo sapien
tctctccctctccacgcagcggaaattaatttt

SEQ ID NO: 859125 - DNA, 33 bp, Homo sapien
tgatatttgcagctcaaattaggtacttgcatt

SEQ ID NO: 859126 - DNA, 33 bp, Homo sapien
tgatatttgcagctcagattaggtacttgcatt

SEQ ID NO: 859127 - DNA, 33 bp, Homo sapien
tttgggatattcactacgtctagcatttactat

SEQ ID NO: 859128 - DNA, 33 bp, Homo sapien
tttgggatattcactatgtctagcatttactat

SEQ ID NO: 859129 - DNA, 33 bp, Homo sapien
aggcttactacctagaaaagacagccacactga

SEQ ID NO: 859130 - DNA, 33 bp, Homo sapien
aggcttactacctagagaagacagccacactga

SEQ ID NO: 859131 - DNA, 33 bp, Homo sapien
tagggattgtggtaaaacacccaaagaatgtgg

SEQ ID NO: 859132 - DNA, 33 bp, Homo sapien
tagggattgtggtaaagcacccaaagaatgtgg

SEQ ID NO: 859133 - DNA, 33 bp, Homo sapien
ctgctaagtagcaaaaagtcctcattttaaatt

SEQ ID NO: 859134 - DNA, 33 bp, Homo sapien
ctgctaagtagcaaaaggtcctcattttaaatt

SEQ ID NO: 859135 - DNA, 33 bp, Homo sapien
ctagaccttgagctgtaaactattctactaaat

SEQ ID NO: 859136 - DNA, 33 bp, Homo sapien
ctagaccttgagctgttaactattctactaaat

SEQ ID NO: 859137 - DNA, 33 bp, Homo sapien
ccacaaaaagtaaagggcagagtgagaatttga

SEQ ID NO: 859138 - DNA, 33 bp, Homo sapien
ccacaaaaagtaaaggtcagagtgagaatttga

SEQ ID NO: 859139 - DNA, 33 bp, Homo sapien
ggtttctagtctctgcactcccctcatttagta

SEQ ID NO: 859140 - DNA, 33 bp, Homo sapien
ggtttctagtctctgcgctcccctcatttagta

SEQ ID NO: 859141 - DNA, 33 bp, Homo sapien
aagcagaacactcatcacttaaatcaaaccaga

SEQ ID NO: 859142 - DNA, 33 bp, Homo sapien
aagcagaacactcatcgcttaaatcaaaccaga

SEQ ID NO: 859143 - DNA, 33 bp, Homo sapien
aaaatatatagagttacaggcaattgattaagg

SEQ ID NO: 859144 - DNA, 33 bp, Homo sapien
aaaatatatagagttataggcaattgattaagg

SEQ ID NO: 859145 - DNA, 33 bp, Homo sapien
gacagataaaacaacacgtaaagggctttgaga

SEQ ID NO: 859146 - DNA, 33 bp, Homo sapien
gacagataaaacaacaggtaaagggctttgaga

SEQ ID NO: 859147 - DNA, 33 bp, Homo sapien
tacgaaacaacgtgccaatctctgaccaggact

SEQ ID NO: 859148 - DNA, 33 bp, Homo sapien
tacgaaacaacgtgcctatctctgaccaggact

SEQ ID NO: 859149 - DNA, 33 bp, Homo sapien
aaattcaggttttataagaaatagtagtgcttt

SEQ ID NO: 859150 - DNA, 33 bp, Homo sapien
aaattcaggttttatatgaaatagtagtgcttt

SEQ ID NO: 859151 - DNA, 33 bp, Homo sapien
cttttttccctaaagaagacagccctttcagaa

SEQ ID NO: 859152 - DNA, 33 bp, Homo sapien
cttttttccctaaagaggacagccctttcagaa

SEQ ID NO: 859153 - DNA, 33 bp, Homo sapien
aaagtggagaagagagaatgatgttttcaggga

SEQ ID NO: 859154 - DNA, 33 bp, Homo sapien
aaagtggagaagagaggatgatgttttcaggga

SEQ ID NO: 859155 - DNA, 33 bp, Homo sapien
gttttgaagtagagcaatatgtcatagctatcg

SEQ ID NO: 859156 - DNA, 33 bp, Homo sapien
gttttgaagtagagcactatgtcatagctatcg

SEQ ID NO: 859157 - DNA, 33 bp, Homo sapien
atattccaccattctaggtgaaactcttccaaa

SEQ ID NO: 859158 - DNA, 33 bp, Homo sapien
atattccaccattctatgtgaaactcttccaaa

SEQ ID NO: 859159 - DNA, 33 bp, Homo sapien
tataagtcaaccaataagatatgagaaatttga

SEQ ID NO: 859160 - DNA, 33 bp, Homo sapien
tataagtcaaccaatatgatatgagaaatttga

SEQ ID NO: 859161 - DNA, 33 bp, Homo sapien
gtttataaaatgactcaattaaaattcccatat

SEQ ID NO: 859162 - DNA, 33 bp, Homo sapien
gtttataaaatgactccattaaaattcccatat

SEQ ID NO: 859163 - DNA, 33 bp, Homo sapien
ctaaaaacaatacaccagagtacaacaagtagc

SEQ ID NO: 859164 - DNA, 33 bp, Homo sapien
ctaaaaacaatacaccggagtacaacaagtagc

SEQ ID NO: 859165 - DNA, 33 bp, Homo sapien
aataagaaagcaataacacaaatgcagtgtttg

SEQ ID NO: 859166 - DNA, 33 bp, Homo sapien
aataagaaagcaataatacaaatgcagtgtttg

SEQ ID NO: 859167 - DNA, 33 bp, Homo sapien
aaatagtaaaagaagacacactttaagtctcaa

SEQ ID NO: 859168 - DNA, 33 bp, Homo sapien
aaatagtaaaagaagatacactttaagtctcaa

SEQ ID NO: 859169 - DNA, 33 bp, Homo sapien
ctaatcttctgccagcaaaagttcttaaaattt

SEQ ID NO: 859170 - DNA, 33 bp, Homo sapien
ctaatcttctgccagcgaaagttcttaaaattt

SEQ ID NO: 859171 - DNA, 33 bp, Homo sapien
gtgagtagctatttacacatcctccctatactt

SEQ ID NO: 859172 - DNA, 33 bp, Homo sapien
gtgagtagctatttacgcatcctccctatactt

SEQ ID NO: 859173 - DNA, 33 bp, Homo sapien
atacactagtatgctacggttctctccctccct

SEQ ID NO: 859174 - DNA, 33 bp, Homo sapien
atacactagtatgctatggttctctccctccct

SEQ ID NO: 859175 - DNA, 33 bp, Homo sapien
ttaaataagagtctaacattgaagatggcagta

SEQ ID NO: 859176 - DNA, 33 bp, Homo sapien
ttaaataagagtctaatattgaagatggcagta

SEQ ID NO: 859177 - DNA, 33 bp, Homo sapien
gagagttgtgttgaagaaagtgttgattgtgac

SEQ ID NO: 859178 - DNA, 33 bp, Homo sapien
gagagttgtgttgaaggaagtgttgattgtgac

SEQ ID NO: 859179 - DNA, 33 bp, Homo sapien
tccttcaaaacatgggaattacaactctacatg

SEQ ID NO: 859180 - DNA, 33 bp, Homo sapien
tccttcaaaacatggggattacaactctacatg

SEQ ID NO: 859181 - DNA, 33 bp, Homo sapien
cattattttagttttgaaatccaacgtaaattt

SEQ ID NO: 859182 - DNA, 33 bp, Homo sapien
cattattttagttttgtaatccaacgtaaattt

SEQ ID NO: 859183 - DNA, 33 bp, Homo sapien
gaagttatgtttatagcattgccccaatttcat

SEQ ID NO: 859184 - DNA, 33 bp, Homo sapien
gaagttatgtttataggattgccccaatttcat

SEQ ID NO: 859185 - DNA, 33 bp, Homo sapien
tattttttaaggagcaatataagtacagagatt

SEQ ID NO: 859186 - DNA, 33 bp, Homo sapien
tattttttaaggagcattataagtacagagatt

SEQ ID NO: 859187 - DNA, 33 bp, Homo sapien
tatgcctagggagaaccattataggactattag

SEQ ID NO: 859188 - DNA, 33 bp, Homo sapien
tatgcctagggagaactattataggactattag

SEQ ID NO: 859189 - DNA, 33 bp, Homo sapien
cccacatttctcatgcaatgggcgcagtaatct

SEQ ID NO: 859190 - DNA, 33 bp, Homo sapien
cccacatttctcatgcgatgggcgcagtaatct

SEQ ID NO: 859191 - DNA, 33 bp, Homo sapien
ataccagttgggcacacattgtggatctctatc

SEQ ID NO: 859192 - DNA, 33 bp, Homo sapien
ataccagttgggcacatattgtggatctctatc

SEQ ID NO: 859193 - DNA, 33 bp, Homo sapien
caaattttttctaagcaaatatgcaaaacagca

SEQ ID NO: 859194 - DNA, 33 bp, Homo sapien
caaattttttctaagccaatatgcaaaacagca

SEQ ID NO: 859195 - DNA, 33 bp, Homo sapien
cagttattattgaaaagtgttttatacagacaa

SEQ ID NO: 859196 - DNA, 33 bp, Homo sapien
cagttattattgaaaattgttttatacagacaa

SEQ ID NO: 859197 - DNA, 33 bp, Homo sapien
ggactcagacattagacgaaattgaggaccaac

SEQ ID NO: 859198 - DNA, 33 bp, Homo sapien
ggactcagacattagatgaaattgaggaccaac

SEQ ID NO: 859199 - DNA, 33 bp, Homo sapien
tcccagtgggagatgacataggatagaatggaa

SEQ ID NO: 859200 - DNA, 33 bp, Homo sapien
tcccagtgggagatgatataggatagaatggaa

SEQ ID NO: 859201 - DNA, 33 bp, Homo sapien
aattttcctccattccactattccactattcca

SEQ ID NO: 859202 - DNA, 33 bp, Homo sapien
aattttcctccattccgctattccactattcca

SEQ ID NO: 859203 - DNA, 33 bp, Homo sapien
accaggcaagtaggcaatgacagtaatgaagtg

SEQ ID NO: 859204 - DNA, 33 bp, Homo sapien
accaggcaagtaggcagtgacagtaatgaagtg

SEQ ID NO: 859205 - DNA, 33 bp, Homo sapien
ccaagatggaattagaagagccaagatttattg

SEQ ID NO: 859206 - DNA, 33 bp, Homo sapien
ccaagatggaattagaggagccaagatttattg

SEQ ID NO: 859207 - DNA, 33 bp, Homo sapien
tttttagaacaggcaacttagattagtttctga

SEQ ID NO: 859208 - DNA, 33 bp, Homo sapien
tttttagaacaggcaatttagattagtttctga

SEQ ID NO: 859209 - DNA, 33 bp, Homo sapien
attaagttccagtcaaaggggatgctaataaag

SEQ ID NO: 859210 - DNA, 33 bp, Homo sapien
attaagttccagtcaacggggatgctaataaag

SEQ ID NO: 859211 - DNA, 33 bp, Homo sapien
agctctgaaatactccgcaacagttacttagga

SEQ ID NO: 859212 - DNA, 33 bp, Homo sapien
agctctgaaatactcctcaacagttacttagga

SEQ ID NO: 859213 - DNA, 33 bp, Homo sapien
tgagatgcatggtaaaatgagtgtatgcagtct

SEQ ID NO: 859214 - DNA, 33 bp, Homo sapien
tgagatgcatggtaaattgagtgtatgcagtct

SEQ ID NO: 859215 - DNA, 33 bp, Homo sapien
tcaacattatagatgcggacagataaaatagcc

SEQ ID NO: 859216 - DNA, 33 bp, Homo sapien
tcaacattatagatgctgacagataaaatagcc

SEQ ID NO: 859217 - DNA, 33 bp, Homo sapien
agagcaaatgggtagaaaactagctgtgcctgc

SEQ ID NO: 859218 - DNA, 33 bp, Homo sapien
agagcaaatgggtagacaactagctgtgcctgc

SEQ ID NO: 859219 - DNA, 33 bp, Homo sapien
ttattaactcacttataaagctctgttactctt

SEQ ID NO: 859220 - DNA, 33 bp, Homo sapien
ttattaactcacttatgaagctctgttactctt

SEQ ID NO: 859221 - DNA, 33 bp, Homo sapien
aagagagaaagtatggcaactactgtggaaagt

SEQ ID NO: 859222 - DNA, 33 bp, Homo sapien
aagagagaaagtatggtaactactgtggaaagt

SEQ ID NO: 859223 - DNA, 33 bp, Homo sapien
gtgactaagcataatacgataggcagcaagttt

SEQ ID NO: 859224 - DNA, 33 bp, Homo sapien
gtgactaagcataataggataggcagcaagttt

SEQ ID NO: 859225 - DNA, 33 bp, Homo sapien
atggtgaacaatataaccatgacccctgccctg

SEQ ID NO: 859226 - DNA, 33 bp, Homo sapien
atggtgaacaatataatcatgacccctgccctg

SEQ ID NO: 859227 - DNA, 33 bp, Homo sapien
aacaaagactacataaaatttagcaagttttta

SEQ ID NO: 859228 - DNA, 33 bp, Homo sapien
aacaaagactacataacatttagcaagttttta

SEQ ID NO: 859229 - DNA, 33 bp, Homo sapien
tttttacaaataaacaaggtaatgtgttacaga

SEQ ID NO: 859230 - DNA, 33 bp, Homo sapien
tttttacaaataaacagggtaatgtgttacaga

SEQ ID NO: 859231 - DNA, 33 bp, Homo sapien
gatggataaatggatgaatggactgattggaca

SEQ ID NO: 859232 - DNA, 33 bp, Homo sapien
gatggataaatggatggatggactgattggaca

SEQ ID NO: 859233 - DNA, 33 bp, Homo sapien
gtataagttgggctaacatattgaaatctgaag

SEQ ID NO: 859234 - DNA, 33 bp, Homo sapien
gtataagttgggctaatatattgaaatctgaag

SEQ ID NO: 859235 - DNA, 33 bp, Homo sapien
gaaatagcctgcttctaaagtgtgatctttttc

SEQ ID NO: 859236 - DNA, 33 bp, Homo sapien
gaaatagcctgcttctgaagtgtgatctttttc

SEQ ID NO: 859237 - DNA, 33 bp, Homo sapien
tctggtaattgattagaatgggcttttttcaat

SEQ ID NO: 859238 - DNA, 33 bp, Homo sapien
tctggtaattgattaggatgggcttttttcaat

SEQ ID NO: 859239 - DNA, 33 bp, Homo sapien
ctgtaacaataagccccagataaacagaggttc

SEQ ID NO: 859240 - DNA, 33 bp, Homo sapien
ctgtaacaataagcccgagataaacagaggttc

SEQ ID NO: 859241 - DNA, 33 bp, Homo sapien
gtgtccttcataaagacgaacaagattttcata

SEQ ID NO: 859242 - DNA, 33 bp, Homo sapien
gtgtccttcataaagatgaacaagattttcata

SEQ ID NO: 859243 - DNA, 33 bp, Homo sapien
ataaagcccagatacaaatccatgtacaaatga

SEQ ID NO: 859244 - DNA, 33 bp, Homo sapien
ataaagcccagatacagatccatgtacaaatga

SEQ ID NO: 859245 - DNA, 33 bp, Homo sapien
agtaagttggcacatcacctaaatttcagatta

SEQ ID NO: 859246 - DNA, 33 bp, Homo sapien
agtaagttggcacatcgcctaaatttcagatta

SEQ ID NO: 859247 - DNA, 33 bp, Homo sapien
actctctttgatgatgaaaatgctctagaccca

SEQ ID NO: 859248 - DNA, 33 bp, Homo sapien
actctctttgatgatggaaatgctctagaccca

SEQ ID NO: 859249 - DNA, 33 bp, Homo sapien
gaggaaaatgcagacaaataaaccctgtgatgg

SEQ ID NO: 859250 - DNA, 33 bp, Homo sapien
gaggaaaatgcagacagataaaccctgtgatgg

SEQ ID NO: 859251 - DNA, 33 bp, Homo sapien
tcaaagaattgacaacagaaatatcaacttaaa

SEQ ID NO: 859252 - DNA, 33 bp, Homo sapien
tcaaagaattgacaacggaaatatcaacttaaa

SEQ ID NO: 859253 - DNA, 33 bp, Homo sapien
ggtccctgaaagtccaagcatttctctatttca

SEQ ID NO: 859254 - DNA, 33 bp, Homo sapien
ggtccctgaaagtccaggcatttctctatttca

SEQ ID NO: 859255 - DNA, 33 bp, Homo sapien
tatgtagtgcccggtaagtgttacctgctcaat

SEQ ID NO: 859256 - DNA, 33 bp, Homo sapien
tatgtagtgcccggtacgtgttacctgctcaat

SEQ ID NO: 859257 - DNA, 33 bp, Homo sapien
agagcttccacgtctcgcaaggagtcagggagt

SEQ ID NO: 859258 - DNA, 33 bp, Homo sapien
agagcttccacgtctctcaaggagtcagggagt

SEQ ID NO: 859259 - DNA, 33 bp, Homo sapien
cagagataaatacacaaacgtggaagctctttt

SEQ ID NO: 859260 - DNA, 33 bp, Homo sapien
cagagataaatacacagacgtggaagctctttt

SEQ ID NO: 859261 - DNA, 33 bp, Homo sapien
actccaaagaactggaatcaacaaaataatctg

SEQ ID NO: 859262 - DNA, 33 bp, Homo sapien
actccaaagaactggagtcaacaaaataatctg

SEQ ID NO: 859263 - DNA, 33 bp, Homo sapien
acttagatttaagaaaaccagtatgtgctgaga

SEQ ID NO: 859264 - DNA, 33 bp, Homo sapien
acttagatttaagaaacccagtatgtgctgaga

SEQ ID NO: 859265 - DNA, 33 bp, Homo sapien
attatcagttgttaagaagccagaagacaacag

SEQ ID NO: 859266 - DNA, 33 bp, Homo sapien
attatcagttgttaaggagccagaagacaacag

SEQ ID NO: 859267 - DNA, 33 bp, Homo sapien
tcttatcaatgtggaacaaacacctggttctct

SEQ ID NO: 859268 - DNA, 33 bp, Homo sapien
tcttatcaatgtggaagaaacacctggttctct

SEQ ID NO: 859269 - DNA, 33 bp, Homo sapien
aagctaaagtacaaggccctactggataaacac

SEQ ID NO: 859270 - DNA, 33 bp, Homo sapien
aagctaaagtacaaggtcctactggataaacac

SEQ ID NO: 859271 - DNA, 33 bp, Homo sapien
attttctagaatatccactgtttactttgatat

SEQ ID NO: 859272 - DNA, 33 bp, Homo sapien
attttctagaatatccgctgtttactttgatat

SEQ ID NO: 859273 - DNA, 33 bp, Homo sapien
gaaccaaggtgccaaaaagcttaaattgaactg

SEQ ID NO: 859274 - DNA, 33 bp, Homo sapien
gaaccaaggtgccaaagagcttaaattgaactg

SEQ ID NO: 859275 - DNA, 33 bp, Homo sapien
tctcaaattgcatgaactgcctcagctacaaac

SEQ ID NO: 859276 - DNA, 33 bp, Homo sapien
tctcaaattgcatgaagtgcctcagctacaaac

SEQ ID NO: 859277 - DNA, 33 bp, Homo sapien
agaaccacacagggaacgaaaatcagacaatat

SEQ ID NO: 859278 - DNA, 33 bp, Homo sapien
agaaccacacagggaatgaaaatcagacaatat

SEQ ID NO: 859279 - DNA, 33 bp, Homo sapien
ttaaatgggcttaatacgtaattatatacttga

SEQ ID NO: 859280 - DNA, 33 bp, Homo sapien
ttaaatgggcttaatatgtaattatatacttga

SEQ ID NO: 859281 - DNA, 33 bp, Homo sapien
actacctttctgttgacggattgatgagactga

SEQ ID NO: 859282 - DNA, 33 bp, Homo sapien
actacctttctgttgatggattgatgagactga

SEQ ID NO: 859283 - DNA, 33 bp, Homo sapien
attatctgagaaggaaatacatatccaggtcat

SEQ ID NO: 859284 - DNA, 33 bp, Homo sapien
attatctgagaaggaagtacatatccaggtcat

SEQ ID NO: 859285 - DNA, 33 bp, Homo sapien
taattaggatgtgaaccgtagtatttattagga

SEQ ID NO: 859286 - DNA, 33 bp, Homo sapien
taattaggatgtgaactgtagtatttattagga

SEQ ID NO: 859287 - DNA, 33 bp, Homo sapien
aatttgtcagaatagcaaagtaacttgattatt

SEQ ID NO: 859288 - DNA, 33 bp, Homo sapien
aatttgtcagaatagccaagtaacttgattatt

SEQ ID NO: 859289 - DNA, 33 bp, Homo sapien
ttcttgatcaaacataacaccaatttgtcagaa

SEQ ID NO: 859290 - DNA, 33 bp, Homo sapien
ttcttgatcaaacatatcaccaatttgtcagaa

SEQ ID NO: 859291 - DNA, 33 bp, Homo sapien
ttgctgtaagtaaatacgtgagaccgcataatt

SEQ ID NO: 859292 - DNA, 33 bp, Homo sapien
ttgctgtaagtaaatatgtgagaccgcataatt

SEQ ID NO: 859293 - DNA, 33 bp, Homo sapien
actagctataagagaggctaccaaagcaattac

SEQ ID NO: 859294 - DNA, 33 bp, Homo sapien
actagctataagagagtctaccaaagcaattac

SEQ ID NO: 859295 - DNA, 33 bp, Homo sapien
tactcagtatatggaaagatgacacttctttct

SEQ ID NO: 859296 - DNA, 33 bp, Homo sapien
tactcagtatatggaaggatgacacttctttct

SEQ ID NO: 859297 - DNA, 33 bp, Homo sapien
catgctcctacatacacgaacctaaaacttcac

SEQ ID NO: 859298 - DNA, 33 bp, Homo sapien
catgctcctacatacaggaacctaaaacttcac

SEQ ID NO: 859299 - DNA, 33 bp, Homo sapien
ggggtagcatgaattaaaaaagaatcacatcta

SEQ ID NO: 859300 - DNA, 33 bp, Homo sapien
ggggtagcatgaattacaaaagaatcacatcta

SEQ ID NO: 859301 - DNA, 33 bp, Homo sapien
atatcaagctttgccacatttgtgaattgttta

SEQ ID NO: 859302 - DNA, 33 bp, Homo sapien
atatcaagctttgccatatttgtgaattgttta

SEQ ID NO: 859303 - DNA, 33 bp, Homo sapien
tggacttcaccaacaccgtagatcaaatgaacc

SEQ ID NO: 859304 - DNA, 33 bp, Homo sapien
tggacttcaccaacactgtagatcaaatgaacc

SEQ ID NO: 859305 - DNA, 33 bp, Homo sapien
cagcaaccataataaaatgttcattctaaataa

SEQ ID NO: 859306 - DNA, 33 bp, Homo sapien
cagcaaccataataaagtgttcattctaaataa

SEQ ID NO: 859307 - DNA, 33 bp, Homo sapien
gcattgtgactaactacggagcaagaataaaaa

SEQ ID NO: 859308 - DNA, 33 bp, Homo sapien
gcattgtgactaactatggagcaagaataaaaa

SEQ ID NO: 859309 - DNA, 33 bp, Homo sapien
gtttattgccatagaaatattagctgggaggaa

SEQ ID NO: 859310 - DNA, 33 bp, Homo sapien
gtttattgccatagaactattagctgggaggaa

SEQ ID NO: 859311 - DNA, 33 bp, Homo sapien
atattaattaaatttacaagtggctagagaagt

SEQ ID NO: 859312 - DNA, 33 bp, Homo sapien
atattaattaaatttagaagtggctagagaagt

SEQ ID NO: 859313 - DNA, 33 bp, Homo sapien
gaccatggaggccgaacctcaaattttctggtg

SEQ ID NO: 859314 - DNA, 33 bp, Homo sapien
gaccatggaggccgaatctcaaattttctggtg

SEQ ID NO: 859315 - DNA, 33 bp, Homo sapien
tactgtccaattgggaaaggcagtcatcacctt

SEQ ID NO: 859316 - DNA, 33 bp, Homo sapien
tactgtccaattgggagaggcagtcatcacctt

SEQ ID NO: 859317 - DNA, 33 bp, Homo sapien
atgaaatccagagttacatttttacactgtttt

SEQ ID NO: 859318 - DNA, 33 bp, Homo sapien
atgaaatccagagttatatttttacactgtttt

SEQ ID NO: 859319 - DNA, 33 bp, Homo sapien
aaacatatctacctcaggtgtctggctcatagt

SEQ ID NO: 859320 - DNA, 33 bp, Homo sapien
aaacatatctacctcatgtgtctggctcatagt

SEQ ID NO: 859321 - DNA, 33 bp, Homo sapien
gaaatcacttaagaatcagtgaagaatgtgtga

SEQ ID NO: 859322 - DNA, 33 bp, Homo sapien
gaaatcacttaagaatgagtgaagaatgtgtga

SEQ ID NO: 859323 - DNA, 33 bp, Homo sapien
tgccattgccactaccaaagtccaagttcctct

SEQ ID NO: 859324 - DNA, 33 bp, Homo sapien
tgccattgccactaccgaagtccaagttcctct

SEQ ID NO: 859325 - DNA, 33 bp, Homo sapien
aagaatcatactacccagcttcaagctatactg

SEQ ID NO: 859326 - DNA, 33 bp, Homo sapien
aagaatcatactacccggcttcaagctatactg

SEQ ID NO: 859327 - DNA, 33 bp, Homo sapien
cagctattttatgtcaccaatttatcgttacat

SEQ ID NO: 859328 - DNA, 33 bp, Homo sapien
cagctattttatgtcatcaatttatcgttacat

SEQ ID NO: 859329 - DNA, 33 bp, Homo sapien
gtacagaaggagagacaatgagttcctgactac

SEQ ID NO: 859330 - DNA, 33 bp, Homo sapien
gtacagaaggagagaccatgagttcctgactac

SEQ ID NO: 859331 - DNA, 33 bp, Homo sapien
ccacaacttctaggaaccctgatttttcatgat

SEQ ID NO: 859332 - DNA, 33 bp, Homo sapien
ccacaacttctaggaatcctgatttttcatgat

SEQ ID NO: 859333 - DNA, 33 bp, Homo sapien
tatatgcataggaaaaacttgaatgcataggaa

SEQ ID NO: 859334 - DNA, 33 bp, Homo sapien
tatatgcataggaaaagcttgaatgcataggaa

SEQ ID NO: 859335 - DNA, 33 bp, Homo sapien
attgaagactttggaacaacggtgaggtctcgt

SEQ ID NO: 859336 - DNA, 33 bp, Homo sapien
attgaagactttggaataacggtgaggtctcgt

SEQ ID NO: 859337 - DNA, 33 bp, Homo sapien
gtgcttatcattcccactaactcatatagaact

SEQ ID NO: 859338 - DNA, 33 bp, Homo sapien
gtgcttatcattcccagtaactcatatagaact

SEQ ID NO: 859339 - DNA, 33 bp, Homo sapien
ccatagctgaaaatacaatagctgaaagcatgg

SEQ ID NO: 859340 - DNA, 33 bp, Homo sapien
ccatagctgaaaatactatagctgaaagcatgg

SEQ ID NO: 859341 - DNA, 33 bp, Homo sapien
tctccaaaattgacctaaaccttcaatagatgg

SEQ ID NO: 859342 - DNA, 33 bp, Homo sapien
tctccaaaattgacctgaaccttcaatagatgg

SEQ ID NO: 859343 - DNA, 33 bp, Homo sapien
gattaaaagcagtctacaaaacagtgcacgagg

SEQ ID NO: 859344 - DNA, 33 bp, Homo sapien
gattaaaagcagtctataaaacagtgcacgagg

SEQ ID NO: 859345 - DNA, 33 bp, Homo sapien
ccttgagcaccaataacgtgaggaaagttagtt

SEQ ID NO: 859346 - DNA, 33 bp, Homo sapien
ccttgagcaccaataatgtgaggaaagttagtt

SEQ ID NO: 859347 - DNA, 33 bp, Homo sapien
attccatgactatctcaactaccttcattcttt

SEQ ID NO: 859348 - DNA, 33 bp, Homo sapien
attccatgactatctcgactaccttcattcttt

SEQ ID NO: 859349 - DNA, 33 bp, Homo sapien
catgcaattcaactaaatcctgattacaatgtg

SEQ ID NO: 859350 - DNA, 33 bp, Homo sapien
catgcaattcaactaagtcctgattacaatgtg

SEQ ID NO: 859351 - DNA, 33 bp, Homo sapien
cgtgcatgatggatagaaactaacagaagcagc

SEQ ID NO: 859352 - DNA, 33 bp, Homo sapien
cgtgcatgatggataggaactaacagaagcagc

SEQ ID NO: 859353 - DNA, 33 bp, Homo sapien
aatctgaaatgtgaaaactgtcaggtttaaatt

SEQ ID NO: 859354 - DNA, 33 bp, Homo sapien
aatctgaaatgtgaaatctgtcaggtttaaatt

SEQ ID NO: 859355 - DNA, 33 bp, Homo sapien
taggagtggatgtagcaaaaggatagtaagata

SEQ ID NO: 859356 - DNA, 33 bp, Homo sapien
taggagtggatgtagcgaaaggatagtaagata

SEQ ID NO: 859357 - DNA, 33 bp, Homo sapien
acattactcagctacagctctcaattgcagttt

SEQ ID NO: 859358 - DNA, 33 bp, Homo sapien
acattactcagctacatctctcaattgcagttt

SEQ ID NO: 859359 - DNA, 33 bp, Homo sapien
cctaaaattagtctgaagtacacaaggaaaaaa

SEQ ID NO: 859360 - DNA, 33 bp, Homo sapien
cctaaaattagtctgaggtacacaaggaaaaaa

SEQ ID NO: 859361 - DNA, 33 bp, Homo sapien
acactcattgggacaacctttctgcagaaagga

SEQ ID NO: 859362 - DNA, 33 bp, Homo sapien
acactcattgggacaagctttctgcagaaagga

SEQ ID NO: 859363 - DNA, 33 bp, Homo sapien
cattaaaacttcaaagcatcatggagaaaaata

SEQ ID NO: 859364 - DNA, 33 bp, Homo sapien
cattaaaacttcaaagtatcatggagaaaaata

SEQ ID NO: 859365 - DNA, 33 bp, Homo sapien
attctctactaggtgacaaattgacatattttt

SEQ ID NO: 859366 - DNA, 33 bp, Homo sapien
attctctactaggtgataaattgacatattttt

SEQ ID NO: 859367 - DNA, 33 bp, Homo sapien
atcatgtcaggaaaataagccagtagaataaac

SEQ ID NO: 859368 - DNA, 33 bp, Homo sapien
atcatgtcaggaaaattagccagtagaataaac

SEQ ID NO: 859369 - DNA, 33 bp, Homo sapien
gagaattctactaaaacctgggcatcaatgtat

SEQ ID NO: 859370 - DNA, 33 bp, Homo sapien
gagaattctactaaaatctgggcatcaatgtat

SEQ ID NO: 859371 - DNA, 33 bp, Homo sapien
gtacaaaggctgctaaataactgtcaatataac

SEQ ID NO: 859372 - DNA, 33 bp, Homo sapien
gtacaaaggctgctaattaactgtcaatataac

SEQ ID NO: 859373 - DNA, 33 bp, Homo sapien
tggcaagaacgtgtaaagatctgctcttccagt

SEQ ID NO: 859374 - DNA, 33 bp, Homo sapien
tggcaagaacgtgtaaggatctgctcttccagt

SEQ ID NO: 859375 - DNA, 33 bp, Homo sapien
tgttaattttccccacaacaatttatagaacca

SEQ ID NO: 859376 - DNA, 33 bp, Homo sapien
tgttaattttccccaccacaatttatagaacca

SEQ ID NO: 859377 - DNA, 33 bp, Homo sapien
aggaacaattcaccaacggaaacaaatggacta

SEQ ID NO: 859378 - DNA, 33 bp, Homo sapien
aggaacaattcaccaatggaaacaaatggacta

SEQ ID NO: 859379 - DNA, 33 bp, Homo sapien
aggcagtctgctggccgaattctctcttcttcc

SEQ ID NO: 859380 - DNA, 33 bp, Homo sapien
aggcagtctgctggcctaattctctcttcttcc

SEQ ID NO: 859381 - DNA, 33 bp, Homo sapien
tattattgtttctacaactttctttaccaaaac

SEQ ID NO: 859382 - DNA, 33 bp, Homo sapien
tattattgtttctacagctttctttaccaaaac

SEQ ID NO: 859383 - DNA, 33 bp, Homo sapien
ttggctgataatcataagtaggaactggttcca

SEQ ID NO: 859384 - DNA, 33 bp, Homo sapien
ttggctgataatcatacgtaggaactggttcca

SEQ ID NO: 859385 - DNA, 33 bp, Homo sapien
atcttagagtcccgatcagctagttttcaggtg

SEQ ID NO: 859386 - DNA, 33 bp, Homo sapien
atcttagagtcccgattagctagttttcaggtg

SEQ ID NO: 859387 - DNA, 33 bp, Homo sapien
ttcttagaaatgactccgaaagaaaccccagct

SEQ ID NO: 859388 - DNA, 33 bp, Homo sapien
ttcttagaaatgactctgaaagaaaccccagct

SEQ ID NO: 859389 - DNA, 33 bp, Homo sapien
cccctgtatggagcaaagaggaaaagggaaaag

SEQ ID NO: 859390 - DNA, 33 bp, Homo sapien
cccctgtatggagcaaggaggaaaagggaaaag

SEQ ID NO: 859391 - DNA, 33 bp, Homo sapien
ctcctatacagttaacacataatggcaaaagat

SEQ ID NO: 859392 - DNA, 33 bp, Homo sapien
ctcctatacagttaacccataatggcaaaagat

SEQ ID NO: 859393 - DNA, 33 bp, Homo sapien
ctgttttaatgtcaacaaatcaagattaataag

SEQ ID NO: 859394 - DNA, 33 bp, Homo sapien
ctgttttaatgtcaaccaatcaagattaataag

SEQ ID NO: 859395 - DNA, 33 bp, Homo sapien
agcttctgtcataaataaggctcataattggaa

SEQ ID NO: 859396 - DNA, 33 bp, Homo sapien
agcttctgtcataaatgaggctcataattggaa

SEQ ID NO: 859397 - DNA, 33 bp, Homo sapien
tacaacatcagagcagaaacagggagtaggaac

SEQ ID NO: 859398 - DNA, 33 bp, Homo sapien
tacaacatcagagcaggaacagggagtaggaac

SEQ ID NO: 859399 - DNA, 33 bp, Homo sapien
tatgggtaggagtgcacgaaagggccgttgttc

SEQ ID NO: 859400 - DNA, 33 bp, Homo sapien
tatgggtaggagtgcaggaaagggccgttgttc

SEQ ID NO: 859401 - DNA, 33 bp, Homo sapien
atcctgaaaaaaaagactatagggtgcaaatta

SEQ ID NO: 859402 - DNA, 33 bp, Homo sapien
atcctgaaaaaaaagattatagggtgcaaatta

SEQ ID NO: 859403 - DNA, 33 bp, Homo sapien
gcactggaatttgacaaaagcataaatttatga

SEQ ID NO: 859404 - DNA, 33 bp, Homo sapien
gcactggaatttgacagaagcataaatttatga

SEQ ID NO: 859405 - DNA, 33 bp, Homo sapien
taaatataatcattagcaagcaggagtcagaac

SEQ ID NO: 859406 - DNA, 33 bp, Homo sapien
taaatataatcattagtaagcaggagtcagaac

SEQ ID NO: 859407 - DNA, 33 bp, Homo sapien
atattcatggattataactggtgtaactggtta

SEQ ID NO: 859408 - DNA, 33 bp, Homo sapien
atattcatggattatacctggtgtaactggtta

SEQ ID NO: 859409 - DNA, 33 bp, Homo sapien
cattcaacaaaggcaaaatatatagcacagcaa

SEQ ID NO: 859410 - DNA, 33 bp, Homo sapien
cattcaacaaaggcaacatatatagcacagcaa

SEQ ID NO: 859411 - DNA, 33 bp, Homo sapien
tatgtgcatactcttggaatttgacacttgtct

SEQ ID NO: 859412 - DNA, 33 bp, Homo sapien
tatgtgcatactcttgtaatttgacacttgtct

SEQ ID NO: 859413 - DNA, 33 bp, Homo sapien
ttgtgggaaggtcacagtattgctttacctgtt

SEQ ID NO: 859414 - DNA, 33 bp, Homo sapien
ttgtgggaaggtcacattattgctttacctgtt

SEQ ID NO: 859415 - DNA, 33 bp, Homo sapien
cgattctcactcactactaattctgctcactaa

SEQ ID NO: 859416 - DNA, 33 bp, Homo sapien
cgattctcactcactagtaattctgctcactaa

SEQ ID NO: 859417 - DNA, 33 bp, Homo sapien
ttttattttgcctcaacgttacaaacaccctga

SEQ ID NO: 859418 - DNA, 33 bp, Homo sapien
ttttattttgcctcaatgttacaaacaccctga

SEQ ID NO: 859419 - DNA, 33 bp, Homo sapien
tgaaagaatattgtaaatcaatgttttgagtga

SEQ ID NO: 859420 - DNA, 33 bp, Homo sapien
tgaaagaatattgtaagtcaatgttttgagtga

SEQ ID NO: 859421 - DNA, 33 bp, Homo sapien
aacccttatctcctccaagtcataaagcttggc

SEQ ID NO: 859422 - DNA, 33 bp, Homo sapien
aacccttatctcctccgagtcataaagcttggc

SEQ ID NO: 859423 - DNA, 33 bp, Homo sapien
taaataactttcaaggacaatggtggtcaaaac

SEQ ID NO: 859424 - DNA, 33 bp, Homo sapien
taaataactttcaaggtcaatggtggtcaaaac

SEQ ID NO: 859425 - DNA, 33 bp, Homo sapien
aaaaatctttgcattcgctacttcttagtgctc

SEQ ID NO: 859426 - DNA, 33 bp, Homo sapien
aaaaatctttgcattctctacttcttagtgctc

SEQ ID NO: 859427 - DNA, 33 bp, Homo sapien
ctaacttcttgtactcccattctctttgaagct

SEQ ID NO: 859428 - DNA, 33 bp, Homo sapien
ctaacttcttgtactctcattctctttgaagct

SEQ ID NO: 859429 - DNA, 33 bp, Homo sapien
tttgatgctttattaacaatttcactataacgt

SEQ ID NO: 859430 - DNA, 33 bp, Homo sapien
tttgatgctttattaagaatttcactataacgt

SEQ ID NO: 859431 - DNA, 33 bp, Homo sapien
atatagttggtccaaaaattttttagcatatgg

SEQ ID NO: 859432 - DNA, 33 bp, Homo sapien
atatagttggtccaaacattttttagcatatgg

SEQ ID NO: 859433 - DNA, 33 bp, Homo sapien
cagggaacagagactacgaaacttaaatcaata

SEQ ID NO: 859434 - DNA, 33 bp, Homo sapien
cagggaacagagactatgaaacttaaatcaata

SEQ ID NO: 859435 - DNA, 33 bp, Homo sapien
tacctgagtagttcaacgacaaagttacttttt

SEQ ID NO: 859436 - DNA, 33 bp, Homo sapien
tacctgagtagttcaatgacaaagttacttttt

SEQ ID NO: 859437 - DNA, 33 bp, Homo sapien
tctttcattctctctaacttcaataagcaactt

SEQ ID NO: 859438 - DNA, 33 bp, Homo sapien
tctttcattctctctagcttcaataagcaactt

SEQ ID NO: 859439 - DNA, 33 bp, Homo sapien
ataataaaaggcattaagttctttcattctctc

SEQ ID NO: 859440 - DNA, 33 bp, Homo sapien
ataataaaaggcattaggttctttcattctctc

SEQ ID NO: 859441 - DNA, 33 bp, Homo sapien
tatgccactgggtttcaccaatgagagatactg

SEQ ID NO: 859442 - DNA, 33 bp, Homo sapien
tatgccactgggtttcgccaatgagagatactg

SEQ ID NO: 859443 - DNA, 33 bp, Homo sapien
taaaatatggaagtcaccattacggtactgatg

SEQ ID NO: 859444 - DNA, 33 bp, Homo sapien
taaaatatggaagtcatcattacggtactgatg

SEQ ID NO: 859445 - DNA, 33 bp, Homo sapien
ataaattttgattttgaagaatatatgcaatgg

SEQ ID NO: 859446 - DNA, 33 bp, Homo sapien
ataaattttgattttggagaatatatgcaatgg

SEQ ID NO: 859447 - DNA, 33 bp, Homo sapien
atgaacttaaaaggtaaagcaaaaatgcagagg

SEQ ID NO: 859448 - DNA, 33 bp, Homo sapien
atgaacttaaaaggtatagcaaaaatgcagagg

SEQ ID NO: 859449 - DNA, 33 bp, Homo sapien
tataagatagacatacagagggcaaagcaaata

SEQ ID NO: 859450 - DNA, 33 bp, Homo sapien
tataagatagacatacggagggcaaagcaaata

SEQ ID NO: 859451 - DNA, 33 bp, Homo sapien
ttcatggataaaaataccatagtgaggatttca

SEQ ID NO: 859452 - DNA, 33 bp, Homo sapien
ttcatggataaaaatatcatagtgaggatttca

SEQ ID NO: 859453 - DNA, 33 bp, Homo sapien
cttaactctttgtttaacctgtaggcaaaatct

SEQ ID NO: 859454 - DNA, 33 bp, Homo sapien
cttaactctttgtttatcctgtaggcaaaatct

SEQ ID NO: 859455 - DNA, 33 bp, Homo sapien
acttgaatcaactataggggaaaagcgcaaaaa

SEQ ID NO: 859456 - DNA, 33 bp, Homo sapien
acttgaatcaactatatgggaaaagcgcaaaaa

SEQ ID NO: 859457 - DNA, 33 bp, Homo sapien
aaagacgttacaagaaaagacaactgcagacca

SEQ ID NO: 859458 - DNA, 33 bp, Homo sapien
aaagacgttacaagaagagacaactgcagacca

SEQ ID NO: 859459 - DNA, 33 bp, Homo sapien
agactattaagcttccaattgatttcagtcttc

SEQ ID NO: 859460 - DNA, 33 bp, Homo sapien
agactattaagcttccgattgatttcagtcttc

SEQ ID NO: 859461 - DNA, 33 bp, Homo sapien
tacctctgtggaaggaccaagaaaagtacagag

SEQ ID NO: 859462 - DNA, 33 bp, Homo sapien
tacctctgtggaaggagcaagaaaagtacagag

SEQ ID NO: 859463 - DNA, 33 bp, Homo sapien
tctgacaattccaacaactatttcaaacatgag

SEQ ID NO: 859464 - DNA, 33 bp, Homo sapien
tctgacaattccaacatctatttcaaacatgag

SEQ ID NO: 859465 - DNA, 33 bp, Homo sapien
tttacaagacgatacactgaaagggaaaacaga

SEQ ID NO: 859466 - DNA, 33 bp, Homo sapien
tttacaagacgatacattgaaagggaaaacaga

SEQ ID NO: 859467 - DNA, 33 bp, Homo sapien
agttatgccaaattcaatgaactctccagtttc

SEQ ID NO: 859468 - DNA, 33 bp, Homo sapien
agttatgccaaattcagtgaactctccagtttc

SEQ ID NO: 859469 - DNA, 33 bp, Homo sapien
cagtctctccgaccacaatacaatcaaattaaa

SEQ ID NO: 859470 - DNA, 33 bp, Homo sapien
cagtctctccgaccaccatacaatcaaattaaa

SEQ ID NO: 859471 - DNA, 33 bp, Homo sapien
gcaaaataactagctaccatcattatgacagga

SEQ ID NO: 859472 - DNA, 33 bp, Homo sapien
gcaaaataactagctagcatcattatgacagga

SEQ ID NO: 859473 - DNA, 33 bp, Homo sapien
tcccctacaggaaaagactcaaattgtgaggat

SEQ ID NO: 859474 - DNA, 33 bp, Homo sapien
tcccctacaggaaaagtctcaaattgtgaggat

SEQ ID NO: 859475 - DNA, 33 bp, Homo sapien
ttagaggaaaactgcaagtaattttgactttaa

SEQ ID NO: 859476 - DNA, 33 bp, Homo sapien
ttagaggaaaactgcaggtaattttgactttaa

SEQ ID NO: 859477 - DNA, 33 bp, Homo sapien
attgtagggatgtacccgagttattcatgtatt

SEQ ID NO: 859478 - DNA, 33 bp, Homo sapien
attgtagggatgtaccggagttattcatgtatt

SEQ ID NO: 859479 - DNA, 33 bp, Homo sapien
ttttttctccattaaactgcccttccatctttc

SEQ ID NO: 859480 - DNA, 33 bp, Homo sapien
ttttttctccattaaattgcccttccatctttc

SEQ ID NO: 859481 - DNA, 33 bp, Homo sapien
tattgtagagtttacacgaaaaagcagaagaga

SEQ ID NO: 859482 - DNA, 33 bp, Homo sapien
tattgtagagtttacatgaaaaagcagaagaga

SEQ ID NO: 859483 - DNA, 33 bp, Homo sapien
aaataattgatgacagaagaaaacgcagaacag

SEQ ID NO: 859484 - DNA, 33 bp, Homo sapien
aaataattgatgacaggagaaaacgcagaacag

SEQ ID NO: 859485 - DNA, 33 bp, Homo sapien
attatttcatcactcaagtgttaaggccagtac

SEQ ID NO: 859486 - DNA, 33 bp, Homo sapien
attatttcatcactcacgtgttaaggccagtac

SEQ ID NO: 859487 - DNA, 33 bp, Homo sapien
caaaagcaaatccatacattcacagtgaactta

SEQ ID NO: 859488 - DNA, 33 bp, Homo sapien
caaaagcaaatccatatattcacagtgaactta

SEQ ID NO: 859489 - DNA, 33 bp, Homo sapien
tagatgtctaattctcactatgttcaaaaatca

SEQ ID NO: 859490 - DNA, 33 bp, Homo sapien
tagatgtctaattctccctatgttcaaaaatca

SEQ ID NO: 859491 - DNA, 33 bp, Homo sapien
agtaatttttgtccagaccaatgttctagagag

SEQ ID NO: 859492 - DNA, 33 bp, Homo sapien
agtaatttttgtccaggccaatgttctagagag

SEQ ID NO: 859493 - DNA, 33 bp, Homo sapien
attttttatcatcatgcattttaagcaatataa

SEQ ID NO: 859494 - DNA, 33 bp, Homo sapien
attttttatcatcatgtattttaagcaatataa

SEQ ID NO: 859495 - DNA, 33 bp, Homo sapien
gaaactaattggttcagaaaactgctaacccaa

SEQ ID NO: 859496 - DNA, 33 bp, Homo sapien
gaaactaattggttcataaaactgctaacccaa

SEQ ID NO: 859497 - DNA, 33 bp, Homo sapien
tatccatggaataaaacgaacggcttgttggct

SEQ ID NO: 859498 - DNA, 33 bp, Homo sapien
tatccatggaataaaatgaacggcttgttggct

SEQ ID NO: 859499 - DNA, 33 bp, Homo sapien
caacccttattcttaaagcttgcaagaggttta

SEQ ID NO: 859500 - DNA, 33 bp, Homo sapien
caacccttattcttaaggcttgcaagaggttta

SEQ ID NO: 859501 - DNA, 33 bp, Homo sapien
gtagcaaccacaagagaaaattgagatccaagg

SEQ ID NO: 859502 - DNA, 33 bp, Homo sapien
gtagcaaccacaagaggaaattgagatccaagg

SEQ ID NO: 859503 - DNA, 33 bp, Homo sapien
cttgtggttgctacaacgaagaagaacaaatgt

SEQ ID NO: 859504 - DNA, 33 bp, Homo sapien
cttgtggttgctacaatgaagaagaacaaatgt

SEQ ID NO: 859505 - DNA, 33 bp, Homo sapien
ttttaagcaatccttaccatccaacatccagta

SEQ ID NO: 859506 - DNA, 33 bp, Homo sapien
ttttaagcaatccttagcatccaacatccagta

SEQ ID NO: 859507 - DNA, 33 bp, Homo sapien
ttgtcacataaagcaacgtatttattctttagc

SEQ ID NO: 859508 - DNA, 33 bp, Homo sapien
ttgtcacataaagcaaggtatttattctttagc

SEQ ID NO: 859509 - DNA, 33 bp, Homo sapien
ctcttaagctaagtaaccagggctacaattagt

SEQ ID NO: 859510 - DNA, 33 bp, Homo sapien
ctcttaagctaagtaatcagggctacaattagt

SEQ ID NO: 859511 - DNA, 33 bp, Homo sapien
attctccacttaaaaagtttccacaggtcagaa

SEQ ID NO: 859512 - DNA, 33 bp, Homo sapien
attctccacttaaaaattttccacaggtcagaa

SEQ ID NO: 859513 - DNA, 33 bp, Homo sapien
gtttggagagttctcaaataaatgaaaacagat

SEQ ID NO: 859514 - DNA, 33 bp, Homo sapien
gtttggagagttctcagataaatgaaaacagat

SEQ ID NO: 859515 - DNA, 33 bp, Homo sapien
actctgctttatgatgccaaagcagtgggcaaa

SEQ ID NO: 859516 - DNA, 33 bp, Homo sapien
actctgctttatgatgtcaaagcagtgggcaaa

SEQ ID NO: 859517 - DNA, 33 bp, Homo sapien
agaagtgtaatctacacgaaagcatttccaagt

SEQ ID NO: 859518 - DNA, 33 bp, Homo sapien
agaagtgtaatctacatgaaagcatttccaagt

SEQ ID NO: 859519 - DNA, 33 bp, Homo sapien
ctgctgtgaggacagcaccaagatattcatgag

SEQ ID NO: 859520 - DNA, 33 bp, Homo sapien
ctgctgtgaggacagcgccaagatattcatgag

SEQ ID NO: 859521 - DNA, 33 bp, Homo sapien
gcatttaacatgacctcaacatagcagaaagac

SEQ ID NO: 859522 - DNA, 33 bp, Homo sapien
gcatttaacatgaccttaacatagcagaaagac

SEQ ID NO: 859523 - DNA, 33 bp, Homo sapien
ataaataagaaaaatgccaacagtagataaata

SEQ ID NO: 859524 - DNA, 33 bp, Homo sapien
ataaataagaaaaatggcaacagtagataaata

SEQ ID NO: 859525 - DNA, 33 bp, Homo sapien
agtgaatgtggagtacaaattttctgagaagta

SEQ ID NO: 859526 - DNA, 33 bp, Homo sapien
agtgaatgtggagtactaattttctgagaagta

SEQ ID NO: 859527 - DNA, 33 bp, Homo sapien
ggtatagttggaggaacaatcaatgtgggaaag

SEQ ID NO: 859528 - DNA, 33 bp, Homo sapien
ggtatagttggaggaataatcaatgtgggaaag

SEQ ID NO: 859529 - DNA, 33 bp, Homo sapien
tccaggtggaagagaacggtggaagtgacaggg

SEQ ID NO: 859530 - DNA, 33 bp, Homo sapien
tccaggtggaagagaatggtggaagtgacaggg

SEQ ID NO: 859531 - DNA, 33 bp, Homo sapien
gacctgccaaattgcaagaccgaaaaagctgta

SEQ ID NO: 859532 - DNA, 33 bp, Homo sapien
gacctgccaaattgcaggaccgaaaaagctgta

SEQ ID NO: 859533 - DNA, 33 bp, Homo sapien
ctgaaacactcactgcaataagctgtaacagta

SEQ ID NO: 859534 - DNA, 33 bp, Homo sapien
ctgaaacactcactgcgataagctgtaacagta

SEQ ID NO: 859535 - DNA, 33 bp, Homo sapien
tctgacagagccattaggtactgaaaatattct

SEQ ID NO: 859536 - DNA, 33 bp, Homo sapien
tctgacagagccattatgtactgaaaatattct

SEQ ID NO: 859537 - DNA, 33 bp, Homo sapien
cttcaacttctggcaagattataagtttcctga

SEQ ID NO: 859538 - DNA, 33 bp, Homo sapien
cttcaacttctggcaatattataagtttcctga

SEQ ID NO: 859539 - DNA, 33 bp, Homo sapien
tctaacagcaaaaacccggatctagtatctaaa

SEQ ID NO: 859540 - DNA, 33 bp, Homo sapien
tctaacagcaaaaacctggatctagtatctaaa

SEQ ID NO: 859541 - DNA, 33 bp, Homo sapien
catgtatagcagctgactaacaatgtttaatat

SEQ ID NO: 859542 - DNA, 33 bp, Homo sapien
catgtatagcagctgattaacaatgtttaatat

SEQ ID NO: 859543 - DNA, 33 bp, Homo sapien
tcgagagtttcctagacgtttataaggaaaatg

SEQ ID NO: 859544 - DNA, 33 bp, Homo sapien
tcgagagtttcctagatgtttataaggaaaatg

SEQ ID NO: 859545 - DNA, 33 bp, Homo sapien
agagatattattcagaaatttactcaagaattt

SEQ ID NO: 859546 - DNA, 33 bp, Homo sapien
agagatattattcagagatttactcaagaattt

SEQ ID NO: 859547 - DNA, 33 bp, Homo sapien
ttactctttgaggcgacgacaactttaagaaga

SEQ ID NO: 859548 - DNA, 33 bp, Homo sapien
ttactctttgaggcgatgacaactttaagaaga

SEQ ID NO: 859549 - DNA, 33 bp, Homo sapien
acatggtattggccaaagtttatagcttttagc

SEQ ID NO: 859550 - DNA, 33 bp, Homo sapien
acatggtattggccaacgtttatagcttttagc

SEQ ID NO: 859551 - DNA, 33 bp, Homo sapien
ttagtttctttttctaaccttcatgaagacatc

SEQ ID NO: 859552 - DNA, 33 bp, Homo sapien
ttagtttctttttctacccttcatgaagacatc

SEQ ID NO: 859553 - DNA, 33 bp, Homo sapien
aatagcctgtcataaaacaataagtacagtaaa

SEQ ID NO: 859554 - DNA, 33 bp, Homo sapien
aatagcctgtcataaagcaataagtacagtaaa

SEQ ID NO: 859555 - DNA, 33 bp, Homo sapien
agagaatctatggtaccctcctaatccttaaat

SEQ ID NO: 859556 - DNA, 33 bp, Homo sapien
agagaatctatggtactctcctaatccttaaat

SEQ ID NO: 859557 - DNA, 33 bp, Homo sapien
aaagaaaggagaaagacagaagcagctcattgt

SEQ ID NO: 859558 - DNA, 33 bp, Homo sapien
aaagaaaggagaaagagagaagcagctcattgt

SEQ ID NO: 859559 - DNA, 33 bp, Homo sapien
cttagatttcagaagaggtatcgaaatgcctgg

SEQ ID NO: 859560 - DNA, 33 bp, Homo sapien
cttagatttcagaagatgtatcgaaatgcctgg

SEQ ID NO: 859561 - DNA, 33 bp, Homo sapien; identical to SEQ ID NO: 859559

SEQ ID NO: 859562 - DNA, 33 bp, Homo sapien; identical to SEQ ID NO: 859560

SEQ ID NO: 859563 - DNA, 33 bp, Homo sapien
cacataaccttgggaaccacctctttcatcagc

SEQ ID NO: 859564 - DNA, 33 bp, Homo sapien
cacataaccttgggaagcacctctttcatcagc

SEQ ID NO: 859565 - DNA, 33 bp, Homo sapien
tttggtggactctgacaagtagtgatgccagat

SEQ ID NO: 859566 - DNA, 33 bp, Homo sapien
tttggtggactctgaccagtagtgatgccagat

SEQ ID NO: 859567 - DNA, 33 bp, Homo sapien
acatttgattcactgaaagacaaaattattttc

SEQ ID NO: 859568 - DNA, 33 bp, Homo sapien
acatttgattcactgagagacaaaattattttc

SEQ ID NO: 859569 - DNA, 33 bp, Homo sapien
agtaaggtgtcttcaacatatgcagttttgaca

SEQ ID NO: 859570 - DNA, 33 bp, Homo sapien
agtaaggtgtcttcaatatatgcagttttgaca

SEQ ID NO: 859571 - DNA, 33 bp, Homo sapien
gaaaagagaatgcttacgtattgttggtgagaa

SEQ ID NO: 859572 - DNA, 33 bp, Homo sapien
gaaaagagaatgcttatgtattgttggtgagaa

SEQ ID NO: 859573 - DNA, 33 bp, Homo sapien
cacaggtatggaatcaatccaagtgcctatcaa

SEQ ID NO: 859574 - DNA, 33 bp, Homo sapien
cacaggtatggaatcagtccaagtgcctatcaa

SEQ ID NO: 859575 - DNA, 33 bp, Homo sapien
cattctgcattgaacaagagattgtaatcaagt

SEQ ID NO: 859576 - DNA, 33 bp, Homo sapien
cattctgcattgaacaggagattgtaatcaagt

SEQ ID NO: 859577 - DNA, 33 bp, Homo sapien
aatagtggttacatcagctggctttgagtttat

SEQ ID NO: 859578 - DNA, 33 bp, Homo sapien
aatagtggttacatcatctggctttgagtttat

SEQ ID NO: 859579 - DNA, 33 bp, Homo sapien
cggcagttataccacaagaagccttcaaaatta

SEQ ID NO: 859580 - DNA, 33 bp, Homo sapien
cggcagttataccacatgaagccttcaaaatta

SEQ ID NO: 859581 - DNA, 33 bp, Homo sapien
agaaataccctcaaaacgctggtgacaaataaa

SEQ ID NO: 859582 - DNA, 33 bp, Homo sapien
agaaataccctcaaaatgctggtgacaaataaa

SEQ ID NO: 859583 - DNA, 33 bp, Homo sapien
cttcccttaccactcacaagataattacaaatg

SEQ ID NO: 859584 - DNA, 33 bp, Homo sapien
cttcccttaccactcagaagataattacaaatg

SEQ ID NO: 859585 - DNA, 33 bp, Homo sapien
taaagtgctaccttcacacaattaatttactgg

SEQ ID NO: 859586 - DNA, 33 bp, Homo sapien
taaagtgctaccttcatacaattaatttactgg

SEQ ID NO: 859587 - DNA, 33 bp, Homo sapien
ttcttttttaatgggactagctcactgataatg

SEQ ID NO: 859588 - DNA, 33 bp, Homo sapien
ttcttttttaatgggagtagctcactgataatg

SEQ ID NO: 859589 - DNA, 33 bp, Homo sapien
actttgaagcaagaaacagtgaatggcattttg

SEQ ID NO: 859590 - DNA, 33 bp, Homo sapien
actttgaagcaagaaatagtgaatggcattttg

SEQ ID NO: 859591 - DNA, 33 bp, Homo sapien
agatggagataagaaacttactggaaactggag

SEQ ID NO: 859592 - DNA, 33 bp, Homo sapien
agatggagataagaaatttactggaaactggag

SEQ ID NO: 859593 - DNA, 33 bp, Homo sapien
aaactcttagatcatacgcttttttaggtatgt

SEQ ID NO: 859594 - DNA, 33 bp, Homo sapien
aaactcttagatcatatgcttttttaggtatgt

SEQ ID NO: 859595 - DNA, 33 bp, Homo sapien
tgattaggtacaaagaaactggatgatacattc

SEQ ID NO: 859596 - DNA, 33 bp, Homo sapien
tgattaggtacaaagagactggatgatacattc

SEQ ID NO: 859597 - DNA, 33 bp, Homo sapien
tttgattgttgaactggaaaatcaatatgtatt

SEQ ID NO: 859598 - DNA, 33 bp, Homo sapien
tttgattgttgaactgtaaaatcaatatgtatt

SEQ ID NO: 859599 - DNA, 33 bp, Homo sapien
attcctaattgccaccaggtagtaatataaagc

SEQ ID NO: 859600 - DNA, 33 bp, Homo sapien
attcctaattgccaccgggtagtaatataaagc

SEQ ID NO: 859601 - DNA, 33 bp, Homo sapien
tgatttcttaggaagccgaagtagtattatttc

SEQ ID NO: 859602 - DNA, 33 bp, Homo sapien
tgatttcttaggaagctgaagtagtattatttc

SEQ ID NO: 859603 - DNA, 33 bp, Homo sapien
attatattttttagtacgtgtattggatttatg

SEQ ID NO: 859604 - DNA, 33 bp, Homo sapien
attatattttttagtatgtgtattggatttatg

SEQ ID NO: 859605 - DNA, 33 bp, Homo sapien
agcaaggtaaagaggcaatgagaccggagaatc

SEQ ID NO: 859606 - DNA, 33 bp, Homo sapien
agcaaggtaaagaggcgatgagaccggagaatc

SEQ ID NO: 859607 - DNA, 33 bp, Homo sapien
ctttgttcttttgctacgtccaccattttgtaa

SEQ ID NO: 859608 - DNA, 33 bp, Homo sapien
ctttgttcttttgctatgtccaccattttgtaa

SEQ ID NO: 859609 - DNA, 33 bp, Homo sapien
tatttagaattgcttcgcctggcaaacatttca

SEQ ID NO: 859610 - DNA, 33 bp, Homo sapien
tatttagaattgcttctcctggcaaacatttca

SEQ ID NO: 859611 - DNA, 33 bp, Homo sapien
gagcctgggtccatgaagttgggcttgaagcct

SEQ ID NO: 859612 - DNA, 33 bp, Homo sapien
gagcctgggtccatgaggttgggcttgaagcct

SEQ ID NO: 859613 - DNA, 33 bp, Homo sapien
atccatgtatcaataacgtttaagctgactgcc

SEQ ID NO: 859614 - DNA, 33 bp, Homo sapien
atccatgtatcaataatgtttaagctgactgcc

SEQ ID NO: 859615 - DNA, 33 bp, Homo sapien
aaaggaacaatctacaaaacaaccagaaaataa

SEQ ID NO: 859616 - DNA, 33 bp, Homo sapien
aaaggaacaatctacacaacaaccagaaaataa

SEQ ID NO: 859617 - DNA, 33 bp, Homo sapien
aagtatgttaagtcataatcaagtctgatgaat

SEQ ID NO: 859618 - DNA, 33 bp, Homo sapien
aagtatgttaagtcatgatcaagtctgatgaat

SEQ ID NO: 859619 - DNA, 33 bp, Homo sapien
ttatcatttttcacacactcaaaattttggtaa

SEQ ID NO: 859620 - DNA, 33 bp, Homo sapien
ttatcatttttcacaccctcaaaattttggtaa

SEQ ID NO: 859621 - DNA, 33 bp, Homo sapien
tgacccatattgcctgcaatttaagagattttc

SEQ ID NO: 859622 - DNA, 33 bp, Homo sapien
tgacccatattgcctgtaatttaagagattttc

SEQ ID NO: 859623 - DNA, 33 bp, Homo sapien
ggtggagttggcagtaaaatgaacagtcagaaa

SEQ ID NO: 859624 - DNA, 33 bp, Homo sapien
ggtggagttggcagtagaatgaacagtcagaaa

SEQ ID NO: 859625 - DNA, 33 bp, Homo sapien
gagagtaagcagttcaacaaccttacctgaccc

SEQ ID NO: 859626 - DNA, 33 bp, Homo sapien
gagagtaagcagttcagcaaccttacctgaccc

SEQ ID NO: 859627 - DNA, 33 bp, Homo sapien
ataaatatgtcaaataccacagagaaatgttga

SEQ ID NO: 859628 - DNA, 33 bp, Homo sapien
ataaatatgtcaaatatcacagagaaatgttga

SEQ ID NO: 859629 - DNA, 33 bp, Homo sapien
gaatgtaaaggaacaggcattttggaaaactat

SEQ ID NO: 859630 - DNA, 33 bp, Homo sapien
gaatgtaaaggaacagtcattttggaaaactat

SEQ ID NO: 859631 - DNA, 33 bp, Homo sapien
attttagattatttgaaaagtcttcagccaaaa

SEQ ID NO: 859632 - DNA, 33 bp, Homo sapien
attttagattatttgagaagtcttcagccaaaa

SEQ ID NO: 859633 - DNA, 33 bp, Homo sapien
gtcatttaaaaattaacgtcagcatataacaca

SEQ ID NO: 859634 - DNA, 33 bp, Homo sapien
gtcatttaaaaattaatgtcagcatataacaca

SEQ ID NO: 859635 - DNA, 33 bp, Homo sapien
ttacaaatgtcaccagaaaatccatactccatt

SEQ ID NO: 859636 - DNA, 33 bp, Homo sapien
ttacaaatgtcaccaggaaatccatactccatt

SEQ ID NO: 859637 - DNA, 33 bp, Homo sapien
cggtgtctttggacaaatatgtagtgtcatgca

SEQ ID NO: 859638 - DNA, 33 bp, Homo sapien
cggtgtctttggacaagtatgtagtgtcatgca

SEQ ID NO: 859639 - DNA, 33 bp, Homo sapien
gccaaaaatgctgtcaaagttcatgtctacatg

SEQ ID NO: 859640 - DNA, 33 bp, Homo sapien
gccaaaaatgctgtcacagttcatgtctacatg

SEQ ID NO: 859641 - DNA, 33 bp, Homo sapien
agcataagcagactcaatactttcttgtctttt

SEQ ID NO: 859642 - DNA, 33 bp, Homo sapien
agcataagcagactcagtactttcttgtctttt

SEQ ID NO: 859643 - DNA, 33 bp, Homo sapien
gatctggttatttacaaatgtgtagtatttccc

SEQ ID NO: 859644 - DNA, 33 bp, Homo sapien
gatctggttatttacagatgtgtagtatttccc

SEQ ID NO: 859645 - DNA, 33 bp, Homo sapien
aggtaagagaaagattcaaactgtgagaataac

SEQ ID NO: 859646 - DNA, 33 bp, Homo sapien
aggtaagagaaagattgaaactgtgagaataac

SEQ ID NO: 859647 - DNA, 33 bp, Homo sapien
acctgaagaagaggacacagttacgtgactctc

SEQ ID NO: 859648 - DNA, 33 bp, Homo sapien
acctgaagaagaggacccagttacgtgactctc

SEQ ID NO: 859649 - DNA, 33 bp, Homo sapien
aattgaggtaaagactaaataagcaacactcct

SEQ ID NO: 859650 - DNA, 33 bp, Homo sapien
aattgaggtaaagactgaataagcaacactcct

SEQ ID NO: 859651 - DNA, 33 bp, Homo sapien
agcaatatctgcataacgaatggtggtgagcat

SEQ ID NO: 859652 - DNA, 33 bp, Homo sapien
agcaatatctgcataatgaatggtggtgagcat

SEQ ID NO: 859653 - DNA, 33 bp, Homo sapien
tatgtttttatgtgaacatttggaaagataaac

SEQ ID NO: 859654 - DNA, 33 bp, Homo sapien
tatgtttttatgtgaatatttggaaagataaac

SEQ ID NO: 859655 - DNA, 33 bp, Homo sapien
ttaagtatccacttaaaatctagcttttcactg

SEQ ID NO: 859656 - DNA, 33 bp, Homo sapien
ttaagtatccacttaatatctagcttttcactg

SEQ ID NO: 859657 - DNA, 33 bp, Homo sapien
ctcctttgttctttggcatggaagaagtctatg

SEQ ID NO: 859658 - DNA, 33 bp, Homo sapien
ctcctttgttctttgggatggaagaagtctatg

SEQ ID NO: 859659 - DNA, 33 bp, Homo sapien
atatctggcctggagacatttttgcctaggcaa

SEQ ID NO: 859660 - DNA, 33 bp, Homo sapien
atatctggcctggagagatttttgcctaggcaa

SEQ ID NO: 859661 - DNA, 33 bp, Homo sapien
ttttgatgtgcaaagaaattggctaaatacttt

SEQ ID NO: 859662 - DNA, 33 bp, Homo sapien
ttttgatgtgcaaagagattggctaaatacttt

SEQ ID NO: 859663 - DNA, 33 bp, Homo sapien
acagaaaaactgagtgaaaaacacagcgattta

SEQ ID NO: 859664 - DNA, 33 bp, Homo sapien
acagaaaaactgagtggaaaacacagcgattta

SEQ ID NO: 859665 - DNA, 33 bp, Homo sapien
aaaaaactattattcaaaatacgcaaacaactg

SEQ ID NO: 859666 - DNA, 33 bp, Homo sapien
aaaaaactattattcacaatacgcaaacaactg

SEQ ID NO: 859667 - DNA, 33 bp, Homo sapien
ctgatttttgacagagaaggtaaagcaattcaa

SEQ ID NO: 859668 - DNA, 33 bp, Homo sapien
ctgatttttgacagaggaggtaaagcaattcaa

SEQ ID NO: 859669 - DNA, 33 bp, Homo sapien
aaatagattcacagaaatgtagtcagctgattt

SEQ ID NO: 859670 - DNA, 33 bp, Homo sapien
aaatagattcacagaattgtagtcagctgattt

SEQ ID NO: 859671 - DNA, 33 bp, Homo sapien
tagctatgcagagataagaagagtgcttgaacc

SEQ ID NO: 859672 - DNA, 33 bp, Homo sapien
tagctatgcagagataggaagagtgcttgaacc

SEQ ID NO: 859673 - DNA, 33 bp, Homo sapien
tctgctttgactgcctaacaatatctttctgac

SEQ ID NO: 859674 - DNA, 33 bp, Homo sapien
tctgctttgactgcctgacaatatctttctgac

SEQ ID NO: 859675 - DNA, 33 bp, Homo sapien
aaatattgagtttggaaatcattttttcatcac

SEQ ID NO: 859676 - DNA, 33 bp, Homo sapien
aaatattgagtttggacatcattttttcatcac

SEQ ID NO: 859677 - DNA, 33 bp, Homo sapien
actaaagggttcataactattaggagtagtaac

SEQ ID NO: 859678 - DNA, 33 bp, Homo sapien
actaaagggttcataattattaggagtagtaac

SEQ ID NO: 859679 - DNA, 33 bp, Homo sapien
tagtaacattctaaacagtattatcaggttata

SEQ ID NO: 859680 - DNA, 33 bp, Homo sapien
tagtaacattctaaacggtattatcaggttata

SEQ ID NO: 859681 - DNA, 33 bp, Homo sapien
agctctagtgaatcaaaattaaatactatcagg

SEQ ID NO: 859682 - DNA, 33 bp, Homo sapien
agctctagtgaatcaagattaaatactatcagg

SEQ ID NO: 859683 - DNA, 33 bp, Homo sapien
aatggaatatagtcacaactctaaagtttgata

SEQ ID NO: 859684 - DNA, 33 bp, Homo sapien
aatggaatatagtcaccactctaaagtttgata

SEQ ID NO: 859685 - DNA, 33 bp, Homo sapien
catgagaaattataaccaaacaagtagatatga

SEQ ID NO: 859686 - DNA, 33 bp, Homo sapien
catgagaaattataacgaaacaagtagatatga

SEQ ID NO: 859687 - DNA, 33 bp, Homo sapien
aatgtctctttatcccgaaatacttcagcatct

SEQ ID NO: 859688 - DNA, 33 bp, Homo sapien
aatgtctctttatccctaaatacttcagcatct

SEQ ID NO: 859689 - DNA, 33 bp, Homo sapien
ttttgaaaattaaaaaaattatcagtggtgcaa

SEQ ID NO: 859690 - DNA, 33 bp, Homo sapien
ttttgaaaattaaaaacattatcagtggtgcaa

SEQ ID NO: 859691 - DNA, 33 bp, Homo sapien
aaggaaatgttgagaaagtattctagaataaag

SEQ ID NO: 859692 - DNA, 33 bp, Homo sapien
aaggaaatgttgagaacgtattctagaataaag

SEQ ID NO: 859693 - DNA, 33 bp, Homo sapien
gaaaaactgccttaaagatgtcaactaataata

SEQ ID NO: 859694 - DNA, 33 bp, Homo sapien
gaaaaactgccttaaatatgtcaactaataata

SEQ ID NO: 859695 - DNA, 33 bp, Homo sapien
aactgctgtgatccaacaagtctaagtaatata

SEQ ID NO: 859696 - DNA, 33 bp, Homo sapien
aactgctgtgatccaataagtctaagtaatata

SEQ ID NO: 859697 - DNA, 33 bp, Homo sapien
gatggctttggtggaaaaatttagccttaagtg

SEQ ID NO: 859698 - DNA, 33 bp, Homo sapien
gatggctttggtggaataatttagccttaagtg

SEQ ID NO: 859699 - DNA, 33 bp, Homo sapien
attagtgggtatgtggaagaattgagttatctg

SEQ ID NO: 859700 - DNA, 33 bp, Homo sapien
attagtgggtatgtggtagaattgagttatctg

SEQ ID NO: 859701 - DNA, 33 bp, Homo sapien
taccatgaccatcctacgtaaaatcgcaaactc

SEQ ID NO: 859702 - DNA, 33 bp, Homo sapien
taccatgaccatcctatgtaaaatcgcaaactc

SEQ ID NO: 859703 - DNA, 33 bp, Homo sapien
tttttcattaattttaccaaacgtaccatacta

SEQ ID NO: 859704 - DNA, 33 bp, Homo sapien
tttttcattaattttatcaaacgtaccatacta

SEQ ID NO: 859705 - DNA, 33 bp, Homo sapien
aatgtaatgtggaataaagaattggtcctgaac

SEQ ID NO: 859706 - DNA, 33 bp, Homo sapien
aatgtaatgtggaatacagaattggtcctgaac

SEQ ID NO: 859707 - DNA, 33 bp, Homo sapien
gaaatctagggaaggcaaaattatagagatagt

SEQ ID NO: 859708 - DNA, 33 bp, Homo sapien
gaaatctagggaaggcgaaattatagagatagt

SEQ ID NO: 859709 - DNA, 33 bp, Homo sapien
tttccttttgttacataacctcacaagtaattg

SEQ ID NO: 859710 - DNA, 33 bp, Homo sapien
tttccttttgttacatgacctcacaagtaattg

SEQ ID NO: 859711 - DNA, 33 bp, Homo sapien
aatgcaaagtgacagaatataaaccgatcccac

SEQ ID NO: 859712 - DNA, 33 bp, Homo sapien
aatgcaaagtgacagagtataaaccgatcccac

SEQ ID NO: 859713 - DNA, 33 bp, Homo sapien
ctgttcaatgagaatacgtgggcgcaaggagag

SEQ ID NO: 859714 - DNA, 33 bp, Homo sapien
ctgttcaatgagaatatgtgggcgcaaggagag

SEQ ID NO: 859715 - DNA, 33 bp, Homo sapien
aggacatcggcacaggaaaatgtttcatggcga

SEQ ID NO: 859716 - DNA, 33 bp, Homo sapien
aggacatcggcacaggcaaatgtttcatggcga

SEQ ID NO: 859717 - DNA, 33 bp, Homo sapien
tccttgagaaacaacaaggaaaatgagcaataa

SEQ ID NO: 859718 - DNA, 33 bp, Homo sapien
tccttgagaaacaacatggaaaatgagcaataa

SEQ ID NO: 859719 - DNA, 33 bp, Homo sapien
aaaagttcaatcaaaacgcttaagtcactctat

SEQ ID NO: 859720 - DNA, 33 bp, Homo sapien
aaaagttcaatcaaaatgcttaagtcactctat

SEQ ID NO: 859721 - DNA, 33 bp, Homo sapien
aataatgcaggtaaagcaattggtcctttttat

SEQ ID NO: 859722 - DNA, 33 bp, Homo sapien
aataatgcaggtaaagtaattggtcctttttat

SEQ ID NO: 859723 - DNA, 33 bp, Homo sapien
tggaagagcttccttacagagttagcatccaca

SEQ ID NO: 859724 - DNA, 33 bp, Homo sapien
tggaagagcttccttatagagttagcatccaca

SEQ ID NO: 859725 - DNA, 33 bp, Homo sapien
tatatatgtattagctcaacttcaaatgaccta

SEQ ID NO: 859726 - DNA, 33 bp, Homo sapien
tatatatgtattagctgaacttcaaatgaccta

SEQ ID NO: 859727 - DNA, 33 bp, Homo sapien
aaagagaacattatgaagaaagaactttatatt

SEQ ID NO: 859728 - DNA, 33 bp, Homo sapien
aaagagaacattatgaggaaagaactttatatt

SEQ ID NO: 859729 - DNA, 33 bp, Homo sapien
gagattatttttctaccccaacacatgttaaaa

SEQ ID NO: 859730 - DNA, 33 bp, Homo sapien
gagattatttttctacgccaacacatgttaaaa

SEQ ID NO: 859731 - DNA, 33 bp, Homo sapien
tgcaatcttcagcttcacaattgatatcattgc

SEQ ID NO: 859732 - DNA, 33 bp, Homo sapien
tgcaatcttcagcttcgcaattgatatcattgc

SEQ ID NO: 859733 - DNA, 33 bp, Homo sapien
actatatgaaaaagacacaagcatatgaatgtc

SEQ ID NO: 859734 - DNA, 33 bp, Homo sapien
actatatgaaaaagacccaagcatatgaatgtc

SEQ ID NO: 859735 - DNA, 33 bp, Homo sapien
cagcttactgcatgataactgatgtgctcaata

SEQ ID NO: 859736 - DNA, 33 bp, Homo sapien
cagcttactgcatgattactgatgtgctcaata

SEQ ID NO: 859737 - DNA, 33 bp, Homo sapien
ggaacataggaaggcccagcattttgaatcagc

SEQ ID NO: 859738 - DNA, 33 bp, Homo sapien
ggaacataggaaggcctagcattttgaatcagc

SEQ ID NO: 859739 - DNA, 33 bp, Homo sapien
tttgtgtttagaccgtcaaaaaatacctacaag

SEQ ID NO: 859740 - DNA, 33 bp, Homo sapien
tttgtgtttagaccgtgaaaaaatacctacaag

SEQ ID NO: 859741 - DNA, 33 bp, Homo sapien
tccagcttatttgatacgatgctttagctgtgt

SEQ ID NO: 859742 - DNA, 33 bp, Homo sapien
tccagcttatttgatatgatgctttagctgtgt

SEQ ID NO: 859743 - DNA, 33 bp, Homo sapien
caaataagctggaaacaaagaagtccatgtaat

SEQ ID NO: 859744 - DNA, 33 bp, Homo sapien
caaataagctggaaacgaagaagtccatgtaat

SEQ ID NO: 859745 - DNA, 33 bp, Homo sapien
aagtatggtaaaagtcacaagattggaaccttt

SEQ ID NO: 859746 - DNA, 33 bp, Homo sapien
aagtatggtaaaagtcgcaagattggaaccttt

SEQ ID NO: 859747 - DNA, 33 bp, Homo sapien
cttgactcaccatctaatacatgcttgcaacaa

SEQ ID NO: 859748 - DNA, 33 bp, Homo sapien
cttgactcaccatctagtacatgcttgcaacaa

SEQ ID NO: 859749 - DNA, 33 bp, Homo sapien
ttttgcaaatgggagacggtgcaggagtttgat

SEQ ID NO: 859750 - DNA, 33 bp, Homo sapien
ttttgcaaatgggagatggtgcaggagtttgat

SEQ ID NO: 859751 - DNA, 33 bp, Homo sapien
cctcaaagtaagttcaagtaaatcagacactat

SEQ ID NO: 859752 - DNA, 33 bp, Homo sapien
cctcaaagtaagttcacgtaaatcagacactat

SEQ ID NO: 859753 - DNA, 33 bp, Homo sapien
ctctgcttgctttatacagacaaatatttacac

SEQ ID NO: 859754 - DNA, 33 bp, Homo sapien
ctctgcttgctttatagagacaaatatttacac

SEQ ID NO: 859755 - DNA, 33 bp, Homo sapien
tttagcagaaaaagaaacttagcactcgtcatt

SEQ ID NO: 859756 - DNA, 33 bp, Homo sapien
tttagcagaaaaagaaccttagcactcgtcatt

SEQ ID NO: 859757 - DNA, 33 bp, Homo sapien
acacagatgctgcctccgaatgtacttgggaat

SEQ ID NO: 859758 - DNA, 33 bp, Homo sapien
acacagatgctgcctcggaatgtacttgggaat

SEQ ID NO: 859759 - DNA, 33 bp, Homo sapien
taagtttaatttgctcacagttcctcaggctgt

SEQ ID NO: 859760 - DNA, 33 bp, Homo sapien
taagtttaatttgctcgcagttcctcaggctgt

SEQ ID NO: 859761 - DNA, 33 bp, Homo sapien
cttagtgcaactctgacggattcaggatctgtc

SEQ ID NO: 859762 - DNA, 33 bp, Homo sapien
cttagtgcaactctgatggattcaggatctgtc

SEQ ID NO: 859763 - DNA, 33 bp, Homo sapien
ctaacatggcacctaaagactatcattctccta

SEQ ID NO: 859764 - DNA, 33 bp, Homo sapien
ctaacatggcacctaatgactatcattctccta

SEQ ID NO: 859765 - DNA, 33 bp, Homo sapien
attttgtaactttgggaaaaatgccctttccag

SEQ ID NO: 859766 - DNA, 33 bp, Homo sapien
attttgtaactttggggaaaatgccctttccag

SEQ ID NO: 859767 - DNA, 33 bp, Homo sapien
tgcctggctgaaggccaaattttgagaaataac

SEQ ID NO: 859768 - DNA, 33 bp, Homo sapien
tgcctggctgaaggccgaattttgagaaataac

SEQ ID NO: 859769 - DNA, 33 bp, Homo sapien
tgattatgcaagtgtgaactcaggtataaactt

SEQ ID NO: 859770 - DNA, 33 bp, Homo sapien
tgattatgcaagtgtgcactcaggtataaactt

SEQ ID NO: 859771 - DNA, 33 bp, Homo sapien
aatgggtgcatctgaaacaactaacccatgggc

SEQ ID NO: 859772 - DNA, 33 bp, Homo sapien
aatgggtgcatctgaagcaactaacccatgggc

SEQ ID NO: 859773 - DNA, 33 bp, Homo sapien
ctcactcattaccaacacaggtgtgcaggcagc

SEQ ID NO: 859774 - DNA, 33 bp, Homo sapien
ctcactcattaccaacgcaggtgtgcaggcagc

SEQ ID NO: 859775 - DNA, 33 bp, Homo sapien
taatttggccttgagaccatgtagagctagaac

SEQ ID NO: 859776 - DNA, 33 bp, Homo sapien
taatttggccttgagatcatgtagagctagaac

SEQ ID NO: 859777 - DNA, 33 bp, Homo sapien
aaattccattaaactcacttgaaaacttatatg

SEQ ID NO: 859778 - DNA, 33 bp, Homo sapien
aaattccattaaactctcttgaaaacttatatg

SEQ ID NO: 859779 - DNA, 33 bp, Homo sapien
aaaacagactcctgtacgcaaaaatgtagctgt

SEQ ID NO: 859780 - DNA, 33 bp, Homo sapien
aaaacagactcctgtatgcaaaaatgtagctgt

SEQ ID NO: 859781 - DNA, 33 bp, Homo sapien
ccagtactgttgagaaatagcatcaatgaggaa

SEQ ID NO: 859782 - DNA, 33 bp, Homo sapien
ccagtactgttgagaagtagcatcaatgaggaa

SEQ ID NO: 859783 - DNA, 33 bp, Homo sapien
ctacatcctgtgtgagactcaaagaagccagtc

SEQ ID NO: 859784 - DNA, 33 bp, Homo sapien
ctacatcctgtgtgagcctcaaagaagccagtc

SEQ ID NO: 859785 - DNA, 33 bp, Homo sapien
gcagctataggtcctaacatcctctcaaatttt

SEQ ID NO: 859786 - DNA, 33 bp, Homo sapien
gcagctataggtcctagcatcctctcaaatttt

SEQ ID NO: 859787 - DNA, 33 bp, Homo sapien
tgaaggagctgtagaaaagaacagatgggagtc

SEQ ID NO: 859788 - DNA, 33 bp, Homo sapien
tgaaggagctgtagaatagaacagatgggagtc

SEQ ID NO: 859789 - DNA, 33 bp, Homo sapien
ttttgtttcaagatagccaggactgtttaaacc

SEQ ID NO: 859790 - DNA, 33 bp, Homo sapien
ttttgtttcaagataggcaggactgtttaaacc

SEQ ID NO: 859791 - DNA, 33 bp, Homo sapien
ctatcttgaaacaaaacgaattagtggataaat

SEQ ID NO: 859792 - DNA, 33 bp, Homo sapien
ctatcttgaaacaaaatgaattagtggataaat

SEQ ID NO: 859793 - DNA, 33 bp, Homo sapien
tttgagttaaaattcaagcaaacattatttaaa

SEQ ID NO: 859794 - DNA, 33 bp, Homo sapien
tttgagttaaaattcatgcaaacattatttaaa

SEQ ID NO: 859795 - DNA, 33 bp, Homo sapien
tggatttctagaggagaataaaatagccagagc

SEQ ID NO: 859796 - DNA, 33 bp, Homo sapien
tggatttctagaggaggataaaatagccagagc

SEQ ID NO: 859797 - DNA, 33 bp, Homo sapien
tggtagacaagaaacactagatttgattcagcc

SEQ ID NO: 859798 - DNA, 33 bp, Homo sapien
tggtagacaagaaacagtagatttgattcagcc

SEQ ID NO: 859799 - DNA, 33 bp, Homo sapien
tatgatgggaaggaacaactaccactgagtgaa

SEQ ID NO: 859800 - DNA, 33 bp, Homo sapien
tatgatgggaaggaacgactaccactgagtgaa

SEQ ID NO: 859801 - DNA, 33 bp, Homo sapien
atattgcagtggataccagaagaaccaaacatc

SEQ ID NO: 859802 - DNA, 33 bp, Homo sapien
atattgcagtggatactagaagaaccaaacatc

SEQ ID NO: 859803 - DNA, 33 bp, Homo sapien
cagaaaacctatccacaaagacagaaaagaaag

SEQ ID NO: 859804 - DNA, 33 bp, Homo sapien
cagaaaacctatccaccaagacagaaaagaaag

SEQ ID NO: 859805 - DNA, 33 bp, Homo sapien
ggtgttacatgaaaaccaagagcaaggatgcac

SEQ ID NO: 859806 - DNA, 33 bp, Homo sapien
ggtgttacatgaaaactaagagcaaggatgcac

SEQ ID NO: 859807 - DNA, 33 bp, Homo sapien
gaggcggaagcatttgaaagtaggtgtatcggg

SEQ ID NO: 859808 - DNA, 33 bp, Homo sapien
gaggcggaagcatttggaagtaggtgtatcggg

SEQ ID NO: 859809 - DNA, 33 bp, Homo sapien
ctgatttaggttcagacaaaaattgtgctgggt

SEQ ID NO: 859810 - DNA, 33 bp, Homo sapien
ctgatttaggttcagagaaaaattgtgctgggt

SEQ ID NO: 859811 - DNA, 33 bp, Homo sapien
ccttagtggtcttgcacaaaatctggaacagtt

SEQ ID NO: 859812 - DNA, 33 bp, Homo sapien
ccttagtggtcttgcataaaatctggaacagtt

SEQ ID NO: 859813 - DNA, 33 bp, Homo sapien
gcagcagaaaatgcaccaagacatcatctaatt

SEQ ID NO: 859814 - DNA, 33 bp, Homo sapien
gcagcagaaaatgcactaagacatcatctaatt

SEQ ID NO: 859815 - DNA, 33 bp, Homo sapien
gggctagtcacatctaagtttgttgagtaaaga

SEQ ID NO: 859816 - DNA, 33 bp, Homo sapien
gggctagtcacatctatgtttgttgagtaaaga

SEQ ID NO: 859817 - DNA, 33 bp, Homo sapien
aaactacaatatacaaaacccagtgtcctgtga

SEQ ID NO: 859818 - DNA, 33 bp, Homo sapien
aaactacaatatacaatacccagtgtcctgtga

SEQ ID NO: 859819 - DNA, 33 bp, Homo sapien
ttaaagtctgttataactgatctaagaatactg

SEQ ID NO: 859820 - DNA, 33 bp, Homo sapien
ttaaagtctgttataattgatctaagaatactg

SEQ ID NO: 859821 - DNA, 33 bp, Homo sapien
aaattaagaaggacaactaagggtgttacataa

SEQ ID NO: 859822 - DNA, 33 bp, Homo sapien
aaattaagaaggacaattaagggtgttacataa

SEQ ID NO: 859823 - DNA, 33 bp, Homo sapien
ttcatttcttaattacaaaaaaatcactcatat

SEQ ID NO: 859824 - DNA, 33 bp, Homo sapien
ttcatttcttaattacgaaaaaatcactcatat

SEQ ID NO: 859825 - DNA, 33 bp, Homo sapien
caagagatctttctgaacgcaaaaagatataac

SEQ ID NO: 859826 - DNA, 33 bp, Homo sapien
caagagatctttctgagcgcaaaaagatataac

SEQ ID NO: 859827 - DNA, 33 bp, Homo sapien
ggatctccattgccataaaacagataggcatct

SEQ ID NO: 859828 - DNA, 33 bp, Homo sapien
ggatctccattgccatgaaacagataggcatct

SEQ ID NO: 859829 - DNA, 33 bp, Homo sapien
tctcacatctaatgaaacaattcaaactcaaaa

SEQ ID NO: 859830 - DNA, 33 bp, Homo sapien
tctcacatctaatgaagcaattcaaactcaaaa

SEQ ID NO: 859831 - DNA, 33 bp, Homo sapien
caatacactgaatagtaaacaaaggatttgtga

SEQ ID NO: 859832 - DNA, 33 bp, Homo sapien
caatacactgaatagtgaacaaaggatttgtga

SEQ ID NO: 859833 - DNA, 33 bp, Homo sapien
tacttctcaagccacaagtgtgataccatgggt

SEQ ID NO: 859834 - DNA, 33 bp, Homo sapien
tacttctcaagccacaggtgtgataccatgggt

SEQ ID NO: 859835 - DNA, 33 bp, Homo sapien
tggtaaccatgatagaagtaacatagacccaca

SEQ ID NO: 859836 - DNA, 33 bp, Homo sapien
tggtaaccatgatagaggtaacatagacccaca

SEQ ID NO: 859837 - DNA, 33 bp, Homo sapien
accactggagaagagacgaaaagttaccatggc

SEQ ID NO: 859838 - DNA, 33 bp, Homo sapien
accactggagaagagatgaaaagttaccatggc

SEQ ID NO: 859839 - DNA, 33 bp, Homo sapien
acatatgtcaggagaaagcaccttaataaaact

SEQ ID NO: 859840 - DNA, 33 bp, Homo sapien
acatatgtcaggagaaggcaccttaataaaact

SEQ ID NO: 859841 - DNA, 33 bp, Homo sapien
ttatcacttccaaataacctctagaaaggacat

SEQ ID NO: 859842 - DNA, 33 bp, Homo sapien
ttatcacttccaaatagcctctagaaaggacat

SEQ ID NO: 859843 - DNA, 33 bp, Homo sapien
aagtgataatatggcactagaaactataagtga

SEQ ID NO: 859844 - DNA, 33 bp, Homo sapien
aagtgataatatggcattagaaactataagtga

SEQ ID NO: 859845 - DNA, 33 bp, Homo sapien
aaattgttaacagaaacctggtgaccacggaaa

SEQ ID NO: 859846 - DNA, 33 bp, Homo sapien
aaattgttaacagaaagctggtgaccacggaaa

SEQ ID NO: 859847 - DNA, 33 bp, Homo sapien
aggatttgactaaggacggaatatggtaataat

SEQ ID NO: 859848 - DNA, 33 bp, Homo sapien
aggatttgactaaggatggaatatggtaataat

SEQ ID NO: 859849 - DNA, 33 bp, Homo sapien
ataataaaaatggaaacgttgtatcatgagttc

SEQ ID NO: 859850 - DNA, 33 bp, Homo sapien
ataataaaaatggaaatgttgtatcatgagttc

SEQ ID NO: 859851 - DNA, 33 bp, Homo sapien
ataataacctatccataaagcactgcagaacag

SEQ ID NO: 859852 - DNA, 33 bp, Homo sapien
ataataacctatccatgaagcactgcagaacag

SEQ ID NO: 859853 - DNA, 33 bp, Homo sapien
agccacttcactaggaactagcatactacttgg

SEQ ID NO: 859854 - DNA, 33 bp, Homo sapien
agccacttcactaggagctagcatactacttgg

SEQ ID NO: 859855 - DNA, 33 bp, Homo sapien
cttttctcttgtcccacgtcctgaacaacatgg

SEQ ID NO: 859856 - DNA, 33 bp, Homo sapien
cttttctcttgtcccatgtcctgaacaacatgg

SEQ ID NO: 859857 - DNA, 33 bp, Homo sapien
tttaattaacaatacaacttgaaacatatttca

SEQ ID NO: 859858 - DNA, 33 bp, Homo sapien
tttaattaacaatacatcttgaaacatatttca

SEQ ID NO: 859859 - DNA, 33 bp, Homo sapien
acaattgaaatacagaaatgaatagaactcaaa

SEQ ID NO: 859860 - DNA, 33 bp, Homo sapien
acaattgaaatacagagatgaatagaactcaaa

SEQ ID NO: 859861 - DNA, 33 bp, Homo sapien
gaattacctaaaatgacgcatataaatacttag

SEQ ID NO: 859862 - DNA, 33 bp, Homo sapien
gaattacctaaaatgaggcatataaatacttag

SEQ ID NO: 859863 - DNA, 33 bp, Homo sapien
ctctttcctttacctacagtagctcttatattc

SEQ ID NO: 859864 - DNA, 33 bp, Homo sapien
ctctttcctttacctagagtagctcttatattc

SEQ ID NO: 859865 - DNA, 33 bp, Homo sapien
caaaaaaaacaaacaaatgaacttcaaattttt

SEQ ID NO: 859866 - DNA, 33 bp, Homo sapien
caaaaaaaacaaacaagtgaacttcaaattttt

SEQ ID NO: 859867 - DNA, 33 bp, Homo sapien
gatatcagcttaaccacagtagaggcagagtcc

SEQ ID NO: 859868 - DNA, 33 bp, Homo sapien
gatatcagcttaaccatagtagaggcagagtcc

SEQ ID NO: 859869 - DNA, 33 bp, Homo sapien
atagctgagatcatgcaaaagctttgtccttta

SEQ ID NO: 859870 - DNA, 33 bp, Homo sapien
atagctgagatcatgccaaagctttgtccttta

SEQ ID NO: 859871 - DNA, 33 bp, Homo sapien
ctctgtaaccaacaaactcatagagtcttcagc

SEQ ID NO: 859872 - DNA, 33 bp, Homo sapien
ctctgtaaccaacaaagtcatagagtcttcagc

SEQ ID NO: 859873 - DNA, 33 bp, Homo sapien
catgattgaataaatcactggccattactgact

SEQ ID NO: 859874 - DNA, 33 bp, Homo sapien
catgattgaataaatcgctggccattactgact

SEQ ID NO: 859875 - DNA, 33 bp, Homo sapien
aaatcactcaaaattcaccacagaaatatggag

SEQ ID NO: 859876 - DNA, 33 bp, Homo sapien
aaatcactcaaaattcgccacagaaatatggag

SEQ ID NO: 859877 - DNA, 33 bp, Homo sapien
attcagctggttgttacagcacactttttgtca

SEQ ID NO: 859878 - DNA, 33 bp, Homo sapien
attcagctggttgttatagcacactttttgtca

SEQ ID NO: 859879 - DNA, 33 bp, Homo sapien
atctctaatggtgtcacagtctcacagcttggc

SEQ ID NO: 859880 - DNA, 33 bp, Homo sapien
atctctaatggtgtcatagtctcacagcttggc

SEQ ID NO: 859881 - DNA, 33 bp, Homo sapien
ggcattgtgcaagcaaatctatgttatagacac

SEQ ID NO: 859882 - DNA, 33 bp, Homo sapien
ggcattgtgcaagcaagtctatgttatagacac

SEQ ID NO: 859883 - DNA, 33 bp, Homo sapien
aacattggaagacttaagaatatgcttgtcttt

SEQ ID NO: 859884 - DNA, 33 bp, Homo sapien
aacattggaagacttacgaatatgcttgtcttt

SEQ ID NO: 859885 - DNA, 33 bp, Homo sapien
tttcagggatgtcagtgaattgtagatttgatc

SEQ ID NO: 859886 - DNA, 33 bp, Homo sapien
tttcagggatgtcagttaattgtagatttgatc

SEQ ID NO: 859887 - DNA, 33 bp, Homo sapien
tgctgactgcagaagcaaagagtgtacaagctt

SEQ ID NO: 859888 - DNA, 33 bp, Homo sapien
tgctgactgcagaagcgaagagtgtacaagctt

SEQ ID NO: 859889 - DNA, 33 bp, Homo sapien
gtccaggcaattatacagagcagaaacaccata

SEQ ID NO: 859890 - DNA, 33 bp, Homo sapien
gtccaggcaattatacggagcagaaacaccata

SEQ ID NO: 859891 - DNA, 33 bp, Homo sapien
ctgttctcccagattacgacctgcagccttgaa

SEQ ID NO: 859892 - DNA, 33 bp, Homo sapien
ctgttctcccagattatgacctgcagccttgaa

SEQ ID NO: 859893 - DNA, 33 bp, Homo sapien
tctgttaagaagaaccaaagtgattgaaattgg

SEQ ID NO: 859894 - DNA, 33 bp, Homo sapien
tctgttaagaagaaccgaagtgattgaaattgg

SEQ ID NO: 859895 - DNA, 33 bp, Homo sapien
agggatcagacaaaagaactccaacattctcac

SEQ ID NO: 859896 - DNA, 33 bp, Homo sapien
agggatcagacaaaagtactccaacattctcac

SEQ ID NO: 859897 - DNA, 33 bp, Homo sapien
atgctttgcaatgttacgattttacttaaaaaa

SEQ ID NO: 859898 - DNA, 33 bp, Homo sapien
atgctttgcaatgttatgattttacttaaaaaa

SEQ ID NO: 859899 - DNA, 33 bp, Homo sapien
ggagtttctgttcactcaaagcaaaaggcctat

SEQ ID NO: 859900 - DNA, 33 bp, Homo sapien
ggagtttctgttcacttaaagcaaaaggcctat

SEQ ID NO: 859901 - DNA, 33 bp, Homo sapien
tttactgattttaggacgtctaattcataaatt

SEQ ID NO: 859902 - DNA, 33 bp, Homo sapien
tttactgattttaggatgtctaattcataaatt

SEQ ID NO: 859903 - DNA, 33 bp, Homo sapien
tcatgccaaagtagtacatttatttgtgcttgg

SEQ ID NO: 859904 - DNA, 33 bp, Homo sapien
tcatgccaaagtagtatatttatttgtgcttgg

SEQ ID NO: 859905 - DNA, 33 bp, Homo sapien
gaatccaaattgcaaaaatttcttgcctcttct

SEQ ID NO: 859906 - DNA, 33 bp, Homo sapien
gaatccaaattgcaaacatttcttgcctcttct

SEQ ID NO: 859907 - DNA, 33 bp, Homo sapien
caaaatctcactcgaacgcactcatggaaatta

SEQ ID NO: 859908 - DNA, 33 bp, Homo sapien
caaaatctcactcgaatgcactcatggaaatta

SEQ ID NO: 859909 - DNA, 33 bp, Homo sapien
tgggctcacttgccgcaccctttctgagaacac

SEQ ID NO: 859910 - DNA, 33 bp, Homo sapien
tgggctcacttgccgcgccctttctgagaacac

SEQ ID NO: 859911 - DNA, 33 bp, Homo sapien
agacgtggaaacatgacatattaaaacatagaa

SEQ ID NO: 859912 - DNA, 33 bp, Homo sapien
agacgtggaaacatgatatattaaaacatagaa

SEQ ID NO: 859913 - DNA, 33 bp, Homo sapien
gcttttttcaattttaccattgactcacattta

SEQ ID NO: 859914 - DNA, 33 bp, Homo sapien
gcttttttcaattttatcattgactcacattta

SEQ ID NO: 859915 - DNA, 33 bp, Homo sapien
cagatgactctggagacggcagtagcaacagag

SEQ ID NO: 859916 - DNA, 33 bp, Homo sapien
cagatgactctggagatggcagtagcaacagag

SEQ ID NO: 859917 - DNA, 33 bp, Homo sapien
tcccctctgcagttcaccactacagatgaaagc

SEQ ID NO: 859918 - DNA, 33 bp, Homo sapien
tcccctctgcagttcagcactacagatgaaagc

SEQ ID NO: 859919 - DNA, 33 bp, Homo sapien
ctattgctgagtgacacagtagccaccataatg

SEQ ID NO: 859920 - DNA, 33 bp, Homo sapien
ctattgctgagtgacatagtagccaccataatg

SEQ ID NO: 859921 - DNA, 33 bp, Homo sapien
gacccacagtgctgtgaacaaaaagtgatgcat

SEQ ID NO: 859922 - DNA, 33 bp, Homo sapien
gacccacagtgctgtggacaaaaagtgatgcat

SEQ ID NO: 859923 - DNA, 33 bp, Homo sapien
ttctctggtatgtgacagccttgattccaagaa

SEQ ID NO: 859924 - DNA, 33 bp, Homo sapien
ttctctggtatgtgacggccttgattccaagaa

SEQ ID NO: 859925 - DNA, 33 bp, Homo sapien
aattaaacaaggtactcaggagataagcaaagg

SEQ ID NO: 859926 - DNA, 33 bp, Homo sapien
aattaaacaaggtacttaggagataagcaaagg

SEQ ID NO: 859927 - DNA, 33 bp, Homo sapien
gatcatggcaaatatacgaagctctctatgccc

SEQ ID NO: 859928 - DNA, 33 bp, Homo sapien
gatcatggcaaatatatgaagctctctatgccc

SEQ ID NO: 859929 - DNA, 33 bp, Homo sapien
atgtgtatgaagagaaggagaaagatctagggt

SEQ ID NO: 859930 - DNA, 33 bp, Homo sapien
atgtgtatgaagagaatgagaaagatctagggt

SEQ ID NO: 859931 - DNA, 33 bp, Homo sapien
ggcaacaaagtctaacagaaacctgggccacca

SEQ ID NO: 859932 - DNA, 33 bp, Homo sapien
ggcaacaaagtctaacggaaacctgggccacca

SEQ ID NO: 859933 - DNA, 33 bp, Homo sapien
gtcacagccttttgaacctaatctctgtgtata

SEQ ID NO: 859934 - DNA, 33 bp, Homo sapien
gtcacagccttttgaatctaatctctgtgtata

SEQ ID NO: 859935 - DNA, 33 bp, Homo sapien
tttcaccatattactacagttttcctgaactgc

SEQ ID NO: 859936 - DNA, 33 bp, Homo sapien
tttcaccatattactagagttttcctgaactgc

SEQ ID NO: 859937 - DNA, 33 bp, Homo sapien
atgacctgaagctttacaacgtctacacaagat

SEQ ID NO: 859938 - DNA, 33 bp, Homo sapien
atgacctgaagctttataacgtctacacaagat

SEQ ID NO: 859939 - DNA, 33 bp, Homo sapien
ctcaagagctggaacacagtagtaaggtggaaa

SEQ ID NO: 859940 - DNA, 33 bp, Homo sapien
ctcaagagctggaacatagtagtaaggtggaaa

SEQ ID NO: 859941 - DNA, 33 bp, Homo sapien
tctaccataatctaaaatcatatcactcagaaa

SEQ ID NO: 859942 - DNA, 33 bp, Homo sapien
tctaccataatctaaagtcatatcactcagaaa

SEQ ID NO: 859943 - DNA, 33 bp, Homo sapien
ttaagtgtaattttaccaccatctacctcattt

SEQ ID NO: 859944 - DNA, 33 bp, Homo sapien
ttaagtgtaattttacgaccatctacctcattt

SEQ ID NO: 859945 - DNA, 33 bp, Homo sapien
atttctcatctggttcaatgcaatttttaacat

SEQ ID NO: 859946 - DNA, 33 bp, Homo sapien
atttctcatctggttcgatgcaatttttaacat

SEQ ID NO: 859947 - DNA, 33 bp, Homo sapien
ttaagagatcaaccttgaagtgacatacaaaat

SEQ ID NO: 859948 - DNA, 33 bp, Homo sapien
ttaagagatcaacctttaagtgacatacaaaat

SEQ ID NO: 859949 - DNA, 33 bp, Homo sapien
aaaggaaatcagaccaacttaccatgagatgaa

SEQ ID NO: 859950 - DNA, 33 bp, Homo sapien
aaaggaaatcagaccaccttaccatgagatgaa

SEQ ID NO: 859951 - DNA, 33 bp, Homo sapien
caggcagaccaactccaaagtcctcactcttaa

SEQ ID NO: 859952 - DNA, 33 bp, Homo sapien
caggcagaccaactccgaagtcctcactcttaa

SEQ ID NO: 859953 - DNA, 33 bp, Homo sapien
ctgcgtacatgggaaacactacataactattag

SEQ ID NO: 859954 - DNA, 33 bp, Homo sapien
ctgcgtacatgggaaatactacataactattag

SEQ ID NO: 859955 - DNA, 33 bp, Homo sapien
aatgtactaccagcaaaaacaccatttcactac

SEQ ID NO: 859956 - DNA, 33 bp, Homo sapien
aatgtactaccagcaagaacaccatttcactac

SEQ ID NO: 859957 - DNA, 33 bp, Homo sapien
gttgaggtgattaaatgatcagaaaagactaaa

SEQ ID NO: 859958 - DNA, 33 bp, Homo sapien
gttgaggtgattaaattatcagaaaagactaaa

SEQ ID NO: 859959 - DNA, 33 bp, Homo sapien
cttttatcatggagaaatgttgaggtgattaaa

SEQ ID NO: 859960 - DNA, 33 bp, Homo sapien
cttttatcatggagaagtgttgaggtgattaaa

SEQ ID NO: 859961 - DNA, 33 bp, Homo sapien
ttttgcctgaaaatgaagaatctgaactgactc

SEQ ID NO: 859962 - DNA, 33 bp, Homo sapien
ttttgcctgaaaatgaggaatctgaactgactc

SEQ ID NO: 859963 - DNA, 33 bp, Homo sapien
aggagtgggagctaaaccacttgatggcaccgt

SEQ ID NO: 859964 - DNA, 33 bp, Homo sapien
aggagtgggagctaaatcacttgatggcaccgt

SEQ ID NO: 859965 - DNA, 33 bp, Homo sapien
gtccttattaaatgagaaaatcatatggagtgt

SEQ ID NO: 859966 - DNA, 33 bp, Homo sapien
gtccttattaaatgagtaaatcatatggagtgt

SEQ ID NO: 859967 - DNA, 33 bp, Homo sapien
ttaatttgcacttccaccctacaatcactggac

SEQ ID NO: 859968 - DNA, 33 bp, Homo sapien
ttaatttgcacttccatcctacaatcactggac

SEQ ID NO: 859969 - DNA, 33 bp, Homo sapien
gtgtgtcaatctggaaagttgtttgaacacata

SEQ ID NO: 859970 - DNA, 33 bp, Homo sapien
gtgtgtcaatctggaaggttgtttgaacacata

SEQ ID NO: 859971 - DNA, 33 bp, Homo sapien
gaagactatagtcggaaatcacagcaatccctg

SEQ ID NO: 859972 - DNA, 33 bp, Homo sapien
gaagactatagtcggacatcacagcaatccctg

SEQ ID NO: 859973 - DNA, 33 bp, Homo sapien
acatatctcctaagcagctccagatagtaatgt

SEQ ID NO: 859974 - DNA, 33 bp, Homo sapien
acatatctcctaagcatctccagatagtaatgt

SEQ ID NO: 859975 - DNA, 33 bp, Homo sapien
agataaaaggcttttacggaaatctgagattaa

SEQ ID NO: 859976 - DNA, 33 bp, Homo sapien
agataaaaggcttttatggaaatctgagattaa

SEQ ID NO: 859977 - DNA, 33 bp, Homo sapien
ccaatttaaagctacacgatcaggtcaactcag

SEQ ID NO: 859978 - DNA, 33 bp, Homo sapien
ccaatttaaagctacatgatcaggtcaactcag

SEQ ID NO: 859979 - DNA, 33 bp, Homo sapien
agaatgtgaagcacaaaatgatggtagagcttt

SEQ ID NO: 859980 - DNA, 33 bp, Homo sapien
agaatgtgaagcacaagatgatggtagagcttt

SEQ ID NO: 859981 - DNA, 33 bp, Homo sapien
actgcatctattgttaacagtatggtttactta

SEQ ID NO: 859982 - DNA, 33 bp, Homo sapien
actgcatctattgttagcagtatggtttactta

SEQ ID NO: 859983 - DNA, 33 bp, Homo sapien
gcaacacacatatataccttgttgggtctagta

SEQ ID NO: 859984 - DNA, 33 bp, Homo sapien
gcaacacacatatatatcttgttgggtctagta

SEQ ID NO: 859985 - DNA, 33 bp, Homo sapien
tgacagaatctttggaagggctgaagaaccagg

SEQ ID NO: 859986 - DNA, 33 bp, Homo sapien
tgacagaatctttggacgggctgaagaaccagg

SEQ ID NO: 859987 - DNA, 33 bp, Homo sapien
tggtcgaagtgtgaacaaaatggtagttgccta

SEQ ID NO: 859988 - DNA, 33 bp, Homo sapien
tggtcgaagtgtgaacgaaatggtagttgccta

SEQ ID NO: 859989 - DNA, 33 bp, Homo sapien
aattatttaaacagaaagaaactatgtgtaggg

SEQ ID NO: 859990 - DNA, 33 bp, Homo sapien
aattatttaaacagaaggaaactatgtgtaggg

SEQ ID NO: 859991 - DNA, 33 bp, Homo sapien
gtacatctaaacattacgagaaggacagcatat

SEQ ID NO: 859992 - DNA, 33 bp, Homo sapien
gtacatctaaacattatgagaaggacagcatat

SEQ ID NO: 859993 - DNA, 33 bp, Homo sapien
gaggatcaaccaatcacggcaactatcaaatcc

SEQ ID NO: 859994 - DNA, 33 bp, Homo sapien
gaggatcaaccaatcatggcaactatcaaatcc

SEQ ID NO: 859995 - DNA, 33 bp, Homo sapien
cctggaatatagggaacgtttaatataactgcc

SEQ ID NO: 859996 - DNA, 33 bp, Homo sapien
cctggaatatagggaatgtttaatataactgcc

SEQ ID NO: 859997 - DNA, 33 bp, Homo sapien
catcagtaggtctacaactacaggaacgaatta

SEQ ID NO: 859998 - DNA, 33 bp, Homo sapien
catcagtaggtctacagctacaggaacgaatta

SEQ ID NO: 859999 - DNA, 33 bp, Homo sapien
actgcctgagcaaaggacctaggttgggagcat

SEQ ID NO: 860000 - DNA, 33 bp, Homo sapien
actgcctgagcaaaggccctaggttgggagcat

SEQ ID NO: 860001 - DNA, 33 bp, Homo sapien
cattctagttcaagcagtcagataataataagc

SEQ ID NO: 860002 - DNA, 33 bp, Homo sapien
cattctagttcaagcattcagataataataagc

SEQ ID NO: 860003 - DNA, 33 bp, Homo sapien
atgagttgggacagataataatagcccactgga

SEQ ID NO: 860004 - DNA, 33 bp, Homo sapien
atgagttgggacagattataatagcccactgga

SEQ ID NO: 860005 - DNA, 33 bp, Homo sapien
tttgacagttgaaccaaatgattttatttctga

SEQ ID NO: 860006 - DNA, 33 bp, Homo sapien
tttgacagttgaaccagatgattttatttctga

SEQ ID NO: 860007 - DNA, 33 bp, Homo sapien
ttttaatctgaatgaacctgaccttgtctgtct

SEQ ID NO: 860008 - DNA, 33 bp, Homo sapien
ttttaatctgaatgaatctgaccttgtctgtct

SEQ ID NO: 860009 - DNA, 33 bp, Homo sapien
agtctggattcaaatcaatttccctaattcttg

SEQ ID NO: 860010 - DNA, 33 bp, Homo sapien
agtctggattcaaatcgatttccctaattcttg

SEQ ID NO: 860011 - DNA, 33 bp, Homo sapien
agaaagtttgcaacttaaaaaaatgtcaggttt

SEQ ID NO: 860012 - DNA, 33 bp, Homo sapien
agaaagtttgcaactttaaaaaatgtcaggttt

SEQ ID NO: 860013 - DNA, 33 bp, Homo sapien
ttgagaatgttgaagacgaatgctttctatatt

SEQ ID NO: 860014 - DNA, 33 bp, Homo sapien
ttgagaatgttgaagatgaatgctttctatatt

SEQ ID NO: 860015 - DNA, 33 bp, Homo sapien
gtctacagtgactctaaggctgtggtatccaga

SEQ ID NO: 860016 - DNA, 33 bp, Homo sapien
gtctacagtgactctacggctgtggtatccaga

SEQ ID NO: 860017 - DNA, 33 bp, Homo sapien
tttcttggtaatgtaacagatcaatgtagatat

SEQ ID NO: 860018 - DNA, 33 bp, Homo sapien
tttcttggtaatgtaatagatcaatgtagatat

SEQ ID NO: 860019 - DNA, 33 bp, Homo sapien
tgatgtgaaaattaagaatcaatttgtttcaat

SEQ ID NO: 860020 - DNA, 33 bp, Homo sapien
tgatgtgaaaattaagtatcaatttgtttcaat

SEQ ID NO: 860021 - DNA, 33 bp, Homo sapien
aactaggcccattaaaagagccatgtaaagagc

SEQ ID NO: 860022 - DNA, 33 bp, Homo sapien
aactaggcccattaaaggagccatgtaaagagc

SEQ ID NO: 860023 - DNA, 33 bp, Homo sapien
aaaagagttcaaggatcaaagtcaatgtggaca

SEQ ID NO: 860024 - DNA, 33 bp, Homo sapien
aaaagagttcaaggatgaaagtcaatgtggaca

SEQ ID NO: 860025 - DNA, 33 bp, Homo sapien
agactagaactttcaaagtcaacatatttgttc

SEQ ID NO: 860026 - DNA, 33 bp, Homo sapien
agactagaactttcaaggtcaacatatttgttc

SEQ ID NO: 860027 - DNA, 33 bp, Homo sapien
gtgtcattgttcttgcactcgtggtaagactag

SEQ ID NO: 860028 - DNA, 33 bp, Homo sapien
gtgtcattgttcttgcgctcgtggtaagactag

SEQ ID NO: 860029 - DNA, 33 bp, Homo sapien
gttattcagccagtcccgaaaagggtaatatcc

SEQ ID NO: 860030 - DNA, 33 bp, Homo sapien
gttattcagccagtcctgaaaagggtaatatcc

SEQ ID NO: 860031 - DNA, 33 bp, Homo sapien
atcttccttggctcccagctctaaatctatcat

SEQ ID NO: 860032 - DNA, 33 bp, Homo sapien
atcttccttggctccctgctctaaatctatcat

SEQ ID NO: 860033 - DNA, 33 bp, Homo sapien
aagagattgttttgatccagaatctctaaccat

SEQ ID NO: 860034 - DNA, 33 bp, Homo sapien
aagagattgttttgatgcagaatctctaaccat

SEQ ID NO: 860035 - DNA, 33 bp, Homo sapien
attcaaatttttccaaagtgcgcttgcttacac

SEQ ID NO: 860036 - DNA, 33 bp, Homo sapien
attcaaatttttccaaggtgcgcttgcttacac

SEQ ID NO: 860037 - DNA, 33 bp, Homo sapien
ttcctgtaaactctccaaactttatttgcctaa

SEQ ID NO: 860038 - DNA, 33 bp, Homo sapien
ttcctgtaaactctcctaactttatttgcctaa

SEQ ID NO: 860039 - DNA, 33 bp, Homo sapien
gtcggagttctgagccccattgtggttctcaaa

SEQ ID NO: 860040 - DNA, 33 bp, Homo sapien
gtcggagttctgagcctcattgtggttctcaaa

SEQ ID NO: 860041 - DNA, 33 bp, Homo sapien
tattccagatggaaaagatacagactgtaaaac

SEQ ID NO: 860042 - DNA, 33 bp, Homo sapien
tattccagatggaaaatatacagactgtaaaac

SEQ ID NO: 860043 - DNA, 33 bp, Homo sapien
aatctccttgctaaaacggcatatttaaaatct

SEQ ID NO: 860044 - DNA, 33 bp, Homo sapien
aatctccttgctaaaatggcatatttaaaatct

SEQ ID NO: 860045 - DNA, 33 bp, Homo sapien
ttagtagattatactaggagctatttctcttcc

SEQ ID NO: 860046 - DNA, 33 bp, Homo sapien
ttagtagattatactatgagctatttctcttcc

SEQ ID NO: 860047 - DNA, 33 bp, Homo sapien
ctttgcaaggatactgacaatcagaagagttcc

SEQ ID NO: 860048 - DNA, 33 bp, Homo sapien
ctttgcaaggatactggcaatcagaagagttcc

SEQ ID NO: 860049 - DNA, 33 bp, Homo sapien
atttgagtattggtaacgtcttagggagcagtt

SEQ ID NO: 860050 - DNA, 33 bp, Homo sapien
atttgagtattggtaatgtcttagggagcagtt

SEQ ID NO: 860051 - DNA, 33 bp, Homo sapien
gtagggaaacctgttgcaagactagcagaggtg

SEQ ID NO: 860052 - DNA, 33 bp, Homo sapien
gtagggaaacctgttgtaagactagcagaggtg

SEQ ID NO: 860053 - DNA, 33 bp, Homo sapien
gtcaaatccagcatgaagaggtacagaaacgat

SEQ ID NO: 860054 - DNA, 33 bp, Homo sapien
gtcaaatccagcatgatgaggtacagaaacgat

SEQ ID NO: 860055 - DNA, 33 bp, Homo sapien
gaaaggagaaacccaaagatgatgaaaaggagc

SEQ ID NO: 860056 - DNA, 33 bp, Homo sapien
gaaaggagaaacccaaggatgatgaaaaggagc

SEQ ID NO: 860057 - DNA, 33 bp, Homo sapien
agggaagattgtcacagatactcaagtttatga

SEQ ID NO: 860058 - DNA, 33 bp, Homo sapien
agggaagattgtcacatatactcaagtttatga

SEQ ID NO: 860059 - DNA, 33 bp, Homo sapien
ctctgaagttggactacggactccttgtgagca

SEQ ID NO: 860060 - DNA, 33 bp, Homo sapien
ctctgaagttggactatggactccttgtgagca

SEQ ID NO: 860061 - DNA, 33 bp, Homo sapien
gggagggactttttaaaccaaagctgataatgt

SEQ ID NO: 860062 - DNA, 33 bp, Homo sapien
gggagggactttttaacccaaagctgataatgt

SEQ ID NO: 860063 - DNA, 33 bp, Homo sapien
caggaaaatgtccacccggcagatttatatatg

SEQ ID NO: 860064 - DNA, 33 bp, Homo sapien
caggaaaatgtccacctggcagatttatatatg

SEQ ID NO: 860065 - DNA, 33 bp, Homo sapien
tttaaaaatctttttgaacattgcatgagtcag

SEQ ID NO: 860066 - DNA, 33 bp, Homo sapien
tttaaaaatctttttgtacattgcatgagtcag

SEQ ID NO: 860067 - DNA, 33 bp, Homo sapien
aatcattctcatggaaaaaccaggattcctgtt

SEQ ID NO: 860068 - DNA, 33 bp, Homo sapien
aatcattctcatggaacaaccaggattcctgtt

SEQ ID NO: 860069 - DNA, 33 bp, Homo sapien
acacctccttgcattaacctgatttgagagtat

SEQ ID NO: 860070 - DNA, 33 bp, Homo sapien
acacctccttgcattatcctgatttgagagtat

SEQ ID NO: 860071 - DNA, 33 bp, Homo sapien
tgaggtctgtgaaccaatctagcaaattaatca

SEQ ID NO: 860072 - DNA, 33 bp, Homo sapien
tgaggtctgtgaaccactctagcaaattaatca

SEQ ID NO: 860073 - DNA, 33 bp, Homo sapien
ccttaccaaaagctaaatgcattgtcagtagta

SEQ ID NO: 860074 - DNA, 33 bp, Homo sapien
ccttaccaaaagctaattgcattgtcagtagta

SEQ ID NO: 860075 - DNA, 33 bp, Homo sapien
gaggaacattagctcacggttgatgtctcacat

SEQ ID NO: 860076 - DNA, 33 bp, Homo sapien
gaggaacattagctcatggttgatgtctcacat

SEQ ID NO: 860077 - DNA, 33 bp, Homo sapien
cccagtctgtaaaatacagtaggaatgtctgac

SEQ ID NO: 860078 - DNA, 33 bp, Homo sapien
cccagtctgtaaaatagagtaggaatgtctgac

SEQ ID NO: 860079 - DNA, 33 bp, Homo sapien
aatagtataatcagaacagtattcacaagctca

SEQ ID NO: 860080 - DNA, 33 bp, Homo sapien
aatagtataatcagaatagtattcacaagctca

SEQ ID NO: 860081 - DNA, 33 bp, Homo sapien
ttttcacctagcttacccatttactaactacct

SEQ ID NO: 860082 - DNA, 33 bp, Homo sapien
ttttcacctagcttactcatttactaactacct

SEQ ID NO: 860083 - DNA, 33 bp, Homo sapien
ttttcttatctgtaaaaggaataatagagctaa

SEQ ID NO: 860084 - DNA, 33 bp, Homo sapien
ttttcttatctgtaaatggaataatagagctaa

SEQ ID NO: 860085 - DNA, 33 bp, Homo sapien
tagagtcaacagagaccggatgttgaagggttg

SEQ ID NO: 860086 - DNA, 33 bp, Homo sapien
tagagtcaacagagactggatgttgaagggttg

SEQ ID NO: 860087 - DNA, 33 bp, Homo sapien
caggattccaacacgaacacaatgtatttgtat

SEQ ID NO: 860088 - DNA, 33 bp, Homo sapien
caggattccaacacgagcacaatgtatttgtat

SEQ ID NO: 860089 - DNA, 33 bp, Homo sapien
aggaagaaagggagcaaaatagctaacacattc

SEQ ID NO: 860090 - DNA, 33 bp, Homo sapien
aggaagaaagggagcagaatagctaacacattc

SEQ ID NO: 860091 - DNA, 33 bp, Homo sapien
ctccaaggtaaaggataagcaatctagtaggga

SEQ ID NO: 860092 - DNA, 33 bp, Homo sapien
ctccaaggtaaaggatcagcaatctagtaggga

SEQ ID NO: 860093 - DNA, 33 bp, Homo sapien
tacccttctaatgccaactctcattgcttcatt

SEQ ID NO: 860094 - DNA, 33 bp, Homo sapien
tacccttctaatgccatctctcattgcttcatt

SEQ ID NO: 860095 - DNA, 33 bp, Homo sapien
ctgtctgcagagagtacgcatcttgacgtctca

SEQ ID NO: 860096 - DNA, 33 bp, Homo sapien
ctgtctgcagagagtatgcatcttgacgtctca

SEQ ID NO: 860097 - DNA, 33 bp, Homo sapien
tcatctagtatccaagaaccaacccttagacag

SEQ ID NO: 860098 - DNA, 33 bp, Homo sapien
tcatctagtatccaaggaccaacccttagacag

SEQ ID NO: 860099 - DNA, 33 bp, Homo sapien
tgagaatttcaaaatgacatcagctgagcagtg

SEQ ID NO: 860100 - DNA, 33 bp, Homo sapien
tgagaatttcaaaatggcatcagctgagcagtg

SEQ ID NO: 860101 - DNA, 33 bp, Homo sapien
atggtggctaagtgaccactcaaaattgatgag

SEQ ID NO: 860102 - DNA, 33 bp, Homo sapien
atggtggctaagtgactactcaaaattgatgag

SEQ ID NO: 860103 - DNA, 33 bp, Homo sapien
ggaggagtcatcggagacccactcaaagaagca

SEQ ID NO: 860104 - DNA, 33 bp, Homo sapien
ggaggagtcatcggagtcccactcaaagaagca

SEQ ID NO: 860105 - DNA, 33 bp, Homo sapien
caatctttgtgagagccattgtggcttttagag

SEQ ID NO: 860106 - DNA, 33 bp, Homo sapien
caatctttgtgagagctattgtggcttttagag

SEQ ID NO: 860107 - DNA, 33 bp, Homo sapien
caggtgtcaatttgaacgagcccacgaggcaaa

SEQ ID NO: 860108 - DNA, 33 bp, Homo sapien
caggtgtcaatttgaatgagcccacgaggcaaa

SEQ ID NO: 860109 - DNA, 33 bp, Homo sapien
aagtttagagtgaacacagaatgaatcatgatt

SEQ ID NO: 860110 - DNA, 33 bp, Homo sapien
aagtttagagtgaacagagaatgaatcatgatt

SEQ ID NO: 860111 - DNA, 33 bp, Homo sapien
aaatcagccagaatgtaaaccaaaaataattta

SEQ ID NO: 860112 - DNA, 33 bp, Homo sapien
aaatcagccagaatgtcaaccaaaaataattta

SEQ ID NO: 860113 - DNA, 33 bp, Homo sapien
gaagggagcagttacgcccttgacatccgtttc

SEQ ID NO: 860114 - DNA, 33 bp, Homo sapien
gaagggagcagttacgtccttgacatccgtttc

SEQ ID NO: 860115 - DNA, 33 bp, Homo sapien
cagcgcctacttcagacatggccacctggatta

SEQ ID NO: 860116 - DNA, 33 bp, Homo sapien
cagcgcctacttcagatatggccacctggatta

SEQ ID NO: 860117 - DNA, 33 bp, Homo sapien
taaatgtttaccataaataaggccacaaataaa

SEQ ID NO: 860118 - DNA, 33 bp, Homo sapien
taaatgtttaccataagtaaggccacaaataaa

SEQ ID NO: 860119 - DNA, 33 bp, Homo sapien
tttacagtgagacttaaaaaacattgaatgaac

SEQ ID NO: 860120 - DNA, 33 bp, Homo sapien
tttacagtgagacttacaaaacattgaatgaac

SEQ ID NO: 860121 - DNA, 33 bp, Homo sapien
ggaaatcatggtcaaacggtataaagtttcagt

SEQ ID NO: 860122 - DNA, 33 bp, Homo sapien
ggaaatcatggtcaaatggtataaagtttcagt

SEQ ID NO: 860123 - DNA, 33 bp, Homo sapien
ctaataatgtgttacaaccctagaatagaatac

SEQ ID NO: 860124 - DNA, 33 bp, Homo sapien
ctaataatgtgttacagccctagaatagaatac

SEQ ID NO: 860125 - DNA, 33 bp, Homo sapien
taaggatatttgtccaatgatattcactgaagc

SEQ ID NO: 860126 - DNA, 33 bp, Homo sapien
taaggatatttgtccagtgatattcactgaagc

SEQ ID NO: 860127 - DNA, 33 bp, Homo sapien
tttaaagcagactccaatgctttcaatggccag

SEQ ID NO: 860128 - DNA, 33 bp, Homo sapien
tttaaagcagactccagtgctttcaatggccag

SEQ ID NO: 860129 - DNA, 33 bp, Homo sapien
cctgaagatttcatgcagaagtcaggagttttg

SEQ ID NO: 860130 - DNA, 33 bp, Homo sapien
cctgaagatttcatgcggaagtcaggagttttg

SEQ ID NO: 860131 - DNA, 33 bp, Homo sapien
gaatgaactagggggagaatggaaagaagtgag

SEQ ID NO: 860132 - DNA, 33 bp, Homo sapien
gaatgaactagggggataatggaaagaagtgag

SEQ ID NO: 860133 - DNA, 33 bp, Homo sapien
tctaacccacatgactcacactgggaccctctt

SEQ ID NO: 860134 - DNA, 33 bp, Homo sapien
tctaacccacatgactgacactgggaccctctt

SEQ ID NO: 860135 - DNA, 33 bp, Homo sapien
acaatctcgagcttacggaacgattttttaaaa

SEQ ID NO: 860136 - DNA, 33 bp, Homo sapien
acaatctcgagcttactgaacgattttttaaaa

SEQ ID NO: 860137 - DNA, 33 bp, Homo sapien
tagaagttcagattccaaacatattctgaaggt

SEQ ID NO: 860138 - DNA, 33 bp, Homo sapien
tagaagttcagattccgaacatattctgaaggt

SEQ ID NO: 860139 - DNA, 33 bp, Homo sapien
aaaatgttatgcaagaaaggaaagcaactataa

SEQ ID NO: 860140 - DNA, 33 bp, Homo sapien
aaaatgttatgcaagacaggaaagcaactataa

SEQ ID NO: 860141 - DNA, 33 bp, Homo sapien
ggattgatgtaatggacaatttttagctccata

SEQ ID NO: 860142 - DNA, 33 bp, Homo sapien
ggattgatgtaatggagaatttttagctccata

SEQ ID NO: 860143 - DNA, 33 bp, Homo sapien
ttttggatgatgatgcacgggctaccatactac

SEQ ID NO: 860144 - DNA, 33 bp, Homo sapien
ttttggatgatgatgcgcgggctaccatactac

SEQ ID NO: 860145 - DNA, 33 bp, Homo sapien
accaataattcgactacgaaaaataagtaagag

SEQ ID NO: 860146 - DNA, 33 bp, Homo sapien
accaataattcgactatgaaaaataagtaagag

SEQ ID NO: 860147 - DNA, 33 bp, Homo sapien
ttattcgtttcagagcaaagggtgtgaaaaatc

SEQ ID NO: 860148 - DNA, 33 bp, Homo sapien
ttattcgtttcagagcgaagggtgtgaaaaatc

SEQ ID NO: 860149 - DNA, 33 bp, Homo sapien
gggcagctatggggacagaaaacgaagtaacaa

SEQ ID NO: 860150 - DNA, 33 bp, Homo sapien
gggcagctatggggacggaaaacgaagtaacaa

SEQ ID NO: 860151 - DNA, 33 bp, Homo sapien
gcatcctgcccatctacagtatgctcacataca

SEQ ID NO: 860152 - DNA, 33 bp, Homo sapien
gcatcctgcccatctatagtatgctcacataca

SEQ ID NO: 860153 - DNA, 33 bp, Homo sapien
gatcatattgttctcccactttgtgagtaatgc

SEQ ID NO: 860154 - DNA, 33 bp, Homo sapien
gatcatattgttctcctactttgtgagtaatgc

SEQ ID NO: 860155 - DNA, 33 bp, Homo sapien
tccttacccgttgccacgtaatcaatcagctac

SEQ ID NO: 860156 - DNA, 33 bp, Homo sapien
tccttacccgttgccatgtaatcaatcagctac

SEQ ID NO: 860157 - DNA, 33 bp, Homo sapien
tgtgtttaattccaaagtttcagaatgattttt

SEQ ID NO: 860158 - DNA, 33 bp, Homo sapien
tgtgtttaattccaaattttcagaatgattttt

SEQ ID NO: 860159 - DNA, 33 bp, Homo sapien
ggttccataacaccttaaagctaagaagcccca

SEQ ID NO: 860160 - DNA, 33 bp, Homo sapien
ggttccataacaccttgaagctaagaagcccca

SEQ ID NO: 860161 - DNA, 33 bp, Homo sapien
ttctttgtctggtcacacctttttataatttga

SEQ ID NO: 860162 - DNA, 33 bp, Homo sapien
ttctttgtctggtcacgcctttttataatttga

SEQ ID NO: 860163 - DNA, 33 bp, Homo sapien
actgtatgtaactgaagattaagtcaactattt

SEQ ID NO: 860164 - DNA, 33 bp, Homo sapien
actgtatgtaactgaatattaagtcaactattt

SEQ ID NO: 860165 - DNA, 33 bp, Homo sapien
taaaacactagtgcaacagaaatccagttacaa

SEQ ID NO: 860166 - DNA, 33 bp, Homo sapien
taaaacactagtgcaagagaaatccagttacaa

SEQ ID NO: 860167 - DNA, 33 bp, Homo sapien
gaagccactttaaataggtaaggtgggcataca

SEQ ID NO: 860168 - DNA, 33 bp, Homo sapien
gaagccactttaaatatgtaaggtgggcataca

SEQ ID NO: 860169 - DNA, 33 bp, Homo sapien
atatcttatataggtaagcctgtttaaatcctg

SEQ ID NO: 860170 - DNA, 33 bp, Homo sapien
atatcttatataggtaggcctgtttaaatcctg

SEQ ID NO: 860171 - DNA, 33 bp, Homo sapien
gactggtgtggtaaaaagaggtaaatttgtttg

SEQ ID NO: 860172 - DNA, 33 bp, Homo sapien
gactggtgtggtaaaaggaggtaaatttgtttg

SEQ ID NO: 860173 - DNA, 33 bp, Homo sapien
aagcacaaagaacaacaggttatatatatatat

SEQ ID NO: 860174 - DNA, 33 bp, Homo sapien
aagcacaaagaacaacgggttatatatatatat

SEQ ID NO: 860175 - DNA, 33 bp, Homo sapien
caaagagtttaaaagacgccaatgtccttcatt

SEQ ID NO: 860176 - DNA, 33 bp, Homo sapien
caaagagtttaaaagatgccaatgtccttcatt

SEQ ID NO: 860177 - DNA, 33 bp, Homo sapien
tctgccatgtagcaaaagatcagcttacagggc

SEQ ID NO: 860178 - DNA, 33 bp, Homo sapien
tctgccatgtagcaaatgatcagcttacagggc

SEQ ID NO: 860179 - DNA, 33 bp, Homo sapien; identical to SEQ ID NO: 860177

SEQ ID NO: 860180 - DNA, 33 bp, Homo sapien; identical to SEQ ID NO: 860178

SEQ ID NO: 860181 - DNA, 33 bp, Homo sapien
actctcagctgcaatcactctggacctgtttgc

SEQ ID NO: 860182 - DNA, 33 bp, Homo sapien
actctcagctgcaatcgctctggacctgtttgc

SEQ ID NO: 860183 - DNA, 33 bp, Homo sapien
ttgcagtgtggagtccaaaaccctgttaatggc

SEQ ID NO: 860184 - DNA, 33 bp, Homo sapien
ttgcagtgtggagtccgaaaccctgttaatggc

SEQ ID NO: 860185 - DNA, 33 bp, Homo sapien
gcatttgtgggctgccggaatgccactccaccc

SEQ ID NO: 860186 - DNA, 33 bp, Homo sapien
gcatttgtgggctgcctgaatgccactccaccc

SEQ ID NO: 860187 - DNA, 33 bp, Homo sapien
ccagcattcctcaagcacaggcaggcctcaggg

SEQ ID NO: 860188 - DNA, 33 bp, Homo sapien
ccagcattcctcaagcgcaggcaggcctcaggg

SEQ ID NO: 860189 - DNA, 33 bp, Homo sapien
agacagcatgaaagaccgggtgtgattcctttt

SEQ ID NO: 860190 - DNA, 33 bp, Homo sapien
agacagcatgaaagactgggtgtgattcctttt

SEQ ID NO: 860191 - DNA, 33 bp, Homo sapien
gcacttttcagagcaactcaccctcaccacatc

SEQ ID NO: 860192 - DNA, 33 bp, Homo sapien
gcacttttcagagcaattcaccctcaccacatc

SEQ ID NO: 860193 - DNA, 33 bp, Homo sapien
actgggacagcagcgaaagtcctgagcgaaaca

SEQ ID NO: 860194 - DNA, 33 bp, Homo sapien
actgggacagcagcgagagtcctgagcgaaaca

SEQ ID NO: 860195 - DNA, 33 bp, Homo sapien
gcaataaataacggcacatcatttggcactgtg

SEQ ID NO: 860196 - DNA, 33 bp, Homo sapien
gcaataaataacggcatatcatttggcactgtg

SEQ ID NO: 860197 - DNA, 33 bp, Homo sapien
ctgattgcattgcctacattgtcttgtgatttt

SEQ ID NO: 860198 - DNA, 33 bp, Homo sapien
ctgattgcattgcctatattgtcttgtgatttt

SEQ ID NO: 860199 - DNA, 33 bp, Homo sapien
tttatacatgccacacaatgctaaatccacagc

SEQ ID NO: 860200 - DNA, 33 bp, Homo sapien
tttatacatgccacacgatgctaaatccacagc

SEQ ID NO: 860201 - DNA, 33 bp, Homo sapien
accttctgcccatccaactctgcaaatatacac

SEQ ID NO: 860202 - DNA, 33 bp, Homo sapien
accttctgcccatccatctctgcaaatatacac

SEQ ID NO: 860203 - DNA, 33 bp, Homo sapien
ttgtctttcttatttaccattgtaacttcatac

SEQ ID NO: 860204 - DNA, 33 bp, Homo sapien
ttgtctttcttatttatcattgtaacttcatac

SEQ ID NO: 860205 - DNA, 33 bp, Homo sapien
gtcccttgagattgcacagcaggtgttgctcag

SEQ ID NO: 860206 - DNA, 33 bp, Homo sapien
gtcccttgagattgcatagcaggtgttgctcag

SEQ ID NO: 860207 - DNA, 33 bp, Homo sapien
catgaattgtacagtacgatgaaaaggaggaaa

SEQ ID NO: 860208 - DNA, 33 bp, Homo sapien
catgaattgtacagtaggatgaaaaggaggaaa

SEQ ID NO: 860209 - DNA, 33 bp, Homo sapien
cataattctactacttaaagaaagccattaaat

SEQ ID NO: 860210 - DNA, 33 bp, Homo sapien
cataattctactactttaagaaagccattaaat

SEQ ID NO: 860211 - DNA, 33 bp, Homo sapien
ggcaatacaggtgaaactgggtgaactcgaggg

SEQ ID NO: 860212 - DNA, 33 bp, Homo sapien
ggcaatacaggtgaaattgggtgaactcgaggg

SEQ ID NO: 860213 - DNA, 33 bp, Homo sapien
caaagcaagaattctaaacacatagcccaggat

SEQ ID NO: 860214 - DNA, 33 bp, Homo sapien
caaagcaagaattctagacacatagcccaggat

SEQ ID NO: 860215 - DNA, 33 bp, Homo sapien
tagtcggtaaaggggacatgaagtggaatcatt

SEQ ID NO: 860216 - DNA, 33 bp, Homo sapien
tagtcggtaaaggggatatgaagtggaatcatt

SEQ ID NO: 860217 - DNA, 33 bp, Homo sapien
ctcttattaagatcaccaaagcttgaattggaa

SEQ ID NO: 860218 - DNA, 33 bp, Homo sapien
ctcttattaagatcactaaagcttgaattggaa

SEQ ID NO: 860219 - DNA, 33 bp, Homo sapien
tgcttggtttgacaaaagccataaatatacatg

SEQ ID NO: 860220 - DNA, 33 bp, Homo sapien
tgcttggtttgacaaacgccataaatatacatg

SEQ ID NO: 860221 - DNA, 33 bp, Homo sapien
agtcagcaaggagaacaggagaggaagtactgg

SEQ ID NO: 860222 - DNA, 33 bp, Homo sapien
agtcagcaaggagaacgggagaggaagtactgg

SEQ ID NO: 860223 - DNA, 33 bp, Homo sapien
aatacccagtagaataaaattttgtgctttgtt

SEQ ID NO: 860224 - DNA, 33 bp, Homo sapien
aatacccagtagaatagaattttgtgctttgtt

SEQ ID NO: 860225 - DNA, 33 bp, Homo sapien
agtagattagtaaagacggaagcacagttcccc

SEQ ID NO: 860226 - DNA, 33 bp, Homo sapien
agtagattagtaaagatggaagcacagttcccc

SEQ ID NO: 860227 - DNA, 33 bp, Homo sapien
acctctcaaacatctaccagctatcttggtttg

SEQ ID NO: 860228 - DNA, 33 bp, Homo sapien
acctctcaaacatctatcagctatcttggtttg

SEQ ID NO: 860229 - DNA, 33 bp, Homo sapien
agtgaaaactgatcaacgtctctctgaatcaga

SEQ ID NO: 860230 - DNA, 33 bp, Homo sapien
agtgaaaactgatcaaggtctctctgaatcaga

SEQ ID NO: 860231 - DNA, 33 bp, Homo sapien; identical to SEQ ID NO: 860229

SEQ ID NO: 860232 - DNA, 33 bp, Homo sapien; identical to SEQ ID NO: 860230

SEQ ID NO: 860233 - DNA, 33 bp, Homo sapien
tagtatggaggataccaagagtccctggcataa

SEQ ID NO: 860234 - DNA, 33 bp, Homo sapien
tagtatggaggataccgagagtccctggcataa

SEQ ID NO: 860235 - DNA, 33 bp, Homo sapien
atccactctcctaaaacagatctttctacccag

SEQ ID NO: 860236 - DNA, 33 bp, Homo sapien
atccactctcctaaaatagatctttctacccag

SEQ ID NO: 860237 - DNA, 33 bp, Homo sapien
gcatatgatatttgcacagaagactttttggaa

SEQ ID NO: 860238 - DNA, 33 bp, Homo sapien
gcatatgatatttgcagagaagactttttggaa

SEQ ID NO: 860239 - DNA, 33 bp, Homo sapien
aatacaaatctcttgaactcaaaagggctatta

SEQ ID NO: 860240 - DNA, 33 bp, Homo sapien
aatacaaatctcttgacctcaaaagggctatta

SEQ ID NO: 860241 - DNA, 33 bp, Homo sapien
atgaatgaggaaaatacacagtgtgataagatc

SEQ ID NO: 860242 - DNA, 33 bp, Homo sapien
atgaatgaggaaaatatacagtgtgataagatc

SEQ ID NO: 860243 - DNA, 33 bp, Homo sapien
tatggaatccagtcgacgttcaggcaccgcgcg

SEQ ID NO: 860244 - DNA, 33 bp, Homo sapien
tatggaatccagtcgatgttcaggcaccgcgcg

SEQ ID NO: 860245 - DNA, 33 bp, Homo sapien
tttgcacgtaaggaaacaagtcctatttaaact

SEQ ID NO: 860246 - DNA, 33 bp, Homo sapien
tttgcacgtaaggaaataagtcctatttaaact

SEQ ID NO: 860247 - DNA, 33 bp, Homo sapien
ggtcggttatgagagaagtatgataatgaaagg

SEQ ID NO: 860248 - DNA, 33 bp, Homo sapien
ggtcggttatgagagatgtatgataatgaaagg

SEQ ID NO: 860249 - DNA, 33 bp, Homo sapien
gagcaagcgagcaaaccgtctcacatgatgcta

SEQ ID NO: 860250 - DNA, 33 bp, Homo sapien
gagcaagcgagcaaactgtctcacatgatgcta

SEQ ID NO: 860251 - DNA, 33 bp, Homo sapien
gggcagagcccccaaacgtgcagatttaataca

SEQ ID NO: 860252 - DNA, 33 bp, Homo sapien
gggcagagcccccaaatgtgcagatttaataca

SEQ ID NO: 860253 - DNA, 33 bp, Homo sapien
acaactccactgtagccgatgagaggagtcagg

SEQ ID NO: 860254 - DNA, 33 bp, Homo sapien
acaactccactgtagctgatgagaggagtcagg

SEQ ID NO: 860255 - DNA, 33 bp, Homo sapien
aagacacacagggctaggatgaataaatctgac

SEQ ID NO: 860256 - DNA, 33 bp, Homo sapien
aagacacacagggctatgatgaataaatctgac

SEQ ID NO: 860257 - DNA, 33 bp, Homo sapien
aatacagaattgcatagtaaatacacacttttc

SEQ ID NO: 860258 - DNA, 33 bp, Homo sapien
aatacagaattgcatattaaatacacacttttc

SEQ ID NO: 860259 - DNA, 33 bp, Homo sapien
tctgttgtgaaaaatacagaaactaactggcag

SEQ ID NO: 860260 - DNA, 33 bp, Homo sapien
tctgttgtgaaaaatatagaaactaactggcag

SEQ ID NO: 860261 - DNA, 33 bp, Homo sapien
ccctctagaaccaaaccatcaatgcaccaaggc

SEQ ID NO: 860262 - DNA, 33 bp, Homo sapien
ccctctagaaccaaactatcaatgcaccaaggc

SEQ ID NO: 860263 - DNA, 33 bp, Homo sapien
tgagtagtagggctgacgagggctgaacagggt

SEQ ID NO: 860264 - DNA, 33 bp, Homo sapien
tgagtagtagggctgatgagggctgaacagggt

SEQ ID NO: 860265 - DNA, 33 bp, Homo sapien
aggcagccatacatagacataaatgaattgtaa

SEQ ID NO: 860266 - DNA, 33 bp, Homo sapien
aggcagccatacataggcataaatgaattgtaa

SEQ ID NO: 860267 - DNA, 33 bp, Homo sapien
agaaaatcatttagcccgcaagtaaaaaatcat

SEQ ID NO: 860268 - DNA, 33 bp, Homo sapien
agaaaatcatttagcctgcaagtaaaaaatcat

SEQ ID NO: 860269 - DNA, 33 bp, Homo sapien
aaggtggtgaacttaactgaaaaatgctgtgtg

SEQ ID NO: 860270 - DNA, 33 bp, Homo sapien
aaggtggtgaacttaattgaaaaatgctgtgtg

SEQ ID NO: 860271 - DNA, 33 bp, Homo sapien
ttaaaagacaatggcacacaaattttaatcaat

SEQ ID NO: 860272 - DNA, 33 bp, Homo sapien
ttaaaagacaatggcatacaaattttaatcaat

SEQ ID NO: 860273 - DNA, 33 bp, Homo sapien
taactatgagcacatcagaattataaaacagac

SEQ ID NO: 860274 - DNA, 33 bp, Homo sapien
taactatgagcacatcggaattataaaacagac

SEQ ID NO: 860275 - DNA, 33 bp, Homo sapien
tgtagcctagaaccacagtatacacagtagaat

SEQ ID NO: 860276 - DNA, 33 bp, Homo sapien
tgtagcctagaaccacggtatacacagtagaat

SEQ ID NO: 860277 - DNA, 33 bp, Homo sapien
taattgtctcttaataggaagaaaggcttgttt

SEQ ID NO: 860278 - DNA, 33 bp, Homo sapien
taattgtctcttaatatgaagaaaggcttgttt

SEQ ID NO: 860279 - DNA, 33 bp, Homo sapien
acaaagaaagtatctacggtttgtcttattttc

SEQ ID NO: 860280 - DNA, 33 bp, Homo sapien
acaaagaaagtatctatggtttgtcttattttc

SEQ ID NO: 860281 - DNA, 33 bp, Homo sapien
gcagaaaagtcagaaacccaagctagagacgtg

SEQ ID NO: 860282 - DNA, 33 bp, Homo sapien
gcagaaaagtcagaaagccaagctagagacgtg

SEQ ID NO: 860283 - DNA, 33 bp, Homo sapien
gcttatggagacacaacagatactaagattcag

SEQ ID NO: 860284 - DNA, 33 bp, Homo sapien
gcttatggagacacaagagatactaagattcag

SEQ ID NO: 860285 - DNA, 33 bp, Homo sapien
gaggtccctggctgaaagtgaggagggcagtga

SEQ ID NO: 860286 - DNA, 33 bp, Homo sapien
gaggtccctggctgaaggtgaggagggcagtga

SEQ ID NO: 860287 - DNA, 33 bp, Homo sapien
tctccttgcctattcaccctgttagttttccca

SEQ ID NO: 860288 - DNA, 33 bp, Homo sapien
tctccttgcctattcatcctgttagttttccca

SEQ ID NO: 860289 - DNA, 33 bp, Homo sapien
actggctctctcatcacagacactgtaaaaact

SEQ ID NO: 860290 - DNA, 33 bp, Homo sapien
actggctctctcatcatagacactgtaaaaact

SEQ ID NO: 860291 - DNA, 33 bp, Homo sapien
gtattagcaaaacaacagacaaatagatcaatg

SEQ ID NO: 860292 - DNA, 33 bp, Homo sapien
gtattagcaaaacaacggacaaatagatcaatg

SEQ ID NO: 860293 - DNA, 33 bp, Homo sapien
tttgttagatggcataaaggaccgtggagttgt

SEQ ID NO: 860294 - DNA, 33 bp, Homo sapien
tttgttagatggcatagaggaccgtggagttgt

SEQ ID NO: 860295 - DNA, 33 bp, Homo sapien
tttaacatcatttctagctaggttttcattttt

SEQ ID NO: 860296 - DNA, 33 bp, Homo sapien
tttaacatcatttctatctaggttttcattttt

SEQ ID NO: 860297 - DNA, 33 bp, Homo sapien
gataaatcttgtctccacaaatcgcaaacttgc

SEQ ID NO: 860298 - DNA, 33 bp, Homo sapien
gataaatcttgtctccgcaaatcgcaaacttgc

SEQ ID NO: 860299 - DNA, 33 bp, Homo sapien
gctaaaatgggctcccaataattccaggcttat

SEQ ID NO: 860300 - DNA, 33 bp, Homo sapien
gctaaaatgggctcccgataattccaggcttat

SEQ ID NO: 860301 - DNA, 33 bp, Homo sapien
tcagagtgaatttagaaaagaataggagaaaag

SEQ ID NO: 860302 - DNA, 33 bp, Homo sapien
tcagagtgaatttagagaagaataggagaaaag

SEQ ID NO: 860303 - DNA, 33 bp, Homo sapien
agtaaactttcaaaaccagccttagacaaaagt

SEQ ID NO: 860304 - DNA, 33 bp, Homo sapien
agtaaactttcaaaactagccttagacaaaagt

SEQ ID NO: 860305 - DNA, 33 bp, Homo sapien
atttctctagttcttaaaaacaaggccaagagg

SEQ ID NO: 860306 - DNA, 33 bp, Homo sapien
atttctctagttcttacaaacaaggccaagagg

SEQ ID NO: 860307 - DNA, 33 bp, Homo sapien
ttatacctctttagaaacctgagtaggctgaga

SEQ ID NO: 860308 - DNA, 33 bp, Homo sapien
ttatacctctttagaagcctgagtaggctgaga

SEQ ID NO: 860309 - DNA, 33 bp, Homo sapien
gtctcttattgctcctgaattgtttcatatcta

SEQ ID NO: 860310 - DNA, 33 bp, Homo sapien
gtctcttattgctccttaattgtttcatatcta

SEQ ID NO: 860311 - DNA, 33 bp, Homo sapien
atttcacttctgaatacgctttaatctctcaac

SEQ ID NO: 860312 - DNA, 33 bp, Homo sapien
atttcacttctgaatatgctttaatctctcaac

SEQ ID NO: 860313 - DNA, 33 bp, Homo sapien
caccctgcacagtaaactgaaggtcctttttta

SEQ ID NO: 860314 - DNA, 33 bp, Homo sapien
caccctgcacagtaaagtgaaggtcctttttta

SEQ ID NO: 860315 - DNA, 33 bp, Homo sapien
tttgcacatgtacctgcagatgacatgagggac

SEQ ID NO: 860316 - DNA, 33 bp, Homo sapien
tttgcacatgtacctggagatgacatgagggac

SEQ ID NO: 860317 - DNA, 33 bp, Homo sapien
ccctgtagtatagtccaaagttgggtactgtga

SEQ ID NO: 860318 - DNA, 33 bp, Homo sapien
ccctgtagtatagtccgaagttgggtactgtga

SEQ ID NO: 860319 - DNA, 33 bp, Homo sapien
ctaatcaaatgaaagcacttctgaatagcaaag

SEQ ID NO: 860320 - DNA, 33 bp, Homo sapien
ctaatcaaatgaaagcgcttctgaatagcaaag

SEQ ID NO: 860321 - DNA, 33 bp, Homo sapien
ggaactgtttatcatacagtatcacatgaagct

SEQ ID NO: 860322 - DNA, 33 bp, Homo sapien
ggaactgtttatcatatagtatcacatgaagct

SEQ ID NO: 860323 - DNA, 33 bp, Homo sapien
gctttattcagcaatgcataaaggtaagattca

SEQ ID NO: 860324 - DNA, 33 bp, Homo sapien
gctttattcagcaatggataaaggtaagattca

SEQ ID NO: 860325 - DNA, 33 bp, Homo sapien
actacttgctcctttagccgtgatttcagtcct

SEQ ID NO: 860326 - DNA, 33 bp, Homo sapien
actacttgctcctttatccgtgatttcagtcct

SEQ ID NO: 860327 - DNA, 33 bp, Homo sapien
tggcaggctggaaaagccaacgacaaacttctg

SEQ ID NO: 860328 - DNA, 33 bp, Homo sapien
tggcaggctggaaaagtcaacgacaaacttctg

SEQ ID NO: 860329 - DNA, 33 bp, Homo sapien
tatttatattgtgcaacgccagttttaaataca

SEQ ID NO: 860330 - DNA, 33 bp, Homo sapien
tatttatattgtgcaatgccagttttaaataca

SEQ ID NO: 860331 - DNA, 33 bp, Homo sapien
cactgagaagactggaaaagaattgtgaaatgt

SEQ ID NO: 860332 - DNA, 33 bp, Homo sapien
cactgagaagactggagaagaattgtgaaatgt

SEQ ID NO: 860333 - DNA, 33 bp, Homo sapien
gagggctgtttgtctgcatggtggtccttatgg

SEQ ID NO: 860334 - DNA, 33 bp, Homo sapien
gagggctgtttgtctggatggtggtccttatgg

SEQ ID NO: 860335 - DNA, 33 bp, Homo sapien
ccccataacaaaatgccatgtcaaaggttaagc

SEQ ID NO: 860336 - DNA, 33 bp, Homo sapien
ccccataacaaaatgctatgtcaaaggttaagc

SEQ ID NO: 860337 - DNA, 33 bp, Homo sapien
ctcctaagggtatcagaccttccaaaaaatatc

SEQ ID NO: 860338 - DNA, 33 bp, Homo sapien
ctcctaagggtatcaggccttccaaaaaatatc

SEQ ID NO: 860339 - DNA, 33 bp, Homo sapien
taataatcataattccaacttattgaacattca

SEQ ID NO: 860340 - DNA, 33 bp, Homo sapien
taataatcataattcccacttattgaacattca

SEQ ID NO: 860341 - DNA, 33 bp, Homo sapien
aagaaaatgtggcatacagatagagatggatat

SEQ ID NO: 860342 - DNA, 33 bp, Homo sapien
aagaaaatgtggcatatagatagagatggatat

SEQ ID NO: 860343 - DNA, 33 bp, Homo sapien
acataaaaatggtcaacaggtgtttgcaaaggt

SEQ ID NO: 860344 - DNA, 33 bp, Homo sapien
acataaaaatggtcaataggtgtttgcaaaggt

SEQ ID NO: 860345 - DNA, 33 bp, Homo sapien
ttcctaagcatggtaaaaatttggtgccccaaa

SEQ ID NO: 860346 - DNA, 33 bp, Homo sapien
ttcctaagcatggtaacaatttggtgccccaaa

SEQ ID NO: 860347 - DNA, 33 bp, Homo sapien
ggattcttttagtgaactacaaaactagttgtg

SEQ ID NO: 860348 - DNA, 33 bp, Homo sapien
ggattcttttagtgaattacaaaactagttgtg

SEQ ID NO: 860349 - DNA, 33 bp, Homo sapien
tttgtctcttactcaaagctaccatatattgat

SEQ ID NO: 860350 - DNA, 33 bp, Homo sapien
tttgtctcttactcaaggctaccatatattgat

SEQ ID NO: 860351 - DNA, 33 bp, Homo sapien
ctgctgacttatttacacacagagttgcagatg

SEQ ID NO: 860352 - DNA, 33 bp, Homo sapien
ctgctgacttatttacccacagagttgcagatg

SEQ ID NO: 860353 - DNA, 33 bp, Homo sapien
gcttggtccacagatacgcgtgttcgactcccc

SEQ ID NO: 860354 - DNA, 33 bp, Homo sapien
gcttggtccacagatatgcgtgttcgactcccc

SEQ ID NO: 860355 - DNA, 33 bp, Homo sapien
taattgaaatgaggctgagcaactgtcaatttg

SEQ ID NO: 860356 - DNA, 33 bp, Homo sapien
taattgaaatgaggcttagcaactgtcaatttg

SEQ ID NO: 860357 - DNA, 33 bp, Homo sapien
gtacttcctatttaaaaaatggtttggcttctg

SEQ ID NO: 860358 - DNA, 33 bp, Homo sapien
gtacttcctatttaaagaatggtttggcttctg

SEQ ID NO: 860359 - DNA, 33 bp, Homo sapien
ttcaagtgctaaaatcaaaggcacaactttgca

SEQ ID NO: 860360 - DNA, 33 bp, Homo sapien
ttcaagtgctaaaatcgaaggcacaactttgca

SEQ ID NO: 860361 - DNA, 33 bp, Homo sapien
caatctaaaatctctccagttaactccagcaat

SEQ ID NO: 860362 - DNA, 33 bp, Homo sapien
caatctaaaatctctctagttaactccagcaat

SEQ ID NO: 860363 - DNA, 33 bp, Homo sapien
atttattttgagaagacggaaaaagcgcggggc

SEQ ID NO: 860364 - DNA, 33 bp, Homo sapien
atttattttgagaagatggaaaaagcgcggggc

SEQ ID NO: 860365 - DNA, 33 bp, Homo sapien
atgcaaaagccaataacgtctgtcattgtcatg

SEQ ID NO: 860366 - DNA, 33 bp, Homo sapien
atgcaaaagccaataatgtctgtcattgtcatg

SEQ ID NO: 860367 - DNA, 33 bp, Homo sapien
cttacaagatatagctaaagtcaacatggtgtt

SEQ ID NO: 860368 - DNA, 33 bp, Homo sapien
cttacaagatatagctgaagtcaacatggtgtt

SEQ ID NO: 860369 - DNA, 33 bp, Homo sapien
attatataccatttcagggactctggccaatgg

SEQ ID NO: 860370 - DNA, 33 bp, Homo sapien
attatataccatttcatggactctggccaatgg

SEQ ID NO: 860371 - DNA, 33 bp, Homo sapien
agaacaaaagtttgaaatgagtgttttcgagag

SEQ ID NO: 860372 - DNA, 33 bp, Homo sapien
agaacaaaagtttgaagtgagtgttttcgagag

SEQ ID NO: 860373 - DNA, 33 bp, Homo sapien
ttaacattaagaattacgattctcatgattcct

SEQ ID NO: 860374 - DNA, 33 bp, Homo sapien
ttaacattaagaattaggattctcatgattcct

SEQ ID NO: 860375 - DNA, 33 bp, Homo sapien
ctcaagatcacgaaaggctcatggggaagatgg

SEQ ID NO: 860376 - DNA, 33 bp, Homo sapien
ctcaagatcacgaaagtctcatggggaagatgg

SEQ ID NO: 860377 - DNA, 33 bp, Homo sapien
tctacctttcctcaaggatgctgtatctaaatg

SEQ ID NO: 860378 - DNA, 33 bp, Homo sapien
tctacctttcctcaagtatgctgtatctaaatg

SEQ ID NO: 860379 - DNA, 33 bp, Homo sapien
gcaagtctactttccccctagactacatttgca

SEQ ID NO: 860380 - DNA, 33 bp, Homo sapien
gcaagtctactttccctctagactacatttgca

SEQ ID NO: 860381 - DNA, 33 bp, Homo sapien
atagaggctatccagaccaaaggggcagaagga

SEQ ID NO: 860382 - DNA, 33 bp, Homo sapien
atagaggctatccagatcaaaggggcagaagga

SEQ ID NO: 860383 - DNA, 33 bp, Homo sapien
agtttctaagctgagcaagaattttgttgtgta

SEQ ID NO: 860384 - DNA, 33 bp, Homo sapien
agtttctaagctgagcgagaattttgttgtgta

SEQ ID NO: 860385 - DNA, 33 bp, Homo sapien
gctaaaatccactcccagcataggtaatgtgca

SEQ ID NO: 860386 - DNA, 33 bp, Homo sapien
gctaaaatccactcccggcataggtaatgtgca

SEQ ID NO: 860387 - DNA, 33 bp, Homo sapien
gaccagatgtagtaggcaggttcctttagttgt

SEQ ID NO: 860388 - DNA, 33 bp, Homo sapien
gaccagatgtagtaggtaggttcctttagttgt

SEQ ID NO: 860389 - DNA, 33 bp, Homo sapien
aatatagtttatatcaatcattttacaccaaga

SEQ ID NO: 860390 - DNA, 33 bp, Homo sapien
aatatagtttatatcagtcattttacaccaaga

SEQ ID NO: 860391 - DNA, 33 bp, Homo sapien
cctgcgttttctggaacgtggagactagtgttt

SEQ ID NO: 860392 - DNA, 33 bp, Homo sapien
cctgcgttttctggaatgtggagactagtgttt

SEQ ID NO: 860393 - DNA, 33 bp, Homo sapien
tctattcttgagactcagactcttccagtaaga

SEQ ID NO: 860394 - DNA, 33 bp, Homo sapien
tctattcttgagactcggactcttccagtaaga

SEQ ID NO: 860395 - DNA, 33 bp, Homo sapien
tgtgttatcagagcaacatgagtttcctagcct

SEQ ID NO: 860396 - DNA, 33 bp, Homo sapien
tgtgttatcagagcaagatgagtttcctagcct

SEQ ID NO: 860397 - DNA, 33 bp, Homo sapien
gaccaactaaattcacaaaatctttcccaaagg

SEQ ID NO: 860398 - DNA, 33 bp, Homo sapien
gaccaactaaattcacgaaatctttcccaaagg

SEQ ID NO: 860399 - DNA, 33 bp, Homo sapien
gctgtgagcagcctacaatcaggttatttcagg

SEQ ID NO: 860400 - DNA, 33 bp, Homo sapien
gctgtgagcagcctacgatcaggttatttcagg

SEQ ID NO: 860401 - DNA, 33 bp, Homo sapien
ccacggtcttcttcccagcgtgtgtgcattctg

SEQ ID NO: 860402 - DNA, 33 bp, Homo sapien
ccacggtcttcttcccggcgtgtgtgcattctg

SEQ ID NO: 860403 - DNA, 33 bp, Homo sapien
ttcaatggcatgaagacgtgagaaattggtaag

SEQ ID NO: 860404 - DNA, 33 bp, Homo sapien
ttcaatggcatgaagatgtgagaaattggtaag

SEQ ID NO: 860405 - DNA, 33 bp, Homo sapien
attaccaggagctttgaaagcatctgtcacatt

SEQ ID NO: 860406 - DNA, 33 bp, Homo sapien
attaccaggagctttggaagcatctgtcacatt

SEQ ID NO: 860407 - DNA, 33 bp, Homo sapien
atatttcagattgggaaaaattgaagaaactac

SEQ ID NO: 860408 - DNA, 33 bp, Homo sapien
atatttcagattgggagaaattgaagaaactac

SEQ ID NO: 860409 - DNA, 33 bp, Homo sapien
tgcacagcctggccaacgaagcacgatcccatc

SEQ ID NO: 860410 - DNA, 33 bp, Homo sapien
tgcacagcctggccaatgaagcacgatcccatc

SEQ ID NO: 860411 - DNA, 33 bp, Homo sapien
ggtagagatttcaccccggcattccaggtctct

SEQ ID NO: 860412 - DNA, 33 bp, Homo sapien
ggtagagatttcaccctggcattccaggtctct

SEQ ID NO: 860413 - DNA, 33 bp, Homo sapien
gtcacatctacatgcaccttctttggagaaagg

SEQ ID NO: 860414 - DNA, 33 bp, Homo sapien
gtcacatctacatgcatcttctttggagaaagg

SEQ ID NO: 860415 - DNA, 33 bp, Homo sapien
ttgctctttgagtgccaatatgtgtcaggtgcc

SEQ ID NO: 860416 - DNA, 33 bp, Homo sapien
ttgctctttgagtgccgatatgtgtcaggtgcc

SEQ ID NO: 860417 - DNA, 33 bp, Homo sapien
gaccagtgggcagtcacagatatgggaataaac

SEQ ID NO: 860418 - DNA, 33 bp, Homo sapien
gaccagtgggcagtcagagatatgggaataaac

SEQ ID NO: 860419 - DNA, 33 bp, Homo sapien
cctagagacgactgagaaacctaaagaagaaac

SEQ ID NO: 860420 - DNA, 33 bp, Homo sapien
cctagagacgactgagtaacctaaagaagaaac

SEQ ID NO: 860421 - DNA, 33 bp, Homo sapien
cctacgcctctccaaagttaaggaaaatgtgac

SEQ ID NO: 860422 - DNA, 33 bp, Homo sapien
cctacgcctctccaaatttaaggaaaatgtgac

SEQ ID NO: 860423 - DNA, 33 bp, Homo sapien
gcagtgtatttatacaatgaacaaactatgaca

SEQ ID NO: 860424 - DNA, 33 bp, Homo sapien
gcagtgtatttatacagtgaacaaactatgaca

SEQ ID NO: 860425 - DNA, 33 bp, Homo sapien
caaagacaaagggaaaaggaacgagccacctgt

SEQ ID NO: 860426 - DNA, 33 bp, Homo sapien
caaagacaaagggaaagggaacgagccacctgt

SEQ ID NO: 860427 - DNA, 33 bp, Homo sapien
aatagaaaaagacctagtaaattatccttttcc

SEQ ID NO: 860428 - DNA, 33 bp, Homo sapien
aatagaaaaagacctattaaattatccttttcc

SEQ ID NO: 860429 - DNA, 33 bp, Homo sapien
gaatttgtgcagaaacaccagcagaatcaggac

SEQ ID NO: 860430 - DNA, 33 bp, Homo sapien
gaatttgtgcagaaactccagcagaatcaggac

SEQ ID NO: 860431 - DNA, 33 bp, Homo sapien
aatgctctaagagtacaaacagtcgtcagccta

SEQ ID NO: 860432 - DNA, 33 bp, Homo sapien
aatgctctaagagtacgaacagtcgtcagccta

SEQ ID NO: 860433 - DNA, 33 bp, Homo sapien
actttatattagagtcaataagcagttgctggc

SEQ ID NO: 860434 - DNA, 33 bp, Homo sapien
actttatattagagtcgataagcagttgctggc

SEQ ID NO: 860435 - DNA, 33 bp, Homo sapien
aatgctttctccttttaaaaaatcttgtctgca

SEQ ID NO: 860436 - DNA, 33 bp, Homo sapien
aatgctttctcctttttaaaaatcttgtctgca

SEQ ID NO: 860437 - DNA, 33 bp, Homo sapien
catgcttatttctctaagtggacaatgctttct

SEQ ID NO: 860438 - DNA, 33 bp, Homo sapien
catgcttatttctctaggtggacaatgctttct

SEQ ID NO: 860439 - DNA, 33 bp, Homo sapien
tattttttctgcaagagagatgtaagcacagta

SEQ ID NO: 860440 - DNA, 33 bp, Homo sapien
tattttttctgcaagatagatgtaagcacagta

SEQ ID NO: 860441 - DNA, 33 bp, Homo sapien
ccacccatgtagaagacgcaaacgctcaccttg

SEQ ID NO: 860442 - DNA, 33 bp, Homo sapien
ccacccatgtagaagaggcaaacgctcaccttg

SEQ ID NO: 860443 - DNA, 33 bp, Homo sapien
ttgagaacaaatggtacgcagtgccaaagcctt

SEQ ID NO: 860444 - DNA, 33 bp, Homo sapien
ttgagaacaaatggtatgcagtgccaaagcctt

SEQ ID NO: 860445 - DNA, 33 bp, Homo sapien
ccactgatcttgtcaccgcttcctgacaaattc

SEQ ID NO: 860446 - DNA, 33 bp, Homo sapien
ccactgatcttgtcactgcttcctgacaaattc

SEQ ID NO: 860447 - DNA, 33 bp, Homo sapien
ttagttctctgtgataatacgggtttatacgtt

SEQ ID NO: 860448 - DNA, 33 bp, Homo sapien
ttagttctctgtgatagtacgggtttatacgtt

SEQ ID NO: 860449 - DNA, 33 bp, Homo sapien
ccccatttgggatccactgaactctaagcactt

SEQ ID NO: 860450 - DNA, 33 bp, Homo sapien
ccccatttgggatccattgaactctaagcactt

SEQ ID NO: 860451 - DNA, 33 bp, Homo sapien
taatacatttttgatacatggcagctgctaaat

SEQ ID NO: 860452 - DNA, 33 bp, Homo sapien
taatacatttttgatatatggcagctgctaaat

SEQ ID NO: 860453 - DNA, 33 bp, Homo sapien
ccaagtggctacctgaaagcatcagagattaga

SEQ ID NO: 860454 - DNA, 33 bp, Homo sapien
ccaagtggctacctgagagcatcagagattaga

SEQ ID NO: 860455 - DNA, 33 bp, Homo sapien
cacagaacctgttaaacagtagctaagtagtca

SEQ ID NO: 860456 - DNA, 33 bp, Homo sapien
cacagaacctgttaaatagtagctaagtagtca

SEQ ID NO: 860457 - DNA, 33 bp, Homo sapien
tattaccacaactcaacatttactccagttgaa

SEQ ID NO: 860458 - DNA, 33 bp, Homo sapien
tattaccacaactcaatatttactccagttgaa

SEQ ID NO: 860459 - DNA, 33 bp, Homo sapien
accctgctaacagccccaggatcttgtaagcaa

SEQ ID NO: 860460 - DNA, 33 bp, Homo sapien
accctgctaacagcccgaggatcttgtaagcaa

SEQ ID NO: 860461 - DNA, 33 bp, Homo sapien
agacctccctcgttatcacatctagacagcgag

SEQ ID NO: 860462 - DNA, 33 bp, Homo sapien
agacctccctcgttattacatctagacagcgag

SEQ ID NO: 860463 - DNA, 33 bp, Homo sapien
ataccttcattccagcaactcatggagacttca

SEQ ID NO: 860464 - DNA, 33 bp, Homo sapien
ataccttcattccagccactcatggagacttca

SEQ ID NO: 860465 - DNA, 33 bp, Homo sapien
gatgaattatttggtccactgaggcagaatcac

SEQ ID NO: 860466 - DNA, 33 bp, Homo sapien
gatgaattatttggtcgactgaggcagaatcac

SEQ ID NO: 860467 - DNA, 33 bp, Homo sapien
ccctcaccagaataaaacagtgaaggcttctgg

SEQ ID NO: 860468 - DNA, 33 bp, Homo sapien
ccctcaccagaataaaccagtgaaggcttctgg

SEQ ID NO: 860469 - DNA, 33 bp, Homo sapien
attgctaaagacactacaaactgtaaagggcct

SEQ ID NO: 860470 - DNA, 33 bp, Homo sapien
attgctaaagacactataaactgtaaagggcct

SEQ ID NO: 860471 - DNA, 33 bp, Homo sapien
ttctgatttgtcttccacttattatcacaacag

SEQ ID NO: 860472 - DNA, 33 bp, Homo sapien
ttctgatttgtcttcctcttattatcacaacag

SEQ ID NO: 860473 - DNA, 33 bp, Homo sapien
attctaaaattaattcaatcatctcacttctat

SEQ ID NO: 860474 - DNA, 33 bp, Homo sapien
attctaaaattaattcgatcatctcacttctat

SEQ ID NO: 860475 - DNA, 33 bp, Homo sapien
cttagtccttgtgattcaagtaaggccaacttc

SEQ ID NO: 860476 - DNA, 33 bp, Homo sapien
cttagtccttgtgattgaagtaaggccaacttc

SEQ ID NO: 860477 - DNA, 33 bp, Homo sapien
gccctgaactggaataaactgataaataattat

SEQ ID NO: 860478 - DNA, 33 bp, Homo sapien
gccctgaactggaatagactgataaataattat

SEQ ID NO: 860479 - DNA, 33 bp, Homo sapien
tgtttggatgcatttcaaagttatttacagaca

SEQ ID NO: 860480 - DNA, 33 bp, Homo sapien
tgtttggatgcatttcgaagttatttacagaca

SEQ ID NO: 860481 - DNA, 33 bp, Homo sapien
cagtgtttgcctgtaacctacacactgctgctg

SEQ ID NO: 860482 - DNA, 33 bp, Homo sapien
cagtgtttgcctgtaatctacacactgctgctg

SEQ ID NO: 860483 - DNA, 33 bp, Homo sapien
agatagacttcggaggccactttcagattatga

SEQ ID NO: 860484 - DNA, 33 bp, Homo sapien
agatagacttcggaggtcactttcagattatga

SEQ ID NO: 860485 - DNA, 33 bp, Homo sapien
tagactccacctcttgaagggagaagcataaca

SEQ ID NO: 860486 - DNA, 33 bp, Homo sapien
tagactccacctcttgcagggagaagcataaca

SEQ ID NO: 860487 - DNA, 33 bp, Homo sapien
atatattataaagccaatccaatcttcaaagac

SEQ ID NO: 860488 - DNA, 33 bp, Homo sapien
atatattataaagccactccaatcttcaaagac

SEQ ID NO: 860489 - DNA, 33 bp, Homo sapien
ctgactggtataaatccatatcatcatttttgc

SEQ ID NO: 860490 - DNA, 33 bp, Homo sapien
ctgactggtataaatctatatcatcatttttgc

SEQ ID NO: 860491 - DNA, 33 bp, Homo sapien
ttgtcaagtcaaaaagaatttatggattaaata

SEQ ID NO: 860492 - DNA, 33 bp, Homo sapien
ttgtcaagtcaaaaaggatttatggattaaata

SEQ ID NO: 860493 - DNA, 33 bp, Homo sapien
taacatcttggaatgacaggccaacaatagaca

SEQ ID NO: 860494 - DNA, 33 bp, Homo sapien
taacatcttggaatgagaggccaacaatagaca

SEQ ID NO: 860495 - DNA, 33 bp, Homo sapien
gtataaccaacataaagatgccacgatttgaat

SEQ ID NO: 860496 - DNA, 33 bp, Homo sapien
gtataaccaacataaatatgccacgatttgaat

SEQ ID NO: 860497 - DNA, 33 bp, Homo sapien
tctgctttgccaggaccgagtgagttagctgca

SEQ ID NO: 860498 - DNA, 33 bp, Homo sapien
tctgctttgccaggactgagtgagttagctgca

SEQ ID NO: 860499 - DNA, 33 bp, Homo sapien
tgggtcttcagttgctcacttccaaagacattc

SEQ ID NO: 860500 - DNA, 33 bp, Homo sapien
tgggtcttcagttgcttacttccaaagacattc

SEQ ID NO: 860501 - DNA, 33 bp, Homo sapien
agactggcaagttggaagttaacaaaaatgata

SEQ ID NO: 860502 - DNA, 33 bp, Homo sapien
agactggcaagttggaggttaacaaaaatgata

SEQ ID NO: 860503 - DNA, 33 bp, Homo sapien
gagtgcgtacttaaaagaattgaaggtctggcg

SEQ ID NO: 860504 - DNA, 33 bp, Homo sapien
gagtgcgtacttaaaataattgaaggtctggcg

SEQ ID NO: 860505 - DNA, 33 bp, Homo sapien
acgggggttgctcaatgaatgtcaggggctgct

SEQ ID NO: 860506 - DNA, 33 bp, Homo sapien
acgggggttgctcaattaatgtcaggggctgct

SEQ ID NO: 860507 - DNA, 33 bp, Homo sapien
gcttctctgaggccatcaaaagttcttggcata

SEQ ID NO: 860508 - DNA, 33 bp, Homo sapien
gcttctctgaggccatgaaaagttcttggcata

SEQ ID NO: 860509 - DNA, 33 bp, Homo sapien
gtggggtggggggacaataatgatatacctagt

SEQ ID NO: 860510 - DNA, 33 bp, Homo sapien
gtggggtggggggacagtaatgatatacctagt

SEQ ID NO: 860511 - DNA, 33 bp, Homo sapien
tgaaagggatcacaagcctgaaggatatctaac

SEQ ID NO: 860512 - DNA, 33 bp, Homo sapien
tgaaagggatcacaaggctgaaggatatctaac

SEQ ID NO: 860513 - DNA, 33 bp, Homo sapien
ccatgcaaatcttctaaataattgggcatttac

SEQ ID NO: 860514 - DNA, 33 bp, Homo sapien
ccatgcaaatcttctagataattgggcatttac

SEQ ID NO: 860515 - DNA, 33 bp, Homo sapien
tgcccaaacacacaggaaatattttgaatgcct

SEQ ID NO: 860516 - DNA, 33 bp, Homo sapien
tgcccaaacacacagggaatattttgaatgcct

SEQ ID NO: 860517 - DNA, 33 bp, Homo sapien
gaacaaggaaccaatcgaatttaaaggtaaagg

SEQ ID NO: 860518 - DNA, 33 bp, Homo sapien
gaacaaggaaccaatctaatttaaaggtaaagg

SEQ ID NO: 860519 - DNA, 33 bp, Homo sapien
catatttggtgcagagcagcataggagatgaca

SEQ ID NO: 860520 - DNA, 33 bp, Homo sapien
catatttggtgcagagtagcataggagatgaca

SEQ ID NO: 860521 - DNA, 33 bp, Homo sapien
ggaagggcctggtttgcataccttggcaagtaa

SEQ ID NO: 860522 - DNA, 33 bp, Homo sapien
ggaagggcctggtttgtataccttggcaagtaa

SEQ ID NO: 860523 - DNA, 33 bp, Homo sapien
ctatcttagccaaggcactgtcatcatttgcct

SEQ ID NO: 860524 - DNA, 33 bp, Homo sapien
ctatcttagccaaggctctgtcatcatttgcct

SEQ ID NO: 860525 - DNA, 33 bp, Homo sapien
tctacagaagaggaaacggtgattcagttaagc

SEQ ID NO: 860526 - DNA, 33 bp, Homo sapien
tctacagaagaggaaatggtgattcagttaagc

SEQ ID NO: 860527 - DNA, 33 bp, Homo sapien
ctcgtgttgttaataaactgaaatgtacactgg

SEQ ID NO: 860528 - DNA, 33 bp, Homo sapien
ctcgtgttgttaataagctgaaatgtacactgg

SEQ ID NO: 860529 - DNA, 33 bp, Homo sapien
ggaaagtgtaatcaacagttcactttttcttat

SEQ ID NO: 860530 - DNA, 33 bp, Homo sapien
ggaaagtgtaatcaacggttcactttttcttat

SEQ ID NO: 860531 - DNA, 33 bp, Homo sapien
tgtaacagcctttgaaaattgatttagctaaaa

SEQ ID NO: 860532 - DNA, 33 bp, Homo sapien
tgtaacagcctttgaagattgatttagctaaaa

SEQ ID NO: 860533 - DNA, 33 bp, Homo sapien
ttaatccagggacttacctcaagcattctttca

SEQ ID NO: 860534 - DNA, 33 bp, Homo sapien
ttaatccagggacttatctcaagcattctttca

SEQ ID NO: 860535 - DNA, 33 bp, Homo sapien
ctatagtattgacacaaatgcaggtcccacatc

SEQ ID NO: 860536 - DNA, 33 bp, Homo sapien
ctatagtattgacacagatgcaggtcccacatc

SEQ ID NO: 860537 - DNA, 33 bp, Homo sapien
tcctgctcatcctccagagaagcctttcacctt

SEQ ID NO: 860538 - DNA, 33 bp, Homo sapien
tcctgctcatcctccatagaagcctttcacctt

SEQ ID NO: 860539 - DNA, 33 bp, Homo sapien
tttcacttcccttttagaatcaaactctgttct

SEQ ID NO: 860540 - DNA, 33 bp, Homo sapien
tttcacttcccttttataatcaaactctgttct

SEQ ID NO: 860541 - DNA, 33 bp, Homo sapien
agtaatgagttaccaacccttagatttcacccc

SEQ ID NO: 860542 - DNA, 33 bp, Homo sapien
agtaatgagttaccaagccttagatttcacccc

SEQ ID NO: 860543 - DNA, 33 bp, Homo sapien
cagacctttaactccaagaactatgcacctttg

SEQ ID NO: 860544 - DNA, 33 bp, Homo sapien
cagacctttaactccacgaactatgcacctttg

SEQ ID NO: 860545 - DNA, 33 bp, Homo sapien
aaggcactgttcgtagcaggaattttgtgctca

SEQ ID NO: 860546 - DNA, 33 bp, Homo sapien
aaggcactgttcgtaggaggaattttgtgctca

SEQ ID NO: 860547 - DNA, 33 bp, Homo sapien
gaagcctttctgcaaactcccgacaataccaca

SEQ ID NO: 860548 - DNA, 33 bp, Homo sapien
gaagcctttctgcaaagtcccgacaataccaca

SEQ ID NO: 860549 - DNA, 33 bp, Homo sapien
ttttgtcttctctcacccttgtcttgacttttc

SEQ ID NO: 860550 - DNA, 33 bp, Homo sapien
ttttgtcttctctcactcttgtcttgacttttc

SEQ ID NO: 860551 - DNA, 33 bp, Homo sapien
agatgaggaagttgagcaaaatctccagggtcc

SEQ ID NO: 860552 - DNA, 33 bp, Homo sapien
agatgaggaagttgaggaaaatctccagggtcc

SEQ ID NO: 860553 - DNA, 33 bp, Homo sapien
gatatcagttccctccactaccctctctcaggg

SEQ ID NO: 860554 - DNA, 33 bp, Homo sapien
gatatcagttccctccgctaccctctctcaggg

SEQ ID NO: 860555 - DNA, 33 bp, Homo sapien
tcaggcttgcttaagaaaaacatttttactgct

SEQ ID NO: 860556 - DNA, 33 bp, Homo sapien
tcaggcttgcttaagagaaacatttttactgct

SEQ ID NO: 860557 - DNA, 33 bp, Homo sapien
ttctgagaagggtacgcagaacagatgttagtt

SEQ ID NO: 860558 - DNA, 33 bp, Homo sapien
ttctgagaagggtacgtagaacagatgttagtt

SEQ ID NO: 860559 - DNA, 33 bp, Homo sapien
agaatcaccccatgatcaagtcccagctctttg

SEQ ID NO: 860560 - DNA, 33 bp, Homo sapien
agaatcaccccatgatgaagtcccagctctttg

SEQ ID NO: 860561 - DNA, 33 bp, Homo sapien
aggatgtaaaataggaacaatatgcagaactga

SEQ ID NO: 860562 - DNA, 33 bp, Homo sapien
aggatgtaaaataggaccaatatgcagaactga

SEQ ID NO: 860563 - DNA, 33 bp, Homo sapien
ttttcttttttaaatcgctgcgccatgtgaatt

SEQ ID NO: 860564 - DNA, 33 bp, Homo sapien
ttttcttttttaaatctctgcgccatgtgaatt

SEQ ID NO: 860565 - DNA, 33 bp, Homo sapien
gaaggaatcagaaaacaggtccgggtgcagtgg

SEQ ID NO: 860566 - DNA, 33 bp, Homo sapien
gaaggaatcagaaaacgggtccgggtgcagtgg

SEQ ID NO: 860567 - DNA, 33 bp, Homo sapien
ggcagcatccttacccactcagaatggaagcca

SEQ ID NO: 860568 - DNA, 33 bp, Homo sapien
ggcagcatccttacccgctcagaatggaagcca

SEQ ID NO: 860569 - DNA, 33 bp, Homo sapien
agatggcgattggtcaactgaggtgagctttcc

SEQ ID NO: 860570 - DNA, 33 bp, Homo sapien
agatggcgattggtcagctgaggtgagctttcc

SEQ ID NO: 860571 - DNA, 33 bp, Homo sapien
atgaaactggacataccgattgtcactacctag

SEQ ID NO: 860572 - DNA, 33 bp, Homo sapien
atgaaactggacatactgattgtcactacctag

SEQ ID NO: 860573 - DNA, 33 bp, Homo sapien
cttccaggagagaagacctatcctagccacaca

SEQ ID NO: 860574 - DNA, 33 bp, Homo sapien
cttccaggagagaagatctatcctagccacaca

SEQ ID NO: 860575 - DNA, 33 bp, Homo sapien
aaacagtgtgtaggcccctataagtatcatggg

SEQ ID NO: 860576 - DNA, 33 bp, Homo sapien
aaacagtgtgtaggcctctataagtatcatggg

SEQ ID NO: 860577 - DNA, 33 bp, Homo sapien
ggtggtgggaggaacccacggaggcaatagtca

SEQ ID NO: 860578 - DNA, 33 bp, Homo sapien
ggtggtgggaggaacctacggaggcaatagtca

SEQ ID NO: 860579 - DNA, 33 bp, Homo sapien
aggtggctctggccccacgtaaggcccggctac

SEQ ID NO: 860580 - DNA, 33 bp, Homo sapien
aggtggctctggccccgcgtaaggcccggctac

SEQ ID NO: 860581 - DNA, 33 bp, Homo sapien
gttctcttggtagtcaataagtatcaggagatc

SEQ ID NO: 860582 - DNA, 33 bp, Homo sapien
gttctcttggtagtcagtaagtatcaggagatc

SEQ ID NO: 860583 - DNA, 33 bp, Homo sapien
caggggataatagtgaataattctgtttgtcaa

SEQ ID NO: 860584 - DNA, 33 bp, Homo sapien
caggggataatagtgagtaattctgtttgtcaa

SEQ ID NO: 860585 - DNA, 33 bp, Homo sapien
gctgccaaatctaccaatcagcttaagaaatag

SEQ ID NO: 860586 - DNA, 33 bp, Homo sapien
gctgccaaatctaccactcagcttaagaaatag

SEQ ID NO: 860587 - DNA, 33 bp, Homo sapien
ttcaaacgtgcaaaccagatttggtcaaatact

SEQ ID NO: 860588 - DNA, 33 bp, Homo sapien
ttcaaacgtgcaaaccggatttggtcaaatact

SEQ ID NO: 860589 - DNA, 33 bp, Homo sapien
gaactgataagcaccaagattttcttacagatt

SEQ ID NO: 860590 - DNA, 33 bp, Homo sapien
gaactgataagcaccaggattttcttacagatt

SEQ ID NO: 860591 - DNA, 33 bp, Homo sapien
tactttaacagtatcaagtgtttcctttgtact

SEQ ID NO: 860592 - DNA, 33 bp, Homo sapien
tactttaacagtatcaggtgtttcctttgtact

SEQ ID NO: 860593 - DNA, 33 bp, Homo sapien
aatttttgtcatttcactaatgttatatcagtg

SEQ ID NO: 860594 - DNA, 33 bp, Homo sapien
aatttttgtcatttcagtaatgttatatcagtg

SEQ ID NO: 860595 - DNA, 33 bp, Homo sapien
gtagaggtcgcttatcaatggaatggtgagttt

SEQ ID NO: 860596 - DNA, 33 bp, Homo sapien
gtagaggtcgcttatccatggaatggtgagttt

SEQ ID NO: 860597 - DNA, 33 bp, Homo sapien
aagtcagatgatacaactgaatgtttatgctag

SEQ ID NO: 860598 - DNA, 33 bp, Homo sapien
aagtcagatgatacaattgaatgtttatgctag

SEQ ID NO: 860599 - DNA, 33 bp, Homo sapien
catctctactacacccccctgacctggcccaga

SEQ ID NO: 860600 - DNA, 33 bp, Homo sapien
catctctactacaccctcctgacctggcccaga

SEQ ID NO: 860601 - DNA, 33 bp, Homo sapien
atattgttactcatcaagaaaatgaaaataaca

SEQ ID NO: 860602 - DNA, 33 bp, Homo sapien
atattgttactcatcaggaaaatgaaaataaca

SEQ ID NO: 860603 - DNA, 33 bp, Homo sapien
gaaatcttcattaactcaaccaaactatgccca

SEQ ID NO: 860604 - DNA, 33 bp, Homo sapien
gaaatcttcattaactgaaccaaactatgccca

SEQ ID NO: 860605 - DNA, 33 bp, Homo sapien
cctaatagaatttctgcataaccggagagagag

SEQ ID NO: 860606 - DNA, 33 bp, Homo sapien
cctaatagaatttctgtataaccggagagagag

SEQ ID NO: 860607 - DNA, 33 bp, Homo sapien
gccctcatgggacttaaattttggttgagggag

SEQ ID NO: 860608 - DNA, 33 bp, Homo sapien
gccctcatgggacttacattttggttgagggag

SEQ ID NO: 860609 - DNA, 33 bp, Homo sapien
aatgcaccaatcgacaatctgtaactagctact

SEQ ID NO: 860610 - DNA, 33 bp, Homo sapien
aatgcaccaatcgacactctgtaactagctact

SEQ ID NO: 860611 - DNA, 33 bp, Homo sapien
cagggtatcagagaagaaggagccaaagtgtac

SEQ ID NO: 860612 - DNA, 33 bp, Homo sapien
cagggtatcagagaaggaggagccaaagtgtac

SEQ ID NO: 860613 - DNA, 33 bp, Homo sapien
ctattgtactgccttacagatttttgattgatt

SEQ ID NO: 860614 - DNA, 33 bp, Homo sapien
ctattgtactgccttatagatttttgattgatt

SEQ ID NO: 860615 - DNA, 33 bp, Homo sapien
tgttaaaataaccaccaatctcatcagaaaatt

SEQ ID NO: 860616 - DNA, 33 bp, Homo sapien
tgttaaaataaccaccgatctcatcagaaaatt

SEQ ID NO: 860617 - DNA, 33 bp, Homo sapien
acctaattttgtctcaatattttatgaagtgct

SEQ ID NO: 860618 - DNA, 33 bp, Homo sapien
acctaattttgtctcattattttatgaagtgct

SEQ ID NO: 860619 - DNA, 33 bp, Homo sapien
aaatcttgcatgtagacgtggatatggaagtac

SEQ ID NO: 860620 - DNA, 33 bp, Homo sapien
aaatcttgcatgtagatgtggatatggaagtac

SEQ ID NO: 860621 - DNA, 33 bp, Homo sapien
tataagtaatctagcaataatttaaagtatacg

SEQ ID NO: 860622 - DNA, 33 bp, Homo sapien
tataagtaatctagcagtaatttaaagtatacg

SEQ ID NO: 860623 - DNA, 33 bp, Homo sapien
aaagacctggaaagaactgggatcatggacaac

SEQ ID NO: 860624 - DNA, 33 bp, Homo sapien
aaagacctggaaagaagtgggatcatggacaac

SEQ ID NO: 860625 - DNA, 33 bp, Homo sapien
cagggctaacaggacaatgccacaagatgggag

SEQ ID NO: 860626 - DNA, 33 bp, Homo sapien
cagggctaacaggacagtgccacaagatgggag

SEQ ID NO: 860627 - DNA, 33 bp, Homo sapien
aaattaacaaacagaccctgagcttggctaaaa

SEQ ID NO: 860628 - DNA, 33 bp, Homo sapien
aaattaacaaacagactctgagcttggctaaaa

SEQ ID NO: 860629 - DNA, 33 bp, Homo sapien
agatggggtcaacagaaggttgttgtttcagga

SEQ ID NO: 860630 - DNA, 33 bp, Homo sapien
agatggggtcaacagagggttgttgtttcagga

SEQ ID NO: 860631 - DNA, 33 bp, Homo sapien
tagctgaacttccaaaaccttccagaattggct

SEQ ID NO: 860632 - DNA, 33 bp, Homo sapien
tagctgaacttccaaagccttccagaattggct

SEQ ID NO: 860633 - DNA, 33 bp, Homo sapien
aactatttaataggaacgctgataactggacca

SEQ ID NO: 860634 - DNA, 33 bp, Homo sapien
aactatttaataggaatgctgataactggacca

SEQ ID NO: 860635 - DNA, 33 bp, Homo sapien
atgtgccaagcactgcaataaacgttttatgtg

SEQ ID NO: 860636 - DNA, 33 bp, Homo sapien
atgtgccaagcactgcgataaacgttttatgtg

SEQ ID NO: 860637 - DNA, 33 bp, Homo sapien
gttctgtaggcagtgaagatttagtttttataa

SEQ ID NO: 860638 - DNA, 33 bp, Homo sapien
gttctgtaggcagtgaggatttagtttttataa

SEQ ID NO: 860639 - DNA, 33 bp, Homo sapien
aacaccaaacgcctgcaaggatgtgagcaacag

SEQ ID NO: 860640 - DNA, 33 bp, Homo sapien
aacaccaaacgcctgcgaggatgtgagcaacag

SEQ ID NO: 860641 - DNA, 33 bp, Homo sapien
ttcatgatggcaaagaacagtttattgtgttga

SEQ ID NO: 860642 - DNA, 33 bp, Homo sapien
ttcatgatggcaaagagcagtttattgtgttga

SEQ ID NO: 860643 - DNA, 33 bp, Homo sapien
ttggcacccactttggacacctttatagtattt

SEQ ID NO: 860644 - DNA, 33 bp, Homo sapien
ttggcacccactttgggcacctttatagtattt

SEQ ID NO: 860645 - DNA, 33 bp, Homo sapien
ggaccgctgtatcctacggtagctttattttta

SEQ ID NO: 860646 - DNA, 33 bp, Homo sapien
ggaccgctgtatcctatggtagctttattttta

SEQ ID NO: 860647 - DNA, 33 bp, Homo sapien
tctatataggcagagaggtctaagaactcattg

SEQ ID NO: 860648 - DNA, 33 bp, Homo sapien
tctatataggcagagatgtctaagaactcattg

SEQ ID NO: 860649 - DNA, 33 bp, Homo sapien
ttgaattactttatccaccctctatttccacac

SEQ ID NO: 860650 - DNA, 33 bp, Homo sapien
ttgaattactttatcccccctctatttccacac

SEQ ID NO: 860651 - DNA, 33 bp, Homo sapien
ccaccatgctgacctaaaaataagatttataat

SEQ ID NO: 860652 - DNA, 33 bp, Homo sapien
ccaccatgctgacctacaaataagatttataat

SEQ ID NO: 860653 - DNA, 33 bp, Homo sapien
ctgaagtgttaactaaacctgttgcacctgatt

SEQ ID NO: 860654 - DNA, 33 bp, Homo sapien
ctgaagtgttaactaagcctgttgcacctgatt

SEQ ID NO: 860655 - DNA, 33 bp, Homo sapien
tgatttccaatctagccacaaagtcttagtacc

SEQ ID NO: 860656 - DNA, 33 bp, Homo sapien
tgatttccaatctagcgacaaagtcttagtacc

SEQ ID NO: 860657 - DNA, 33 bp, Homo sapien
actcagtgaatcaccccagtagcaggtactaag

SEQ ID NO: 860658 - DNA, 33 bp, Homo sapien
actcagtgaatcacccgagtagcaggtactaag

SEQ ID NO: 860659 - DNA, 33 bp, Homo sapien
gagtttgatgcaaaagaattatgaaaaccttgt

SEQ ID NO: 860660 - DNA, 33 bp, Homo sapien
gagtttgatgcaaaaggattatgaaaaccttgt

SEQ ID NO: 860661 - DNA, 33 bp, Homo sapien
ttgagagaaatgggtaataaagacaaagattat

SEQ ID NO: 860662 - DNA, 33 bp, Homo sapien
ttgagagaaatgggtactaaagacaaagattat

SEQ ID NO: 860663 - DNA, 33 bp, Homo sapien
ctgctaaaggaattccagagaacacttgatgat

SEQ ID NO: 860664 - DNA, 33 bp, Homo sapien
ctgctaaaggaattccggagaacacttgatgat

SEQ ID NO: 860665 - DNA, 33 bp, Homo sapien
taagtaggtaatctagaactgagtatatatatc

SEQ ID NO: 860666 - DNA, 33 bp, Homo sapien
taagtaggtaatctagcactgagtatatatatc

SEQ ID NO: 860667 - DNA, 33 bp, Homo sapien
tatcttccttaaagaggctcagttggttagcat

SEQ ID NO: 860668 - DNA, 33 bp, Homo sapien
tatcttccttaaagagtctcagttggttagcat

SEQ ID NO: 860669 - DNA, 33 bp, Homo sapien
ttacttgagaagttcaccgatctgaccgtttcc

SEQ ID NO: 860670 - DNA, 33 bp, Homo sapien
ttacttgagaagttcatcgatctgaccgtttcc

SEQ ID NO: 860671 - DNA, 33 bp, Homo sapien
ttataataattcacaacctcactatttatggat

SEQ ID NO: 860672 - DNA, 33 bp, Homo sapien
ttataataattcacaatctcactatttatggat

SEQ ID NO: 860673 - DNA, 33 bp, Homo sapien
ccagagactgaggttcaagatgtggataaaggt

SEQ ID NO: 860674 - DNA, 33 bp, Homo sapien
ccagagactgaggttcgagatgtggataaaggt

SEQ ID NO: 860675 - DNA, 33 bp, Homo sapien
cttgggaaattctggacaccattgcagaactca

SEQ ID NO: 860676 - DNA, 33 bp, Homo sapien
cttgggaaattctggataccattgcagaactca

SEQ ID NO: 860677 - DNA, 33 bp, Homo sapien
agagacacacacaaaaaattgcaggatttccca

SEQ ID NO: 860678 - DNA, 33 bp, Homo sapien
agagacacacacaaaacattgcaggatttccca

SEQ ID NO: 860679 - DNA, 33 bp, Homo sapien
aggagattgcatatgaaaaactgcaggaggaag

SEQ ID NO: 860680 - DNA, 33 bp, Homo sapien
aggagattgcatatgagaaactgcaggaggaag

SEQ ID NO: 860681 - DNA, 33 bp, Homo sapien
ccagtaggtcaaagagaagtctctgtagccttg

SEQ ID NO: 860682 - DNA, 33 bp, Homo sapien
ccagtaggtcaaagaggagtctctgtagccttg

SEQ ID NO: 860683 - DNA, 33 bp, Homo sapien
tggttcagtcgactccaatagtgagaggcaggt

SEQ ID NO: 860684 - DNA, 33 bp, Homo sapien
tggttcagtcgactcctatagtgagaggcaggt

SEQ ID NO: 860685 - DNA, 33 bp, Homo sapien
ctcctccatgaaaatggaagcggaaacatgacc

SEQ ID NO: 860686 - DNA, 33 bp, Homo sapien
ctcctccatgaaaatgtaagcggaaacatgacc

SEQ ID NO: 860687 - DNA, 33 bp, Homo sapien
ttttttcctttgaactcagctatgaattttaat

SEQ ID NO: 860688 - DNA, 33 bp, Homo sapien
ttttttcctttgaacttagctatgaattttaat

SEQ ID NO: 860689 - DNA, 33 bp, Homo sapien
ggtgctaagtttgtcagaaagaataaatgagtc

SEQ ID NO: 860690 - DNA, 33 bp, Homo sapien
ggtgctaagtttgtcataaagaataaatgagtc

SEQ ID NO: 860691 - DNA, 33 bp, Homo sapien
gaataggtgaccattacagtttatctctaacta

SEQ ID NO: 860692 - DNA, 33 bp, Homo sapien
gaataggtgaccattatagtttatctctaacta

SEQ ID NO: 860693 - DNA, 33 bp, Homo sapien
acccatgatcccacaacgcggaatcatgttatt

SEQ ID NO: 860694 - DNA, 33 bp, Homo sapien
acccatgatcccacaatgcggaatcatgttatt

SEQ ID NO: 860695 - DNA, 33 bp, Homo sapien
tcatgggttgtgcaagaccctgtagttcacatt

SEQ ID NO: 860696 - DNA, 33 bp, Homo sapien
tcatgggttgtgcaaggccctgtagttcacatt

SEQ ID NO: 860697 - DNA, 33 bp, Homo sapien
agcggacacctgaagacgaaaaggctgcaggag

SEQ ID NO: 860698 - DNA, 33 bp, Homo sapien
agcggacacctgaagatgaaaaggctgcaggag

SEQ ID NO: 860699 - DNA, 33 bp, Homo sapien
tgcctctcttgactaaacctattcccagccttg

SEQ ID NO: 860700 - DNA, 33 bp, Homo sapien
tgcctctcttgactaaccctattcccagccttg

SEQ ID NO: 860701 - DNA, 33 bp, Homo sapien
gggcaggcaaacaggaacagaagttctcaccct

SEQ ID NO: 860702 - DNA, 33 bp, Homo sapien
gggcaggcaaacaggagcagaagttctcaccct

SEQ ID NO: 860703 - DNA, 33 bp, Homo sapien
aaaatcatctgagcagacaaatataactctttt

SEQ ID NO: 860704 - DNA, 33 bp, Homo sapien
aaaatcatctgagcaggcaaatataactctttt

SEQ ID NO: 860705 - DNA, 33 bp, Homo sapien
catcaaggcccagaacactgaaagaaagctgaa

SEQ ID NO: 860706 - DNA, 33 bp, Homo sapien
catcaaggcccagaacgctgaaagaaagctgaa

SEQ ID NO: 860707 - DNA, 33 bp, Homo sapien
actctggtttatctgacaaaaagttggagaaga

SEQ ID NO: 860708 - DNA, 33 bp, Homo sapien
actctggtttatctgataaaaagttggagaaga

SEQ ID NO: 860709 - DNA, 33 bp, Homo sapien
taacaaaatttgcaaaaaacccattcaggtaat

SEQ ID NO: 860710 - DNA, 33 bp, Homo sapien
taacaaaatttgcaaacaacccattcaggtaat

SEQ ID NO: 860711 - DNA, 33 bp, Homo sapien
ggaaaacaacttcctaagattaaaagcaatgag

SEQ ID NO: 860712 - DNA, 33 bp, Homo sapien
ggaaaacaacttcctacgattaaaagcaatgag

SEQ ID NO: 860713 - DNA, 33 bp, Homo sapien
agtgacgcagtgggaaaccaacgagaacaccaa

SEQ ID NO: 860714 - DNA, 33 bp, Homo sapien
agtgacgcagtgggaagccaacgagaacaccaa

SEQ ID NO: 860715 - DNA, 33 bp, Homo sapien
gtattttcaattgttagcctttgtagcaccaaa

SEQ ID NO: 860716 - DNA, 33 bp, Homo sapien
gtattttcaattgttatcctttgtagcaccaaa

SEQ ID NO: 860717 - DNA, 33 bp, Homo sapien
cagctgagaaaaaatacaaatttgaagacaaca

SEQ ID NO: 860718 - DNA, 33 bp, Homo sapien
cagctgagaaaaaatataaatttgaagacaaca

SEQ ID NO: 860719 - DNA, 33 bp, Homo sapien
ggaaagaggttgctcactaaatggttgctctct

SEQ ID NO: 860720 - DNA, 33 bp, Homo sapien
ggaaagaggttgctcagtaaatggttgctctct

SEQ ID NO: 860721 - DNA, 33 bp, Homo sapien
tgctcaactgcagacaacaaggaacacccaagt

SEQ ID NO: 860722 - DNA, 33 bp, Homo sapien
tgctcaactgcagacagcaaggaacacccaagt

SEQ ID NO: 860723 - DNA, 33 bp, Homo sapien
cctttaagtaagtcacgatggagaagttctaac

SEQ ID NO: 860724 - DNA, 33 bp, Homo sapien
cctttaagtaagtcactatggagaagttctaac

SEQ ID NO: 860725 - DNA, 33 bp, Homo sapien
ctgtctaatcgaacgcccttcttgacttcaaac

SEQ ID NO: 860726 - DNA, 33 bp, Homo sapien
ctgtctaatcgaacgctcttcttgacttcaaac

SEQ ID NO: 860727 - DNA, 33 bp, Homo sapien
atatttccaaaattcaacctgtggaatataatt

SEQ ID NO: 860728 - DNA, 33 bp, Homo sapien
atatttccaaaattcagcctgtggaatataatt

SEQ ID NO: 860729 - DNA, 33 bp, Homo sapien
tccttagtgtcatagccgccaggaaatttaacc

SEQ ID NO: 860730 - DNA, 33 bp, Homo sapien
tccttagtgtcatagctgccaggaaatttaacc

SEQ ID NO: 860731 - DNA, 33 bp, Homo sapien
atagatctaatcttcaaacaaaaggataataca

SEQ ID NO: 860732 - DNA, 33 bp, Homo sapien
atagatctaatcttcacacaaaaggataataca

SEQ ID NO: 860733 - DNA, 33 bp, Homo sapien
ggtgcctacaataccaataccccagctacccag

SEQ ID NO: 860734 - DNA, 33 bp, Homo sapien
ggtgcctacaataccagtaccccagctacccag

SEQ ID NO: 860735 - DNA, 33 bp, Homo sapien
caaaatgatgaaatacccacaagtcgtgtcaga

SEQ ID NO: 860736 - DNA, 33 bp, Homo sapien
caaaatgatgaaatactcacaagtcgtgtcaga

SEQ ID NO: 860737 - DNA, 33 bp, Homo sapien
aggccggtcttcctgaaggtagaaagaaactga

SEQ ID NO: 860738 - DNA, 33 bp, Homo sapien
aggccggtcttcctgagggtagaaagaaactga

SEQ ID NO: 860739 - DNA, 33 bp, Homo sapien
agagaacagcggcggaagtgggctgcctggcag

SEQ ID NO: 860740 - DNA, 33 bp, Homo sapien
agagaacagcggcggaggtgggctgcctggcag

SEQ ID NO: 860741 - DNA, 33 bp, Homo sapien
ccaccgtacccagccacgttatgcagttcttaa

SEQ ID NO: 860742 - DNA, 33 bp, Homo sapien
ccaccgtacccagccatgttatgcagttcttaa

SEQ ID NO: 860743 - DNA, 33 bp, Homo sapien
ttactctgtcctgccaatgatgttgcaatctgc

SEQ ID NO: 860744 - DNA, 33 bp, Homo sapien
ttactctgtcctgccagtgatgttgcaatctgc

SEQ ID NO: 860745 - DNA, 33 bp, Homo sapien
acctagctgttgggaagataaaatgaaagtgtg

SEQ ID NO: 860746 - DNA, 33 bp, Homo sapien
acctagctgttgggaatataaaatgaaagtgtg

SEQ ID NO: 860747 - DNA, 33 bp, Homo sapien
tcagatttgctctcaaggttctaagactctcct

SEQ ID NO: 860748 - DNA, 33 bp, Homo sapien
tcagatttgctctcaatgttctaagactctcct

SEQ ID NO: 860749 - DNA, 33 bp, Homo sapien
attcatgcgcacttccccgggagctgactctgg

SEQ ID NO: 860750 - DNA, 33 bp, Homo sapien
attcatgcgcacttcctcgggagctgactctgg

SEQ ID NO: 860751 - DNA, 33 bp, Homo sapien
actgacattcgaggccaaaggaatactcctgcc

SEQ ID NO: 860752 - DNA, 33 bp, Homo sapien
actgacattcgaggcccaaggaatactcctgcc

SEQ ID NO: 860753 - DNA, 33 bp, Homo sapien
atttagatttactctacgtggcatggagaatca

SEQ ID NO: 860754 - DNA, 33 bp, Homo sapien
atttagatttactctatgtggcatggagaatca

SEQ ID NO: 860755 - DNA, 33 bp, Homo sapien
cgtctaagccaccatcccttcttggctgtatga

SEQ ID NO: 860756 - DNA, 33 bp, Homo sapien
cgtctaagccaccatctcttcttggctgtatga

SEQ ID NO: 860757 - DNA, 33 bp, Homo sapien
tacacagcaatgaaaaaaatacatagagatgta

SEQ ID NO: 860758 - DNA, 33 bp, Homo sapien
tacacagcaatgaaaacaatacatagagatgta

SEQ ID NO: 860759 - DNA, 33 bp, Homo sapien
gtattcccctgcataactatcattattacactt

SEQ ID NO: 860760 - DNA, 33 bp, Homo sapien
gtattcccctgcataagtatcattattacactt

SEQ ID NO: 860761 - DNA, 33 bp, Homo sapien
aatatctgttcaatagcccatcaccaaattttc

SEQ ID NO: 860762 - DNA, 33 bp, Homo sapien
aatatctgttcaatagtccatcaccaaattttc

SEQ ID NO: 860763 - DNA, 33 bp, Homo sapien
atccaatcaaggttcacataaatgcgtttgatt

SEQ ID NO: 860764 - DNA, 33 bp, Homo sapien
atccaatcaaggttcatataaatgcgtttgatt

SEQ ID NO: 860765 - DNA, 33 bp, Homo sapien
caaacagttttggcaccgatacttcatatagat

SEQ ID NO: 860766 - DNA, 33 bp, Homo sapien
caaacagttttggcacggatacttcatatagat

SEQ ID NO: 860767 - DNA, 33 bp, Homo sapien
catgtacttgggtcataagctttcgccaatata

SEQ ID NO: 860768 - DNA, 33 bp, Homo sapien
catgtacttgggtcatgagctttcgccaatata

SEQ ID NO: 860769 - DNA, 33 bp, Homo sapien
tcttcacaaaaaccacagccaaaaatgtgcctt

SEQ ID NO: 860770 - DNA, 33 bp, Homo sapien
tcttcacaaaaaccaccgccaaaaatgtgcctt

SEQ ID NO: 860771 - DNA, 33 bp, Homo sapien
aggatacggacctacacaatgaatggttggact

SEQ ID NO: 860772 - DNA, 33 bp, Homo sapien
aggatacggacctacataatgaatggttggact

SEQ ID NO: 860773 - DNA, 33 bp, Homo sapien
attatgaatagttagcaatttacaagagcaact

SEQ ID NO: 860774 - DNA, 33 bp, Homo sapien
attatgaatagttagcgatttacaagagcaact

SEQ ID NO: 860775 - DNA, 33 bp, Homo sapien
ttgttagtaaaaagaacagagtactggctaaag

SEQ ID NO: 860776 - DNA, 33 bp, Homo sapien
ttgttagtaaaaagaatagagtactggctaaag

SEQ ID NO: 860777 - DNA, 33 bp, Homo sapien
tctataggacaaatcaaaatggtaagccagcag

SEQ ID NO: 860778 - DNA, 33 bp, Homo sapien
tctataggacaaatcagaatggtaagccagcag

SEQ ID NO: 860779 - DNA, 33 bp, Homo sapien
gtgttgcagaaatgtacgcctcatatagctgat

SEQ ID NO: 860780 - DNA, 33 bp, Homo sapien
gtgttgcagaaatgtatgcctcatatagctgat

SEQ ID NO: 860781 - DNA, 33 bp, Homo sapien
atgctctgtttactgacggacaaaatcttttta

SEQ ID NO: 860782 - DNA, 33 bp, Homo sapien
atgctctgtttactgatggacaaaatcttttta

SEQ ID NO: 860783 - DNA, 33 bp, Homo sapien
ccagattcgttctccactatccagaaaagttgt

SEQ ID NO: 860784 - DNA, 33 bp, Homo sapien
ccagattcgttctccattatccagaaaagttgt

SEQ ID NO: 860785 - DNA, 33 bp, Homo sapien
tgacacaatgttagagaaagtagggtatgtagt

SEQ ID NO: 860786 - DNA, 33 bp, Homo sapien
tgacacaatgttagagcaagtagggtatgtagt

SEQ ID NO: 860787 - DNA, 33 bp, Homo sapien
ctgaaacatccagtaaacacctttggaaaatct

SEQ ID NO: 860788 - DNA, 33 bp, Homo sapien
ctgaaacatccagtaagcacctttggaaaatct

SEQ ID NO: 860789 - DNA, 33 bp, Homo sapien
acccggaagtacataaagggacgcggtagcatt

SEQ ID NO: 860790 - DNA, 33 bp, Homo sapien
acccggaagtacataaggggacgcggtagcatt

SEQ ID NO: 860791 - DNA, 33 bp, Homo sapien
ggatggcacccgtgtaccacacatctgtcatct

SEQ ID NO: 860792 - DNA, 33 bp, Homo sapien
ggatggcacccgtgtagcacacatctgtcatct

SEQ ID NO: 860793 - DNA, 33 bp, Homo sapien
ctgggccgagaaacatcaatgcattccattctg

SEQ ID NO: 860794 - DNA, 33 bp, Homo sapien
ctgggccgagaaacattaatgcattccattctg

SEQ ID NO: 860795 - DNA, 33 bp, Homo sapien
tagagttaacatatccaagtgggcctcttttga

SEQ ID NO: 860796 - DNA, 33 bp, Homo sapien
tagagttaacatatccgagtgggcctcttttga

SEQ ID NO: 860797 - DNA, 33 bp, Homo sapien
aatccagtggcaataaagaacttaaggtttaga

SEQ ID NO: 860798 - DNA, 33 bp, Homo sapien
aatccagtggcaataaggaacttaaggtttaga

SEQ ID NO: 860799 - DNA, 33 bp, Homo sapien
tctagttgctctcataacctttttgaagtattt

SEQ ID NO: 860800 - DNA, 33 bp, Homo sapien
tctagttgctctcatatcctttttgaagtattt

SEQ ID NO: 860801 - DNA, 33 bp, Homo sapien
agatgataagcaacagcccctttcccacagagt

SEQ ID NO: 860802 - DNA, 33 bp, Homo sapien
agatgataagcaacagtccctttcccacagagt

SEQ ID NO: 860803 - DNA, 33 bp, Homo sapien
taccactaaaaccgcccaaacaagaatgtaagc

SEQ ID NO: 860804 - DNA, 33 bp, Homo sapien
taccactaaaaccgcctaaacaagaatgtaagc

SEQ ID NO: 860805 - DNA, 33 bp, Homo sapien
tgagagcagaaatgagaagtatttggaaagcta

SEQ ID NO: 860806 - DNA, 33 bp, Homo sapien
tgagagcagaaatgaggagtatttggaaagcta

SEQ ID NO: 860807 - DNA, 33 bp, Homo sapien
tctgtggcatctgtcaccacaggaagaatatag

SEQ ID NO: 860808 - DNA, 33 bp, Homo sapien
tctgtggcatctgtcatcacaggaagaatatag

SEQ ID NO: 860809 - DNA, 33 bp, Homo sapien
ctcattactttgacacactttctgattcaatat

SEQ ID NO: 860810 - DNA, 33 bp, Homo sapien
ctcattactttgacacgctttctgattcaatat

SEQ ID NO: 860811 - DNA, 33 bp, Homo sapien
aaaagataaaaacagagtcaagagaaagtatca

SEQ ID NO: 860812 - DNA, 33 bp, Homo sapien
aaaagataaaaacagattcaagagaaagtatca

SEQ ID NO: 860813 - DNA, 33 bp, Homo sapien
ttgacaaggaaaggaagctagacctatcatcta

SEQ ID NO: 860814 - DNA, 33 bp, Homo sapien
ttgacaaggaaaggaatctagacctatcatcta

SEQ ID NO: 860815 - DNA, 33 bp, Homo sapien
ctgagtactttgaagtaaagaagcagcctcaga

SEQ ID NO: 860816 - DNA, 33 bp, Homo sapien
ctgagtactttgaagttaagaagcagcctcaga

SEQ ID NO: 860817 - DNA, 33 bp, Homo sapien
tccattagagaaaagacgtgccagagagagaat

SEQ ID NO: 860818 - DNA, 33 bp, Homo sapien
tccattagagaaaagatgtgccagagagagaat

SEQ ID NO: 860819 - DNA, 33 bp, Homo sapien
cacgtccaataaactgcagtcctattggcaacc

SEQ ID NO: 860820 - DNA, 33 bp, Homo sapien
cacgtccaataaactgtagtcctattggcaacc

SEQ ID NO: 860821 - DNA, 33 bp, Homo sapien
cttagtggatgcttaccaaatgctgacacgtta

SEQ ID NO: 860822 - DNA, 33 bp, Homo sapien
cttagtggatgcttactaaatgctgacacgtta

SEQ ID NO: 860823 - DNA, 33 bp, Homo sapien
ttagataaaagataaaatctctgttgttcaaca

SEQ ID NO: 860824 - DNA, 33 bp, Homo sapien
ttagataaaagataaactctctgttgttcaaca

SEQ ID NO: 860825 - DNA, 33 bp, Homo sapien
agctgagtagagtgacaatagtaagtaacaata

SEQ ID NO: 860826 - DNA, 33 bp, Homo sapien
agctgagtagagtgactatagtaagtaacaata

SEQ ID NO: 860827 - DNA, 33 bp, Homo sapien
aattaaagacaaccaactgaaacataaaggaaa

SEQ ID NO: 860828 - DNA, 33 bp, Homo sapien
aattaaagacaaccaattgaaacataaaggaaa

SEQ ID NO: 860829 - DNA, 33 bp, Homo sapien
gattgggtattttgcacctagttgttacattat

SEQ ID NO: 860830 - DNA, 33 bp, Homo sapien
gattgggtattttgcatctagttgttacattat

SEQ ID NO: 860831 - DNA, 33 bp, Homo sapien
cacacacaaatgtgtccaaagaagttcagtaac

SEQ ID NO: 860832 - DNA, 33 bp, Homo sapien
cacacacaaatgtgtctaaagaagttcagtaac

SEQ ID NO: 860833 - DNA, 33 bp, Homo sapien
agacagcgttgattgtaaatagtcaagctctaa

SEQ ID NO: 860834 - DNA, 33 bp, Homo sapien
agacagcgttgattgtgaatagtcaagctctaa

SEQ ID NO: 860835 - DNA, 33 bp, Homo sapien
acagcttttatcagaaaactggcacttggaaaa

SEQ ID NO: 860836 - DNA, 33 bp, Homo sapien
acagcttttatcagaacactggcacttggaaaa

SEQ ID NO: 860837 - DNA, 33 bp, Homo sapien
gctagatcccctgcacccactctttctgccagt

SEQ ID NO: 860838 - DNA, 33 bp, Homo sapien
gctagatcccctgcacgcactctttctgccagt

SEQ ID NO: 860839 - DNA, 33 bp, Homo sapien
tctcattgtcagaaaacgtttttaccagaggaa

SEQ ID NO: 860840 - DNA, 33 bp, Homo sapien
tctcattgtcagaaaatgtttttaccagaggaa

SEQ ID NO: 860841 - DNA, 33 bp, Homo sapien
gagaattgtgaaaaagactgccctggctgttgt

SEQ ID NO: 860842 - DNA, 33 bp, Homo sapien
gagaattgtgaaaaagtctgccctggctgttgt

SEQ ID NO: 860843 - DNA, 33 bp, Homo sapien
acccagaccaaagaagcctccttatttctgaag

SEQ ID NO: 860844 - DNA, 33 bp, Homo sapien
acccagaccaaagaaggctccttatttctgaag

SEQ ID NO: 860845 - DNA, 33 bp, Homo sapien
cagttgaaaaagcaacacatctgacattatttc

SEQ ID NO: 860846 - DNA, 33 bp, Homo sapien
cagttgaaaaagcaacgcatctgacattatttc

SEQ ID NO: 860847 - DNA, 33 bp, Homo sapien
tagcgataaatgctccagagagagaataaagca

SEQ ID NO: 860848 - DNA, 33 bp, Homo sapien
tagcgataaatgctccggagagagaataaagca

SEQ ID NO: 860849 - DNA, 33 bp, Homo sapien
ggctgctacttctctaaaacaatctcttaccag

SEQ ID NO: 860850 - DNA, 33 bp, Homo sapien
ggctgctacttctctagaacaatctcttaccag

SEQ ID NO: 860851 - DNA, 33 bp, Homo sapien
tccaactagggttaccagataaaacacaggata

SEQ ID NO: 860852 - DNA, 33 bp, Homo sapien
tccaactagggttacccgataaaacacaggata

SEQ ID NO: 860853 - DNA, 33 bp, Homo sapien
catcagcagaaggacacggtgaccacagaggtc

SEQ ID NO: 860854 - DNA, 33 bp, Homo sapien
catcagcagaaggacatggtgaccacagaggtc

SEQ ID NO: 860855 - DNA, 33 bp, Homo sapien
gtaatgtatgtttggactattgattgcatccaa

SEQ ID NO: 860856 - DNA, 33 bp, Homo sapien
gtaatgtatgtttggattattgattgcatccaa

SEQ ID NO: 860857 - DNA, 33 bp, Homo sapien
acaaagactaatgttacagcccctgtgttctca

SEQ ID NO: 860858 - DNA, 33 bp, Homo sapien
acaaagactaatgttatagcccctgtgttctca

SEQ ID NO: 860859 - DNA, 33 bp, Homo sapien
atatgcagcctcctccaaagacagaaacaagct

SEQ ID NO: 860860 - DNA, 33 bp, Homo sapien
atatgcagcctcctccgaagacagaaacaagct

SEQ ID NO: 860861 - DNA, 33 bp, Homo sapien
tttgcctaaagctctacaatattggtaagcaaa

SEQ ID NO: 860862 - DNA, 33 bp, Homo sapien
tttgcctaaagctctagaatattggtaagcaaa

SEQ ID NO: 860863 - DNA, 33 bp, Homo sapien
ctcaaatatataccagacatgggaatcctgtga

SEQ ID NO: 860864 - DNA, 33 bp, Homo sapien
ctcaaatatataccagtcatgggaatcctgtga

SEQ ID NO: 860865 - DNA, 33 bp, Homo sapien
ctggtatatatttgagaaactcgcttataaaaa

SEQ ID NO: 860866 - DNA, 33 bp, Homo sapien
ctggtatatatttgagcaactcgcttataaaaa

SEQ ID NO: 860867 - DNA, 33 bp, Homo sapien
gggaaagacagctatgaaaagccttgatgagca

SEQ ID NO: 860868 - DNA, 33 bp, Homo sapien
gggaaagacagctatggaaagccttgatgagca

SEQ ID NO: 860869 - DNA, 33 bp, Homo sapien
actgccattccacgtaaccacttgtagttttta

SEQ ID NO: 860870 - DNA, 33 bp, Homo sapien
actgccattccacgtagccacttgtagttttta

SEQ ID NO: 860871 - DNA, 33 bp, Homo sapien
ttcatggttgacacctaacaaaaagacagccaa

SEQ ID NO: 860872 - DNA, 33 bp, Homo sapien
ttcatggttgacacctgacaaaaagacagccaa

SEQ ID NO: 860873 - DNA, 33 bp, Homo sapien
ttaatttgtccacttcacaaatgtttctcacat

SEQ ID NO: 860874 - DNA, 33 bp, Homo sapien
ttaatttgtccacttcgcaaatgtttctcacat

SEQ ID NO: 860875 - DNA, 33 bp, Homo sapien
ctgcagtgcgttgggacgagcaaaccacctggg

SEQ ID NO: 860876 - DNA, 33 bp, Homo sapien
ctgcagtgcgttgggatgagcaaaccacctggg

SEQ ID NO: 860877 - DNA, 33 bp, Homo sapien
tcctgcttatctctagaccaggctctcaactct

SEQ ID NO: 860878 - DNA, 33 bp, Homo sapien
tcctgcttatctctaggccaggctctcaactct

SEQ ID NO: 860879 - DNA, 33 bp, Homo sapien
tttttggcatatctgaatcactctaggatcccc

SEQ ID NO: 860880 - DNA, 33 bp, Homo sapien
tttttggcatatctgagtcactctaggatcccc

SEQ ID NO: 860881 - DNA, 33 bp, Homo sapien
tattctgcagatgtaaatataatgtagggcaat

SEQ ID NO: 860882 - DNA, 33 bp, Homo sapien
tattctgcagatgtaactataatgtagggcaat

SEQ ID NO: 860883 - DNA, 33 bp, Homo sapien
tgggtcacagcttgtgaaaagaattgccattaa

SEQ ID NO: 860884 - DNA, 33 bp, Homo sapien
tgggtcacagcttgtggaaagaattgccattaa

SEQ ID NO: 860885 - DNA, 33 bp, Homo sapien
aactgttgctaagggaaatttactcctaaatta

SEQ ID NO: 860886 - DNA, 33 bp, Homo sapien
aactgttgctaagggagatttactcctaaatta

SEQ ID NO: 860887 - DNA, 33 bp, Homo sapien
tcagaggcccatgttaagaaattgtatagaaac

SEQ ID NO: 860888 - DNA, 33 bp, Homo sapien
tcagaggcccatgttaggaaattgtatagaaac

SEQ ID NO: 860889 - DNA, 33 bp, Homo sapien
ctctgagaagtaatcactacataattctgtatc

SEQ ID NO: 860890 - DNA, 33 bp, Homo sapien
ctctgagaagtaatcagtacataattctgtatc

SEQ ID NO: 860891 - DNA, 33 bp, Homo sapien
tgtttatttttccaaaaaggctgcaccagaact

SEQ ID NO: 860892 - DNA, 33 bp, Homo sapien
tgtttatttttccaaagaggctgcaccagaact

SEQ ID NO: 860893 - DNA, 33 bp, Homo sapien
agaagacagttaaacccgataccattgcttcca

SEQ ID NO: 860894 - DNA, 33 bp, Homo sapien
agaagacagttaaacctgataccattgcttcca

SEQ ID NO: 860895 - DNA, 33 bp, Homo sapien
agactgagcaggccacaatttagaatattagca

SEQ ID NO: 860896 - DNA, 33 bp, Homo sapien
agactgagcaggccacgatttagaatattagca

SEQ ID NO: 860897 - DNA, 33 bp, Homo sapien
ttttttgaggatgaaaaaacaaaattatttaga

SEQ ID NO: 860898 - DNA, 33 bp, Homo sapien
ttttttgaggatgaaacaacaaaattatttaga

SEQ ID NO: 860899 - DNA, 33 bp, Homo sapien
gagactgtcacttaccccttcaacattccaaca

SEQ ID NO: 860900 - DNA, 33 bp, Homo sapien
gagactgtcacttacctcttcaacattccaaca

SEQ ID NO: 860901 - DNA, 33 bp, Homo sapien
aatatttttacgttacactgacttttgctttct

SEQ ID NO: 860902 - DNA, 33 bp, Homo sapien
aatatttttacgttacgctgacttttgctttct

SEQ ID NO: 860903 - DNA, 33 bp, Homo sapien
ataggggtatggtacaatctttaactgtgtgtt

SEQ ID NO: 860904 - DNA, 33 bp, Homo sapien
ataggggtatggtacattctttaactgtgtgtt

SEQ ID NO: 860905 - DNA, 33 bp, Homo sapien
tacagtcacaacttgccctgattctttaaataa

SEQ ID NO: 860906 - DNA, 33 bp, Homo sapien
tacagtcacaacttgctctgattctttaaataa

SEQ ID NO: 860907 - DNA, 33 bp, Homo sapien
tcttgggaaggaatgccgaacaattgatttaca

SEQ ID NO: 860908 - DNA, 33 bp, Homo sapien
tcttgggaaggaatgctgaacaattgatttaca

SEQ ID NO: 860909 - DNA, 33 bp, Homo sapien
gtgtgatccattccaaagcccataggattgatc

SEQ ID NO: 860910 - DNA, 33 bp, Homo sapien
gtgtgatccattccaatgcccataggattgatc

SEQ ID NO: 860911 - DNA, 33 bp, Homo sapien
accaacttaggccagaagaggggtgtgatccat

SEQ ID NO: 860912 - DNA, 33 bp, Homo sapien
accaacttaggccagaggaggggtgtgatccat

SEQ ID NO: 860913 - DNA, 33 bp, Homo sapien
atgttcttcttgtgaaatgttttactggggttc

SEQ ID NO: 860914 - DNA, 33 bp, Homo sapien
atgttcttcttgtgaagtgttttactggggttc

SEQ ID NO: 860915 - DNA, 33 bp, Homo sapien
ttgtagaaacatagacacataaaccaatggaac

SEQ ID NO: 860916 - DNA, 33 bp, Homo sapien
ttgtagaaacatagacgcataaaccaatggaac

SEQ ID NO: 860917 - DNA, 33 bp, Homo sapien
cccaagtggaccaagacagtggtcaaagaacat

SEQ ID NO: 860918 - DNA, 33 bp, Homo sapien
cccaagtggaccaagagagtggtcaaagaacat

SEQ ID NO: 860919 - DNA, 33 bp, Homo sapien
ttgaaagactggctccacaactgatatcaatca

SEQ ID NO: 860920 - DNA, 33 bp, Homo sapien
ttgaaagactggctccgcaactgatatcaatca

SEQ ID NO: 860921 - DNA, 33 bp, Homo sapien
tttttaaccagaagctaaaaaagtgtgatgaga

SEQ ID NO: 860922 - DNA, 33 bp, Homo sapien
tttttaaccagaagcttaaaaagtgtgatgaga

SEQ ID NO: 860923 - DNA, 33 bp, Homo sapien
atagacacgttacaaacgctttttcttcataga

SEQ ID NO: 860924 - DNA, 33 bp, Homo sapien
atagacacgttacaaatgctttttcttcataga

SEQ ID NO: 860925 - DNA, 33 bp, Homo sapien
attgtgacagtcagagaaatctagcatggctga

SEQ ID NO: 860926 - DNA, 33 bp, Homo sapien
attgtgacagtcagaggaatctagcatggctga

SEQ ID NO: 860927 - DNA, 33 bp, Homo sapien
acattgttatagcctccctaggacattaataca

SEQ ID NO: 860928 - DNA, 33 bp, Homo sapien
acattgttatagcctcgctaggacattaataca

SEQ ID NO: 860929 - DNA, 33 bp, Homo sapien
cttctgattcataaaaagaggccagtgagggaa

SEQ ID NO: 860930 - DNA, 33 bp, Homo sapien
cttctgattcataaaaggaggccagtgagggaa

SEQ ID NO: 860931 - DNA, 33 bp, Homo sapien
cagagagaagaaaatacgaagagcgtccagtgt

SEQ ID NO: 860932 - DNA, 33 bp, Homo sapien
cagagagaagaaaataggaagagcgtccagtgt

SEQ ID NO: 860933 - DNA, 33 bp, Homo sapien
gaaacaattaaaccctaaaggcagtattcaaaa

SEQ ID NO: 860934 - DNA, 33 bp, Homo sapien
gaaacaattaaaccctgaaggcagtattcaaaa

SEQ ID NO: 860935 - DNA, 33 bp, Homo sapien
gagacacagatggggagattttccaagcaattc

SEQ ID NO: 860936 - DNA, 33 bp, Homo sapien
gagacacagatggggatattttccaagcaattc

SEQ ID NO: 860937 - DNA, 33 bp, Homo sapien
ctctctaaggacagcccaaaacctatgccagct

SEQ ID NO: 860938 - DNA, 33 bp, Homo sapien
ctctctaaggacagccgaaaacctatgccagct

SEQ ID NO: 860939 - DNA, 33 bp, Homo sapien
gatgcatgaggattaaaacactgcaatcttcaa

SEQ ID NO: 860940 - DNA, 33 bp, Homo sapien
gatgcatgaggattaagacactgcaatcttcaa

SEQ ID NO: 860941 - DNA, 33 bp, Homo sapien
atataaatcaaaaaaccaccatcgaagggctct

SEQ ID NO: 860942 - DNA, 33 bp, Homo sapien
atataaatcaaaaaactaccatcgaagggctct

SEQ ID NO: 860943 - DNA, 33 bp, Homo sapien
aaaaagaatatctgtcaaagtcctgtagttgat

SEQ ID NO: 860944 - DNA, 33 bp, Homo sapien
aaaaagaatatctgtcgaagtcctgtagttgat

SEQ ID NO: 860945 - DNA, 33 bp, Homo sapien
acataaagcatttatcacttggcattaaaattg

SEQ ID NO: 860946 - DNA, 33 bp, Homo sapien
acataaagcatttatcgcttggcattaaaattg

SEQ ID NO: 860947 - DNA, 33 bp, Homo sapien
gattatcattgacctgcaacataggcaaattct

SEQ ID NO: 860948 - DNA, 33 bp, Homo sapien
gattatcattgacctgtaacataggcaaattct

SEQ ID NO: 860949 - DNA, 33 bp, Homo sapien
aatatgctgggggggaaatttagcaaggcctct

SEQ ID NO: 860950 - DNA, 33 bp, Homo sapien
aatatgctgggggggatatttagcaaggcctct

SEQ ID NO: 860951 - DNA, 33 bp, Homo sapien
ataaagtgaatgtagaagagaagaggaccaaag

SEQ ID NO: 860952 - DNA, 33 bp, Homo sapien
ataaagtgaatgtagacgagaagaggaccaaag

SEQ ID NO: 860953 - DNA, 33 bp, Homo sapien
tttaacagaggcattaactagcagacaaggaag

SEQ ID NO: 860954 - DNA, 33 bp, Homo sapien
tttaacagaggcattagctagcagacaaggaag

SEQ ID NO: 860955 - DNA, 33 bp, Homo sapien
tcagaggtaagggtgaacaaattggacagacct

SEQ ID NO: 860956 - DNA, 33 bp, Homo sapien
tcagaggtaagggtgagcaaattggacagacct

SEQ ID NO: 860957 - DNA, 33 bp, Homo sapien
caatagttctcaattacgtttgtttttttattt

SEQ ID NO: 860958 - DNA, 33 bp, Homo sapien
caatagttctcaattatgtttgtttttttattt

SEQ ID NO: 860959 - DNA, 33 bp, Homo sapien
tctttggacgtaagcaatgcaatcagcatgaac

SEQ ID NO: 860960 - DNA, 33 bp, Homo sapien
tctttggacgtaagcagtgcaatcagcatgaac

SEQ ID NO: 860961 - DNA, 33 bp, Homo sapien
gggccttccttacctacgctgaagtatatgcct

SEQ ID NO: 860962 - DNA, 33 bp, Homo sapien
gggccttccttacctatgctgaagtatatgcct

SEQ ID NO: 860963 - DNA, 33 bp, Homo sapien
gatgtgctaagatggccgaagaaacaagattct

SEQ ID NO: 860964 - DNA, 33 bp, Homo sapien
gatgtgctaagatggctgaagaaacaagattct

SEQ ID NO: 860965 - DNA, 33 bp, Homo sapien
tagatggaataaggtacggaaggcactatttgt

SEQ ID NO: 860966 - DNA, 33 bp, Homo sapien
tagatggaataaggtatggaaggcactatttgt

SEQ ID NO: 860967 - DNA, 33 bp, Homo sapien
cctcagttttttttaacgtgaggctggccacgt

SEQ ID NO: 860968 - DNA, 33 bp, Homo sapien
cctcagttttttttaatgtgaggctggccacgt

SEQ ID NO: 860969 - DNA, 33 bp, Homo sapien
tccacatcatggaacactgagtgataggtttgt

SEQ ID NO: 860970 - DNA, 33 bp, Homo sapien
tccacatcatggaacattgagtgataggtttgt

SEQ ID NO: 860971 - DNA, 33 bp, Homo sapien
gttggacagagggactcaaatttggaaacaggc

SEQ ID NO: 860972 - DNA, 33 bp, Homo sapien
gttggacagagggacttaaatttggaaacaggc

SEQ ID NO: 860973 - DNA, 33 bp, Homo sapien
gagtggcctacacatccctcttgtagaagcttt

SEQ ID NO: 860974 - DNA, 33 bp, Homo sapien
gagtggcctacacatctctcttgtagaagcttt

SEQ ID NO: 860975 - DNA, 33 bp, Homo sapien
gacacatagcactcaaagttacctattataaag

SEQ ID NO: 860976 - DNA, 33 bp, Homo sapien
gacacatagcactcaatgttacctattataaag

SEQ ID NO: 860977 - DNA, 33 bp, Homo sapien
agcgctgcctagaaagaccctggaaacaatgag

SEQ ID NO: 860978 - DNA, 33 bp, Homo sapien
agcgctgcctagaaagtccctggaaacaatgag

SEQ ID NO: 860979 - DNA, 33 bp, Homo sapien
gatggcatctctggtaacaacaacaacaaaaaa

SEQ ID NO: 860980 - DNA, 33 bp, Homo sapien
gatggcatctctggtatcaacaacaacaaaaaa

SEQ ID NO: 860981 - DNA, 33 bp, Homo sapien
actgcctggttctaccactaaggaaactggggc

SEQ ID NO: 860982 - DNA, 33 bp, Homo sapien
actgcctggttctaccgctaaggaaactggggc

SEQ ID NO: 860983 - DNA, 33 bp, Homo sapien
accttaggaaactacagaagcttttagtttcca

SEQ ID NO: 860984 - DNA, 33 bp, Homo sapien
accttaggaaactacataagcttttagtttcca

SEQ ID NO: 860985 - DNA, 33 bp, Homo sapien
gaagctagactcttaaaaacccactctctggaa

SEQ ID NO: 860986 - DNA, 33 bp, Homo sapien
gaagctagactcttaacaacccactctctggaa

SEQ ID NO: 860987 - DNA, 33 bp, Homo sapien
ggaggagctgtaattaagctgattggaacctat

SEQ ID NO: 860988 - DNA, 33 bp, Homo sapien
ggaggagctgtaattaggctgattggaacctat

SEQ ID NO: 860989 - DNA, 33 bp, Homo sapien
tttgacatgcatctctgaagaacattgtcctac

SEQ ID NO: 860990 - DNA, 33 bp, Homo sapien
tttgacatgcatctcttaagaacattgtcctac

SEQ ID NO: 860991 - DNA, 33 bp, Homo sapien
atcctttagttatgataaaccataaatgaaact

SEQ ID NO: 860992 - DNA, 33 bp, Homo sapien
atcctttagttatgatgaaccataaatgaaact

SEQ ID NO: 860993 - DNA, 33 bp, Homo sapien
ttatggcttgaagatcactgtagtcataaacag

SEQ ID NO: 860994 - DNA, 33 bp, Homo sapien
ttatggcttgaagatcgctgtagtcataaacag

SEQ ID NO: 860995 - DNA, 33 bp, Homo sapien
ggctaataataaggcaaaactctggtttaagat

SEQ ID NO: 860996 - DNA, 33 bp, Homo sapien
ggctaataataaggcacaactctggtttaagat

SEQ ID NO: 860997 - DNA, 33 bp, Homo sapien
ggagaggtctgggatcaaggaccgtagactcaa

SEQ ID NO: 860998 - DNA, 33 bp, Homo sapien
ggagaggtctgggatcgaggaccgtagactcaa

SEQ ID NO: 860999 - DNA, 33 bp, Homo sapien
gacaacaccgttaccacagccattataatctga

SEQ ID NO: 861000 - DNA, 33 bp, Homo sapien
gacaacaccgttaccatagccattataatctga

SEQ ID NO: 861001 - DNA, 33 bp, Homo sapien
cattgtctctatttccgctaagttcccttttta

SEQ ID NO: 861002 - DNA, 33 bp, Homo sapien
cattgtctctatttcctctaagttcccttttta

SEQ ID NO: 861003 - DNA, 33 bp, Homo sapien
gattgttatgtaatgtaaatagtataattgcta

SEQ ID NO: 861004 - DNA, 33 bp, Homo sapien
gattgttatgtaatgtcaatagtataattgcta

SEQ ID NO: 861005 - DNA, 33 bp, Homo sapien
acttaaatagctaaaacgacacacaagaaacct

SEQ ID NO: 861006 - DNA, 33 bp, Homo sapien
acttaaatagctaaaatgacacacaagaaacct

SEQ ID NO: 861007 - DNA, 33 bp, Homo sapien
tctcttagtatatacacggcaagctgatggaaa

SEQ ID NO: 861008 - DNA, 33 bp, Homo sapien
tctcttagtatatacatggcaagctgatggaaa

SEQ ID NO: 861009 - DNA, 33 bp, Homo sapien
ctgctgttcatctacgcaaggcttgtactgaat

SEQ ID NO: 861010 - DNA, 33 bp, Homo sapien
ctgctgttcatctacgtaaggcttgtactgaat

SEQ ID NO: 861011 - DNA, 33 bp, Homo sapien
tgaatctacctggaatgagatggtttgcttaaa

SEQ ID NO: 861012 - DNA, 33 bp, Homo sapien
tgaatctacctggaattagatggtttgcttaaa

SEQ ID NO: 861013 - DNA, 33 bp, Homo sapien
tagtagctttttggcacaggaaggttaaatgcc

SEQ ID NO: 861014 - DNA, 33 bp, Homo sapien
tagtagctttttggcataggaaggttaaatgcc

SEQ ID NO: 861015 - DNA, 33 bp, Homo sapien
gggagggcaagtgataaaatctgctctccagtg

SEQ ID NO: 861016 - DNA, 33 bp, Homo sapien
gggagggcaagtgatagaatctgctctccagtg

SEQ ID NO: 861017 - DNA, 33 bp, Homo sapien
tttaaagtaggccattaaataattgtgatgttt

SEQ ID NO: 861018 - DNA, 33 bp, Homo sapien
tttaaagtaggccattcaataattgtgatgttt

SEQ ID NO: 861019 - DNA, 33 bp, Homo sapien
acttccttgttcagaagttcagaatatattaca

SEQ ID NO: 861020 - DNA, 33 bp, Homo sapien
acttccttgttcagaatttcagaatatattaca

SEQ ID NO: 861021 - DNA, 33 bp, Homo sapien
ttttatcagtataagggccaacatgtgacaaga

SEQ ID NO: 861022 - DNA, 33 bp, Homo sapien
ttttatcagtataaggtccaacatgtgacaaga

SEQ ID NO: 861023 - DNA, 33 bp, Homo sapien
ccctctcagtttatcacacttcatctcttgtca

SEQ ID NO: 861024 - DNA, 33 bp, Homo sapien
ccctctcagtttatcatacttcatctcttgtca

SEQ ID NO: 861025 - DNA, 33 bp, Homo sapien
ccaggtctctgtttacccaaaaaagaagcaact

SEQ ID NO: 861026 - DNA, 33 bp, Homo sapien
ccaggtctctgtttactcaaaaaagaagcaact

SEQ ID NO: 861027 - DNA, 33 bp, Homo sapien
gggaaatctaataaagaccatgaagcagcatga

SEQ ID NO: 861028 - DNA, 33 bp, Homo sapien
gggaaatctaataaaggccatgaagcagcatga

SEQ ID NO: 861029 - DNA, 33 bp, Homo sapien
ttctaagggttctcgacgtattaacttatttaa

SEQ ID NO: 861030 - DNA, 33 bp, Homo sapien
ttctaagggttctcgatgtattaacttatttaa

SEQ ID NO: 861031 - DNA, 33 bp, Homo sapien
atcaaggtctctaagacgagcctgtgaaaaaga

SEQ ID NO: 861032 - DNA, 33 bp, Homo sapien
atcaaggtctctaagatgagcctgtgaaaaaga

SEQ ID NO: 861033 - DNA, 33 bp, Homo sapien
aaattgacaactataacattagtaagaattagt

SEQ ID NO: 861034 - DNA, 33 bp, Homo sapien
aaattgacaactataagattagtaagaattagt

SEQ ID NO: 861035 - DNA, 33 bp, Homo sapien
ttggggagtaactttacggtgaagaaacttgat

SEQ ID NO: 861036 - DNA, 33 bp, Homo sapien
ttggggagtaactttatggtgaagaaacttgat

SEQ ID NO: 861037 - DNA, 33 bp, Homo sapien
cagtgtcctttataccaaactggggactgtcca

SEQ ID NO: 861038 - DNA, 33 bp, Homo sapien
cagtgtcctttataccgaactggggactgtcca

SEQ ID NO: 861039 - DNA, 33 bp, Homo sapien
ttagtaaattttcagaacagctaactttgggaa

SEQ ID NO: 861040 - DNA, 33 bp, Homo sapien
ttagtaaattttcagagcagctaactttgggaa

SEQ ID NO: 861041 - DNA, 33 bp, Homo sapien
tattttgttatttccaaatggatgaggtatgct

SEQ ID NO: 861042 - DNA, 33 bp, Homo sapien
tattttgttatttccagatggatgaggtatgct

SEQ ID NO: 861043 - DNA, 33 bp, Homo sapien
ctggaatgcttctgccacacctacagaagcact

SEQ ID NO: 861044 - DNA, 33 bp, Homo sapien
ctggaatgcttctgccgcacctacagaagcact

SEQ ID NO: 861045 - DNA, 33 bp, Homo sapien
aaatgaatcagagaaccctaaatactttacaag

SEQ ID NO: 861046 - DNA, 33 bp, Homo sapien
aaatgaatcagagaactctaaatactttacaag

SEQ ID NO: 861047 - DNA, 33 bp, Homo sapien
tttagccactagcttcatgatcatttgttacag

SEQ ID NO: 861048 - DNA, 33 bp, Homo sapien
tttagccactagcttcgtgatcatttgttacag

SEQ ID NO: 861049 - DNA, 33 bp, Homo sapien
cctttcattcagtgagcctcacaacaagatagg

SEQ ID NO: 861050 - DNA, 33 bp, Homo sapien
cctttcattcagtgagtctcacaacaagatagg

SEQ ID NO: 861051 - DNA, 33 bp, Homo sapien
ttttcctacgttgaccaggtatactcatattcg

SEQ ID NO: 861052 - DNA, 33 bp, Homo sapien
ttttcctacgttgaccgggtatactcatattcg

SEQ ID NO: 861053 - DNA, 33 bp, Homo sapien
aaagaacagaagaagaataagctgagcaattga

SEQ ID NO: 861054 - DNA, 33 bp, Homo sapien
aaagaacagaagaagagtaagctgagcaattga

SEQ ID NO: 861055 - DNA, 33 bp, Homo sapien
aagctacatttgtgaactgaggttggtaattgc

SEQ ID NO: 861056 - DNA, 33 bp, Homo sapien
aagctacatttgtgaagtgaggttggtaattgc

SEQ ID NO: 861057 - DNA, 33 bp, Homo sapien
tcgtcagttctcaagcagagaataaaccaggtt

SEQ ID NO: 861058 - DNA, 33 bp, Homo sapien
tcgtcagttctcaagcggagaataaaccaggtt

SEQ ID NO: 861059 - DNA, 33 bp, Homo sapien
gtctaatagccctaaaatttacgtgaatggtga

SEQ ID NO: 861060 - DNA, 33 bp, Homo sapien
gtctaatagccctaaagtttacgtgaatggtga

SEQ ID NO: 861061 - DNA, 33 bp, Homo sapien
tcagaggccaccagagacatcctagatgaaagt

SEQ ID NO: 861062 - DNA, 33 bp, Homo sapien
tcagaggccaccagaggcatcctagatgaaagt

SEQ ID NO: 861063 - DNA, 33 bp, Homo sapien
tgtagtaagaaaatgaaaggtgcctcgaaaaat

SEQ ID NO: 861064 - DNA, 33 bp, Homo sapien
tgtagtaagaaaatgacaggtgcctcgaaaaat

SEQ ID NO: 861065 - DNA, 33 bp, Homo sapien
ttggcttctgtggagaaattaaagtacatgctg

SEQ ID NO: 861066 - DNA, 33 bp, Homo sapien
ttggcttctgtggagatattaaagtacatgctg

SEQ ID NO: 861067 - DNA, 33 bp, Homo sapien
aggttattgcccagaaactgacactcacataaa

SEQ ID NO: 861068 - DNA, 33 bp, Homo sapien
aggttattgcccagaagctgacactcacataaa

SEQ ID NO: 861069 - DNA, 33 bp, Homo sapien
catatttggttaaatcacagagcttttcaagat

SEQ ID NO: 861070 - DNA, 33 bp, Homo sapien
catatttggttaaatcgcagagcttttcaagat

SEQ ID NO: 861071 - DNA, 33 bp, Homo sapien
tgtatacactattgtacgaagaagccaaaggac

SEQ ID NO: 861072 - DNA, 33 bp, Homo sapien
tgtatacactattgtatgaagaagccaaaggac

SEQ ID NO: 861073 - DNA, 33 bp, Homo sapien
tgatatacagcaagcagagctctctggctacca

SEQ ID NO: 861074 - DNA, 33 bp, Homo sapien
tgatatacagcaagcatagctctctggctacca

SEQ ID NO: 861075 - DNA, 33 bp, Homo sapien
tttataatttgctccactatgatagctaatatt

SEQ ID NO: 861076 - DNA, 33 bp, Homo sapien
tttataatttgctccattatgatagctaatatt

SEQ ID NO: 861077 - DNA, 33 bp, Homo sapien
catggaattccagggcgctcatctgttgaaaat

SEQ ID NO: 861078 - DNA, 33 bp, Homo sapien
catggaattccagggctctcatctgttgaaaat

SEQ ID NO: 861079 - DNA, 33 bp, Homo sapien
gagagtaatacagaccaaatagctcatgttcac

SEQ ID NO: 861080 - DNA, 33 bp, Homo sapien
gagagtaatacagaccgaatagctcatgttcac

SEQ ID NO: 861081 - DNA, 33 bp, Homo sapien
gatgggaaatggaatgcatgatgtttttacaat

SEQ ID NO: 861082 - DNA, 33 bp, Homo sapien
gatgggaaatggaatgtatgatgtttttacaat

SEQ ID NO: 861083 - DNA, 33 bp, Homo sapien
agggttagagcaggaaagttctggctagtgaag

SEQ ID NO: 861084 - DNA, 33 bp, Homo sapien
agggttagagcaggaaggttctggctagtgaag

SEQ ID NO: 861085 - DNA, 33 bp, Homo sapien
aaaggggaatttgcccaacaggagataagtacc

SEQ ID NO: 861086 - DNA, 33 bp, Homo sapien
aaaggggaatttgcccgacaggagataagtacc

SEQ ID NO: 861087 - DNA, 33 bp, Homo sapien
aagtggggctagcactcaaatctgaaggataaa

SEQ ID NO: 861088 - DNA, 33 bp, Homo sapien
aagtggggctagcactgaaatctgaaggataaa

SEQ ID NO: 861089 - DNA, 33 bp, Homo sapien
aagctgcatactctccaaaatgatttagtatta

SEQ ID NO: 861090 - DNA, 33 bp, Homo sapien
aagctgcatactctccgaaatgatttagtatta

SEQ ID NO: 861091 - DNA, 33 bp, Homo sapien
ttcatcattacccaaactttctgtctgcccttg

SEQ ID NO: 861092 - DNA, 33 bp, Homo sapien
ttcatcattacccaaagtttctgtctgcccttg

SEQ ID NO: 861093 - DNA, 33 bp, Homo sapien
ggaatatcttccaaaacaacccaagagagttct

SEQ ID NO: 861094 - DNA, 33 bp, Homo sapien
ggaatatcttccaaaataacccaagagagttct

SEQ ID NO: 861095 - DNA, 33 bp, Homo sapien
tttaaattcatgaccacaattccatgtttcata

SEQ ID NO: 861096 - DNA, 33 bp, Homo sapien
tttaaattcatgaccagaattccatgtttcata

SEQ ID NO: 861097 - DNA, 33 bp, Homo sapien
gacatcatgtctttgacaagtattgctgttagt

SEQ ID NO: 861098 - DNA, 33 bp, Homo sapien
gacatcatgtctttgataagtattgctgttagt

SEQ ID NO: 861099 - DNA, 33 bp, Homo sapien
tagctgtgcactctggacaagtttctcactctc

SEQ ID NO: 861100 - DNA, 33 bp, Homo sapien
tagctgtgcactctgggcaagtttctcactctc

SEQ ID NO: 861101 - DNA, 33 bp, Homo sapien
ttcttaccataataggcagcttattgtcccaca

SEQ ID NO: 861102 - DNA, 33 bp, Homo sapien
ttcttaccataatagggagcttattgtcccaca

SEQ ID NO: 861103 - DNA, 33 bp, Homo sapien
ctcaaaagcagcttaactacgatgtaatggaag

SEQ ID NO: 861104 - DNA, 33 bp, Homo sapien
ctcaaaagcagcttaagtacgatgtaatggaag

SEQ ID NO: 861105 - DNA, 33 bp, Homo sapien
catacctggtaaggggcaaagctctctatggaa

SEQ ID NO: 861106 - DNA, 33 bp, Homo sapien
catacctggtaaggggtaaagctctctatggaa

SEQ ID NO: 861107 - DNA, 33 bp, Homo sapien
tcttacatcttatacaccatggttttgttcaga

SEQ ID NO: 861108 - DNA, 33 bp, Homo sapien
tcttacatcttatacatcatggttttgttcaga

SEQ ID NO: 861109 - DNA, 33 bp, Homo sapien
gtgaaggtgattcctacacatgggcccctccgc

SEQ ID NO: 861110 - DNA, 33 bp, Homo sapien
gtgaaggtgattcctatacatgggcccctccgc

SEQ ID NO: 861111 - DNA, 33 bp, Homo sapien
ggatgcataagatgggaccaggaaacctaagcc

SEQ ID NO: 861112 - DNA, 33 bp, Homo sapien
ggatgcataagatggggccaggaaacctaagcc

SEQ ID NO: 861113 - DNA, 33 bp, Homo sapien
tacatgaatttcctcactgaacctccacaaata

SEQ ID NO: 861114 - DNA, 33 bp, Homo sapien
tacatgaatttcctcattgaacctccacaaata

SEQ ID NO: 861115 - DNA, 33 bp, Homo sapien
ctgggcatctcaattaagataaaagcttccctt

SEQ ID NO: 861116 - DNA, 33 bp, Homo sapien
ctgggcatctcaattatgataaaagcttccctt

SEQ ID NO: 861117 - DNA, 33 bp, Homo sapien
ctgtcaaaatcaggatgagaaccctgaaccagt

SEQ ID NO: 861118 - DNA, 33 bp, Homo sapien
ctgtcaaaatcaggattagaaccctgaaccagt

SEQ ID NO: 861119 - DNA, 33 bp, Homo sapien
cctgatcggacagtgaaaagtgctgtcaaaatc

SEQ ID NO: 861120 - DNA, 33 bp, Homo sapien
cctgatcggacagtgagaagtgctgtcaaaatc

SEQ ID NO: 861121 - DNA, 33 bp, Homo sapien
ggagttattaagtttcacagattgtaatatatg

SEQ ID NO: 861122 - DNA, 33 bp, Homo sapien
ggagttattaagtttcgcagattgtaatatatg

SEQ ID NO: 861123 - DNA, 33 bp, Homo sapien
atgactctgggtggcacacttaacctctccaag

SEQ ID NO: 861124 - DNA, 33 bp, Homo sapien
atgactctgggtggcatacttaacctctccaag

SEQ ID NO: 861125 - DNA, 33 bp, Homo sapien
gtcgagactgcaacaaagagagcgagtgcccaa

SEQ ID NO: 861126 - DNA, 33 bp, Homo sapien
gtcgagactgcaacaaggagagcgagtgcccaa

SEQ ID NO: 861127 - DNA, 33 bp, Homo sapien
ttacttaagtgagtgcacaagaaggggctccgt

SEQ ID NO: 861128 - DNA, 33 bp, Homo sapien
ttacttaagtgagtgcgcaagaaggggctccgt

SEQ ID NO: 861129 - DNA, 33 bp, Homo sapien
atctgttaccagtatacaaggaagcccatgaac

SEQ ID NO: 861130 - DNA, 33 bp, Homo sapien
atctgttaccagtatataaggaagcccatgaac

SEQ ID NO: 861131 - DNA, 33 bp, Homo sapien
tttctgatatttaactcaggtatcaaagagcca

SEQ ID NO: 861132 - DNA, 33 bp, Homo sapien
tttctgatatttaacttaggtatcaaagagcca

SEQ ID NO: 861133 - DNA, 33 bp, Homo sapien
ctgttcagagtctcgcacttagttgatttagct

SEQ ID NO: 861134 - DNA, 33 bp, Homo sapien
ctgttcagagtctcgcgcttagttgatttagct

SEQ ID NO: 861135 - DNA, 33 bp, Homo sapien
tctgctttctgaaaaaagagtcaggcgggattt

SEQ ID NO: 861136 - DNA, 33 bp, Homo sapien
tctgctttctgaaaaatgagtcaggcgggattt

SEQ ID NO: 861137 - DNA, 33 bp, Homo sapien
tggttatcaaccccccacagaacacaaagcccc

SEQ ID NO: 861138 - DNA, 33 bp, Homo sapien
tggttatcaaccccccgcagaacacaaagcccc

SEQ ID NO: 861139 - DNA, 33 bp, Homo sapien
gagagtccagacacaccagacattgcctatagt

SEQ ID NO: 861140 - DNA, 33 bp, Homo sapien
gagagtccagacacacgagacattgcctatagt

SEQ ID NO: 861141 - DNA, 33 bp, Homo sapien
catgtgagaaagggacagctccgaagttgcagg

SEQ ID NO: 861142 - DNA, 33 bp, Homo sapien
catgtgagaaagggacggctccgaagttgcagg

SEQ ID NO: 861143 - DNA, 33 bp, Homo sapien
tatctttagttacctactacatgggatctaatt

SEQ ID NO: 861144 - DNA, 33 bp, Homo sapien
tatctttagttacctagtacatgggatctaatt

SEQ ID NO: 861145 - DNA, 33 bp, Homo sapien
ttctgtgtcagcaaatcatgtttttagtaaaaa

SEQ ID NO: 861146 - DNA, 33 bp, Homo sapien
ttctgtgtcagcaaattatgtttttagtaaaaa

SEQ ID NO: 861147 - DNA, 33 bp, Homo sapien
ggaatttggaaaccaaaatctcggtgatttgtg

SEQ ID NO: 861148 - DNA, 33 bp, Homo sapien
ggaatttggaaaccaagatctcggtgatttgtg

SEQ ID NO: 861149 - DNA, 33 bp, Homo sapien
gatatcccagttgtaaagagcacacaaatcacc

SEQ ID NO: 861150 - DNA, 33 bp, Homo sapien
gatatcccagttgtaaggagcacacaaatcacc

SEQ ID NO: 861151 - DNA, 33 bp, Homo sapien
ttacaactgggatatcactgtttctagtcttct

SEQ ID NO: 861152 - DNA, 33 bp, Homo sapien
ttacaactgggatatcgctgtttctagtcttct

SEQ ID NO: 861153 - DNA, 33 bp, Homo sapien
aaagagttctatgaccaagttggatttgaccca

SEQ ID NO: 861154 - DNA, 33 bp, Homo sapien
aaagagttctatgaccgagttggatttgaccca

SEQ ID NO: 861155 - DNA, 33 bp, Homo sapien
tatctaaatttcaagcaaactattaggctcaac

SEQ ID NO: 861156 - DNA, 33 bp, Homo sapien
tatctaaatttcaagccaactattaggctcaac

SEQ ID NO: 861157 - DNA, 33 bp, Homo sapien
actagattatttaaacaagtcgatcacttccca

SEQ ID NO: 861158 - DNA, 33 bp, Homo sapien
actagattatttaaacgagtcgatcacttccca

SEQ ID NO: 861159 - DNA, 33 bp, Homo sapien
tggggttggtcttcccacgattctcatcaacca

SEQ ID NO: 861160 - DNA, 33 bp, Homo sapien
tggggttggtcttcccgcgattctcatcaacca

SEQ ID NO: 861161 - DNA, 33 bp, Homo sapien
agtggcatttacattgcagagagacagcggtaa

SEQ ID NO: 861162 - DNA, 33 bp, Homo sapien
agtggcatttacattggagagagacagcggtaa

SEQ ID NO: 861163 - DNA, 33 bp, Homo sapien
gtagaatgacgatgaccgaaatgttatgtcttt

SEQ ID NO: 861164 - DNA, 33 bp, Homo sapien
gtagaatgacgatgactgaaatgttatgtcttt

SEQ ID NO: 861165 - DNA, 33 bp, Homo sapien
aaagaaaatgtctcaacgaagctttgaaatggg

SEQ ID NO: 861166 - DNA, 33 bp, Homo sapien
aaagaaaatgtctcaatgaagctttgaaatggg

SEQ ID NO: 861167 - DNA, 33 bp, Homo sapien
gattgcgacttgggaaaaaaccatcagctagag

SEQ ID NO: 861168 - DNA, 33 bp, Homo sapien
gattgcgacttgggaagaaaccatcagctagag

SEQ ID NO: 861169 - DNA, 33 bp, Homo sapien
gcaaacaaggctcacagggataggtccccaggt

SEQ ID NO: 861170 - DNA, 33 bp, Homo sapien
gcaaacaaggctcacatggataggtccccaggt

SEQ ID NO: 861171 - DNA, 33 bp, Homo sapien
cacctgttcctaaaccacttcgaggattaaata

SEQ ID NO: 861172 - DNA, 33 bp, Homo sapien
cacctgttcctaaaccgcttcgaggattaaata

SEQ ID NO: 861173 - DNA, 33 bp, Homo sapien
aaaggaatatttgccccatctcttctctcatgt

SEQ ID NO: 861174 - DNA, 33 bp, Homo sapien
aaaggaatatttgccctatctcttctctcatgt

SEQ ID NO: 861175 - DNA, 33 bp, Homo sapien
acaaattaagtggtcactctgctctgaggagcc

SEQ ID NO: 861176 - DNA, 33 bp, Homo sapien
acaaattaagtggtcattctgctctgaggagcc

SEQ ID NO: 861177 - DNA, 33 bp, Homo sapien
gtgtgtgtatgtcccaaactaattcatcctctt

SEQ ID NO: 861178 - DNA, 33 bp, Homo sapien
gtgtgtgtatgtcccagactaattcatcctctt

SEQ ID NO: 861179 - DNA, 33 bp, Homo sapien
ccttgaggtagaatgaagactcagtgtgttggt

SEQ ID NO: 861180 - DNA, 33 bp, Homo sapien
ccttgaggtagaatgaggactcagtgtgttggt

SEQ ID NO: 861181 - DNA, 33 bp, Homo sapien
aggaagaggcagggaaaatctcaaagtcaatcc

SEQ ID NO: 861182 - DNA, 33 bp, Homo sapien
aggaagaggcagggaagatctcaaagtcaatcc

SEQ ID NO: 861183 - DNA, 33 bp, Homo sapien
ttttcttcctttctaaagcgaatctatgtgctt

SEQ ID NO: 861184 - DNA, 33 bp, Homo sapien
ttttcttcctttctaaggcgaatctatgtgctt

SEQ ID NO: 861185 - DNA, 33 bp, Homo sapien
tcggaaactgtctggcccccttgagtgtaggtg

SEQ ID NO: 861186 - DNA, 33 bp, Homo sapien
tcggaaactgtctggctcccttgagtgtaggtg

SEQ ID NO: 861187 - DNA, 33 bp, Homo sapien
tacattttggagtctacgtatcctgtggcctag

SEQ ID NO: 861188 - DNA, 33 bp, Homo sapien
tacattttggagtctatgtatcctgtggcctag

SEQ ID NO: 861189 - DNA, 33 bp, Homo sapien
agaggagaaatgaaccccacaacataattccaa

SEQ ID NO: 861190 - DNA, 33 bp, Homo sapien
agaggagaaatgaacctcacaacataattccaa

SEQ ID NO: 861191 - DNA, 33 bp, Homo sapien
agtaaggctgccattacattccttttgttggaa

SEQ ID NO: 861192 - DNA, 33 bp, Homo sapien
agtaaggctgccattatattccttttgttggaa

SEQ ID NO: 861193 - DNA, 33 bp, Homo sapien
tctttcagatggaaaacgattttgtatggacac

SEQ ID NO: 861194 - DNA, 33 bp, Homo sapien
tctttcagatggaaaaggattttgtatggacac

SEQ ID NO: 861195 - DNA, 33 bp, Homo sapien
ccctccatatgatctcacagctttgccaaacct

SEQ ID NO: 861196 - DNA, 33 bp, Homo sapien
ccctccatatgatctcgcagctttgccaaacct

SEQ ID NO: 861197 - DNA, 33 bp, Homo sapien
cagctctaatggctcacggagaatcgaggagtg

SEQ ID NO: 861198 - DNA, 33 bp, Homo sapien
cagctctaatggctcatggagaatcgaggagtg

SEQ ID NO: 861199 - DNA, 33 bp, Homo sapien
aaagggatccaatcaactgctggacataataga

SEQ ID NO: 861200 - DNA, 33 bp, Homo sapien
aaagggatccaatcaattgctggacataataga

SEQ ID NO: 861201 - DNA, 33 bp, Homo sapien
tctccccatgtgcctacgtaaattcatttagga

SEQ ID NO: 861202 - DNA, 33 bp, Homo sapien
tctccccatgtgcctatgtaaattcatttagga

SEQ ID NO: 861203 - DNA, 33 bp, Homo sapien
ggagtcctcatcctaactctccccatgtgccta

SEQ ID NO: 861204 - DNA, 33 bp, Homo sapien
ggagtcctcatcctaattctccccatgtgccta

SEQ ID NO: 861205 - DNA, 33 bp, Homo sapien
atgaaattcagaacaaatattggcttttctggc

SEQ ID NO: 861206 - DNA, 33 bp, Homo sapien
atgaaattcagaacaagtattggcttttctggc

SEQ ID NO: 861207 - DNA, 33 bp, Homo sapien
caatgagaggagagtgaagaaacttacttgtta

SEQ ID NO: 861208 - DNA, 33 bp, Homo sapien
caatgagaggagagtgcagaaacttacttgtta

SEQ ID NO: 861209 - DNA, 33 bp, Homo sapien
gtgggggaagcaggacaaggcctacctgattcc

SEQ ID NO: 861210 - DNA, 33 bp, Homo sapien
gtgggggaagcaggacgaggcctacctgattcc

SEQ ID NO: 861211 - DNA, 33 bp, Homo sapien
tcccattgcttttagacgaagcccagacttgtt

SEQ ID NO: 861212 - DNA, 33 bp, Homo sapien
tcccattgcttttagatgaagcccagacttgtt

SEQ ID NO: 861213 - DNA, 33 bp, Homo sapien
cactcgctgattctgaagcttagtacttaggcc

SEQ ID NO: 861214 - DNA, 33 bp, Homo sapien
cactcgctgattctgaggcttagtacttaggcc

SEQ ID NO: 861215 - DNA, 33 bp, Homo sapien
aagtttcttgttcatgaagtgatggcaggagga

SEQ ID NO: 861216 - DNA, 33 bp, Homo sapien
aagtttcttgttcatgcagtgatggcaggagga

SEQ ID NO: 861217 - DNA, 33 bp, Homo sapien
gtgaggaaaaagggtcaatttgcagagatttct

SEQ ID NO: 861218 - DNA, 33 bp, Homo sapien
gtgaggaaaaagggtcgatttgcagagatttct

SEQ ID NO: 861219 - DNA, 33 bp, Homo sapien
catacatacatacataaggctgctgttaggcag

SEQ ID NO: 861220 - DNA, 33 bp, Homo sapien
catacatacatacatacggctgctgttaggcag

SEQ ID NO: 861221 - DNA, 33 bp, Homo sapien
ccacacctttcttaacgcattaaacagagcaga

SEQ ID NO: 861222 - DNA, 33 bp, Homo sapien
ccacacctttcttaactcattaaacagagcaga

SEQ ID NO: 861223 - DNA, 33 bp, Homo sapien
ttggttgaggtccttaattcagagactccccaa

SEQ ID NO: 861224 - DNA, 33 bp, Homo sapien
ttggttgaggtccttagttcagagactccccaa

SEQ ID NO: 861225 - DNA, 33 bp, Homo sapien
gaaggcaggtcttggaccagagagagttcccac

SEQ ID NO: 861226 - DNA, 33 bp, Homo sapien
gaaggcaggtcttggatcagagagagttcccac

SEQ ID NO: 861227 - DNA, 33 bp, Homo sapien
actttttgaccatacaaattttttgcatagttg

SEQ ID NO: 861228 - DNA, 33 bp, Homo sapien
actttttgaccatacacattttttgcatagttg

SEQ ID NO: 861229 - DNA, 33 bp, Homo sapien
aagaaaagaacaacaaatcagcactcacatgaa

SEQ ID NO: 861230 - DNA, 33 bp, Homo sapien
aagaaaagaacaacaagtcagcactcacatgaa

SEQ ID NO: 861231 - DNA, 33 bp, Homo sapien
gaactctaagctcaggaaaccctagcggggtca

SEQ ID NO: 861232 - DNA, 33 bp, Homo sapien
gaactctaagctcagggaaccctagcggggtca

SEQ ID NO: 861233 - DNA, 33 bp, Homo sapien
tacctccgttcacttacagaaacaacagaagcc

SEQ ID NO: 861234 - DNA, 33 bp, Homo sapien
tacctccgttcacttatagaaacaacagaagcc

SEQ ID NO: 861235 - DNA, 33 bp, Homo sapien
gctaagaatgagtacacgtgagtcttggcttta

SEQ ID NO: 861236 - DNA, 33 bp, Homo sapien
gctaagaatgagtacatgtgagtcttggcttta

SEQ ID NO: 861237 - DNA, 33 bp, Homo sapien
agctcaagcatattagaacagagagacagggat

SEQ ID NO: 861238 - DNA, 33 bp, Homo sapien
agctcaagcatattaggacagagagacagggat

SEQ ID NO: 861239 - DNA, 33 bp, Homo sapien
tatatgcatgtatgtacgttttattaattcatt

SEQ ID NO: 861240 - DNA, 33 bp, Homo sapien
tatatgcatgtatgtatgttttattaattcatt

SEQ ID NO: 861241 - DNA, 33 bp, Homo sapien
gagaagggtctcaaaccggagatggcagacgca

SEQ ID NO: 861242 - DNA, 33 bp, Homo sapien
gagaagggtctcaaactggagatggcagacgca

SEQ ID NO: 861243 - DNA, 33 bp, Homo sapien
actggaagagcagagaagggcatattttatccc

SEQ ID NO: 861244 - DNA, 33 bp, Homo sapien
actggaagagcagagaggggcatattttatccc

SEQ ID NO: 861245 - DNA, 33 bp, Homo sapien
tgggaagcgtacaggacaaacaaatgcttaaaa

SEQ ID NO: 861246 - DNA, 33 bp, Homo sapien
tgggaagcgtacaggagaaacaaatgcttaaaa

SEQ ID NO: 861247 - DNA, 33 bp, Homo sapien
ctctcaccttataaagaagcgacagaaagaatg

SEQ ID NO: 861248 - DNA, 33 bp, Homo sapien
ctctcaccttataaaggagcgacagaaagaatg

SEQ ID NO: 861249 - DNA, 33 bp, Homo sapien
cagaggtaatgtctgtcaaatttcaatgtcatt

SEQ ID NO: 861250 - DNA, 33 bp, Homo sapien
cagaggtaatgtctgttaaatttcaatgtcatt

SEQ ID NO: 861251 - DNA, 33 bp, Homo sapien
ggcttaagaactcataaccgtggcctccatgac

SEQ ID NO: 861252 - DNA, 33 bp, Homo sapien
ggcttaagaactcatagccgtggcctccatgac

SEQ ID NO: 861253 - DNA, 33 bp, Homo sapien
aaaggtcttgctagagaaagggacctgggggag

SEQ ID NO: 861254 - DNA, 33 bp, Homo sapien
aaaggtcttgctagaggaagggacctgggggag

SEQ ID NO: 861255 - DNA, 33 bp, Homo sapien
aagtcaactcaattcccaatatcaagcaattag

SEQ ID NO: 861256 - DNA, 33 bp, Homo sapien
aagtcaactcaattcctaatatcaagcaattag

SEQ ID NO: 861257 - DNA, 33 bp, Homo sapien
tggtaagtaataatagaccattatgaaacatat

SEQ ID NO: 861258 - DNA, 33 bp, Homo sapien
tggtaagtaataataggccattatgaaacatat

SEQ ID NO: 861259 - DNA, 33 bp, Homo sapien
ttgttccccccaaccccaaaaatcatatattga

SEQ ID NO: 861260 - DNA, 33 bp, Homo sapien
ttgttccccccaaccctaaaaatcatatattga

SEQ ID NO: 861261 - DNA, 33 bp, Homo sapien
tgattaacactactgacggactgtgatgttgca

SEQ ID NO: 861262 - DNA, 33 bp, Homo sapien
tgattaacactactgagggactgtgatgttgca

SEQ ID NO: 861263 - DNA, 33 bp, Homo sapien
agctgcacagaatccaactaaatggaaccgcac

SEQ ID NO: 861264 - DNA, 33 bp, Homo sapien
agctgcacagaatccatctaaatggaaccgcac

SEQ ID NO: 861265 - DNA, 33 bp, Homo sapien
aaaggattcagtaataactatgagtaccataca

SEQ ID NO: 861266 - DNA, 33 bp, Homo sapien
aaaggattcagtaatagctatgagtaccataca

SEQ ID NO: 861267 - DNA, 33 bp, Homo sapien
ttactttcaggccataagtttctgttttgaaac

SEQ ID NO: 861268 - DNA, 33 bp, Homo sapien
ttactttcaggccatatgtttctgttttgaaac

SEQ ID NO: 861269 - DNA, 33 bp, Homo sapien
gctgcaaggtaatgacacttctgcttctttggt

SEQ ID NO: 861270 - DNA, 33 bp, Homo sapien
gctgcaaggtaatgacgcttctgcttctttggt

SEQ ID NO: 861271 - DNA, 33 bp, Homo sapien
gattgggacaaagagacgatgttacagtctggt

SEQ ID NO: 861272 - DNA, 33 bp, Homo sapien
gattgggacaaagagatgatgttacagtctggt

SEQ ID NO: 861273 - DNA, 33 bp, Homo sapien
ctacactgagcttaaaacacctggaatgggctg

SEQ ID NO: 861274 - DNA, 33 bp, Homo sapien
ctacactgagcttaaagcacctggaatgggctg

SEQ ID NO: 861275 - DNA, 33 bp, Homo sapien
ctggaatgggctgagacattagaccaattttca

SEQ ID NO: 861276 - DNA, 33 bp, Homo sapien
ctggaatgggctgagatattagaccaattttca

SEQ ID NO: 861277 - DNA, 33 bp, Homo sapien
agtccttgagtatcagccagggtcacaggccca

SEQ ID NO: 861278 - DNA, 33 bp, Homo sapien
agtccttgagtatcagtcagggtcacaggccca

SEQ ID NO: 861279 - DNA, 33 bp, Homo sapien
ataggttagaaggacaatctactcaggaatctg

SEQ ID NO: 861280 - DNA, 33 bp, Homo sapien
ataggttagaaggacagtctactcaggaatctg

SEQ ID NO: 861281 - DNA, 33 bp, Homo sapien
aaatctctagcctcacagagcttaatttctact

SEQ ID NO: 861282 - DNA, 33 bp, Homo sapien
aaatctctagcctcacggagcttaatttctact

SEQ ID NO: 861283 - DNA, 33 bp, Homo sapien
tgtgatgagggggagaagagttgcaattcaaat

SEQ ID NO: 861284 - DNA, 33 bp, Homo sapien
tgtgatgagggggagaggagttgcaattcaaat

SEQ ID NO: 861285 - DNA, 33 bp, Homo sapien
caaaaactgctagaacagaaaagagaaagacaa

SEQ ID NO: 861286 - DNA, 33 bp, Homo sapien
caaaaactgctagaacggaaaagagaaagacaa

SEQ ID NO: 861287 - DNA, 33 bp, Homo sapien
ttattcaaaatcacccaggaaaacaactcccac

SEQ ID NO: 861288 - DNA, 33 bp, Homo sapien
ttattcaaaatcacccgggaaaacaactcccac

SEQ ID NO: 861289 - DNA, 33 bp, Homo sapien
ggcaatatagtaagaccacgactcaacaacaac

SEQ ID NO: 861290 - DNA, 33 bp, Homo sapien
ggcaatatagtaagactacgactcaacaacaac

SEQ ID NO: 861291 - DNA, 33 bp, Homo sapien
tcaaatataagacttgacaagctgtaggaaaaa

SEQ ID NO: 861292 - DNA, 33 bp, Homo sapien
tcaaatataagacttgtcaagctgtaggaaaaa

SEQ ID NO: 861293 - DNA, 33 bp, Homo sapien
taataaacgttagtctaaagctgctatgttttg

SEQ ID NO: 861294 - DNA, 33 bp, Homo sapien
taataaacgttagtcttaagctgctatgttttg

SEQ ID NO: 861295 - DNA, 33 bp, Homo sapien
ccgtgtttcttacctaagtaacctaactaccaa

SEQ ID NO: 861296 - DNA, 33 bp, Homo sapien
ccgtgtttcttacctaggtaacctaactaccaa

SEQ ID NO: 861297 - DNA, 33 bp, Homo sapien
ggctatcaaggagatcaaaagttgagcaggctg

SEQ ID NO: 861298 - DNA, 33 bp, Homo sapien
ggctatcaaggagatcgaaagttgagcaggctg

SEQ ID NO: 861299 - DNA, 33 bp, Homo sapien
actgtaggtctgtttacggactctagttcattc

SEQ ID NO: 861300 - DNA, 33 bp, Homo sapien
actgtaggtctgtttatggactctagttcattc

SEQ ID NO: 861301 - DNA, 33 bp, Homo sapien
gtgcacaagcaggtcacgtgaaataactacatg

SEQ ID NO: 861302 - DNA, 33 bp, Homo sapien
gtgcacaagcaggtcatgtgaaataactacatg

SEQ ID NO: 861303 - DNA, 33 bp, Homo sapien
gagctttaacatttgcgaagttactattatgag

SEQ ID NO: 861304 - DNA, 33 bp, Homo sapien
gagctttaacatttgctaagttactattatgag

SEQ ID NO: 861305 - DNA, 33 bp, Homo sapien
ttattagactttgcagaactgtagtttacctgt

SEQ ID NO: 861306 - DNA, 33 bp, Homo sapien
ttattagactttgcaggactgtagtttacctgt

SEQ ID NO: 861307 - DNA, 33 bp, Homo sapien
aaacctcaataaagacacaccttcaaagtttta

SEQ ID NO: 861308 - DNA, 33 bp, Homo sapien
aaacctcaataaagacgcaccttcaaagtttta

SEQ ID NO: 861309 - DNA, 33 bp, Homo sapien
atttttgaattgggagaatatacacatcatgct

SEQ ID NO: 861310 - DNA, 33 bp, Homo sapien
atttttgaattgggaggatatacacatcatgct

SEQ ID NO: 861311 - DNA, 33 bp, Homo sapien
attaaaacaacatccaagaatttattttgaggc

SEQ ID NO: 861312 - DNA, 33 bp, Homo sapien
attaaaacaacatccatgaatttattttgaggc

SEQ ID NO: 861313 - DNA, 33 bp, Homo sapien
agtggtctcgacagaaaatcaaactacccacaa

SEQ ID NO: 861314 - DNA, 33 bp, Homo sapien
agtggtctcgacagaagatcaaactacccacaa

SEQ ID NO: 861315 - DNA, 33 bp, Homo sapien
tagcctcctgtcagtacaagtcggcaaattatt

SEQ ID NO: 861316 - DNA, 33 bp, Homo sapien
tagcctcctgtcagtataagtcggcaaattatt

SEQ ID NO: 861317 - DNA, 33 bp, Homo sapien
tgacatggatttcaaccattaagatgcaaaggc

SEQ ID NO: 861318 - DNA, 33 bp, Homo sapien
tgacatggatttcaactattaagatgcaaaggc

SEQ ID NO: 861319 - DNA, 33 bp, Homo sapien
acacaaatggagtggaagttcctgtgtagacat

SEQ ID NO: 861320 - DNA, 33 bp, Homo sapien
acacaaatggagtggacgttcctgtgtagacat

SEQ ID NO: 861321 - DNA, 33 bp, Homo sapien
tgtgaggtttaccaaactatttgaccactgcct

SEQ ID NO: 861322 - DNA, 33 bp, Homo sapien
tgtgaggtttaccaaattatttgaccactgcct

SEQ ID NO: 861323 - DNA, 33 bp, Homo sapien
aagatgtaagcaggaaatcaaaaggaaatataa

SEQ ID NO: 861324 - DNA, 33 bp, Homo sapien
aagatgtaagcaggaagtcaaaaggaaatataa

SEQ ID NO: 861325 - DNA, 33 bp, Homo sapien
ggttatctgcctggccaatgccacgatgtccat

SEQ ID NO: 861326 - DNA, 33 bp, Homo sapien
ggttatctgcctggccgatgccacgatgtccat

SEQ ID NO: 861327 - DNA, 33 bp, Homo sapien
ggccatcttttcatgccatatgcaaatggcaca

SEQ ID NO: 861328 - DNA, 33 bp, Homo sapien
ggccatcttttcatgctatatgcaaatggcaca

SEQ ID NO: 861329 - DNA, 33 bp, Homo sapien
tcgctcttcaatctcacaacaaccaaggtcaga

SEQ ID NO: 861330 - DNA, 33 bp, Homo sapien
tcgctcttcaatctcagaacaaccaaggtcaga

SEQ ID NO: 861331 - DNA, 33 bp, Homo sapien
tttaagtaggttcaataatctccactttgagca

SEQ ID NO: 861332 - DNA, 33 bp, Homo sapien
tttaagtaggttcaatcatctccactttgagca

SEQ ID NO: 861333 - DNA, 33 bp, Homo sapien
cagacctcacagaggaagtgtcattttagaagt

SEQ ID NO: 861334 - DNA, 33 bp, Homo sapien
cagacctcacagaggatgtgtcattttagaagt

SEQ ID NO: 861335 - DNA, 33 bp, Homo sapien
atactaatcaccaaaaaaatgggaaaaatgtct

SEQ ID NO: 861336 - DNA, 33 bp, Homo sapien
atactaatcaccaaaacaatgggaaaaatgtct

SEQ ID NO: 861337 - DNA, 33 bp, Homo sapien
tgcctattgatgctaaatcctgaagttgatgag

SEQ ID NO: 861338 - DNA, 33 bp, Homo sapien
tgcctattgatgctaagtcctgaagttgatgag

SEQ ID NO: 861339 - DNA, 33 bp, Homo sapien
ggctaaacaaagtgaaaggttcaggctgaccac

SEQ ID NO: 861340 - DNA, 33 bp, Homo sapien
ggctaaacaaagtgaagggttcaggctgaccac

SEQ ID NO: 861341 - DNA, 33 bp, Homo sapien
ttacttgtgcagttgacgagtaatttttcatca

SEQ ID NO: 861342 - DNA, 33 bp, Homo sapien
ttacttgtgcagttgatgagtaatttttcatca

SEQ ID NO: 861343 - DNA, 33 bp, Homo sapien
ttaggatgttatcagacctttgtacctgagaaa

SEQ ID NO: 861344 - DNA, 33 bp, Homo sapien
ttaggatgttatcagatctttgtacctgagaaa

SEQ ID NO: 861345 - DNA, 33 bp, Homo sapien
ttaagtatgaaaaaaaagtcttattgcaaggaa

SEQ ID NO: 861346 - DNA, 33 bp, Homo sapien
ttaagtatgaaaaaaatgtcttattgcaaggaa

SEQ ID NO: 861347 - DNA, 33 bp, Homo sapien
taagcaaaggcatagagaataaagcctgacccc

SEQ ID NO: 861348 - DNA, 33 bp, Homo sapien
taagcaaaggcatagataataaagcctgacccc

SEQ ID NO: 861349 - DNA, 33 bp, Homo sapien
gggttaattttctgaaccctgatcccacctggg

SEQ ID NO: 861350 - DNA, 33 bp, Homo sapien
gggttaattttctgaatcctgatcccacctggg

SEQ ID NO: 861351 - DNA, 33 bp, Homo sapien
taagatgtcatggaagaagtggaattggatctg

SEQ ID NO: 861352 - DNA, 33 bp, Homo sapien
taagatgtcatggaaggagtggaattggatctg

SEQ ID NO: 861353 - DNA, 33 bp, Homo sapien
acagattgcatcaaggcatttgctgctttgaag

SEQ ID NO: 861354 - DNA, 33 bp, Homo sapien
acagattgcatcaaggtatttgctgctttgaag

SEQ ID NO: 861355 - DNA, 33 bp, Homo sapien
ggatgggaaaagcagacagtcttccccaaaatc

SEQ ID NO: 861356 - DNA, 33 bp, Homo sapien
ggatgggaaaagcagatagtcttccccaaaatc

SEQ ID NO: 861357 - DNA, 33 bp, Homo sapien
ccccacaattacaaaacaaggtctgagtgccac

SEQ ID NO: 861358 - DNA, 33 bp, Homo sapien
ccccacaattacaaaataaggtctgagtgccac

SEQ ID NO: 861359 - DNA, 33 bp, Homo sapien
tgcttctgatgtgatacatattttagagtgtta

SEQ ID NO: 861360 - DNA, 33 bp, Homo sapien
tgcttctgatgtgatagatattttagagtgtta

SEQ ID NO: 861361 - DNA, 33 bp, Homo sapien
taaagagaggctaaaaatagcacctcaaactct

SEQ ID NO: 861362 - DNA, 33 bp, Homo sapien
taaagagaggctaaaagtagcacctcaaactct

SEQ ID NO: 861363 - DNA, 33 bp, Homo sapien
gtgtgcctggaaaataccgcatgtaagcctgaa

SEQ ID NO: 861364 - DNA, 33 bp, Homo sapien
gtgtgcctggaaaatatcgcatgtaagcctgaa

SEQ ID NO: 861365 - DNA, 33 bp, Homo sapien
ctctcctcatataccaatgcacagtgatggaac

SEQ ID NO: 861366 - DNA, 33 bp, Homo sapien
ctctcctcatataccagtgcacagtgatggaac

SEQ ID NO: 861367 - DNA, 33 bp, Homo sapien
cagagaaggtacccaaaacatttgttacattga

SEQ ID NO: 861368 - DNA, 33 bp, Homo sapien
cagagaaggtacccaacacatttgttacattga

SEQ ID NO: 861369 - DNA, 33 bp, Homo sapien
gccaataaagatccaacagataggctgtcttga

SEQ ID NO: 861370 - DNA, 33 bp, Homo sapien
gccaataaagatccaatagataggctgtcttga

SEQ ID NO: 861371 - DNA, 33 bp, Homo sapien
gggccttgcactggacacctattaggtttggca

SEQ ID NO: 861372 - DNA, 33 bp, Homo sapien
gggccttgcactggacccctattaggtttggca

SEQ ID NO: 861373 - DNA, 33 bp, Homo sapien
aatggaaaatggatctcaaacagtgcccttctg

SEQ ID NO: 861374 - DNA, 33 bp, Homo sapien
aatggaaaatggatcttaaacagtgcccttctg

SEQ ID NO: 861375 - DNA, 33 bp, Homo sapien
aggagtgactttgctccgaagtggatttctgga

SEQ ID NO: 861376 - DNA, 33 bp, Homo sapien
aggagtgactttgctctgaagtggatttctgga

SEQ ID NO: 861377 - DNA, 33 bp, Homo sapien
ccctcataaaaaactacgtcatccatggaaaag

SEQ ID NO: 861378 - DNA, 33 bp, Homo sapien
ccctcataaaaaactatgtcatccatggaaaag

SEQ ID NO: 861379 - DNA, 33 bp, Homo sapien
ttttgatgaagttctcaatactatttcacgtat

SEQ ID NO: 861380 - DNA, 33 bp, Homo sapien
ttttgatgaagttctcgatactatttcacgtat

SEQ ID NO: 861381 - DNA, 33 bp, Homo sapien
catagaattgtcagataactcaaaacccaactt

SEQ ID NO: 861382 - DNA, 33 bp, Homo sapien
catagaattgtcagatgactcaaaacccaactt

SEQ ID NO: 861383 - DNA, 33 bp, Homo sapien
agcctaagtcatgtacactgcatgtcttgccct

SEQ ID NO: 861384 - DNA, 33 bp, Homo sapien
agcctaagtcatgtactctgcatgtcttgccct

SEQ ID NO: 861385 - DNA, 33 bp, Homo sapien
tgatctgggatttgtacagattcagcccaattt

SEQ ID NO: 861386 - DNA, 33 bp, Homo sapien
tgatctgggatttgtatagattcagcccaattt

SEQ ID NO: 861387 - DNA, 33 bp, Homo sapien
gcatggagctcattagcactgcagaaatcattc

SEQ ID NO: 861388 - DNA, 33 bp, Homo sapien
gcatggagctcattagtactgcagaaatcattc

SEQ ID NO: 861389 - DNA, 33 bp, Homo sapien
gaatactatacaacaacgagaatgaagaaaccc

SEQ ID NO: 861390 - DNA, 33 bp, Homo sapien
gaatactatacaacaatgagaatgaagaaaccc

SEQ ID NO: 861391 - DNA, 33 bp, Homo sapien
cttattgtgtttctcaaatcctgcccgaaattc

SEQ ID NO: 861392 - DNA, 33 bp, Homo sapien
cttattgtgtttctcagatcctgcccgaaattc

SEQ ID NO: 861393 - DNA, 33 bp, Homo sapien
ggcggtagcacaataacacactcgctcaaaact

SEQ ID NO: 861394 - DNA, 33 bp, Homo sapien
ggcggtagcacaataatacactcgctcaaaact

SEQ ID NO: 861395 - DNA, 33 bp, Homo sapien
agggctccagaattccaaatcttggcatgtatg

SEQ ID NO: 861396 - DNA, 33 bp, Homo sapien
agggctccagaattcccaatcttggcatgtatg

SEQ ID NO: 861397 - DNA, 33 bp, Homo sapien
tctttttgtttgattgaaacagcaaatataatc

SEQ ID NO: 861398 - DNA, 33 bp, Homo sapien
tctttttgtttgattggaacagcaaatataatc

SEQ ID NO: 861399 - DNA, 33 bp, Homo sapien
tttttaaataatgacacagatgcccaaaagaaa

SEQ ID NO: 861400 - DNA, 33 bp, Homo sapien
tttttaaataatgacagagatgcccaaaagaaa

SEQ ID NO: 861401 - DNA, 33 bp, Homo sapien
taaatgttaagtcttcaagttgtcctccagaaa

SEQ ID NO: 861402 - DNA, 33 bp, Homo sapien
taaatgttaagtcttcgagttgtcctccagaaa

SEQ ID NO: 861403 - DNA, 33 bp, Homo sapien
tgataggagctaaccaaaaacttgtgacacctt

SEQ ID NO: 861404 - DNA, 33 bp, Homo sapien
tgataggagctaaccacaaacttgtgacacctt

SEQ ID NO: 861405 - DNA, 33 bp, Homo sapien
ttttgctaatgcctggaatttcagtttagagta

SEQ ID NO: 861406 - DNA, 33 bp, Homo sapien
ttttgctaatgcctggtatttcagtttagagta

SEQ ID NO: 861407 - DNA, 33 bp, Homo sapien
ggtattcttgtttctagacttccatagcaggta

SEQ ID NO: 861408 - DNA, 33 bp, Homo sapien
ggtattcttgtttctatacttccatagcaggta

SEQ ID NO: 861409 - DNA, 33 bp, Homo sapien
gtgcatccacagatacaagtttgcagtatccag

SEQ ID NO: 861410 - DNA, 33 bp, Homo sapien
gtgcatccacagatacgagtttgcagtatccag

SEQ ID NO: 861411 - DNA, 33 bp, Homo sapien
agcagctcttgtcacagaaaaataactgtgaga

SEQ ID NO: 861412 - DNA, 33 bp, Homo sapien
agcagctcttgtcacataaaaataactgtgaga

SEQ ID NO: 861413 - DNA, 33 bp, Homo sapien
cgattcttggatatcacgaatctgtgttgtcct

SEQ ID NO: 861414 - DNA, 33 bp, Homo sapien
cgattcttggatatcatgaatctgtgttgtcct

SEQ ID NO: 861415 - DNA, 33 bp, Homo sapien
gaatgaaaccaaaatcacaatctagtcttttcc

SEQ ID NO: 861416 - DNA, 33 bp, Homo sapien
gaatgaaaccaaaatcgcaatctagtcttttcc

SEQ ID NO: 861417 - DNA, 33 bp, Homo sapien
tggtatgctgaaagataaagatagtaaaatgtg

SEQ ID NO: 861418 - DNA, 33 bp, Homo sapien
tggtatgctgaaagattaagatagtaaaatgtg

SEQ ID NO: 861419 - DNA, 33 bp, Homo sapien
ggggctgataagcaaaatgtacttttattctct

SEQ ID NO: 861420 - DNA, 33 bp, Homo sapien
ggggctgataagcaaagtgtacttttattctct

SEQ ID NO: 861421 - DNA, 33 bp, Homo sapien
cagctcctgaactagacagtaaaattgaagcag

SEQ ID NO: 861422 - DNA, 33 bp, Homo sapien
cagctcctgaactagatagtaaaattgaagcag

SEQ ID NO: 861423 - DNA, 33 bp, Homo sapien
tatctctaaataaaacggaactggcatagttac

SEQ ID NO: 861424 - DNA, 33 bp, Homo sapien
tatctctaaataaaactgaactggcatagttac

SEQ ID NO: 861425 - DNA, 33 bp, Homo sapien
agttcaagatgcggaactgcaaaaattggacaa

SEQ ID NO: 861426 - DNA, 33 bp, Homo sapien
agttcaagatgcggaattgcaaaaattggacaa

SEQ ID NO: 861427 - DNA, 33 bp, Homo sapien
ctgcctctgcccttcacggctcccattgccacc

SEQ ID NO: 861428 - DNA, 33 bp, Homo sapien
ctgcctctgcccttcatggctcccattgccacc

SEQ ID NO: 861429 - DNA, 33 bp, Homo sapien
accatggcctacccaccggcagtcacataggcc

SEQ ID NO: 861430 - DNA, 33 bp, Homo sapien
accatggcctacccactggcagtcacataggcc

SEQ ID NO: 861431 - DNA, 33 bp, Homo sapien
gtcacatgaactcacaacctgagggatagggac

SEQ ID NO: 861432 - DNA, 33 bp, Homo sapien
gtcacatgaactcacagcctgagggatagggac

SEQ ID NO: 861433 - DNA, 33 bp, Homo sapien
gacgtgcctggatactcactctctcacacagct

SEQ ID NO: 861434 - DNA, 33 bp, Homo sapien
gacgtgcctggatacttactctctcacacagct

SEQ ID NO: 861435 - DNA, 33 bp, Homo sapien
atgtagaagtttatgacgtagatttatgtatat

SEQ ID NO: 861436 - DNA, 33 bp, Homo sapien
atgtagaagtttatgatgtagatttatgtatat

SEQ ID NO: 861437 - DNA, 33 bp, Homo sapien
gtagtagtatccagcaacgaaaatgaagtcctg

SEQ ID NO: 861438 - DNA, 33 bp, Homo sapien
gtagtagtatccagcagcgaaaatgaagtcctg

SEQ ID NO: 861439 - DNA, 33 bp, Homo sapien
tgcgatcaccactacaatctaatttcagatgtt

SEQ ID NO: 861440 - DNA, 33 bp, Homo sapien
tgcgatcaccactacagtctaatttcagatgtt

SEQ ID NO: 861441 - DNA, 33 bp, Homo sapien
agcccttctgctccaaattaaagaaaccacaac

SEQ ID NO: 861442 - DNA, 33 bp, Homo sapien
agcccttctgctccaacttaaagaaaccacaac

SEQ ID NO: 861443 - DNA, 33 bp, Homo sapien
acatggctcatctcacagcttaatatgccaaga

SEQ ID NO: 861444 - DNA, 33 bp, Homo sapien
acatggctcatctcacggcttaatatgccaaga

SEQ ID NO: 861445 - DNA, 33 bp, Homo sapien
cctgtaatatagcccaatcgatggcttcaggct

SEQ ID NO: 861446 - DNA, 33 bp, Homo sapien
cctgtaatatagcccagtcgatggcttcaggct

SEQ ID NO: 861447 - DNA, 33 bp, Homo sapien
aaacaaaaaacagttaaaggagtatctaagaga

SEQ ID NO: 861448 - DNA, 33 bp, Homo sapien
aaacaaaaaacagttagaggagtatctaagaga

SEQ ID NO: 861449 - DNA, 33 bp, Homo sapien
tgaggtcagggtctggcattgactgattgttgt

SEQ ID NO: 861450 - DNA, 33 bp, Homo sapien
tgaggtcagggtctggtattgactgattgttgt

SEQ ID NO: 861451 - DNA, 33 bp, Homo sapien
agaactggggatcccacatcagtccagggccaa

SEQ ID NO: 861452 - DNA, 33 bp, Homo sapien
agaactggggatcccagatcagtccagggccaa

SEQ ID NO: 861453 - DNA, 33 bp, Homo sapien
atatgggttgattataaaatccaaaaagcagct

SEQ ID NO: 861454 - DNA, 33 bp, Homo sapien
atatgggttgattatacaatccaaaaagcagct

SEQ ID NO: 861455 - DNA, 33 bp, Homo sapien
tagtgatggacacttacggagttttcagagact

SEQ ID NO: 861456 - DNA, 33 bp, Homo sapien
tagtgatggacacttatggagttttcagagact

SEQ ID NO: 861457 - DNA, 33 bp, Homo sapien
aaagacccaggtacgcactaattcttctttttt

SEQ ID NO: 861458 - DNA, 33 bp, Homo sapien
aaagacccaggtacgcgctaattcttctttttt

SEQ ID NO: 861459 - DNA, 33 bp, Homo sapien
ttctttttgaatagacacatgtcctctgctgaa

SEQ ID NO: 861460 - DNA, 33 bp, Homo sapien
ttctttttgaatagacgcatgtcctctgctgaa

SEQ ID NO: 861461 - DNA, 33 bp, Homo sapien
tagaaacaattttgaactgaatgcaaaaacaaa

SEQ ID NO: 861462 - DNA, 33 bp, Homo sapien
tagaaacaattttgaattgaatgcaaaaacaaa

SEQ ID NO: 861463 - DNA, 33 bp, Homo sapien
gaataaatgccaaagaagtggacatctgacatc

SEQ ID NO: 861464 - DNA, 33 bp, Homo sapien
gaataaatgccaaagaggtggacatctgacatc

SEQ ID NO: 861465 - DNA, 33 bp, Homo sapien
tctagacctctaacctaaaaacagtaaatcgtc

SEQ ID NO: 861466 - DNA, 33 bp, Homo sapien
tctagacctctaacctcaaaacagtaaatcgtc

SEQ ID NO: 861467 - DNA, 33 bp, Homo sapien
ctataagatgtttcacactttttctcagttggg

SEQ ID NO: 861468 - DNA, 33 bp, Homo sapien
ctataagatgtttcacgctttttctcagttggg

SEQ ID NO: 861469 - DNA, 33 bp, Homo sapien
atgctttttaaggggggatagctgaatacttga

SEQ ID NO: 861470 - DNA, 33 bp, Homo sapien
atgctttttaagggggtatagctgaatacttga

SEQ ID NO: 861471 - DNA, 33 bp, Homo sapien
atatcctaccctaaaaagttcataatgtgtatt

SEQ ID NO: 861472 - DNA, 33 bp, Homo sapien
atatcctaccctaaaaggttcataatgtgtatt

SEQ ID NO: 861473 - DNA, 33 bp, Homo sapien
aaagcaggaaaagagcactttagagatcctccc

SEQ ID NO: 861474 - DNA, 33 bp, Homo sapien
aaagcaggaaaagagcgctttagagatcctccc

SEQ ID NO: 861475 - DNA, 33 bp, Homo sapien
aaagtatgaatgattaaatagcgtttcacaggc

SEQ ID NO: 861476 - DNA, 33 bp, Homo sapien
aaagtatgaatgattagatagcgtttcacaggc

SEQ ID NO: 861477 - DNA, 33 bp, Homo sapien
gagataaagaaagccacattaggggtgttttgg

SEQ ID NO: 861478 - DNA, 33 bp, Homo sapien
gagataaagaaagccatattaggggtgttttgg

SEQ ID NO: 861479 - DNA, 33 bp, Homo sapien
tccttagcagcattcaagggactcaggtgctca

SEQ ID NO: 861480 - DNA, 33 bp, Homo sapien
tccttagcagcattcacgggactcaggtgctca

SEQ ID NO: 861481 - DNA, 33 bp, Homo sapien
gaaaagaaggctgcccagaaactcgagaccaag

SEQ ID NO: 861482 - DNA, 33 bp, Homo sapien
gaaaagaaggctgcccggaaactcgagaccaag

SEQ ID NO: 861483 - DNA, 33 bp, Homo sapien
ccagtggggcacataaacatctctctgtgggtg

SEQ ID NO: 861484 - DNA, 33 bp, Homo sapien
ccagtggggcacataagcatctctctgtgggtg

SEQ ID NO: 861485 - DNA, 33 bp, Homo sapien
ttggtcacctgaaacccgaagcagttttctccg

SEQ ID NO: 861486 - DNA, 33 bp, Homo sapien
ttggtcacctgaaacctgaagcagttttctccg

SEQ ID NO: 861487 - DNA, 33 bp, Homo sapien
aaggaatctggaagacaggatggaactgttctg

SEQ ID NO: 861488 - DNA, 33 bp, Homo sapien
aaggaatctggaagacgggatggaactgttctg

SEQ ID NO: 861489 - DNA, 33 bp, Homo sapien
gaaaagaaaaagatgtaaaacttctgcagatgg

SEQ ID NO: 861490 - DNA, 33 bp, Homo sapien
gaaaagaaaaagatgtgaaacttctgcagatgg

SEQ ID NO: 861491 - DNA, 33 bp, Homo sapien
tgtaacagccggcaccaaatttgctttatatgg

SEQ ID NO: 861492 - DNA, 33 bp, Homo sapien
tgtaacagccggcacccaatttgctttatatgg

SEQ ID NO: 861493 - DNA, 33 bp, Homo sapien
gtatttttggcgcaacccggaactcctgagtgt

SEQ ID NO: 861494 - DNA, 33 bp, Homo sapien
gtatttttggcgcaactcggaactcctgagtgt

SEQ ID NO: 861495 - DNA, 33 bp, Homo sapien
tatgttggaaaacaccagataaaacacacttca

SEQ ID NO: 861496 - DNA, 33 bp, Homo sapien
tatgttggaaaacaccggataaaacacacttca

SEQ ID NO: 861497 - DNA, 33 bp, Homo sapien
ttgtctgaggacaactcaaattcaatctatcca

SEQ ID NO: 861498 - DNA, 33 bp, Homo sapien
ttgtctgaggacaacttaaattcaatctatcca

SEQ ID NO: 861499 - DNA, 33 bp, Homo sapien
agctgagctcagaaacacgatgctcacagtgac

SEQ ID NO: 861500 - DNA, 33 bp, Homo sapien
agctgagctcagaaacgcgatgctcacagtgac

SEQ ID NO: 861501 - DNA, 33 bp, Homo sapien
gtaggtttactggagaggacttaacttcattcc

SEQ ID NO: 861502 - DNA, 33 bp, Homo sapien
gtaggtttactggagatgacttaacttcattcc

SEQ ID NO: 861503 - DNA, 33 bp, Homo sapien
tgccccaactccctaccaggtgcgtcaggactg

SEQ ID NO: 861504 - DNA, 33 bp, Homo sapien
tgccccaactccctactaggtgcgtcaggactg

SEQ ID NO: 861505 - DNA, 33 bp, Homo sapien
cgccattgattttcacaaaggaattggcagtaa

SEQ ID NO: 861506 - DNA, 33 bp, Homo sapien
cgccattgattttcacgaaggaattggcagtaa

SEQ ID NO: 861507 - DNA, 33 bp, Homo sapien
tctatattccctcataaggcacattgccaaatt

SEQ ID NO: 861508 - DNA, 33 bp, Homo sapien
tctatattccctcatagggcacattgccaaatt

SEQ ID NO: 861509 - DNA, 33 bp, Homo sapien
tcctttaatagctgtgaatcctcaggcacatcc

SEQ ID NO: 861510 - DNA, 33 bp, Homo sapien
tcctttaatagctgtgcatcctcaggcacatcc

SEQ ID NO: 861511 - DNA, 33 bp, Homo sapien
aaatgtctcagtcaacacaagccaaagctagtt

SEQ ID NO: 861512 - DNA, 33 bp, Homo sapien
aaatgtctcagtcaactcaagccaaagctagtt

SEQ ID NO: 861513 - DNA, 33 bp, Homo sapien
aagaaaagctccaaacagaggcctctcaattct

SEQ ID NO: 861514 - DNA, 33 bp, Homo sapien
aagaaaagctccaaactgaggcctctcaattct

SEQ ID NO: 861515 - DNA, 33 bp, Homo sapien
taacagttttatctacagcctgcccttatctga

SEQ ID NO: 861516 - DNA, 33 bp, Homo sapien
taacagttttatctacggcctgcccttatctga

SEQ ID NO: 861517 - DNA, 33 bp, Homo sapien
aggtggggaaaatgaaatctagttcaggctggt

SEQ ID NO: 861518 - DNA, 33 bp, Homo sapien
aggtggggaaaatgaagtctagttcaggctggt

SEQ ID NO: 861519 - DNA, 33 bp, Homo sapien
tttcatattttctccccgctcaaattcacaaca

SEQ ID NO: 861520 - DNA, 33 bp, Homo sapien
tttcatattttctccctgctcaaattcacaaca

SEQ ID NO: 861521 - DNA, 33 bp, Homo sapien
actgaagatggaaagaacctggtacccaaatca

SEQ ID NO: 861522 - DNA, 33 bp, Homo sapien
actgaagatggaaagagcctggtacccaaatca

SEQ ID NO: 861523 - DNA, 33 bp, Homo sapien
agagagtcacgtacgacgtcaccaggtatctgc

SEQ ID NO: 861524 - DNA, 33 bp, Homo sapien
agagagtcacgtacgatgtcaccaggtatctgc

SEQ ID NO: 861525 - DNA, 33 bp, Homo sapien
tcgccctacctgggaacggtggaaagtctgagt

SEQ ID NO: 861526 - DNA, 33 bp, Homo sapien
tcgccctacctgggaatggtggaaagtctgagt

SEQ ID NO: 861527 - DNA, 33 bp, Homo sapien
aatttggacaaggtcaatgaacgtccttgagcc

SEQ ID NO: 861528 - DNA, 33 bp, Homo sapien
aatttggacaaggtcagtgaacgtccttgagcc

SEQ ID NO: 861529 - DNA, 33 bp, Homo sapien
taactgtttcctgctgaatcatccataataaag

SEQ ID NO: 861530 - DNA, 33 bp, Homo sapien
taactgtttcctgctggatcatccataataaag

SEQ ID NO: 861531 - DNA, 33 bp, Homo sapien
gatggaccagatcatcaaaggtaacatgaagac

SEQ ID NO: 861532 - DNA, 33 bp, Homo sapien
gatggaccagatcatcgaaggtaacatgaagac

SEQ ID NO: 861533 - DNA, 33 bp, Homo sapien
aaacaatgtgtgagagaaaaagaagaataagag

SEQ ID NO: 861534 - DNA, 33 bp, Homo sapien
aaacaatgtgtgagaggaaaagaagaataagag

SEQ ID NO: 861535 - DNA, 33 bp, Homo sapien
aatctcacaacagaaagaattcatgagcagcct

SEQ ID NO: 861536 - DNA, 33 bp, Homo sapien
aatctcacaacagaaataattcatgagcagcct

SEQ ID NO: 861537 - DNA, 33 bp, Homo sapien
atatccacagtggaaactaatgcatacccctga

SEQ ID NO: 861538 - DNA, 33 bp, Homo sapien
atatccacagtggaaattaatgcatacccctga

SEQ ID NO: 861539 - DNA, 33 bp, Homo sapien
agagactccgaaacagaactgagctaagctgtt

SEQ ID NO: 861540 - DNA, 33 bp, Homo sapien
agagactccgaaacaggactgagctaagctgtt

SEQ ID NO: 861541 - DNA, 33 bp, Homo sapien
accaggatgagcttgacaaacactgtgtctgag

SEQ ID NO: 861542 - DNA, 33 bp, Homo sapien
accaggatgagcttgataaacactgtgtctgag

SEQ ID NO: 861543 - DNA, 33 bp, Homo sapien
ccagggatatgcaaataaaaagagcaatgagat

SEQ ID NO: 861544 - DNA, 33 bp, Homo sapien
ccagggatatgcaaatgaaaagagcaatgagat

SEQ ID NO: 861545 - DNA, 33 bp, Homo sapien
caactgtgatgatgcaagaacaaaaaacgattg

SEQ ID NO: 861546 - DNA, 33 bp, Homo sapien
caactgtgatgatgcacgaacaaaaaacgattg

SEQ ID NO: 861547 - DNA, 33 bp, Homo sapien
gtagtgagcaggagaaagagattccagtctagg

SEQ ID NO: 861548 - DNA, 33 bp, Homo sapien
gtagtgagcaggagaaggagattccagtctagg

SEQ ID NO: 861549 - DNA, 33 bp, Homo sapien
agcccttgcatttgtacagcccttcagttcgca

SEQ ID NO: 861550 - DNA, 33 bp, Homo sapien
agcccttgcatttgtatagcccttcagttcgca

SEQ ID NO: 861551 - DNA, 33 bp, Homo sapien
tcttacaaagctaaacacaatcttcccatatga

SEQ ID NO: 861552 - DNA, 33 bp, Homo sapien
tcttacaaagctaaacgcaatcttcccatatga

SEQ ID NO: 861553 - DNA, 33 bp, Homo sapien
tatattaaaagtcatcacaatacgcaaggtttt

SEQ ID NO: 861554 - DNA, 33 bp, Homo sapien
tatattaaaagtcatcgcaatacgcaaggtttt

SEQ ID NO: 861555 - DNA, 33 bp, Homo sapien
gagccaccgagctgccaaactgggtcctcaggc

SEQ ID NO: 861556 - DNA, 33 bp, Homo sapien
gagccaccgagctgccgaactgggtcctcaggc

SEQ ID NO: 861557 - DNA, 33 bp, Homo sapien
aaggaaaaaatagatcactgccaacatcatcaa

SEQ ID NO: 861558 - DNA, 33 bp, Homo sapien
aaggaaaaaatagatcgctgccaacatcatcaa

SEQ ID NO: 861559 - DNA, 33 bp, Homo sapien
tctcatcttggcaaaccctttgttcctgcaatt

SEQ ID NO: 861560 - DNA, 33 bp, Homo sapien
tctcatcttggcaaacgctttgttcctgcaatt

SEQ ID NO: 861561 - DNA, 33 bp, Homo sapien
ccagttagtgattattaaaaaaggtgccaaggg

SEQ ID NO: 861562 - DNA, 33 bp, Homo sapien
ccagttagtgattattgaaaaaggtgccaaggg

SEQ ID NO: 861563 - DNA, 33 bp, Homo sapien
gacctgattactgaaaagttcaaatgacctcac

SEQ ID NO: 861564 - DNA, 33 bp, Homo sapien
gacctgattactgaaaggttcaaatgacctcac

SEQ ID NO: 861565 - DNA, 33 bp, Homo sapien
tggccatacgcttggcaagtagcagcaccggga

SEQ ID NO: 861566 - DNA, 33 bp, Homo sapien
tggccatacgcttggcgagtagcagcaccggga

SEQ ID NO: 861567 - DNA, 33 bp, Homo sapien
tatcttgcgcgaccccacctattggaagcctaa

SEQ ID NO: 861568 - DNA, 33 bp, Homo sapien
tatcttgcgcgaccccgcctattggaagcctaa

SEQ ID NO: 861569 - DNA, 33 bp, Homo sapien
gttgctcaagcagagacatcccagaatcctgcc

SEQ ID NO: 861570 - DNA, 33 bp, Homo sapien
gttgctcaagcagagatatcccagaatcctgcc

SEQ ID NO: 861571 - DNA, 33 bp, Homo sapien
accatacatttgaaaaatacacagcaatagctc

SEQ ID NO: 861572 - DNA, 33 bp, Homo sapien
accatacatttgaaaactacacagcaatagctc

SEQ ID NO: 861573 - DNA, 33 bp, Homo sapien
catacataactttcataaataacccaagtcagg

SEQ ID NO: 861574 - DNA, 33 bp, Homo sapien
catacataactttcatgaataacccaagtcagg

SEQ ID NO: 861575 - DNA, 33 bp, Homo sapien
catcttcacgctccccacatctaagctctggca

SEQ ID NO: 861576 - DNA, 33 bp, Homo sapien
catcttcacgctcccctcatctaagctctggca

SEQ ID NO: 861577 - DNA, 33 bp, Homo sapien
cacattctctggtcaaagtgcaattaaattaga

SEQ ID NO: 861578 - DNA, 33 bp, Homo sapien
cacattctctggtcaaggtgcaattaaattaga

SEQ ID NO: 861579 - DNA, 33 bp, Homo sapien
aaacctatatactcaaaacataaagacatttaa

SEQ ID NO: 861580 - DNA, 33 bp, Homo sapien
aaacctatatactcaagacataaagacatttaa

SEQ ID NO: 861581 - DNA, 33 bp, Homo sapien
ccacagggacttctgacgcaaattaaggtttgc

SEQ ID NO: 861582 - DNA, 33 bp, Homo sapien
ccacagggacttctgatgcaaattaaggtttgc

SEQ ID NO: 861583 - DNA, 33 bp, Homo sapien
catatttcaagttgtacctctcttgtctgctcc

SEQ ID NO: 861584 - DNA, 33 bp, Homo sapien
catatttcaagttgtagctctcttgtctgctcc

SEQ ID NO: 861585 - DNA, 33 bp, Homo sapien
ctggggaacattttgaaatgacagagtcgagga

SEQ ID NO: 861586 - DNA, 33 bp, Homo sapien
ctggggaacattttgagatgacagagtcgagga

SEQ ID NO: 861587 - DNA, 33 bp, Homo sapien
ttactaatctcggccacgttaggacctacagag

SEQ ID NO: 861588 - DNA, 33 bp, Homo sapien
ttactaatctcggccatgttaggacctacagag

SEQ ID NO: 861589 - DNA, 33 bp, Homo sapien
gcggctggaaaacacaaggctagttgtttgttt

SEQ ID NO: 861590 - DNA, 33 bp, Homo sapien
gcggctggaaaacacagggctagttgtttgttt

SEQ ID NO: 861591 - DNA, 33 bp, Homo sapien
acccatagtgccaaagcacacagtgaatgtaca

SEQ ID NO: 861592 - DNA, 33 bp, Homo sapien
acccatagtgccaaagtacacagtgaatgtaca

SEQ ID NO: 861593 - DNA, 33 bp, Homo sapien
cagtctctttaacaaacggtgctaggaaaacta

SEQ ID NO: 861594 - DNA, 33 bp, Homo sapien
cagtctctttaacaaatggtgctaggaaaacta

SEQ ID NO: 861595 - DNA, 33 bp, Homo sapien
ttcctatgtagtacagaataacttagccttggg

SEQ ID NO: 861596 - DNA, 33 bp, Homo sapien
ttcctatgtagtacagcataacttagccttggg

SEQ ID NO: 861597 - DNA, 33 bp, Homo sapien
actaaaggtgttcagtgacaaactttgttctag

SEQ ID NO: 861598 - DNA, 33 bp, Homo sapien
actaaaggtgttcagttacaaactttgttctag

SEQ ID NO: 861599 - DNA, 33 bp, Homo sapien
tgagttgatactcccaacgttcccaaatattgt

SEQ ID NO: 861600 - DNA, 33 bp, Homo sapien
tgagttgatactcccagcgttcccaaatattgt

SEQ ID NO: 861601 - DNA, 33 bp, Homo sapien
gtttcttaaaaactcaacactatctactgcaaa

SEQ ID NO: 861602 - DNA, 33 bp, Homo sapien
gtttcttaaaaactcagcactatctactgcaaa

SEQ ID NO: 861603 - DNA, 33 bp, Homo sapien
ttggaaaaatatattgcaaggggcaaaactagg

SEQ ID NO: 861604 - DNA, 33 bp, Homo sapien
ttggaaaaatatattggaaggggcaaaactagg

SEQ ID NO: 861605 - DNA, 33 bp, Homo sapien
aacaggagtaagccaaattgaatagtcagcctc

SEQ ID NO: 861606 - DNA, 33 bp, Homo sapien
aacaggagtaagccaagttgaatagtcagcctc

SEQ ID NO: 861607 - DNA, 33 bp, Homo sapien
caattttcaataattacaataagttcgtgacca

SEQ ID NO: 861608 - DNA, 33 bp, Homo sapien
caattttcaataattataataagttcgtgacca

SEQ ID NO: 861609 - DNA, 33 bp, Homo sapien
tgggtactatatgacactaagaagtttaaattc

SEQ ID NO: 861610 - DNA, 33 bp, Homo sapien
tgggtactatatgacattaagaagtttaaattc

SEQ ID NO: 861611 - DNA, 33 bp, Homo sapien
tgttctgtgagtgttaccagcactctggattct

SEQ ID NO: 861612 - DNA, 33 bp, Homo sapien
tgttctgtgagtgttatcagcactctggattct

SEQ ID NO: 861613 - DNA, 33 bp, Homo sapien
cattgtgttttctcaacgattcaacctaacagg

SEQ ID NO: 861614 - DNA, 33 bp, Homo sapien
cattgtgttttctcaatgattcaacctaacagg

SEQ ID NO: 861615 - DNA, 33 bp, Homo sapien
cttaacttgctaattacaaagacggagattaaa

SEQ ID NO: 861616 - DNA, 33 bp, Homo sapien
cttaacttgctaattataaagacggagattaaa

SEQ ID NO: 861617 - DNA, 33 bp, Homo sapien
agagatcactgattctcaaaggtttgttatgga

SEQ ID NO: 861618 - DNA, 33 bp, Homo sapien
agagatcactgattctgaaaggtttgttatgga

SEQ ID NO: 861619 - DNA, 33 bp, Homo sapien
tcccagagctcttctacgtcatatgggatactg

SEQ ID NO: 861620 - DNA, 33 bp, Homo sapien
tcccagagctcttctatgtcatatgggatactg

SEQ ID NO: 861621 - DNA, 33 bp, Homo sapien
ttctggaatgagtgagcaaatttgtgagtcaca

SEQ ID NO: 861622 - DNA, 33 bp, Homo sapien
ttctggaatgagtgagtaaatttgtgagtcaca

SEQ ID NO: 861623 - DNA, 33 bp, Homo sapien
cctgacacaacgtggcaagtacagtgatgaagg

SEQ ID NO: 861624 - DNA, 33 bp, Homo sapien
cctgacacaacgtggctagtacagtgatgaagg

SEQ ID NO: 861625 - DNA, 33 bp, Homo sapien
ctacgacatcggttcccactgtcaaaatgctga

SEQ ID NO: 861626 - DNA, 33 bp, Homo sapien
ctacgacatcggttcctactgtcaaaatgctga

SEQ ID NO: 861627 - DNA, 33 bp, Homo sapien
tgttgctccatgaagacgctttgaaatttttgg

SEQ ID NO: 861628 - DNA, 33 bp, Homo sapien
tgttgctccatgaagatgctttgaaatttttgg

SEQ ID NO: 861629 - DNA, 33 bp, Homo sapien
agatgactatcactacaagtctctttaccttta

SEQ ID NO: 861630 - DNA, 33 bp, Homo sapien
agatgactatcactacgagtctctttaccttta

SEQ ID NO: 861631 - DNA, 33 bp, Homo sapien
gttagcactacctaaaatcatcttatttagtct

SEQ ID NO: 861632 - DNA, 33 bp, Homo sapien
gttagcactacctaaactcatcttatttagtct

SEQ ID NO: 861633 - DNA, 33 bp, Homo sapien
gtagttggatataataagctggagtttagggct

SEQ ID NO: 861634 - DNA, 33 bp, Homo sapien
gtagttggatataataggctggagtttagggct

SEQ ID NO: 861635 - DNA, 33 bp, Homo sapien
cttcatgcaataagtcccaagatggcagaattt

SEQ ID NO: 861636 - DNA, 33 bp, Homo sapien
cttcatgcaataagtctcaagatggcagaattt

SEQ ID NO: 861637 - DNA, 33 bp, Homo sapien
tgccattgcctgaaagacttataaaattcttct

SEQ ID NO: 861638 - DNA, 33 bp, Homo sapien
tgccattgcctgaaagtcttataaaattcttct

SEQ ID NO: 861639 - DNA, 33 bp, Homo sapien
gggaaaggtcttttccaataaagtgaataaagc

SEQ ID NO: 861640 - DNA, 33 bp, Homo sapien
gggaaaggtcttttccgataaagtgaataaagc

SEQ ID NO: 861641 - DNA, 33 bp, Homo sapien
gaactctccaagacatcaagtgtccaaaacccc

SEQ ID NO: 861642 - DNA, 33 bp, Homo sapien
gaactctccaagacatgaagtgtccaaaacccc

SEQ ID NO: 861643 - DNA, 33 bp, Homo sapien
cctaattccaagttcaactgttttatagtacac

SEQ ID NO: 861644 - DNA, 33 bp, Homo sapien
cctaattccaagttcagctgttttatagtacac

SEQ ID NO: 861645 - DNA, 33 bp, Homo sapien
aaataatacacataaaatccccagtaaagaccc

SEQ ID NO: 861646 - DNA, 33 bp, Homo sapien
aaataatacacataaagtccccagtaaagaccc

SEQ ID NO: 861647 - DNA, 33 bp, Homo sapien
cagtgaagatgagagacagcggtcatgaggcag

SEQ ID NO: 861648 - DNA, 33 bp, Homo sapien
cagtgaagatgagagagagcggtcatgaggcag

SEQ ID NO: 861649 - DNA, 33 bp, Homo sapien
aattcaaagtgaacagacctcagatacaaatgg

SEQ ID NO: 861650 - DNA, 33 bp, Homo sapien
aattcaaagtgaacaggcctcagatacaaatgg

SEQ ID NO: 861651 - DNA, 33 bp, Homo sapien
atttttgtcaccattcaacatgcaagaacaatc

SEQ ID NO: 861652 - DNA, 33 bp, Homo sapien
atttttgtcaccattcgacatgcaagaacaatc

SEQ ID NO: 861653 - DNA, 33 bp, Homo sapien
ttacttttcttcagaccaggaagatgtcactta

SEQ ID NO: 861654 - DNA, 33 bp, Homo sapien
ttacttttcttcagactaggaagatgtcactta

SEQ ID NO: 861655 - DNA, 33 bp, Homo sapien
tcactagctaataaagaaggctgcctgagatat

SEQ ID NO: 861656 - DNA, 33 bp, Homo sapien
tcactagctaataaaggaggctgcctgagatat

SEQ ID NO: 861657 - DNA, 33 bp, Homo sapien
ttagctagtgacagaaaccagtgcaaaccagtg

SEQ ID NO: 861658 - DNA, 33 bp, Homo sapien
ttagctagtgacagaagccagtgcaaaccagtg

SEQ ID NO: 861659 - DNA, 33 bp, Homo sapien
aggttaattgtgtgagaacaaaagaagattcct

SEQ ID NO: 861660 - DNA, 33 bp, Homo sapien
aggttaattgtgtgaggacaaaagaagattcct

SEQ ID NO: 861661 - DNA, 33 bp, Homo sapien
ggtactggaatactaccggtatctagtgcgtag

SEQ ID NO: 861662 - DNA, 33 bp, Homo sapien
ggtactggaatactactggtatctagtgcgtag

SEQ ID NO: 861663 - DNA, 33 bp, Homo sapien
gttaattctctcaaacagtgctttatgtaatat

SEQ ID NO: 861664 - DNA, 33 bp, Homo sapien
gttaattctctcaaactgtgctttatgtaatat

SEQ ID NO: 861665 - DNA, 33 bp, Homo sapien
gtttaatgtagccaccgctatcaattatcttag

SEQ ID NO: 861666 - DNA, 33 bp, Homo sapien
gtttaatgtagccacctctatcaattatcttag

SEQ ID NO: 861667 - DNA, 33 bp, Homo sapien
agggagaccaaaaggcaagaagatgtgaagtcc

SEQ ID NO: 861668 - DNA, 33 bp, Homo sapien
agggagaccaaaaggcgagaagatgtgaagtcc

SEQ ID NO: 861669 - DNA, 33 bp, Homo sapien
acttagaaggccattacagtcacacaagtgaga

SEQ ID NO: 861670 - DNA, 33 bp, Homo sapien
acttagaaggccattatagtcacacaagtgaga

SEQ ID NO: 861671 - DNA, 33 bp, Homo sapien
tttagtcaagagtcataaacacatcctagaaga

SEQ ID NO: 861672 - DNA, 33 bp, Homo sapien
tttagtcaagagtcatgaacacatcctagaaga

SEQ ID NO: 861673 - DNA, 33 bp, Homo sapien
acataattgacattcaagaaacaacacatattt

SEQ ID NO: 861674 - DNA, 33 bp, Homo sapien
acataattgacattcaggaaacaacacatattt

SEQ ID NO: 861675 - DNA, 33 bp, Homo sapien
aatctagatatccttacagtcaagtcgaggaga

SEQ ID NO: 861676 - DNA, 33 bp, Homo sapien
aatctagatatccttagagtcaagtcgaggaga

SEQ ID NO: 861677 - DNA, 33 bp, Homo sapien
acaatatattttcaacagtcctagccaaatagg

SEQ ID NO: 861678 - DNA, 33 bp, Homo sapien
acaatatattttcaacggtcctagccaaatagg

SEQ ID NO: 861679 - DNA, 33 bp, Homo sapien
agcacctgcactggaacattagcctactcttga

SEQ ID NO: 861680 - DNA, 33 bp, Homo sapien
agcacctgcactggaagattagcctactcttga

SEQ ID NO: 861681 - DNA, 33 bp, Homo sapien
ctggaggacttttcaaagagagagtacttctat

SEQ ID NO: 861682 - DNA, 33 bp, Homo sapien
ctggaggacttttcaaggagagagtacttctat

SEQ ID NO: 861683 - DNA, 33 bp, Homo sapien
ttcctcagtcatcagacgaagagattgaaaaag

SEQ ID NO: 861684 - DNA, 33 bp, Homo sapien
ttcctcagtcatcagatgaagagattgaaaaag

SEQ ID NO: 861685 - DNA, 33 bp, Homo sapien
aaccaaacacactacagtacagcctttgcagaa

SEQ ID NO: 861686 - DNA, 33 bp, Homo sapien
aaccaaacacactacattacagcctttgcagaa

SEQ ID NO: 861687 - DNA, 33 bp, Homo sapien
agagagaggatgctaacattaattgagctctta

SEQ ID NO: 861688 - DNA, 33 bp, Homo sapien
agagagaggatgctaagattaattgagctctta

SEQ ID NO: 861689 - DNA, 33 bp, Homo sapien
agaaccctaacaaaagaactgcatgactacttg

SEQ ID NO: 861690 - DNA, 33 bp, Homo sapien
agaaccctaacaaaagcactgcatgactacttg

SEQ ID NO: 861691 - DNA, 33 bp, Homo sapien
gaggaagacttgctccaagaaccctaacaaaag

SEQ ID NO: 861692 - DNA, 33 bp, Homo sapien
gaggaagacttgctccgagaaccctaacaaaag

SEQ ID NO: 861693 - DNA, 33 bp, Homo sapien
gaggctctgtgtgtcccccaacccgttcctgga

SEQ ID NO: 861694 - DNA, 33 bp, Homo sapien
gaggctctgtgtgtcctccaacccgttcctgga

SEQ ID NO: 861695 - DNA, 33 bp, Homo sapien
gaagccagatccagtacgagcaggtgtgcgtga

SEQ ID NO: 861696 - DNA, 33 bp, Homo sapien
gaagccagatccagtatgagcaggtgtgcgtga

SEQ ID NO: 861697 - DNA, 33 bp, Homo sapien
accatatcacctccaaagtcttaactttcccag

SEQ ID NO: 861698 - DNA, 33 bp, Homo sapien
accatatcacctccaaggtcttaactttcccag

SEQ ID NO: 861699 - DNA, 33 bp, Homo sapien
gagtcccttctatgaactgatttgtgacccttg

SEQ ID NO: 861700 - DNA, 33 bp, Homo sapien
gagtcccttctatgaattgatttgtgacccttg

SEQ ID NO: 861701 - DNA, 33 bp, Homo sapien
tccctgattctgataaatgtagcttagtaaaca

SEQ ID NO: 861702 - DNA, 33 bp, Homo sapien
tccctgattctgataattgtagcttagtaaaca

SEQ ID NO: 861703 - DNA, 33 bp, Homo sapien
ggctttacatcttacccgcttgactaagctaca

SEQ ID NO: 861704 - DNA, 33 bp, Homo sapien
ggctttacatcttacctgcttgactaagctaca

SEQ ID NO: 861705 - DNA, 33 bp, Homo sapien
tcaccagtatgtaaaaaccttgcaaattctgac

SEQ ID NO: 861706 - DNA, 33 bp, Homo sapien
tcaccagtatgtaaaatccttgcaaattctgac

SEQ ID NO: 861707 - DNA, 33 bp, Homo sapien
ttctgccttagggtcacggggatggctgaacac

SEQ ID NO: 861708 - DNA, 33 bp, Homo sapien
ttctgccttagggtcatggggatggctgaacac

SEQ ID NO: 861709 - DNA, 33 bp, Homo sapien
caattgctatcatgacgatttattaagtggaga

SEQ ID NO: 861710 - DNA, 33 bp, Homo sapien
caattgctatcatgactatttattaagtggaga

SEQ ID NO: 861711 - DNA, 33 bp, Homo sapien
gctagtggcccttgcaacttagagcttcagaat

SEQ ID NO: 861712 - DNA, 33 bp, Homo sapien
gctagtggcccttgcaccttagagcttcagaat

SEQ ID NO: 861713 - DNA, 33 bp, Homo sapien
aaactagctggtgcccccacttgaagagctttt

SEQ ID NO: 861714 - DNA, 33 bp, Homo sapien
aaactagctggtgcccgcacttgaagagctttt

SEQ ID NO: 861715 - DNA, 33 bp, Homo sapien
cagaattcggttactcaaagcactaataaaacg

SEQ ID NO: 861716 - DNA, 33 bp, Homo sapien
cagaattcggttactcgaagcactaataaaacg

SEQ ID NO: 861717 - DNA, 33 bp, Homo sapien
ccaagctaatcttgaccacaaagggtgatctct

SEQ ID NO: 861718 - DNA, 33 bp, Homo sapien
ccaagctaatcttgactacaaagggtgatctct

SEQ ID NO: 861719 - DNA, 33 bp, Homo sapien
actactagttcagctaccgagacctaatacaag

SEQ ID NO: 861720 - DNA, 33 bp, Homo sapien
actactagttcagctatcgagacctaatacaag

SEQ ID NO: 861721 - DNA, 33 bp, Homo sapien
cacatgccacactctacactgaggtgtcctgaa

SEQ ID NO: 861722 - DNA, 33 bp, Homo sapien
cacatgccacactctatactgaggtgtcctgaa

SEQ ID NO: 861723 - DNA, 33 bp, Homo sapien
gttcttctggtaacataaggcagcaaagtgctc

SEQ ID NO: 861724 - DNA, 33 bp, Homo sapien
gttcttctggtaacatgaggcagcaaagtgctc

SEQ ID NO: 861725 - DNA, 33 bp, Homo sapien
attaatggctataaaaaggcaactctctgagac

SEQ ID NO: 861726 - DNA, 33 bp, Homo sapien
attaatggctataaaatggcaactctctgagac

SEQ ID NO: 861727 - DNA, 33 bp, Homo sapien
ggatatgatcaagatacgggcaataaagcagca

SEQ ID NO: 861728 - DNA, 33 bp, Homo sapien
ggatatgatcaagatatgggcaataaagcagca

SEQ ID NO: 861729 - DNA, 33 bp, Homo sapien
tctactttttaactgggaatctggcagaagcta

SEQ ID NO: 861730 - DNA, 33 bp, Homo sapien
tctactttttaactggtaatctggcagaagcta

SEQ ID NO: 861731 - DNA, 33 bp, Homo sapien
gtggattatcatgatgaacaaggtctctgtgga

SEQ ID NO: 861732 - DNA, 33 bp, Homo sapien
gtggattatcatgatgcacaaggtctctgtgga

SEQ ID NO: 861733 - DNA, 33 bp, Homo sapien
aactgagacatggccaaaagtacagacttacac

SEQ ID NO: 861734 - DNA, 33 bp, Homo sapien
aactgagacatggccagaagtacagacttacac

SEQ ID NO: 861735 - DNA, 33 bp, Homo sapien
gtgggtgtattagtccaaacctgctgatagaca

SEQ ID NO: 861736 - DNA, 33 bp, Homo sapien
gtgggtgtattagtccgaacctgctgatagaca

SEQ ID NO: 861737 - DNA, 33 bp, Homo sapien
aggctgtgtgtgggctcaacatcaggggattcc

SEQ ID NO: 861738 - DNA, 33 bp, Homo sapien
aggctgtgtgtgggcttaacatcaggggattcc

SEQ ID NO: 861739 - DNA, 33 bp, Homo sapien
gaagcatgagcagggaaggcaatccatatccag

SEQ ID NO: 861740 - DNA, 33 bp, Homo sapien
gaagcatgagcagggagggcaatccatatccag

SEQ ID NO: 861741 - DNA, 33 bp, Homo sapien
gagaaaaaggctttgacataataccaacactac

SEQ ID NO: 861742 - DNA, 33 bp, Homo sapien
gagaaaaaggctttgatataataccaacactac

SEQ ID NO: 861743 - DNA, 33 bp, Homo sapien
ctgttagtctcctataataagaagtccagagta

SEQ ID NO: 861744 - DNA, 33 bp, Homo sapien
ctgttagtctcctatactaagaagtccagagta

SEQ ID NO: 861745 - DNA, 33 bp, Homo sapien
accattcaccaagatacagaatataaggaggag

SEQ ID NO: 861746 - DNA, 33 bp, Homo sapien
accattcaccaagatagagaatataaggaggag

SEQ ID NO: 861747 - DNA, 33 bp, Homo sapien
tataaatagatctacaatatacatacccaaaag

SEQ ID NO: 861748 - DNA, 33 bp, Homo sapien
tataaatagatctacactatacatacccaaaag

SEQ ID NO: 861749 - DNA, 33 bp, Homo sapien
ttatagcagaactgacaggacagaggacagagc

SEQ ID NO: 861750 - DNA, 33 bp, Homo sapien
ttatagcagaactgacgggacagaggacagagc

SEQ ID NO: 861751 - DNA, 33 bp, Homo sapien
ggtcacgaaacatacagaccttgcaaaagacct

SEQ ID NO: 861752 - DNA, 33 bp, Homo sapien
ggtcacgaaacatacataccttgcaaaagacct

SEQ ID NO: 861753 - DNA, 33 bp, Homo sapien
cagagtaacatcagcactgatagtgaatgtacc

SEQ ID NO: 861754 - DNA, 33 bp, Homo sapien
cagagtaacatcagcattgatagtgaatgtacc

SEQ ID NO: 861755 - DNA, 33 bp, Homo sapien
tcttgtaagactttgacctgcattatatgattc

SEQ ID NO: 861756 - DNA, 33 bp, Homo sapien
tcttgtaagactttgatctgcattatatgattc

SEQ ID NO: 861757 - DNA, 33 bp, Homo sapien
gtctgtgtacctctgacacaattcaggaggaag

SEQ ID NO: 861758 - DNA, 33 bp, Homo sapien
gtctgtgtacctctgagacaattcaggaggaag

SEQ ID NO: 861759 - DNA, 33 bp, Homo sapien
aaaaagccttgtcccaactgccaagattctgat

SEQ ID NO: 861760 - DNA, 33 bp, Homo sapien
aaaaagccttgtcccagctgccaagattctgat

SEQ ID NO: 861761 - DNA, 33 bp, Homo sapien
catgcataaaagagcaactctctttccggcatc

SEQ ID NO: 861762 - DNA, 33 bp, Homo sapien
catgcataaaagagcagctctctttccggcatc

SEQ ID NO: 861763 - DNA, 33 bp, Homo sapien
aagagcagaacaatataaacctaatgtttcaga

SEQ ID NO: 861764 - DNA, 33 bp, Homo sapien
aagagcagaacaatatgaacctaatgtttcaga

SEQ ID NO: 861765 - DNA, 33 bp, Homo sapien
gaaaagccactagcaccctctctctggccacat

SEQ ID NO: 861766 - DNA, 33 bp, Homo sapien
gaaaagccactagcacgctctctctggccacat

SEQ ID NO: 861767 - DNA, 33 bp, Homo sapien
ttcaggaataccctagaccaggtttgttgtagg

SEQ ID NO: 861768 - DNA, 33 bp, Homo sapien
ttcaggaataccctaggccaggtttgttgtagg

SEQ ID NO: 861769 - DNA, 33 bp, Homo sapien
cctggtaacaacagaacgtgatggactttaggg

SEQ ID NO: 861770 - DNA, 33 bp, Homo sapien
cctggtaacaacagaatgtgatggactttaggg

SEQ ID NO: 861771 - DNA, 33 bp, Homo sapien
ccagaacctaatgatacggtcaggattcattca

SEQ ID NO: 861772 - DNA, 33 bp, Homo sapien
ccagaacctaatgatatggtcaggattcattca

SEQ ID NO: 861773 - DNA, 33 bp, Homo sapien
acattattgacagctacaatttgtgcactattg

SEQ ID NO: 861774 - DNA, 33 bp, Homo sapien
acattattgacagctataatttgtgcactattg

SEQ ID NO: 861775 - DNA, 33 bp, Homo sapien
ggtgagaatttacaaaaacttccattatttcat

SEQ ID NO: 861776 - DNA, 33 bp, Homo sapien
ggtgagaatttacaaagacttccattatttcat

SEQ ID NO: 861777 - DNA, 33 bp, Homo sapien
cagtgagacaacatataaatgtgctttggtagg

SEQ ID NO: 861778 - DNA, 33 bp, Homo sapien
cagtgagacaacatatgaatgtgctttggtagg

SEQ ID NO: 861779 - DNA, 33 bp, Homo sapien
gacatttcaaaaagaaccaagactgaaggcagg

SEQ ID NO: 861780 - DNA, 33 bp, Homo sapien
gacatttcaaaaagaatcaagactgaaggcagg

SEQ ID NO: 861781 - DNA, 33 bp, Homo sapien
acttcctcaatctagcaagaaaagccaacattc

SEQ ID NO: 861782 - DNA, 33 bp, Homo sapien
acttcctcaatctagcgagaaaagccaacattc

SEQ ID NO: 861783 - DNA, 33 bp, Homo sapien
gtaacatcttcaggcacgggggcaaatcagatg

SEQ ID NO: 861784 - DNA, 33 bp, Homo sapien
gtaacatcttcaggcatgggggcaaatcagatg

SEQ ID NO: 861785 - DNA, 33 bp, Homo sapien
ccagatacttcaccaaataaaatatacagatgg

SEQ ID NO: 861786 - DNA, 33 bp, Homo sapien
ccagatacttcaccaactaaaatatacagatgg

SEQ ID NO: 861787 - DNA, 33 bp, Homo sapien
caaaacaacaaaacaaactttgcaggtgcttag

SEQ ID NO: 861788 - DNA, 33 bp, Homo sapien
caaaacaacaaaacaatctttgcaggtgcttag

SEQ ID NO: 861789 - DNA, 33 bp, Homo sapien
ctttggcaaagtcaaccagaatatacactgtgg

SEQ ID NO: 861790 - DNA, 33 bp, Homo sapien
ctttggcaaagtcaactagaatatacactgtgg

SEQ ID NO: 861791 - DNA, 33 bp, Homo sapien
ggacttgggtacctgaggatgcaagttttggat

SEQ ID NO: 861792 - DNA, 33 bp, Homo sapien
ggacttgggtacctgatgatgcaagttttggat

SEQ ID NO: 861793 - DNA, 33 bp, Homo sapien
ctaatagatacaatgcaacccgatcaaaatccc

SEQ ID NO: 861794 - DNA, 33 bp, Homo sapien
ctaatagatacaatgcgacccgatcaaaatccc

SEQ ID NO: 861795 - DNA, 33 bp, Homo sapien
acatggaacttctcaaaccacaactctggaagc

SEQ ID NO: 861796 - DNA, 33 bp, Homo sapien
acatggaacttctcaacccacaactctggaagc

SEQ ID NO: 861797 - DNA, 33 bp, Homo sapien
tgccattgcttctgataacaagttggctgtcat

SEQ ID NO: 861798 - DNA, 33 bp, Homo sapien
tgccattgcttctgatgacaagttggctgtcat

SEQ ID NO: 861799 - DNA, 33 bp, Homo sapien
gtgtggtaaaccaatacagttatgtgctgcata

SEQ ID NO: 861800 - DNA, 33 bp, Homo sapien
gtgtggtaaaccaatatagttatgtgctgcata

SEQ ID NO: 861801 - DNA, 33 bp, Homo sapien
atgcaagagtacgaaacagctcatcctgtgaat

SEQ ID NO: 861802 - DNA, 33 bp, Homo sapien
atgcaagagtacgaaatagctcatcctgtgaat

SEQ ID NO: 861803 - DNA, 33 bp, Homo sapien
ctgttggtgacctccaaataagttaagaaatac

SEQ ID NO: 861804 - DNA, 33 bp, Homo sapien
ctgttggtgacctccagataagttaagaaatac

SEQ ID NO: 861805 - DNA, 33 bp, Homo sapien
aaaaattttggctttcaagtcacacagacctgg

SEQ ID NO: 861806 - DNA, 33 bp, Homo sapien
aaaaattttggctttcgagtcacacagacctgg

SEQ ID NO: 861807 - DNA, 33 bp, Homo sapien
caaaaagatatgttgaagccctgaagtccaata

SEQ ID NO: 861808 - DNA, 33 bp, Homo sapien
caaaaagatatgttgaggccctgaagtccaata

SEQ ID NO: 861809 - DNA, 33 bp, Homo sapien
ttacaatgcaaccttcactgattaattccctag

SEQ ID NO: 861810 - DNA, 33 bp, Homo sapien
ttacaatgcaaccttcgctgattaattccctag

SEQ ID NO: 861811 - DNA, 33 bp, Homo sapien
ctaggttttgtctttacgctatgaactgctgta

SEQ ID NO: 861812 - DNA, 33 bp, Homo sapien
ctaggttttgtctttatgctatgaactgctgta

SEQ ID NO: 861813 - DNA, 33 bp, Homo sapien
taccttctaggatgaccaaagtaaaaacaaaca

SEQ ID NO: 861814 - DNA, 33 bp, Homo sapien
taccttctaggatgactaaagtaaaaacaaaca

SEQ ID NO: 861815 - DNA, 33 bp, Homo sapien
ccaagagaggctcagacactaattttatgctat

SEQ ID NO: 861816 - DNA, 33 bp, Homo sapien
ccaagagaggctcagatactaattttatgctat

SEQ ID NO: 861817 - DNA, 33 bp, Homo sapien
tctttactgatggaaacggcagaagaataagta

SEQ ID NO: 861818 - DNA, 33 bp, Homo sapien
tctttactgatggaaatggcagaagaataagta

SEQ ID NO: 861819 - DNA, 33 bp, Homo sapien
tcaaactgtatttagcagagtgctaggttctaa

SEQ ID NO: 861820 - DNA, 33 bp, Homo sapien
tcaaactgtatttagccgagtgctaggttctaa

SEQ ID NO: 861821 - DNA, 33 bp, Homo sapien
aacattgtgttatccaataaaagcatcagaaat

SEQ ID NO: 861822 - DNA, 33 bp, Homo sapien
aacattgtgttatccagtaaaagcatcagaaat

SEQ ID NO: 861823 - DNA, 33 bp, Homo sapien
aataactaatgatataacaactctcctgggtcc

SEQ ID NO: 861824 - DNA, 33 bp, Homo sapien
aataactaatgatatagcaactctcctgggtcc

SEQ ID NO: 861825 - DNA, 33 bp, Homo sapien
ttgtttttgtctcaaactaagagcttactattg

SEQ ID NO: 861826 - DNA, 33 bp, Homo sapien
ttgtttttgtctcaaattaagagcttactattg

SEQ ID NO: 861827 - DNA, 33 bp, Homo sapien
gatttgctcttaagcggatttctaggcacagaa

SEQ ID NO: 861828 - DNA, 33 bp, Homo sapien
gatttgctcttaagcgtatttctaggcacagaa

SEQ ID NO: 861829 - DNA, 33 bp, Homo sapien
tttcttgatagggattgaaaaggatgcacacat

SEQ ID NO: 861830 - DNA, 33 bp, Homo sapien
tttcttgatagggatttaaaaggatgcacacat

SEQ ID NO: 861831 - DNA, 33 bp, Homo sapien
ttttcaaagagagcataaagcgcactaaagaat

SEQ ID NO: 861832 - DNA, 33 bp, Homo sapien
ttttcaaagagagcatgaagcgcactaaagaat

SEQ ID NO: 861833 - DNA, 33 bp, Homo sapien
ttaccttctgatcttgcaccttctaggcccttg

SEQ ID NO: 861834 - DNA, 33 bp, Homo sapien
ttaccttctgatcttgtaccttctaggcccttg

SEQ ID NO: 861835 - DNA, 33 bp, Homo sapien
gagaaaaatgtcagacaagttgggtctagaatt

SEQ ID NO: 861836 - DNA, 33 bp, Homo sapien
gagaaaaatgtcagacgagttgggtctagaatt

SEQ ID NO: 861837 - DNA, 33 bp, Homo sapien
ccttatatgtccaataataaatggcacaatgtg

SEQ ID NO: 861838 - DNA, 33 bp, Homo sapien
ccttatatgtccaatagtaaatggcacaatgtg

SEQ ID NO: 861839 - DNA, 33 bp, Homo sapien
tacgtatgaagagcaaagacagtattcttagaa

SEQ ID NO: 861840 - DNA, 33 bp, Homo sapien
tacgtatgaagagcaacgacagtattcttagaa

SEQ ID NO: 861841 - DNA, 33 bp, Homo sapien
ttttaataatgtttgaagttttttccataaggt

SEQ ID NO: 861842 - DNA, 33 bp, Homo sapien
ttttaataatgtttgacgttttttccataaggt

SEQ ID NO: 861843 - DNA, 33 bp, Homo sapien
tgtacactctcaattaactccagattacttata

SEQ ID NO: 861844 - DNA, 33 bp, Homo sapien
tgtacactctcaattacctccagattacttata

SEQ ID NO: 861845 - DNA, 33 bp, Homo sapien
caaccattttcctgtcactgatgtgaatccttc

SEQ ID NO: 861846 - DNA, 33 bp, Homo sapien
caaccattttcctgtctctgatgtgaatccttc

SEQ ID NO: 861847 - DNA, 33 bp, Homo sapien
gcaatgtgggtcaccaaaattttaagttggtaa

SEQ ID NO: 861848 - DNA, 33 bp, Homo sapien
gcaatgtgggtcaccacaattttaagttggtaa

SEQ ID NO: 861849 - DNA, 33 bp, Homo sapien
caaaaatgatacaattaaacttcacagatgaaa

SEQ ID NO: 861850 - DNA, 33 bp, Homo sapien
caaaaatgatacaattgaacttcacagatgaaa

SEQ ID NO: 861851 - DNA, 33 bp, Homo sapien
aatacctttatcgccaaatttttgggttggtct

SEQ ID NO: 861852 - DNA, 33 bp, Homo sapien
aatacctttatcgccagatttttgggttggtct

SEQ ID NO: 861853 - DNA, 33 bp, Homo sapien
tcagtgccttagcagcaagagagatcaggccga

SEQ ID NO: 861854 - DNA, 33 bp, Homo sapien
tcagtgccttagcagcgagagagatcaggccga

SEQ ID NO: 861855 - DNA, 33 bp, Homo sapien
gttctttaagccattggacaagctgtatctaaa

SEQ ID NO: 861856 - DNA, 33 bp, Homo sapien
gttctttaagccattgtacaagctgtatctaaa

SEQ ID NO: 861857 - DNA, 33 bp, Homo sapien
ttgatactaaaaggcaactgtattctcttgata

SEQ ID NO: 861858 - DNA, 33 bp, Homo sapien
ttgatactaaaaggcacctgtattctcttgata

SEQ ID NO: 861859 - DNA, 33 bp, Homo sapien
cacacatccactcaaaactcaagttgtctattg

SEQ ID NO: 861860 - DNA, 33 bp, Homo sapien
cacacatccactcaaagctcaagttgtctattg

SEQ ID NO: 861861 - DNA, 33 bp, Homo sapien
gaaactattgaaagatgagttgaattgcatttc

SEQ ID NO: 861862 - DNA, 33 bp, Homo sapien
gaaactattgaaagattagttgaattgcatttc

SEQ ID NO: 861863 - DNA, 33 bp, Homo sapien
ccaaacctctggaacaactggtcaaagtgaagg

SEQ ID NO: 861864 - DNA, 33 bp, Homo sapien
ccaaacctctggaacatctggtcaaagtgaagg

SEQ ID NO: 861865 - DNA, 33 bp, Homo sapien
cactactagattgttgcacaccaccaagagcac

SEQ ID NO: 861866 - DNA, 33 bp, Homo sapien
cactactagattgttggacaccaccaagagcac

SEQ ID NO: 861867 - DNA, 33 bp, Homo sapien
cctggcattcctgacacagcacttcctggtttt

SEQ ID NO: 861868 - DNA, 33 bp, Homo sapien
cctggcattcctgacatagcacttcctggtttt

SEQ ID NO: 861869 - DNA, 33 bp, Homo sapien
ttgggggaaaagtacaacacttactcactgtta

SEQ ID NO: 861870 - DNA, 33 bp, Homo sapien
ttgggggaaaagtacatcacttactcactgtta

SEQ ID NO: 861871 - DNA, 33 bp, Homo sapien
atgttttctgtaagcaatcatggaaagacctgt

SEQ ID NO: 861872 - DNA, 33 bp, Homo sapien
atgttttctgtaagcagtcatggaaagacctgt

SEQ ID NO: 861873 - DNA, 33 bp, Homo sapien
tggggactttctttgcacttgttgagagaaaac

SEQ ID NO: 861874 - DNA, 33 bp, Homo sapien
tggggactttctttgcgcttgttgagagaaaac

SEQ ID NO: 861875 - DNA, 33 bp, Homo sapien
aacacaaacagttacccaccttcatcatagggc

SEQ ID NO: 861876 - DNA, 33 bp, Homo sapien
aacacaaacagttacctaccttcatcatagggc

SEQ ID NO: 861877 - DNA, 33 bp, Homo sapien
aggacctattcacaagaagaacttaaaactttt

SEQ ID NO: 861878 - DNA, 33 bp, Homo sapien
aggacctattcacaaggagaacttaaaactttt

SEQ ID NO: 861879 - DNA, 33 bp, Homo sapien
taaagttggataaaagaaagctgtttgaaagtt

SEQ ID NO: 861880 - DNA, 33 bp, Homo sapien
taaagttggataaaagtaagctgtttgaaagtt

SEQ ID NO: 861881 - DNA, 33 bp, Homo sapien
aacaaaactacaaaaccgtatccttgaaggaaa

SEQ ID NO: 861882 - DNA, 33 bp, Homo sapien
aacaaaactacaaaactgtatccttgaaggaaa

SEQ ID NO: 861883 - DNA, 33 bp, Homo sapien
agaaaaacacctaagaatactgtatgtaacata

SEQ ID NO: 861884 - DNA, 33 bp, Homo sapien
agaaaaacacctaagagtactgtatgtaacata

SEQ ID NO: 861885 - DNA, 33 bp, Homo sapien
tctcctctcactccagaaattaccaagataggc

SEQ ID NO: 861886 - DNA, 33 bp, Homo sapien
tctcctctcactccaggaattaccaagataggc

SEQ ID NO: 861887 - DNA, 33 bp, Homo sapien
ttctacctttgtaaaacaataccccatctctat

SEQ ID NO: 861888 - DNA, 33 bp, Homo sapien
ttctacctttgtaaaagaataccccatctctat

SEQ ID NO: 861889 - DNA, 33 bp, Homo sapien
tatagcccttgtcttcactgagcatatactaga

SEQ ID NO: 861890 - DNA, 33 bp, Homo sapien
tatagcccttgtcttctctgagcatatactaga

SEQ ID NO: 861891 - DNA, 33 bp, Homo sapien
ttctaagctaatcagacgtgtccaccaggtgga

SEQ ID NO: 861892 - DNA, 33 bp, Homo sapien
ttctaagctaatcagatgtgtccaccaggtgga

SEQ ID NO: 861893 - DNA, 33 bp, Homo sapien
ataaatgtttgttgtccagctcaatcagattgc

SEQ ID NO: 861894 - DNA, 33 bp, Homo sapien
ataaatgtttgttgtctagctcaatcagattgc

SEQ ID NO: 861895 - DNA, 33 bp, Homo sapien
catggtctggaactagcaggatgattcctctac

SEQ ID NO: 861896 - DNA, 33 bp, Homo sapien
catggtctggaactagtaggatgattcctctac

SEQ ID NO: 861897 - DNA, 33 bp, Homo sapien
gtctcaccaataagaccggtgtgtttgctactt

SEQ ID NO: 861898 - DNA, 33 bp, Homo sapien
gtctcaccaataagactggtgtgtttgctactt

SEQ ID NO: 861899 - DNA, 33 bp, Homo sapien
atgagttcatctcaacacagtaagagaaagcca

SEQ ID NO: 861900 - DNA, 33 bp, Homo sapien
atgagttcatctcaacgcagtaagagaaagcca

SEQ ID NO: 861901 - DNA, 33 bp, Homo sapien
taatgaataaatgagtaaaacaaacatgagccc

SEQ ID NO: 861902 - DNA, 33 bp, Homo sapien
taatgaataaatgagttaaacaaacatgagccc

SEQ ID NO: 861903 - DNA, 33 bp, Homo sapien
acctatcagcactcacgggttgttaaaaaaaaa

SEQ ID NO: 861904 - DNA, 33 bp, Homo sapien
acctatcagcactcactggttgttaaaaaaaaa

SEQ ID NO: 861905 - DNA, 33 bp, Homo sapien
aattagcaaattcttacgtgtggcttagagttt

SEQ ID NO: 861906 - DNA, 33 bp, Homo sapien
aattagcaaattcttatgtgtggcttagagttt

SEQ ID NO: 861907 - DNA, 33 bp, Homo sapien
ttagagtttcttcttcaatttcagtgcttcctt

SEQ ID NO: 861908 - DNA, 33 bp, Homo sapien
ttagagtttcttcttcgatttcagtgcttcctt

SEQ ID NO: 861909 - DNA, 33 bp, Homo sapien
atattgcagcaacaggacagaatcaagctaaac

SEQ ID NO: 861910 - DNA, 33 bp, Homo sapien
atattgcagcaacaggtcagaatcaagctaaac

SEQ ID NO: 861911 - DNA, 33 bp, Homo sapien
gttgtttgactattggccataaagcaaagaggc

SEQ ID NO: 861912 - DNA, 33 bp, Homo sapien
gttgtttgactattggtcataaagcaaagaggc

SEQ ID NO: 861913 - DNA, 33 bp, Homo sapien
agggaggcatggagtacattctctcagagcctc

SEQ ID NO: 861914 - DNA, 33 bp, Homo sapien
agggaggcatggagtagattctctcagagcctc

SEQ ID NO: 861915 - DNA, 33 bp, Homo sapien
caggaattgtgccttgaatccaccacagtcggc

SEQ ID NO: 861916 - DNA, 33 bp, Homo sapien
caggaattgtgccttggatccaccacagtcggc

SEQ ID NO: 861917 - DNA, 33 bp, Homo sapien
acacagatgaggaaggaaccaaactgggcaaag

SEQ ID NO: 861918 - DNA, 33 bp, Homo sapien
acacagatgaggaagggaccaaactgggcaaag

SEQ ID NO: 861919 - DNA, 33 bp, Homo sapien
gagcgcaccggcccagcagattaacatccgaag

SEQ ID NO: 861920 - DNA, 33 bp, Homo sapien
gagcgcaccggcccaggagattaacatccgaag

SEQ ID NO: 861921 - DNA, 33 bp, Homo sapien
tattttaagttcagccgaaatgttcctctctac

SEQ ID NO: 861922 - DNA, 33 bp, Homo sapien
tattttaagttcagcctaaatgttcctctctac

SEQ ID NO: 861923 - DNA, 33 bp, Homo sapien
tgggcaagatgaaaaaatcagaacttagtcctc

SEQ ID NO: 861924 - DNA, 33 bp, Homo sapien
tgggcaagatgaaaaagtcagaacttagtcctc

SEQ ID NO: 861925 - DNA, 33 bp, Homo sapien
ttccccagcagattgaataaaggctattctagg

SEQ ID NO: 861926 - DNA, 33 bp, Homo sapien
ttccccagcagattgagtaaaggctattctagg

SEQ ID NO: 861927 - DNA, 33 bp, Homo sapien
ttatcagtgttctagacgtaacaatatctcata

SEQ ID NO: 861928 - DNA, 33 bp, Homo sapien
ttatcagtgttctagatgtaacaatatctcata

SEQ ID NO: 861929 - DNA, 33 bp, Homo sapien
atacgcttatttgccacatgtacgtctcccttg

SEQ ID NO: 861930 - DNA, 33 bp, Homo sapien
atacgcttatttgccatatgtacgtctcccttg

SEQ ID NO: 861931 - DNA, 33 bp, Homo sapien
tgaaggtatcgaccagcaattctcttgctctcc

SEQ ID NO: 861932 - DNA, 33 bp, Homo sapien
tgaaggtatcgaccagtaattctcttgctctcc

SEQ ID NO: 861933 - DNA, 33 bp, Homo sapien
actcctgcccatttctcactgctccctcccctt

SEQ ID NO: 861934 - DNA, 33 bp, Homo sapien
actcctgcccatttctgactgctccctcccctt

SEQ ID NO: 861935 - DNA, 33 bp, Homo sapien
ctgaggtctctttccacgcaacccatcacccca

SEQ ID NO: 861936 - DNA, 33 bp, Homo sapien
ctgaggtctctttccatgcaacccatcacccca

SEQ ID NO: 861937 - DNA, 33 bp, Homo sapien
catgtgttgttctgcactgacctgtgaccctgc

SEQ ID NO: 861938 - DNA, 33 bp, Homo sapien
catgtgttgttctgcattgacctgtgaccctgc

SEQ ID NO: 861939 - DNA, 33 bp, Homo sapien
agtgtctctgtgagcaaccccaggccctgcaca

SEQ ID NO: 861940 - DNA, 33 bp, Homo sapien
agtgtctctgtgagcacccccaggccctgcaca

SEQ ID NO: 861941 - DNA, 33 bp, Homo sapien
cctccatctattgggccagtattcaatgagtgt

SEQ ID NO: 861942 - DNA, 33 bp, Homo sapien
cctccatctattgggctagtattcaatgagtgt

SEQ ID NO: 861943 - DNA, 33 bp, Homo sapien
agtaagtgttgcagacagaggtcttctttgatt

SEQ ID NO: 861944 - DNA, 33 bp, Homo sapien
agtaagtgttgcagacggaggtcttctttgatt

SEQ ID NO: 861945 - DNA, 33 bp, Homo sapien
tgaccagaaagcctagaagaagagcagaggttt

SEQ ID NO: 861946 - DNA, 33 bp, Homo sapien
tgaccagaaagcctagtagaagagcagaggttt

SEQ ID NO: 861947 - DNA, 33 bp, Homo sapien
tatggagcaccttccacgtaccaagcactgctg

SEQ ID NO: 861948 - DNA, 33 bp, Homo sapien
tatggagcaccttccatgtaccaagcactgctg

SEQ ID NO: 861949 - DNA, 33 bp, Homo sapien
ttccagtatttggagacaacgagaggtgaaact

SEQ ID NO: 861950 - DNA, 33 bp, Homo sapien
ttccagtatttggagataacgagaggtgaaact

SEQ ID NO: 861951 - DNA, 33 bp, Homo sapien
gagcaggctctagaaactctcccaaggcctgcc

SEQ ID NO: 861952 - DNA, 33 bp, Homo sapien
gagcaggctctagaaattctcccaaggcctgcc

SEQ ID NO: 861953 - DNA, 33 bp, Homo sapien
agcatagaaataggcactccctccacaggaacc

SEQ ID NO: 861954 - DNA, 33 bp, Homo sapien
agcatagaaataggcattccctccacaggaacc

SEQ ID NO: 861955 - DNA, 33 bp, Homo sapien
tgaagccaacttaaaactaaattgcagatagtc

SEQ ID NO: 861956 - DNA, 33 bp, Homo sapien
tgaagccaacttaaaattaaattgcagatagtc

SEQ ID NO: 861957 - DNA, 33 bp, Homo sapien
tggtaatgggtcctaaagaagttgcagttgatt

SEQ ID NO: 861958 - DNA, 33 bp, Homo sapien
tggtaatgggtcctaaggaagttgcagttgatt

SEQ ID NO: 861959 - DNA, 33 bp, Homo sapien
tccaagacacttactaatacttgcttgatgtat

SEQ ID NO: 861960 - DNA, 33 bp, Homo sapien
tccaagacacttactagtacttgcttgatgtat

SEQ ID NO: 861961 - DNA, 33 bp, Homo sapien
gggaggatacctgcatcaatttgtactctcttt

SEQ ID NO: 861962 - DNA, 33 bp, Homo sapien
gggaggatacctgcattaatttgtactctcttt

SEQ ID NO: 861963 - DNA, 33 bp, Homo sapien
tattacattgaggacacggggcaatgtttaatt

SEQ ID NO: 861964 - DNA, 33 bp, Homo sapien
tattacattgaggacatggggcaatgtttaatt

SEQ ID NO: 861965 - DNA, 33 bp, Homo sapien
tccccacattgtgcaacgaattaggaggcaatc

SEQ ID NO: 861966 - DNA, 33 bp, Homo sapien
tccccacattgtgcaatgaattaggaggcaatc

SEQ ID NO: 861967 - DNA, 33 bp, Homo sapien
acagcttgcaaacagaaaacagtctatcaaatg

SEQ ID NO: 861968 - DNA, 33 bp, Homo sapien
acagcttgcaaacagagaacagtctatcaaatg

SEQ ID NO: 861969 - DNA, 33 bp, Homo sapien
cgaaaatcgtgataacgcagctgcaccagactt

SEQ ID NO: 861970 - DNA, 33 bp, Homo sapien
cgaaaatcgtgataactcagctgcaccagactt

SEQ ID NO: 861971 - DNA, 33 bp, Homo sapien
tgctgtgtagagttcaaaaaagataatgggaaa

SEQ ID NO: 861972 - DNA, 33 bp, Homo sapien
tgctgtgtagagttcagaaaagataatgggaaa

SEQ ID NO: 861973 - DNA, 33 bp, Homo sapien
tcagctgcatttgaaccagttgactacttctcc

SEQ ID NO: 861974 - DNA, 33 bp, Homo sapien
tcagctgcatttgaactagttgactacttctcc

SEQ ID NO: 861975 - DNA, 33 bp, Homo sapien
gcctgactgtagaagacacaagagaaaatatat

SEQ ID NO: 861976 - DNA, 33 bp, Homo sapien
gcctgactgtagaagatacaagagaaaatatat

SEQ ID NO: 861977 - DNA, 33 bp, Homo sapien
ttgagtggattgaggagaaaatgggaattttca

SEQ ID NO: 861978 - DNA, 33 bp, Homo sapien
ttgagtggattgaggataaaatgggaattttca

SEQ ID NO: 861979 - DNA, 33 bp, Homo sapien
gaacatatcactccaaaactttcattgtgttcc

SEQ ID NO: 861980 - DNA, 33 bp, Homo sapien
gaacatatcactccaagactttcattgtgttcc

SEQ ID NO: 861981 - DNA, 33 bp, Homo sapien
taaaagcacacggtgaaattcaacagtgaggag

SEQ ID NO: 861982 - DNA, 33 bp, Homo sapien
taaaagcacacggtgagattcaacagtgaggag

SEQ ID NO: 861983 - DNA, 33 bp, Homo sapien
ccaagagcctcaaagacgttctagttaagtgac

SEQ ID NO: 861984 - DNA, 33 bp, Homo sapien
ccaagagcctcaaagatgttctagttaagtgac

SEQ ID NO: 861985 - DNA, 33 bp, Homo sapien
tagctaatttccaacaacctaatgccccagggt

SEQ ID NO: 861986 - DNA, 33 bp, Homo sapien
tagctaatttccaacagcctaatgccccagggt

SEQ ID NO: 861987 - DNA, 33 bp, Homo sapien
ccaggaaatcaaaaggcactccctccatgagct

SEQ ID NO: 861988 - DNA, 33 bp, Homo sapien
ccaggaaatcaaaaggtactccctccatgagct

SEQ ID NO: 861989 - DNA, 33 bp, Homo sapien
tgggtaccttgtagccaatggtgttaatagatg

SEQ ID NO: 861990 - DNA, 33 bp, Homo sapien
tgggtaccttgtagcccatggtgttaatagatg

SEQ ID NO: 861991 - DNA, 33 bp, Homo sapien
tcatgcaggctggtcaacatagcccaaggctgg

SEQ ID NO: 861992 - DNA, 33 bp, Homo sapien
tcatgcaggctggtcatcatagcccaaggctgg

SEQ ID NO: 861993 - DNA, 33 bp, Homo sapien
taaagctaacactttcaccctaaagcattgctt

SEQ ID NO: 861994 - DNA, 33 bp, Homo sapien
taaagctaacactttcgccctaaagcattgctt

SEQ ID NO: 861995 - DNA, 33 bp, Homo sapien
aacacccactcacatcagagtcatctattgaaa

SEQ ID NO: 861996 - DNA, 33 bp, Homo sapien
aacacccactcacatcggagtcatctattgaaa

SEQ ID NO: 861997 - DNA, 33 bp, Homo sapien
aaaacagcaggaaaataagcccaagtagctccg

SEQ ID NO: 861998 - DNA, 33 bp, Homo sapien
aaaacagcaggaaaatgagcccaagtagctccg

SEQ ID NO: 861999 - DNA, 33 bp, Homo sapien
aatttaaagtctgaggaatcgccacttacaaat

SEQ ID NO: 862000 - DNA, 33 bp, Homo sapien
aatttaaagtctgagggatcgccacttacaaat

SEQ ID NO: 862001 - DNA, 33 bp, Homo sapien
ttgagaggttacttcaactctagttctgttacc

SEQ ID NO: 862002 - DNA, 33 bp, Homo sapien
ttgagaggttacttcacctctagttctgttacc

SEQ ID NO: 862003 - DNA, 33 bp, Homo sapien
taaaatactaaacaaagttcactctttttattg

SEQ ID NO: 862004 - DNA, 33 bp, Homo sapien
taaaatactaaacaaatttcactctttttattg

SEQ ID NO: 862005 - DNA, 33 bp, Homo sapien
tatacttagaacatacagaactaggatttcagc

SEQ ID NO: 862006 - DNA, 33 bp, Homo sapien
tatacttagaacatacggaactaggatttcagc

SEQ ID NO: 862007 - DNA, 33 bp, Homo sapien
aaaaagcttttgtttcaaacttatttagtggga

SEQ ID NO: 862008 - DNA, 33 bp, Homo sapien
aaaaagcttttgtttccaacttatttagtggga

SEQ ID NO: 862009 - DNA, 33 bp, Homo sapien
agcaaatacaattagacgaacgttgctatgcca

SEQ ID NO: 862010 - DNA, 33 bp, Homo sapien
agcaaatacaattagaggaacgttgctatgcca

SEQ ID NO: 862011 - DNA, 33 bp, Homo sapien
atgcctaccttctgccaacttcagagactggat

SEQ ID NO: 862012 - DNA, 33 bp, Homo sapien
atgcctaccttctgccgacttcagagactggat

SEQ ID NO: 862013 - DNA, 33 bp, Homo sapien
ttttattcacgtgtcacaacactcaaaaggcac

SEQ ID NO: 862014 - DNA, 33 bp, Homo sapien
ttttattcacgtgtcataacactcaaaaggcac

SEQ ID NO: 862015 - DNA, 33 bp, Homo sapien
cagagccaggaactcaatagtacacacatacaa

SEQ ID NO: 862016 - DNA, 33 bp, Homo sapien
cagagccaggaactcagtagtacacacatacaa

SEQ ID NO: 862017 - DNA, 33 bp, Homo sapien
tcagaacagtgcataacttaaaactcatgaatt

SEQ ID NO: 862018 - DNA, 33 bp, Homo sapien
tcagaacagtgcataatttaaaactcatgaatt

SEQ ID NO: 862019 - DNA, 33 bp, Homo sapien
ttaaatatccactacccatgagggcaacacaaa

SEQ ID NO: 862020 - DNA, 33 bp, Homo sapien
ttaaatatccactacctatgagggcaacacaaa

SEQ ID NO: 862021 - DNA, 33 bp, Homo sapien
atttgttgatctgttgcagagtaatggtaatct

SEQ ID NO: 862022 - DNA, 33 bp, Homo sapien
atttgttgatctgttgtagagtaatggtaatct

SEQ ID NO: 862023 - DNA, 33 bp, Homo sapien
taatacccaggacaggaaaacatccaaaccaga

SEQ ID NO: 862024 - DNA, 33 bp, Homo sapien
taatacccaggacagggaaacatccaaaccaga

SEQ ID NO: 862025 - DNA, 33 bp, Homo sapien
ttctgcatttcctagacagaggattctgacccc

SEQ ID NO: 862026 - DNA, 33 bp, Homo sapien
ttctgcatttcctagagagaggattctgacccc

SEQ ID NO: 862027 - DNA, 33 bp, Homo sapien
aaaacatcgatgttgacatttttgtatgggtgt

SEQ ID NO: 862028 - DNA, 33 bp, Homo sapien
aaaacatcgatgttgagatttttgtatgggtgt

SEQ ID NO: 862029 - DNA, 33 bp, Homo sapien
tcctaacttcctatcaaaacaaaactttccaaa

SEQ ID NO: 862030 - DNA, 33 bp, Homo sapien
tcctaacttcctatcagaacaaaactttccaaa

SEQ ID NO: 862031 - DNA, 33 bp, Homo sapien
tctggtaccttacgcaacctttcctcctgggtt

SEQ ID NO: 862032 - DNA, 33 bp, Homo sapien
tctggtaccttacgcagcctttcctcctgggtt

SEQ ID NO: 862033 - DNA, 33 bp, Homo sapien
aatccactctatctgacggagacattttgttcc

SEQ ID NO: 862034 - DNA, 33 bp, Homo sapien
aatccactctatctgatggagacattttgttcc

SEQ ID NO: 862035 - DNA, 33 bp, Homo sapien
attctacagcttcttacatctgcaatagctgtc

SEQ ID NO: 862036 - DNA, 33 bp, Homo sapien
attctacagcttcttatatctgcaatagctgtc

SEQ ID NO: 862037 - DNA, 33 bp, Homo sapien
tcttgtagctgttataggtaaattctgtgtacc

SEQ ID NO: 862038 - DNA, 33 bp, Homo sapien
tcttgtagctgttatatgtaaattctgtgtacc

SEQ ID NO: 862039 - DNA, 33 bp, Homo sapien
aagcctatgtttactacgatttagcctaataat

SEQ ID NO: 862040 - DNA, 33 bp, Homo sapien
aagcctatgtttactatgatttagcctaataat

SEQ ID NO: 862041 - DNA, 33 bp, Homo sapien
ataattatcaagcataaggtccagtataaggca

SEQ ID NO: 862042 - DNA, 33 bp, Homo sapien
ataattatcaagcatatggtccagtataaggca

SEQ ID NO: 862043 - DNA, 33 bp, Homo sapien
atgctattctctttcagtcttagattcaggatt

SEQ ID NO: 862044 - DNA, 33 bp, Homo sapien
atgctattctctttcattcttagattcaggatt

SEQ ID NO: 862045 - DNA, 33 bp, Homo sapien
gcattcttcacatgataaattttcctcaaattt

SEQ ID NO: 862046 - DNA, 33 bp, Homo sapien
gcattcttcacatgatgaattttcctcaaattt

SEQ ID NO: 862047 - DNA, 33 bp, Homo sapien
cttttgtcctcaaatacgtattctttagtagaa

SEQ ID NO: 862048 - DNA, 33 bp, Homo sapien
cttttgtcctcaaatatgtattctttagtagaa

SEQ ID NO: 862049 - DNA, 33 bp, Homo sapien
cttccacacttttctcccagtggtatatatatt

SEQ ID NO: 862050 - DNA, 33 bp, Homo sapien
cttccacacttttctctcagtggtatatatatt

SEQ ID NO: 862051 - DNA, 33 bp, Homo sapien
tctgcttgttaattcaatatgaactctagaatc

SEQ ID NO: 862052 - DNA, 33 bp, Homo sapien
tctgcttgttaattcagtatgaactctagaatc

SEQ ID NO: 862053 - DNA, 33 bp, Homo sapien
attatcttgagttttccagtataccatcatatt

SEQ ID NO: 862054 - DNA, 33 bp, Homo sapien
attatcttgagttttctagtataccatcatatt

SEQ ID NO: 862055 - DNA, 33 bp, Homo sapien
taagattaaaatcggaccttcagctatccaatg

SEQ ID NO: 862056 - DNA, 33 bp, Homo sapien
taagattaaaatcggatcttcagctatccaatg

SEQ ID NO: 862057 - DNA, 33 bp, Homo sapien
acttgaccaatttcaactatgcttgaagaagta

SEQ ID NO: 862058 - DNA, 33 bp, Homo sapien
acttgaccaatttcaattatgcttgaagaagta

SEQ ID NO: 862059 - DNA, 33 bp, Homo sapien
atgaatcggatttgagaactatgggcttcactc

SEQ ID NO: 862060 - DNA, 33 bp, Homo sapien
atgaatcggatttgaggactatgggcttcactc

SEQ ID NO: 862061 - DNA, 33 bp, Homo sapien
tgtttcaggctcaaagaagttagagaagaatgt

SEQ ID NO: 862062 - DNA, 33 bp, Homo sapien
tgtttcaggctcaaaggagttagagaagaatgt

SEQ ID NO: 862063 - DNA, 33 bp, Homo sapien
ctgaggtcccagggtacgctcacagttcatttc

SEQ ID NO: 862064 - DNA, 33 bp, Homo sapien
ctgaggtcccagggtatgctcacagttcatttc

SEQ ID NO: 862065 - DNA, 33 bp, Homo sapien
gcattttctcccatccactacaggttgtttgct

SEQ ID NO: 862066 - DNA, 33 bp, Homo sapien
gcattttctcccatccgctacaggttgtttgct

SEQ ID NO: 862067 - DNA, 33 bp, Homo sapien
tatgaaaaaaaaatctcaatattacggatcagt

SEQ ID NO: 862068 - DNA, 33 bp, Homo sapien
tatgaaaaaaaaatctgaatattacggatcagt

SEQ ID NO: 862069 - DNA, 33 bp, Homo sapien
aaataactattcagtaccaggcttagtacctgg

SEQ ID NO: 862070 - DNA, 33 bp, Homo sapien
aaataactattcagtatcaggcttagtacctgg

SEQ ID NO: 862071 - DNA, 33 bp, Homo sapien
atacatttttggtactcacaggccagtgcccca

SEQ ID NO: 862072 - DNA, 33 bp, Homo sapien
atacatttttggtacttacaggccagtgcccca

SEQ ID NO: 862073 - DNA, 33 bp, Homo sapien
gtcagtgaaagtaataagtgggatctaggagtc

SEQ ID NO: 862074 - DNA, 33 bp, Homo sapien
gtcagtgaaagtaatacgtgggatctaggagtc

SEQ ID NO: 862075 - DNA, 33 bp, Homo sapien
tacgttctctactaaaagtcctcgaaatggggg

SEQ ID NO: 862076 - DNA, 33 bp, Homo sapien
tacgttctctactaaatgtcctcgaaatggggg

SEQ ID NO: 862077 - DNA, 33 bp, Homo sapien
ccaagtacaaatggcactaaaactgagagatcg

SEQ ID NO: 862078 - DNA, 33 bp, Homo sapien
ccaagtacaaatggcagtaaaactgagagatcg

SEQ ID NO: 862079 - DNA, 33 bp, Homo sapien
atttctagaaggaacacactgagaggtctaata

SEQ ID NO: 862080 - DNA, 33 bp, Homo sapien
atttctagaaggaacagactgagaggtctaata

SEQ ID NO: 862081 - DNA, 33 bp, Homo sapien
tttatccttcctctaccggggatgtttctcagg

SEQ ID NO: 862082 - DNA, 33 bp, Homo sapien
tttatccttcctctactggggatgtttctcagg

SEQ ID NO: 862083 - DNA, 33 bp, Homo sapien
aggtcagaaacgattaacaggcaactgacagga

SEQ ID NO: 862084 - DNA, 33 bp, Homo sapien
aggtcagaaacgattaccaggcaactgacagga

SEQ ID NO: 862085 - DNA, 33 bp, Homo sapien
caacttagcttgtgaacgtactaaaaatcctga

SEQ ID NO: 862086 - DNA, 33 bp, Homo sapien
caacttagcttgtgaatgtactaaaaatcctga

SEQ ID NO: 862087 - DNA, 33 bp, Homo sapien
tgatgctgctaactcaaaaatgatcagggctga

SEQ ID NO: 862088 - DNA, 33 bp, Homo sapien
tgatgctgctaactcacaaatgatcagggctga

SEQ ID NO: 862089 - DNA, 33 bp, Homo sapien
aatcccgggcttttaacgggagaaggctgagtt

SEQ ID NO: 862090 - DNA, 33 bp, Homo sapien
aatcccgggcttttaatgggagaaggctgagtt

SEQ ID NO: 862091 - DNA, 33 bp, Homo sapien
acaagcaaaggtgttacgtgaaccttctgggaa

SEQ ID NO: 862092 - DNA, 33 bp, Homo sapien
acaagcaaaggtgttatgtgaaccttctgggaa

SEQ ID NO: 862093 - DNA, 33 bp, Homo sapien
ttatatgaatgttggaagctatagagattttga

SEQ ID NO: 862094 - DNA, 33 bp, Homo sapien
ttatatgaatgttggacgctatagagattttga

SEQ ID NO: 862095 - DNA, 33 bp, Homo sapien
tgaatatttgttagcgacctgatcaactacttc

SEQ ID NO: 862096 - DNA, 33 bp, Homo sapien
tgaatatttgttagcgtcctgatcaactacttc

SEQ ID NO: 862097 - DNA, 33 bp, Homo sapien
tctctctctgactgccacaatccaagccgtttc

SEQ ID NO: 862098 - DNA, 33 bp, Homo sapien
tctctctctgactgccgcaatccaagccgtttc

SEQ ID NO: 862099 - DNA, 33 bp, Homo sapien
tctgaagtatgtccaccgagcagtttcaagaac

SEQ ID NO: 862100 - DNA, 33 bp, Homo sapien
tctgaagtatgtccactgagcagtttcaagaac

SEQ ID NO: 862101 - DNA, 33 bp, Homo sapien
tctccagcagatcacgaagaggcagatgagtga

SEQ ID NO: 862102 - DNA, 33 bp, Homo sapien
tctccagcagatcacggagaggcagatgagtga

SEQ ID NO: 862103 - DNA, 33 bp, Homo sapien
tgctagtgataaggaactgaggcatcatataac

SEQ ID NO: 862104 - DNA, 33 bp, Homo sapien
tgctagtgataaggaattgaggcatcatataac

SEQ ID NO: 862105 - DNA, 33 bp, Homo sapien
taaaccactgttcatacgccaagtttggacttg

SEQ ID NO: 862106 - DNA, 33 bp, Homo sapien
taaaccactgttcatatgccaagtttggacttg

SEQ ID NO: 862107 - DNA, 33 bp, Homo sapien
tacctactccccactacataagtccacttagaa

SEQ ID NO: 862108 - DNA, 33 bp, Homo sapien
tacctactccccactagataagtccacttagaa

SEQ ID NO: 862109 - DNA, 33 bp, Homo sapien
tcaggttggttatagaactgccaaggacctctg

SEQ ID NO: 862110 - DNA, 33 bp, Homo sapien
tcaggttggttatagacctgccaaggacctctg

SEQ ID NO: 862111 - DNA, 33 bp, Homo sapien
ctgcaatgccaaggtcactgctattaccaccct

SEQ ID NO: 862112 - DNA, 33 bp, Homo sapien
ctgcaatgccaaggtcgctgctattaccaccct

SEQ ID NO: 862113 - DNA, 33 bp, Homo sapien
agtactgacaactacacgattggcggctctgtc

SEQ ID NO: 862114 - DNA, 33 bp, Homo sapien
agtactgacaactacatgattggcggctctgtc

SEQ ID NO: 862115 - DNA, 33 bp, Homo sapien
ctttgggtggtaaataagagagacccagtgagg

SEQ ID NO: 862116 - DNA, 33 bp, Homo sapien
ctttgggtggtaaataggagagacccagtgagg

SEQ ID NO: 862117 - DNA, 33 bp, Homo sapien
acagattgtgtttttacggattgtatagagatt

SEQ ID NO: 862118 - DNA, 33 bp, Homo sapien
acagattgtgtttttatggattgtatagagatt

SEQ ID NO: 862119 - DNA, 33 bp, Homo sapien
ctcaacagtcgtttgcaacagatactattcttt

SEQ ID NO: 862120 - DNA, 33 bp, Homo sapien
ctcaacagtcgtttgcgacagatactattcttt

SEQ ID NO: 862121 - DNA, 33 bp, Homo sapien
acagcaggtacacatacggctcttcgggaatcg

SEQ ID NO: 862122 - DNA, 33 bp, Homo sapien
acagcaggtacacatatggctcttcgggaatcg

SEQ ID NO: 862123 - DNA, 33 bp, Homo sapien
attacttgtgagattacgttagtgtcttttaga

SEQ ID NO: 862124 - DNA, 33 bp, Homo sapien
attacttgtgagattatgttagtgtcttttaga

SEQ ID NO: 862125 - DNA, 33 bp, Homo sapien
gagtgagagcagggacacttagtttgcagatcc

SEQ ID NO: 862126 - DNA, 33 bp, Homo sapien
gagtgagagcagggacgcttagtttgcagatcc

SEQ ID NO: 862127 - DNA, 33 bp, Homo sapien
gatgtactggctttcaataaataacaatagaga

SEQ ID NO: 862128 - DNA, 33 bp, Homo sapien
gatgtactggctttcagtaaataacaatagaga

SEQ ID NO: 862129 - DNA, 33 bp, Homo sapien
acaatgaaatgacacaaaagtgaaagataatag

SEQ ID NO: 862130 - DNA, 33 bp, Homo sapien
acaatgaaatgacacacaagtgaaagataatag

SEQ ID NO: 862131 - DNA, 33 bp, Homo sapien
agggtttgaactgtgacgaaagccagttgggaa

SEQ ID NO: 862132 - DNA, 33 bp, Homo sapien
agggtttgaactgtgatgaaagccagttgggaa

SEQ ID NO: 862133 - DNA, 33 bp, Homo sapien
agtttccgtaaatgtaacgagagggcgtctggc

SEQ ID NO: 862134 - DNA, 33 bp, Homo sapien
agtttccgtaaatgtagcgagagggcgtctggc

SEQ ID NO: 862135 - DNA, 33 bp, Homo sapien
aaatatctgcttatgacgagagtgttttgagag

SEQ ID NO: 862136 - DNA, 33 bp, Homo sapien
aaatatctgcttatgaggagagtgttttgagag

SEQ ID NO: 862137 - DNA, 33 bp, Homo sapien
gactttttgagtgtcaggtcttacatttaggcc

SEQ ID NO: 862138 - DNA, 33 bp, Homo sapien
gactttttgagtgtcatgtcttacatttaggcc

SEQ ID NO: 862139 - DNA, 33 bp, Homo sapien
gcaagattaatttcccactttatttacatcagc

SEQ ID NO: 862140 - DNA, 33 bp, Homo sapien
gcaagattaatttcccgctttatttacatcagc

SEQ ID NO: 862141 - DNA, 33 bp, Homo sapien
ccaggaaggtagaaacaaactgaagaagctggt

SEQ ID NO: 862142 - DNA, 33 bp, Homo sapien
ccaggaaggtagaaactaactgaagaagctggt

SEQ ID NO: 862143 - DNA, 33 bp, Homo sapien
gtacatagtttaaccacaaaactagatatcctg

SEQ ID NO: 862144 - DNA, 33 bp, Homo sapien
gtacatagtttaaccagaaaactagatatcctg

SEQ ID NO: 862145 - DNA, 33 bp, Homo sapien
taggctaccatcacccacacaaactagaaatcc

SEQ ID NO: 862146 - DNA, 33 bp, Homo sapien
taggctaccatcacccgcacaaactagaaatcc

SEQ ID NO: 862147 - DNA, 33 bp, Homo sapien
gtgttagaatgctagacgcctaaggaaatgggg

SEQ ID NO: 862148 - DNA, 33 bp, Homo sapien
gtgttagaatgctagatgcctaaggaaatgggg

SEQ ID NO: 862149 - DNA, 33 bp, Homo sapien
catgcaatctgagtgacggatgaagaaaactgc

SEQ ID NO: 862150 - DNA, 33 bp, Homo sapien
catgcaatctgagtgatggatgaagaaaactgc

SEQ ID NO: 862151 - DNA, 33 bp, Homo sapien
tttagtcctctctttaagggatcctagtgaaag

SEQ ID NO: 862152 - DNA, 33 bp, Homo sapien
tttagtcctctctttaggggatcctagtgaaag

SEQ ID NO: 862153 - DNA, 33 bp, Homo sapien
tttgactaaagtgcccaatcaaacagattcctc

SEQ ID NO: 862154 - DNA, 33 bp, Homo sapien
tttgactaaagtgccctatcaaacagattcctc

SEQ ID NO: 862155 - DNA, 33 bp, Homo sapien
aagagcttggcccagccgaggagccgtcaccta

SEQ ID NO: 862156 - DNA, 33 bp, Homo sapien
aagagcttggcccagctgaggagccgtcaccta

SEQ ID NO: 862157 - DNA, 33 bp, Homo sapien
cttctggaaggtatcaagtgaatgaactttagg

SEQ ID NO: 862158 - DNA, 33 bp, Homo sapien
cttctggaaggtatcaggtgaatgaactttagg

SEQ ID NO: 862159 - DNA, 33 bp, Homo sapien
cttatcaaagtcaccacgatctgtatgttgcca

SEQ ID NO: 862160 - DNA, 33 bp, Homo sapien
cttatcaaagtcaccatgatctgtatgttgcca

SEQ ID NO: 862161 - DNA, 33 bp, Homo sapien
ggcaattgcattctacaaattccaccagtgcaa

SEQ ID NO: 862162 - DNA, 33 bp, Homo sapien
ggcaattgcattctaccaattccaccagtgcaa

SEQ ID NO: 862163 - DNA, 33 bp, Homo sapien
atctaggtccatacaaggtatccagaaagtaga

SEQ ID NO: 862164 - DNA, 33 bp, Homo sapien
atctaggtccatacaatgtatccagaaagtaga

SEQ ID NO: 862165 - DNA, 33 bp, Homo sapien
accttgaaaccagtacccatgttatgacccctg

SEQ ID NO: 862166 - DNA, 33 bp, Homo sapien
accttgaaaccagtactcatgttatgacccctg

SEQ ID NO: 862167 - DNA, 33 bp, Homo sapien
accactctggacaaaaacttcagtaagctcccc

SEQ ID NO: 862168 - DNA, 33 bp, Homo sapien
accactctggacaaaaccttcagtaagctcccc

SEQ ID NO: 862169 - DNA, 33 bp, Homo sapien
tcttcgaaagatgatcacagatttggctgctca

SEQ ID NO: 862170 - DNA, 33 bp, Homo sapien
tcttcgaaagatgatcgcagatttggctgctca

SEQ ID NO: 862171 - DNA, 33 bp, Homo sapien; identical to SEQ ID NO: 862169

SEQ ID NO: 862172 - DNA, 33 bp, Homo sapien; identical to SEQ ID NO: 862170

SEQ ID NO: 862173 - DNA, 33 bp, Homo sapien
ttgttgaacagaactgcagctacagtaagaaat

SEQ ID NO: 862174 - DNA, 33 bp, Homo sapien
ttgttgaacagaactggagctacagtaagaaat

SEQ ID NO: 862175 - DNA, 33 bp, Homo sapien
aggcaaccacatcaaagaagctgtattagcact

SEQ ID NO: 862176 - DNA, 33 bp, Homo sapien
aggcaaccacatcaaataagctgtattagcact

SEQ ID NO: 862177 - DNA, 33 bp, Homo sapien
acgggacactgggagacgagcagctttggggac

SEQ ID NO: 862178 - DNA, 33 bp, Homo sapien
acgggacactgggagatgagcagctttggggac

SEQ ID NO: 862179 - DNA, 33 bp, Homo sapien
agtacatattgttctaccaactcattgttaatg

SEQ ID NO: 862180 - DNA, 33 bp, Homo sapien
agtacatattgttctatcaactcattgttaatg

SEQ ID NO: 862181 - DNA, 33 bp, Homo sapien
tgtccaatatttatcacgtcttggtgtttcact

SEQ ID NO: 862182 - DNA, 33 bp, Homo sapien
tgtccaatatttatcatgtcttggtgtttcact

SEQ ID NO: 862183 - DNA, 33 bp, Homo sapien
tgcaaaccatggtatggatggcaagagtgatac

SEQ ID NO: 862184 - DNA, 33 bp, Homo sapien
tgcaaaccatggtatgtatggcaagagtgatac

SEQ ID NO: 862185 - DNA, 33 bp, Homo sapien
aagagtgatacgtacacagtctggtttcattga

SEQ ID NO: 862186 - DNA, 33 bp, Homo sapien
aagagtgatacgtacatagtctggtttcattga

SEQ ID NO: 862187 - DNA, 33 bp, Homo sapien
aggacttctcaaaggaaggtatcttagttcagg

SEQ ID NO: 862188 - DNA, 33 bp, Homo sapien
aggacttctcaaaggagggtatcttagttcagg

SEQ ID NO: 862189 - DNA, 33 bp, Homo sapien
gcccatgccatctagcaacaaaccatcaacact

SEQ ID NO: 862190 - DNA, 33 bp, Homo sapien
gcccatgccatctagccacaaaccatcaacact

SEQ ID NO: 862191 - DNA, 33 bp, Homo sapien
atcaacactttgcacccatagaagcttcctcta

SEQ ID NO: 862192 - DNA, 33 bp, Homo sapien
atcaacactttgcacctatagaagcttcctcta

SEQ ID NO: 862193 - DNA, 33 bp, Homo sapien
caaaacaaaactatctcaaacagggtctacttc

SEQ ID NO: 862194 - DNA, 33 bp, Homo sapien
caaaacaaaactatctgaaacagggtctacttc

SEQ ID NO: 862195 - DNA, 33 bp, Homo sapien
tgcccaagagtccttacctggaacctctggtct

SEQ ID NO: 862196 - DNA, 33 bp, Homo sapien
tgcccaagagtccttatctggaacctctggtct

SEQ ID NO: 862197 - DNA, 33 bp, Homo sapien
atgtggttgtttataacacagcagctcacttcc

SEQ ID NO: 862198 - DNA, 33 bp, Homo sapien
atgtggttgtttataatacagcagctcacttcc

SEQ ID NO: 862199 - DNA, 33 bp, Homo sapien
tttctttaatgaatgaagcaatttattaaccca

SEQ ID NO: 862200 - DNA, 33 bp, Homo sapien
tttctttaatgaatgaggcaatttattaaccca

SEQ ID NO: 862201 - DNA, 33 bp, Homo sapien
tggagttactgtagaaaacatgaatcagcagga

SEQ ID NO: 862202 - DNA, 33 bp, Homo sapien
tggagttactgtagaagacatgaatcagcagga

SEQ ID NO: 862203 - DNA, 33 bp, Homo sapien
tttcaggtgtgctttaaatatggcacctgtatc

SEQ ID NO: 862204 - DNA, 33 bp, Homo sapien
tttcaggtgtgctttacatatggcacctgtatc

SEQ ID NO: 862205 - DNA, 33 bp, Homo sapien
ccaaaccacaccagaaatgacaaggacaattta

SEQ ID NO: 862206 - DNA, 33 bp, Homo sapien
ccaaaccacaccagaagtgacaaggacaattta

SEQ ID NO: 862207 - DNA, 33 bp, Homo sapien
cattgcctttagacaaatgaatttagacagctg

SEQ ID NO: 862208 - DNA, 33 bp, Homo sapien
cattgcctttagacaattgaatttagacagctg

SEQ ID NO: 862209 - DNA, 33 bp, Homo sapien
gtcaaatttacttgtgaactttttgcaaaattt

SEQ ID NO: 862210 - DNA, 33 bp, Homo sapien
gtcaaatttacttgtggactttttgcaaaattt

SEQ ID NO: 862211 - DNA, 33 bp, Homo sapien
ccttaggtcttgttaggactgcttaaagttttt

SEQ ID NO: 862212 - DNA, 33 bp, Homo sapien
ccttaggtcttgttagtactgcttaaagttttt

SEQ ID NO: 862213 - DNA, 33 bp, Homo sapien
gttggaactacttcaactcactataagaattct

SEQ ID NO: 862214 - DNA, 33 bp, Homo sapien
gttggaactacttcaattcactataagaattct

SEQ ID NO: 862215 - DNA, 33 bp, Homo sapien
gaggagggaatgtaaaaccagtcaggtaggcta

SEQ ID NO: 862216 - DNA, 33 bp, Homo sapien
gaggagggaatgtaaagccagtcaggtaggcta

SEQ ID NO: 862217 - DNA, 33 bp, Homo sapien
gaaaatacagacccagaaacgtctaacagaact

SEQ ID NO: 862218 - DNA, 33 bp, Homo sapien
gaaaatacagacccagcaacgtctaacagaact

SEQ ID NO: 862219 - DNA, 33 bp, Homo sapien
agaagtgctagtgggacgggtcttctttcttcc

SEQ ID NO: 862220 - DNA, 33 bp, Homo sapien
agaagtgctagtgggaggggtcttctttcttcc

SEQ ID NO: 862221 - DNA, 33 bp, Homo sapien
tttagattttctgatactagcagtcaaaatcat

SEQ ID NO: 862222 - DNA, 33 bp, Homo sapien
tttagattttctgatattagcagtcaaaatcat

SEQ ID NO: 862223 - DNA, 33 bp, Homo sapien
ctccctcactgtcacaagaacaccacaggggaa

SEQ ID NO: 862224 - DNA, 33 bp, Homo sapien
ctccctcactgtcacaggaacaccacaggggaa

SEQ ID NO: 862225 - DNA, 33 bp, Homo sapien
acagaataagaagtccacaaatagattcacaca

SEQ ID NO: 862226 - DNA, 33 bp, Homo sapien
acagaataagaagtccgcaaatagattcacaca

SEQ ID NO: 862227 - DNA, 33 bp, Homo sapien
agcacatcaagttgcacgtcttattttccaact

SEQ ID NO: 862228 - DNA, 33 bp, Homo sapien
agcacatcaagttgcatgtcttattttccaact

SEQ ID NO: 862229 - DNA, 33 bp, Homo sapien
aaagagaaatgggtccactgaaatttccccttt

SEQ ID NO: 862230 - DNA, 33 bp, Homo sapien
aaagagaaatgggtccgctgaaatttccccttt

SEQ ID NO: 862231 - DNA, 33 bp, Homo sapien
atgcaaaggattgttacaccccagaattggaat

SEQ ID NO: 862232 - DNA, 33 bp, Homo sapien
atgcaaaggattgttagaccccagaattggaat

SEQ ID NO: 862233 - DNA, 33 bp, Homo sapien
ttaacagtatctggaaaatcttctttaaatcac

SEQ ID NO: 862234 - DNA, 33 bp, Homo sapien
ttaacagtatctggaatatcttctttaaatcac

SEQ ID NO: 862235 - DNA, 33 bp, Homo sapien
cttttctctaacaagaaccaataaaaagcaacc

SEQ ID NO: 862236 - DNA, 33 bp, Homo sapien
cttttctctaacaagagccaataaaaagcaacc

SEQ ID NO: 862237 - DNA, 33 bp, Homo sapien
tttcattatcatatcccagaacctagtacacaa

SEQ ID NO: 862238 - DNA, 33 bp, Homo sapien
tttcattatcatatcctagaacctagtacacaa

SEQ ID NO: 862239 - DNA, 33 bp, Homo sapien
gagcagtgtttattgacgaaaggatctagttag

SEQ ID NO: 862240 - DNA, 33 bp, Homo sapien
gagcagtgtttattgatgaaaggatctagttag

SEQ ID NO: 862241 - DNA, 33 bp, Homo sapien
agtatcactggcaacacggtagggtaaatgggt

SEQ ID NO: 862242 - DNA, 33 bp, Homo sapien
agtatcactggcaacatggtagggtaaatgggt

SEQ ID NO: 862243 - DNA, 33 bp, Homo sapien
tgaaactttgagatcaccatgtccaaagtggcc

SEQ ID NO: 862244 - DNA, 33 bp, Homo sapien
tgaaactttgagatcatcatgtccaaagtggcc

SEQ ID NO: 862245 - DNA, 33 bp, Homo sapien
tggagctgagaatgaccggaaagttcagcaagg

SEQ ID NO: 862246 - DNA, 33 bp, Homo sapien
tggagctgagaatgacgggaaagttcagcaagg

SEQ ID NO: 862247 - DNA, 33 bp, Homo sapien
ataaaatgctattcaacctagaaactgcacact

SEQ ID NO: 862248 - DNA, 33 bp, Homo sapien
ataaaatgctattcaatctagaaactgcacact

SEQ ID NO: 862249 - DNA, 33 bp, Homo sapien
aagaatactgtttccaaataagggatcattact

SEQ ID NO: 862250 - DNA, 33 bp, Homo sapien
aagaatactgtttccagataagggatcattact

SEQ ID NO: 862251 - DNA, 33 bp, Homo sapien
aatactatgcacgaaacacttgactaaattgtg

SEQ ID NO: 862252 - DNA, 33 bp, Homo sapien
aatactatgcacgaaatacttgactaaattgtg

SEQ ID NO: 862253 - DNA, 33 bp, Homo sapien
gtttcctatcctcaagacctttcactttgatga

SEQ ID NO: 862254 - DNA, 33 bp, Homo sapien
gtttcctatcctcaaggcctttcactttgatga

SEQ ID NO: 862255 - DNA, 33 bp, Homo sapien
atccatagacaagccacaaaaagttgattagag

SEQ ID NO: 862256 - DNA, 33 bp, Homo sapien
atccatagacaagccataaaaagttgattagag

SEQ ID NO: 862257 - DNA, 33 bp, Homo sapien
acagaaaagaaaatgcgaaggaaaccataagac

SEQ ID NO: 862258 - DNA, 33 bp, Homo sapien
acagaaaagaaaatgctaaggaaaccataagac

SEQ ID NO: 862259 - DNA, 33 bp, Homo sapien
acaaaagggggtagtaggatttcacaaaattgc

SEQ ID NO: 862260 - DNA, 33 bp, Homo sapien
acaaaagggggtagtatgatttcacaaaattgc

SEQ ID NO: 862261 - DNA, 33 bp, Homo sapien
agtgttaaaggaatacacaatgtaacactgaat

SEQ ID NO: 862262 - DNA, 33 bp, Homo sapien
agtgttaaaggaatacgcaatgtaacactgaat

SEQ ID NO: 862263 - DNA, 33 bp, Homo sapien
cctgggccggcagatacatgaccccaagttctg

SEQ ID NO: 862264 - DNA, 33 bp, Homo sapien
cctgggccggcagatatatgaccccaagttctg

SEQ ID NO: 862265 - DNA, 33 bp, Homo sapien
accactgagtgagacacaaagtagagtgaatgg

SEQ ID NO: 862266 - DNA, 33 bp, Homo sapien
accactgagtgagacataaagtagagtgaatgg

SEQ ID NO: 862267 - DNA, 33 bp, Homo sapien
caagcctttgtaggacaaatgaatctctcccta

SEQ ID NO: 862268 - DNA, 33 bp, Homo sapien
caagcctttgtaggacgaatgaatctctcccta

SEQ ID NO: 862269 - DNA, 33 bp, Homo sapien
ggtcagatggtagaaacggtaggaagtatggca

SEQ ID NO: 862270 - DNA, 33 bp, Homo sapien
ggtcagatggtagaaatggtaggaagtatggca

SEQ ID NO: 862271 - DNA, 33 bp, Homo sapien
ctgtgtggcacctgggaaaaacatgctccacaa

SEQ ID NO: 862272 - DNA, 33 bp, Homo sapien
ctgtgtggcacctgggcaaaacatgctccacaa

SEQ ID NO: 862273 - DNA, 33 bp, Homo sapien
gtgtctattgtaagaaatgaaactgccttaggc

SEQ ID NO: 862274 - DNA, 33 bp, Homo sapien
gtgtctattgtaagaagtgaaactgccttaggc

SEQ ID NO: 862275 - DNA, 33 bp, Homo sapien
agtttttcccacattcaccaaatgccaaaatat

SEQ ID NO: 862276 - DNA, 33 bp, Homo sapien
agtttttcccacattcgccaaatgccaaaatat

SEQ ID NO: 862277 - DNA, 33 bp, Homo sapien
gagtgcctgtgctttgcattactgaatgaatta

SEQ ID NO: 862278 - DNA, 33 bp, Homo sapien
gagtgcctgtgctttgtattactgaatgaatta

SEQ ID NO: 862279 - DNA, 33 bp, Homo sapien
ttggagcgtacagacaatacagaagttacagtc

SEQ ID NO: 862280 - DNA, 33 bp, Homo sapien
ttggagcgtacagacagtacagaagttacagtc

SEQ ID NO: 862281 - DNA, 33 bp, Homo sapien
attcatatttttttcccgcaataacatcgttct

SEQ ID NO: 862282 - DNA, 33 bp, Homo sapien
attcatatttttttcctgcaataacatcgttct

SEQ ID NO: 862283 - DNA, 33 bp, Homo sapien
agacaccttattggtaaactatctggaccagga

SEQ ID NO: 862284 - DNA, 33 bp, Homo sapien
agacaccttattggtagactatctggaccagga

SEQ ID NO: 862285 - DNA, 33 bp, Homo sapien
aaaactgctgctatacaaatagaaaagtatata

SEQ ID NO: 862286 - DNA, 33 bp, Homo sapien
aaaactgctgctatacgaatagaaaagtatata

SEQ ID NO: 862287 - DNA, 33 bp, Homo sapien
tctatacttttactcaactgtatcatacatttt

SEQ ID NO: 862288 - DNA, 33 bp, Homo sapien
tctatacttttactcagctgtatcatacatttt

SEQ ID NO: 862289 - DNA, 33 bp, Homo sapien
ttatgctagatccacacctttgattaccatata

SEQ ID NO: 862290 - DNA, 33 bp, Homo sapien
ttatgctagatccacagctttgattaccatata

SEQ ID NO: 862291 - DNA, 33 bp, Homo sapien
tcttagcttattctgtaaaatagcgctcaccat

SEQ ID NO: 862292 - DNA, 33 bp, Homo sapien
tcttagcttattctgtgaaatagcgctcaccat

SEQ ID NO: 862293 - DNA, 33 bp, Homo sapien
tattcttgaacaaattcaaaacaggtatcattc

SEQ ID NO: 862294 - DNA, 33 bp, Homo sapien
tattcttgaacaaatttaaaacaggtatcattc

SEQ ID NO: 862295 - DNA, 33 bp, Homo sapien
atgtaagtaagccaaaatctagtaattgaaaac

SEQ ID NO: 862296 - DNA, 33 bp, Homo sapien
atgtaagtaagccaaattctagtaattgaaaac

SEQ ID NO: 862297 - DNA, 33 bp, Homo sapien
taatatctttcaatgactacacggagctttcag

SEQ ID NO: 862298 - DNA, 33 bp, Homo sapien
taatatctttcaatgattacacggagctttcag

SEQ ID NO: 862299 - DNA, 33 bp, Homo sapien
tatcacgaaaggctgacagattgaaataatgtt

SEQ ID NO: 862300 - DNA, 33 bp, Homo sapien
tatcacgaaaggctgatagattgaaataatgtt

SEQ ID NO: 862301 - DNA, 33 bp, Homo sapien
gcctatctactgtaacaagctctgtgactcaga

SEQ ID NO: 862302 - DNA, 33 bp, Homo sapien
gcctatctactgtaacgagctctgtgactcaga

SEQ ID NO: 862303 - DNA, 33 bp, Homo sapien
aagatgtcactactggccaagagaagcattaca

SEQ ID NO: 862304 - DNA, 33 bp, Homo sapien
aagatgtcactactggtcaagagaagcattaca

SEQ ID NO: 862305 - DNA, 33 bp, Homo sapien
gtgagggtggaggagaaggacaagttaacggag

SEQ ID NO: 862306 - DNA, 33 bp, Homo sapien
gtgagggtggaggagacggacaagttaacggag

SEQ ID NO: 862307 - DNA, 33 bp, Homo sapien
gctcctagaatactcactcaatttcctggtaga

SEQ ID NO: 862308 - DNA, 33 bp, Homo sapien
gctcctagaatactcagtcaatttcctggtaga

SEQ ID NO: 862309 - DNA, 33 bp, Homo sapien
tgtatgatgtgtataccgggtgacaacttcaaa

SEQ ID NO: 862310 - DNA, 33 bp, Homo sapien
tgtatgatgtgtatactgggtgacaacttcaaa

SEQ ID NO: 862311 - DNA, 33 bp, Homo sapien
aaaacaagggtaacaaaaagtgtagcataagct

SEQ ID NO: 862312 - DNA, 33 bp, Homo sapien
aaaacaagggtaacaagaagtgtagcataagct

SEQ ID NO: 862313 - DNA, 33 bp, Homo sapien
tgagcccaccaaaaaaactgtgacaaatacatt

SEQ ID NO: 862314 - DNA, 33 bp, Homo sapien
tgagcccaccaaaaaacctgtgacaaatacatt

SEQ ID NO: 862315 - DNA, 33 bp, Homo sapien
gtgtttgttttatacaagttaatgctgtgtttt

SEQ ID NO: 862316 - DNA, 33 bp, Homo sapien
gtgtttgttttatacacgttaatgctgtgtttt

SEQ ID NO: 862317 - DNA, 33 bp, Homo sapien
acaattttgacttcaacgctctaccgggaaagt

SEQ ID NO: 862318 - DNA, 33 bp, Homo sapien
acaattttgacttcaatgctctaccgggaaagt

SEQ ID NO: 862319 - DNA, 33 bp, Homo sapien
gatattaagcctggagcagaggaaaactcagta

SEQ ID NO: 862320 - DNA, 33 bp, Homo sapien
gatattaagcctggagtagaggaaaactcagta

SEQ ID NO: 862321 - DNA, 33 bp, Homo sapien
gaagagggtaaccacaaagctaaaattcatcat

SEQ ID NO: 862322 - DNA, 33 bp, Homo sapien
gaagagggtaaccacagagctaaaattcatcat

SEQ ID NO: 862323 - DNA, 33 bp, Homo sapien
tagattagtctatttacgggtcacctggaagat

SEQ ID NO: 862324 - DNA, 33 bp, Homo sapien
tagattagtctatttatgggtcacctggaagat

SEQ ID NO: 862325 - DNA, 33 bp, Homo sapien
gagttaaaaaaagtaacctggtacagacacctg

SEQ ID NO: 862326 - DNA, 33 bp, Homo sapien
gagttaaaaaaagtaatctggtacagacacctg

SEQ ID NO: 862327 - DNA, 33 bp, Homo sapien
aggagagggaaatgggcagacgttggttaaagg

SEQ ID NO: 862328 - DNA, 33 bp, Homo sapien
aggagagggaaatgggtagacgttggttaaagg

SEQ ID NO: 862329 - DNA, 33 bp, Homo sapien
aaatggacttcttggcaaaagtaatagagaaaa

SEQ ID NO: 862330 - DNA, 33 bp, Homo sapien
aaatggacttcttggctaaagtaatagagaaaa

SEQ ID NO: 862331 - DNA, 33 bp, Homo sapien
agagatagggcctcacaatgctgaccaggctgg

SEQ ID NO: 862332 - DNA, 33 bp, Homo sapien
agagatagggcctcacgatgctgaccaggctgg

SEQ ID NO: 862333 - DNA, 33 bp, Homo sapien
atatcaggccagcataagtaaaggagagatggg

SEQ ID NO: 862334 - DNA, 33 bp, Homo sapien
atatcaggccagcatacgtaaaggagagatggg

SEQ ID NO: 862335 - DNA, 33 bp, Homo sapien
ggtaatcactatcccaaatttgctttaattatt

SEQ ID NO: 862336 - DNA, 33 bp, Homo sapien
ggtaatcactatcccacatttgctttaattatt

SEQ ID NO: 862337 - DNA, 33 bp, Homo sapien
aattatgtaaaataaacgtatgcaaatatatat

SEQ ID NO: 862338 - DNA, 33 bp, Homo sapien
aattatgtaaaataaatgtatgcaaatatatat

SEQ ID NO: 862339 - DNA, 33 bp, Homo sapien
aggttggagctaccaaagggcaaaaaactattc

SEQ ID NO: 862340 - DNA, 33 bp, Homo sapien
aggttggagctaccaacgggcaaaaaactattc

SEQ ID NO: 862341 - DNA, 33 bp, Homo sapien
tgcccttctccctctactaatccacagctagca

SEQ ID NO: 862342 - DNA, 33 bp, Homo sapien
tgcccttctccctctattaatccacagctagca

SEQ ID NO: 862343 - DNA, 33 bp, Homo sapien
ttgctataaatttgtacatgtccatttttgttc

SEQ ID NO: 862344 - DNA, 33 bp, Homo sapien
ttgctataaatttgtatatgtccatttttgttc

SEQ ID NO: 862345 - DNA, 33 bp, Homo sapien
atttaaagggcaatgcacaccaaattggaggtg

SEQ ID NO: 862346 - DNA, 33 bp, Homo sapien
atttaaagggcaatgcgcaccaaattggaggtg

SEQ ID NO: 862347 - DNA, 33 bp, Homo sapien
gggagaacacctcttacatcaatgtgccctgaa

SEQ ID NO: 862348 - DNA, 33 bp, Homo sapien
gggagaacacctcttatatcaatgtgccctgaa

SEQ ID NO: 862349 - DNA, 33 bp, Homo sapien
taatccagagtacacaagccttccattttctta

SEQ ID NO: 862350 - DNA, 33 bp, Homo sapien
taatccagagtacacaggccttccattttctta

SEQ ID NO: 862351 - DNA, 33 bp, Homo sapien
tcctggcctctgtatacggcctttgttagcact

SEQ ID NO: 862352 - DNA, 33 bp, Homo sapien
tcctggcctctgtatatggcctttgttagcact

SEQ ID NO: 862353 - DNA, 33 bp, Homo sapien
attactctcatcacccaatgtctcattaaatgt

SEQ ID NO: 862354 - DNA, 33 bp, Homo sapien
attactctcatcacccgatgtctcattaaatgt

SEQ ID NO: 862355 - DNA, 33 bp, Homo sapien
ttcctaaagtttagccaatataaagtctccaga

SEQ ID NO: 862356 - DNA, 33 bp, Homo sapien
ttcctaaagtttagcccatataaagtctccaga

SEQ ID NO: 862357 - DNA, 33 bp, Homo sapien
gcttgtgctgtcatggaagttgcattggagaaa

SEQ ID NO: 862358 - DNA, 33 bp, Homo sapien
gcttgtgctgtcatggcagttgcattggagaaa

SEQ ID NO: 862359 - DNA, 33 bp, Homo sapien
tgttaccagtaaggcacacataaaagcaaaaga

SEQ ID NO: 862360 - DNA, 33 bp, Homo sapien
tgttaccagtaaggcatacataaaagcaaaaga

SEQ ID NO: 862361 - DNA, 33 bp, Homo sapien
ttcttcctatcaaaaaaggtttatatttcagat

SEQ ID NO: 862362 - DNA, 33 bp, Homo sapien
ttcttcctatcaaaaagggtttatatttcagat

SEQ ID NO: 862363 - DNA, 33 bp, Homo sapien
tgttattatttgctccagaaccattcttaaatt

SEQ ID NO: 862364 - DNA, 33 bp, Homo sapien
tgttattatttgctccggaaccattcttaaatt

SEQ ID NO: 862365 - DNA, 33 bp, Homo sapien
tgtcttcacttccacacgttcaaggacacctct

SEQ ID NO: 862366 - DNA, 33 bp, Homo sapien
tgtcttcacttccacatgttcaaggacacctct

SEQ ID NO: 862367 - DNA, 33 bp, Homo sapien
tacataagccagctcaataggaagctattatat

SEQ ID NO: 862368 - DNA, 33 bp, Homo sapien
tacataagccagctcattaggaagctattatat

SEQ ID NO: 862369 - DNA, 33 bp, Homo sapien
cctgtaaatagactcaatctcccaattgtgtgg

SEQ ID NO: 862370 - DNA, 33 bp, Homo sapien
cctgtaaatagactcagtctcccaattgtgtgg

SEQ ID NO: 862371 - DNA, 33 bp, Homo sapien
agaaacacacacatgcacaatagagcttcatgc

SEQ ID NO: 862372 - DNA, 33 bp, Homo sapien
agaaacacacacatgcgcaatagagcttcatgc

SEQ ID NO: 862373 - DNA, 33 bp, Homo sapien
gataatgtgtacataaacaggcatggctatgtt

SEQ ID NO: 862374 - DNA, 33 bp, Homo sapien
gataatgtgtacataagcaggcatggctatgtt

SEQ ID NO: 862375 - DNA, 33 bp, Homo sapien
ttacactgtttatatacggccactaattcgatg

SEQ ID NO: 862376 - DNA, 33 bp, Homo sapien
ttacactgtttatatatggccactaattcgatg

SEQ ID NO: 862377 - DNA, 33 bp, Homo sapien
catctttcactccacaagtatttgttgaacgtc

SEQ ID NO: 862378 - DNA, 33 bp, Homo sapien
catctttcactccacaggtatttgttgaacgtc

SEQ ID NO: 862379 - DNA, 33 bp, Homo sapien
tcaaccaatcatctgacgctgactcagaagctc

SEQ ID NO: 862380 - DNA, 33 bp, Homo sapien
tcaaccaatcatctgatgctgactcagaagctc

SEQ ID NO: 862381 - DNA, 33 bp, Homo sapien; identical to SEQ ID NO: 862379

SEQ ID NO: 862382 - DNA, 33 bp, Homo sapien; identical to SEQ ID NO: 862380

SEQ ID NO: 862383 - DNA, 33 bp, Homo sapien
gttttaaagtttgtgcaaaatgtctgctagaaa

SEQ ID NO: 862384 - DNA, 33 bp, Homo sapien
gttttaaagtttgtgccaaatgtctgctagaaa

SEQ ID NO: 862385 - DNA, 33 bp, Homo sapien
tcttaaaattagaacacagtgtctccaaattcc

SEQ ID NO: 862386 - DNA, 33 bp, Homo sapien
tcttaaaattagaacatagtgtctccaaattcc

SEQ ID NO: 862387 - DNA, 33 bp, Homo sapien
aactgatcagcaggataaatgctaattcttaga

SEQ ID NO: 862388 - DNA, 33 bp, Homo sapien
aactgatcagcaggatgaatgctaattcttaga

SEQ ID NO: 862389 - DNA, 33 bp, Homo sapien
caaagacacagttgtacacccacattcacagca

SEQ ID NO: 862390 - DNA, 33 bp, Homo sapien
caaagacacagttgtatacccacattcacagca

SEQ ID NO: 862391 - DNA, 33 bp, Homo sapien
gaatctggaccagagagatatagaagatgggcc

SEQ ID NO: 862392 - DNA, 33 bp, Homo sapien
gaatctggaccagagatatatagaagatgggcc

SEQ ID NO: 862393 - DNA, 33 bp, Homo sapien
gaaaactttctggtccacacagatgagaactgt

SEQ ID NO: 862394 - DNA, 33 bp, Homo sapien
gaaaactttctggtccgcacagatgagaactgt

SEQ ID NO: 862395 - DNA, 33 bp, Homo sapien
cttgatagctgcagtccagtagcaatagaaaca

SEQ ID NO: 862396 - DNA, 33 bp, Homo sapien
cttgatagctgcagtctagtagcaatagaaaca

SEQ ID NO: 862397 - DNA, 33 bp, Homo sapien
tttattttttcaagacagaattttgctcttgtc

SEQ ID NO: 862398 - DNA, 33 bp, Homo sapien
tttattttttcaagacggaattttgctcttgtc

SEQ ID NO: 862399 - DNA, 33 bp, Homo sapien
aaggcagtaaaatatcacaacagcaaagaggca

SEQ ID NO: 862400 - DNA, 33 bp, Homo sapien
aaggcagtaaaatatcgcaacagcaaagaggca

SEQ ID NO: 862401 - DNA, 33 bp, Homo sapien
taagagaaatcaaatacgctctagtgaattctt

SEQ ID NO: 862402 - DNA, 33 bp, Homo sapien
taagagaaatcaaatatgctctagtgaattctt

SEQ ID NO: 862403 - DNA, 33 bp, Homo sapien
aaacaagaaacccaaacgtttagtgacatctgt

SEQ ID NO: 862404 - DNA, 33 bp, Homo sapien
aaacaagaaacccaaatgtttagtgacatctgt

SEQ ID NO: 862405 - DNA, 33 bp, Homo sapien
ctgcaatgtttataaaactaacagagcacttct

SEQ ID NO: 862406 - DNA, 33 bp, Homo sapien
ctgcaatgtttataaatctaacagagcacttct

SEQ ID NO: 862407 - DNA, 33 bp, Homo sapien
ggtggtaggcatcagcaataccatattaaaaca

SEQ ID NO: 862408 - DNA, 33 bp, Homo sapien
ggtggtaggcatcagcgataccatattaaaaca

SEQ ID NO: 862409 - DNA, 33 bp, Homo sapien
gctacactgttgagaaaatgcaaattatccact

SEQ ID NO: 862410 - DNA, 33 bp, Homo sapien
gctacactgttgagaatatgcaaattatccact

SEQ ID NO: 862411 - DNA, 33 bp, Homo sapien
atacctcagtcattaacctagagaactgtttaa

SEQ ID NO: 862412 - DNA, 33 bp, Homo sapien
atacctcagtcattaagctagagaactgtttaa

SEQ ID NO: 862413 - DNA, 33 bp, Homo sapien
aaaaacgagttcactgcagtcatgaatttattt

SEQ ID NO: 862414 - DNA, 33 bp, Homo sapien
aaaaacgagttcactgtagtcatgaatttattt

SEQ ID NO: 862415 - DNA, 33 bp, Homo sapien
tttgaaacaagtgttaaatagtcagtgatttat

SEQ ID NO: 862416 - DNA, 33 bp, Homo sapien
tttgaaacaagtgttatatagtcagtgatttat

SEQ ID NO: 862417 - DNA, 33 bp, Homo sapien
ccaaatagaaattccacaattgaaaagttcaat

SEQ ID NO: 862418 - DNA, 33 bp, Homo sapien
ccaaatagaaattccagaattgaaaagttcaat

SEQ ID NO: 862419 - DNA, 33 bp, Homo sapien
acacaatgaaattaacaagactcaaagcaacat

SEQ ID NO: 862420 - DNA, 33 bp, Homo sapien
acacaatgaaattaacgagactcaaagcaacat

SEQ ID NO: 862421 - DNA, 33 bp, Homo sapien
caaattctcatatcccagaaagcagaattatga

SEQ ID NO: 862422 - DNA, 33 bp, Homo sapien
caaattctcatatcccggaaagcagaattatga

SEQ ID NO: 862423 - DNA, 33 bp, Homo sapien
gttataccgtgttatggattaatctctacctta

SEQ ID NO: 862424 - DNA, 33 bp, Homo sapien
gttataccgtgttatgtattaatctctacctta

SEQ ID NO: 862425 - DNA, 33 bp, Homo sapien
tacgggcttggccacacaaattgctttggtcac

SEQ ID NO: 862426 - DNA, 33 bp, Homo sapien
tacgggcttggccacataaattgctttggtcac

SEQ ID NO: 862427 - DNA, 33 bp, Homo sapien
gtgcttaacagccttacgtggctagttagtggc

SEQ ID NO: 862428 - DNA, 33 bp, Homo sapien
gtgcttaacagccttatgtggctagttagtggc

SEQ ID NO: 862429 - DNA, 33 bp, Homo sapien
aattttgacctggaaacgaactttgatgtcatc

SEQ ID NO: 862430 - DNA, 33 bp, Homo sapien
aattttgacctggaaaggaactttgatgtcatc

SEQ ID NO: 862431 - DNA, 33 bp, Homo sapien
tgcctatagtgactcaactgaagctaaaaccgt

SEQ ID NO: 862432 - DNA, 33 bp, Homo sapien
tgcctatagtgactcacctgaagctaaaaccgt

SEQ ID NO: 862433 - DNA, 33 bp, Homo sapien
tgtggcagatttactagcggttaccttataaga

SEQ ID NO: 862434 - DNA, 33 bp, Homo sapien
tgtggcagatttactatcggttaccttataaga

SEQ ID NO: 862435 - DNA, 33 bp, Homo sapien
agaccaatgccagccacgttactggaagccaga

SEQ ID NO: 862436 - DNA, 33 bp, Homo sapien
agaccaatgccagccatgttactggaagccaga

SEQ ID NO: 862437 - DNA, 33 bp, Homo sapien
tctacacaaagaaacacgatttgagccaattta

SEQ ID NO: 862438 - DNA, 33 bp, Homo sapien
tctacacaaagaaacaggatttgagccaattta

SEQ ID NO: 862439 - DNA, 33 bp, Homo sapien
taacagcttcacagatcacagggctttaggtgt

SEQ ID NO: 862440 - DNA, 33 bp, Homo sapien
taacagcttcacagattacagggctttaggtgt

SEQ ID NO: 862441 - DNA, 33 bp, Homo sapien
gagatagttagaataaagtaagatgaagaatag

SEQ ID NO: 862442 - DNA, 33 bp, Homo sapien
gagatagttagaataaggtaagatgaagaatag

SEQ ID NO: 862443 - DNA, 33 bp, Homo sapien
ctagaaccatgcctcaagaagggccagacaaca

SEQ ID NO: 862444 - DNA, 33 bp, Homo sapien
ctagaaccatgcctcaggaagggccagacaaca

SEQ ID NO: 862445 - DNA, 33 bp, Homo sapien
agtctccataaatcaccatgtaaatgcaatcag

SEQ ID NO: 862446 - DNA, 33 bp, Homo sapien
agtctccataaatcactatgtaaatgcaatcag

SEQ ID NO: 862447 - DNA, 33 bp, Homo sapien
atggtttccaaacaagactgtggtaaaaccaat

SEQ ID NO: 862448 - DNA, 33 bp, Homo sapien
atggtttccaaacaaggctgtggtaaaaccaat

SEQ ID NO: 862449 - DNA, 33 bp, Homo sapien
agcaaaacatggaactaagccactcatttgtaa

SEQ ID NO: 862450 - DNA, 33 bp, Homo sapien
agcaaaacatggaactgagccactcatttgtaa

SEQ ID NO: 862451 - DNA, 33 bp, Homo sapien
aaaagccaacacaaagaaattattcagctttca

SEQ ID NO: 862452 - DNA, 33 bp, Homo sapien
aaaagccaacacaaagtaattattcagctttca

SEQ ID NO: 862453 - DNA, 33 bp, Homo sapien
atttttgattttactacgactgacttccactgt

SEQ ID NO: 862454 - DNA, 33 bp, Homo sapien
atttttgattttactatgactgacttccactgt

SEQ ID NO: 862455 - DNA, 33 bp, Homo sapien
caatagttacaaagccaacttacagaaaaagag

SEQ ID NO: 862456 - DNA, 33 bp, Homo sapien
caatagttacaaagccgacttacagaaaaagag

SEQ ID NO: 862457 - DNA, 33 bp, Homo sapien
aaaacccccaaaacaaatggacagcagaagaga

SEQ ID NO: 862458 - DNA, 33 bp, Homo sapien
aaaacccccaaaacaagtggacagcagaagaga

SEQ ID NO: 862459 - DNA, 33 bp, Homo sapien
aactctataattctcaatatggaacttagaaca

SEQ ID NO: 862460 - DNA, 33 bp, Homo sapien
aactctataattctcagtatggaacttagaaca

SEQ ID NO: 862461 - DNA, 33 bp, Homo sapien
tctgtaggctgttaagcatatttggtggaaaac

SEQ ID NO: 862462 - DNA, 33 bp, Homo sapien
tctgtaggctgttaagtatatttggtggaaaac

SEQ ID NO: 862463 - DNA, 33 bp, Homo sapien
gccaaattgcacagatcacatttcccttggcaa

SEQ ID NO: 862464 - DNA, 33 bp, Homo sapien
gccaaattgcacagattacatttcccttggcaa

SEQ ID NO: 862465 - DNA, 33 bp, Homo sapien
tcctttctcccacttacggtctttgcctcccgt

SEQ ID NO: 862466 - DNA, 33 bp, Homo sapien
tcctttctcccacttatggtctttgcctcccgt

SEQ ID NO: 862467 - DNA, 33 bp, Homo sapien
gatttccattctacaacgtgtaaaacaaagatt

SEQ ID NO: 862468 - DNA, 33 bp, Homo sapien
gatttccattctacaatgtgtaaaacaaagatt

SEQ ID NO: 862469 - DNA, 33 bp, Homo sapien
ctaactccttaatcccaggagaagcaggcttta

SEQ ID NO: 862470 - DNA, 33 bp, Homo sapien
ctaactccttaatcccgggagaagcaggcttta

SEQ ID NO: 862471 - DNA, 33 bp, Homo sapien
ctctgcagaaccctgacgaattcactgagcaaa

SEQ ID NO: 862472 - DNA, 33 bp, Homo sapien
ctctgcagaaccctgatgaattcactgagcaaa

SEQ ID NO: 862473 - DNA, 33 bp, Homo sapien
agctccatcctgcacacgaaggacgtcacatgt

SEQ ID NO: 862474 - DNA, 33 bp, Homo sapien
agctccatcctgcacatgaaggacgtcacatgt

SEQ ID NO: 862475 - DNA, 33 bp, Homo sapien
atgttgctcatagtgaggggaagttagatctaa

SEQ ID NO: 862476 - DNA, 33 bp, Homo sapien
atgttgctcatagtgatgggaagttagatctaa

SEQ ID NO: 862477 - DNA, 33 bp, Homo sapien
ggaggtgagcagcacccatattcagtgagagca

SEQ ID NO: 862478 - DNA, 33 bp, Homo sapien
ggaggtgagcagcacctatattcagtgagagca

SEQ ID NO: 862479 - DNA, 33 bp, Homo sapien
ctgaccgctgagattcaagaccctctggagaac

SEQ ID NO: 862480 - DNA, 33 bp, Homo sapien
ctgaccgctgagattcgagaccctctggagaac

SEQ ID NO: 862481 - DNA, 33 bp, Homo sapien
gcccacagagttagcacggatttcctgaaggtc

SEQ ID NO: 862482 - DNA, 33 bp, Homo sapien
gcccacagagttagcatggatttcctgaaggtc

SEQ ID NO: 862483 - DNA, 33 bp, Homo sapien
tggctgcagttgttagcatacatccttgagttt

SEQ ID NO: 862484 - DNA, 33 bp, Homo sapien
tggctgcagttgttagtatacatccttgagttt

SEQ ID NO: 862485 - DNA, 33 bp, Homo sapien
caggtgtctacccctcaaatatcagctgttctg

SEQ ID NO: 862486 - DNA, 33 bp, Homo sapien
caggtgtctacccctcgaatatcagctgttctg

SEQ ID NO: 862487 - DNA, 33 bp, Homo sapien
ctgccatgctactcagaagtaaagaaggagtgc

SEQ ID NO: 862488 - DNA, 33 bp, Homo sapien
ctgccatgctactcaggagtaaagaaggagtgc

SEQ ID NO: 862489 - DNA, 33 bp, Homo sapien
atgatttcattcatgcaaaattctagaaaaggc

SEQ ID NO: 862490 - DNA, 33 bp, Homo sapien
atgatttcattcatgcgaaattctagaaaaggc

SEQ ID NO: 862491 - DNA, 33 bp, Homo sapien
ccccacagtgccctgacgtttggtgaatttgat

SEQ ID NO: 862492 - DNA, 33 bp, Homo sapien
ccccacagtgccctgaggtttggtgaatttgat

SEQ ID NO: 862493 - DNA, 33 bp, Homo sapien
cagatcgctaactcctcagagagtgcggcctcc

SEQ ID NO: 862494 - DNA, 33 bp, Homo sapien
cagatcgctaactccttagagagtgcggcctcc

SEQ ID NO: 862495 - DNA, 33 bp, Homo sapien
tctggaatcctccccaatatctgacccggttaa

SEQ ID NO: 862496 - DNA, 33 bp, Homo sapien
tctggaatcctccccagtatctgacccggttaa

SEQ ID NO: 862497 - DNA, 33 bp, Homo sapien
ttttgcctccatgtcaacttggctctcctagga

SEQ ID NO: 862498 - DNA, 33 bp, Homo sapien
ttttgcctccatgtcagcttggctctcctagga

SEQ ID NO: 862499 - DNA, 33 bp, Homo sapien
ccttcctctagtcctcacttgctcagcatgtcc

SEQ ID NO: 862500 - DNA, 33 bp, Homo sapien
ccttcctctagtcctcgcttgctcagcatgtcc

SEQ ID NO: 862501 - DNA, 33 bp, Homo sapien
gcaagaagaagagcccacaggggagacacacaa

SEQ ID NO: 862502 - DNA, 33 bp, Homo sapien
gcaagaagaagagcccgcaggggagacacacaa

SEQ ID NO: 862503 - DNA, 33 bp, Homo sapien
ctttggcctagtgtgaaaattctgagttttgct

SEQ ID NO: 862504 - DNA, 33 bp, Homo sapien
ctttggcctagtgtgacaattctgagttttgct

SEQ ID NO: 862505 - DNA, 33 bp, Homo sapien
tcctcatctccggccaacttgcctattttctca

SEQ ID NO: 862506 - DNA, 33 bp, Homo sapien
tcctcatctccggccagcttgcctattttctca

SEQ ID NO: 862507 - DNA, 33 bp, Homo sapien
taagtaactggcctgcagacaccaagcttgtaa

SEQ ID NO: 862508 - DNA, 33 bp, Homo sapien
taagtaactggcctgcggacaccaagcttgtaa

SEQ ID NO: 862509 - DNA, 33 bp, Homo sapien
cagccacctgtggaaacccagggaacaggacat

SEQ ID NO: 862510 - DNA, 33 bp, Homo sapien
cagccacctgtggaaatccagggaacaggacat

SEQ ID NO: 862511 - DNA, 33 bp, Homo sapien
agaaagaacaaaataaaggtgatatctgggtgt

SEQ ID NO: 862512 - DNA, 33 bp, Homo sapien
agaaagaacaaaataatggtgatatctgggtgt

SEQ ID NO: 862513 - DNA, 33 bp, Homo sapien
tctaaatgattggagcggctaatgctttccacg

SEQ ID NO: 862514 - DNA, 33 bp, Homo sapien
tctaaatgattggagctgctaatgctttccacg

SEQ ID NO: 862515 - DNA, 33 bp, Homo sapien
tgcaacaaggggtaccaaacagtgtgtttaaga

SEQ ID NO: 862516 - DNA, 33 bp, Homo sapien
tgcaacaaggggtaccgaacagtgtgtttaaga

SEQ ID NO: 862517 - DNA, 33 bp, Homo sapien
aaaaagtcagattagacagatatgatatgaata

SEQ ID NO: 862518 - DNA, 33 bp, Homo sapien
aaaaagtcagattagatagatatgatatgaata

SEQ ID NO: 862519 - DNA, 33 bp, Homo sapien
gccacctaatgctagactaagaattgttgcaca

SEQ ID NO: 862520 - DNA, 33 bp, Homo sapien
gccacctaatgctagattaagaattgttgcaca

SEQ ID NO: 862521 - DNA, 33 bp, Homo sapien
gtgagatttttagtcacgccactttgtactgcc

SEQ ID NO: 862522 - DNA, 33 bp, Homo sapien
gtgagatttttagtcatgccactttgtactgcc

SEQ ID NO: 862523 - DNA, 33 bp, Homo sapien
acagggctacctgtgacgaagagcaggaatgga

SEQ ID NO: 862524 - DNA, 33 bp, Homo sapien
acagggctacctgtgatgaagagcaggaatgga

SEQ ID NO: 862525 - DNA, 33 bp, Homo sapien
ttggtggcataagtaacagaatagcccacaaaa

SEQ ID NO: 862526 - DNA, 33 bp, Homo sapien
ttggtggcataagtaatagaatagcccacaaaa

SEQ ID NO: 862527 - DNA, 33 bp, Homo sapien
agagtgcctgctatgacctacagaaatgacagg

SEQ ID NO: 862528 - DNA, 33 bp, Homo sapien
agagtgcctgctatgagctacagaaatgacagg

SEQ ID NO: 862529 - DNA, 33 bp, Homo sapien
cagccttttcaaaacacggatgcctgagccatg

SEQ ID NO: 862530 - DNA, 33 bp, Homo sapien
cagccttttcaaaacatggatgcctgagccatg

SEQ ID NO: 862531 - DNA, 33 bp, Homo sapien
gcctgaaatagccaacagtgagccttgtcaatt

SEQ ID NO: 862532 - DNA, 33 bp, Homo sapien
gcctgaaatagccaacggtgagccttgtcaatt

SEQ ID NO: 862533 - DNA, 33 bp, Homo sapien
caaggcatgatgtactaaaggaatttcatcatt

SEQ ID NO: 862534 - DNA, 33 bp, Homo sapien
caaggcatgatgtactcaaggaatttcatcatt

SEQ ID NO: 862535 - DNA, 33 bp, Homo sapien
acttcaggatagaagactcatggcagagggctc

SEQ ID NO: 862536 - DNA, 33 bp, Homo sapien
acttcaggatagaagattcatggcagagggctc

SEQ ID NO: 862537 - DNA, 33 bp, Homo sapien
ctacattctcagtggacagagttaatccattga

SEQ ID NO: 862538 - DNA, 33 bp, Homo sapien
ctacattctcagtggagagagttaatccattga

SEQ ID NO: 862539 - DNA, 33 bp, Homo sapien
gaatgggttcaactccacttatttctgaagcaa

SEQ ID NO: 862540 - DNA, 33 bp, Homo sapien
gaatgggttcaactccgcttatttctgaagcaa

SEQ ID NO: 862541 - DNA, 33 bp, Homo sapien
ccagagatggggacccacaaaaatattctaggt

SEQ ID NO: 862542 - DNA, 33 bp, Homo sapien
ccagagatggggacccgcaaaaatattctaggt

SEQ ID NO: 862543 - DNA, 33 bp, Homo sapien
attctgcgaacactaccgcttgtaaaagttatg

SEQ ID NO: 862544 - DNA, 33 bp, Homo sapien
attctgcgaacactactgcttgtaaaagttatg

SEQ ID NO: 862545 - DNA, 33 bp, Homo sapien
atcaaaagtggcaaaccaactgcactgcaatat

SEQ ID NO: 862546 - DNA, 33 bp, Homo sapien
atcaaaagtggcaaacgaactgcactgcaatat

SEQ ID NO: 862547 - DNA, 33 bp, Homo sapien
agttttccatcatgtaggtcatttatccctgtc

SEQ ID NO: 862548 - DNA, 33 bp, Homo sapien
agttttccatcatgtatgtcatttatccctgtc

SEQ ID NO: 862549 - DNA, 33 bp, Homo sapien
aaaaaatcaaagttcaatcttactagaatggat

SEQ ID NO: 862550 - DNA, 33 bp, Homo sapien
aaaaaatcaaagttcagtcttactagaatggat

SEQ ID NO: 862551 - DNA, 33 bp, Homo sapien
ctttcttgatggttggaaagaatcatttgggtg

SEQ ID NO: 862552 - DNA, 33 bp, Homo sapien
ctttcttgatggttgggaagaatcatttgggtg

SEQ ID NO: 862553 - DNA, 33 bp, Homo sapien
tacaactcaacatacaaaatacagaaaaaggac

SEQ ID NO: 862554 - DNA, 33 bp, Homo sapien
tacaactcaacatacataatacagaaaaaggac

SEQ ID NO: 862555 - DNA, 33 bp, Homo sapien
tttgctaaaagtacaaagagaccctgggcaagc

SEQ ID NO: 862556 - DNA, 33 bp, Homo sapien
tttgctaaaagtacaaggagaccctgggcaagc

SEQ ID NO: 862557 - DNA, 33 bp, Homo sapien
atttcaaaatacatcaaggaaatatatgttagg

SEQ ID NO: 862558 - DNA, 33 bp, Homo sapien
atttcaaaatacatcagggaaatatatgttagg

SEQ ID NO: 862559 - DNA, 33 bp, Homo sapien
tataaaaatcaaaacacaccatgccagtagaat

SEQ ID NO: 862560 - DNA, 33 bp, Homo sapien
tataaaaatcaaaacataccatgccagtagaat

SEQ ID NO: 862561 - DNA, 33 bp, Homo sapien
aatcttagaggtcatcaaatgactaacacatct

SEQ ID NO: 862562 - DNA, 33 bp, Homo sapien
aatcttagaggtcatcgaatgactaacacatct

SEQ ID NO: 862563 - DNA, 33 bp, Homo sapien
tgagtggacttacttcaaaggtgactaagagca

SEQ ID NO: 862564 - DNA, 33 bp, Homo sapien
tgagtggacttacttcgaaggtgactaagagca

SEQ ID NO: 862565 - DNA, 33 bp, Homo sapien
gcctcttgctgtaaaagggtgctcacgaaggga

SEQ ID NO: 862566 - DNA, 33 bp, Homo sapien
gcctcttgctgtaaaatggtgctcacgaaggga

SEQ ID NO: 862567 - DNA, 33 bp, Homo sapien
tgtgatcgttggcggaaattttggtaagtgttg

SEQ ID NO: 862568 - DNA, 33 bp, Homo sapien
tgtgatcgttggcggacattttggtaagtgttg

SEQ ID NO: 862569 - DNA, 33 bp, Homo sapien
actatttcagactgacagaaattatgcatttat

SEQ ID NO: 862570 - DNA, 33 bp, Homo sapien
actatttcagactgacggaaattatgcatttat

SEQ ID NO: 862571 - DNA, 33 bp, Homo sapien
ccccaggatgagatgacacattttagtgaattc

SEQ ID NO: 862572 - DNA, 33 bp, Homo sapien
ccccaggatgagatgatacattttagtgaattc

SEQ ID NO: 862573 - DNA, 33 bp, Homo sapien
gtggtgaagaataaacaaaaagcgttctgggct

SEQ ID NO: 862574 - DNA, 33 bp, Homo sapien
gtggtgaagaataaacgaaaagcgttctgggct

SEQ ID NO: 862575 - DNA, 33 bp, Homo sapien
cctgatgcttcacagacagtagaaggacctctg

SEQ ID NO: 862576 - DNA, 33 bp, Homo sapien
cctgatgcttcacagatagtagaaggacctctg

SEQ ID NO: 862577 - DNA, 33 bp, Homo sapien
gcagaaggaacctgaaacacatggacccttgtt

SEQ ID NO: 862578 - DNA, 33 bp, Homo sapien
gcagaaggaacctgaaccacatggacccttgtt

SEQ ID NO: 862579 - DNA, 33 bp, Homo sapien
cttcaacttttacacgacctgtaattcagtcat

SEQ ID NO: 862580 - DNA, 33 bp, Homo sapien
cttcaacttttacacggcctgtaattcagtcat

SEQ ID NO: 862581 - DNA, 33 bp, Homo sapien
atacaatctagtgacaataatttcagaatagca

SEQ ID NO: 862582 - DNA, 33 bp, Homo sapien
atacaatctagtgacagtaatttcagaatagca

SEQ ID NO: 862583 - DNA, 33 bp, Homo sapien
tcctcaacacttgatgcaaagtttctctcctat

SEQ ID NO: 862584 - DNA, 33 bp, Homo sapien
tcctcaacacttgatggaaagtttctctcctat

SEQ ID NO: 862585 - DNA, 33 bp, Homo sapien
tcctatctgcttgataaatgtgccatgttagag

SEQ ID NO: 862586 - DNA, 33 bp, Homo sapien
tcctatctgcttgatagatgtgccatgttagag

SEQ ID NO: 862587 - DNA, 33 bp, Homo sapien
atgtttgccaatgtcaatcggagtctttggatt

SEQ ID NO: 862588 - DNA, 33 bp, Homo sapien
atgtttgccaatgtcagtcggagtctttggatt

SEQ ID NO: 862589 - DNA, 33 bp, Homo sapien
tttgttagcattcctacgaaactgaaagtagag

SEQ ID NO: 862590 - DNA, 33 bp, Homo sapien
tttgttagcattcctatgaaactgaaagtagag

SEQ ID NO: 862591 - DNA, 33 bp, Homo sapien
tttgatcactgaaatactaaagtgatactaaag

SEQ ID NO: 862592 - DNA, 33 bp, Homo sapien
tttgatcactgaaatattaaagtgatactaaag

SEQ ID NO: 862593 - DNA, 33 bp, Homo sapien
tagtcttggcccaaaaatagttgttatgtatca

SEQ ID NO: 862594 - DNA, 33 bp, Homo sapien
tagtcttggcccaaaagtagttgttatgtatca

SEQ ID NO: 862595 - DNA, 33 bp, Homo sapien
ttccgttagcccaagaaggagaaaattgcttcc

SEQ ID NO: 862596 - DNA, 33 bp, Homo sapien
ttccgttagcccaagacggagaaaattgcttcc

SEQ ID NO: 862597 - DNA, 33 bp, Homo sapien
gactcccagggcaacaacaattaggaggaaggg

SEQ ID NO: 862598 - DNA, 33 bp, Homo sapien
gactcccagggcaacagcaattaggaggaaggg

SEQ ID NO: 862599 - DNA, 33 bp, Homo sapien
ctccttccattcagacacttatctactacttac

SEQ ID NO: 862600 - DNA, 33 bp, Homo sapien
ctccttccattcagacccttatctactacttac

SEQ ID NO: 862601 - DNA, 33 bp, Homo sapien
tgagattcctgagacacattcaagcagagatgt

SEQ ID NO: 862602 - DNA, 33 bp, Homo sapien
tgagattcctgagacatattcaagcagagatgt

SEQ ID NO: 862603 - DNA, 33 bp, Homo sapien
tttgaaaggaagacgacggcagttatgatcact

SEQ ID NO: 862604 - DNA, 33 bp, Homo sapien
tttgaaaggaagacgatggcagttatgatcact

SEQ ID NO: 862605 - DNA, 33 bp, Homo sapien
gtgtccttcacaaacacccataccagccatgtt

SEQ ID NO: 862606 - DNA, 33 bp, Homo sapien
gtgtccttcacaaacatccataccagccatgtt

SEQ ID NO: 862607 - DNA, 33 bp, Homo sapien
gtaaaacaacaaacaagttctatggtcaaataa

SEQ ID NO: 862608 - DNA, 33 bp, Homo sapien
gtaaaacaacaaacaatttctatggtcaaataa

SEQ ID NO: 862609 - DNA, 33 bp, Homo sapien
agttaaataatctgccaaatgttatacagattg

SEQ ID NO: 862610 - DNA, 33 bp, Homo sapien
agttaaataatctgcccaatgttatacagattg

SEQ ID NO: 862611 - DNA, 33 bp, Homo sapien
agttcttagaagaaagaaatgcttatttgcact

SEQ ID NO: 862612 - DNA, 33 bp, Homo sapien
agttcttagaagaaagtaatgcttatttgcact

SEQ ID NO: 862613 - DNA, 33 bp, Homo sapien
taacagtactttggacacacaggtttttattca

SEQ ID NO: 862614 - DNA, 33 bp, Homo sapien
taacagtactttggacgcacaggtttttattca

SEQ ID NO: 862615 - DNA, 33 bp, Homo sapien
attttaaagtaaatccaagctatcacattactt

SEQ ID NO: 862616 - DNA, 33 bp, Homo sapien
attttaaagtaaatcccagctatcacattactt

SEQ ID NO: 862617 - DNA, 33 bp, Homo sapien
ttttctttagcctacacgttaacggatccatca

SEQ ID NO: 862618 - DNA, 33 bp, Homo sapien
ttttctttagcctacatgttaacggatccatca

SEQ ID NO: 862619 - DNA, 33 bp, Homo sapien
taaatgaagggcctcacagaaaatgatcaacag

SEQ ID NO: 862620 - DNA, 33 bp, Homo sapien
taaatgaagggcctcagagaaaatgatcaacag

SEQ ID NO: 862621 - DNA, 33 bp, Homo sapien
tgtctttatcctattccctttcatcttttttag

SEQ ID NO: 862622 - DNA, 33 bp, Homo sapien
tgtctttatcctattctctttcatcttttttag

SEQ ID NO: 862623 - DNA, 33 bp, Homo sapien
agatgaccattaccaccattgaaagtgacttcc

SEQ ID NO: 862624 - DNA, 33 bp, Homo sapien
agatgaccattaccactattgaaagtgacttcc

SEQ ID NO: 862625 - DNA, 33 bp, Homo sapien
agcagagatagacacaaatgtcataatatctcc

SEQ ID NO: 862626 - DNA, 33 bp, Homo sapien
agcagagatagacacagatgtcataatatctcc

SEQ ID NO: 862627 - DNA, 33 bp, Homo sapien
cccttgttaggagagacgcttctgacccactgt

SEQ ID NO: 862628 - DNA, 33 bp, Homo sapien
cccttgttaggagagatgcttctgacccactgt

SEQ ID NO: 862629 - DNA, 33 bp, Homo sapien
ttcctgtaactctgcaataagtacttgagcaca

SEQ ID NO: 862630 - DNA, 33 bp, Homo sapien
ttcctgtaactctgcagtaagtacttgagcaca

SEQ ID NO: 862631 - DNA, 33 bp, Homo sapien
tcaatagaatgatcaaatgatgtctgagaagtt

SEQ ID NO: 862632 - DNA, 33 bp, Homo sapien
tcaatagaatgatcaagtgatgtctgagaagtt

SEQ ID NO: 862633 - DNA, 33 bp, Homo sapien
gggaaaaaataaatggcagccaatgttctgtca

SEQ ID NO: 862634 - DNA, 33 bp, Homo sapien
gggaaaaaataaatggtagccaatgttctgtca

SEQ ID NO: 862635 - DNA, 33 bp, Homo sapien
agatcaagggagacgacgtgccactttgtacag

SEQ ID NO: 862636 - DNA, 33 bp, Homo sapien
agatcaagggagacgatgtgccactttgtacag

SEQ ID NO: 862637 - DNA, 33 bp, Homo sapien
gaccacatggaccctgccacgcggaaatgaaaa

SEQ ID NO: 862638 - DNA, 33 bp, Homo sapien
gaccacatggaccctgtcacgcggaaatgaaaa

SEQ ID NO: 862639 - DNA, 33 bp, Homo sapien
ttactgacacaatttacacccagtagcatcaag

SEQ ID NO: 862640 - DNA, 33 bp, Homo sapien
ttactgacacaatttatacccagtagcatcaag

SEQ ID NO: 862641 - DNA, 33 bp, Homo sapien
tcattcatggaacctaataagtgaaagacccga

SEQ ID NO: 862642 - DNA, 33 bp, Homo sapien
tcattcatggaacctagtaagtgaaagacccga

SEQ ID NO: 862643 - DNA, 33 bp, Homo sapien
agccaccttggtccccaaactaaagtcaagaga

SEQ ID NO: 862644 - DNA, 33 bp, Homo sapien
agccaccttggtccccgaactaaagtcaagaga

SEQ ID NO: 862645 - DNA, 33 bp, Homo sapien
atgctctggtggccccccatctcacccagagta

SEQ ID NO: 862646 - DNA, 33 bp, Homo sapien
atgctctggtggccccgcatctcacccagagta

SEQ ID NO: 862647 - DNA, 33 bp, Homo sapien
tgctcagctaaacttcaaaactttcaagttctt

SEQ ID NO: 862648 - DNA, 33 bp, Homo sapien
tgctcagctaaacttccaaactttcaagttctt

SEQ ID NO: 862649 - DNA, 33 bp, Homo sapien
gctgttaaagggtctaaaagaaagccatattgc

SEQ ID NO: 862650 - DNA, 33 bp, Homo sapien
gctgttaaagggtctagaagaaagccatattgc

SEQ ID NO: 862651 - DNA, 33 bp, Homo sapien
agggaatatagttcacaaaaagagacatcccta

SEQ ID NO: 862652 - DNA, 33 bp, Homo sapien
agggaatatagttcacgaaaagagacatcccta

SEQ ID NO: 862653 - DNA, 33 bp, Homo sapien
tagtccaaggtgaagcagaccatgccagtgatt

SEQ ID NO: 862654 - DNA, 33 bp, Homo sapien
tagtccaaggtgaagccgaccatgccagtgatt

SEQ ID NO: 862655 - DNA, 33 bp, Homo sapien
tcttccccagaaaaaaacatagtcttaccacag

SEQ ID NO: 862656 - DNA, 33 bp, Homo sapien
tcttccccagaaaaaaccatagtcttaccacag

SEQ ID NO: 862657 - DNA, 33 bp, Homo sapien
ttaggcaaatctccacaaagggctgtattttcc

SEQ ID NO: 862658 - DNA, 33 bp, Homo sapien
ttaggcaaatctccacgaagggctgtattttcc

SEQ ID NO: 862659 - DNA, 33 bp, Homo sapien
gtcacaaatacaattcaaacactcgaaaacaca

SEQ ID NO: 862660 - DNA, 33 bp, Homo sapien
gtcacaaatacaattcgaacactcgaaaacaca

SEQ ID NO: 862661 - DNA, 33 bp, Homo sapien
taggatttacattgggacattatggagtacagg

SEQ ID NO: 862662 - DNA, 33 bp, Homo sapien
taggatttacattggggcattatggagtacagg

SEQ ID NO: 862663 - DNA, 33 bp, Homo sapien
ggggccacagaattatcagatgtctcccatgtt

SEQ ID NO: 862664 - DNA, 33 bp, Homo sapien
ggggccacagaattattagatgtctcccatgtt

SEQ ID NO: 862665 - DNA, 33 bp, Homo sapien
attttatccaagccacaatttaccagttccacc

SEQ ID NO: 862666 - DNA, 33 bp, Homo sapien
attttatccaagccacgatttaccagttccacc

SEQ ID NO: 862667 - DNA, 33 bp, Homo sapien
gggatcatggtgattcacgagaagagtttcaaa

SEQ ID NO: 862668 - DNA, 33 bp, Homo sapien
gggatcatggtgattcgcgagaagagtttcaaa

SEQ ID NO: 862669 - DNA, 33 bp, Homo sapien
tccttgaaaataaacaagtgtcctcattccaag

SEQ ID NO: 862670 - DNA, 33 bp, Homo sapien
tccttgaaaataaacaggtgtcctcattccaag

SEQ ID NO: 862671 - DNA, 33 bp, Homo sapien
aaatggcaggaaagaacgcaatggataaatgta

SEQ ID NO: 862672 - DNA, 33 bp, Homo sapien
aaatggcaggaaagaatgcaatggataaatgta

SEQ ID NO: 862673 - DNA, 33 bp, Homo sapien
cgtctaaactaagcaagtagattgataccatcc

SEQ ID NO: 862674 - DNA, 33 bp, Homo sapien
cgtctaaactaagcaattagattgataccatcc

SEQ ID NO: 862675 - DNA, 33 bp, Homo sapien
tgaaaagtgaagagaacgtttcatataaacaca

SEQ ID NO: 862676 - DNA, 33 bp, Homo sapien
tgaaaagtgaagagaatgtttcatataaacaca

SEQ ID NO: 862677 - DNA, 33 bp, Homo sapien
ggcaacttatttccaacgtgaaattctgagaac

SEQ ID NO: 862678 - DNA, 33 bp, Homo sapien
ggcaacttatttccaatgtgaaattctgagaac

SEQ ID NO: 862679 - DNA, 33 bp, Homo sapien
caagaagctcggtgaaacttaggcacaagaaac

SEQ ID NO: 862680 - DNA, 33 bp, Homo sapien
caagaagctcggtgaaccttaggcacaagaaac

SEQ ID NO: 862681 - DNA, 33 bp, Homo sapien
ttaagcaatttgattacaatgtacttggcatag

SEQ ID NO: 862682 - DNA, 33 bp, Homo sapien
ttaagcaatttgattataatgtacttggcatag

SEQ ID NO: 862683 - DNA, 33 bp, Homo sapien
tgcttattttacccacggtgatgacctctatct

SEQ ID NO: 862684 - DNA, 33 bp, Homo sapien
tgcttattttacccactgtgatgacctctatct

SEQ ID NO: 862685 - DNA, 33 bp, Homo sapien
tcaggacacatatttacgtttcattgatttttc

SEQ ID NO: 862686 - DNA, 33 bp, Homo sapien
tcaggacacatatttaggtttcattgatttttc

SEQ ID NO: 862687 - DNA, 33 bp, Homo sapien
atcacaagctcaagagcaatagtctttcaattc

SEQ ID NO: 862688 - DNA, 33 bp, Homo sapien
atcacaagctcaagagtaatagtctttcaattc

SEQ ID NO: 862689 - DNA, 33 bp, Homo sapien
aagtttcatcattaagactactgtttggtttgt

SEQ ID NO: 862690 - DNA, 33 bp, Homo sapien
aagtttcatcattaaggctactgtttggtttgt

SEQ ID NO: 862691 - DNA, 33 bp, Homo sapien
tttcaccttttagtcacggatatatatgaagta

SEQ ID NO: 862692 - DNA, 33 bp, Homo sapien
tttcaccttttagtcatggatatatatgaagta

SEQ ID NO: 862693 - DNA, 33 bp, Homo sapien
gtagagtcttcagcaaaatattggcaaagtagg

SEQ ID NO: 862694 - DNA, 33 bp, Homo sapien
gtagagtcttcagcaagatattggcaaagtagg

SEQ ID NO: 862695 - DNA, 33 bp, Homo sapien
accatgaataggaccactcagtttctaaacatc

SEQ ID NO: 862696 - DNA, 33 bp, Homo sapien
accatgaataggaccattcagtttctaaacatc

SEQ ID NO: 862697 - DNA, 33 bp, Homo sapien
ctccaaaaatagtaacaactaagcactcttctt

SEQ ID NO: 862698 - DNA, 33 bp, Homo sapien
ctccaaaaatagtaaccactaagcactcttctt

SEQ ID NO: 862699 - DNA, 33 bp, Homo sapien
gatttcaaaatatgaacgctgcaaaattgtgtt

SEQ ID NO: 862700 - DNA, 33 bp, Homo sapien
gatttcaaaatatgaatgctgcaaaattgtgtt

SEQ ID NO: 862701 - DNA, 33 bp, Homo sapien
gaagatacaaagtgaagagtaaatcagtgagga

SEQ ID NO: 862702 - DNA, 33 bp, Homo sapien
gaagatacaaagtgaatagtaaatcagtgagga

SEQ ID NO: 862703 - DNA, 33 bp, Homo sapien
tgtttaatttctacacactcgggtggctgcttt

SEQ ID NO: 862704 - DNA, 33 bp, Homo sapien
tgtttaatttctacacgctcgggtggctgcttt

SEQ ID NO: 862705 - DNA, 33 bp, Homo sapien
tcctattatgttatcaccaaaataaacactaaa

SEQ ID NO: 862706 - DNA, 33 bp, Homo sapien
tcctattatgttatcatcaaaataaacactaaa

SEQ ID NO: 862707 - DNA, 33 bp, Homo sapien
tgtcatcgttttttcccatctttcctttctgtg

SEQ ID NO: 862708 - DNA, 33 bp, Homo sapien
tgtcatcgttttttcctatctttcctttctgtg

SEQ ID NO: 862709 - DNA, 33 bp, Homo sapien
agggaagcctgaataaagaacctaaggtaggag

SEQ ID NO: 862710 - DNA, 33 bp, Homo sapien
agggaagcctgaataaggaacctaaggtaggag

SEQ ID NO: 862711 - DNA, 33 bp, Homo sapien
ggcattttaaaagctcaaacttcatctttaaaa

SEQ ID NO: 862712 - DNA, 33 bp, Homo sapien
ggcattttaaaagctcgaacttcatctttaaaa

SEQ ID NO: 862713 - DNA, 33 bp, Homo sapien
tctggcagtagcagcacgaaaagggaatgacga

SEQ ID NO: 862714 - DNA, 33 bp, Homo sapien
tctggcagtagcagcaggaaaagggaatgacga

SEQ ID NO: 862715 - DNA, 33 bp, Homo sapien
gttttacttgtagttcacttttggctccatcta

SEQ ID NO: 862716 - DNA, 33 bp, Homo sapien
gttttacttgtagttcgcttttggctccatcta

SEQ ID NO: 862717 - DNA, 33 bp, Homo sapien
ctgtgactttattacaatcgtactgagttctga

SEQ ID NO: 862718 - DNA, 33 bp, Homo sapien
ctgtgactttattacagtcgtactgagttctga

SEQ ID NO: 862719 - DNA, 33 bp, Homo sapien
tgtctaatgctatatacggtaagtgggagaaac

SEQ ID NO: 862720 - DNA, 33 bp, Homo sapien
tgtctaatgctatatatggtaagtgggagaaac

SEQ ID NO: 862721 - DNA, 33 bp, Homo sapien
acaatgtcaaaatgataagcagacatgggcaat

SEQ ID NO: 862722 - DNA, 33 bp, Homo sapien
acaatgtcaaaatgatcagcagacatgggcaat

SEQ ID NO: 862723 - DNA, 33 bp, Homo sapien
tttttgtgtgcgtggtgaaggacagaatgtgat

SEQ ID NO: 862724 - DNA, 33 bp, Homo sapien
tttttgtgtgcgtggttaaggacagaatgtgat

SEQ ID NO: 862725 - DNA, 33 bp, Homo sapien
agagtcaatgtgaaaggctattcaacgcactcc

SEQ ID NO: 862726 - DNA, 33 bp, Homo sapien
agagtcaatgtgaaagtctattcaacgcactcc

SEQ ID NO: 862727 - DNA, 33 bp, Homo sapien
tcttcatgtgttccaacaggtaattttggacaa

SEQ ID NO: 862728 - DNA, 33 bp, Homo sapien
tcttcatgtgttccaataggtaattttggacaa

SEQ ID NO: 862729 - DNA, 33 bp, Homo sapien
acaattgggttagcaagaaatccaaaactaaaa

SEQ ID NO: 862730 - DNA, 33 bp, Homo sapien
acaattgggttagcaataaatccaaaactaaaa

SEQ ID NO: 862731 - DNA, 33 bp, Homo sapien
cccagtaggaacaactaagaacattttgaagat

SEQ ID NO: 862732 - DNA, 33 bp, Homo sapien
cccagtaggaacaactcagaacattttgaagat

SEQ ID NO: 862733 - DNA, 33 bp, Homo sapien
ttggtttagtggaataaataagtctcctcacta

SEQ ID NO: 862734 - DNA, 33 bp, Homo sapien
ttggtttagtggaatacataagtctcctcacta

SEQ ID NO: 862735 - DNA, 33 bp, Homo sapien
ccacgtgtttggaaaactcttcatagacacatg

SEQ ID NO: 862736 - DNA, 33 bp, Homo sapien
ccacgtgtttggaaaattcttcatagacacatg

SEQ ID NO: 862737 - DNA, 33 bp, Homo sapien
aaaagtataccaagacagagtgaagggagctca

SEQ ID NO: 862738 - DNA, 33 bp, Homo sapien
aaaagtataccaagacggagtgaagggagctca

SEQ ID NO: 862739 - DNA, 33 bp, Homo sapien
aaaataacaggaaaccagagatggaagcattag

SEQ ID NO: 862740 - DNA, 33 bp, Homo sapien
aaaataacaggaaaccggagatggaagcattag

SEQ ID NO: 862741 - DNA, 33 bp, Homo sapien
tcacataaaccaggaacaatctcataatgtgtc

SEQ ID NO: 862742 - DNA, 33 bp, Homo sapien
tcacataaaccaggaataatctcataatgtgtc

SEQ ID NO: 862743 - DNA, 33 bp, Homo sapien
atgccaacctaagaaaaaaatgcctttgaactg

SEQ ID NO: 862744 - DNA, 33 bp, Homo sapien
atgccaacctaagaaagaaatgcctttgaactg

SEQ ID NO: 862745 - DNA, 33 bp, Homo sapien
gccctatatatgccaacagttgttacaattgtt

SEQ ID NO: 862746 - DNA, 33 bp, Homo sapien
gccctatatatgccaagagttgttacaattgtt

SEQ ID NO: 862747 - DNA, 33 bp, Homo sapien
aaactcatgaataatccacaccctgtttagcat

SEQ ID NO: 862748 - DNA, 33 bp, Homo sapien
aaactcatgaataatcgacaccctgtttagcat

SEQ ID NO: 862749 - DNA, 33 bp, Homo sapien
taacagctgagcagcaaaaatacaaagacagca

SEQ ID NO: 862750 - DNA, 33 bp, Homo sapien
taacagctgagcagcagaaatacaaagacagca

SEQ ID NO: 862751 - DNA, 33 bp, Homo sapien
cctgcaggtgaactaacggctgagagaaactac

SEQ ID NO: 862752 - DNA, 33 bp, Homo sapien
cctgcaggtgaactaatggctgagagaaactac

SEQ ID NO: 862753 - DNA, 33 bp, Homo sapien
agagaagttatagaaaagagtcaaaactaggga

SEQ ID NO: 862754 - DNA, 33 bp, Homo sapien
agagaagttatagaaaggagtcaaaactaggga

SEQ ID NO: 862755 - DNA, 33 bp, Homo sapien
actgtctggaatcagcaacaatgttaggaagaa

SEQ ID NO: 862756 - DNA, 33 bp, Homo sapien
actgtctggaatcagcgacaatgttaggaagaa

SEQ ID NO: 862757 - DNA, 33 bp, Homo sapien
cacaagtttacctgcacaacaaacctgaacttg

SEQ ID NO: 862758 - DNA, 33 bp, Homo sapien
cacaagtttacctgcataacaaacctgaacttg

SEQ ID NO: 862759 - DNA, 33 bp, Homo sapien
gccctcaccccattaaactctaaaacagcattt

SEQ ID NO: 862760 - DNA, 33 bp, Homo sapien
gccctcaccccattaacctctaaaacagcattt

SEQ ID NO: 862761 - DNA, 33 bp, Homo sapien
tgtgtgggggtatgaacaagtaagtgtgagtaa

SEQ ID NO: 862762 - DNA, 33 bp, Homo sapien
tgtgtgggggtatgaataagtaagtgtgagtaa

SEQ ID NO: 862763 - DNA, 33 bp, Homo sapien
tgtagtctagttagcagtattgtgcaaatgtca

SEQ ID NO: 862764 - DNA, 33 bp, Homo sapien
tgtagtctagttagcattattgtgcaaatgtca

SEQ ID NO: 862765 - DNA, 33 bp, Homo sapien
cttggaccctgtaagactcaaggctgagagact

SEQ ID NO: 862766 - DNA, 33 bp, Homo sapien
cttggaccctgtaagattcaaggctgagagact

SEQ ID NO: 862767 - DNA, 33 bp, Homo sapien
tcagttttattccttacactcaggatcacttca

SEQ ID NO: 862768 - DNA, 33 bp, Homo sapien
tcagttttattccttatactcaggatcacttca

SEQ ID NO: 862769 - DNA, 33 bp, Homo sapien
aagtcttagaatgcaaggaacatttcctgaaat

SEQ ID NO: 862770 - DNA, 33 bp, Homo sapien
aagtcttagaatgcaatgaacatttcctgaaat

SEQ ID NO: 862771 - DNA, 33 bp, Homo sapien
gaatctccaactttcacataggaaatcaataga

SEQ ID NO: 862772 - DNA, 33 bp, Homo sapien
gaatctccaactttcatataggaaatcaataga

SEQ ID NO: 862773 - DNA, 33 bp, Homo sapien
cagcacatgatgttaaagtggtgagagaagaac

SEQ ID NO: 862774 - DNA, 33 bp, Homo sapien
cagcacatgatgttaaggtggtgagagaagaac

SEQ ID NO: 862775 - DNA, 33 bp, Homo sapien
agagagaatgtgctaccatccactaaagcattt

SEQ ID NO: 862776 - DNA, 33 bp, Homo sapien
agagagaatgtgctactatccactaaagcattt

SEQ ID NO: 862777 - DNA, 33 bp, Homo sapien
tcaagcgacagtgaagaagtgtgttcaagcctg

SEQ ID NO: 862778 - DNA, 33 bp, Homo sapien
tcaagcgacagtgaagcagtgtgttcaagcctg

SEQ ID NO: 862779 - DNA, 33 bp, Homo sapien
cctatgtaagcaaacccaaatctaactcagaat

SEQ ID NO: 862780 - DNA, 33 bp, Homo sapien
cctatgtaagcaaacctaaatctaactcagaat

SEQ ID NO: 862781 - DNA, 33 bp, Homo sapien
ttcgtggtgctaggaaactttttatttctcttc

SEQ ID NO: 862782 - DNA, 33 bp, Homo sapien
ttcgtggtgctaggaagctttttatttctcttc

SEQ ID NO: 862783 - DNA, 33 bp, Homo sapien
aagaatctgcacttcaaccagagcttagtatcc

SEQ ID NO: 862784 - DNA, 33 bp, Homo sapien
aagaatctgcacttcatccagagcttagtatcc

SEQ ID NO: 862785 - DNA, 33 bp, Homo sapien
agtgctgaaaccaggacggatatggaaaaacta

SEQ ID NO: 862786 - DNA, 33 bp, Homo sapien
agtgctgaaaccaggatggatatggaaaaacta

SEQ ID NO: 862787 - DNA, 33 bp, Homo sapien
gagtcaaagtcagtgacattcattttatacctt

SEQ ID NO: 862788 - DNA, 33 bp, Homo sapien
gagtcaaagtcagtgatattcattttatacctt

SEQ ID NO: 862789 - DNA, 33 bp, Homo sapien
gtgagctacacagttacatagaagagcttagaa

SEQ ID NO: 862790 - DNA, 33 bp, Homo sapien
gtgagctacacagttagatagaagagcttagaa

SEQ ID NO: 862791 - DNA, 33 bp, Homo sapien
ggcaaggccaagcaaaatgtgatttgggctctc

SEQ ID NO: 862792 - DNA, 33 bp, Homo sapien
ggcaaggccaagcaaactgtgatttgggctctc

SEQ ID NO: 862793 - DNA, 33 bp, Homo sapien
gaaaccaatccatgagcatcactttccttcctt

SEQ ID NO: 862794 - DNA, 33 bp, Homo sapien
gaaaccaatccatgagtatcactttccttcctt

SEQ ID NO: 862795 - DNA, 33 bp, Homo sapien
catccaggacacagaacacacggttgaatatct

SEQ ID NO: 862796 - DNA, 33 bp, Homo sapien
catccaggacacagaatacacggttgaatatct

SEQ ID NO: 862797 - DNA, 33 bp, Homo sapien
cctctgcgcctctcaccccgacacttcctgtta

SEQ ID NO: 862798 - DNA, 33 bp, Homo sapien
cctctgcgcctctcactccgacacttcctgtta

SEQ ID NO: 862799 - DNA, 33 bp, Homo sapien
gggacagcagctttcacaggattccccgttcag

SEQ ID NO: 862800 - DNA, 33 bp, Homo sapien
gggacagcagctttcataggattccccgttcag

SEQ ID NO: 862801 - DNA, 33 bp, Homo sapien
tctaaatttagcctaagtatcccctggttcttt

SEQ ID NO: 862802 - DNA, 33 bp, Homo sapien
tctaaatttagcctaattatcccctggttcttt

SEQ ID NO: 862803 - DNA, 33 bp, Homo sapien
taatttcacgatcacaggtttttttcacgtttt

SEQ ID NO: 862804 - DNA, 33 bp, Homo sapien
taatttcacgatcacatgtttttttcacgtttt

SEQ ID NO: 862805 - DNA, 33 bp, Homo sapien
aatactgaggggagaagaccaggccctggtgga

SEQ ID NO: 862806 - DNA, 33 bp, Homo sapien
aatactgaggggagaataccaggccctggtgga

SEQ ID NO: 862807 - DNA, 33 bp, Homo sapien
tttaaaacatgatagacagccattaagtcagtc

SEQ ID NO: 862808 - DNA, 33 bp, Homo sapien
tttaaaacatgatagatagccattaagtcagtc

SEQ ID NO: 862809 - DNA, 33 bp, Homo sapien
cccagagtccatgatgaagtagagatgaaacaa

SEQ ID NO: 862810 - DNA, 33 bp, Homo sapien
cccagagtccatgatggagtagagatgaaacaa

SEQ ID NO: 862811 - DNA, 33 bp, Homo sapien
tatgcaagtctctttccctgcttctttgttcct

SEQ ID NO: 862812 - DNA, 33 bp, Homo sapien
tatgcaagtctctttctctgcttctttgttcct

SEQ ID NO: 862813 - DNA, 33 bp, Homo sapien
gggaaagtctaagttacgctaatagaagaaata

SEQ ID NO: 862814 - DNA, 33 bp, Homo sapien
gggaaagtctaagttatgctaatagaagaaata

SEQ ID NO: 862815 - DNA, 33 bp, Homo sapien
gagagtcagagaaagacgtgattaaaaataaaa

SEQ ID NO: 862816 - DNA, 33 bp, Homo sapien
gagagtcagagaaagatgtgattaaaaataaaa

SEQ ID NO: 862817 - DNA, 33 bp, Homo sapien
taaagactatgtgagacgtaaatataggcaaca

SEQ ID NO: 862818 - DNA, 33 bp, Homo sapien
taaagactatgtgagatgtaaatataggcaaca

SEQ ID NO: 862819 - DNA, 33 bp, Homo sapien
caaaatctaaatccaacggaggtggtagtagtg

SEQ ID NO: 862820 - DNA, 33 bp, Homo sapien
caaaatctaaatccaatggaggtggtagtagtg

SEQ ID NO: 862821 - DNA, 33 bp, Homo sapien
atcacactgattgatacgcatacgttgaaccat

SEQ ID NO: 862822 - DNA, 33 bp, Homo sapien
atcacactgattgatatgcatacgttgaaccat

SEQ ID NO: 862823 - DNA, 33 bp, Homo sapien; identical to SEQ ID NO: 862821

SEQ ID NO: 862824 - DNA, 33 bp, Homo sapien; identical to SEQ ID NO: 862822

SEQ ID NO: 862825 - DNA, 33 bp, Homo sapien
cagaaatgtgcagcccaatacagatatgttaac

SEQ ID NO: 862826 - DNA, 33 bp, Homo sapien
cagaaatgtgcagcccgatacagatatgttaac

SEQ ID NO: 862827 - DNA, 33 bp, Homo sapien
gataacaaatgacttacgaactgacactgatcc

SEQ ID NO: 862828 - DNA, 33 bp, Homo sapien
gataacaaatgacttatgaactgacactgatcc

SEQ ID NO: 862829 - DNA, 33 bp, Homo sapien
agtggtgaaagtagatgatatacacctattata

SEQ ID NO: 862830 - DNA, 33 bp, Homo sapien
agtggtgaaagtagattatatacacctattata

SEQ ID NO: 862831 - DNA, 33 bp, Homo sapien
aaaggcaattgagaaaatgaaatagaacaagga

SEQ ID NO: 862832 - DNA, 33 bp, Homo sapien
aaaggcaattgagaaagtgaaatagaacaagga

SEQ ID NO: 862833 - DNA, 33 bp, Homo sapien
gaaagcaattggtagacggatgatagaaaataa

SEQ ID NO: 862834 - DNA, 33 bp, Homo sapien
gaaagcaattggtagatggatgatagaaaataa

SEQ ID NO: 862835 - DNA, 33 bp, Homo sapien
tagttgattgttttgacatctataggcatactt

SEQ ID NO: 862836 - DNA, 33 bp, Homo sapien
tagttgattgttttgatatctataggcatactt

SEQ ID NO: 862837 - DNA, 33 bp, Homo sapien
aaggcaaaattgtgcaatccctataaaaacagc

SEQ ID NO: 862838 - DNA, 33 bp, Homo sapien
aaggcaaaattgtgcagtccctataaaaacagc

SEQ ID NO: 862839 - DNA, 33 bp, Homo sapien
tatcaattgttcctcacgagtttaagcctatat

SEQ ID NO: 862840 - DNA, 33 bp, Homo sapien
tatcaattgttcctcatgagtttaagcctatat

SEQ ID NO: 862841 - DNA, 33 bp, Homo sapien
ttaaagtaagcagacaaatcagtttctgatagc

SEQ ID NO: 862842 - DNA, 33 bp, Homo sapien
ttaaagtaagcagacatatcagtttctgatagc

SEQ ID NO: 862843 - DNA, 33 bp, Homo sapien
tctttaaaaaagctacccatgttgagtgtattg

SEQ ID NO: 862844 - DNA, 33 bp, Homo sapien
tctttaaaaaagctactcatgttgagtgtattg

SEQ ID NO: 862845 - DNA, 33 bp, Homo sapien
ctcttaagcatgcggaaactgcattctaagaaa

SEQ ID NO: 862846 - DNA, 33 bp, Homo sapien
ctcttaagcatgcggagactgcattctaagaaa

SEQ ID NO: 862847 - DNA, 33 bp, Homo sapien
gttaactttaccatcaatgaggatttggaggcc

SEQ ID NO: 862848 - DNA, 33 bp, Homo sapien
gttaactttaccatcagtgaggatttggaggcc

SEQ ID NO: 862849 - DNA, 33 bp, Homo sapien
actgagtgactccacaccattcatcaaagagtg

SEQ ID NO: 862850 - DNA, 33 bp, Homo sapien
actgagtgactccacagcattcatcaaagagtg

SEQ ID NO: 862851 - DNA, 33 bp, Homo sapien
gggggctgggagaatagatgttgattattaaaa

SEQ ID NO: 862852 - DNA, 33 bp, Homo sapien
gggggctgggagaatatatgttgattattaaaa

SEQ ID NO: 862853 - DNA, 33 bp, Homo sapien
atacaagctgaaaataaaagcatccatcaaaac

SEQ ID NO: 862854 - DNA, 33 bp, Homo sapien
atacaagctgaaaatagaagcatccatcaaaac

SEQ ID NO: 862855 - DNA, 33 bp, Homo sapien
tggacaacctactcataacattacctaaagaat

SEQ ID NO: 862856 - DNA, 33 bp, Homo sapien
tggacaacctactcatgacattacctaaagaat

SEQ ID NO: 862857 - DNA, 33 bp, Homo sapien
ggataaagctggtatactagtattcactttcaa

SEQ ID NO: 862858 - DNA, 33 bp, Homo sapien
ggataaagctggtatattagtattcactttcaa

SEQ ID NO: 862859 - DNA, 33 bp, Homo sapien
atatggaacaaaaaaacagaccacataggcaag

SEQ ID NO: 862860 - DNA, 33 bp, Homo sapien
atatggaacaaaaaaagagaccacataggcaag

SEQ ID NO: 862861 - DNA, 33 bp, Homo sapien; identical to SEQ ID NO: 862859

SEQ ID NO: 862862 - DNA, 33 bp, Homo sapien; identical to SEQ ID NO: 862860

SEQ ID NO: 862863 - DNA, 33 bp, Homo sapien
aggcattatgaatcacagatcaatgaaactctt

SEQ ID NO: 862864 - DNA, 33 bp, Homo sapien
aggcattatgaatcactgatcaatgaaactctt

SEQ ID NO: 862865 - DNA, 33 bp, Homo sapien
ctttatagagcaggtaaaaactgagctgaattt

SEQ ID NO: 862866 - DNA, 33 bp, Homo sapien
ctttatagagcaggtacaaactgagctgaattt

SEQ ID NO: 862867 - DNA, 33 bp, Homo sapien
tgtgtgtggctgaagagaattggctgcaaaaga

SEQ ID NO: 862868 - DNA, 33 bp, Homo sapien
tgtgtgtggctgaagataattggctgcaaaaga

SEQ ID NO: 862869 - DNA, 33 bp, Homo sapien
gaaagtgagattttaaatactttccaggtgtgt

SEQ ID NO: 862870 - DNA, 33 bp, Homo sapien
gaaagtgagattttaagtactttccaggtgtgt

SEQ ID NO: 862871 - DNA, 33 bp, Homo sapien
ccaactgaaaagggaacctgagcagtgggaaag

SEQ ID NO: 862872 - DNA, 33 bp, Homo sapien
ccaactgaaaagggaatctgagcagtgggaaag

SEQ ID NO: 862873 - DNA, 33 bp, Homo sapien
gatacataattttaaaacatgaaatttgccatc

SEQ ID NO: 862874 - DNA, 33 bp, Homo sapien
gatacataattttaaatcatgaaatttgccatc

SEQ ID NO: 862875 - DNA, 33 bp, Homo sapien
taattgcctcagtataaaacaagagaacctata

SEQ ID NO: 862876 - DNA, 33 bp, Homo sapien
taattgcctcagtatagaacaagagaacctata

SEQ ID NO: 862877 - DNA, 33 bp, Homo sapien
aattcatgtattttccccactttacagataaga

SEQ ID NO: 862878 - DNA, 33 bp, Homo sapien
aattcatgtattttccgcactttacagataaga

SEQ ID NO: 862879 - DNA, 33 bp, Homo sapien
attaagtgactctccaactgtcaagggttgagt

SEQ ID NO: 862880 - DNA, 33 bp, Homo sapien
attaagtgactctccacctgtcaagggttgagt

SEQ ID NO: 862881 - DNA, 33 bp, Homo sapien
aaatcctgacaaggtaaaaatgagacagctgaa

SEQ ID NO: 862882 - DNA, 33 bp, Homo sapien
aaatcctgacaaggtagaaatgagacagctgaa

SEQ ID NO: 862883 - DNA, 33 bp, Homo sapien
aagaagacaacaaatacaacccagaggaaacac

SEQ ID NO: 862884 - DNA, 33 bp, Homo sapien
aagaagacaacaaatagaacccagaggaaacac

SEQ ID NO: 862885 - DNA, 33 bp, Homo sapien
ggacaaagcagtttcagtaaaatggtgggtaca

SEQ ID NO: 862886 - DNA, 33 bp, Homo sapien
ggacaaagcagtttcattaaaatggtgggtaca

SEQ ID NO: 862887 - DNA, 33 bp, Homo sapien
gtgtctatcatttaacaaatatcatgctctctt

SEQ ID NO: 862888 - DNA, 33 bp, Homo sapien
gtgtctatcatttaaccaatatcatgctctctt

SEQ ID NO: 862889 - DNA, 33 bp, Homo sapien
gaaagacaaagcctcaaaaaacaccatagttat

SEQ ID NO: 862890 - DNA, 33 bp, Homo sapien
gaaagacaaagcctcacaaaacaccatagttat

SEQ ID NO: 862891 - DNA, 33 bp, Homo sapien
gattagccagtgctgaacagaccacaggatgac

SEQ ID NO: 862892 - DNA, 33 bp, Homo sapien
gattagccagtgctgagcagaccacaggatgac

SEQ ID NO: 862893 - DNA, 33 bp, Homo sapien
tggaggcactgcactagacatttttttctgatc

SEQ ID NO: 862894 - DNA, 33 bp, Homo sapien
tggaggcactgcactatacatttttttctgatc

SEQ ID NO: 862895 - DNA, 33 bp, Homo sapien
agtgtaggagattttagggtaaccatttcacaa

SEQ ID NO: 862896 - DNA, 33 bp, Homo sapien
agtgtaggagattttatggtaaccatttcacaa

SEQ ID NO: 862897 - DNA, 33 bp, Homo sapien
tgtggaaagatacaagacctaaaatggagtaat

SEQ ID NO: 862898 - DNA, 33 bp, Homo sapien
tgtggaaagatacaaggcctaaaatggagtaat

SEQ ID NO: 862899 - DNA, 33 bp, Homo sapien
gagtcagtgggagcaacgtgttgaataatttta

SEQ ID NO: 862900 - DNA, 33 bp, Homo sapien
gagtcagtgggagcaatgtgttgaataatttta

SEQ ID NO: 862901 - DNA, 33 bp, Homo sapien
atctataagacctttgaacatcctctaccactg

SEQ ID NO: 862902 - DNA, 33 bp, Homo sapien
atctataagacctttgcacatcctctaccactg

SEQ ID NO: 862903 - DNA, 33 bp, Homo sapien
taaactactgcaggcacattgaagacctaagaa

SEQ ID NO: 862904 - DNA, 33 bp, Homo sapien
taaactactgcaggcatattgaagacctaagaa

SEQ ID NO: 862905 - DNA, 33 bp, Homo sapien
ggcatgatgacagtaggaccgtaaagaaaggga

SEQ ID NO: 862906 - DNA, 33 bp, Homo sapien
ggcatgatgacagtagtaccgtaaagaaaggga

SEQ ID NO: 862907 - DNA, 33 bp, Homo sapien
ctatagcactgaaggacgagtatagctaatgat

SEQ ID NO: 862908 - DNA, 33 bp, Homo sapien
ctatagcactgaaggatgagtatagctaatgat

SEQ ID NO: 862909 - DNA, 33 bp, Homo sapien
cttataagctcttgtacgaatgtatctgtccac

SEQ ID NO: 862910 - DNA, 33 bp, Homo sapien
cttataagctcttgtatgaatgtatctgtccac

SEQ ID NO: 862911 - DNA, 33 bp, Homo sapien
aatccactcactcatggaactgcatccacccat

SEQ ID NO: 862912 - DNA, 33 bp, Homo sapien
aatccactcactcatgtaactgcatccacccat

SEQ ID NO: 862913 - DNA, 33 bp, Homo sapien
tattaaacaatgataaaagaacaactataaaca

SEQ ID NO: 862914 - DNA, 33 bp, Homo sapien
tattaaacaatgataagagaacaactataaaca

SEQ ID NO: 862915 - DNA, 33 bp, Homo sapien
ttatgcttggcataatcagtgagcaaaagaaag

SEQ ID NO: 862916 - DNA, 33 bp, Homo sapien
ttatgcttggcataattagtgagcaaaagaaag

SEQ ID NO: 862917 - DNA, 33 bp, Homo sapien
tgttatatgctttagaagaaaaaaacacacatt

SEQ ID NO: 862918 - DNA, 33 bp, Homo sapien
tgttatatgctttagaggaaaaaaacacacatt

SEQ ID NO: 862919 - DNA, 33 bp, Homo sapien
ttactgtaaagggtcacaatatacttgcagaag

SEQ ID NO: 862920 - DNA, 33 bp, Homo sapien
ttactgtaaagggtcagaatatacttgcagaag

SEQ ID NO: 862921 - DNA, 33 bp, Homo sapien
atgtattgaaaacttgaaaaaatgggaactgga

SEQ ID NO: 862922 - DNA, 33 bp, Homo sapien
atgtattgaaaacttggaaaaatgggaactgga

SEQ ID NO: 862923 - DNA, 33 bp, Homo sapien
tttggtatgtgctaagaagtggatgtctatgtg

SEQ ID NO: 862924 - DNA, 33 bp, Homo sapien
tttggtatgtgctaagcagtggatgtctatgtg

SEQ ID NO: 862925 - DNA, 33 bp, Homo sapien
tgatgactatcttttacctatgctatcttttat

SEQ ID NO: 862926 - DNA, 33 bp, Homo sapien
tgatgactatcttttatctatgctatcttttat

SEQ ID NO: 862927 - DNA, 33 bp, Homo sapien
ttagttgatttcaaaaggcctccgttaagtacg

SEQ ID NO: 862928 - DNA, 33 bp, Homo sapien
ttagttgatttcaaaatgcctccgttaagtacg

SEQ ID NO: 862929 - DNA, 33 bp, Homo sapien
ttccagaccgcgtatcaccagtcacagtccctc

SEQ ID NO: 862930 - DNA, 33 bp, Homo sapien
ttccagaccgcgtatccccagtcacagtccctc

SEQ ID NO: 862931 - DNA, 33 bp, Homo sapien
agatgaacttcaacaaattattttgccactcca

SEQ ID NO: 862932 - DNA, 33 bp, Homo sapien
agatgaacttcaacaagttattttgccactcca

SEQ ID NO: 862933 - DNA, 33 bp, Homo sapien
ttgcattttagaaataacactctcacaactatg

SEQ ID NO: 862934 - DNA, 33 bp, Homo sapien
ttgcattttagaaatatcactctcacaactatg

SEQ ID NO: 862935 - DNA, 33 bp, Homo sapien
cccaatccttcagcataaaacaacttagtaact

SEQ ID NO: 862936 - DNA, 33 bp, Homo sapien
cccaatccttcagcatgaaacaacttagtaact

SEQ ID NO: 862937 - DNA, 33 bp, Homo sapien
agcataaattcgcccagtactcagaacaagccc

SEQ ID NO: 862938 - DNA, 33 bp, Homo sapien
agcataaattcgcccattactcagaacaagccc

SEQ ID NO: 862939 - DNA, 33 bp, Homo sapien
agtttttctgttggcacataaggagaacacagg

SEQ ID NO: 862940 - DNA, 33 bp, Homo sapien
agtttttctgttggcatataaggagaacacagg

SEQ ID NO: 862941 - DNA, 33 bp, Homo sapien
tttgtaagtagaaaaactgaatcatcctagagc

SEQ ID NO: 862942 - DNA, 33 bp, Homo sapien
tttgtaagtagaaaaattgaatcatcctagagc

SEQ ID NO: 862943 - DNA, 33 bp, Homo sapien
cctgcaatagctccacaaacatataaaactcta

SEQ ID NO: 862944 - DNA, 33 bp, Homo sapien
cctgcaatagctccacgaacatataaaactcta

SEQ ID NO: 862945 - DNA, 33 bp, Homo sapien
aactggtcctagaaccagaaggttgacatcaaa

SEQ ID NO: 862946 - DNA, 33 bp, Homo sapien
aactggtcctagaaccggaaggttgacatcaaa

SEQ ID NO: 862947 - DNA, 33 bp, Homo sapien
ctgattctgcttcacagatttgtctttctgtct

SEQ ID NO: 862948 - DNA, 33 bp, Homo sapien
ctgattctgcttcacatatttgtctttctgtct

SEQ ID NO: 862949 - DNA, 33 bp, Homo sapien
agtggacacagcatgaatcacaattatcttctt

SEQ ID NO: 862950 - DNA, 33 bp, Homo sapien
agtggacacagcatgagtcacaattatcttctt

SEQ ID NO: 862951 - DNA, 33 bp, Homo sapien
tgcagtctgcgtccagccaggaaactagaaact

SEQ ID NO: 862952 - DNA, 33 bp, Homo sapien
tgcagtctgcgtccagtcaggaaactagaaact

SEQ ID NO: 862953 - DNA, 33 bp, Homo sapien
ttctttcgtatctgaaatcaaaatctagatgta

SEQ ID NO: 862954 - DNA, 33 bp, Homo sapien
ttctttcgtatctgaagtcaaaatctagatgta

SEQ ID NO: 862955 - DNA, 33 bp, Homo sapien
ttgggggtcatcttagaataatatctaccacaa

SEQ ID NO: 862956 - DNA, 33 bp, Homo sapien
ttgggggtcatcttaggataatatctaccacaa

SEQ ID NO: 862957 - DNA, 33 bp, Homo sapien
catacatacttcagtaaatacatacttcaatat

SEQ ID NO: 862958 - DNA, 33 bp, Homo sapien
catacatacttcagtagatacatacttcaatat

SEQ ID NO: 862959 - DNA, 33 bp, Homo sapien
ctcatacttcttccacccaccaacttgcatgag

SEQ ID NO: 862960 - DNA, 33 bp, Homo sapien
ctcatacttcttccacgcaccaacttgcatgag

SEQ ID NO: 862961 - DNA, 33 bp, Homo sapien
ctgttcagagagttaaatgcaaatgctaggctc

SEQ ID NO: 862962 - DNA, 33 bp, Homo sapien
ctgttcagagagttaagtgcaaatgctaggctc

SEQ ID NO: 862963 - DNA, 33 bp, Homo sapien
tttcatggtgaataagcctggaaatagcaacca

SEQ ID NO: 862964 - DNA, 33 bp, Homo sapien
tttcatggtgaataaggctggaaatagcaacca

SEQ ID NO: 862965 - DNA, 33 bp, Homo sapien
aagacggactacagccaatgtgtcagcccccac

SEQ ID NO: 862966 - DNA, 33 bp, Homo sapien
aagacggactacagccgatgtgtcagcccccac

SEQ ID NO: 862967 - DNA, 33 bp, Homo sapien
agaagtgcctagactcacttttcccaggcacta

SEQ ID NO: 862968 - DNA, 33 bp, Homo sapien
agaagtgcctagactctcttttcccaggcacta

SEQ ID NO: 862969 - DNA, 33 bp, Homo sapien
tatcataagtactagacaggctaaagtttttca

SEQ ID NO: 862970 - DNA, 33 bp, Homo sapien
tatcataagtactagataggctaaagtttttca

SEQ ID NO: 862971 - DNA, 33 bp, Homo sapien
aaaggaatactttagcactatggccaaagaaag

SEQ ID NO: 862972 - DNA, 33 bp, Homo sapien
aaaggaatactttagcgctatggccaaagaaag

SEQ ID NO: 862973 - DNA, 33 bp, Homo sapien
ttgtcattttattcaacggtaaactttgataca

SEQ ID NO: 862974 - DNA, 33 bp, Homo sapien
ttgtcattttattcaatggtaaactttgataca

SEQ ID NO: 862975 - DNA, 33 bp, Homo sapien
gaatgctgctgtcctaagaaaaaaaggccattt

SEQ ID NO: 862976 - DNA, 33 bp, Homo sapien
gaatgctgctgtcctaggaaaaaaaggccattt

SEQ ID NO: 862977 - DNA, 33 bp, Homo sapien
aggaatttatcatttacaccatcagaagcagtt

SEQ ID NO: 862978 - DNA, 33 bp, Homo sapien
aggaatttatcatttataccatcagaagcagtt

SEQ ID NO: 862979 - DNA, 33 bp, Homo sapien
tattatttgccaagtcaaccttttaaagtcttt

SEQ ID NO: 862980 - DNA, 33 bp, Homo sapien
tattatttgccaagtcgaccttttaaagtcttt

SEQ ID NO: 862981 - DNA, 33 bp, Homo sapien
caaaagaagattataggactgttctttcctttt

SEQ ID NO: 862982 - DNA, 33 bp, Homo sapien
caaaagaagattatagtactgttctttcctttt

SEQ ID NO: 862983 - DNA, 33 bp, Homo sapien
tgatagctaaaactacggctgaaattgacaaat

SEQ ID NO: 862984 - DNA, 33 bp, Homo sapien
tgatagctaaaactactgctgaaattgacaaat

SEQ ID NO: 862985 - DNA, 33 bp, Homo sapien
aggggtgtacagcaaagaactcctaagaaatcc

SEQ ID NO: 862986 - DNA, 33 bp, Homo sapien
aggggtgtacagcaaataactcctaagaaatcc

SEQ ID NO: 862987 - DNA, 33 bp, Homo sapien
ctttgccaaaagccacagtaaagctagaattaa

SEQ ID NO: 862988 - DNA, 33 bp, Homo sapien
ctttgccaaaagccacggtaaagctagaattaa

SEQ ID NO: 862989 - DNA, 33 bp, Homo sapien
tattgctatctgtgaaaatagaaattgtgtcct

SEQ ID NO: 862990 - DNA, 33 bp, Homo sapien
tattgctatctgtgaatatagaaattgtgtcct

SEQ ID NO: 862991 - DNA, 33 bp, Homo sapien
tcaaagtgtacttacacctctcttgggtgctgg

SEQ ID NO: 862992 - DNA, 33 bp, Homo sapien
tcaaagtgtacttacatctctcttgggtgctgg

SEQ ID NO: 862993 - DNA, 33 bp, Homo sapien
cacatttgataggatcaatcaaaggctcgcaaa

SEQ ID NO: 862994 - DNA, 33 bp, Homo sapien
cacatttgataggatcgatcaaaggctcgcaaa

SEQ ID NO: 862995 - DNA, 33 bp, Homo sapien
ttatgtattaatattccatctgggaagaaagga

SEQ ID NO: 862996 - DNA, 33 bp, Homo sapien
ttatgtattaatattctatctgggaagaaagga

SEQ ID NO: 862997 - DNA, 33 bp, Homo sapien
gaacatatgtagcatgcaggtaagcatattaaa

SEQ ID NO: 862998 - DNA, 33 bp, Homo sapien
gaacatatgtagcatggaggtaagcatattaaa

SEQ ID NO: 862999 - DNA, 33 bp, Homo sapien
acatctggaacaatggcattcatataaatgaag

SEQ ID NO: 863000 - DNA, 33 bp, Homo sapien
acatctggaacaatgggattcatataaatgaag

SEQ ID NO: 863001 - DNA, 33 bp, Homo sapien
gcgtcccaatttgagaacaatatatctctggcc

SEQ ID NO: 863002 - DNA, 33 bp, Homo sapien
gcgtcccaatttgagagcaatatatctctggcc

SEQ ID NO: 863003 - DNA, 33 bp, Homo sapien
atcctttagtcatacaatagaattttaaagata

SEQ ID NO: 863004 - DNA, 33 bp, Homo sapien
atcctttagtcatacagtagaattttaaagata

SEQ ID NO: 863005 - DNA, 33 bp, Homo sapien
acatacagtgagattagagaatcattggtccta

SEQ ID NO: 863006 - DNA, 33 bp, Homo sapien
acatacagtgagattatagaatcattggtccta

SEQ ID NO: 863007 - DNA, 33 bp, Homo sapien
aaagagcatttactacaacttctattttggaga

SEQ ID NO: 863008 - DNA, 33 bp, Homo sapien
aaagagcatttactacgacttctattttggaga

SEQ ID NO: 863009 - DNA, 33 bp, Homo sapien
ctctagtaggctaatgccaggttaggacaaaga

SEQ ID NO: 863010 - DNA, 33 bp, Homo sapien
ctctagtaggctaatgtcaggttaggacaaaga

SEQ ID NO: 863011 - DNA, 33 bp, Homo sapien
gcttgcagaatttgaacgtattttacttctata

SEQ ID NO: 863012 - DNA, 33 bp, Homo sapien
gcttgcagaatttgaatgtattttacttctata

SEQ ID NO: 863013 - DNA, 33 bp, Homo sapien
cagatgctaaactatacaggatatagggcttaa

SEQ ID NO: 863014 - DNA, 33 bp, Homo sapien
cagatgctaaactatagaggatatagggcttaa

SEQ ID NO: 863015 - DNA, 33 bp, Homo sapien
gccttgtctgctctggcatattacattgcaaac

SEQ ID NO: 863016 - DNA, 33 bp, Homo sapien
gccttgtctgctctggtatattacattgcaaac

SEQ ID NO: 863017 - DNA, 33 bp, Homo sapien
ctgactctgcctttcactcaactatgtgatcta

SEQ ID NO: 863018 - DNA, 33 bp, Homo sapien
ctgactctgcctttcattcaactatgtgatcta

SEQ ID NO: 863019 - DNA, 33 bp, Homo sapien
ttattaactcactgccaaaaatcttttttaaaa

SEQ ID NO: 863020 - DNA, 33 bp, Homo sapien
ttattaactcactgcccaaaatcttttttaaaa

SEQ ID NO: 863021 - DNA, 33 bp, Homo sapien
agtaattgaaattgtacggcaagtagaaatgta

SEQ ID NO: 863022 - DNA, 33 bp, Homo sapien
agtaattgaaattgtatggcaagtagaaatgta

SEQ ID NO: 863023 - DNA, 33 bp, Homo sapien
tgggggataatgggaaaaacaattacatgcata

SEQ ID NO: 863024 - DNA, 33 bp, Homo sapien
tgggggataatgggaagaacaattacatgcata

SEQ ID NO: 863025 - DNA, 33 bp, Homo sapien
tactgtaatatgtcaaccctgaagaaatttata

SEQ ID NO: 863026 - DNA, 33 bp, Homo sapien
tactgtaatatgtcaatcctgaagaaatttata

SEQ ID NO: 863027 - DNA, 33 bp, Homo sapien
attaaatttgttttcaatcattatggtctaagt

SEQ ID NO: 863028 - DNA, 33 bp, Homo sapien
attaaatttgttttcagtcattatggtctaagt

SEQ ID NO: 863029 - DNA, 33 bp, Homo sapien
atccatacaccacaataagtcaaagataccatt

SEQ ID NO: 863030 - DNA, 33 bp, Homo sapien
atccatacaccacaatgagtcaaagataccatt

SEQ ID NO: 863031 - DNA, 33 bp, Homo sapien
tatcttctctttcagaacttttagacacataaa

SEQ ID NO: 863032 - DNA, 33 bp, Homo sapien
tatcttctctttcagagcttttagacacataaa

SEQ ID NO: 863033 - DNA, 33 bp, Homo sapien
agacacaataagtttgcaaagtctctaaaaaga

SEQ ID NO: 863034 - DNA, 33 bp, Homo sapien
agacacaataagtttgtaaagtctctaaaaaga

SEQ ID NO: 863035 - DNA, 33 bp, Homo sapien
acattcacagttccacactgctaccatctagat

SEQ ID NO: 863036 - DNA, 33 bp, Homo sapien
acattcacagttccacgctgctaccatctagat

SEQ ID NO: 863037 - DNA, 33 bp, Homo sapien
ttttttcttgacttcacgtactaggtaggactt

SEQ ID NO: 863038 - DNA, 33 bp, Homo sapien
ttttttcttgacttcatgtactaggtaggactt

SEQ ID NO: 863039 - DNA, 33 bp, Homo sapien
tgtgagatagctgtaaaaattatgttcaaatta

SEQ ID NO: 863040 - DNA, 33 bp, Homo sapien
tgtgagatagctgtaacaattatgttcaaatta

SEQ ID NO: 863041 - DNA, 33 bp, Homo sapien
taactctgctaacacaatggtttcaggtaaaag

SEQ ID NO: 863042 - DNA, 33 bp, Homo sapien
taactctgctaacacagtggtttcaggtaaaag

SEQ ID NO: 863043 - DNA, 33 bp, Homo sapien
gctggaaaaatctattcaaataggtgcaaattg

SEQ ID NO: 863044 - DNA, 33 bp, Homo sapien
gctggaaaaatctattgaaataggtgcaaattg

SEQ ID NO: 863045 - DNA, 33 bp, Homo sapien
gagtagagttaccatacatagctgcggtggcac

SEQ ID NO: 863046 - DNA, 33 bp, Homo sapien
gagtagagttaccatatatagctgcggtggcac

SEQ ID NO: 863047 - DNA, 33 bp, Homo sapien
tcaatgttacttaagaagacaaatctgccacag

SEQ ID NO: 863048 - DNA, 33 bp, Homo sapien
tcaatgttacttaagatgacaaatctgccacag

SEQ ID NO: 863049 - DNA, 33 bp, Homo sapien
accaccaaattggtatcagaaaggccaagtagg

SEQ ID NO: 863050 - DNA, 33 bp, Homo sapien
accaccaaattggtatgagaaaggccaagtagg

SEQ ID NO: 863051 - DNA, 33 bp, Homo sapien
ttcctgtatgcagaaaaagggcaatgtttaaaa

SEQ ID NO: 863052 - DNA, 33 bp, Homo sapien
ttcctgtatgcagaaagagggcaatgtttaaaa

SEQ ID NO: 863053 - DNA, 33 bp, Homo sapien
tttattaccattaaacagctgcaaatactaata

SEQ ID NO: 863054 - DNA, 33 bp, Homo sapien
tttattaccattaaactgctgcaaatactaata

SEQ ID NO: 863055 - DNA, 33 bp, Homo sapien
ttgttttgctttcactaaaaagagaagacagct

SEQ ID NO: 863056 - DNA, 33 bp, Homo sapien
ttgttttgctttcactgaaaagagaagacagct

SEQ ID NO: 863057 - DNA, 33 bp, Homo sapien
ccacaaaaatctgaagaaagtttggcctacggt

SEQ ID NO: 863058 - DNA, 33 bp, Homo sapien
ccacaaaaatctgaaggaagtttggcctacggt

SEQ ID NO: 863059 - DNA, 33 bp, Homo sapien
caaagaagtagaaaagaaatatgtgcatttgct

SEQ ID NO: 863060 - DNA, 33 bp, Homo sapien
caaagaagtagaaaaggaatatgtgcatttgct

SEQ ID NO: 863061 - DNA, 33 bp, Homo sapien
aatgtataatacaaaaataaaatccatgcagta

SEQ ID NO: 863062 - DNA, 33 bp, Homo sapien
aatgtataatacaaaagtaaaatccatgcagta

SEQ ID NO: 863063 - DNA, 33 bp, Homo sapien
ctgggctgtctacccaacaactcttacagatta

SEQ ID NO: 863064 - DNA, 33 bp, Homo sapien
ctgggctgtctacccagcaactcttacagatta

SEQ ID NO: 863065 - DNA, 33 bp, Homo sapien
ggtggcttaggcaaaaggaatatattgtctcac

SEQ ID NO: 863066 - DNA, 33 bp, Homo sapien
ggtggcttaggcaaaatgaatatattgtctcac

SEQ ID NO: 863067 - DNA, 33 bp, Homo sapien
ccacagtgattcagaacacccacaatcaccaag

SEQ ID NO: 863068 - DNA, 33 bp, Homo sapien
ccacagtgattcagaatacccacaatcaccaag

SEQ ID NO: 863069 - DNA, 33 bp, Homo sapien
catgaactcattatgaacttcatggcttaaaat

SEQ ID NO: 863070 - DNA, 33 bp, Homo sapien
catgaactcattatgaccttcatggcttaaaat

SEQ ID NO: 863071 - DNA, 33 bp, Homo sapien
ggctatctctaacagaagagttatagtaattta

SEQ ID NO: 863072 - DNA, 33 bp, Homo sapien
ggctatctctaacagaggagttatagtaattta

SEQ ID NO: 863073 - DNA, 33 bp, Homo sapien
aaacaacttgtgtttacgtgggctatctctctc

SEQ ID NO: 863074 - DNA, 33 bp, Homo sapien
aaacaacttgtgtttatgtgggctatctctctc

SEQ ID NO: 863075 - DNA, 33 bp, Homo sapien
aatatctacagttacccgaaaaggctattgaat

SEQ ID NO: 863076 - DNA, 33 bp, Homo sapien
aatatctacagttacctgaaaaggctattgaat

SEQ ID NO: 863077 - DNA, 33 bp, Homo sapien
cttggtattgtgttaacggcacagccctaaata

SEQ ID NO: 863078 - DNA, 33 bp, Homo sapien
cttggtattgtgttaatggcacagccctaaata

SEQ ID NO: 863079 - DNA, 33 bp, Homo sapien
gtccttcaacgggaaaatctggtattattcatt

SEQ ID NO: 863080 - DNA, 33 bp, Homo sapien
gtccttcaacgggaaagtctggtattattcatt

SEQ ID NO: 863081 - DNA, 33 bp, Homo sapien
ggtgggcattgaggaaatgttaagtccctatac

SEQ ID NO: 863082 - DNA, 33 bp, Homo sapien
ggtgggcattgaggaagtgttaagtccctatac

SEQ ID NO: 863083 - DNA, 33 bp, Homo sapien
caggctaacagttgccaggatcatgaccattct

SEQ ID NO: 863084 - DNA, 33 bp, Homo sapien
caggctaacagttgccgggatcatgaccattct

SEQ ID NO: 863085 - DNA, 33 bp, Homo sapien
aatattacagcaaataacctgtgcactcttcag

SEQ ID NO: 863086 - DNA, 33 bp, Homo sapien
aatattacagcaaatagcctgtgcactcttcag

SEQ ID NO: 863087 - DNA, 33 bp, Homo sapien
aaagtaagttttgagaaacgaagattgagaaag

SEQ ID NO: 863088 - DNA, 33 bp, Homo sapien
aaagtaagttttgagagacgaagattgagaaag

SEQ ID NO: 863089 - DNA, 33 bp, Homo sapien
agtagcgtaatccaaaactgaaatattcaagtc

SEQ ID NO: 863090 - DNA, 33 bp, Homo sapien
agtagcgtaatccaaagctgaaatattcaagtc

SEQ ID NO: 863091 - DNA, 33 bp, Homo sapien
gacaactttttaaaagacatcaggataatgttt

SEQ ID NO: 863092 - DNA, 33 bp, Homo sapien
gacaactttttaaaaggcatcaggataatgttt

SEQ ID NO: 863093 - DNA, 33 bp, Homo sapien
tttatacatttgcaacactttgtcttgtaaatg

SEQ ID NO: 863094 - DNA, 33 bp, Homo sapien
tttatacatttgcaacgctttgtcttgtaaatg

SEQ ID NO: 863095 - DNA, 33 bp, Homo sapien
actctaaatttaatgcgctacatcttatcaatc

SEQ ID NO: 863096 - DNA, 33 bp, Homo sapien
actctaaatttaatgctctacatcttatcaatc

SEQ ID NO: 863097 - DNA, 33 bp, Homo sapien
tcattggatagtttcaatctttcacttataagc

SEQ ID NO: 863098 - DNA, 33 bp, Homo sapien
tcattggatagtttcagtctttcacttataagc

SEQ ID NO: 863099 - DNA, 33 bp, Homo sapien
tatcttttaactttgcaacacaataaattttaa

SEQ ID NO: 863100 - DNA, 33 bp, Homo sapien
tatcttttaactttgctacacaataaattttaa

SEQ ID NO: 863101 - DNA, 33 bp, Homo sapien
tttttggttagcacacaaaggtcaaattgcctc

SEQ ID NO: 863102 - DNA, 33 bp, Homo sapien
tttttggttagcacacgaaggtcaaattgcctc

SEQ ID NO: 863103 - DNA, 33 bp, Homo sapien
gctgcggcacattatactaatgacaagtatatt

SEQ ID NO: 863104 - DNA, 33 bp, Homo sapien
gctgcggcacattatattaatgacaagtatatt

SEQ ID NO: 863105 - DNA, 33 bp, Homo sapien
tctaaaatccaccacaaaatcagacataaaaca

SEQ ID NO: 863106 - DNA, 33 bp, Homo sapien
tctaaaatccaccacacaatcagacataaaaca

SEQ ID NO: 863107 - DNA, 33 bp, Homo sapien
aagaaagttagaaagacctcaatttaacaaact

SEQ ID NO: 863108 - DNA, 33 bp, Homo sapien
aagaaagttagaaagatctcaatttaacaaact

SEQ ID NO: 863109 - DNA, 33 bp, Homo sapien
gcaaggtttgaaagaacggcttcaagaggaaag

SEQ ID NO: 863110 - DNA, 33 bp, Homo sapien
gcaaggtttgaaagaatggcttcaagaggaaag

SEQ ID NO: 863111 - DNA, 33 bp, Homo sapien
tatcattttttcatccaaacaatgtagtggaaa

SEQ ID NO: 863112 - DNA, 33 bp, Homo sapien
tatcattttttcatcctaacaatgtagtggaaa

SEQ ID NO: 863113 - DNA, 33 bp, Homo sapien
aaggttggatttctttctccatggttaatgggt

SEQ ID NO: 863114 - DNA, 33 bp, Homo sapien
aaggttggatttctttttccatggttaatgggt

SEQ ID NO: 863115 - DNA, 33 bp, Homo sapien
tttaggatctagaggaagagcttgttattcact

SEQ ID NO: 863116 - DNA, 33 bp, Homo sapien
tttaggatctagaggaggagcttgttattcact

SEQ ID NO: 863117 - DNA, 33 bp, Homo sapien
atctaaagggaattgtaaatgaatgcttgttat

SEQ ID NO: 863118 - DNA, 33 bp, Homo sapien
atctaaagggaattgttaatgaatgcttgttat

SEQ ID NO: 863119 - DNA, 33 bp, Homo sapien
ccaataagaatgcacaatgatacagaaaagaag

SEQ ID NO: 863120 - DNA, 33 bp, Homo sapien
ccaataagaatgcacagtgatacagaaaagaag

SEQ ID NO: 863121 - DNA, 33 bp, Homo sapien
acacataataagatacaataaaaagctcgcaca

SEQ ID NO: 863122 - DNA, 33 bp, Homo sapien
acacataataagatacgataaaaagctcgcaca

SEQ ID NO: 863123 - DNA, 33 bp, Homo sapien
taagtgaacactggttaaaaaggctttagtata

SEQ ID NO: 863124 - DNA, 33 bp, Homo sapien
taagtgaacactggtttaaaaggctttagtata

SEQ ID NO: 863125 - DNA, 33 bp, Homo sapien
aggtgtggactaggcaactgtgaatgattggga

SEQ ID NO: 863126 - DNA, 33 bp, Homo sapien
aggtgtggactaggcagctgtgaatgattggga

SEQ ID NO: 863127 - DNA, 33 bp, Homo sapien
ggatttgagtaaaagcaccagaaaaaagaggcc

SEQ ID NO: 863128 - DNA, 33 bp, Homo sapien
ggatttgagtaaaagcgccagaaaaaagaggcc

SEQ ID NO: 863129 - DNA, 33 bp, Homo sapien
acattcaccaaataacagaatgcccaatgcagt

SEQ ID NO: 863130 - DNA, 33 bp, Homo sapien
acattcaccaaataaccgaatgcccaatgcagt

SEQ ID NO: 863131 - DNA, 33 bp, Homo sapien
ttgatttggttgcaaacagccatagtaaataca

SEQ ID NO: 863132 - DNA, 33 bp, Homo sapien
ttgatttggttgcaaagagccatagtaaataca

SEQ ID NO: 863133 - DNA, 33 bp, Homo sapien
ccagtgcaaaacaaaaatgtgaggacctcttgt

SEQ ID NO: 863134 - DNA, 33 bp, Homo sapien
ccagtgcaaaacaaaactgtgaggacctcttgt

SEQ ID NO: 863135 - DNA, 33 bp, Homo sapien
gttttgaagagcaaaaatgtctttgaatttggc

SEQ ID NO: 863136 - DNA, 33 bp, Homo sapien
gttttgaagagcaaaagtgtctttgaatttggc

SEQ ID NO: 863137 - DNA, 33 bp, Homo sapien
gactgggaaatgtcagaaagcacatggacaatt

SEQ ID NO: 863138 - DNA, 33 bp, Homo sapien
gactgggaaatgtcaggaagcacatggacaatt

SEQ ID NO: 863139 - DNA, 33 bp, Homo sapien
accaaactacatggaaacaagttgcaggttacc

SEQ ID NO: 863140 - DNA, 33 bp, Homo sapien
accaaactacatggaagcaagttgcaggttacc

SEQ ID NO: 863141 - DNA, 33 bp, Homo sapien
cagaaatagtgatgtcaactcaaaagatacatt

SEQ ID NO: 863142 - DNA, 33 bp, Homo sapien
cagaaatagtgatgtcgactcaaaagatacatt

SEQ ID NO: 863143 - DNA, 33 bp, Homo sapien
ctgatgcaagtggtacaactaagactagaatcc

SEQ ID NO: 863144 - DNA, 33 bp, Homo sapien
ctgatgcaagtggtactactaagactagaatcc

SEQ ID NO: 863145 - DNA, 33 bp, Homo sapien
ccggccaaaccatagaagactttcaatgctaga

SEQ ID NO: 863146 - DNA, 33 bp, Homo sapien
ccggccaaaccatagaggactttcaatgctaga

SEQ ID NO: 863147 - DNA, 33 bp, Homo sapien
attgaatggcaaagaccaaaatgggcactgggg

SEQ ID NO: 863148 - DNA, 33 bp, Homo sapien
attgaatggcaaagactaaaatgggcactgggg

SEQ ID NO: 863149 - DNA, 33 bp, Homo sapien
gaatcctgtacagtcacgttcattgagaggtga

SEQ ID NO: 863150 - DNA, 33 bp, Homo sapien
gaatcctgtacagtcatgttcattgagaggtga

SEQ ID NO: 863151 - DNA, 33 bp, Homo sapien
gtagggattgcttgcccggaaatggtgagagcc

SEQ ID NO: 863152 - DNA, 33 bp, Homo sapien
gtagggattgcttgcctggaaatggtgagagcc

SEQ ID NO: 863153 - DNA, 33 bp, Homo sapien
aggacattggcattccagcttacgagtcagact

SEQ ID NO: 863154 - DNA, 33 bp, Homo sapien
aggacattggcattccggcttacgagtcagact

SEQ ID NO: 863155 - DNA, 33 bp, Homo sapien
tgcctatgaattgcaccgtaatgaaatctttga

SEQ ID NO: 863156 - DNA, 33 bp, Homo sapien
tgcctatgaattgcactgtaatgaaatctttga

SEQ ID NO: 863157 - DNA, 33 bp, Homo sapien
cctccttctctgttgacagattctagtgctcat

SEQ ID NO: 863158 - DNA, 33 bp, Homo sapien
cctccttctctgttgatagattctagtgctcat

SEQ ID NO: 863159 - DNA, 33 bp, Homo sapien
gggggcaaaggtacaaatggaattctttctata

SEQ ID NO: 863160 - DNA, 33 bp, Homo sapien
gggggcaaaggtacaagtggaattctttctata

SEQ ID NO: 863161 - DNA, 33 bp, Homo sapien
tttaggtaaagggataaaaatggcagtaaatcc

SEQ ID NO: 863162 - DNA, 33 bp, Homo sapien
tttaggtaaagggatacaaatggcagtaaatcc

SEQ ID NO: 863163 - DNA, 33 bp, Homo sapien
ttgaatgaatttagtagagaacctccctcgtgg

SEQ ID NO: 863164 - DNA, 33 bp, Homo sapien
ttgaatgaatttagtatagaacctccctcgtgg

SEQ ID NO: 863165 - DNA, 33 bp, Homo sapien
aattcataactataataagcatcaagttaacta

SEQ ID NO: 863166 - DNA, 33 bp, Homo sapien
aattcataactataatgagcatcaagttaacta

SEQ ID NO: 863167 - DNA, 33 bp, Homo sapien
gcaacataagcagaaaatggctagataatggct

SEQ ID NO: 863168 - DNA, 33 bp, Homo sapien
gcaacataagcagaaagtggctagataatggct

SEQ ID NO: 863169 - DNA, 33 bp, Homo sapien
tcagtgacagataaaactgaaaggcaaaaacaa

SEQ ID NO: 863170 - DNA, 33 bp, Homo sapien
tcagtgacagataaaattgaaaggcaaaaacaa

SEQ ID NO: 863171 - DNA, 33 bp, Homo sapien
aattcacttttctctcaatcaagtaagccttgc

SEQ ID NO: 863172 - DNA, 33 bp, Homo sapien
aattcacttttctctccatcaagtaagccttgc

SEQ ID NO: 863173 - DNA, 33 bp, Homo sapien
tagcaatattcccaagcagttatccagattgag

SEQ ID NO: 863174 - DNA, 33 bp, Homo sapien
tagcaatattcccaagtagttatccagattgag

SEQ ID NO: 863175 - DNA, 33 bp, Homo sapien
ttttgaagggctacacgggggttcattcctacc

SEQ ID NO: 863176 - DNA, 33 bp, Homo sapien
ttttgaagggctacactggggttcattcctacc

SEQ ID NO: 863177 - DNA, 33 bp, Homo sapien
cctgatttgaacataaatgcctttgcatgaata

SEQ ID NO: 863178 - DNA, 33 bp, Homo sapien
cctgatttgaacataactgcctttgcatgaata

SEQ ID NO: 863179 - DNA, 33 bp, Homo sapien
gctatatatactgaaccaatgacctctatagtg

SEQ ID NO: 863180 - DNA, 33 bp, Homo sapien
gctatatatactgaactaatgacctctatagtg

SEQ ID NO: 863181 - DNA, 33 bp, Homo sapien
ttttatacctggaaaactggcttcctggaaaaa

SEQ ID NO: 863182 - DNA, 33 bp, Homo sapien
ttttatacctggaaaagtggcttcctggaaaaa

SEQ ID NO: 863183 - DNA, 33 bp, Homo sapien
gatttcaaattgcaaacgtagcaaatttttctt

SEQ ID NO: 863184 - DNA, 33 bp, Homo sapien
gatttcaaattgcaaaggtagcaaatttttctt

SEQ ID NO: 863185 - DNA, 33 bp, Homo sapien
tgtgtgtactggaatacgtcagtgcaagcaagg

SEQ ID NO: 863186 - DNA, 33 bp, Homo sapien
tgtgtgtactggaataggtcagtgcaagcaagg

SEQ ID NO: 863187 - DNA, 33 bp, Homo sapien
gggcctgggtggatccaaaataagatattactg

SEQ ID NO: 863188 - DNA, 33 bp, Homo sapien
gggcctgggtggatcccaaataagatattactg

SEQ ID NO: 863189 - DNA, 33 bp, Homo sapien
aaatggcagtgctttgcaaattgaaatattctg

SEQ ID NO: 863190 - DNA, 33 bp, Homo sapien
aaatggcagtgctttgtaaattgaaatattctg

SEQ ID NO: 863191 - DNA, 33 bp, Homo sapien
gcagcctaaatgtctaacttgcaggttaggtga

SEQ ID NO: 863192 - DNA, 33 bp, Homo sapien
gcagcctaaatgtctaccttgcaggttaggtga

SEQ ID NO: 863193 - DNA, 33 bp, Homo sapien
gagtcattacctggaaatcacagttcagaagca

SEQ ID NO: 863194 - DNA, 33 bp, Homo sapien
gagtcattacctggaagtcacagttcagaagca

SEQ ID NO: 863195 - DNA, 33 bp, Homo sapien
atagttcatcatgagaaccattatggcagagca

SEQ ID NO: 863196 - DNA, 33 bp, Homo sapien
atagttcatcatgagagccattatggcagagca

SEQ ID NO: 863197 - DNA, 33 bp, Homo sapien
atctgaacatatcaaacacttccaaacactcca

SEQ ID NO: 863198 - DNA, 33 bp, Homo sapien
atctgaacatatcaaatacttccaaacactcca

SEQ ID NO: 863199 - DNA, 33 bp, Homo sapien
caccaaacttttatcaatcttgttgcattttat

SEQ ID NO: 863200 - DNA, 33 bp, Homo sapien
caccaaacttttatcagtcttgttgcattttat

SEQ ID NO: 863201 - DNA, 33 bp, Homo sapien
tatctgctttctgagacagccacacaaaacagg

SEQ ID NO: 863202 - DNA, 33 bp, Homo sapien
tatctgctttctgagagagccacacaaaacagg

SEQ ID NO: 863203 - DNA, 33 bp, Homo sapien
agagtaacagctcccaaaggtatccaggtccta

SEQ ID NO: 863204 - DNA, 33 bp, Homo sapien
agagtaacagctcccagaggtatccaggtccta

SEQ ID NO: 863205 - DNA, 33 bp, Homo sapien
ttatatgagatacccactcacttgctgacaatc

SEQ ID NO: 863206 - DNA, 33 bp, Homo sapien
ttatatgagatacccattcacttgctgacaatc

SEQ ID NO: 863207 - DNA, 33 bp, Homo sapien
ctcttaccaatagccacgtgaagaagccatctt

SEQ ID NO: 863208 - DNA, 33 bp, Homo sapien
ctcttaccaatagccatgtgaagaagccatctt

SEQ ID NO: 863209 - DNA, 33 bp, Homo sapien
tgcatttttaagaagaacgctctggcagcagag

SEQ ID NO: 863210 - DNA, 33 bp, Homo sapien
tgcatttttaagaagaccgctctggcagcagag

SEQ ID NO: 863211 - DNA, 33 bp, Homo sapien
agacagaaaggtagtaagaaaatagaaaatgga

SEQ ID NO: 863212 - DNA, 33 bp, Homo sapien
agacagaaaggtagtaggaaaatagaaaatgga

SEQ ID NO: 863213 - DNA, 33 bp, Homo sapien
aaaagccaggaaaaaggagtctcagaaataaat

SEQ ID NO: 863214 - DNA, 33 bp, Homo sapien
aaaagccaggaaaaagtagtctcagaaataaat

SEQ ID NO: 863215 - DNA, 33 bp, Homo sapien
tacattctgacttcaacagcattgttagcttgt

SEQ ID NO: 863216 - DNA, 33 bp, Homo sapien
tacattctgacttcaatagcattgttagcttgt

SEQ ID NO: 863217 - DNA, 33 bp, Homo sapien
tgttcttactgcataaaactactgttgtatcat

SEQ ID NO: 863218 - DNA, 33 bp, Homo sapien
tgttcttactgcataatactactgttgtatcat

SEQ ID NO: 863219 - DNA, 33 bp, Homo sapien
ttctaatgaggcaaagactgaaatatgaagatg

SEQ ID NO: 863220 - DNA, 33 bp, Homo sapien
ttctaatgaggcaaagtctgaaatatgaagatg

SEQ ID NO: 863221 - DNA, 33 bp, Homo sapien
caaaactgtttatttcaaaactcaccagatatt

SEQ ID NO: 863222 - DNA, 33 bp, Homo sapien
caaaactgtttatttcgaaactcaccagatatt

SEQ ID NO: 863223 - DNA, 33 bp, Homo sapien
acgcaccaattaaagacggtatgatctagagca

SEQ ID NO: 863224 - DNA, 33 bp, Homo sapien
acgcaccaattaaagatggtatgatctagagca

SEQ ID NO: 863225 - DNA, 33 bp, Homo sapien
caggggtaaaggtataactccagtatgcatcat

SEQ ID NO: 863226 - DNA, 33 bp, Homo sapien
caggggtaaaggtatagctccagtatgcatcat

SEQ ID NO: 863227 - DNA, 33 bp, Homo sapien
attagaccaagggaaaattctagcccaactctt

SEQ ID NO: 863228 - DNA, 33 bp, Homo sapien
attagaccaagggaaatttctagcccaactctt

SEQ ID NO: 863229 - DNA, 33 bp, Homo sapien
actttctagcctctaaatctgccaaaaactcaa

SEQ ID NO: 863230 - DNA, 33 bp, Homo sapien
actttctagcctctaagtctgccaaaaactcaa

SEQ ID NO: 863231 - DNA, 33 bp, Homo sapien
ggatacagaatatacaatcgccacttctgctca

SEQ ID NO: 863232 - DNA, 33 bp, Homo sapien
ggatacagaatatacactcgccacttctgctca

SEQ ID NO: 863233 - DNA, 33 bp, Homo sapien
catctttaaaaagggaatattgagtctcttctt

SEQ ID NO: 863234 - DNA, 33 bp, Homo sapien
catctttaaaaagggattattgagtctcttctt

SEQ ID NO: 863235 - DNA, 33 bp, Homo sapien
gatctccttcagcataaaaagttaaactccaca

SEQ ID NO: 863236 - DNA, 33 bp, Homo sapien
gatctccttcagcatagaaagttaaactccaca

SEQ ID NO: 863237 - DNA, 33 bp, Homo sapien
atgttgagaagagacactgatttctgttgtcac

SEQ ID NO: 863238 - DNA, 33 bp, Homo sapien
atgttgagaagagacattgatttctgttgtcac

SEQ ID NO: 863239 - DNA, 33 bp, Homo sapien
tttgttgattctacacaatgataccgactaata

SEQ ID NO: 863240 - DNA, 33 bp, Homo sapien
tttgttgattctacacgatgataccgactaata

SEQ ID NO: 863241 - DNA, 33 bp, Homo sapien
tccttgtctatcaaccaaaatatggtccatctc

SEQ ID NO: 863242 - DNA, 33 bp, Homo sapien
tccttgtctatcaacctaaatatggtccatctc

SEQ ID NO: 863243 - DNA, 33 bp, Homo sapien
gtaagcatgaacaaaacccttaaagaagatctg

SEQ ID NO: 863244 - DNA, 33 bp, Homo sapien
gtaagcatgaacaaaatccttaaagaagatctg

SEQ ID NO: 863245 - DNA, 33 bp, Homo sapien
ggaataaagaagacacagagaagccatagccaa

SEQ ID NO: 863246 - DNA, 33 bp, Homo sapien
ggaataaagaagacacggagaagccatagccaa

SEQ ID NO: 863247 - DNA, 33 bp, Homo sapien
gggccatattacttcacgtttcttttgttcctt

SEQ ID NO: 863248 - DNA, 33 bp, Homo sapien
gggccatattacttcatgtttcttttgttcctt

SEQ ID NO: 863249 - DNA, 33 bp, Homo sapien
ggaatctttcatccaaatggaatttttctatgt

SEQ ID NO: 863250 - DNA, 33 bp, Homo sapien
ggaatctttcatccaagtggaatttttctatgt

SEQ ID NO: 863251 - DNA, 33 bp, Homo sapien
tttatttttgattatgcacacgtcaaggaacaa

SEQ ID NO: 863252 - DNA, 33 bp, Homo sapien
tttatttttgattatggacacgtcaaggaacaa

SEQ ID NO: 863253 - DNA, 33 bp, Homo sapien
agagctgccacaacaaggtatcacaaattgggt

SEQ ID NO: 863254 - DNA, 33 bp, Homo sapien
agagctgccacaacaatgtatcacaaattgggt

SEQ ID NO: 863255 - DNA, 33 bp, Homo sapien
ctctgacacagttgctcacatttaaaaccaaca

SEQ ID NO: 863256 - DNA, 33 bp, Homo sapien
ctctgacacagttgctgacatttaaaaccaaca

SEQ ID NO: 863257 - DNA, 33 bp, Homo sapien
gggatgatggataaaaacaatagctacctataa

SEQ ID NO: 863258 - DNA, 33 bp, Homo sapien
gggatgatggataaaaccaatagctacctataa

SEQ ID NO: 863259 - DNA, 33 bp, Homo sapien
tggggaagttaggaacaaggtagtgttggtcac

SEQ ID NO: 863260 - DNA, 33 bp, Homo sapien
tggggaagttaggaacgaggtagtgttggtcac

SEQ ID NO: 863261 - DNA, 33 bp, Homo sapien
catgcaattacaagtaaggatgctgggttcaca

SEQ ID NO: 863262 - DNA, 33 bp, Homo sapien
catgcaattacaagtagggatgctgggttcaca

SEQ ID NO: 863263 - DNA, 33 bp, Homo sapien
aggaaagagaagagaacgttacagtctccatgg

SEQ ID NO: 863264 - DNA, 33 bp, Homo sapien
aggaaagagaagagaatgttacagtctccatgg

SEQ ID NO: 863265 - DNA, 33 bp, Homo sapien
ggtttcagcaagattaataacgaacaaactcat

SEQ ID NO: 863266 - DNA, 33 bp, Homo sapien
ggtttcagcaagattagtaacgaacaaactcat

SEQ ID NO: 863267 - DNA, 33 bp, Homo sapien
ctggtctatcctgtgaaggcacttaagaaacat

SEQ ID NO: 863268 - DNA, 33 bp, Homo sapien
ctggtctatcctgtgagggcacttaagaaacat

SEQ ID NO: 863269 - DNA, 33 bp, Homo sapien
tcttttaatcatcttacctcaccttgctcctct

SEQ ID NO: 863270 - DNA, 33 bp, Homo sapien
tcttttaatcatcttatctcaccttgctcctct

SEQ ID NO: 863271 - DNA, 33 bp, Homo sapien
ccactttttagatgggaacactgagacctggag

SEQ ID NO: 863272 - DNA, 33 bp, Homo sapien
ccactttttagatggggacactgagacctggag

SEQ ID NO: 863273 - DNA, 33 bp, Homo sapien
tttagttgtcccttcaaagccaaagggcagtga

SEQ ID NO: 863274 - DNA, 33 bp, Homo sapien
tttagttgtcccttcagagccaaagggcagtga

SEQ ID NO: 863275 - DNA, 33 bp, Homo sapien
tattacagtgaaaggacctgcttacttattatc

SEQ ID NO: 863276 - DNA, 33 bp, Homo sapien
tattacagtgaaaggatctgcttacttattatc

SEQ ID NO: 863277 - DNA, 33 bp, Homo sapien
gataggaatataacaagctctacctcttttctc

SEQ ID NO: 863278 - DNA, 33 bp, Homo sapien
gataggaatataacaatctctacctcttttctc

SEQ ID NO: 863279 - DNA, 33 bp, Homo sapien
gtggagcaatcatccaatgaatccaaattccac

SEQ ID NO: 863280 - DNA, 33 bp, Homo sapien
gtggagcaatcatccagtgaatccaaattccac

SEQ ID NO: 863281 - DNA, 33 bp, Homo sapien
tggatgattgctccacactctctttgaccttgt

SEQ ID NO: 863282 - DNA, 33 bp, Homo sapien
tggatgattgctccacgctctctttgaccttgt

SEQ ID NO: 863283 - DNA, 33 bp, Homo sapien
accaaaactcttccccaaaataccagctaagct

SEQ ID NO: 863284 - DNA, 33 bp, Homo sapien
accaaaactcttcccccaaataccagctaagct

SEQ ID NO: 863285 - DNA, 33 bp, Homo sapien
tatatttagtctataactgaggaaatgctatga

SEQ ID NO: 863286 - DNA, 33 bp, Homo sapien
tatatttagtctataattgaggaaatgctatga

SEQ ID NO: 863287 - DNA, 33 bp, Homo sapien
gctccctgggagaaaacgcggagctcaacactg

SEQ ID NO: 863288 - DNA, 33 bp, Homo sapien
gctccctgggagaaaatgcggagctcaacactg

SEQ ID NO: 863289 - DNA, 33 bp, Homo sapien
tcttacctctacaagacgaatgttcctaaaaca

SEQ ID NO: 863290 - DNA, 33 bp, Homo sapien
tcttacctctacaagatgaatgttcctaaaaca

SEQ ID NO: 863291 - DNA, 33 bp, Homo sapien
accattgacagtatgacggcaagaagtatgtga

SEQ ID NO: 863292 - DNA, 33 bp, Homo sapien
accattgacagtatgatggcaagaagtatgtga

SEQ ID NO: 863293 - DNA, 33 bp, Homo sapien
actgtgttttgaaggacattggaatttctgcct

SEQ ID NO: 863294 - DNA, 33 bp, Homo sapien
actgtgttttgaaggagattggaatttctgcct

SEQ ID NO: 863295 - DNA, 33 bp, Homo sapien
tcttaacctttctgaccgtattttcctcactgt

SEQ ID NO: 863296 - DNA, 33 bp, Homo sapien
tcttaacctttctgactgtattttcctcactgt

SEQ ID NO: 863297 - DNA, 33 bp, Homo sapien
acaaacacaaacacaaacaactttctagaacag

SEQ ID NO: 863298 - DNA, 33 bp, Homo sapien
acaaacacaaacacaatcaactttctagaacag

SEQ ID NO: 863299 - DNA, 33 bp, Homo sapien
tattgtactgtaaaatcacaactgtgaacaccc

SEQ ID NO: 863300 - DNA, 33 bp, Homo sapien
tattgtactgtaaaattacaactgtgaacaccc

SEQ ID NO: 863301 - DNA, 33 bp, Homo sapien
aaatctgtgttgaaggaattaggctgtcaccag

SEQ ID NO: 863302 - DNA, 33 bp, Homo sapien
aaatctgtgttgaagggattaggctgtcaccag

SEQ ID NO: 863303 - DNA, 33 bp, Homo sapien
aaaaaaagcaagtcatcaacccctgtagtttcc

SEQ ID NO: 863304 - DNA, 33 bp, Homo sapien
aaaaaaagcaagtcattaacccctgtagtttcc

SEQ ID NO: 863305 - DNA, 33 bp, Homo sapien
gaattggatcagagaacgagatctgcagcaccc

SEQ ID NO: 863306 - DNA, 33 bp, Homo sapien
gaattggatcagagaatgagatctgcagcaccc

SEQ ID NO: 863307 - DNA, 33 bp, Homo sapien
attcaactttccaaaacgttctaaatgtcatga

SEQ ID NO: 863308 - DNA, 33 bp, Homo sapien
attcaactttccaaaatgttctaaatgtcatga

SEQ ID NO: 863309 - DNA, 33 bp, Homo sapien
tgctatcgtaattagccacaggccccatctgcc

SEQ ID NO: 863310 - DNA, 33 bp, Homo sapien
tgctatcgtaattagcgacaggccccatctgcc

SEQ ID NO: 863311 - DNA, 33 bp, Homo sapien
atcactcactcaatccccttgtctcctgtttaa

SEQ ID NO: 863312 - DNA, 33 bp, Homo sapien
atcactcactcaatcctcttgtctcctgtttaa

SEQ ID NO: 863313 - DNA, 33 bp, Homo sapien
aagaaatgactatgtcaaaaaagccaaatccaa

SEQ ID NO: 863314 - DNA, 33 bp, Homo sapien
aagaaatgactatgtcgaaaaagccaaatccaa

SEQ ID NO: 863315 - DNA, 33 bp, Homo sapien
tacatgggattagtaactctatcattgtttctg

SEQ ID NO: 863316 - DNA, 33 bp, Homo sapien
tacatgggattagtaattctatcattgtttctg

SEQ ID NO: 863317 - DNA, 33 bp, Homo sapien
tgttgcccattcttgacgttctccttatcacat

SEQ ID NO: 863318 - DNA, 33 bp, Homo sapien
tgttgcccattcttgatgttctccttatcacat

SEQ ID NO: 863319 - DNA, 33 bp, Homo sapien
gtattaaaattgagatgaaagccactgatctca

SEQ ID NO: 863320 - DNA, 33 bp, Homo sapien
gtattaaaattgagattaaagccactgatctca

SEQ ID NO: 863321 - DNA, 33 bp, Homo sapien
agacttcacttcaaagacataaagtagtagcaa

SEQ ID NO: 863322 - DNA, 33 bp, Homo sapien
agacttcacttcaaagtcataaagtagtagcaa

SEQ ID NO: 863323 - DNA, 33 bp, Homo sapien
ataaaaacaatggccaaaactctgggaaaatgt

SEQ ID NO: 863324 - DNA, 33 bp, Homo sapien
ataaaaacaatggccagaactctgggaaaatgt

SEQ ID NO: 863325 - DNA, 33 bp, Homo sapien
agccaccacgccaggcagaatagtttttctttt

SEQ ID NO: 863326 - DNA, 33 bp, Homo sapien
agccaccacgccaggcggaatagtttttctttt

SEQ ID NO: 863327 - DNA, 33 bp, Homo sapien
gggcgtggtcacgtagaaccgatggcctgaggt

SEQ ID NO: 863328 - DNA, 33 bp, Homo sapien
gggcgtggtcacgtagcaccgatggcctgaggt

SEQ ID NO: 863329 - DNA, 33 bp, Homo sapien
ttacttctttttccaaattgcattccatgagtt

SEQ ID NO: 863330 - DNA, 33 bp, Homo sapien
ttacttctttttccaagttgcattccatgagtt

SEQ ID NO: 863331 - DNA, 33 bp, Homo sapien
atagattgtggtgtaacgtaatatggtaaataa

SEQ ID NO: 863332 - DNA, 33 bp, Homo sapien
atagattgtggtgtaatgtaatatggtaaataa

SEQ ID NO: 863333 - DNA, 33 bp, Homo sapien
cttagcttctcaaccaccacaagcagataagga

SEQ ID NO: 863334 - DNA, 33 bp, Homo sapien
cttagcttctcaaccatcacaagcagataagga

SEQ ID NO: 863335 - DNA, 33 bp, Homo sapien
tccaatgcatgattcaaacttgtgtaacatcac

SEQ ID NO: 863336 - DNA, 33 bp, Homo sapien
tccaatgcatgattcagacttgtgtaacatcac

SEQ ID NO: 863337 - DNA, 33 bp, Homo sapien
actcttctgtatagaaccaaccaatgtttccat

SEQ ID NO: 863338 - DNA, 33 bp, Homo sapien
actcttctgtatagaatcaaccaatgtttccat

SEQ ID NO: 863339 - DNA, 33 bp, Homo sapien
tccaggtctagttaacaggatgagttaaggctg

SEQ ID NO: 863340 - DNA, 33 bp, Homo sapien
tccaggtctagttaaccggatgagttaaggctg

SEQ ID NO: 863341 - DNA, 33 bp, Homo sapien
gcacagagcatgaaaacacaacaggataatctt

SEQ ID NO: 863342 - DNA, 33 bp, Homo sapien
gcacagagcatgaaaagacaacaggataatctt

SEQ ID NO: 863343 - DNA, 33 bp, Homo sapien
catcttgtaacctcagcaagcttgaaaaatgga

SEQ ID NO: 863344 - DNA, 33 bp, Homo sapien
catcttgtaacctcagtaagcttgaaaaatgga

SEQ ID NO: 863345 - DNA, 33 bp, Homo sapien
aatatatatgatattacggtaacggtgacctaa

SEQ ID NO: 863346 - DNA, 33 bp, Homo sapien
aatatatatgatattatggtaacggtgacctaa

SEQ ID NO: 863347 - DNA, 33 bp, Homo sapien
aggacaagaaaccaaacttcctcaatgccaacc

SEQ ID NO: 863348 - DNA, 33 bp, Homo sapien
aggacaagaaaccaaatttcctcaatgccaacc

SEQ ID NO: 863349 - DNA, 33 bp, Homo sapien
aaaagtcaaaaagagacgaggcaaaatggtagc

SEQ ID NO: 863350 - DNA, 33 bp, Homo sapien
aaaagtcaaaaagagatgaggcaaaatggtagc

SEQ ID NO: 863351 - DNA, 33 bp, Homo sapien
gatcaaaattagatgccatgtgaattaaaagca

SEQ ID NO: 863352 - DNA, 33 bp, Homo sapien
gatcaaaattagatgctatgtgaattaaaagca

SEQ ID NO: 863353 - DNA, 33 bp, Homo sapien
ctgatccacaaaacaaataattgcagaaactgt

SEQ ID NO: 863354 - DNA, 33 bp, Homo sapien
ctgatccacaaaacaagtaattgcagaaactgt

SEQ ID NO: 863355 - DNA, 33 bp, Homo sapien
aaggctaatttggtcgacatcaatactcaaaaa

SEQ ID NO: 863356 - DNA, 33 bp, Homo sapien
aaggctaatttggtcggcatcaatactcaaaaa

SEQ ID NO: 863357 - DNA, 33 bp, Homo sapien
atgatctcatttaatcccaattacttcccaagg

SEQ ID NO: 863358 - DNA, 33 bp, Homo sapien
atgatctcatttaatcgcaattacttcccaagg

SEQ ID NO: 863359 - DNA, 33 bp, Homo sapien
attcaatgaagcatcaaataaaactctagtgat

SEQ ID NO: 863360 - DNA, 33 bp, Homo sapien
attcaatgaagcatcagataaaactctagtgat

SEQ ID NO: 863361 - DNA, 33 bp, Homo sapien
ttcacattaaatggaacctacacatttattgaa

SEQ ID NO: 863362 - DNA, 33 bp, Homo sapien
ttcacattaaatggaatctacacatttattgaa

SEQ ID NO: 863363 - DNA, 33 bp, Homo sapien
aggagtgaatgggtcacggtgtctgttcttggg

SEQ ID NO: 863364 - DNA, 33 bp, Homo sapien
aggagtgaatgggtcatggtgtctgttcttggg

SEQ ID NO: 863365 - DNA, 33 bp, Homo sapien
aaccaggcaagttacactctgcaaagctccttt

SEQ ID NO: 863366 - DNA, 33 bp, Homo sapien
aaccaggcaagttacattctgcaaagctccttt

SEQ ID NO: 863367 - DNA, 33 bp, Homo sapien
atggtatttgatgtaccggatcactatcagcac

SEQ ID NO: 863368 - DNA, 33 bp, Homo sapien
atggtatttgatgtactggatcactatcagcac

SEQ ID NO: 863369 - DNA, 33 bp, Homo sapien
aagcatcatgtagttacatctgtccgttgtttc

SEQ ID NO: 863370 - DNA, 33 bp, Homo sapien
aagcatcatgtagttatatctgtccgttgtttc

SEQ ID NO: 863371 - DNA, 33 bp, Homo sapien
tcacttgtaaagtaagcatttgcaatgaaccca

SEQ ID NO: 863372 - DNA, 33 bp, Homo sapien
tcacttgtaaagtaagtatttgcaatgaaccca

SEQ ID NO: 863373 - DNA, 33 bp, Homo sapien
ttcgtgtgttgaggataaaatggaagatgaaga

SEQ ID NO: 863374 - DNA, 33 bp, Homo sapien
ttcgtgtgttgaggattaaatggaagatgaaga

SEQ ID NO: 863375 - DNA, 33 bp, Homo sapien
tgtagttgactaaaaccgatgagattatctttt

SEQ ID NO: 863376 - DNA, 33 bp, Homo sapien
tgtagttgactaaaactgatgagattatctttt

SEQ ID NO: 863377 - DNA, 33 bp, Homo sapien
aagctcaatgaagtcacgagaagatggatgtcc

SEQ ID NO: 863378 - DNA, 33 bp, Homo sapien
aagctcaatgaagtcatgagaagatggatgtcc

SEQ ID NO: 863379 - DNA, 33 bp, Homo sapien
taattgttgttttatacgactgagttttcaggt

SEQ ID NO: 863380 - DNA, 33 bp, Homo sapien
taattgttgttttatatgactgagttttcaggt

SEQ ID NO: 863381 - DNA, 33 bp, Homo sapien
acctatgttttttagcggattgtcacatcattc

SEQ ID NO: 863382 - DNA, 33 bp, Homo sapien
acctatgttttttagctgattgtcacatcattc

SEQ ID NO: 863383 - DNA, 33 bp, Homo sapien
tgatgacaagacaaaacggaacagttaaaagat

SEQ ID NO: 863384 - DNA, 33 bp, Homo sapien
tgatgacaagacaaaatggaacagttaaaagat

SEQ ID NO: 863385 - DNA, 33 bp, Homo sapien
tcttctaggcaacaacgagtccacacactggtt

SEQ ID NO: 863386 - DNA, 33 bp, Homo sapien
tcttctaggcaacaactagtccacacactggtt

SEQ ID NO: 863387 - DNA, 33 bp, Homo sapien
acaaacgtaagacaccaacaaatcccataattc

SEQ ID NO: 863388 - DNA, 33 bp, Homo sapien
acaaacgtaagacacctacaaatcccataattc

SEQ ID NO: 863389 - DNA, 33 bp, Homo sapien
agtgatgtccacttgacagtaaagggtaaatag

SEQ ID NO: 863390 - DNA, 33 bp, Homo sapien
agtgatgtccacttgatagtaaagggtaaatag

SEQ ID NO: 863391 - DNA, 33 bp, Homo sapien
gctgcagctcctactagctttgttctgggcgag

SEQ ID NO: 863392 - DNA, 33 bp, Homo sapien
gctgcagctcctactatctttgttctgggcgag

SEQ ID NO: 863393 - DNA, 33 bp, Homo sapien
tgttctattcttccagacactgttctccaccat

SEQ ID NO: 863394 - DNA, 33 bp, Homo sapien
tgttctattcttccagccactgttctccaccat

SEQ ID NO: 863395 - DNA, 33 bp, Homo sapien
gcagcagtaaggacgacagactcaaggcgagga

SEQ ID NO: 863396 - DNA, 33 bp, Homo sapien
gcagcagtaaggacgagagactcaaggcgagga

SEQ ID NO: 863397 - DNA, 33 bp, Homo sapien
gaaaagcgagaaccaccggtcttcctttcagac

SEQ ID NO: 863398 - DNA, 33 bp, Homo sapien
gaaaagcgagaaccactggtcttcctttcagac

SEQ ID NO: 863399 - DNA, 33 bp, Homo sapien
ccatataaaatccaaacgatgacagtaattgaa

SEQ ID NO: 863400 - DNA, 33 bp, Homo sapien
ccatataaaatccaaatgatgacagtaattgaa

SEQ ID NO: 863401 - DNA, 33 bp, Homo sapien
ggaagtaggtgggcaactgaaggaaaggtgaat

SEQ ID NO: 863402 - DNA, 33 bp, Homo sapien
ggaagtaggtgggcaattgaaggaaaggtgaat

SEQ ID NO: 863403 - DNA, 33 bp, Homo sapien
ctgtctaaatcctaaacgttagcaagagttttc

SEQ ID NO: 863404 - DNA, 33 bp, Homo sapien
ctgtctaaatcctaaatgttagcaagagttttc

SEQ ID NO: 863405 - DNA, 33 bp, Homo sapien
gcagacctttttacaccattctcaccgagagat

SEQ ID NO: 863406 - DNA, 33 bp, Homo sapien
gcagacctttttacactattctcaccgagagat

SEQ ID NO: 863407 - DNA, 33 bp, Homo sapien
gtgactatttcagaacgggctataaatgttcaa

SEQ ID NO: 863408 - DNA, 33 bp, Homo sapien
gtgactatttcagaactggctataaatgttcaa

SEQ ID NO: 863409 - DNA, 33 bp, Homo sapien
ttatcaaatctgccacacatttatatttatttt

SEQ ID NO: 863410 - DNA, 33 bp, Homo sapien
ttatcaaatctgccacgcatttatatttatttt

SEQ ID NO: 863411 - DNA, 33 bp, Homo sapien
attgagtttctgactgcaccaaaatgcaattat

SEQ ID NO: 863412 - DNA, 33 bp, Homo sapien
attgagtttctgactgtaccaaaatgcaattat

SEQ ID NO: 863413 - DNA, 33 bp, Homo sapien
aataggcacctggtaacaataattagtaacttt

SEQ ID NO: 863414 - DNA, 33 bp, Homo sapien
aataggcacctggtaagaataattagtaacttt

SEQ ID NO: 863415 - DNA, 33 bp, Homo sapien
tccacagataacaaacacagcaatgcaggcagc

SEQ ID NO: 863416 - DNA, 33 bp, Homo sapien
tccacagataacaaacgcagcaatgcaggcagc

SEQ ID NO: 863417 - DNA, 33 bp, Homo sapien
caaatggaaaatttcacaacagcacagtatagt

SEQ ID NO: 863418 - DNA, 33 bp, Homo sapien
caaatggaaaatttcataacagcacagtatagt

SEQ ID NO: 863419 - DNA, 33 bp, Homo sapien
cttcacagaacttcaactattctgctcccagta

SEQ ID NO: 863420 - DNA, 33 bp, Homo sapien
cttcacagaacttcaattattctgctcccagta

SEQ ID NO: 863421 - DNA, 33 bp, Homo sapien
agaatttgtacctaagacacctgtggaatgaac

SEQ ID NO: 863422 - DNA, 33 bp, Homo sapien
agaatttgtacctaaggcacctgtggaatgaac

SEQ ID NO: 863423 - DNA, 33 bp, Homo sapien
gaaagggtgtttgtaaatatggaggatgtatgg

SEQ ID NO: 863424 - DNA, 33 bp, Homo sapien
gaaagggtgtttgtaagtatggaggatgtatgg

SEQ ID NO: 863425 - DNA, 33 bp, Homo sapien
gcttcctgatgtctcaaaacctgatttgggtgt

SEQ ID NO: 863426 - DNA, 33 bp, Homo sapien
gcttcctgatgtctcagaacctgatttgggtgt

SEQ ID NO: 863427 - DNA, 33 bp, Homo sapien
aagaatattctcataacactataaacagcatac

SEQ ID NO: 863428 - DNA, 33 bp, Homo sapien
aagaatattctcataagactataaacagcatac

SEQ ID NO: 863429 - DNA, 33 bp, Homo sapien
caaaaaataactaacactgcgaacatccaaatt

SEQ ID NO: 863430 - DNA, 33 bp, Homo sapien
caaaaaataactaacattgcgaacatccaaatt

SEQ ID NO: 863431 - DNA, 33 bp, Homo sapien
agtcaaggccgggatacaaattttgcctcgcgg

SEQ ID NO: 863432 - DNA, 33 bp, Homo sapien
agtcaaggccgggatagaaattttgcctcgcgg

SEQ ID NO: 863433 - DNA, 33 bp, Homo sapien
tagggaactctggcaccggaattttatatttac

SEQ ID NO: 863434 - DNA, 33 bp, Homo sapien
tagggaactctggcactggaattttatatttac

SEQ ID NO: 863435 - DNA, 33 bp, Homo sapien
accccatcgtatcttcctctgtcttactagatg

SEQ ID NO: 863436 - DNA, 33 bp, Homo sapien
accccatcgtatcttcgtctgtcttactagatg

SEQ ID NO: 863437 - DNA, 33 bp, Homo sapien
tcagcgtgggcctatgatcaagcctggccaagg

SEQ ID NO: 863438 - DNA, 33 bp, Homo sapien
tcagcgtgggcctatggtcaagcctggccaagg

SEQ ID NO: 863439 - DNA, 33 bp, Homo sapien
aaaaagaaatgaaagccgctgccagtgaaaaga

SEQ ID NO: 863440 - DNA, 33 bp, Homo sapien
aaaaagaaatgaaagctgctgccagtgaaaaga

SEQ ID NO: 863441 - DNA, 33 bp, Homo sapien
gtcagagtcatgtggacagatgtgttctgctag

SEQ ID NO: 863442 - DNA, 33 bp, Homo sapien
gtcagagtcatgtggatagatgtgttctgctag

SEQ ID NO: 863443 - DNA, 33 bp, Homo sapien
ttgccagtctgctcagaactttcatggaaccag

SEQ ID NO: 863444 - DNA, 33 bp, Homo sapien
ttgccagtctgctcaggactttcatggaaccag

SEQ ID NO: 863445 - DNA, 33 bp, Homo sapien
gccattgttttcaggacgtggcgctgatgttgg

SEQ ID NO: 863446 - DNA, 33 bp, Homo sapien
gccattgttttcaggatgtggcgctgatgttgg

SEQ ID NO: 863447 - DNA, 33 bp, Homo sapien
catgctttccttctaacaggctctgcaatgttc

SEQ ID NO: 863448 - DNA, 33 bp, Homo sapien
catgctttccttctaataggctctgcaatgttc

SEQ ID NO: 863449 - DNA, 33 bp, Homo sapien
ttctgcagtcatctgaacaaaatatagagacac

SEQ ID NO: 863450 - DNA, 33 bp, Homo sapien
ttctgcagtcatctgagcaaaatatagagacac

SEQ ID NO: 863451 - DNA, 33 bp, Homo sapien
ttattagcttctttcaacaggcttacaaataaa

SEQ ID NO: 863452 - DNA, 33 bp, Homo sapien
ttattagcttctttcagcaggcttacaaataaa

SEQ ID NO: 863453 - DNA, 33 bp, Homo sapien
acttcagctattctcaaagagttagtcttcctt

SEQ ID NO: 863454 - DNA, 33 bp, Homo sapien
acttcagctattctcagagagttagtcttcctt

SEQ ID NO: 863455 - DNA, 33 bp, Homo sapien
attttatcacagaggaagttccagaaaggattt

SEQ ID NO: 863456 - DNA, 33 bp, Homo sapien
attttatcacagaggaggttccagaaaggattt

SEQ ID NO: 863457 - DNA, 33 bp, Homo sapien
ataccaactctcacaagtgtcatgatgtaacag

SEQ ID NO: 863458 - DNA, 33 bp, Homo sapien
ataccaactctcacaattgtcatgatgtaacag

SEQ ID NO: 863459 - DNA, 33 bp, Homo sapien
ttcaggtatatgagaaaagagcttccaggtaag

SEQ ID NO: 863460 - DNA, 33 bp, Homo sapien
ttcaggtatatgagaacagagcttccaggtaag

SEQ ID NO: 863461 - DNA, 33 bp, Homo sapien
gacctcagaaggaaggacatagactttcaagag

SEQ ID NO: 863462 - DNA, 33 bp, Homo sapien
gacctcagaaggaagggcatagactttcaagag

SEQ ID NO: 863463 - DNA, 33 bp, Homo sapien
gggtttatcataaagcaagagttaggtttaata

SEQ ID NO: 863464 - DNA, 33 bp, Homo sapien
gggtttatcataaagcgagagttaggtttaata

SEQ ID NO: 863465 - DNA, 33 bp, Homo sapien
gctgtggtgccatatacgaagaacatctaaacc

SEQ ID NO: 863466 - DNA, 33 bp, Homo sapien
gctgtggtgccatataggaagaacatctaaacc

SEQ ID NO: 863467 - DNA, 33 bp, Homo sapien
ttcatctaactgattgaattattcagcaatcat

SEQ ID NO: 863468 - DNA, 33 bp, Homo sapien
ttcatctaactgattggattattcagcaatcat

SEQ ID NO: 863469 - DNA, 33 bp, Homo sapien
tggtatccagatgccacaatcttaggatagtca

SEQ ID NO: 863470 - DNA, 33 bp, Homo sapien
tggtatccagatgccataatcttaggatagtca

SEQ ID NO: 863471 - DNA, 33 bp, Homo sapien
cacaggggtctcagaaatgaaaacaggcctctg

SEQ ID NO: 863472 - DNA, 33 bp, Homo sapien
cacaggggtctcagaattgaaaacaggcctctg

SEQ ID NO: 863473 - DNA, 33 bp, Homo sapien
aggtacgcacaaatttaaaaagagagctgaagt

SEQ ID NO: 863474 - DNA, 33 bp, Homo sapien
aggtacgcacaaattttaaaagagagctgaagt

SEQ ID NO: 863475 - DNA, 33 bp, Homo sapien
ccagcttcaactcaccactagtctcaacagctg

SEQ ID NO: 863476 - DNA, 33 bp, Homo sapien
ccagcttcaactcaccgctagtctcaacagctg

SEQ ID NO: 863477 - DNA, 33 bp, Homo sapien
aacagagaagataatgcaattgagtttgctatt

SEQ ID NO: 863478 - DNA, 33 bp, Homo sapien
aacagagaagataatggaattgagtttgctatt

SEQ ID NO: 863479 - DNA, 33 bp, Homo sapien
acaacccaagctggaactaaaatctgagcagac

SEQ ID NO: 863480 - DNA, 33 bp, Homo sapien
acaacccaagctggaagtaaaatctgagcagac

SEQ ID NO: 863481 - DNA, 33 bp, Homo sapien
ggacttagaagacgaccggatataatatatgcc

SEQ ID NO: 863482 - DNA, 33 bp, Homo sapien
ggacttagaagacgactggatataatatatgcc

SEQ ID NO: 863483 - DNA, 33 bp, Homo sapien
gaaacctggtttatctaacaatattttctacta

SEQ ID NO: 863484 - DNA, 33 bp, Homo sapien
gaaacctggtttatcttacaatattttctacta

SEQ ID NO: 863485 - DNA, 33 bp, Homo sapien
gagtaagaatagcaaaacataagaagaggcaca

SEQ ID NO: 863486 - DNA, 33 bp, Homo sapien
gagtaagaatagcaaagcataagaagaggcaca

SEQ ID NO: 863487 - DNA, 33 bp, Homo sapien
caaagtgcctgagggaagataaacaagacagta

SEQ ID NO: 863488 - DNA, 33 bp, Homo sapien
caaagtgcctgagggacgataaacaagacagta

SEQ ID NO: 863489 - DNA, 33 bp, Homo sapien
catgaaaaacctaggaaattaagtagcaaccaa

SEQ ID NO: 863490 - DNA, 33 bp, Homo sapien
catgaaaaacctaggagattaagtagcaaccaa

SEQ ID NO: 863491 - DNA, 33 bp, Homo sapien
tgtgtattttttttccactggttatcaaggttt

SEQ ID NO: 863492 - DNA, 33 bp, Homo sapien
tgtgtattttttttcctctggttatcaaggttt

SEQ ID NO: 863493 - DNA, 33 bp, Homo sapien
gtgtttgagaacctctcaactatgatataagct

SEQ ID NO: 863494 - DNA, 33 bp, Homo sapien
gtgtttgagaacctcttaactatgatataagct

SEQ ID NO: 863495 - DNA, 33 bp, Homo sapien
gtcctgggtcaaataacgtttacagtttgggat

SEQ ID NO: 863496 - DNA, 33 bp, Homo sapien
gtcctgggtcaaataaggtttacagtttgggat

SEQ ID NO: 863497 - DNA, 33 bp, Homo sapien
ttctgactggcgagtgccaatagttattaggta

SEQ ID NO: 863498 - DNA, 33 bp, Homo sapien
ttctgactggcgagtgtcaatagttattaggta

SEQ ID NO: 863499 - DNA, 33 bp, Homo sapien
ctactctgtagcctgaacagactgtcacagaac

SEQ ID NO: 863500 - DNA, 33 bp, Homo sapien
ctactctgtagcctgagcagactgtcacagaac

SEQ ID NO: 863501 - DNA, 33 bp, Homo sapien
ctgtgatggagtcaggcagcacagggaagtggc

SEQ ID NO: 863502 - DNA, 33 bp, Homo sapien
ctgtgatggagtcaggtagcacagggaagtggc

SEQ ID NO: 863503 - DNA, 33 bp, Homo sapien
cacaatgtgtattccacgtatgtgtgtgctctc

SEQ ID NO: 863504 - DNA, 33 bp, Homo sapien
cacaatgtgtattccatgtatgtgtgtgctctc

SEQ ID NO: 863505 - DNA, 33 bp, Homo sapien
tcttatatgtacaaaacagtactggttatggag

SEQ ID NO: 863506 - DNA, 33 bp, Homo sapien
tcttatatgtacaaaatagtactggttatggag

SEQ ID NO: 863507 - DNA, 33 bp, Homo sapien
tcatcagctcctctacaaacagagcagtctata

SEQ ID NO: 863508 - DNA, 33 bp, Homo sapien
tcatcagctcctctacgaacagagcagtctata

SEQ ID NO: 863509 - DNA, 33 bp, Homo sapien
ggcaactcaattcttccagttgtcaggtacaaa

SEQ ID NO: 863510 - DNA, 33 bp, Homo sapien
ggcaactcaattcttctagttgtcaggtacaaa

SEQ ID NO: 863511 - DNA, 33 bp, Homo sapien
cctgagtgatagcagacgagatgaggagtggcc

SEQ ID NO: 863512 - DNA, 33 bp, Homo sapien
cctgagtgatagcagaggagatgaggagtggcc

SEQ ID NO: 863513 - DNA, 33 bp, Homo sapien
gataacatacaaggcaatatagaatagtgatta

SEQ ID NO: 863514 - DNA, 33 bp, Homo sapien
gataacatacaaggcagtatagaatagtgatta

SEQ ID NO: 863515 - DNA, 33 bp, Homo sapien
atacaccaatgataataaacatgattcacttca

SEQ ID NO: 863516 - DNA, 33 bp, Homo sapien
atacaccaatgataatgaacatgattcacttca

SEQ ID NO: 863517 - DNA, 33 bp, Homo sapien
gtgtaaatcatctgcaatatttcaatttcagag

SEQ ID NO: 863518 - DNA, 33 bp, Homo sapien
gtgtaaatcatctgcactatttcaatttcagag

SEQ ID NO: 863519 - DNA, 33 bp, Homo sapien
ttttactcatctctcgcattatccatattctat

SEQ ID NO: 863520 - DNA, 33 bp, Homo sapien
ttttactcatctctcgtattatccatattctat

SEQ ID NO: 863521 - DNA, 33 bp, Homo sapien
ggatttaacaaatccaacacttgcttggaaaat

SEQ ID NO: 863522 - DNA, 33 bp, Homo sapien
ggatttaacaaatccagcacttgcttggaaaat

SEQ ID NO: 863523 - DNA, 33 bp, Homo sapien
agagctgggattagagaccttccctgatttccc

SEQ ID NO: 863524 - DNA, 33 bp, Homo sapien
agagctgggattagaggccttccctgatttccc

SEQ ID NO: 863525 - DNA, 33 bp, Homo sapien
aaaacgaccttgaataatatctgcatatggctt

SEQ ID NO: 863526 - DNA, 33 bp, Homo sapien
aaaacgaccttgaatagtatctgcatatggctt

SEQ ID NO: 863527 - DNA, 33 bp, Homo sapien
ctaatagaaatgtgggaactgtccagaatagag

SEQ ID NO: 863528 - DNA, 33 bp, Homo sapien
ctaatagaaatgtggggactgtccagaatagag

SEQ ID NO: 863529 - DNA, 33 bp, Homo sapien
atagcacagatctgtaactcccgaagaacacag

SEQ ID NO: 863530 - DNA, 33 bp, Homo sapien
atagcacagatctgtagctcccgaagaacacag

SEQ ID NO: 863531 - DNA, 33 bp, Homo sapien
aacattttcttcatcccctcagtaatccctgca

SEQ ID NO: 863532 - DNA, 33 bp, Homo sapien
aacattttcttcatcctctcagtaatccctgca

SEQ ID NO: 863533 - DNA, 33 bp, Homo sapien
agaattagaaataaggaaattccttgcatcagg

SEQ ID NO: 863534 - DNA, 33 bp, Homo sapien
agaattagaaataagggaattccttgcatcagg

SEQ ID NO: 863535 - DNA, 33 bp, Homo sapien
ccctgcagtgccattaagagaagcggaagcagg

SEQ ID NO: 863536 - DNA, 33 bp, Homo sapien
ccctgcagtgccattacgagaagcggaagcagg

SEQ ID NO: 863537 - DNA, 33 bp, Homo sapien
cttgttcatctaggaaagttttggttttttcta

SEQ ID NO: 863538 - DNA, 33 bp, Homo sapien
cttgttcatctaggaaggttttggttttttcta

SEQ ID NO: 863539 - DNA, 33 bp, Homo sapien
cattatgttgaggtaacaaatgaccagtctcaa

SEQ ID NO: 863540 - DNA, 33 bp, Homo sapien
cattatgttgaggtaataaatgaccagtctcaa

SEQ ID NO: 863541 - DNA, 33 bp, Homo sapien
tggcctacatacttgccacaaatcacattattt

SEQ ID NO: 863542 - DNA, 33 bp, Homo sapien
tggcctacatacttgctacaaatcacattattt

SEQ ID NO: 863543 - DNA, 33 bp, Homo sapien
tgtccacattccagtacgagtttagtaagtact

SEQ ID NO: 863544 - DNA, 33 bp, Homo sapien
tgtccacattccagtatgagtttagtaagtact

SEQ ID NO: 863545 - DNA, 33 bp, Homo sapien
ttcttttacttttccactaacagttgccttttc

SEQ ID NO: 863546 - DNA, 33 bp, Homo sapien
ttcttttacttttccattaacagttgccttttc

SEQ ID NO: 863547 - DNA, 33 bp, Homo sapien
ttgggcaacagcagaaaccaagagaaaggcata

SEQ ID NO: 863548 - DNA, 33 bp, Homo sapien
ttgggcaacagcagaagccaagagaaaggcata

SEQ ID NO: 863549 - DNA, 33 bp, Homo sapien
catgctcactattacacgcatttatttccagat

SEQ ID NO: 863550 - DNA, 33 bp, Homo sapien
catgctcactattacaggcatttatttccagat

SEQ ID NO: 863551 - DNA, 33 bp, Homo sapien
attaaagattttagccaaacttctaaataatga

SEQ ID NO: 863552 - DNA, 33 bp, Homo sapien
attaaagattttagccgaacttctaaataatga

SEQ ID NO: 863553 - DNA, 33 bp, Homo sapien
atccatcctctcttcacagttgagcctctctcc

SEQ ID NO: 863554 - DNA, 33 bp, Homo sapien
atccatcctctcttcagagttgagcctctctcc

SEQ ID NO: 863555 - DNA, 33 bp, Homo sapien
gccagttcccataagacaagttgataatcaccc

SEQ ID NO: 863556 - DNA, 33 bp, Homo sapien
gccagttcccataagagaagttgataatcaccc

SEQ ID NO: 863557 - DNA, 33 bp, Homo sapien
ccactccctgtttgggaaccactcaagcagatt

SEQ ID NO: 863558 - DNA, 33 bp, Homo sapien
ccactccctgtttggggaccactcaagcagatt

SEQ ID NO: 863559 - DNA, 33 bp, Homo sapien
tttcttgtgtccaaaggagacagatttccactc

SEQ ID NO: 863560 - DNA, 33 bp, Homo sapien
tttcttgtgtccaaagtagacagatttccactc

SEQ ID NO: 863561 - DNA, 33 bp, Homo sapien
aaaagtagcaataagaaggcagcttttacatat

SEQ ID NO: 863562 - DNA, 33 bp, Homo sapien
aaaagtagcaataagagggcagcttttacatat

SEQ ID NO: 863563 - DNA, 33 bp, Homo sapien
gtgcagaaagtacacccggggcaaaattccttg

SEQ ID NO: 863564 - DNA, 33 bp, Homo sapien
gtgcagaaagtacacctggggcaaaattccttg

SEQ ID NO: 863565 - DNA, 33 bp, Homo sapien
gtgctgctcccaggcaatgattgagcgcagcag

SEQ ID NO: 863566 - DNA, 33 bp, Homo sapien
gtgctgctcccaggcagtgattgagcgcagcag

SEQ ID NO: 863567 - DNA, 33 bp, Homo sapien
ttatccttgatgtttacgcatttttcagcaagt

SEQ ID NO: 863568 - DNA, 33 bp, Homo sapien
ttatccttgatgtttatgcatttttcagcaagt

SEQ ID NO: 863569 - DNA, 33 bp, Homo sapien
ctttgatcttcagaccactgtgggtttgttccc

SEQ ID NO: 863570 - DNA, 33 bp, Homo sapien
ctttgatcttcagacctctgtgggtttgttccc

SEQ ID NO: 863571 - DNA, 33 bp, Homo sapien
ttactatctataaggccgagatttcatatgcca

SEQ ID NO: 863572 - DNA, 33 bp, Homo sapien
ttactatctataaggctgagatttcatatgcca

SEQ ID NO: 863573 - DNA, 33 bp, Homo sapien
caactttgaccttcacaatgctgacatcttgtt

SEQ ID NO: 863574 - DNA, 33 bp, Homo sapien
caactttgaccttcactatgctgacatcttgtt

SEQ ID NO: 863575 - DNA, 33 bp, Homo sapien
ggagggaattgtgaataagaggagtctagaagt

SEQ ID NO: 863576 - DNA, 33 bp, Homo sapien
ggagggaattgtgaatgagaggagtctagaagt

SEQ ID NO: 863577 - DNA, 33 bp, Homo sapien
tttagtgatgctcttaaccattgaatatcatgt

SEQ ID NO: 863578 - DNA, 33 bp, Homo sapien
tttagtgatgctcttagccattgaatatcatgt

SEQ ID NO: 863579 - DNA, 33 bp, Homo sapien
accggactgtcctaaacgttctgtgggcaatgg

SEQ ID NO: 863580 - DNA, 33 bp, Homo sapien
accggactgtcctaaatgttctgtgggcaatgg

SEQ ID NO: 863581 - DNA, 33 bp, Homo sapien
cagaaaaatcaaggccagctgcaagatttctga

SEQ ID NO: 863582 - DNA, 33 bp, Homo sapien
cagaaaaatcaaggccggctgcaagatttctga

SEQ ID NO: 863583 - DNA, 33 bp, Homo sapien
ctcagtgtcaggtgccaaatggactctcatggc

SEQ ID NO: 863584 - DNA, 33 bp, Homo sapien
ctcagtgtcaggtgccgaatggactctcatggc

SEQ ID NO: 863585 - DNA, 33 bp, Homo sapien
tcagattaaaacaacaccggaacttgaataatt

SEQ ID NO: 863586 - DNA, 33 bp, Homo sapien
tcagattaaaacaacatcggaacttgaataatt

SEQ ID NO: 863587 - DNA, 33 bp, Homo sapien
ccttgtccttagtagtaacatctgtattcccta

SEQ ID NO: 863588 - DNA, 33 bp, Homo sapien
ccttgtccttagtagtcacatctgtattcccta

SEQ ID NO: 863589 - DNA, 33 bp, Homo sapien
aaaacggccaattcaaatcgatggctatggctt

SEQ ID NO: 863590 - DNA, 33 bp, Homo sapien
aaaacggccaattcaagtcgatggctatggctt

SEQ ID NO: 863591 - DNA, 33 bp, Homo sapien
ctaaaaatgtggtgataaatgaagactctaaaa

SEQ ID NO: 863592 - DNA, 33 bp, Homo sapien
ctaaaaatgtggtgatgaatgaagactctaaaa

SEQ ID NO: 863593 - DNA, 33 bp, Homo sapien
agttttgtagaatagaacttcaaaatatctact

SEQ ID NO: 863594 - DNA, 33 bp, Homo sapien
agttttgtagaatagaccttcaaaatatctact

SEQ ID NO: 863595 - DNA, 33 bp, Homo sapien
caaaatgaatgtgtcaataccctccaaaaaatg

SEQ ID NO: 863596 - DNA, 33 bp, Homo sapien
caaaatgaatgtgtcagtaccctccaaaaaatg

SEQ ID NO: 863597 - DNA, 33 bp, Homo sapien
agaagtaggaagtaggaacctcaaaggatggaa

SEQ ID NO: 863598 - DNA, 33 bp, Homo sapien
agaagtaggaagtagggacctcaaaggatggaa

SEQ ID NO: 863599 - DNA, 33 bp, Homo sapien
ttttctcttgctgccacgatgtaaaaagttcct

SEQ ID NO: 863600 - DNA, 33 bp, Homo sapien
ttttctcttgctgccatgatgtaaaaagttcct

SEQ ID NO: 863601 - DNA, 33 bp, Homo sapien
aatttcctacttcaaaagttatagtactgtttt

SEQ ID NO: 863602 - DNA, 33 bp, Homo sapien
aatttcctacttcaaaggttatagtactgtttt

SEQ ID NO: 863603 - DNA, 33 bp, Homo sapien
ctggagctatacttacggcccacgtccccacca

SEQ ID NO: 863604 - DNA, 33 bp, Homo sapien
ctggagctatacttactgcccacgtccccacca

SEQ ID NO: 863605 - DNA, 33 bp, Homo sapien
ataaattaatgcaaaacggtcaacctacagact

SEQ ID NO: 863606 - DNA, 33 bp, Homo sapien
ataaattaatgcaaaatggtcaacctacagact

SEQ ID NO: 863607 - DNA, 33 bp, Homo sapien
tctttagtttgtataacgtctttgtgagatagg

SEQ ID NO: 863608 - DNA, 33 bp, Homo sapien
tctttagtttgtataatgtctttgtgagatagg

SEQ ID NO: 863609 - DNA, 33 bp, Homo sapien
aaaagtttttggtttcccatgtcttaaatctac

SEQ ID NO: 863610 - DNA, 33 bp, Homo sapien
aaaagtttttggtttctcatgtcttaaatctac

SEQ ID NO: 863611 - DNA, 33 bp, Homo sapien
tcttattttgtcatcccatgatggaaagcggaa

SEQ ID NO: 863612 - DNA, 33 bp, Homo sapien
tcttattttgtcatcctatgatggaaagcggaa

SEQ ID NO: 863613 - DNA, 33 bp, Homo sapien
cggaaaggtaaaagacaacttgtgggagagagc

SEQ ID NO: 863614 - DNA, 33 bp, Homo sapien
cggaaaggtaaaagaccacttgtgggagagagc

SEQ ID NO: 863615 - DNA, 33 bp, Homo sapien
tcatgtagtcactttcacttcaaaatccttaag

SEQ ID NO: 863616 - DNA, 33 bp, Homo sapien
tcatgtagtcactttcgcttcaaaatccttaag

SEQ ID NO: 863617 - DNA, 33 bp, Homo sapien
ggaatggggaaatagacgtgtaagtaaagtctt

SEQ ID NO: 863618 - DNA, 33 bp, Homo sapien
ggaatggggaaatagatgtgtaagtaaagtctt

SEQ ID NO: 863619 - DNA, 33 bp, Homo sapien
gatcaaggtgttaagaaacccactctctggtaa

SEQ ID NO: 863620 - DNA, 33 bp, Homo sapien
gatcaaggtgttaagagacccactctctggtaa

SEQ ID NO: 863621 - DNA, 33 bp, Homo sapien
tggtcagagaagaaaacgcctacatttgatcat

SEQ ID NO: 863622 - DNA, 33 bp, Homo sapien
tggtcagagaagaaaatgcctacatttgatcat

SEQ ID NO: 863623 - DNA, 33 bp, Homo sapien
gataatggataataaacagtggctttagattat

SEQ ID NO: 863624 - DNA, 33 bp, Homo sapien
gataatggataataaatagtggctttagattat

SEQ ID NO: 863625 - DNA, 33 bp, Homo sapien
actagcatccacctcggaaggcttttgaggatt

SEQ ID NO: 863626 - DNA, 33 bp, Homo sapien
actagcatccacctcgtaaggcttttgaggatt

SEQ ID NO: 863627 - DNA, 33 bp, Homo sapien
ccccaacttatttcaccgacttatttcactatg

SEQ ID NO: 863628 - DNA, 33 bp, Homo sapien
ccccaacttatttcactgacttatttcactatg

SEQ ID NO: 863629 - DNA, 33 bp, Homo sapien
ggaaatccagcaaacaactattaatatacaaat

SEQ ID NO: 863630 - DNA, 33 bp, Homo sapien
ggaaatccagcaaacagctattaatatacaaat

SEQ ID NO: 863631 - DNA, 33 bp, Homo sapien
ccagcttatgtgagaaaaacaaagacggaatta

SEQ ID NO: 863632 - DNA, 33 bp, Homo sapien
ccagcttatgtgagaagaacaaagacggaatta

SEQ ID NO: 863633 - DNA, 33 bp, Homo sapien
aaaagtcataactagactcatacctgaaaagtt

SEQ ID NO: 863634 - DNA, 33 bp, Homo sapien
aaaagtcataactagattcatacctgaaaagtt

SEQ ID NO: 863635 - DNA, 33 bp, Homo sapien
atctgacctcctttcaaaagatgccatttggct

SEQ ID NO: 863636 - DNA, 33 bp, Homo sapien
atctgacctcctttcataagatgccatttggct

SEQ ID NO: 863637 - DNA, 33 bp, Homo sapien
atgtcaccgctgatctaagaggaggcagaacgc

SEQ ID NO: 863638 - DNA, 33 bp, Homo sapien
atgtcaccgctgatctgagaggaggcagaacgc

SEQ ID NO: 863639 - DNA, 33 bp, Homo sapien
tctgtcggaaccctaaagacagcccatctacct

SEQ ID NO: 863640 - DNA, 33 bp, Homo sapien
tctgtcggaaccctaaggacagcccatctacct

SEQ ID NO: 863641 - DNA, 33 bp, Homo sapien
tcaggcaggctaatgaacatggctagagaaggt

SEQ ID NO: 863642 - DNA, 33 bp, Homo sapien
tcaggcaggctaatgatcatggctagagaaggt

SEQ ID NO: 863643 - DNA, 33 bp, Homo sapien
aagtgttttataataaaggttagcttcgtggaa

SEQ ID NO: 863644 - DNA, 33 bp, Homo sapien
aagtgttttataataagggttagcttcgtggaa

SEQ ID NO: 863645 - DNA, 33 bp, Homo sapien
attgttattacctatcaccactattttatacaa

SEQ ID NO: 863646 - DNA, 33 bp, Homo sapien
attgttattacctatcgccactattttatacaa

SEQ ID NO: 863647 - DNA, 33 bp, Homo sapien
gaaagagcaaacttgacgatagatcaatagata

SEQ ID NO: 863648 - DNA, 33 bp, Homo sapien
gaaagagcaaacttgatgatagatcaatagata

SEQ ID NO: 863649 - DNA, 33 bp, Homo sapien
aatctaaaatgctgaacgattgttctagtgaac

SEQ ID NO: 863650 - DNA, 33 bp, Homo sapien
aatctaaaatgctgaatgattgttctagtgaac

SEQ ID NO: 863651 - DNA, 33 bp, Homo sapien
attcttttcctcataaactgtatcaatccttaa

SEQ ID NO: 863652 - DNA, 33 bp, Homo sapien
attcttttcctcataagctgtatcaatccttaa

SEQ ID NO: 863653 - DNA, 33 bp, Homo sapien
ggaatatgatttcaccccttatcattcaacaat

SEQ ID NO: 863654 - DNA, 33 bp, Homo sapien
ggaatatgatttcacctcttatcattcaacaat

SEQ ID NO: 863655 - DNA, 33 bp, Homo sapien
cagaatataaacagaaatcaccagctagaatta

SEQ ID NO: 863656 - DNA, 33 bp, Homo sapien
cagaatataaacagaagtcaccagctagaatta

SEQ ID NO: 863657 - DNA, 33 bp, Homo sapien
aatgcaattactatcacgccagtctagttttca

SEQ ID NO: 863658 - DNA, 33 bp, Homo sapien
aatgcaattactatcaggccagtctagttttca

SEQ ID NO: 863659 - DNA, 33 bp, Homo sapien
caggggaatacaagaccggagagttggacagca

SEQ ID NO: 863660 - DNA, 33 bp, Homo sapien
caggggaatacaagactggagagttggacagca

SEQ ID NO: 863661 - DNA, 33 bp, Homo sapien
gtggagaagggataaaagactgaaaaactaact

SEQ ID NO: 863662 - DNA, 33 bp, Homo sapien
gtggagaagggataaaggactgaaaaactaact

SEQ ID NO: 863663 - DNA, 33 bp, Homo sapien
ccttgttttgcatgacagacatcaaaaatctaa

SEQ ID NO: 863664 - DNA, 33 bp, Homo sapien
ccttgttttgcatgacggacatcaaaaatctaa

SEQ ID NO: 863665 - DNA, 33 bp, Homo sapien
ctgctgtaattacacacaaatgtttagtgtggt

SEQ ID NO: 863666 - DNA, 33 bp, Homo sapien
ctgctgtaattacacataaatgtttagtgtggt

SEQ ID NO: 863667 - DNA, 33 bp, Homo sapien
agaaatactatggttcaacttccataaaaaaat

SEQ ID NO: 863668 - DNA, 33 bp, Homo sapien
agaaatactatggttcgacttccataaaaaaat

SEQ ID NO: 863669 - DNA, 33 bp, Homo sapien
aaattatgtctacgaaacaatattttatgtaac

SEQ ID NO: 863670 - DNA, 33 bp, Homo sapien
aaattatgtctacgaagcaatattttatgtaac

SEQ ID NO: 863671 - DNA, 33 bp, Homo sapien
gtacatcattgtcagaatacctagaaaatattc

SEQ ID NO: 863672 - DNA, 33 bp, Homo sapien
gtacatcattgtcagagtacctagaaaatattc

SEQ ID NO: 863673 - DNA, 33 bp, Homo sapien
ttcaaaaatggtaaccaagacttcatctgaata

SEQ ID NO: 863674 - DNA, 33 bp, Homo sapien
ttcaaaaatggtaaccgagacttcatctgaata

SEQ ID NO: 863675 - DNA, 33 bp, Homo sapien
acaacacagctaaaaagaaataggatagcgttc

SEQ ID NO: 863676 - DNA, 33 bp, Homo sapien
acaacacagctaaaaataaataggatagcgttc

SEQ ID NO: 863677 - DNA, 33 bp, Homo sapien
acccatccattttatacataagcagcctgaagt

SEQ ID NO: 863678 - DNA, 33 bp, Homo sapien
acccatccattttatagataagcagcctgaagt

SEQ ID NO: 863679 - DNA, 33 bp, Homo sapien
ttcatcttttttagacaactacatgataaatct

SEQ ID NO: 863680 - DNA, 33 bp, Homo sapien
ttcatcttttttagacgactacatgataaatct

SEQ ID NO: 863681 - DNA, 33 bp, Homo sapien
cttggatgcagacaaacctgtgttaggaggaaa

SEQ ID NO: 863682 - DNA, 33 bp, Homo sapien
cttggatgcagacaaagctgtgttaggaggaaa

SEQ ID NO: 863683 - DNA, 33 bp, Homo sapien
aggtcttcatgaagaaacctaaactttacttga

SEQ ID NO: 863684 - DNA, 33 bp, Homo sapien
aggtcttcatgaagaagcctaaactttacttga

SEQ ID NO: 863685 - DNA, 33 bp, Homo sapien
tctgatgtctggtctacgctacagaatgtttgt

SEQ ID NO: 863686 - DNA, 33 bp, Homo sapien
tctgatgtctggtctatgctacagaatgtttgt

SEQ ID NO: 863687 - DNA, 33 bp, Homo sapien
tgcttattttttacttcaaacccatggcattga

SEQ ID NO: 863688 - DNA, 33 bp, Homo sapien
tgcttattttttactttaaacccatggcattga

SEQ ID NO: 863689 - DNA, 33 bp, Homo sapien
gaacaacccaaaatgaagctccatgatattaaa

SEQ ID NO: 863690 - DNA, 33 bp, Homo sapien
gaacaacccaaaatgacgctccatgatattaaa

SEQ ID NO: 863691 - DNA, 33 bp, Homo sapien
cttttctcactaactagatcagttttctttatc

SEQ ID NO: 863692 - DNA, 33 bp, Homo sapien
cttttctcactaactatatcagttttctttatc

SEQ ID NO: 863693 - DNA, 33 bp, Homo sapien
tttcaaggagcttggaaaaaagaatttgtgaaa

SEQ ID NO: 863694 - DNA, 33 bp, Homo sapien
tttcaaggagcttggagaaaagaatttgtgaaa

SEQ ID NO: 863695 - DNA, 33 bp, Homo sapien
tgaggcttttgtaagcaaagagtatatagtaga

SEQ ID NO: 863696 - DNA, 33 bp, Homo sapien
tgaggcttttgtaagcgaagagtatatagtaga

SEQ ID NO: 863697 - DNA, 33 bp, Homo sapien
tatgagcagaaacacactggctcattgactatt

SEQ ID NO: 863698 - DNA, 33 bp, Homo sapien
tatgagcagaaacacagtggctcattgactatt

SEQ ID NO: 863699 - DNA, 33 bp, Homo sapien
catcatgtggctctgaagaatctgagattatat

SEQ ID NO: 863700 - DNA, 33 bp, Homo sapien
catcatgtggctctgaggaatctgagattatat

SEQ ID NO: 863701 - DNA, 33 bp, Homo sapien
attaccaggacaagtacgatctagaagaatgag

SEQ ID NO: 863702 - DNA, 33 bp, Homo sapien
attaccaggacaagtaggatctagaagaatgag

SEQ ID NO: 863703 - DNA, 33 bp, Homo sapien
ctgttaccctcaacccagaaattccttctatct

SEQ ID NO: 863704 - DNA, 33 bp, Homo sapien
ctgttaccctcaacccggaaattccttctatct

SEQ ID NO: 863705 - DNA, 33 bp, Homo sapien
catataaatcaagttaaagatgagcttccaagc

SEQ ID NO: 863706 - DNA, 33 bp, Homo sapien
catataaatcaagttacagatgagcttccaagc

SEQ ID NO: 863707 - DNA, 33 bp, Homo sapien
agctgactgattaatacgcttgtgaattcttaa

SEQ ID NO: 863708 - DNA, 33 bp, Homo sapien
agctgactgattaataggcttgtgaattcttaa

SEQ ID NO: 863709 - DNA, 33 bp, Homo sapien
gagagttgagtcaaccaggcatcatagaagagg

SEQ ID NO: 863710 - DNA, 33 bp, Homo sapien
gagagttgagtcaaccgggcatcatagaagagg

SEQ ID NO: 863711 - DNA, 33 bp, Homo sapien
cttagccacaaaaagaccatgggcttaaatgtt

SEQ ID NO: 863712 - DNA, 33 bp, Homo sapien
cttagccacaaaaagatcatgggcttaaatgtt

SEQ ID NO: 863713 - DNA, 33 bp, Homo sapien
gaaagctgttgagaaacgatacacagggatgtt

SEQ ID NO: 863714 - DNA, 33 bp, Homo sapien
gaaagctgttgagaaatgatacacagggatgtt

SEQ ID NO: 863715 - DNA, 33 bp, Homo sapien
tggccagaatgagtgaaggagagaatagttttg

SEQ ID NO: 863716 - DNA, 33 bp, Homo sapien
tggccagaatgagtgagggagagaatagttttg

SEQ ID NO: 863717 - DNA, 33 bp, Homo sapien
aattcaatagaaactcaaagatccagactcata

SEQ ID NO: 863718 - DNA, 33 bp, Homo sapien
aattcaatagaaactcgaagatccagactcata

SEQ ID NO: 863719 - DNA, 33 bp, Homo sapien
aaaaataagttgcccaagtcatatctttaaagg

SEQ ID NO: 863720 - DNA, 33 bp, Homo sapien
aaaaataagttgcccaggtcatatctttaaagg

SEQ ID NO: 863721 - DNA, 33 bp, Homo sapien
tatttagaagtagagaaggtaggagcatttaag

SEQ ID NO: 863722 - DNA, 33 bp, Homo sapien
tatttagaagtagagacggtaggagcatttaag

SEQ ID NO: 863723 - DNA, 33 bp, Homo sapien
caactaaaacatttaactgggagatcacagaat

SEQ ID NO: 863724 - DNA, 33 bp, Homo sapien
caactaaaacatttaattgggagatcacagaat

SEQ ID NO: 863725 - DNA, 33 bp, Homo sapien
tatgtcatgatgaatacacgatgccacattatg

SEQ ID NO: 863726 - DNA, 33 bp, Homo sapien
tatgtcatgatgaatatacgatgccacattatg

SEQ ID NO: 863727 - DNA, 33 bp, Homo sapien
gagtcactttgcaagaataaaaaaacaagtctt

SEQ ID NO: 863728 - DNA, 33 bp, Homo sapien
gagtcactttgcaagattaaaaaaacaagtctt

SEQ ID NO: 863729 - DNA, 33 bp, Homo sapien
tcaagccaaaaatgaaaatgctgaaagataaaa

SEQ ID NO: 863730 - DNA, 33 bp, Homo sapien
tcaagccaaaaatgaagatgctgaaagataaaa

SEQ ID NO: 863731 - DNA, 33 bp, Homo sapien
tgaataagagcagagacagcttgtaagtgtatg

SEQ ID NO: 863732 - DNA, 33 bp, Homo sapien
tgaataagagcagagagagcttgtaagtgtatg

SEQ ID NO: 863733 - DNA, 33 bp, Homo sapien
cacaatgcaatcacgactatcagtagcagaata

SEQ ID NO: 863734 - DNA, 33 bp, Homo sapien
cacaatgcaatcacgagtatcagtagcagaata

SEQ ID NO: 863735 - DNA, 33 bp, Homo sapien
gcaaccacttcagagacattctactttcctcta

SEQ ID NO: 863736 - DNA, 33 bp, Homo sapien
gcaaccacttcagagatattctactttcctcta

SEQ ID NO: 863737 - DNA, 33 bp, Homo sapien
gatggtggaggtagtacgtaaacaaacggaatg

SEQ ID NO: 863738 - DNA, 33 bp, Homo sapien
gatggtggaggtagtaggtaaacaaacggaatg

SEQ ID NO: 863739 - DNA, 33 bp, Homo sapien
ccaagagaagaggagcaaaactaaatacttgat

SEQ ID NO: 863740 - DNA, 33 bp, Homo sapien
ccaagagaagaggagcgaaactaaatacttgat

SEQ ID NO: 863741 - DNA, 33 bp, Homo sapien
aaacattgacatatagaaatagagtcgattatc

SEQ ID NO: 863742 - DNA, 33 bp, Homo sapien
aaacattgacatataggaatagagtcgattatc

SEQ ID NO: 863743 - DNA, 33 bp, Homo sapien
ttacctattggattgacgttgtatctgtaattt

SEQ ID NO: 863744 - DNA, 33 bp, Homo sapien
ttacctattggattgatgttgtatctgtaattt

SEQ ID NO: 863745 - DNA, 33 bp, Homo sapien
ctgtcatcattattccaccagacctagaagctg

SEQ ID NO: 863746 - DNA, 33 bp, Homo sapien
ctgtcatcattattcctccagacctagaagctg

SEQ ID NO: 863747 - DNA, 33 bp, Homo sapien
aaggtttgagctctgaaacaagccattctactt

SEQ ID NO: 863748 - DNA, 33 bp, Homo sapien
aaggtttgagctctgagacaagccattctactt

SEQ ID NO: 863749 - DNA, 33 bp, Homo sapien
gcagcccaggaaagaacaggtgagcatgaagtt

SEQ ID NO: 863750 - DNA, 33 bp, Homo sapien
gcagcccaggaaagaataggtgagcatgaagtt

SEQ ID NO: 863751 - DNA, 33 bp, Homo sapien
tttaattttgttactccaagaattttacttaac

SEQ ID NO: 863752 - DNA, 33 bp, Homo sapien
tttaattttgttactcgaagaattttacttaac

SEQ ID NO: 863753 - DNA, 33 bp, Homo sapien
taggtggtgctaaagacgtgacaaaggtggaga

SEQ ID NO: 863754 - DNA, 33 bp, Homo sapien
taggtggtgctaaagatgtgacaaaggtggaga

SEQ ID NO: 863755 - DNA, 33 bp, Homo sapien
agaatggataggacgccgatgagtttgaggcag

SEQ ID NO: 863756 - DNA, 33 bp, Homo sapien
agaatggataggacgctgatgagtttgaggcag

SEQ ID NO: 863757 - DNA, 33 bp, Homo sapien
tattggcatgaaaacaaatagataggccaatgg

SEQ ID NO: 863758 - DNA, 33 bp, Homo sapien
tattggcatgaaaacagatagataggccaatgg

SEQ ID NO: 863759 - DNA, 33 bp, Homo sapien
acaccggcttactaaaaggatttgtgaccaaga

SEQ ID NO: 863760 - DNA, 33 bp, Homo sapien
acaccggcttactaaagggatttgtgaccaaga

SEQ ID NO: 863761 - DNA, 33 bp, Homo sapien
ttaaggcatttctgaaactccgaagaagatact

SEQ ID NO: 863762 - DNA, 33 bp, Homo sapien
ttaaggcatttctgaagctccgaagaagatact

SEQ ID NO: 863763 - DNA, 33 bp, Homo sapien
taacaacactggaaacaagatgcaaatgaaaca

SEQ ID NO: 863764 - DNA, 33 bp, Homo sapien
taacaacactggaaacgagatgcaaatgaaaca

SEQ ID NO: 863765 - DNA, 33 bp, Homo sapien
gaatatagtagtcaacccaaaacaacaaaacct

SEQ ID NO: 863766 - DNA, 33 bp, Homo sapien
gaatatagtagtcaactcaaaacaacaaaacct

SEQ ID NO: 863767 - DNA, 33 bp, Homo sapien
gctacgtgagaaaaagaagacatgtagaggact

SEQ ID NO: 863768 - DNA, 33 bp, Homo sapien
gctacgtgagaaaaaggagacatgtagaggact

SEQ ID NO: 863769 - DNA, 33 bp, Homo sapien
aggccccaggacttcacccccagagattctgat

SEQ ID NO: 863770 - DNA, 33 bp, Homo sapien
aggccccaggacttcatccccagagattctgat

SEQ ID NO: 863771 - DNA, 33 bp, Homo sapien
ctgccaccacttaaaccgtatatgattcagaaa

SEQ ID NO: 863772 - DNA, 33 bp, Homo sapien
ctgccaccacttaaactgtatatgattcagaaa

SEQ ID NO: 863773 - DNA, 33 bp, Homo sapien
ggtttgaatgatgttacgggccctctacaacta

SEQ ID NO: 863774 - DNA, 33 bp, Homo sapien
ggtttgaatgatgttatgggccctctacaacta

SEQ ID NO: 863775 - DNA, 33 bp, Homo sapien
tcagatcatgctctgaaattcaaggttttagta

SEQ ID NO: 863776 - DNA, 33 bp, Homo sapien
tcagatcatgctctgatattcaaggttttagta

SEQ ID NO: 863777 - DNA, 33 bp, Homo sapien
gaaatttgataatggccctgtataccagtcttc

SEQ ID NO: 863778 - DNA, 33 bp, Homo sapien
gaaatttgataatggctctgtataccagtcttc

SEQ ID NO: 863779 - DNA, 33 bp, Homo sapien
agctccatctccgttgcactgcacggtacagcc

SEQ ID NO: 863780 - DNA, 33 bp, Homo sapien
agctccatctccgttgtactgcacggtacagcc

SEQ ID NO: 863781 - DNA, 33 bp, Homo sapien
tgtaggtccttcgttacggccaatttctcctat

SEQ ID NO: 863782 - DNA, 33 bp, Homo sapien
tgtaggtccttcgttatggccaatttctcctat

SEQ ID NO: 863783 - DNA, 33 bp, Homo sapien
ccaaagatatttctcacgtaacagcttactgca

SEQ ID NO: 863784 - DNA, 33 bp, Homo sapien
ccaaagatatttctcatgtaacagcttactgca

SEQ ID NO: 863785 - DNA, 33 bp, Homo sapien
cctcaaatgttttgtgaatacctctataccttg

SEQ ID NO: 863786 - DNA, 33 bp, Homo sapien
cctcaaatgttttgtggatacctctataccttg

SEQ ID NO: 863787 - DNA, 33 bp, Homo sapien
tgaccctatggaagaaaaaaacataactgagat

SEQ ID NO: 863788 - DNA, 33 bp, Homo sapien
tgaccctatggaagaagaaaacataactgagat

SEQ ID NO: 863789 - DNA, 33 bp, Homo sapien
tgggaaattattatgaaactttgaaaggcaggt

SEQ ID NO: 863790 - DNA, 33 bp, Homo sapien
tgggaaattattatgacactttgaaaggcaggt

SEQ ID NO: 863791 - DNA, 33 bp, Homo sapien
tcattataattacctaggaaaccatcaattgat

SEQ ID NO: 863792 - DNA, 33 bp, Homo sapien
tcattataattacctatgaaaccatcaattgat

SEQ ID NO: 863793 - DNA, 33 bp, Homo sapien
tagatacatgacaacaatgttcctgtatgttac

SEQ ID NO: 863794 - DNA, 33 bp, Homo sapien
tagatacatgacaacagtgttcctgtatgttac

SEQ ID NO: 863795 - DNA, 33 bp, Homo sapien
gtaagtgaagccctaactcattcagctgtagaa

SEQ ID NO: 863796 - DNA, 33 bp, Homo sapien
gtaagtgaagccctaattcattcagctgtagaa

SEQ ID NO: 863797 - DNA, 33 bp, Homo sapien
cactaataagttattaagccacaagtttagttt

SEQ ID NO: 863798 - DNA, 33 bp, Homo sapien
cactaataagttattaggccacaagtttagttt

SEQ ID NO: 863799 - DNA, 33 bp, Homo sapien
ttctgaatcttaggtaaaacatggtcattttta

SEQ ID NO: 863800 - DNA, 33 bp, Homo sapien
ttctgaatcttaggtacaacatggtcattttta

SEQ ID NO: 863801 - DNA, 33 bp, Homo sapien
aagaaacattcatggactacactttggcagaca

SEQ ID NO: 863802 - DNA, 33 bp, Homo sapien
aagaaacattcatggagtacactttggcagaca

SEQ ID NO: 863803 - DNA, 33 bp, Homo sapien
agaattgaagtgtaggaaaataaatccttgcct

SEQ ID NO: 863804 - DNA, 33 bp, Homo sapien
agaattgaagtgtagggaaataaatccttgcct

SEQ ID NO: 863805 - DNA, 33 bp, Homo sapien
gcacacttactttgacaaagatttgagaatttc

SEQ ID NO: 863806 - DNA, 33 bp, Homo sapien
gcacacttactttgactaagatttgagaatttc

SEQ ID NO: 863807 - DNA, 33 bp, Homo sapien
aattccagctactcagactcctttccttcagct

SEQ ID NO: 863808 - DNA, 33 bp, Homo sapien
aattccagctactcaggctcctttccttcagct

SEQ ID NO: 863809 - DNA, 33 bp, Homo sapien
accctataccaaccacagtggtgatacaggtca

SEQ ID NO: 863810 - DNA, 33 bp, Homo sapien
accctataccaaccaccgtggtgatacaggtca

SEQ ID NO: 863811 - DNA, 33 bp, Homo sapien
gatgttgtggatacaaaaaaacataaggtctca

SEQ ID NO: 863812 - DNA, 33 bp, Homo sapien
gatgttgtggatacaagaaaacataaggtctca

SEQ ID NO: 863813 - DNA, 33 bp, Homo sapien
attgaatgtagttctacgagatttatatttcct

SEQ ID NO: 863814 - DNA, 33 bp, Homo sapien
attgaatgtagttctatgagatttatatttcct

SEQ ID NO: 863815 - DNA, 33 bp, Homo sapien
gtgagattcctgggtcaataatgacagtttact

SEQ ID NO: 863816 - DNA, 33 bp, Homo sapien
gtgagattcctgggtcgataatgacagtttact

SEQ ID NO: 863817 - DNA, 33 bp, Homo sapien
gaggatggcagaaacaaaaaggacctatgggga

SEQ ID NO: 863818 - DNA, 33 bp, Homo sapien
gaggatggcagaaacacaaaggacctatgggga

SEQ ID NO: 863819 - DNA, 33 bp, Homo sapien
gaatagcatgatgaacgataccttgaattatag

SEQ ID NO: 863820 - DNA, 33 bp, Homo sapien
gaatagcatgatgaactataccttgaattatag

SEQ ID NO: 863821 - DNA, 33 bp, Homo sapien
agaaactgagatggcaggatggattaaaaaaag

SEQ ID NO: 863822 - DNA, 33 bp, Homo sapien
agaaactgagatggcatgatggattaaaaaaag

SEQ ID NO: 863823 - DNA, 33 bp, Homo sapien
tattattaattgccacccttctgaaaactcagt

SEQ ID NO: 863824 - DNA, 33 bp, Homo sapien
tattattaattgccactcttctgaaaactcagt

SEQ ID NO: 863825 - DNA, 33 bp, Homo sapien
tcatcttgaagtaataggctacccagggaaaca

SEQ ID NO: 863826 - DNA, 33 bp, Homo sapien
tcatcttgaagtaatatgctacccagggaaaca

SEQ ID NO: 863827 - DNA, 33 bp, Homo sapien
gaaagaaattaaggtacagtagaaatcagagat

SEQ ID NO: 863828 - DNA, 33 bp, Homo sapien
gaaagaaattaaggtagagtagaaatcagagat

SEQ ID NO: 863829 - DNA, 33 bp, Homo sapien
gctttcatgtttcttccacagttcctctcctaa

SEQ ID NO: 863830 - DNA, 33 bp, Homo sapien
gctttcatgtttcttctacagttcctctcctaa

SEQ ID NO: 863831 - DNA, 33 bp, Homo sapien
gtttccaaggtcagtacagactaaactgatcaa

SEQ ID NO: 863832 - DNA, 33 bp, Homo sapien
gtttccaaggtcagtatagactaaactgatcaa

SEQ ID NO: 863833 - DNA, 33 bp, Homo sapien
ctacagaatgaaaatacagctgtggaacttact

SEQ ID NO: 863834 - DNA, 33 bp, Homo sapien
ctacagaatgaaaatatagctgtggaacttact

SEQ ID NO: 863835 - DNA, 33 bp, Homo sapien
tccagaagaaaacctacgaaatactgttctgga

SEQ ID NO: 863836 - DNA, 33 bp, Homo sapien
tccagaagaaaacctatgaaatactgttctgga

SEQ ID NO: 863837 - DNA, 33 bp, Homo sapien
gtctcctcatgtcctaccaattttctagggaca

SEQ ID NO: 863838 - DNA, 33 bp, Homo sapien
gtctcctcatgtcctatcaattttctagggaca

SEQ ID NO: 863839 - DNA, 33 bp, Homo sapien
cagaacctctatacaacgctccccttctgctga

SEQ ID NO: 863840 - DNA, 33 bp, Homo sapien
cagaacctctatacaatgctccccttctgctga

SEQ ID NO: 863841 - DNA, 33 bp, Homo sapien
tatgtagtaggcagtgaaaccaatccagcatag

SEQ ID NO: 863842 - DNA, 33 bp, Homo sapien
tatgtagtaggcagtggaaccaatccagcatag

SEQ ID NO: 863843 - DNA, 33 bp, Homo sapien
gggtattgggaaaggacgcaatgaaagtttggg

SEQ ID NO: 863844 - DNA, 33 bp, Homo sapien
gggtattgggaaaggaggcaatgaaagtttggg

SEQ ID NO: 863845 - DNA, 33 bp, Homo sapien
agattttgatgcaattcaatgtatggaacatag

SEQ ID NO: 863846 - DNA, 33 bp, Homo sapien
agattttgatgcaattgaatgtatggaacatag

SEQ ID NO: 863847 - DNA, 33 bp, Homo sapien
ttacagaaaacatgaacaatatgatgtataaag

SEQ ID NO: 863848 - DNA, 33 bp, Homo sapien
ttacagaaaacatgaagaatatgatgtataaag

SEQ ID NO: 863849 - DNA, 33 bp, Homo sapien
tcttatattttttgaaggttcaatgatgatgat

SEQ ID NO: 863850 - DNA, 33 bp, Homo sapien
tcttatattttttgaatgttcaatgatgatgat

SEQ ID NO: 863851 - DNA, 33 bp, Homo sapien
aggtaagttgtctgcaaaaagaaaaggatgaaa

SEQ ID NO: 863852 - DNA, 33 bp, Homo sapien
aggtaagttgtctgcagaaagaaaaggatgaaa

SEQ ID NO: 863853 - DNA, 33 bp, Homo sapien
gatgtagtacacactgaactggacattttaaaa

SEQ ID NO: 863854 - DNA, 33 bp, Homo sapien
gatgtagtacacactggactggacattttaaaa

SEQ ID NO: 863855 - DNA, 33 bp, Homo sapien
cttacagggaagtttcaaactttagacagtgta

SEQ ID NO: 863856 - DNA, 33 bp, Homo sapien
cttacagggaagtttccaactttagacagtgta

SEQ ID NO: 863857 - DNA, 33 bp, Homo sapien
agcagctgtttcctacaatctctaaagccctga

SEQ ID NO: 863858 - DNA, 33 bp, Homo sapien
agcagctgtttcctacgatctctaaagccctga

SEQ ID NO: 863859 - DNA, 33 bp, Homo sapien
ttgcctagctacaaaaataaatgaggattccaa

SEQ ID NO: 863860 - DNA, 33 bp, Homo sapien
ttgcctagctacaaaagtaaatgaggattccaa

SEQ ID NO: 863861 - DNA, 33 bp, Homo sapien
aattggaaaaagccatcaacaatgcgtttgtgc

SEQ ID NO: 863862 - DNA, 33 bp, Homo sapien
aattggaaaaagccattaacaatgcgtttgtgc

SEQ ID NO: 863863 - DNA, 33 bp, Homo sapien
attttgtgagagatgacgactgaagggaagaca

SEQ ID NO: 863864 - DNA, 33 bp, Homo sapien
attttgtgagagatgatgactgaagggaagaca

SEQ ID NO: 863865 - DNA, 33 bp, Homo sapien
ctaatgcaaaccagaacttacagtcagcccata

SEQ ID NO: 863866 - DNA, 33 bp, Homo sapien
ctaatgcaaaccagaatttacagtcagcccata

SEQ ID NO: 863867 - DNA, 33 bp, Homo sapien
ggcataattaaatgaacgcagtttattctttgg

SEQ ID NO: 863868 - DNA, 33 bp, Homo sapien
ggcataattaaatgaatgcagtttattctttgg

SEQ ID NO: 863869 - DNA, 33 bp, Homo sapien
ggacttatactgttcgcagcagtcagcttggac

SEQ ID NO: 863870 - DNA, 33 bp, Homo sapien
ggacttatactgttcgtagcagtcagcttggac

SEQ ID NO: 863871 - DNA, 33 bp, Homo sapien
atataaactcagtaagccctgtctgttcagatt

SEQ ID NO: 863872 - DNA, 33 bp, Homo sapien
atataaactcagtaaggcctgtctgttcagatt

SEQ ID NO: 863873 - DNA, 33 bp, Homo sapien
gtgtgcttgatatgaacaataaagaagataaaa

SEQ ID NO: 863874 - DNA, 33 bp, Homo sapien
gtgtgcttgatatgaataataaagaagataaaa

SEQ ID NO: 863875 - DNA, 33 bp, Homo sapien
ctgagaaatagaggaacagatattggattctca

SEQ ID NO: 863876 - DNA, 33 bp, Homo sapien
ctgagaaatagaggaatagatattggattctca

SEQ ID NO: 863877 - DNA, 33 bp, Homo sapien
catccctctatgttcacgccctagttcagctgt

SEQ ID NO: 863878 - DNA, 33 bp, Homo sapien
catccctctatgttcatgccctagttcagctgt

SEQ ID NO: 863879 - DNA, 33 bp, Homo sapien
cagtgagattctgacaagctttcctagaagata

SEQ ID NO: 863880 - DNA, 33 bp, Homo sapien
cagtgagattctgacatgctttcctagaagata

SEQ ID NO: 863881 - DNA, 33 bp, Homo sapien
gtcagtgttaggcaagaaacaacttacttttgt

SEQ ID NO: 863882 - DNA, 33 bp, Homo sapien
gtcagtgttaggcaaggaacaacttacttttgt

SEQ ID NO: 863883 - DNA, 33 bp, Homo sapien
ctctgtgccgggcaccgctggaacttctgagga

SEQ ID NO: 863884 - DNA, 33 bp, Homo sapien
ctctgtgccgggcacctctggaacttctgagga

SEQ ID NO: 863885 - DNA, 33 bp, Homo sapien
tgataggttaaaaaaaatggttgtatgatttcc

SEQ ID NO: 863886 - DNA, 33 bp, Homo sapien
tgataggttaaaaaaattggttgtatgatttcc

SEQ ID NO: 863887 - DNA, 33 bp, Homo sapien
atcaaagaaatgacacaggatatgaatggaaaa

SEQ ID NO: 863888 - DNA, 33 bp, Homo sapien
atcaaagaaatgacaccggatatgaatggaaaa

SEQ ID NO: 863889 - DNA, 33 bp, Homo sapien
atcagcgatggatccaaacgaagaaaaaaatct

SEQ ID NO: 863890 - DNA, 33 bp, Homo sapien
atcagcgatggatccacacgaagaaaaaaatct

SEQ ID NO: 863891 - DNA, 33 bp, Homo sapien
gccctctgggatagcaaaagtgctacctttggg

SEQ ID NO: 863892 - DNA, 33 bp, Homo sapien
gccctctgggatagcagaagtgctacctttggg

SEQ ID NO: 863893 - DNA, 33 bp, Homo sapien
agaacctatgtaaagcgccacaaaagagtcccc

SEQ ID NO: 863894 - DNA, 33 bp, Homo sapien
agaacctatgtaaagctccacaaaagagtcccc

SEQ ID NO: 863895 - DNA, 33 bp, Homo sapien
gtggattagtagaacaatggcatcaaagtgttg

SEQ ID NO: 863896 - DNA, 33 bp, Homo sapien
gtggattagtagaacagtggcatcaaagtgttg

SEQ ID NO: 863897 - DNA, 33 bp, Homo sapien
ttcctcagattctcacagcgaggttagtggaaa

SEQ ID NO: 863898 - DNA, 33 bp, Homo sapien
ttcctcagattctcaccgcgaggttagtggaaa

SEQ ID NO: 863899 - DNA, 33 bp, Homo sapien
ttcagagctatttaagcaatgcaccaaaaaaaa

SEQ ID NO: 863900 - DNA, 33 bp, Homo sapien
ttcagagctatttaagtaatgcaccaaaaaaaa

SEQ ID NO: 863901 - DNA, 33 bp, Homo sapien
aggctacccttcagagccaggataggtttctcc

SEQ ID NO: 863902 - DNA, 33 bp, Homo sapien
aggctacccttcagagtcaggataggtttctcc

SEQ ID NO: 863903 - DNA, 33 bp, Homo sapien
aggagaaaagggatgacgtaaaaattgttgctg

SEQ ID NO: 863904 - DNA, 33 bp, Homo sapien
aggagaaaagggatgatgtaaaaattgttgctg

SEQ ID NO: 863905 - DNA, 33 bp, Homo sapien
acagattcactaatccaatccctttactctctg

SEQ ID NO: 863906 - DNA, 33 bp, Homo sapien
acagattcactaatccgatccctttactctctg

SEQ ID NO: 863907 - DNA, 33 bp, Homo sapien
taagcaggataagctgacacattgttactagag

SEQ ID NO: 863908 - DNA, 33 bp, Homo sapien
taagcaggataagctggcacattgttactagag

SEQ ID NO: 863909 - DNA, 33 bp, Homo sapien
atgataggggtgcccaatatactcagcctgccc

SEQ ID NO: 863910 - DNA, 33 bp, Homo sapien
atgataggggtgcccagtatactcagcctgccc

SEQ ID NO: 863911 - DNA, 33 bp, Homo sapien
gaacttgagtgagtgactacaggaaccggtcgg

SEQ ID NO: 863912 - DNA, 33 bp, Homo sapien
gaacttgagtgagtgagtacaggaaccggtcgg

SEQ ID NO: 863913 - DNA, 33 bp, Homo sapien
acagtgattcctcatagtaaatgcctatatgca

SEQ ID NO: 863914 - DNA, 33 bp, Homo sapien
acagtgattcctcatattaaatgcctatatgca

SEQ ID NO: 863915 - DNA, 33 bp, Homo sapien
caaggagttttatggacgattatatatgaatga

SEQ ID NO: 863916 - DNA, 33 bp, Homo sapien
caaggagttttatggatgattatatatgaatga

SEQ ID NO: 863917 - DNA, 33 bp, Homo sapien
taaaaaaaggtgcagaataccatggaagttttt

SEQ ID NO: 863918 - DNA, 33 bp, Homo sapien
taaaaaaaggtgcagagtaccatggaagttttt

SEQ ID NO: 863919 - DNA, 33 bp, Homo sapien
atttttatttcagtcaccatatcatggattttt

SEQ ID NO: 863920 - DNA, 33 bp, Homo sapien
atttttatttcagtcatcatatcatggattttt

SEQ ID NO: 863921 - DNA, 33 bp, Homo sapien
agaggccatgtcaaggcagtttgcagctcacaa

SEQ ID NO: 863922 - DNA, 33 bp, Homo sapien
agaggccatgtcaaggtagtttgcagctcacaa

SEQ ID NO: 863923 - DNA, 33 bp, Homo sapien
tttgcccatattcaaagaacaaatgacccagtg

SEQ ID NO: 863924 - DNA, 33 bp, Homo sapien
tttgcccatattcaaataacaaatgacccagtg

SEQ ID NO: 863925 - DNA, 33 bp, Homo sapien
tcaggaaaagtgaaaaccactaagtctaaaaga

SEQ ID NO: 863926 - DNA, 33 bp, Homo sapien
tcaggaaaagtgaaaagcactaagtctaaaaga

SEQ ID NO: 863927 - DNA, 33 bp, Homo sapien
ctgcctacttctgcaaactatctagttaaatag

SEQ ID NO: 863928 - DNA, 33 bp, Homo sapien
ctgcctacttctgcaatctatctagttaaatag

SEQ ID NO: 863929 - DNA, 33 bp, Homo sapien
taatactgagtgaaccagggcttggtcttggcc

SEQ ID NO: 863930 - DNA, 33 bp, Homo sapien
taatactgagtgaaccggggcttggtcttggcc

SEQ ID NO: 863931 - DNA, 33 bp, Homo sapien
caagttgttcaagggtcaaatgtgtatgtacac

SEQ ID NO: 863932 - DNA, 33 bp, Homo sapien
caagttgttcaagggtgaaatgtgtatgtacac

SEQ ID NO: 863933 - DNA, 33 bp, Homo sapien
ttaggacagggtagaacgatgttgttttatgat

SEQ ID NO: 863934 - DNA, 33 bp, Homo sapien
ttaggacagggtagaatgatgttgttttatgat

SEQ ID NO: 863935 - DNA, 33 bp, Homo sapien
acaaggagtgagattcgaggtaatatagctcca

SEQ ID NO: 863936 - DNA, 33 bp, Homo sapien
acaaggagtgagattctaggtaatatagctcca

SEQ ID NO: 863937 - DNA, 33 bp, Homo sapien
ttcttgtttcttaacccgaaattgtctctaaaa

SEQ ID NO: 863938 - DNA, 33 bp, Homo sapien
ttcttgtttcttaacctgaaattgtctctaaaa

SEQ ID NO: 863939 - DNA, 33 bp, Homo sapien
atacacttgaccaacaacaggtttattcattcc

SEQ ID NO: 863940 - DNA, 33 bp, Homo sapien
atacacttgaccaacatcaggtttattcattcc

SEQ ID NO: 863941 - DNA, 33 bp, Homo sapien
gtggtaacaatacggcaacccaacaatcagaag

SEQ ID NO: 863942 - DNA, 33 bp, Homo sapien
gtggtaacaatacggcgacccaacaatcagaag

SEQ ID NO: 863943 - DNA, 33 bp, Homo sapien
ctgctaatatctgacaactgcaaattgacatct

SEQ ID NO: 863944 - DNA, 33 bp, Homo sapien
ctgctaatatctgacacctgcaaattgacatct

SEQ ID NO: 863945 - DNA, 33 bp, Homo sapien
tctactggcctgggtagatgtttagttcccatt

SEQ ID NO: 863946 - DNA, 33 bp, Homo sapien
tctactggcctgggtatatgtttagttcccatt

SEQ ID NO: 863947 - DNA, 33 bp, Homo sapien
aagtcagtcagaataaggtgtatttgagtgtct

SEQ ID NO: 863948 - DNA, 33 bp, Homo sapien
aagtcagtcagaataatgtgtatttgagtgtct

SEQ ID NO: 863949 - DNA, 33 bp, Homo sapien
tgggcactctagagacagaaacccgtttaatac

SEQ ID NO: 863950 - DNA, 33 bp, Homo sapien
tgggcactctagagacggaaacccgtttaatac

SEQ ID NO: 863951 - DNA, 33 bp, Homo sapien
gtagctgtcaaagtggacaattccttctatgat

SEQ ID NO: 863952 - DNA, 33 bp, Homo sapien
gtagctgtcaaagtgggcaattccttctatgat

SEQ ID NO: 863953 - DNA, 33 bp, Homo sapien
aaaatgagcccataacaaaagactaaagactga

SEQ ID NO: 863954 - DNA, 33 bp, Homo sapien
aaaatgagcccataaccaaagactaaagactga

SEQ ID NO: 863955 - DNA, 33 bp, Homo sapien
aacacaaatgtgcaaaatgattggggatgattc

SEQ ID NO: 863956 - DNA, 33 bp, Homo sapien
aacacaaatgtgcaaagtgattggggatgattc

SEQ ID NO: 863957 - DNA, 33 bp, Homo sapien
atgacatctagcccaacgtaggtactcactata

SEQ ID NO: 863958 - DNA, 33 bp, Homo sapien
atgacatctagcccaatgtaggtactcactata

SEQ ID NO: 863959 - DNA, 33 bp, Homo sapien
gaagttaatgaaaacaacagtctttgtctagtt

SEQ ID NO: 863960 - DNA, 33 bp, Homo sapien
gaagttaatgaaaacagcagtctttgtctagtt

SEQ ID NO: 863961 - DNA, 33 bp, Homo sapien
caggttccatgacagactcagtcagatgtattt

SEQ ID NO: 863962 - DNA, 33 bp, Homo sapien
caggttccatgacagattcagtcagatgtattt

SEQ ID NO: 863963 - DNA, 33 bp, Homo sapien
ttatctccctgcaaaccctcaccattttattat

SEQ ID NO: 863964 - DNA, 33 bp, Homo sapien
ttatctccctgcaaactctcaccattttattat

SEQ ID NO: 863965 - DNA, 33 bp, Homo sapien
acttttctatactgtcccccattaaaagggagt

SEQ ID NO: 863966 - DNA, 33 bp, Homo sapien
acttttctatactgtcgcccattaaaagggagt

SEQ ID NO: 863967 - DNA, 33 bp, Homo sapien
aagcccaacactgaaacggattaaacttgattt

SEQ ID NO: 863968 - DNA, 33 bp, Homo sapien
aagcccaacactgaaatggattaaacttgattt

SEQ ID NO: 863969 - DNA, 33 bp, Homo sapien
tatttggtggaggacacattctgtggcaggtgg

SEQ ID NO: 863970 - DNA, 33 bp, Homo sapien
tatttggtggaggacatattctgtggcaggtgg

SEQ ID NO: 863971 - DNA, 33 bp, Homo sapien
acttttacaaatgcaaaagcagaggaacagcaa

SEQ ID NO: 863972 - DNA, 33 bp, Homo sapien
acttttacaaatgcaagagcagaggaacagcaa

SEQ ID NO: 863973 - DNA, 33 bp, Homo sapien
gctaatatgattgataatagagtcaagattcaa

SEQ ID NO: 863974 - DNA, 33 bp, Homo sapien
gctaatatgattgatagtagagtcaagattcaa

SEQ ID NO: 863975 - DNA, 33 bp, Homo sapien
caaaccaatacactcaatgagagcttttgattt

SEQ ID NO: 863976 - DNA, 33 bp, Homo sapien
caaaccaatacactcagtgagagcttttgattt

SEQ ID NO: 863977 - DNA, 33 bp, Homo sapien
tattttgagcaatggccatactctggaataaat

SEQ ID NO: 863978 - DNA, 33 bp, Homo sapien
tattttgagcaatggctatactctggaataaat

SEQ ID NO: 863979 - DNA, 33 bp, Homo sapien
ctgggtcagagtgaatcatccttagaatgtggg

SEQ ID NO: 863980 - DNA, 33 bp, Homo sapien
ctgggtcagagtgaattatccttagaatgtggg

SEQ ID NO: 863981 - DNA, 33 bp, Homo sapien
aaattttcctaaaatacgcatgaagcctgatat

SEQ ID NO: 863982 - DNA, 33 bp, Homo sapien
aaattttcctaaaatatgcatgaagcctgatat

SEQ ID NO: 863983 - DNA, 33 bp, Homo sapien
atgctattatttacccagattcaaatgtaacta

SEQ ID NO: 863984 - DNA, 33 bp, Homo sapien
atgctattatttaccctgattcaaatgtaacta

SEQ ID NO: 863985 - DNA, 33 bp, Homo sapien
acaggatgctgttttgaatgccaaagaggatgt

SEQ ID NO: 863986 - DNA, 33 bp, Homo sapien
acaggatgctgttttggatgccaaagaggatgt

SEQ ID NO: 863987 - DNA, 33 bp, Homo sapien
tctgactgtggaagcacatagtacaggagaaaa

SEQ ID NO: 863988 - DNA, 33 bp, Homo sapien
tctgactgtggaagcagatagtacaggagaaaa

SEQ ID NO: 863989 - DNA, 33 bp, Homo sapien
catgtaactaactcaaattcacattaataaaca

SEQ ID NO: 863990 - DNA, 33 bp, Homo sapien
catgtaactaactcaacttcacattaataaaca

SEQ ID NO: 863991 - DNA, 33 bp, Homo sapien
ccatgaaatcctataacgtggctttggaaataa

SEQ ID NO: 863992 - DNA, 33 bp, Homo sapien
ccatgaaatcctataatgtggctttggaaataa

SEQ ID NO: 863993 - DNA, 33 bp, Homo sapien
aacaacaattctctgacgaaaactgggggtgct

SEQ ID NO: 863994 - DNA, 33 bp, Homo sapien
aacaacaattctctgaggaaaactgggggtgct

SEQ ID NO: 863995 - DNA, 33 bp, Homo sapien
tattaaagtgccatcacgtagaagagttgttct

SEQ ID NO: 863996 - DNA, 33 bp, Homo sapien
tattaaagtgccatcatgtagaagagttgttct

SEQ ID NO: 863997 - DNA, 33 bp, Homo sapien
tgaccctgactagtccaaaggtcgtgtgtgtgt

SEQ ID NO: 863998 - DNA, 33 bp, Homo sapien
tgaccctgactagtccgaaggtcgtgtgtgtgt

SEQ ID NO: 863999 - DNA, 33 bp, Homo sapien
attcaagaaagcttcaataagcacatccttgtg

SEQ ID NO: 864000 - DNA, 33 bp, Homo sapien
attcaagaaagcttcagtaagcacatccttgtg

SEQ ID NO: 864001 - DNA, 33 bp, Homo sapien
acaaattcaacaataacgaaaggacaccctatg

SEQ ID NO: 864002 - DNA, 33 bp, Homo sapien
acaaattcaacaataatgaaaggacaccctatg

SEQ ID NO: 864003 - DNA, 33 bp, Homo sapien
tctttccagtgaaacactattggcttatcaaag

SEQ ID NO: 864004 - DNA, 33 bp, Homo sapien
tctttccagtgaaacattattggcttatcaaag

SEQ ID NO: 864005 - DNA, 33 bp, Homo sapien
ctctcctaagtggaacgaactcagtgatctggc

SEQ ID NO: 864006 - DNA, 33 bp, Homo sapien
ctctcctaagtggaactaactcagtgatctggc

SEQ ID NO: 864007 - DNA, 33 bp, Homo sapien
tagattttgacctacgcatcagatcagtgctag

SEQ ID NO: 864008 - DNA, 33 bp, Homo sapien
tagattttgacctacgtatcagatcagtgctag

SEQ ID NO: 864009 - DNA, 33 bp, Homo sapien
ggaaacacaatcagaaagacatatcacttgtta

SEQ ID NO: 864010 - DNA, 33 bp, Homo sapien
ggaaacacaatcagaaggacatatcacttgtta

SEQ ID NO: 864011 - DNA, 33 bp, Homo sapien
gaaatgagcttttatacagtactagtggtagta

SEQ ID NO: 864012 - DNA, 33 bp, Homo sapien
gaaatgagcttttatatagtactagtggtagta

SEQ ID NO: 864013 - DNA, 33 bp, Homo sapien
agttcctgtgactataagtgcataccaccatgc

SEQ ID NO: 864014 - DNA, 33 bp, Homo sapien
agttcctgtgactataggtgcataccaccatgc

SEQ ID NO: 864015 - DNA, 33 bp, Homo sapien
agtgcttcatgccacacatatgtgaagttatca

SEQ ID NO: 864016 - DNA, 33 bp, Homo sapien
agtgcttcatgccacagatatgtgaagttatca

SEQ ID NO: 864017 - DNA, 33 bp, Homo sapien
aagaactggtctcataaatgtaataccttgctc

SEQ ID NO: 864018 - DNA, 33 bp, Homo sapien
aagaactggtctcatagatgtaataccttgctc

SEQ ID NO: 864019 - DNA, 33 bp, Homo sapien
gggatttttattcagaccttgaaatgcaggcag

SEQ ID NO: 864020 - DNA, 33 bp, Homo sapien
gggatttttattcagatcttgaaatgcaggcag

SEQ ID NO: 864021 - DNA, 33 bp, Homo sapien
tctttcatcttttggagagtcaatctgatatat

SEQ ID NO: 864022 - DNA, 33 bp, Homo sapien
tctttcatcttttggatagtcaatctgatatat

SEQ ID NO: 864023 - DNA, 33 bp, Homo sapien
cctaccaacagtctgcaaagtttgggtcctcac

SEQ ID NO: 864024 - DNA, 33 bp, Homo sapien
cctaccaacagtctgcgaagtttgggtcctcac

SEQ ID NO: 864025 - DNA, 33 bp, Homo sapien
ccaaggtactattctaagcattatacatctctt

SEQ ID NO: 864026 - DNA, 33 bp, Homo sapien
ccaaggtactattctacgcattatacatctctt

SEQ ID NO: 864027 - DNA, 33 bp, Homo sapien
ggagttagagtaaaggccagaacctcgaggtga

SEQ ID NO: 864028 - DNA, 33 bp, Homo sapien
ggagttagagtaaaggtcagaacctcgaggtga

SEQ ID NO: 864029 - DNA, 33 bp, Homo sapien
cagtctaagagttgaactattgattttgagtaa

SEQ ID NO: 864030 - DNA, 33 bp, Homo sapien
cagtctaagagttgaagtattgattttgagtaa

SEQ ID NO: 864031 - DNA, 33 bp, Homo sapien
actccttatttacgacacaataaaataacatca

SEQ ID NO: 864032 - DNA, 33 bp, Homo sapien
actccttatttacgacgcaataaaataacatca

SEQ ID NO: 864033 - DNA, 33 bp, Homo sapien
gagttgttctcaagtacgatggcaaacagagga

SEQ ID NO: 864034 - DNA, 33 bp, Homo sapien
gagttgttctcaagtatgatggcaaacagagga

SEQ ID NO: 864035 - DNA, 33 bp, Homo sapien
catcacttagctaatacactttctcagagtggg

SEQ ID NO: 864036 - DNA, 33 bp, Homo sapien
catcacttagctaatatactttctcagagtggg

SEQ ID NO: 864037 - DNA, 33 bp, Homo sapien
ttgtctactttttggaacatttgaatacagtga

SEQ ID NO: 864038 - DNA, 33 bp, Homo sapien
ttgtctactttttggagcatttgaatacagtga

SEQ ID NO: 864039 - DNA, 33 bp, Homo sapien
ttccatgaaagacagaatctccagttgtttctt

SEQ ID NO: 864040 - DNA, 33 bp, Homo sapien
ttccatgaaagacagactctccagttgtttctt

SEQ ID NO: 864041 - DNA, 33 bp, Homo sapien
taatcacttatttataccagactcattgatggt

SEQ ID NO: 864042 - DNA, 33 bp, Homo sapien
taatcacttatttatatcagactcattgatggt

SEQ ID NO: 864043 - DNA, 33 bp, Homo sapien
ctgtaatccgttggtgaagaagaattgaccaat

SEQ ID NO: 864044 - DNA, 33 bp, Homo sapien
ctgtaatccgttggtggagaagaattgaccaat

SEQ ID NO: 864045 - DNA, 33 bp, Homo sapien
tattgctctcaaggctcagaaatgaaagtgaat

SEQ ID NO: 864046 - DNA, 33 bp, Homo sapien
tattgctctcaaggctgagaaatgaaagtgaat

SEQ ID NO: 864047 - DNA, 33 bp, Homo sapien
tctgaaaatgattaaaagagtggaaattattgc

SEQ ID NO: 864048 - DNA, 33 bp, Homo sapien
tctgaaaatgattaaaggagtggaaattattgc

SEQ ID NO: 864049 - DNA, 33 bp, Homo sapien
aagttagtcaaaagataaatgatgctgtggtaa

SEQ ID NO: 864050 - DNA, 33 bp, Homo sapien
aagttagtcaaaagatgaatgatgctgtggtaa

SEQ ID NO: 864051 - DNA, 33 bp, Homo sapien
tctagaaagagctgcaaatataccctggttcca

SEQ ID NO: 864052 - DNA, 33 bp, Homo sapien
tctagaaagagctgcacatataccctggttcca

SEQ ID NO: 864053 - DNA, 33 bp, Homo sapien
atcctacactgtcttccagctaaaacctcaatt

SEQ ID NO: 864054 - DNA, 33 bp, Homo sapien
atcctacactgtcttctagctaaaacctcaatt

SEQ ID NO: 864055 - DNA, 33 bp, Homo sapien
taatactaaaaagctacgcaaccacaaagaaaa

SEQ ID NO: 864056 - DNA, 33 bp, Homo sapien
taatactaaaaagctatgcaaccacaaagaaaa

SEQ ID NO: 864057 - DNA, 33 bp, Homo sapien
acatagactgcttgccaatcagtttgttgtacc

SEQ ID NO: 864058 - DNA, 33 bp, Homo sapien
acatagactgcttgcccatcagtttgttgtacc

SEQ ID NO: 864059 - DNA, 33 bp, Homo sapien
attgagagaaaacatcaacttacattttgttta

SEQ ID NO: 864060 - DNA, 33 bp, Homo sapien
attgagagaaaacatcgacttacattttgttta

SEQ ID NO: 864061 - DNA, 33 bp, Homo sapien
gtgacaagaagacaaacgaatacgatggattga

SEQ ID NO: 864062 - DNA, 33 bp, Homo sapien
gtgacaagaagacaaaggaatacgatggattga

SEQ ID NO: 864063 - DNA, 33 bp, Homo sapien
aatcaatctattgaggcatcgtctttgtaaaca

SEQ ID NO: 864064 - DNA, 33 bp, Homo sapien
aatcaatctattgaggtatcgtctttgtaaaca

SEQ ID NO: 864065 - DNA, 33 bp, Homo sapien
tgacagaactaatacaagctagagatgggaatg

SEQ ID NO: 864066 - DNA, 33 bp, Homo sapien
tgacagaactaatacaggctagagatgggaatg

SEQ ID NO: 864067 - DNA, 33 bp, Homo sapien
acctgaatcatttttcactcataaccacctggc

SEQ ID NO: 864068 - DNA, 33 bp, Homo sapien
acctgaatcatttttcgctcataaccacctggc

SEQ ID NO: 864069 - DNA, 33 bp, Homo sapien
ccatgttgatgatcaaaaggttgttcctcttta

SEQ ID NO: 864070 - DNA, 33 bp, Homo sapien
ccatgttgatgatcaataggttgttcctcttta

SEQ ID NO: 864071 - DNA, 33 bp, Homo sapien
ataatatttgtaaggaaagtacccaattatttt

SEQ ID NO: 864072 - DNA, 33 bp, Homo sapien
ataatatttgtaaggatagtacccaattatttt

SEQ ID NO: 864073 - DNA, 33 bp, Homo sapien
tggaaaaatcatttgcactgttttgtggggatt

SEQ ID NO: 864074 - DNA, 33 bp, Homo sapien
tggaaaaatcatttgcgctgttttgtggggatt

SEQ ID NO: 864075 - DNA, 33 bp, Homo sapien
gagttgaaaaagagaaagacgagaaggaggtag

SEQ ID NO: 864076 - DNA, 33 bp, Homo sapien
gagttgaaaaagagaatgacgagaaggaggtag

SEQ ID NO: 864077 - DNA, 33 bp, Homo sapien
atcatttcagcatatacagagtaaggagtgcct

SEQ ID NO: 864078 - DNA, 33 bp, Homo sapien
atcatttcagcatatatagagtaaggagtgcct

SEQ ID NO: 864079 - DNA, 33 bp, Homo sapien
attgaaaacaaaacaccgtgcagcccatgctgc

SEQ ID NO: 864080 - DNA, 33 bp, Homo sapien
attgaaaacaaaacactgtgcagcccatgctgc

SEQ ID NO: 864081 - DNA, 33 bp, Homo sapien
ggaattatcttgtacacacttctttccttgtgc

SEQ ID NO: 864082 - DNA, 33 bp, Homo sapien
ggaattatcttgtacatacttctttccttgtgc

SEQ ID NO: 864083 - DNA, 33 bp, Homo sapien
agcgttatcccctcaactcatgaaataaccttt

SEQ ID NO: 864084 - DNA, 33 bp, Homo sapien
agcgttatcccctcaagtcatgaaataaccttt

SEQ ID NO: 864085 - DNA, 33 bp, Homo sapien
ctttggagagaacaaaacaaaggagagaacagt

SEQ ID NO: 864086 - DNA, 33 bp, Homo sapien
ctttggagagaacaaaccaaaggagagaacagt

SEQ ID NO: 864087 - DNA, 33 bp, Homo sapien
ggaatactctgatgacagaaaagactattttaa

SEQ ID NO: 864088 - DNA, 33 bp, Homo sapien
ggaatactctgatgaccgaaaagactattttaa

SEQ ID NO: 864089 - DNA, 33 bp, Homo sapien
atgcttaaatgaattacgcatataggtatgtgt

SEQ ID NO: 864090 - DNA, 33 bp, Homo sapien
atgcttaaatgaattatgcatataggtatgtgt

SEQ ID NO: 864091 - DNA, 33 bp, Homo sapien
gttttgtgccctagtaaagtagcttcctttgtc

SEQ ID NO: 864092 - DNA, 33 bp, Homo sapien
gttttgtgccctagtagagtagcttcctttgtc

SEQ ID NO: 864093 - DNA, 33 bp, Homo sapien
ctcactttgcgaatgacgaaacaggtaccccat

SEQ ID NO: 864094 - DNA, 33 bp, Homo sapien
ctcactttgcgaatgaggaaacaggtaccccat

SEQ ID NO: 864095 - DNA, 33 bp, Homo sapien
cagtaggattgcaggaaggaagaggttccaagg

SEQ ID NO: 864096 - DNA, 33 bp, Homo sapien
cagtaggattgcaggatggaagaggttccaagg

SEQ ID NO: 864097 - DNA, 33 bp, Homo sapien
aaaaactccgagggcccgaaatatggccagata

SEQ ID NO: 864098 - DNA, 33 bp, Homo sapien
aaaaactccgagggcctgaaatatggccagata

SEQ ID NO: 864099 - DNA, 33 bp, Homo sapien
tgagagcattaggatacactagacagggctgca

SEQ ID NO: 864100 - DNA, 33 bp, Homo sapien
tgagagcattaggatatactagacagggctgca

SEQ ID NO: 864101 - DNA, 33 bp, Homo sapien
gtgtcagcctacatcaccgacgagaacccagaa

SEQ ID NO: 864102 - DNA, 33 bp, Homo sapien
gtgtcagcctacatcatcgacgagaacccagaa

SEQ ID NO: 864103 - DNA, 33 bp, Homo sapien
ctctgtccctattacactgcaagggctcataga

SEQ ID NO: 864104 - DNA, 33 bp, Homo sapien
ctctgtccctattacattgcaagggctcataga

SEQ ID NO: 864105 - DNA, 33 bp, Homo sapien
tgtttaactgtgtggccctgaacaagtaatctc

SEQ ID NO: 864106 - DNA, 33 bp, Homo sapien
tgtttaactgtgtggctctgaacaagtaatctc

SEQ ID NO: 864107 - DNA, 33 bp, Homo sapien
aacaagtaatctcctagccaaattgctttttca

SEQ ID NO: 864108 - DNA, 33 bp, Homo sapien
aacaagtaatctcctatccaaattgctttttca

SEQ ID NO: 864109 - DNA, 33 bp, Homo sapien
ggtccataatccatgacctctcaatctgcacag

SEQ ID NO: 864110 - DNA, 33 bp, Homo sapien
ggtccataatccatgatctctcaatctgcacag

SEQ ID NO: 864111 - DNA, 33 bp, Homo sapien
tggcaggagctactccaggaattaaattttctt

SEQ ID NO: 864112 - DNA, 33 bp, Homo sapien
tggcaggagctactccgggaattaaattttctt

SEQ ID NO: 864113 - DNA, 33 bp, Homo sapien
gctagtgttcattccaggttcagaaacccaaac

SEQ ID NO: 864114 - DNA, 33 bp, Homo sapien
gctagtgttcattccatgttcagaaacccaaac

SEQ ID NO: 864115 - DNA, 33 bp, Homo sapien
atttattatgtggtaacctgtccttggtaacat

SEQ ID NO: 864116 - DNA, 33 bp, Homo sapien
atttattatgtggtaatctgtccttggtaacat

SEQ ID NO: 864117 - DNA, 33 bp, Homo sapien
gtttagacctatataggagtgtgaagttttcaa

SEQ ID NO: 864118 - DNA, 33 bp, Homo sapien
gtttagacctatatagtagtgtgaagttttcaa

SEQ ID NO: 864119 - DNA, 33 bp, Homo sapien
gatcctttccctgttccctgtgtattccctgtc

SEQ ID NO: 864120 - DNA, 33 bp, Homo sapien
gatcctttccctgttcgctgtgtattccctgtc

SEQ ID NO: 864121 - DNA, 33 bp, Homo sapien
agaacataaactatacaagggccagcttttatt

SEQ ID NO: 864122 - DNA, 33 bp, Homo sapien
agaacataaactatacgagggccagcttttatt

SEQ ID NO: 864123 - DNA, 33 bp, Homo sapien
cagctggcttttctgccacacctgcacacgtgg

SEQ ID NO: 864124 - DNA, 33 bp, Homo sapien
cagctggcttttctgcgacacctgcacacgtgg

SEQ ID NO: 864125 - DNA, 33 bp, Homo sapien
actttccacatacacaacctgaataatctcctc

SEQ ID NO: 864126 - DNA, 33 bp, Homo sapien
actttccacatacacaccctgaataatctcctc

SEQ ID NO: 864127 - DNA, 33 bp, Homo sapien
ttagaaagactggtcacagaagatgtggtggag

SEQ ID NO: 864128 - DNA, 33 bp, Homo sapien
ttagaaagactggtcatagaagatgtggtggag

SEQ ID NO: 864129 - DNA, 33 bp, Homo sapien
gtggagcataaatcaaaacaatggagacaatat

SEQ ID NO: 864130 - DNA, 33 bp, Homo sapien
gtggagcataaatcaacacaatggagacaatat

SEQ ID NO: 864131 - DNA, 33 bp, Homo sapien
catcgcatgaagtccaactgatcaacctcctgc

SEQ ID NO: 864132 - DNA, 33 bp, Homo sapien
catcgcatgaagtccagctgatcaacctcctgc

SEQ ID NO: 864133 - DNA, 33 bp, Homo sapien
attttattgcttcctacggttctgttactccct

SEQ ID NO: 864134 - DNA, 33 bp, Homo sapien
attttattgcttcctatggttctgttactccct

SEQ ID NO: 864135 - DNA, 33 bp, Homo sapien
ccagcctccacaatggccaatgatccctgcctc

SEQ ID NO: 864136 - DNA, 33 bp, Homo sapien
ccagcctccacaatggtcaatgatccctgcctc

SEQ ID NO: 864137 - DNA, 33 bp, Homo sapien
atgaagaatgaataagaaatctcctagtccttc

SEQ ID NO: 864138 - DNA, 33 bp, Homo sapien
atgaagaatgaataaggaatctcctagtccttc

SEQ ID NO: 864139 - DNA, 33 bp, Homo sapien
gcacatcctgatgttccacttgagagcttcaaa

SEQ ID NO: 864140 - DNA, 33 bp, Homo sapien
gcacatcctgatgttctacttgagagcttcaaa

SEQ ID NO: 864141 - DNA, 33 bp, Homo sapien
attcttcaaatgttcaaagcctaataaacaacc

SEQ ID NO: 864142 - DNA, 33 bp, Homo sapien
attcttcaaatgttcagagcctaataaacaacc

SEQ ID NO: 864143 - DNA, 33 bp, Homo sapien
aataaacaaccttaaacacaggagtcaggtttt

SEQ ID NO: 864144 - DNA, 33 bp, Homo sapien
aataaacaaccttaaatacaggagtcaggtttt

SEQ ID NO: 864145 - DNA, 33 bp, Homo sapien
tcaagacttgcccaaacttgacaatataaatta

SEQ ID NO: 864146 - DNA, 33 bp, Homo sapien
tcaagacttgcccaaagttgacaatataaatta

SEQ ID NO: 864147 - DNA, 33 bp, Homo sapien
gtaatctagagccataaaagctgataatgtgaa

SEQ ID NO: 864148 - DNA, 33 bp, Homo sapien
gtaatctagagccatagaagctgataatgtgaa

SEQ ID NO: 864149 - DNA, 33 bp, Homo sapien
taaaaaaatcctttcaccttgacaactgcaggg

SEQ ID NO: 864150 - DNA, 33 bp, Homo sapien
taaaaaaatcctttcatcttgacaactgcaggg

SEQ ID NO: 864151 - DNA, 33 bp, Homo sapien
taatctagttctggaacagtggttaaaagcatg

SEQ ID NO: 864152 - DNA, 33 bp, Homo sapien
taatctagttctggaatagtggttaaaagcatg

SEQ ID NO: 864153 - DNA, 33 bp, Homo sapien
tgtaggcagcttttccaaattcaagttatttca

SEQ ID NO: 864154 - DNA, 33 bp, Homo sapien
tgtaggcagcttttcctaattcaagttatttca

SEQ ID NO: 864155 - DNA, 33 bp, Homo sapien
tcactacccttgaagagatttctgttcagagta

SEQ ID NO: 864156 - DNA, 33 bp, Homo sapien
tcactacccttgaagatatttctgttcagagta

SEQ ID NO: 864157 - DNA, 33 bp, Homo sapien
agcaatgggaatagcacgaaatggtgatgatga

SEQ ID NO: 864158 - DNA, 33 bp, Homo sapien
agcaatgggaatagcaggaaatggtgatgatga

SEQ ID NO: 864159 - DNA, 33 bp, Homo sapien
tgtggaaactgagatacagagcttttaaataat

SEQ ID NO: 864160 - DNA, 33 bp, Homo sapien
tgtggaaactgagatagagagcttttaaataat

SEQ ID NO: 864161 - DNA, 33 bp, Homo sapien
tggatagatggaagaggataggtggtagaagaa

SEQ ID NO: 864162 - DNA, 33 bp, Homo sapien
tggatagatggaagagtataggtggtagaagaa

SEQ ID NO: 864163 - DNA, 33 bp, Homo sapien
tttagttcatcactgaaatttgacacattgctt

SEQ ID NO: 864164 - DNA, 33 bp, Homo sapien
tttagttcatcactgatatttgacacattgctt

SEQ ID NO: 864165 - DNA, 33 bp, Homo sapien
aacaaaagaaatgcaaaatctttacacaacaaa

SEQ ID NO: 864166 - DNA, 33 bp, Homo sapien
aacaaaagaaatgcaagatctttacacaacaaa

SEQ ID NO: 864167 - DNA, 33 bp, Homo sapien
accccagagaactcaccactgggttattcctaa

SEQ ID NO: 864168 - DNA, 33 bp, Homo sapien
accccagagaactcactactgggttattcctaa

SEQ ID NO: 864169 - DNA, 33 bp, Homo sapien
actgtccctccactaacgcacgactcgctcctc

SEQ ID NO: 864170 - DNA, 33 bp, Homo sapien
actgtccctccactaatgcacgactcgctcctc

SEQ ID NO: 864171 - DNA, 33 bp, Homo sapien
tgcagtccttcaatccaacctttggcctggagc

SEQ ID NO: 864172 - DNA, 33 bp, Homo sapien
tgcagtccttcaatcccacctttggcctggagc

SEQ ID NO: 864173 - DNA, 33 bp, Homo sapien
tatatatgttctctaacggaagacagccaaata

SEQ ID NO: 864174 - DNA, 33 bp, Homo sapien
tatatatgttctctaatggaagacagccaaata

SEQ ID NO: 864175 - DNA, 33 bp, Homo sapien
attatttaaggtaccaagaaagaagctggacaa

SEQ ID NO: 864176 - DNA, 33 bp, Homo sapien
attatttaaggtaccaggaaagaagctggacaa

SEQ ID NO: 864177 - DNA, 33 bp, Homo sapien
tggattaatggtctcacaagtagcgcctttgta

SEQ ID NO: 864178 - DNA, 33 bp, Homo sapien
tggattaatggtctcataagtagcgcctttgta

SEQ ID NO: 864179 - DNA, 33 bp, Homo sapien
atttctgtctaaaactcaaaataccaactgagg

SEQ ID NO: 864180 - DNA, 33 bp, Homo sapien
atttctgtctaaaactgaaaataccaactgagg

SEQ ID NO: 864181 - DNA, 33 bp, Homo sapien
gtgctcaatagccttcaatttatgaaatttaaa

SEQ ID NO: 864182 - DNA, 33 bp, Homo sapien
gtgctcaatagccttcgatttatgaaatttaaa

SEQ ID NO: 864183 - DNA, 33 bp, Homo sapien
cactgttggtagaatgcaaatatagctattata

SEQ ID NO: 864184 - DNA, 33 bp, Homo sapien
cactgttggtagaatggaaatatagctattata

SEQ ID NO: 864185 - DNA, 33 bp, Homo sapien
aacaaaaacaagaaatcaggtcactgttagaga

SEQ ID NO: 864186 - DNA, 33 bp, Homo sapien
aacaaaaacaagaaatgaggtcactgttagaga

SEQ ID NO: 864187 - DNA, 33 bp, Homo sapien
gcaacatttagattcacgtttaattggaaactg

SEQ ID NO: 864188 - DNA, 33 bp, Homo sapien
gcaacatttagattcatgtttaattggaaactg

SEQ ID NO: 864189 - DNA, 33 bp, Homo sapien
ctcatcttctatgtaaccagaaatggaaatcat

SEQ ID NO: 864190 - DNA, 33 bp, Homo sapien
ctcatcttctatgtaagcagaaatggaaatcat

SEQ ID NO: 864191 - DNA, 33 bp, Homo sapien
gagaaccgtcagaccacattcttgggcatatac

SEQ ID NO: 864192 - DNA, 33 bp, Homo sapien
gagaaccgtcagaccatattcttgggcatatac

SEQ ID NO: 864193 - DNA, 33 bp, Homo sapien
tgctgttatcaaggtcaccaatgatacactcat

SEQ ID NO: 864194 - DNA, 33 bp, Homo sapien
tgctgttatcaaggtcgccaatgatacactcat

SEQ ID NO: 864195 - DNA, 33 bp, Homo sapien
cactctccattttcccaactacaaaatacctgt

SEQ ID NO: 864196 - DNA, 33 bp, Homo sapien
cactctccattttccctactacaaaatacctgt

SEQ ID NO: 864197 - DNA, 33 bp, Homo sapien
cttaatatatattttaccagcaagttggcatat

SEQ ID NO: 864198 - DNA, 33 bp, Homo sapien
cttaatatatattttatcagcaagttggcatat

SEQ ID NO: 864199 - DNA, 33 bp, Homo sapien
ggattttcttgtcgaaatgcgaaggcctgcgct

SEQ ID NO: 864200 - DNA, 33 bp, Homo sapien
ggattttcttgtcgaactgcgaaggcctgcgct

SEQ ID NO: 864201 - DNA, 33 bp, Homo sapien
agaggagtaacatgaaaacctgtaagtagagct

SEQ ID NO: 864202 - DNA, 33 bp, Homo sapien
agaggagtaacatgaagacctgtaagtagagct

SEQ ID NO: 864203 - DNA, 33 bp, Homo sapien
gatgactgagttggtcaagttgctttttgtccc

SEQ ID NO: 864204 - DNA, 33 bp, Homo sapien
gatgactgagttggtcgagttgctttttgtccc

SEQ ID NO: 864205 - DNA, 33 bp, Homo sapien
gacaagtggcttagagcagttaaagaggaattg

SEQ ID NO: 864206 - DNA, 33 bp, Homo sapien
gacaagtggcttagagtagttaaagaggaattg

SEQ ID NO: 864207 - DNA, 33 bp, Homo sapien
tctatcacaattaaagaaaaatataggctgagc

SEQ ID NO: 864208 - DNA, 33 bp, Homo sapien
tctatcacaattaaaggaaaatataggctgagc

SEQ ID NO: 864209 - DNA, 33 bp, Homo sapien
aacattagcagaagtaggaactaaatttctaaa

SEQ ID NO: 864210 - DNA, 33 bp, Homo sapien
aacattagcagaagtatgaactaaatttctaaa

SEQ ID NO: 864211 - DNA, 33 bp, Homo sapien
caagaaacctgaacacacctgttgtgaaatcat

SEQ ID NO: 864212 - DNA, 33 bp, Homo sapien
caagaaacctgaacactcctgttgtgaaatcat

SEQ ID NO: 864213 - DNA, 33 bp, Homo sapien
tgttgcataaaaggcaatgaggcatatctaaaa

SEQ ID NO: 864214 - DNA, 33 bp, Homo sapien
tgttgcataaaaggcagtgaggcatatctaaaa

SEQ ID NO: 864215 - DNA, 33 bp, Homo sapien
ctggtagaaataataaaagtgccaggatgtgca

SEQ ID NO: 864216 - DNA, 33 bp, Homo sapien
ctggtagaaataataagagtgccaggatgtgca

SEQ ID NO: 864217 - DNA, 33 bp, Homo sapien
gggatacatggacaaaattgacagagaacttgc

SEQ ID NO: 864218 - DNA, 33 bp, Homo sapien
gggatacatggacaaagttgacagagaacttgc

SEQ ID NO: 864219 - DNA, 33 bp, Homo sapien
tcttggtcactagaaacacttcttcttactact

SEQ ID NO: 864220 - DNA, 33 bp, Homo sapien
tcttggtcactagaaatacttcttcttactact

SEQ ID NO: 864221 - DNA, 33 bp, Homo sapien
catgatggcaacggcactgacaggatgaccctc

SEQ ID NO: 864222 - DNA, 33 bp, Homo sapien
catgatggcaacggcagtgacaggatgaccctc

SEQ ID NO: 864223 - DNA, 33 bp, Homo sapien
tatttgcaataggaaagatatagaatcaacttg

SEQ ID NO: 864224 - DNA, 33 bp, Homo sapien
tatttgcaataggaaatatatagaatcaacttg

SEQ ID NO: 864225 - DNA, 33 bp, Homo sapien
ataatggaaggattaaataagctggtaagctag

SEQ ID NO: 864226 - DNA, 33 bp, Homo sapien
ataatggaaggattaagtaagctggtaagctag

SEQ ID NO: 864227 - DNA, 33 bp, Homo sapien
atgttctgctcacccccagtcgatctccctctg

SEQ ID NO: 864228 - DNA, 33 bp, Homo sapien
atgttctgctcacccctagtcgatctccctctg

SEQ ID NO: 864229 - DNA, 33 bp, Homo sapien
ccccaggagtgaatgagaaatctggctgctttg

SEQ ID NO: 864230 - DNA, 33 bp, Homo sapien
ccccaggagtgaatgataaatctggctgctttg

SEQ ID NO: 864231 - DNA, 33 bp, Homo sapien
ctgtgaatgtgtttatcactaaatgctttcaga

SEQ ID NO: 864232 - DNA, 33 bp, Homo sapien
ctgtgaatgtgtttattactaaatgctttcaga

SEQ ID NO: 864233 - DNA, 33 bp, Homo sapien
aaggctgtggttccaaaactgtgtgtacaatgc

SEQ ID NO: 864234 - DNA, 33 bp, Homo sapien
aaggctgtggttccaagactgtgtgtacaatgc

SEQ ID NO: 864235 - DNA, 33 bp, Homo sapien
aaaccttaatgagtgacggattcaaataggctc

SEQ ID NO: 864236 - DNA, 33 bp, Homo sapien
aaaccttaatgagtgatggattcaaataggctc

SEQ ID NO: 864237 - DNA, 33 bp, Homo sapien
tcctaaatcataaccaactgaatatattttatt

SEQ ID NO: 864238 - DNA, 33 bp, Homo sapien
tcctaaatcataaccatctgaatatattttatt

SEQ ID NO: 864239 - DNA, 33 bp, Homo sapien
caactatttcttccacagtgagacaaacatcac

SEQ ID NO: 864240 - DNA, 33 bp, Homo sapien
caactatttcttccactgtgagacaaacatcac

SEQ ID NO: 864241 - DNA, 33 bp, Homo sapien
taaagataaacctcataaaactggggagagaga

SEQ ID NO: 864242 - DNA, 33 bp, Homo sapien
taaagataaacctcatgaaactggggagagaga

SEQ ID NO: 864243 - DNA, 33 bp, Homo sapien
gattatattatttggcccccttattcctgtccc

SEQ ID NO: 864244 - DNA, 33 bp, Homo sapien
gattatattatttggctcccttattcctgtccc

SEQ ID NO: 864245 - DNA, 33 bp, Homo sapien
tttcaggatccaggacaggagtacaaatggaag

SEQ ID NO: 864246 - DNA, 33 bp, Homo sapien
tttcaggatccaggacgggagtacaaatggaag

SEQ ID NO: 864247 - DNA, 33 bp, Homo sapien
aacagactttatctaaatgagttagactaccat

SEQ ID NO: 864248 - DNA, 33 bp, Homo sapien
aacagactttatctaagtgagttagactaccat

SEQ ID NO: 864249 - DNA, 33 bp, Homo sapien
tgcaaatcttcatatacgtcagttcatttgaac

SEQ ID NO: 864250 - DNA, 33 bp, Homo sapien
tgcaaatcttcatatatgtcagttcatttgaac

SEQ ID NO: 864251 - DNA, 33 bp, Homo sapien
tagcttgagaatcagaagttagactccaataaa

SEQ ID NO: 864252 - DNA, 33 bp, Homo sapien
tagcttgagaatcagatgttagactccaataaa

SEQ ID NO: 864253 - DNA, 33 bp, Homo sapien
gcccactctagtacaacgtctattctcagaaaa

SEQ ID NO: 864254 - DNA, 33 bp, Homo sapien
gcccactctagtacaatgtctattctcagaaaa

SEQ ID NO: 864255 - DNA, 33 bp, Homo sapien
ttttccttagaattcccgagactcctattttat

SEQ ID NO: 864256 - DNA, 33 bp, Homo sapien
ttttccttagaattcctgagactcctattttat

SEQ ID NO: 864257 - DNA, 33 bp, Homo sapien
ccgcaaatatgcagctaaaaaaaacctagcatc

SEQ ID NO: 864258 - DNA, 33 bp, Homo sapien
ccgcaaatatgcagctcaaaaaaacctagcatc

SEQ ID NO: 864259 - DNA, 33 bp, Homo sapien
tgaagaatgaaagccacgtggagacaacctatc

SEQ ID NO: 864260 - DNA, 33 bp, Homo sapien
tgaagaatgaaagccatgtggagacaacctatc

SEQ ID NO: 864261 - DNA, 33 bp, Homo sapien
attttaaagattgggaacaaaacagaccaataa

SEQ ID NO: 864262 - DNA, 33 bp, Homo sapien
attttaaagattgggaccaaaacagaccaataa

SEQ ID NO: 864263 - DNA, 33 bp, Homo sapien
gaaaaaagtgacaaagcaatgaggtgacgtcct

SEQ ID NO: 864264 - DNA, 33 bp, Homo sapien
gaaaaaagtgacaaagtaatgaggtgacgtcct

SEQ ID NO: 864265 - DNA, 33 bp, Homo sapien
tctgactacacagttaataacagtttttcattt

SEQ ID NO: 864266 - DNA, 33 bp, Homo sapien
tctgactacacagttagtaacagtttttcattt

SEQ ID NO: 864267 - DNA, 33 bp, Homo sapien
ttccactatctcttcaagtaaacagaactaata

SEQ ID NO: 864268 - DNA, 33 bp, Homo sapien
ttccactatctcttcaggtaaacagaactaata

SEQ ID NO: 864269 - DNA, 33 bp, Homo sapien
tagtggaagctttgacaaaacataggttaagag

SEQ ID NO: 864270 - DNA, 33 bp, Homo sapien
tagtggaagctttgacgaaacataggttaagag

SEQ ID NO: 864271 - DNA, 33 bp, Homo sapien
gtggtttgaactacaaccgtgaaagtgcagatg

SEQ ID NO: 864272 - DNA, 33 bp, Homo sapien
gtggtttgaactacaatcgtgaaagtgcagatg

SEQ ID NO: 864273 - DNA, 33 bp, Homo sapien
caacttaagtgctaccaccaaaatatatccccc

SEQ ID NO: 864274 - DNA, 33 bp, Homo sapien
caacttaagtgctaccgccaaaatatatccccc

SEQ ID NO: 864275 - DNA, 33 bp, Homo sapien
aacaaatggaagaaaaaatgattgctctggtaa

SEQ ID NO: 864276 - DNA, 33 bp, Homo sapien
aacaaatggaagaaaagatgattgctctggtaa

SEQ ID NO: 864277 - DNA, 33 bp, Homo sapien
atttctccgctatccaattcagcccctctctcc

SEQ ID NO: 864278 - DNA, 33 bp, Homo sapien
atttctccgctatccatttcagcccctctctcc

SEQ ID NO: 864279 - DNA, 33 bp, Homo sapien
ccctactcacaactcaacttctctctacctctg

SEQ ID NO: 864280 - DNA, 33 bp, Homo sapien
ccctactcacaactcagcttctctctacctctg

SEQ ID NO: 864281 - DNA, 33 bp, Homo sapien
tacccaatatgatacccgctctaaagtaaagag

SEQ ID NO: 864282 - DNA, 33 bp, Homo sapien
tacccaatatgatacctgctctaaagtaaagag

SEQ ID NO: 864283 - DNA, 33 bp, Homo sapien
cctgtctccaaagataagcccacagttaatttg

SEQ ID NO: 864284 - DNA, 33 bp, Homo sapien
cctgtctccaaagatatgcccacagttaatttg

SEQ ID NO: 864285 - DNA, 33 bp, Homo sapien
gaggtgtgtttacatgaagaaataatttcaagg

SEQ ID NO: 864286 - DNA, 33 bp, Homo sapien
gaggtgtgtttacatggagaaataatttcaagg

SEQ ID NO: 864287 - DNA, 33 bp, Homo sapien
agtaagagagacaggaaagaaaagagctgatct

SEQ ID NO: 864288 - DNA, 33 bp, Homo sapien
agtaagagagacaggagagaaaagagctgatct

SEQ ID NO: 864289 - DNA, 33 bp, Homo sapien
atcaatctttatattgacaagcctaatagatat

SEQ ID NO: 864290 - DNA, 33 bp, Homo sapien
atcaatctttatattgccaagcctaatagatat

SEQ ID NO: 864291 - DNA, 33 bp, Homo sapien
ctgctgatgcaaccaaagatactgcttcctgtc

SEQ ID NO: 864292 - DNA, 33 bp, Homo sapien
ctgctgatgcaaccaaggatactgcttcctgtc

SEQ ID NO: 864293 - DNA, 33 bp, Homo sapien
ggtagcatctgcaacactacttatccatttatg

SEQ ID NO: 864294 - DNA, 33 bp, Homo sapien
ggtagcatctgcaacattacttatccatttatg

SEQ ID NO: 864295 - DNA, 33 bp, Homo sapien
cagggcttgcttttggacaaggaataccaaatc

SEQ ID NO: 864296 - DNA, 33 bp, Homo sapien
cagggcttgcttttgggcaaggaataccaaatc

SEQ ID NO: 864297 - DNA, 33 bp, Homo sapien
ctaaaggtagatcttaaatttttggctttttaa

SEQ ID NO: 864298 - DNA, 33 bp, Homo sapien
ctaaaggtagatcttacatttttggctttttaa

SEQ ID NO: 864299 - DNA, 33 bp, Homo sapien
tgtcatatcagccataaacttcaagaggcaaag

SEQ ID NO: 864300 - DNA, 33 bp, Homo sapien
tgtcatatcagccatagacttcaagaggcaaag

SEQ ID NO: 864301 - DNA, 33 bp, Homo sapien
atgcatattcaaagcaactttaaatgttcagtt

SEQ ID NO: 864302 - DNA, 33 bp, Homo sapien
atgcatattcaaagcatctttaaatgttcagtt

SEQ ID NO: 864303 - DNA, 33 bp, Homo sapien
aaaccatgtttatgccaggaaaccaataggtaa

SEQ ID NO: 864304 - DNA, 33 bp, Homo sapien
aaaccatgtttatgccgggaaaccaataggtaa

SEQ ID NO: 864305 - DNA, 33 bp, Homo sapien
cagaataatctaaaacaactctttagcaactct

SEQ ID NO: 864306 - DNA, 33 bp, Homo sapien
cagaataatctaaaacgactctttagcaactct

SEQ ID NO: 864307 - DNA, 33 bp, Homo sapien
cagctacgtggccagagagttgttgtcatagtt

SEQ ID NO: 864308 - DNA, 33 bp, Homo sapien
cagctacgtggccagatagttgttgtcatagtt

SEQ ID NO: 864309 - DNA, 33 bp, Homo sapien
caaagaatacgtgaaacttaaatgttatcacaa

SEQ ID NO: 864310 - DNA, 33 bp, Homo sapien
caaagaatacgtgaaagttaaatgttatcacaa

SEQ ID NO: 864311 - DNA, 33 bp, Homo sapien
ataggtaaggcatacaaagtttctaaactagaa

SEQ ID NO: 864312 - DNA, 33 bp, Homo sapien
ataggtaaggcatacagagtttctaaactagaa

SEQ ID NO: 864313 - DNA, 33 bp, Homo sapien
tgttttgctaaaaccaagtgtctattagaaaca

SEQ ID NO: 864314 - DNA, 33 bp, Homo sapien
tgttttgctaaaaccaggtgtctattagaaaca

SEQ ID NO: 864315 - DNA, 33 bp, Homo sapien
aataattaaaacaatacagatgcgtttctgaaa

SEQ ID NO: 864316 - DNA, 33 bp, Homo sapien
aataattaaaacaatagagatgcgtttctgaaa

SEQ ID NO: 864317 - DNA, 33 bp, Homo sapien
agcctaggaaggcttacggctgattgcaaacct

SEQ ID NO: 864318 - DNA, 33 bp, Homo sapien
agcctaggaaggcttatggctgattgcaaacct

SEQ ID NO: 864319 - DNA, 33 bp, Homo sapien
caatatgctaaagttacagttaacagagtctgc

SEQ ID NO: 864320 - DNA, 33 bp, Homo sapien
caatatgctaaagttatagttaacagagtctgc

SEQ ID NO: 864321 - DNA, 33 bp, Homo sapien
ggtagagtactctgaacggcattgtctcagtaa

SEQ ID NO: 864322 - DNA, 33 bp, Homo sapien
ggtagagtactctgaagggcattgtctcagtaa

SEQ ID NO: 864323 - DNA, 33 bp, Homo sapien
tggccataattccacaaaagtagcattgtgata

SEQ ID NO: 864324 - DNA, 33 bp, Homo sapien
tggccataattccacagaagtagcattgtgata

SEQ ID NO: 864325 - DNA, 33 bp, Homo sapien
tagggctagatttgcactgacatctgaataaat

SEQ ID NO: 864326 - DNA, 33 bp, Homo sapien
tagggctagatttgcattgacatctgaataaat

SEQ ID NO: 864327 - DNA, 33 bp, Homo sapien
aaaggaggcccagttacgtgataatagtaatat

SEQ ID NO: 864328 - DNA, 33 bp, Homo sapien
aaaggaggcccagttaggtgataatagtaatat

SEQ ID NO: 864329 - DNA, 33 bp, Homo sapien
gaaacaaattggaatactatgaaatcacatgta

SEQ ID NO: 864330 - DNA, 33 bp, Homo sapien
gaaacaaattggaatattatgaaatcacatgta

SEQ ID NO: 864331 - DNA, 33 bp, Homo sapien
aaccctgactaaaatacactcctagaaatgcaa

SEQ ID NO: 864332 - DNA, 33 bp, Homo sapien
aaccctgactaaaatagactcctagaaatgcaa

SEQ ID NO: 864333 - DNA, 33 bp, Homo sapien
aatcataaaagcgatgaaacaagtagtaagata

SEQ ID NO: 864334 - DNA, 33 bp, Homo sapien
aatcataaaagcgatgcaacaagtagtaagata

SEQ ID NO: 864335 - DNA, 33 bp, Homo sapien
ccagtcttcaacttacacatagctagagggact

SEQ ID NO: 864336 - DNA, 33 bp, Homo sapien
ccagtcttcaacttacgcatagctagagggact

SEQ ID NO: 864337 - DNA, 33 bp, Homo sapien
aagtctggcttttgtgcatcagccctggatttc

SEQ ID NO: 864338 - DNA, 33 bp, Homo sapien
aagtctggcttttgtgtatcagccctggatttc

SEQ ID NO: 864339 - DNA, 33 bp, Homo sapien
tagatggaaatatggaagtagctagcaggagaa

SEQ ID NO: 864340 - DNA, 33 bp, Homo sapien
tagatggaaatatggaggtagctagcaggagaa

SEQ ID NO: 864341 - DNA, 33 bp, Homo sapien
tcactacaataactccagcatattccccatggt

SEQ ID NO: 864342 - DNA, 33 bp, Homo sapien
tcactacaataactccggcatattccccatggt

SEQ ID NO: 864343 - DNA, 33 bp, Homo sapien
cgttctgtggctttccaatcttcgtggtattca

SEQ ID NO: 864344 - DNA, 33 bp, Homo sapien
cgttctgtggctttccgatcttcgtggtattca

SEQ ID NO: 864345 - DNA, 33 bp, Homo sapien
ccctatttcctactacacagttaccttgataga

SEQ ID NO: 864346 - DNA, 33 bp, Homo sapien
ccctatttcctactacgcagttaccttgataga

SEQ ID NO: 864347 - DNA, 33 bp, Homo sapien
ttgtcctgactcagaacacgaagatttgctggt

SEQ ID NO: 864348 - DNA, 33 bp, Homo sapien
ttgtcctgactcagaatacgaagatttgctggt

SEQ ID NO: 864349 - DNA, 33 bp, Homo sapien
tcctaacaatagaaaaaataactggttgcttct

SEQ ID NO: 864350 - DNA, 33 bp, Homo sapien
tcctaacaatagaaaacataactggttgcttct

SEQ ID NO: 864351 - DNA, 33 bp, Homo sapien
gaaactgacataacacagctcatggtagacagt

SEQ ID NO: 864352 - DNA, 33 bp, Homo sapien
gaaactgacataacacggctcatggtagacagt

SEQ ID NO: 864353 - DNA, 33 bp, Homo sapien
aagaccatatatttgacaaaaattgtacataga

SEQ ID NO: 864354 - DNA, 33 bp, Homo sapien
aagaccatatatttgataaaaattgtacataga

SEQ ID NO: 864355 - DNA, 33 bp, Homo sapien
ccctattggactgtaaaccccacagaagcaggg

SEQ ID NO: 864356 - DNA, 33 bp, Homo sapien
ccctattggactgtaatccccacagaagcaggg

SEQ ID NO: 864357 - DNA, 33 bp, Homo sapien
aacccagactgcaatgccacaattaagttccat

SEQ ID NO: 864358 - DNA, 33 bp, Homo sapien
aacccagactgcaatgtcacaattaagttccat

SEQ ID NO: 864359 - DNA, 33 bp, Homo sapien
aggggtcaacagaaaacagaacagacagacaga

SEQ ID NO: 864360 - DNA, 33 bp, Homo sapien
aggggtcaacagaaaatagaacagacagacaga

SEQ ID NO: 864361 - DNA, 33 bp, Homo sapien
ttaagacacttagagacatcaaagcactaaaaa

SEQ ID NO: 864362 - DNA, 33 bp, Homo sapien
ttaagacacttagagatatcaaagcactaaaaa

SEQ ID NO: 864363 - DNA, 33 bp, Homo sapien
cttacttgttgggaccactcagaatttcccagt

SEQ ID NO: 864364 - DNA, 33 bp, Homo sapien
cttacttgttgggaccgctcagaatttcccagt

SEQ ID NO: 864365 - DNA, 33 bp, Homo sapien
ttcctaatctgaacaacgaaatagactgaaata

SEQ ID NO: 864366 - DNA, 33 bp, Homo sapien
ttcctaatctgaacaatgaaatagactgaaata

SEQ ID NO: 864367 - DNA, 33 bp, Homo sapien
gaaactgtgcaaaggaaacatgggtctctatca

SEQ ID NO: 864368 - DNA, 33 bp, Homo sapien
gaaactgtgcaaaggatacatgggtctctatca

SEQ ID NO: 864369 - DNA, 33 bp, Homo sapien
tcttgcctgcaatggcactagattttcctagtt

SEQ ID NO: 864370 - DNA, 33 bp, Homo sapien
tcttgcctgcaatggcgctagattttcctagtt

SEQ ID NO: 864371 - DNA, 33 bp, Homo sapien
acttacctgagtataaactggtcagtgaggttt

SEQ ID NO: 864372 - DNA, 33 bp, Homo sapien
acttacctgagtataatctggtcagtgaggttt

SEQ ID NO: 864373 - DNA, 33 bp, Homo sapien
tatctactcatttaaaactagaaatatcaggat

SEQ ID NO: 864374 - DNA, 33 bp, Homo sapien
tatctactcatttaaagctagaaatatcaggat

SEQ ID NO: 864375 - DNA, 33 bp, Homo sapien
actgtatttcaagttacctaaattccctgaccc

SEQ ID NO: 864376 - DNA, 33 bp, Homo sapien
actgtatttcaagttatctaaattccctgaccc

SEQ ID NO: 864377 - DNA, 33 bp, Homo sapien
ccctgtaaggtttaatcaattgccatcatgata

SEQ ID NO: 864378 - DNA, 33 bp, Homo sapien
ccctgtaaggtttaatgaattgccatcatgata

SEQ ID NO: 864379 - DNA, 33 bp, Homo sapien
ctatactgcataactaactgtactacctataat

SEQ ID NO: 864380 - DNA, 33 bp, Homo sapien
ctatactgcataactacctgtactacctataat

SEQ ID NO: 864381 - DNA, 33 bp, Homo sapien
ttcaaggaagagagaacagttaggacaatgacc

SEQ ID NO: 864382 - DNA, 33 bp, Homo sapien
ttcaaggaagagagaagagttaggacaatgacc

SEQ ID NO: 864383 - DNA, 33 bp, Homo sapien
tgatggactgaaacgacgtatgtgtcttaaaat

SEQ ID NO: 864384 - DNA, 33 bp, Homo sapien
tgatggactgaaacgatgtatgtgtcttaaaat

SEQ ID NO: 864385 - DNA, 33 bp, Homo sapien
atttatacatgattagaaagaaaattactctct

SEQ ID NO: 864386 - DNA, 33 bp, Homo sapien
atttatacatgattaggaagaaaattactctct

SEQ ID NO: 864387 - DNA, 33 bp, Homo sapien
actgcattcaggaggtaaacaaaaggatatctg

SEQ ID NO: 864388 - DNA, 33 bp, Homo sapien
actgcattcaggaggtgaacaaaaggatatctg

SEQ ID NO: 864389 - DNA, 33 bp, Homo sapien
acaagtattatgcgaaacaagcagatgtgaata

SEQ ID NO: 864390 - DNA, 33 bp, Homo sapien
acaagtattatgcgaagcaagcagatgtgaata

SEQ ID NO: 864391 - DNA, 33 bp, Homo sapien
gtctagcagtcaaatccatacctaccaaacctg

SEQ ID NO: 864392 - DNA, 33 bp, Homo sapien
gtctagcagtcaaatctatacctaccaaacctg

SEQ ID NO: 864393 - DNA, 33 bp, Homo sapien
ggcctctaatattacaatcttcctcctttcagg

SEQ ID NO: 864394 - DNA, 33 bp, Homo sapien
ggcctctaatattacagtcttcctcctttcagg

SEQ ID NO: 864395 - DNA, 33 bp, Homo sapien
aattgggggtgttgaccacaaaccagaggtagt

SEQ ID NO: 864396 - DNA, 33 bp, Homo sapien
aattgggggtgttgactacaaaccagaggtagt

SEQ ID NO: 864397 - DNA, 33 bp, Homo sapien
ccttaaaaatgtttgacaccctcctgcacatat

SEQ ID NO: 864398 - DNA, 33 bp, Homo sapien
ccttaaaaatgtttgataccctcctgcacatat

SEQ ID NO: 864399 - DNA, 33 bp, Homo sapien
aaattggcaaaacttgcatgtaggacagctgat

SEQ ID NO: 864400 - DNA, 33 bp, Homo sapien
aaattggcaaaacttgtatgtaggacagctgat

SEQ ID NO: 864401 - DNA, 33 bp, Homo sapien
cctgggaaggccctcactctccctcttcagtgg

SEQ ID NO: 864402 - DNA, 33 bp, Homo sapien
cctgggaaggccctcattctccctcttcagtgg

SEQ ID NO: 864403 - DNA, 33 bp, Homo sapien
tttagattaactgtcacaaaattaggtatattg

SEQ ID NO: 864404 - DNA, 33 bp, Homo sapien
tttagattaactgtcataaaattaggtatattg

SEQ ID NO: 864405 - DNA, 33 bp, Homo sapien
ataatcaaagtaatcaatagaagacagagtcag

SEQ ID NO: 864406 - DNA, 33 bp, Homo sapien
ataatcaaagtaatcagtagaagacagagtcag

SEQ ID NO: 864407 - DNA, 33 bp, Homo sapien
gacagtaaattgctggaaaaagagtaagctagt

SEQ ID NO: 864408 - DNA, 33 bp, Homo sapien
gacagtaaattgctgggaaaagagtaagctagt

SEQ ID NO: 864409 - DNA, 33 bp, Homo sapien
cctttttggtgattaggacccccaaatcctcct

SEQ ID NO: 864410 - DNA, 33 bp, Homo sapien
cctttttggtgattagtacccccaaatcctcct

SEQ ID NO: 864411 - DNA, 33 bp, Homo sapien
tctcaaggagcagatactagatatacataccat

SEQ ID NO: 864412 - DNA, 33 bp, Homo sapien
tctcaaggagcagatagtagatatacataccat

SEQ ID NO: 864413 - DNA, 33 bp, Homo sapien
agaaataatactgagcaattcaggtctcagagt

SEQ ID NO: 864414 - DNA, 33 bp, Homo sapien
agaaataatactgagcgattcaggtctcagagt

SEQ ID NO: 864415 - DNA, 33 bp, Homo sapien
atataaccatttcatacagactcattaaaaaga

SEQ ID NO: 864416 - DNA, 33 bp, Homo sapien
atataaccatttcatagagactcattaaaaaga

SEQ ID NO: 864417 - DNA, 33 bp, Homo sapien
gtaattgagtcatgggaatggttaccctaatgc

SEQ ID NO: 864418 - DNA, 33 bp, Homo sapien
gtaattgagtcatggggatggttaccctaatgc

SEQ ID NO: 864419 - DNA, 33 bp, Homo sapien; identical to SEQ ID NO: 864417

SEQ ID NO: 864420 - DNA, 33 bp, Homo sapien; identical to SEQ ID NO: 864418

SEQ ID NO: 864421 - DNA, 33 bp, Homo sapien
aacaatgcaacgttcccgatttctaatcttggt

SEQ ID NO: 864422 - DNA, 33 bp, Homo sapien
aacaatgcaacgttcctgatttctaatcttggt

SEQ ID NO: 864423 - DNA, 33 bp, Homo sapien
tagtcatgatccgttaagtcatgtcattttggg

SEQ ID NO: 864424 - DNA, 33 bp, Homo sapien
tagtcatgatccgttatgtcatgtcattttggg

SEQ ID NO: 864425 - DNA, 33 bp, Homo sapien
ccttcttcaaagtctacacaacataaaaacaag

SEQ ID NO: 864426 - DNA, 33 bp, Homo sapien
ccttcttcaaagtctatacaacataaaaacaag

SEQ ID NO: 864427 - DNA, 33 bp, Homo sapien
tgtaaacattactagaactcttattttgcatat

SEQ ID NO: 864428 - DNA, 33 bp, Homo sapien
tgtaaacattactagacctcttattttgcatat

SEQ ID NO: 864429 - DNA, 33 bp, Homo sapien
ttattttaattactcaatcttttctcatgcaca

SEQ ID NO: 864430 - DNA, 33 bp, Homo sapien
ttattttaattactcagtcttttctcatgcaca

SEQ ID NO: 864431 - DNA, 33 bp, Homo sapien
caaacttctgtacacaactaactagataactaa

SEQ ID NO: 864432 - DNA, 33 bp, Homo sapien
caaacttctgtacacagctaactagataactaa

SEQ ID NO: 864433 - DNA, 33 bp, Homo sapien
ataattcatttgactaaggagcatcaggtaagc

SEQ ID NO: 864434 - DNA, 33 bp, Homo sapien
ataattcatttgactacggagcatcaggtaagc

SEQ ID NO: 864435 - DNA, 33 bp, Homo sapien
gtctcctatattttctcaatttcttcattcaag

SEQ ID NO: 864436 - DNA, 33 bp, Homo sapien
gtctcctatattttctgaatttcttcattcaag

SEQ ID NO: 864437 - DNA, 33 bp, Homo sapien
aggtgtgagattgccaactgataacggactgat

SEQ ID NO: 864438 - DNA, 33 bp, Homo sapien
aggtgtgagattgccagctgataacggactgat

SEQ ID NO: 864439 - DNA, 33 bp, Homo sapien
cagtctgttaacctacaattatagaagaggctg

SEQ ID NO: 864440 - DNA, 33 bp, Homo sapien
cagtctgttaacctacgattatagaagaggctg

SEQ ID NO: 864441 - DNA, 33 bp, Homo sapien
aaaactttgacctgacccttactctaacccctg

SEQ ID NO: 864442 - DNA, 33 bp, Homo sapien
aaaactttgacctgacgcttactctaacccctg

SEQ ID NO: 864443 - DNA, 33 bp, Homo sapien
ttaaaaaataaacatcaacatacacagcacata

SEQ ID NO: 864444 - DNA, 33 bp, Homo sapien
ttaaaaaataaacatcgacatacacagcacata

SEQ ID NO: 864445 - DNA, 33 bp, Homo sapien
aatattggttgaactgaagagtggttcatcttg

SEQ ID NO: 864446 - DNA, 33 bp, Homo sapien
aatattggttgaactggagagtggttcatcttg

SEQ ID NO: 864447 - DNA, 33 bp, Homo sapien
catgtgtatatttgagaatacgcggaatgcaag

SEQ ID NO: 864448 - DNA, 33 bp, Homo sapien
catgtgtatatttgagtatacgcggaatgcaag

SEQ ID NO: 864449 - DNA, 33 bp, Homo sapien
ctctttctgctgaaaacgtccacacaacttgat

SEQ ID NO: 864450 - DNA, 33 bp, Homo sapien
ctctttctgctgaaaatgtccacacaacttgat

SEQ ID NO: 864451 - DNA, 33 bp, Homo sapien
tttattccattaaagacgactgcagttaaaaaa

SEQ ID NO: 864452 - DNA, 33 bp, Homo sapien
tttattccattaaagatgactgcagttaaaaaa

SEQ ID NO: 864453 - DNA, 33 bp, Homo sapien
tctttggtttattctacgtgctcctacaactct

SEQ ID NO: 864454 - DNA, 33 bp, Homo sapien
tctttggtttattctatgtgctcctacaactct

SEQ ID NO: 864455 - DNA, 33 bp, Homo sapien
ttctgcttcacctctacatatggcaaatttata

SEQ ID NO: 864456 - DNA, 33 bp, Homo sapien
ttctgcttcacctctatatatggcaaatttata

SEQ ID NO: 864457 - DNA, 33 bp, Homo sapien
actttacccactaatcaatcattcaaatgcgat

SEQ ID NO: 864458 - DNA, 33 bp, Homo sapien
actttacccactaatcgatcattcaaatgcgat

SEQ ID NO: 864459 - DNA, 33 bp, Homo sapien
ttaaacacatagaaaacgtactgacaaattccc

SEQ ID NO: 864460 - DNA, 33 bp, Homo sapien
ttaaacacatagaaaaggtactgacaaattccc

SEQ ID NO: 864461 - DNA, 33 bp, Homo sapien
agtaagcttcttaaagaatccatgcatctatag

SEQ ID NO: 864462 - DNA, 33 bp, Homo sapien
agtaagcttcttaaagtatccatgcatctatag

SEQ ID NO: 864463 - DNA, 33 bp, Homo sapien
ccttaggtcttccacacggaccatccctctgcc

SEQ ID NO: 864464 - DNA, 33 bp, Homo sapien
ccttaggtcttccacatggaccatccctctgcc

SEQ ID NO: 864465 - DNA, 33 bp, Homo sapien
taagagagtggtattgaaagagaaaactggaca

SEQ ID NO: 864466 - DNA, 33 bp, Homo sapien
taagagagtggtattgtaagagaaaactggaca

SEQ ID NO: 864467 - DNA, 33 bp, Homo sapien
tttcatccatgatcctaagaccttatttgtctt

SEQ ID NO: 864468 - DNA, 33 bp, Homo sapien
tttcatccatgatcctgagaccttatttgtctt

SEQ ID NO: 864469 - DNA, 33 bp, Homo sapien
tgaaaaaaagattcctcaaatgatccttacttt

SEQ ID NO: 864470 - DNA, 33 bp, Homo sapien
tgaaaaaaagattcctgaaatgatccttacttt

SEQ ID NO: 864471 - DNA, 33 bp, Homo sapien
acctcagttatccacacctttaggaaatcaaac

SEQ ID NO: 864472 - DNA, 33 bp, Homo sapien
acctcagttatccacatctttaggaaatcaaac

SEQ ID NO: 864473 - DNA, 33 bp, Homo sapien
gattaacaaagaattagcacattacagatctaa

SEQ ID NO: 864474 - DNA, 33 bp, Homo sapien
gattaacaaagaattatcacattacagatctaa

SEQ ID NO: 864475 - DNA, 33 bp, Homo sapien
tgcccaggtgtccttacggtgctctaagcaacc

SEQ ID NO: 864476 - DNA, 33 bp, Homo sapien
tgcccaggtgtccttatggtgctctaagcaacc

SEQ ID NO: 864477 - DNA, 33 bp, Homo sapien
gaatgtgtgtgtatgcacataggaacatatata

SEQ ID NO: 864478 - DNA, 33 bp, Homo sapien
gaatgtgtgtgtatgcccataggaacatatata

SEQ ID NO: 864479 - DNA, 33 bp, Homo sapien
cttgaaagaaacatcaatatcaaaatagaaatc

SEQ ID NO: 864480 - DNA, 33 bp, Homo sapien
cttgaaagaaacatcagtatcaaaatagaaatc

SEQ ID NO: 864481 - DNA, 33 bp, Homo sapien
ccttagctccaactacgccaattatctgcttcc

SEQ ID NO: 864482 - DNA, 33 bp, Homo sapien
ccttagctccaactactccaattatctgcttcc

SEQ ID NO: 864483 - DNA, 33 bp, Homo sapien
taatgctcttcagaacactagtattgtgagatc

SEQ ID NO: 864484 - DNA, 33 bp, Homo sapien
taatgctcttcagaactctagtattgtgagatc

SEQ ID NO: 864485 - DNA, 33 bp, Homo sapien
aaatgtttcaactactaaatggaaaactaaatg

SEQ ID NO: 864486 - DNA, 33 bp, Homo sapien
aaatgtttcaactactgaatggaaaactaaatg

SEQ ID NO: 864487 - DNA, 33 bp, Homo sapien
tcatctctctcttaaacggtatcaccacaggag

SEQ ID NO: 864488 - DNA, 33 bp, Homo sapien
tcatctctctcttaaagggtatcaccacaggag

SEQ ID NO: 864489 - DNA, 33 bp, Homo sapien
gcctctggttttaccagctgcatactctaggac

SEQ ID NO: 864490 - DNA, 33 bp, Homo sapien
gcctctggttttaccatctgcatactctaggac

SEQ ID NO: 864491 - DNA, 33 bp, Homo sapien
ctatacagactactccagatacttttgttttgt

SEQ ID NO: 864492 - DNA, 33 bp, Homo sapien
ctatacagactactccggatacttttgttttgt

SEQ ID NO: 864493 - DNA, 33 bp, Homo sapien
tacaactggttagcaaaagaatcgattttatgt

SEQ ID NO: 864494 - DNA, 33 bp, Homo sapien
tacaactggttagcaacagaatcgattttatgt

SEQ ID NO: 864495 - DNA, 33 bp, Homo sapien
catggcggcaatgagaacccaaacctgggggca

SEQ ID NO: 864496 - DNA, 33 bp, Homo sapien
catggcggcaatgagagcccaaacctgggggca

SEQ ID NO: 864497 - DNA, 33 bp, Homo sapien
aggccattgccctgagaatatctccattcttta

SEQ ID NO: 864498 - DNA, 33 bp, Homo sapien
aggccattgccctgaggatatctccattcttta

SEQ ID NO: 864499 - DNA, 33 bp, Homo sapien
ctggtctcgaattcctcagcttaagttatccac

SEQ ID NO: 864500 - DNA, 33 bp, Homo sapien
ctggtctcgaattcctgagcttaagttatccac

SEQ ID NO: 864501 - DNA, 33 bp, Homo sapien
gtgactcttctaaacaaaactactggataataa

SEQ ID NO: 864502 - DNA, 33 bp, Homo sapien
gtgactcttctaaacagaactactggataataa

SEQ ID NO: 864503 - DNA, 33 bp, Homo sapien
tgctagaatcaactagaccaaatatttagatat

SEQ ID NO: 864504 - DNA, 33 bp, Homo sapien
tgctagaatcaactaggccaaatatttagatat

SEQ ID NO: 864505 - DNA, 33 bp, Homo sapien
caattttagcatatgcactgctgccgaagtgag

SEQ ID NO: 864506 - DNA, 33 bp, Homo sapien
caattttagcatatgcgctgctgccgaagtgag

SEQ ID NO: 864507 - DNA, 33 bp, Homo sapien
atacaagaactcaacaacatcaatgaacagcat

SEQ ID NO: 864508 - DNA, 33 bp, Homo sapien
atacaagaactcaacaccatcaatgaacagcat

SEQ ID NO: 864509 - DNA, 33 bp, Homo sapien
caccatcctgtctgaaaggtcgctactttgaca

SEQ ID NO: 864510 - DNA, 33 bp, Homo sapien
caccatcctgtctgaagggtcgctactttgaca

SEQ ID NO: 864511 - DNA, 33 bp, Homo sapien
accattaaacaattgcagatgaatatatgatgc

SEQ ID NO: 864512 - DNA, 33 bp, Homo sapien
accattaaacaattgcggatgaatatatgatgc

SEQ ID NO: 864513 - DNA, 33 bp, Homo sapien
gttccatcaaagccaactgaaaacgcctatgtg

SEQ ID NO: 864514 - DNA, 33 bp, Homo sapien
gttccatcaaagccaattgaaaacgcctatgtg

SEQ ID NO: 864515 - DNA, 33 bp, Homo sapien
gctaggaaaggcctaaatggcatcaaagctgag

SEQ ID NO: 864516 - DNA, 33 bp, Homo sapien
gctaggaaaggcctaagtggcatcaaagctgag

SEQ ID NO: 864517 - DNA, 33 bp, Homo sapien
cctgcacagtgtttcccaacgctccacaatagt

SEQ ID NO: 864518 - DNA, 33 bp, Homo sapien
cctgcacagtgtttcctaacgctccacaatagt

SEQ ID NO: 864519 - DNA, 33 bp, Homo sapien
gtaacttaataacaacagtgagaaaagtcttgc

SEQ ID NO: 864520 - DNA, 33 bp, Homo sapien
gtaacttaataacaacggtgagaaaagtcttgc

SEQ ID NO: 864521 - DNA, 33 bp, Homo sapien
cagtatgtctcacagaacactactcccaggaga

SEQ ID NO: 864522 - DNA, 33 bp, Homo sapien
cagtatgtctcacagagcactactcccaggaga

SEQ ID NO: 864523 - DNA, 33 bp, Homo sapien
gtgttgcagtttacagcatttcccagaaaactc

SEQ ID NO: 864524 - DNA, 33 bp, Homo sapien
gtgttgcagtttacagtatttcccagaaaactc

SEQ ID NO: 864525 - DNA, 33 bp, Homo sapien
caaagcccttacagtgcatagtgaagctctgat

SEQ ID NO: 864526 - DNA, 33 bp, Homo sapien
caaagcccttacagtgtatagtgaagctctgat

SEQ ID NO: 864527 - DNA, 33 bp, Homo sapien
aacctggctggacaacactacaggaactagaat

SEQ ID NO: 864528 - DNA, 33 bp, Homo sapien
aacctggctggacaacgctacaggaactagaat

SEQ ID NO: 864529 - DNA, 33 bp, Homo sapien
gagtccctcattagccaggagatttctctcaga

SEQ ID NO: 864530 - DNA, 33 bp, Homo sapien
gagtccctcattagccgggagatttctctcaga

SEQ ID NO: 864531 - DNA, 33 bp, Homo sapien
acttattttggaaacaatgttatacccttaatt

SEQ ID NO: 864532 - DNA, 33 bp, Homo sapien
acttattttggaaacagtgttatacccttaatt

SEQ ID NO: 864533 - DNA, 33 bp, Homo sapien
gatcattgtcaacaacactaacaaaaactatga

SEQ ID NO: 864534 - DNA, 33 bp, Homo sapien
gatcattgtcaacaacgctaacaaaaactatga

SEQ ID NO: 864535 - DNA, 33 bp, Homo sapien
taggcagggttcctaggatgaagaccggggatc

SEQ ID NO: 864536 - DNA, 33 bp, Homo sapien
taggcagggttcctagtatgaagaccggggatc

SEQ ID NO: 864537 - DNA, 33 bp, Homo sapien
gtttcttctgttgatacgagggtgctacttcag

SEQ ID NO: 864538 - DNA, 33 bp, Homo sapien
gtttcttctgttgatatgagggtgctacttcag

SEQ ID NO: 864539 - DNA, 33 bp, Homo sapien
aacgattccaaaaaacagattgagagccaaagg

SEQ ID NO: 864540 - DNA, 33 bp, Homo sapien
aacgattccaaaaaaccgattgagagccaaagg

SEQ ID NO: 864541 - DNA, 33 bp, Homo sapien
cttggtggctgtcaaaatgtcctttttttagag

SEQ ID NO: 864542 - DNA, 33 bp, Homo sapien
cttggtggctgtcaaagtgtcctttttttagag

SEQ ID NO: 864543 - DNA, 33 bp, Homo sapien
catttacctgtctaaacagttctcacctgaggg

SEQ ID NO: 864544 - DNA, 33 bp, Homo sapien
catttacctgtctaaatagttctcacctgaggg

SEQ ID NO: 864545 - DNA, 33 bp, Homo sapien
ttctttttgctttccaatatcagtaaatgccta

SEQ ID NO: 864546 - DNA, 33 bp, Homo sapien
ttctttttgctttccagtatcagtaaatgccta

SEQ ID NO: 864547 - DNA, 33 bp, Homo sapien
ttaaatgtgcaatgacacgggttctgtctcacc

SEQ ID NO: 864548 - DNA, 33 bp, Homo sapien
ttaaatgtgcaatgacccgggttctgtctcacc

SEQ ID NO: 864549 - DNA, 33 bp, Homo sapien
taatccctattccatcaatccagtcttacactt

SEQ ID NO: 864550 - DNA, 33 bp, Homo sapien
taatccctattccatctatccagtcttacactt

SEQ ID NO: 864551 - DNA, 33 bp, Homo sapien
gttactttctaacaccagacaggaagctcacag

SEQ ID NO: 864552 - DNA, 33 bp, Homo sapien
gttactttctaacaccggacaggaagctcacag

SEQ ID NO: 864553 - DNA, 33 bp, Homo sapien
tgacatgagatctgcaaactggattttagccac

SEQ ID NO: 864554 - DNA, 33 bp, Homo sapien
tgacatgagatctgcagactggattttagccac

SEQ ID NO: 864555 - DNA, 33 bp, Homo sapien
aagcagtaatgaaatacagacatgggaagacta

SEQ ID NO: 864556 - DNA, 33 bp, Homo sapien
aagcagtaatgaaatatagacatgggaagacta

SEQ ID NO: 864557 - DNA, 33 bp, Homo sapien
tcattggctaagtcaaccaagagaacctgagat

SEQ ID NO: 864558 - DNA, 33 bp, Homo sapien
tcattggctaagtcaatcaagagaacctgagat

SEQ ID NO: 864559 - DNA, 33 bp, Homo sapien
tttgttttgcttttcagagtcaacaacttgtaa

SEQ ID NO: 864560 - DNA, 33 bp, Homo sapien
tttgttttgcttttcatagtcaacaacttgtaa

SEQ ID NO: 864561 - DNA, 33 bp, Homo sapien
gcaatgctgctattcactgaaactaaaccaatg

SEQ ID NO: 864562 - DNA, 33 bp, Homo sapien
gcaatgctgctattcagtgaaactaaaccaatg

SEQ ID NO: 864563 - DNA, 33 bp, Homo sapien
gagtgaaagacacaacaaatagctgattacatg

SEQ ID NO: 864564 - DNA, 33 bp, Homo sapien
gagtgaaagacacaacgaatagctgattacatg

SEQ ID NO: 864565 - DNA, 33 bp, Homo sapien
tatttgttagcctttgcatctcctcttctgtta

SEQ ID NO: 864566 - DNA, 33 bp, Homo sapien
tatttgttagcctttggatctcctcttctgtta

SEQ ID NO: 864567 - DNA, 33 bp, Homo sapien
gattatgcaatttgtagcctgctttttttactt

SEQ ID NO: 864568 - DNA, 33 bp, Homo sapien
gattatgcaatttgtatcctgctttttttactt

SEQ ID NO: 864569 - DNA, 33 bp, Homo sapien
ggattttctaaatacacgatcatgttgtctata

SEQ ID NO: 864570 - DNA, 33 bp, Homo sapien
ggattttctaaatacaggatcatgttgtctata

SEQ ID NO: 864571 - DNA, 33 bp, Homo sapien
catgtttggggatcatcataacctgggaagtag

SEQ ID NO: 864572 - DNA, 33 bp, Homo sapien
catgtttggggatcattataacctgggaagtag

SEQ ID NO: 864573 - DNA, 33 bp, Homo sapien
atttgtgtaccctctacgagactgagcactgtg

SEQ ID NO: 864574 - DNA, 33 bp, Homo sapien
atttgtgtaccctctatgagactgagcactgtg

SEQ ID NO: 864575 - DNA, 33 bp, Homo sapien
ctctcaacatccttccaataaattcccttgtta

SEQ ID NO: 864576 - DNA, 33 bp, Homo sapien
ctctcaacatccttccgataaattcccttgtta

SEQ ID NO: 864577 - DNA, 33 bp, Homo sapien
ctttaaaactaccacagggagcctcaaatacac

SEQ ID NO: 864578 - DNA, 33 bp, Homo sapien
ctttaaaactaccacatggagcctcaaatacac

SEQ ID NO: 864579 - DNA, 33 bp, Homo sapien
cagaaaatcagtaacactggacttgaacactat

SEQ ID NO: 864580 - DNA, 33 bp, Homo sapien
cagaaaatcagtaacattggacttgaacactat

SEQ ID NO: 864581 - DNA, 33 bp, Homo sapien
tctggaaaatgttccacgtgcaattgaggaaaa

SEQ ID NO: 864582 - DNA, 33 bp, Homo sapien
tctggaaaatgttccatgtgcaattgaggaaaa

SEQ ID NO: 864583 - DNA, 33 bp, Homo sapien
ttctggtctttttacaacatttcatgtattgga

SEQ ID NO: 864584 - DNA, 33 bp, Homo sapien
ttctggtctttttacagcatttcatgtattgga

SEQ ID NO: 864585 - DNA, 33 bp, Homo sapien
cttgccaacgacctcaatctatacattcacaac

SEQ ID NO: 864586 - DNA, 33 bp, Homo sapien
cttgccaacgacctcagtctatacattcacaac

SEQ ID NO: 864587 - DNA, 33 bp, Homo sapien
gagtgttgattataccagaatttcctgttgtct

SEQ ID NO: 864588 - DNA, 33 bp, Homo sapien
gagtgttgattataccggaatttcctgttgtct

SEQ ID NO: 864589 - DNA, 33 bp, Homo sapien
agcatagtaaaaaatagcagcatcactaatcat

SEQ ID NO: 864590 - DNA, 33 bp, Homo sapien
agcatagtaaaaaatatcagcatcactaatcat

SEQ ID NO: 864591 - DNA, 33 bp, Homo sapien
ttttcagttctattacacagattacacagcgtg

SEQ ID NO: 864592 - DNA, 33 bp, Homo sapien
ttttcagttctattacgcagattacacagcgtg

SEQ ID NO: 864593 - DNA, 33 bp, Homo sapien
ctctaaaattgcatggaacattttgagtacatg

SEQ ID NO: 864594 - DNA, 33 bp, Homo sapien
ctctaaaattgcatggtacattttgagtacatg

SEQ ID NO: 864595 - DNA, 33 bp, Homo sapien
aaccaacataatgtcacataattaagaggacta

SEQ ID NO: 864596 - DNA, 33 bp, Homo sapien
aaccaacataatgtcatataattaagaggacta

SEQ ID NO: 864597 - DNA, 33 bp, Homo sapien
atctatttacagctaaagaattaagcaccagaa

SEQ ID NO: 864598 - DNA, 33 bp, Homo sapien
atctatttacagctaaggaattaagcaccagaa

SEQ ID NO: 864599 - DNA, 33 bp, Homo sapien
gtccctagcatcaataaattcaagccttcaaat

SEQ ID NO: 864600 - DNA, 33 bp, Homo sapien
gtccctagcatcaatacattcaagccttcaaat

SEQ ID NO: 864601 - DNA, 33 bp, Homo sapien
agtcagaagaagaaaactaagagaacagaaacc

SEQ ID NO: 864602 - DNA, 33 bp, Homo sapien
agtcagaagaagaaaagtaagagaacagaaacc

SEQ ID NO: 864603 - DNA, 33 bp, Homo sapien
tccactttcttaaaaactcaacaatgcttcctc

SEQ ID NO: 864604 - DNA, 33 bp, Homo sapien
tccactttcttaaaaattcaacaatgcttcctc

SEQ ID NO: 864605 - DNA, 33 bp, Homo sapien
tttatgcactggataaagaggtgttaagtttta

SEQ ID NO: 864606 - DNA, 33 bp, Homo sapien
tttatgcactggataaggaggtgttaagtttta

SEQ ID NO: 864607 - DNA, 33 bp, Homo sapien
ctggatggcatttagaagaatgtgtggaaaatg

SEQ ID NO: 864608 - DNA, 33 bp, Homo sapien
ctggatggcatttagaggaatgtgtggaaaatg

SEQ ID NO: 864609 - DNA, 33 bp, Homo sapien
aacttgttcaggaaagcatttatgaatgagaat

SEQ ID NO: 864610 - DNA, 33 bp, Homo sapien
aacttgttcaggaaagtatttatgaatgagaat

SEQ ID NO: 864611 - DNA, 33 bp, Homo sapien
gcttagatgccttcccaaactccttttattgag

SEQ ID NO: 864612 - DNA, 33 bp, Homo sapien
gcttagatgccttccccaactccttttattgag

SEQ ID NO: 864613 - DNA, 33 bp, Homo sapien
aaaagcagaagtcaaacaagttgtgagcttatc

SEQ ID NO: 864614 - DNA, 33 bp, Homo sapien
aaaagcagaagtcaaataagttgtgagcttatc

SEQ ID NO: 864615 - DNA, 33 bp, Homo sapien
ataaataaatgcaaaaatcacatgcagtccctg

SEQ ID NO: 864616 - DNA, 33 bp, Homo sapien
ataaataaatgcaaaactcacatgcagtccctg

SEQ ID NO: 864617 - DNA, 33 bp, Homo sapien
ctcagtaatgaaagaaaactccatcctccatca

SEQ ID NO: 864618 - DNA, 33 bp, Homo sapien
ctcagtaatgaaagaacactccatcctccatca

SEQ ID NO: 864619 - DNA, 33 bp, Homo sapien
ttttctcaagaggtacaagagctttcattttgc

SEQ ID NO: 864620 - DNA, 33 bp, Homo sapien
ttttctcaagaggtactagagctttcattttgc

SEQ ID NO: 864621 - DNA, 33 bp, Homo sapien
ttctgctgggtaagtaccaatgtctgtaaaaag

SEQ ID NO: 864622 - DNA, 33 bp, Homo sapien
ttctgctgggtaagtatcaatgtctgtaaaaag

SEQ ID NO: 864623 - DNA, 33 bp, Homo sapien
tcatcatgtaattatcaccttcaggttggacac

SEQ ID NO: 864624 - DNA, 33 bp, Homo sapien
tcatcatgtaattatcgccttcaggttggacac

SEQ ID NO: 864625 - DNA, 33 bp, Homo sapien
caacccagttatccccaagacagagagtaaaga

SEQ ID NO: 864626 - DNA, 33 bp, Homo sapien
caacccagttatccccgagacagagagtaaaga

SEQ ID NO: 864627 - DNA, 33 bp, Homo sapien
catacaccaaaagagccactcaaaagaggtaag

SEQ ID NO: 864628 - DNA, 33 bp, Homo sapien
catacaccaaaagagctactcaaaagaggtaag

SEQ ID NO: 864629 - DNA, 33 bp, Homo sapien
ctaatgtgagacttcaaaacggactaatagcta

SEQ ID NO: 864630 - DNA, 33 bp, Homo sapien
ctaatgtgagacttcagaacggactaatagcta

SEQ ID NO: 864631 - DNA, 33 bp, Homo sapien
aggatcaatccattgccagactaagatataacc

SEQ ID NO: 864632 - DNA, 33 bp, Homo sapien
aggatcaatccattgctagactaagatataacc

SEQ ID NO: 864633 - DNA, 33 bp, Homo sapien
acttaggcaatcataacgagtgaggagtctgac

SEQ ID NO: 864634 - DNA, 33 bp, Homo sapien
acttaggcaatcataatgagtgaggagtctgac

SEQ ID NO: 864635 - DNA, 33 bp, Homo sapien
attgtaatatcctccaatgaaatgtattttgaa

SEQ ID NO: 864636 - DNA, 33 bp, Homo sapien
attgtaatatcctccagtgaaatgtattttgaa

SEQ ID NO: 864637 - DNA, 33 bp, Homo sapien
gcatgctttgacagtacagagatggtttcccat

SEQ ID NO: 864638 - DNA, 33 bp, Homo sapien
gcatgctttgacagtatagagatggtttcccat

SEQ ID NO: 864639 - DNA, 33 bp, Homo sapien
ttactattttgcaaggcaactatttttaactgg

SEQ ID NO: 864640 - DNA, 33 bp, Homo sapien
ttactattttgcaaggtaactatttttaactgg

SEQ ID NO: 864641 - DNA, 33 bp, Homo sapien
gatatgaaaaggaaaaggttatctcagttagac

SEQ ID NO: 864642 - DNA, 33 bp, Homo sapien
gatatgaaaaggaaaatgttatctcagttagac

SEQ ID NO: 864643 - DNA, 33 bp, Homo sapien
ctcgtcattctgagaacagtttccagaggaggt

SEQ ID NO: 864644 - DNA, 33 bp, Homo sapien
ctcgtcattctgagaagagtttccagaggaggt

SEQ ID NO: 864645 - DNA, 33 bp, Homo sapien
acaagaactgcagctcaacctaaaactgaattc

SEQ ID NO: 864646 - DNA, 33 bp, Homo sapien
acaagaactgcagctcgacctaaaactgaattc

SEQ ID NO: 864647 - DNA, 33 bp, Homo sapien
tgagctgagaagaagacctgaagctccagaaaa

SEQ ID NO: 864648 - DNA, 33 bp, Homo sapien
tgagctgagaagaagatctgaagctccagaaaa

SEQ ID NO: 864649 - DNA, 33 bp, Homo sapien
tagctgttcactgtgacaatgctcttccaggtc

SEQ ID NO: 864650 - DNA, 33 bp, Homo sapien
tagctgttcactgtgataatgctcttccaggtc

SEQ ID NO: 864651 - DNA, 33 bp, Homo sapien
gcataaatggaggcataatctctgtgttgttat

SEQ ID NO: 864652 - DNA, 33 bp, Homo sapien
gcataaatggaggcatgatctctgtgttgttat

SEQ ID NO: 864653 - DNA, 33 bp, Homo sapien
attttcagcatgaagacggttgagaacaaaagt

SEQ ID NO: 864654 - DNA, 33 bp, Homo sapien
attttcagcatgaagatggttgagaacaaaagt

SEQ ID NO: 864655 - DNA, 33 bp, Homo sapien
ctatagctgcacctacaaaatcttctttctcct

SEQ ID NO: 864656 - DNA, 33 bp, Homo sapien
ctatagctgcacctacgaaatcttctttctcct

SEQ ID NO: 864657 - DNA, 33 bp, Homo sapien
aactggctctggaaataatagcaatacacaaga

SEQ ID NO: 864658 - DNA, 33 bp, Homo sapien
aactggctctggaaatgatagcaatacacaaga

SEQ ID NO: 864659 - DNA, 33 bp, Homo sapien
atgttcaccttagtacaggaaggcagttgaaac

SEQ ID NO: 864660 - DNA, 33 bp, Homo sapien
atgttcaccttagtacgggaaggcagttgaaac

SEQ ID NO: 864661 - DNA, 33 bp, Homo sapien
catgtaccaccaccagactacagttttctatct

SEQ ID NO: 864662 - DNA, 33 bp, Homo sapien
catgtaccaccaccagcctacagttttctatct

SEQ ID NO: 864663 - DNA, 33 bp, Homo sapien
aagcatctgacagaaactaacgagtcagaaacc

SEQ ID NO: 864664 - DNA, 33 bp, Homo sapien
aagcatctgacagaaattaacgagtcagaaacc

SEQ ID NO: 864665 - DNA, 33 bp, Homo sapien
gtggggcctacataacacctcagatggcagaat

SEQ ID NO: 864666 - DNA, 33 bp, Homo sapien
gtggggcctacataacgcctcagatggcagaat

SEQ ID NO: 864667 - DNA, 33 bp, Homo sapien
gttctatgccataagcaataagcacattgtcat

SEQ ID NO: 864668 - DNA, 33 bp, Homo sapien
gttctatgccataagcgataagcacattgtcat

SEQ ID NO: 864669 - DNA, 33 bp, Homo sapien
tggtaacaagggtcaacaatttggagccaagtt

SEQ ID NO: 864670 - DNA, 33 bp, Homo sapien
tggtaacaagggtcaataatttggagccaagtt

SEQ ID NO: 864671 - DNA, 33 bp, Homo sapien
catttacatcttaccacgggtatcaataaatca

SEQ ID NO: 864672 - DNA, 33 bp, Homo sapien
catttacatcttaccatgggtatcaataaatca

SEQ ID NO: 864673 - DNA, 33 bp, Homo sapien
taaaataagcagtgaacatcgtcatgctaatgc

SEQ ID NO: 864674 - DNA, 33 bp, Homo sapien
taaaataagcagtgaatatcgtcatgctaatgc

SEQ ID NO: 864675 - DNA, 33 bp, Homo sapien
ctcctactagttgataaatgttccaaaattttg

SEQ ID NO: 864676 - DNA, 33 bp, Homo sapien
ctcctactagttgatacatgttccaaaattttg

SEQ ID NO: 864677 - DNA, 33 bp, Homo sapien
catgtagaacagcaaaaggcaaagaaagaagtc

SEQ ID NO: 864678 - DNA, 33 bp, Homo sapien
catgtagaacagcaaagggcaaagaaagaagtc

SEQ ID NO: 864679 - DNA, 33 bp, Homo sapien
aacacttctgaattgacaccctgtagcccacaa

SEQ ID NO: 864680 - DNA, 33 bp, Homo sapien
aacacttctgaattgataccctgtagcccacaa

SEQ ID NO: 864681 - DNA, 33 bp, Homo sapien
ttgacaagagataggaactcattgtgggctaca

SEQ ID NO: 864682 - DNA, 33 bp, Homo sapien
ttgacaagagataggagctcattgtgggctaca

SEQ ID NO: 864683 - DNA, 33 bp, Homo sapien
agggcacctttcttcaagtctgtgatttgggtg

SEQ ID NO: 864684 - DNA, 33 bp, Homo sapien
agggcacctttcttcaggtctgtgatttgggtg

SEQ ID NO: 864685 - DNA, 33 bp, Homo sapien
atgtccctttaggtcacgcaaactctcagaatc

SEQ ID NO: 864686 - DNA, 33 bp, Homo sapien
atgtccctttaggtcatgcaaactctcagaatc

SEQ ID NO: 864687 - DNA, 33 bp, Homo sapien
gctccaagactgaagaacacaattcagagaaag

SEQ ID NO: 864688 - DNA, 33 bp, Homo sapien
gctccaagactgaagagcacaattcagagaaag

SEQ ID NO: 864689 - DNA, 33 bp, Homo sapien
tagacaaaattgtgaacgcttggtttttattca

SEQ ID NO: 864690 - DNA, 33 bp, Homo sapien
tagacaaaattgtgaatgcttggtttttattca

SEQ ID NO: 864691 - DNA, 33 bp, Homo sapien
atacttactatagacgcaggttgacatgtgata

SEQ ID NO: 864692 - DNA, 33 bp, Homo sapien
atacttactatagacgtaggttgacatgtgata

SEQ ID NO: 864693 - DNA, 33 bp, Homo sapien
ctgagttggaagtgacactggattagaacattt

SEQ ID NO: 864694 - DNA, 33 bp, Homo sapien
ctgagttggaagtgaccctggattagaacattt

SEQ ID NO: 864695 - DNA, 33 bp, Homo sapien
agatttaccttgagaaacagaatagtcagtggt

SEQ ID NO: 864696 - DNA, 33 bp, Homo sapien
agatttaccttgagaagcagaatagtcagtggt

SEQ ID NO: 864697 - DNA, 33 bp, Homo sapien
atgagacactaggtccaggaaagtcagcagtct

SEQ ID NO: 864698 - DNA, 33 bp, Homo sapien
atgagacactaggtcccggaaagtcagcagtct

SEQ ID NO: 864699 - DNA, 33 bp, Homo sapien
cgaatctacccattacacctacagcaaccgcca

SEQ ID NO: 864700 - DNA, 33 bp, Homo sapien
cgaatctacccattacgcctacagcaaccgcca

SEQ ID NO: 864701 - DNA, 33 bp, Homo sapien
caggtggttgatgaaggctggtcagtaaatagt

SEQ ID NO: 864702 - DNA, 33 bp, Homo sapien
caggtggttgatgaagtctggtcagtaaatagt

SEQ ID NO: 864703 - DNA, 33 bp, Homo sapien
ttaataaatgcaatccaaaggtgaacttgcggc

SEQ ID NO: 864704 - DNA, 33 bp, Homo sapien
ttaataaatgcaatccgaaggtgaacttgcggc

SEQ ID NO: 864705 - DNA, 33 bp, Homo sapien
tgctatacttttgtacaactgccagcatagaag

SEQ ID NO: 864706 - DNA, 33 bp, Homo sapien
tgctatacttttgtacgactgccagcatagaag

SEQ ID NO: 864707 - DNA, 33 bp, Homo sapien
ggcatgtagatgtacaatggtttgttacatgac

SEQ ID NO: 864708 - DNA, 33 bp, Homo sapien
ggcatgtagatgtacagtggtttgttacatgac

SEQ ID NO: 864709 - DNA, 33 bp, Homo sapien
tgtacttcaggtttgacagaccatgtggaaaaa

SEQ ID NO: 864710 - DNA, 33 bp, Homo sapien
tgtacttcaggtttgagagaccatgtggaaaaa

SEQ ID NO: 864711 - DNA, 33 bp, Homo sapien
aggtaagctcacaaaaacaccaggaatataact

SEQ ID NO: 864712 - DNA, 33 bp, Homo sapien
aggtaagctcacaaaagcaccaggaatataact

SEQ ID NO: 864713 - DNA, 33 bp, Homo sapien
aaaggcaggatgctgaaggtaaaaagaaaacac

SEQ ID NO: 864714 - DNA, 33 bp, Homo sapien
aaaggcaggatgctgagggtaaaaagaaaacac

SEQ ID NO: 864715 - DNA, 33 bp, Homo sapien
ccttgcttcagtcttcacacttacaattaacat

SEQ ID NO: 864716 - DNA, 33 bp, Homo sapien
ccttgcttcagtcttcgcacttacaattaacat

SEQ ID NO: 864717 - DNA, 33 bp, Homo sapien
agtatttctgtagagaacaaatacgaagccttt

SEQ ID NO: 864718 - DNA, 33 bp, Homo sapien
agtatttctgtagagagcaaatacgaagccttt

SEQ ID NO: 864719 - DNA, 33 bp, Homo sapien
agtccaggtaagacgcaatgggtggcttggctg

SEQ ID NO: 864720 - DNA, 33 bp, Homo sapien
agtccaggtaagacgcgatgggtggcttggctg

SEQ ID NO: 864721 - DNA, 33 bp, Homo sapien
aaggagagtagtacagaagatctgagagaaatg

SEQ ID NO: 864722 - DNA, 33 bp, Homo sapien
aaggagagtagtacaggagatctgagagaaatg

SEQ ID NO: 864723 - DNA, 33 bp, Homo sapien
aaattcagtccatatcaaagtatagaaagtaaa

SEQ ID NO: 864724 - DNA, 33 bp, Homo sapien
aaattcagtccatatcgaagtatagaaagtaaa

SEQ ID NO: 864725 - DNA, 33 bp, Homo sapien
gtaaagtcaaagcctcaattttccacttcctac

SEQ ID NO: 864726 - DNA, 33 bp, Homo sapien
gtaaagtcaaagcctcgattttccacttcctac

SEQ ID NO: 864727 - DNA, 33 bp, Homo sapien
ttttcagagttcacagaagagtccaaagggact

SEQ ID NO: 864728 - DNA, 33 bp, Homo sapien
ttttcagagttcacaggagagtccaaagggact

SEQ ID NO: 864729 - DNA, 33 bp, Homo sapien
agacctgcaaagattaaagatgttggaattact

SEQ ID NO: 864730 - DNA, 33 bp, Homo sapien
agacctgcaaagattacagatgttggaattact

SEQ ID NO: 864731 - DNA, 33 bp, Homo sapien
ttaagagtagaagtcaatactcaatggtgacca

SEQ ID NO: 864732 - DNA, 33 bp, Homo sapien
ttaagagtagaagtcagtactcaatggtgacca

SEQ ID NO: 864733 - DNA, 33 bp, Homo sapien
cttctgagtaagcaacaaatgccctaactccac

SEQ ID NO: 864734 - DNA, 33 bp, Homo sapien
cttctgagtaagcaaccaatgccctaactccac

SEQ ID NO: 864735 - DNA, 33 bp, Homo sapien
aaatcctatatcctgacgttgaaagactcgaaa

SEQ ID NO: 864736 - DNA, 33 bp, Homo sapien
aaatcctatatcctgatgttgaaagactcgaaa

SEQ ID NO: 864737 - DNA, 33 bp, Homo sapien
cagctcctgatgccacacttgaagcacaggtat

SEQ ID NO: 864738 - DNA, 33 bp, Homo sapien
cagctcctgatgccacgcttgaagcacaggtat

SEQ ID NO: 864739 - DNA, 33 bp, Homo sapien
ataacttacagtggaacgttctggataaacaac

SEQ ID NO: 864740 - DNA, 33 bp, Homo sapien
ataacttacagtggaatgttctggataaacaac

SEQ ID NO: 864741 - DNA, 33 bp, Homo sapien
aagatggcctctgtgacacaaaaggtggcaatg

SEQ ID NO: 864742 - DNA, 33 bp, Homo sapien
aagatggcctctgtgatacaaaaggtggcaatg

SEQ ID NO: 864743 - DNA, 33 bp, Homo sapien
aatgctaagagcttcaacagggaaaacaagcat

SEQ ID NO: 864744 - DNA, 33 bp, Homo sapien
aatgctaagagcttcagcagggaaaacaagcat

SEQ ID NO: 864745 - DNA, 33 bp, Homo sapien
aatcaactaaacaatcaacaaaactctgactca

SEQ ID NO: 864746 - DNA, 33 bp, Homo sapien
aatcaactaaacaatccacaaaactctgactca

SEQ ID NO: 864747 - DNA, 33 bp, Homo sapien
cataaggtcttacgcaaaaaaccttagtctaat

SEQ ID NO: 864748 - DNA, 33 bp, Homo sapien
cataaggtcttacgcacaaaaccttagtctaat

SEQ ID NO: 864749 - DNA, 33 bp, Homo sapien
ccagttctgttcagatgatcacttctcagctct

SEQ ID NO: 864750 - DNA, 33 bp, Homo sapien
ccagttctgttcagattatcacttctcagctct

SEQ ID NO: 864751 - DNA, 33 bp, Homo sapien
tttaaaagtaatcaaccgataattgacaggcac

SEQ ID NO: 864752 - DNA, 33 bp, Homo sapien
tttaaaagtaatcaactgataattgacaggcac

SEQ ID NO: 864753 - DNA, 33 bp, Homo sapien
catgtggctggcattagcaggtaaatggataaa

SEQ ID NO: 864754 - DNA, 33 bp, Homo sapien
catgtggctggcattatcaggtaaatggataaa

SEQ ID NO: 864755 - DNA, 33 bp, Homo sapien
tcctactgtttctttaagtcctgaggaatctac

SEQ ID NO: 864756 - DNA, 33 bp, Homo sapien
tcctactgtttctttatgtcctgaggaatctac

SEQ ID NO: 864757 - DNA, 33 bp, Homo sapien
caattaagttcccaaaccaagagaacaatgcat

SEQ ID NO: 864758 - DNA, 33 bp, Homo sapien
caattaagttcccaaatcaagagaacaatgcat

SEQ ID NO: 864759 - DNA, 33 bp, Homo sapien
tttgatatctgttctaagttgctcagagcccag

SEQ ID NO: 864760 - DNA, 33 bp, Homo sapien
tttgatatctgttctacgttgctcagagcccag

SEQ ID NO: 864761 - DNA, 33 bp, Homo sapien
actaccaatatgggaaatgtaaaggtcagagga

SEQ ID NO: 864762 - DNA, 33 bp, Homo sapien
actaccaatatgggaagtgtaaaggtcagagga

SEQ ID NO: 864763 - DNA, 33 bp, Homo sapien
ccagatgatgtgaatacgcagtcaggttgagaa

SEQ ID NO: 864764 - DNA, 33 bp, Homo sapien
ccagatgatgtgaatatgcagtcaggttgagaa

SEQ ID NO: 864765 - DNA, 33 bp, Homo sapien
tggttactaaggtgccaattctcccaatactgc

SEQ ID NO: 864766 - DNA, 33 bp, Homo sapien
tggttactaaggtgccgattctcccaatactgc

SEQ ID NO: 864767 - DNA, 33 bp, Homo sapien
tgctcatttcctccttcaaactccatgctgtca

SEQ ID NO: 864768 - DNA, 33 bp, Homo sapien
tgctcatttcctcctttaaactccatgctgtca

SEQ ID NO: 864769 - DNA, 33 bp, Homo sapien
agacctgagcaactaaatcactggtggtcccat

SEQ ID NO: 864770 - DNA, 33 bp, Homo sapien
agacctgagcaactaagtcactggtggtcccat

SEQ ID NO: 864771 - DNA, 33 bp, Homo sapien
tgaataaatcaatgaactgtcagacatatggta

SEQ ID NO: 864772 - DNA, 33 bp, Homo sapien
tgaataaatcaatgaattgtcagacatatggta

SEQ ID NO: 864773 - DNA, 33 bp, Homo sapien
aatgacaagaacagataaatttttactggtagc

SEQ ID NO: 864774 - DNA, 33 bp, Homo sapien
aatgacaagaacagatcaatttttactggtagc

SEQ ID NO: 864775 - DNA, 33 bp, Homo sapien
gctcaggagtgaattaactcattaccaccaact

SEQ ID NO: 864776 - DNA, 33 bp, Homo sapien
gctcaggagtgaattagctcattaccaccaact

SEQ ID NO: 864777 - DNA, 33 bp, Homo sapien
ttatctgattggtccaaaaagattattcatatc

SEQ ID NO: 864778 - DNA, 33 bp, Homo sapien
ttatctgattggtccacaaagattattcatatc

SEQ ID NO: 864779 - DNA, 33 bp, Homo sapien
atataattaaatgaaaatcaacagggcaaggag

SEQ ID NO: 864780 - DNA, 33 bp, Homo sapien
atataattaaatgaaagtcaacagggcaaggag

SEQ ID NO: 864781 - DNA, 33 bp, Homo sapien
tgagctctcatattgccattaaaacgtcagtcc

SEQ ID NO: 864782 - DNA, 33 bp, Homo sapien
tgagctctcatattgctattaaaacgtcagtcc

SEQ ID NO: 864783 - DNA, 33 bp, Homo sapien
tgtccaagagattatacgaggttagattactaa

SEQ ID NO: 864784 - DNA, 33 bp, Homo sapien
tgtccaagagattatatgaggttagattactaa

SEQ ID NO: 864785 - DNA, 33 bp, Homo sapien
tgattagataatcacaatcagtctttctgttca

SEQ ID NO: 864786 - DNA, 33 bp, Homo sapien
tgattagataatcacagtcagtctttctgttca

SEQ ID NO: 864787 - DNA, 33 bp, Homo sapien
agaccttgcaggtctcagaaaggaatgtgtatc

SEQ ID NO: 864788 - DNA, 33 bp, Homo sapien
agaccttgcaggtctcggaaaggaatgtgtatc

SEQ ID NO: 864789 - DNA, 33 bp, Homo sapien
attatgttgtaataccaaggcagacactgaatt

SEQ ID NO: 864790 - DNA, 33 bp, Homo sapien
attatgttgtaatacccaggcagacactgaatt

SEQ ID NO: 864791 - DNA, 33 bp, Homo sapien
tatatatccattgtaaaaaagtcagaaaatgca

SEQ ID NO: 864792 - DNA, 33 bp, Homo sapien
tatatatccattgtaagaaagtcagaaaatgca

SEQ ID NO: 864793 - DNA, 33 bp, Homo sapien
ctgtgtagccattaaaataatagtacagattag

SEQ ID NO: 864794 - DNA, 33 bp, Homo sapien
ctgtgtagccattaaagtaatagtacagattag

SEQ ID NO: 864795 - DNA, 33 bp, Homo sapien
ttgtctaaaatatcaacatcgccatggttaagg

SEQ ID NO: 864796 - DNA, 33 bp, Homo sapien
ttgtctaaaatatcaatatcgccatggttaagg

SEQ ID NO: 864797 - DNA, 33 bp, Homo sapien
ttctcattgtacttaactgataccacaccactt

SEQ ID NO: 864798 - DNA, 33 bp, Homo sapien
ttctcattgtacttaattgataccacaccactt

SEQ ID NO: 864799 - DNA, 33 bp, Homo sapien
atactagcaagataccagaactactttaaaaat

SEQ ID NO: 864800 - DNA, 33 bp, Homo sapien
atactagcaagatacctgaactactttaaaaat

SEQ ID NO: 864801 - DNA, 33 bp, Homo sapien
caggcttgccttttcaaacaggaaaaaagttgg

SEQ ID NO: 864802 - DNA, 33 bp, Homo sapien
caggcttgccttttcagacaggaaaaaagttgg

SEQ ID NO: 864803 - DNA, 33 bp, Homo sapien
gagcactgcaccctgacatggtttggatgtttg

SEQ ID NO: 864804 - DNA, 33 bp, Homo sapien
gagcactgcaccctgatatggtttggatgtttg

SEQ ID NO: 864805 - DNA, 33 bp, Homo sapien
gatttaaagtatacagaaagtcatatgcaaata

SEQ ID NO: 864806 - DNA, 33 bp, Homo sapien
gatttaaagtatacaggaagtcatatgcaaata

SEQ ID NO: 864807 - DNA, 33 bp, Homo sapien
gtgtggtaggctgaaaaatagtccaccaaaaga

SEQ ID NO: 864808 - DNA, 33 bp, Homo sapien
gtgtggtaggctgaaatatagtccaccaaaaga

SEQ ID NO: 864809 - DNA, 33 bp, Homo sapien
gcaatttcagaaggcaaatggtatcaggtcacc

SEQ ID NO: 864810 - DNA, 33 bp, Homo sapien
gcaatttcagaaggcagatggtatcaggtcacc

SEQ ID NO: 864811 - DNA, 33 bp, Homo sapien
caccagggtttctttgcaaatgagacaatctcc

SEQ ID NO: 864812 - DNA, 33 bp, Homo sapien
caccagggtttctttgtaaatgagacaatctcc

SEQ ID NO: 864813 - DNA, 33 bp, Homo sapien
aaaatggccaaggttacgcagctagcaaatgat

SEQ ID NO: 864814 - DNA, 33 bp, Homo sapien
aaaatggccaaggttatgcagctagcaaatgat

SEQ ID NO: 864815 - DNA, 33 bp, Homo sapien
ctaatgaggtggtagcacactgagtaaggcata

SEQ ID NO: 864816 - DNA, 33 bp, Homo sapien
ctaatgaggtggtagcgcactgagtaaggcata

SEQ ID NO: 864817 - DNA, 33 bp, Homo sapien
accattccttgttccaaactcttactctccctt

SEQ ID NO: 864818 - DNA, 33 bp, Homo sapien
accattccttgttccacactcttactctccctt

SEQ ID NO: 864819 - DNA, 33 bp, Homo sapien
ctagcctgagagaggacagcatgtgtgtcactt

SEQ ID NO: 864820 - DNA, 33 bp, Homo sapien
ctagcctgagagaggatagcatgtgtgtcactt

SEQ ID NO: 864821 - DNA, 33 bp, Homo sapien
agagaaacaagaataacaattacatcagactta

SEQ ID NO: 864822 - DNA, 33 bp, Homo sapien
agagaaacaagaataagaattacatcagactta

SEQ ID NO: 864823 - DNA, 33 bp, Homo sapien
acagatttttttctgccattaatgaccactttt

SEQ ID NO: 864824 - DNA, 33 bp, Homo sapien
acagatttttttctgctattaatgaccactttt

SEQ ID NO: 864825 - DNA, 33 bp, Homo sapien
tagagagtgtgtggaaagagttcttggctgtga

SEQ ID NO: 864826 - DNA, 33 bp, Homo sapien
tagagagtgtgtggaaggagttcttggctgtga

SEQ ID NO: 864827 - DNA, 33 bp, Homo sapien
gtttgcggaatgaataaatgaatgtttaagcct

SEQ ID NO: 864828 - DNA, 33 bp, Homo sapien
gtttgcggaatgaatagatgaatgtttaagcct

SEQ ID NO: 864829 - DNA, 33 bp, Homo sapien
agggtctaactccaaaatatttggcttcagcca

SEQ ID NO: 864830 - DNA, 33 bp, Homo sapien
agggtctaactccaaactatttggcttcagcca

SEQ ID NO: 864831 - DNA, 33 bp, Homo sapien
gaacataggcttctcaatagtcaaatgatttac

SEQ ID NO: 864832 - DNA, 33 bp, Homo sapien
gaacataggcttctcagtagtcaaatgatttac

SEQ ID NO: 864833 - DNA, 33 bp, Homo sapien
tagttacctttaataacgtcatcagcattcatg

SEQ ID NO: 864834 - DNA, 33 bp, Homo sapien
tagttacctttaataatgtcatcagcattcatg

SEQ ID NO: 864835 - DNA, 33 bp, Homo sapien
tttggcctactcccttaaaattatatcttcatt

SEQ ID NO: 864836 - DNA, 33 bp, Homo sapien
tttggcctactcccttgaaattatatcttcatt

SEQ ID NO: 864837 - DNA, 33 bp, Homo sapien
atataccctgtaacataaaagatccattctttg

SEQ ID NO: 864838 - DNA, 33 bp, Homo sapien
atataccctgtaacatgaaagatccattctttg

SEQ ID NO: 864839 - DNA, 33 bp, Homo sapien
catctataaataattcccagatgtttttgtcct

SEQ ID NO: 864840 - DNA, 33 bp, Homo sapien
catctataaataattctcagatgtttttgtcct

SEQ ID NO: 864841 - DNA, 33 bp, Homo sapien
tgccacagcagtcctacggaaaggaggccagac

SEQ ID NO: 864842 - DNA, 33 bp, Homo sapien
tgccacagcagtcctatggaaaggaggccagac

SEQ ID NO: 864843 - DNA, 33 bp, Homo sapien
ctacccttgggctgaggaagaagcatatcatta

SEQ ID NO: 864844 - DNA, 33 bp, Homo sapien
ctacccttgggctgagtaagaagcatatcatta

SEQ ID NO: 864845 - DNA, 33 bp, Homo sapien
tggattcccatgccgaacctcaacttccgttcc

SEQ ID NO: 864846 - DNA, 33 bp, Homo sapien
tggattcccatgccgagcctcaacttccgttcc

SEQ ID NO: 864847 - DNA, 33 bp, Homo sapien
actcaacataataaagcctacacagtagatatt

SEQ ID NO: 864848 - DNA, 33 bp, Homo sapien
actcaacataataaaggctacacagtagatatt

SEQ ID NO: 864849 - DNA, 33 bp, Homo sapien
agaaagaggaacagtgaaaaatgaaattggtat

SEQ ID NO: 864850 - DNA, 33 bp, Homo sapien
agaaagaggaacagtggaaaatgaaattggtat

SEQ ID NO: 864851 - DNA, 33 bp, Homo sapien
gttttcacatatgatcagagaacagagatacca

SEQ ID NO: 864852 - DNA, 33 bp, Homo sapien
gttttcacatatgatcggagaacagagatacca

SEQ ID NO: 864853 - DNA, 33 bp, Homo sapien
caactctggatggaaacatcttactgacgaacc

SEQ ID NO: 864854 - DNA, 33 bp, Homo sapien
caactctggatggaaagatcttactgacgaacc

SEQ ID NO: 864855 - DNA, 33 bp, Homo sapien
cctacgtaagagaatgccaataatccaaactaa

SEQ ID NO: 864856 - DNA, 33 bp, Homo sapien
cctacgtaagagaatgtcaataatccaaactaa

SEQ ID NO: 864857 - DNA, 33 bp, Homo sapien
ggtcaaaggtctattaagggaatttgataagct

SEQ ID NO: 864858 - DNA, 33 bp, Homo sapien
ggtcaaaggtctattatgggaatttgataagct

SEQ ID NO: 864859 - DNA, 33 bp, Homo sapien
atctatgcactcccttcaagaactcaagtcatc

SEQ ID NO: 864860 - DNA, 33 bp, Homo sapien
atctatgcactcccttgaagaactcaagtcatc

SEQ ID NO: 864861 - DNA, 33 bp, Homo sapien
aaatttgaggagagggaatagatgtagagggca

SEQ ID NO: 864862 - DNA, 33 bp, Homo sapien
aaatttgaggagaggggatagatgtagagggca

SEQ ID NO: 864863 - DNA, 33 bp, Homo sapien
attatgcacccactctaacatctttgatctctc

SEQ ID NO: 864864 - DNA, 33 bp, Homo sapien
attatgcacccactctgacatctttgatctctc

SEQ ID NO: 864865 - DNA, 33 bp, Homo sapien
ctgccccaaacagcaacaaaatcgggtgctcaa

SEQ ID NO: 864866 - DNA, 33 bp, Homo sapien
ctgccccaaacagcaataaaatcgggtgctcaa

SEQ ID NO: 864867 - DNA, 33 bp, Homo sapien
gatatacccagaaagcagaacattattcagtaa

SEQ ID NO: 864868 - DNA, 33 bp, Homo sapien
gatatacccagaaagcggaacattattcagtaa

SEQ ID NO: 864869 - DNA, 33 bp, Homo sapien
tctccagctcatccacactgtatatgctatcca

SEQ ID NO: 864870 - DNA, 33 bp, Homo sapien
tctccagctcatccacgctgtatatgctatcca

SEQ ID NO: 864871 - DNA, 33 bp, Homo sapien
acattatcttgaaatgcagcaatgaatttttct

SEQ ID NO: 864872 - DNA, 33 bp, Homo sapien
acattatcttgaaatgtagcaatgaatttttct

SEQ ID NO: 864873 - DNA, 33 bp, Homo sapien
caggagtcatcccctacgttgacactggtaagt

SEQ ID NO: 864874 - DNA, 33 bp, Homo sapien
caggagtcatcccctatgttgacactggtaagt

SEQ ID NO: 864875 - DNA, 33 bp, Homo sapien
aaagttaaaaataaggaacatagcagcttaaac

SEQ ID NO: 864876 - DNA, 33 bp, Homo sapien
aaagttaaaaataagggacatagcagcttaaac

SEQ ID NO: 864877 - DNA, 33 bp, Homo sapien
aaattggtaaagtctacggtgatcatacaaatg

SEQ ID NO: 864878 - DNA, 33 bp, Homo sapien
aaattggtaaagtctagggtgatcatacaaatg

SEQ ID NO: 864879 - DNA, 33 bp, Homo sapien
tactcttaggagacagactgtagacatgacata

SEQ ID NO: 864880 - DNA, 33 bp, Homo sapien
tactcttaggagacagcctgtagacatgacata

SEQ ID NO: 864881 - DNA, 33 bp, Homo sapien
cagattggaaagtagcacattactggatacaag

SEQ ID NO: 864882 - DNA, 33 bp, Homo sapien
cagattggaaagtagcccattactggatacaag

SEQ ID NO: 864883 - DNA, 33 bp, Homo sapien
tatgaggactataaaacgttggaataccagtca

SEQ ID NO: 864884 - DNA, 33 bp, Homo sapien
tatgaggactataaaatgttggaataccagtca

SEQ ID NO: 864885 - DNA, 33 bp, Homo sapien
gtatttgttaccttgcggaactcacgcattagt

SEQ ID NO: 864886 - DNA, 33 bp, Homo sapien
gtatttgttaccttgctgaactcacgcattagt

SEQ ID NO: 864887 - DNA, 33 bp, Homo sapien
aaagttgttatacttacggctatggtttgttac

SEQ ID NO: 864888 - DNA, 33 bp, Homo sapien
aaagttgttatacttatggctatggtttgttac

SEQ ID NO: 864889 - DNA, 33 bp, Homo sapien
atgacaggagaaaaggaatagagctgttccaac

SEQ ID NO: 864890 - DNA, 33 bp, Homo sapien
atgacaggagaaaagggatagagctgttccaac

SEQ ID NO: 864891 - DNA, 33 bp, Homo sapien
ttccacagcatttgaagatatatgtaactgcac

SEQ ID NO: 864892 - DNA, 33 bp, Homo sapien
ttccacagcatttgaatatatatgtaactgcac

SEQ ID NO: 864893 - DNA, 33 bp, Homo sapien
attattttaatgtgcactagctcgttttatcta

SEQ ID NO: 864894 - DNA, 33 bp, Homo sapien
attattttaatgtgcattagctcgttttatcta

SEQ ID NO: 864895 - DNA, 33 bp, Homo sapien
tgattcaaatttatcaaattgtgcaaacatcat

SEQ ID NO: 864896 - DNA, 33 bp, Homo sapien
tgattcaaatttatcagattgtgcaaacatcat

SEQ ID NO: 864897 - DNA, 33 bp, Homo sapien
ttggtagcactgggtaagaaatcacagcctaga

SEQ ID NO: 864898 - DNA, 33 bp, Homo sapien
ttggtagcactgggtaggaaatcacagcctaga

SEQ ID NO: 864899 - DNA, 33 bp, Homo sapien
aaaagttggtatgtggaaagataaaaattcttt

SEQ ID NO: 864900 - DNA, 33 bp, Homo sapien
aaaagttggtatgtgggaagataaaaattcttt

SEQ ID NO: 864901 - DNA, 33 bp, Homo sapien
gaactgggccacgaaacctagaatctcagcacc

SEQ ID NO: 864902 - DNA, 33 bp, Homo sapien
gaactgggccacgaaatctagaatctcagcacc

SEQ ID NO: 864903 - DNA, 33 bp, Homo sapien
agtatctcagaaaccaatgagaaattctttggc

SEQ ID NO: 864904 - DNA, 33 bp, Homo sapien
agtatctcagaaaccagtgagaaattctttggc

SEQ ID NO: 864905 - DNA, 33 bp, Homo sapien
catgcctcttgtataaactaacaattttctccc

SEQ ID NO: 864906 - DNA, 33 bp, Homo sapien
catgcctcttgtataacctaacaattttctccc

SEQ ID NO: 864907 - DNA, 33 bp, Homo sapien
tgttaattttgaagaacacttaacagatttcaa

SEQ ID NO: 864908 - DNA, 33 bp, Homo sapien
tgttaattttgaagaagacttaacagatttcaa

SEQ ID NO: 864909 - DNA, 33 bp, Homo sapien
atgcttcactgtggaaaaaggaaacaagtggct

SEQ ID NO: 864910 - DNA, 33 bp, Homo sapien
atgcttcactgtggaataaggaaacaagtggct

SEQ ID NO: 864911 - DNA, 33 bp, Homo sapien
atactaaacatccatcccaaataagttacacag

SEQ ID NO: 864912 - DNA, 33 bp, Homo sapien
atactaaacatccatctcaaataagttacacag

SEQ ID NO: 864913 - DNA, 33 bp, Homo sapien
tgctggagatacatcaatgaaaaagataaacaa

SEQ ID NO: 864914 - DNA, 33 bp, Homo sapien
tgctggagatacatcagtgaaaaagataaacaa

SEQ ID NO: 864915 - DNA, 33 bp, Homo sapien
aacataaacatggtccggaagtggtccacacac

SEQ ID NO: 864916 - DNA, 33 bp, Homo sapien
aacataaacatggtcctgaagtggtccacacac

SEQ ID NO: 864917 - DNA, 33 bp, Homo sapien
atttactctctatagacgtgatcaatcatttaa

SEQ ID NO: 864918 - DNA, 33 bp, Homo sapien
atttactctctatagatgtgatcaatcatttaa

SEQ ID NO: 864919 - DNA, 33 bp, Homo sapien
tattccttcaaagaagaatgaatggctactcac

SEQ ID NO: 864920 - DNA, 33 bp, Homo sapien
tattccttcaaagaagtatgaatggctactcac

SEQ ID NO: 864921 - DNA, 33 bp, Homo sapien
acttgccttgcgaaaccgttccctagactttct

SEQ ID NO: 864922 - DNA, 33 bp, Homo sapien
acttgccttgcgaaactgttccctagactttct

SEQ ID NO: 864923 - DNA, 33 bp, Homo sapien
ttttattaggaagatgcaaaatattatcaagat

SEQ ID NO: 864924 - DNA, 33 bp, Homo sapien
ttttattaggaagatggaaaatattatcaagat

SEQ ID NO: 864925 - DNA, 33 bp, Homo sapien
aatttatagcttaaataatgagagttgacatct

SEQ ID NO: 864926 - DNA, 33 bp, Homo sapien
aatttatagcttaaatcatgagagttgacatct

SEQ ID NO: 864927 - DNA, 33 bp, Homo sapien
cataaatagacaaaacagtggaactgaatgaaa

SEQ ID NO: 864928 - DNA, 33 bp, Homo sapien
cataaatagacaaaacggtggaactgaatgaaa

SEQ ID NO: 864929 - DNA, 33 bp, Homo sapien
aagaacactgggcttaaatggctagacaccaga

SEQ ID NO: 864930 - DNA, 33 bp, Homo sapien
aagaacactgggcttagatggctagacaccaga

SEQ ID NO: 864931 - DNA, 33 bp, Homo sapien
gacaagaaatcagccacgaagataggcccagac

SEQ ID NO: 864932 - DNA, 33 bp, Homo sapien
gacaagaaatcagccaggaagataggcccagac

SEQ ID NO: 864933 - DNA, 33 bp, Homo sapien
acaggagcttacatgaaatgctcaaggagcagc

SEQ ID NO: 864934 - DNA, 33 bp, Homo sapien
acaggagcttacatgacatgctcaaggagcagc

SEQ ID NO: 864935 - DNA, 33 bp, Homo sapien
tagtcaggagctgtcactcatttgcttagtaaa

SEQ ID NO: 864936 - DNA, 33 bp, Homo sapien
tagtcaggagctgtcattcatttgcttagtaaa

SEQ ID NO: 864937 - DNA, 33 bp, Homo sapien
aagatttgtttgcacccagcatctctactcctt

SEQ ID NO: 864938 - DNA, 33 bp, Homo sapien
aagatttgtttgcacctagcatctctactcctt

SEQ ID NO: 864939 - DNA, 33 bp, Homo sapien
gccgtaattcatccaaacactattcaagaaaaa

SEQ ID NO: 864940 - DNA, 33 bp, Homo sapien
gccgtaattcatccaagcactattcaagaaaaa

SEQ ID NO: 864941 - DNA, 33 bp, Homo sapien
ttttcttggcagaaccaaaggtgattatttctt

SEQ ID NO: 864942 - DNA, 33 bp, Homo sapien
ttttcttggcagaaccgaaggtgattatttctt

SEQ ID NO: 864943 - DNA, 33 bp, Homo sapien
tagcaagaaatataccggaaattgaacccaggt

SEQ ID NO: 864944 - DNA, 33 bp, Homo sapien
tagcaagaaatatacctgaaattgaacccaggt

SEQ ID NO: 864945 - DNA, 33 bp, Homo sapien
ccataaggctgtcacacaggctataaagaaata

SEQ ID NO: 864946 - DNA, 33 bp, Homo sapien
ccataaggctgtcacataggctataaagaaata

SEQ ID NO: 864947 - DNA, 33 bp, Homo sapien
attaccatatctgcatcatatcaccctcattgg

SEQ ID NO: 864948 - DNA, 33 bp, Homo sapien
attaccatatctgcattatatcaccctcattgg

SEQ ID NO: 864949 - DNA, 33 bp, Homo sapien
ttgttcatttaacaacaatgtatcgagagccta

SEQ ID NO: 864950 - DNA, 33 bp, Homo sapien
ttgttcatttaacaacgatgtatcgagagccta

SEQ ID NO: 864951 - DNA, 33 bp, Homo sapien
cttgtttaggccactaaattctgggaaggggga

SEQ ID NO: 864952 - DNA, 33 bp, Homo sapien
cttgtttaggccactagattctgggaaggggga

SEQ ID NO: 864953 - DNA, 33 bp, Homo sapien
tgagaacaaattaacaatgaacaatatttcaaa

SEQ ID NO: 864954 - DNA, 33 bp, Homo sapien
tgagaacaaattaacagtgaacaatatttcaaa

SEQ ID NO: 864955 - DNA, 33 bp, Homo sapien
atgtagaaggtactaaacacacgagttgaaatt

SEQ ID NO: 864956 - DNA, 33 bp, Homo sapien
atgtagaaggtactaatcacacgagttgaaatt

SEQ ID NO: 864957 - DNA, 33 bp, Homo sapien
attatggcaggcctagaaaacgaattcattcac

SEQ ID NO: 864958 - DNA, 33 bp, Homo sapien
attatggcaggcctagcaaacgaattcattcac

SEQ ID NO: 864959 - DNA, 33 bp, Homo sapien
tgttttgcaattttcaataggttaggcatcact

SEQ ID NO: 864960 - DNA, 33 bp, Homo sapien
tgttttgcaattttcagtaggttaggcatcact

SEQ ID NO: 864961 - DNA, 33 bp, Homo sapien
tttacatactcagataaacactaatttaaccta

SEQ ID NO: 864962 - DNA, 33 bp, Homo sapien
tttacatactcagatacacactaatttaaccta

SEQ ID NO: 864963 - DNA, 33 bp, Homo sapien
agaggagatggagagagaatctagccttaacaa

SEQ ID NO: 864964 - DNA, 33 bp, Homo sapien
agaggagatggagagataatctagccttaacaa

SEQ ID NO: 864965 - DNA, 33 bp, Homo sapien
tactttcagtgtacccaaacggattctaatata

SEQ ID NO: 864966 - DNA, 33 bp, Homo sapien
tactttcagtgtaccccaacggattctaatata

SEQ ID NO: 864967 - DNA, 33 bp, Homo sapien
cacttataaagaaacaggaatcattagaccagg

SEQ ID NO: 864968 - DNA, 33 bp, Homo sapien
cacttataaagaaacatgaatcattagaccagg

SEQ ID NO: 864969 - DNA, 33 bp, Homo sapien
tactttacaaatatcaaattatgattctaacag

SEQ ID NO: 864970 - DNA, 33 bp, Homo sapien
tactttacaaatatcacattatgattctaacag

SEQ ID NO: 864971 - DNA, 33 bp, Homo sapien
ttctggctgcagttcccacatctcttctctaaa

SEQ ID NO: 864972 - DNA, 33 bp, Homo sapien
ttctggctgcagttcctacatctcttctctaaa

SEQ ID NO: 864973 - DNA, 33 bp, Homo sapien
catttcctaatatctaccatgtacaaggcacta

SEQ ID NO: 864974 - DNA, 33 bp, Homo sapien
catttcctaatatctatcatgtacaaggcacta

SEQ ID NO: 864975 - DNA, 33 bp, Homo sapien
agaatagacccacaacggatgctttagggacaa

SEQ ID NO: 864976 - DNA, 33 bp, Homo sapien
agaatagacccacaactgatgctttagggacaa

SEQ ID NO: 864977 - DNA, 33 bp, Homo sapien
gattttaagactcttacgaatctacaggaatca

SEQ ID NO: 864978 - DNA, 33 bp, Homo sapien
gattttaagactcttatgaatctacaggaatca

SEQ ID NO: 864979 - DNA, 33 bp, Homo sapien
agagagagagagggaaaggagactctgtttgtt

SEQ ID NO: 864980 - DNA, 33 bp, Homo sapien
agagagagagagggaagggagactctgtttgtt

SEQ ID NO: 864981 - DNA, 33 bp, Homo sapien
aagactctcaaattaactcaattgacaaagaca

SEQ ID NO: 864982 - DNA, 33 bp, Homo sapien
aagactctcaaattaattcaattgacaaagaca

SEQ ID NO: 864983 - DNA, 33 bp, Homo sapien
caactaaatcttacaccggcaagtcatgcagct

SEQ ID NO: 864984 - DNA, 33 bp, Homo sapien
caactaaatcttacactggcaagtcatgcagct

SEQ ID NO: 864985 - DNA, 33 bp, Homo sapien
tcaaaaaggtttacaaatgacgacacagaagac

SEQ ID NO: 864986 - DNA, 33 bp, Homo sapien
tcaaaaaggtttacaagtgacgacacagaagac

SEQ ID NO: 864987 - DNA, 33 bp, Homo sapien
ttttttagctgcaaaacgattactgtagaactt

SEQ ID NO: 864988 - DNA, 33 bp, Homo sapien
ttttttagctgcaaaatgattactgtagaactt

SEQ ID NO: 864989 - DNA, 33 bp, Homo sapien
aaatcaatatgctcaaactgttagtgtacaata

SEQ ID NO: 864990 - DNA, 33 bp, Homo sapien
aaatcaatatgctcaacctgttagtgtacaata

SEQ ID NO: 864991 - DNA, 33 bp, Homo sapien
gcacaggaattgtagtcaaatgtagaggtcgcc

SEQ ID NO: 864992 - DNA, 33 bp, Homo sapien
gcacaggaattgtagtgaaatgtagaggtcgcc

SEQ ID NO: 864993 - DNA, 33 bp, Homo sapien
tgagagtcggaataacagaataacagcctggat

SEQ ID NO: 864994 - DNA, 33 bp, Homo sapien
tgagagtcggaataacggaataacagcctggat

SEQ ID NO: 864995 - DNA, 33 bp, Homo sapien
agcgctgtggactaaaagtgttcccttagcctc

SEQ ID NO: 864996 - DNA, 33 bp, Homo sapien
agcgctgtggactaaatgtgttcccttagcctc

SEQ ID NO: 864997 - DNA, 33 bp, Homo sapien
ttataaggacattaaacccattcacaagggtac

SEQ ID NO: 864998 - DNA, 33 bp, Homo sapien
ttataaggacattaaatccattcacaagggtac

SEQ ID NO: 864999 - DNA, 33 bp, Homo sapien
tctctctttctgtccaatgattacactttagtc

SEQ ID NO: 865000 - DNA, 33 bp, Homo sapien
tctctctttctgtccagtgattacactttagtc

SEQ ID NO: 865001 - DNA, 33 bp, Homo sapien
aaaaatgaaatccagtaacacttctacaaatca

SEQ ID NO: 865002 - DNA, 33 bp, Homo sapien
aaaaatgaaatccagtgacacttctacaaatca

SEQ ID NO: 865003 - DNA, 33 bp, Homo sapien
aacatttagctgaagacgacttctattgtctta

SEQ ID NO: 865004 - DNA, 33 bp, Homo sapien
aacatttagctgaagatgacttctattgtctta

SEQ ID NO: 865005 - DNA, 33 bp, Homo sapien
atatctcatttcaagaactaccaggtatgttac

SEQ ID NO: 865006 - DNA, 33 bp, Homo sapien
atatctcatttcaagagctaccaggtatgttac

SEQ ID NO: 865007 - DNA, 33 bp, Homo sapien
atatcactctactacacgatgctgacagtcagg

SEQ ID NO: 865008 - DNA, 33 bp, Homo sapien
atatcactctactacatgatgctgacagtcagg

SEQ ID NO: 865009 - DNA, 33 bp, Homo sapien
tcaattttcatgaacccatcagaaagctgagat

SEQ ID NO: 865010 - DNA, 33 bp, Homo sapien
tcaattttcatgaacctatcagaaagctgagat

SEQ ID NO: 865011 - DNA, 33 bp, Homo sapien
gcattttagaaattaaaattctggttgcactgt

SEQ ID NO: 865012 - DNA, 33 bp, Homo sapien
gcattttagaaattaatattctggttgcactgt

SEQ ID NO: 865013 - DNA, 33 bp, Homo sapien
taccttttgatcactacggcaatattttcaatt

SEQ ID NO: 865014 - DNA, 33 bp, Homo sapien
taccttttgatcactatggcaatattttcaatt

SEQ ID NO: 865015 - DNA, 33 bp, Homo sapien
ttttacagaaaacgaaaacactgtatgtaaccc

SEQ ID NO: 865016 - DNA, 33 bp, Homo sapien
ttttacagaaaacgaagacactgtatgtaaccc

SEQ ID NO: 865017 - DNA, 33 bp, Homo sapien
ctgatgaagaagaagactaattagattttggac

SEQ ID NO: 865018 - DNA, 33 bp, Homo sapien
ctgatgaagaagaagattaattagattttggac

SEQ ID NO: 865019 - DNA, 33 bp, Homo sapien
atggataagacaagaaatgtattctagtaagca

SEQ ID NO: 865020 - DNA, 33 bp, Homo sapien
atggataagacaagaagtgtattctagtaagca

SEQ ID NO: 865021 - DNA, 33 bp, Homo sapien
tagcttgtttgagaaacgggcagatggtgacat

SEQ ID NO: 865022 - DNA, 33 bp, Homo sapien
tagcttgtttgagaaatgggcagatggtgacat

SEQ ID NO: 865023 - DNA, 33 bp, Homo sapien
actaaaactctcagaaatctcccatcaattttg

SEQ ID NO: 865024 - DNA, 33 bp, Homo sapien
actaaaactctcagaactctcccatcaattttg

SEQ ID NO: 865025 - DNA, 33 bp, Homo sapien
ccagtatctttgcagaaaagtaagttaagcttg

SEQ ID NO: 865026 - DNA, 33 bp, Homo sapien
ccagtatctttgcagacaagtaagttaagcttg

SEQ ID NO: 865027 - DNA, 33 bp, Homo sapien
agcaattaaaaaaatcaaagtactatctccttt

SEQ ID NO: 865028 - DNA, 33 bp, Homo sapien
agcaattaaaaaaatcgaagtactatctccttt

SEQ ID NO: 865029 - DNA, 33 bp, Homo sapien
tctcctttacaattaaatgaggtagcacatggt

SEQ ID NO: 865030 - DNA, 33 bp, Homo sapien
tctcctttacaattaagtgaggtagcacatggt

SEQ ID NO: 865031 - DNA, 33 bp, Homo sapien
gtgaaaggaactccaaaagagtcgcttaaccta

SEQ ID NO: 865032 - DNA, 33 bp, Homo sapien
gtgaaaggaactccaagagagtcgcttaaccta

SEQ ID NO: 865033 - DNA, 33 bp, Homo sapien
cctttctatgaatatcacaatcaaccagaagcc

SEQ ID NO: 865034 - DNA, 33 bp, Homo sapien
cctttctatgaatatcgcaatcaaccagaagcc

SEQ ID NO: 865035 - DNA, 33 bp, Homo sapien
gaatctacctatgacccataacacgctacttca

SEQ ID NO: 865036 - DNA, 33 bp, Homo sapien
gaatctacctatgacctataacacgctacttca

SEQ ID NO: 865037 - DNA, 33 bp, Homo sapien
tcctatgtccatgaaacgtgttattattataca

SEQ ID NO: 865038 - DNA, 33 bp, Homo sapien
tcctatgtccatgaaatgtgttattattataca

SEQ ID NO: 865039 - DNA, 33 bp, Homo sapien
ctacttttacattcccagaagagttgatctaat

SEQ ID NO: 865040 - DNA, 33 bp, Homo sapien
ctacttttacattcccggaagagttgatctaat

SEQ ID NO: 865041 - DNA, 33 bp, Homo sapien
tcactcctttgggtacaatctgattcctgctgg

SEQ ID NO: 865042 - DNA, 33 bp, Homo sapien
tcactcctttgggtacgatctgattcctgctgg

SEQ ID NO: 865043 - DNA, 33 bp, Homo sapien
gcaaatcaggaatccacgtccccacactcggta

SEQ ID NO: 865044 - DNA, 33 bp, Homo sapien
gcaaatcaggaatccaggtccccacactcggta

SEQ ID NO: 865045 - DNA, 33 bp, Homo sapien
catattttcctataaaactgtcctaatgatctt

SEQ ID NO: 865046 - DNA, 33 bp, Homo sapien
catattttcctataaagctgtcctaatgatctt

SEQ ID NO: 865047 - DNA, 33 bp, Homo sapien
ttgtatagccactaaaaaggatgttaagccaaa

SEQ ID NO: 865048 - DNA, 33 bp, Homo sapien
ttgtatagccactaaacaggatgttaagccaaa

SEQ ID NO: 865049 - DNA, 33 bp, Homo sapien
aaggcattgtgacctaaagtcgggcctggagaa

SEQ ID NO: 865050 - DNA, 33 bp, Homo sapien
aaggcattgtgacctacagtcgggcctggagaa

SEQ ID NO: 865051 - DNA, 33 bp, Homo sapien
ccatgctcccggataacagacagtaaacgtggt

SEQ ID NO: 865052 - DNA, 33 bp, Homo sapien
ccatgctcccggataagagacagtaaacgtggt

SEQ ID NO: 865053 - DNA, 33 bp, Homo sapien
ggaaataatgatgtacagaagagtctttttcat

SEQ ID NO: 865054 - DNA, 33 bp, Homo sapien
ggaaataatgatgtacggaagagtctttttcat

SEQ ID NO: 865055 - DNA, 33 bp, Homo sapien
cctcatccagctttccacttaaagacaagactc

SEQ ID NO: 865056 - DNA, 33 bp, Homo sapien
cctcatccagctttccgcttaaagacaagactc

SEQ ID NO: 865057 - DNA, 33 bp, Homo sapien
aacagggacagaagagccaatgaatcatattgt

SEQ ID NO: 865058 - DNA, 33 bp, Homo sapien
aacagggacagaagagtcaatgaatcatattgt

SEQ ID NO: 865059 - DNA, 33 bp, Homo sapien
atgatacctgggcagaagacatatcagacactt

SEQ ID NO: 865060 - DNA, 33 bp, Homo sapien
atgatacctgggcagatgacatatcagacactt

SEQ ID NO: 865061 - DNA, 33 bp, Homo sapien
ccaaaatctacttgaaactacaacagagtagcc

SEQ ID NO: 865062 - DNA, 33 bp, Homo sapien
ccaaaatctacttgaagctacaacagagtagcc

SEQ ID NO: 865063 - DNA, 33 bp, Homo sapien
tggacaattgattactaaagatatggctactct

SEQ ID NO: 865064 - DNA, 33 bp, Homo sapien
tggacaattgattactgaagatatggctactct

SEQ ID NO: 865065 - DNA, 33 bp, Homo sapien
atgaagtgataggaaacgatggccaggatccag

SEQ ID NO: 865066 - DNA, 33 bp, Homo sapien
atgaagtgataggaaatgatggccaggatccag

SEQ ID NO: 865067 - DNA, 33 bp, Homo sapien
cacgtcagtccatctccactatcagcacccaga

SEQ ID NO: 865068 - DNA, 33 bp, Homo sapien
cacgtcagtccatctctactatcagcacccaga

SEQ ID NO: 865069 - DNA, 33 bp, Homo sapien
ataacatacatatggtaaaaaattgaaaagaaa

SEQ ID NO: 865070 - DNA, 33 bp, Homo sapien
ataacatacatatggtgaaaaattgaaaagaaa

SEQ ID NO: 865071 - DNA, 33 bp, Homo sapien
gagattcttgcagagactccacaataagaagtt

SEQ ID NO: 865072 - DNA, 33 bp, Homo sapien
gagattcttgcagagagtccacaataagaagtt

SEQ ID NO: 865073 - DNA, 33 bp, Homo sapien
aaactatcttattttacgcagtgataataaaaa

SEQ ID NO: 865074 - DNA, 33 bp, Homo sapien
aaactatcttattttaggcagtgataataaaaa

SEQ ID NO: 865075 - DNA, 33 bp, Homo sapien
aaacaattctggtaaaagtcaacatggatcttt

SEQ ID NO: 865076 - DNA, 33 bp, Homo sapien
aaacaattctggtaaaggtcaacatggatcttt

SEQ ID NO: 865077 - DNA, 33 bp, Homo sapien
gtgacagccaaatcataaggtctattttttgtt

SEQ ID NO: 865078 - DNA, 33 bp, Homo sapien
gtgacagccaaatcatgaggtctattttttgtt

SEQ ID NO: 865079 - DNA, 33 bp, Homo sapien
tgttcctgcagtgaacaaagcaaaaattgttaa

SEQ ID NO: 865080 - DNA, 33 bp, Homo sapien
tgttcctgcagtgaacgaagcaaaaattgttaa

SEQ ID NO: 865081 - DNA, 33 bp, Homo sapien
aataaatgctgtgttacggaccaataattagat

SEQ ID NO: 865082 - DNA, 33 bp, Homo sapien
aataaatgctgtgttatggaccaataattagat

SEQ ID NO: 865083 - DNA, 33 bp, Homo sapien
ggaacaaacttcagacaaccaaataaatactgt

SEQ ID NO: 865084 - DNA, 33 bp, Homo sapien
ggaacaaacttcagaccaccaaataaatactgt

SEQ ID NO: 865085 - DNA, 33 bp, Homo sapien
gcttgtgtcatttacacctgaaagtcagttttg

SEQ ID NO: 865086 - DNA, 33 bp, Homo sapien
gcttgtgtcatttacatctgaaagtcagttttg

SEQ ID NO: 865087 - DNA, 33 bp, Homo sapien
gacatccagctaatgaacttaagaagtagctct

SEQ ID NO: 865088 - DNA, 33 bp, Homo sapien
gacatccagctaatgagcttaagaagtagctct

SEQ ID NO: 865089 - DNA, 33 bp, Homo sapien
atctcataaaaatgaaatagcagttgccgggca

SEQ ID NO: 865090 - DNA, 33 bp, Homo sapien
atctcataaaaatgaactagcagttgccgggca

SEQ ID NO: 865091 - DNA, 33 bp, Homo sapien
taggtatgtaactgataagcaagtaaacagaaa

SEQ ID NO: 865092 - DNA, 33 bp, Homo sapien
taggtatgtaactgatgagcaagtaaacagaaa

SEQ ID NO: 865093 - DNA, 33 bp, Homo sapien
actattcataagtcaaatgttactaaagtatgc

SEQ ID NO: 865094 - DNA, 33 bp, Homo sapien
actattcataagtcaagtgttactaaagtatgc

SEQ ID NO: 865095 - DNA, 33 bp, Homo sapien
aagctaagtctttcccccatctatttcaattaa

SEQ ID NO: 865096 - DNA, 33 bp, Homo sapien
aagctaagtctttccctcatctatttcaattaa

SEQ ID NO: 865097 - DNA, 33 bp, Homo sapien
agattagaaataataccgataacacacactgaa

SEQ ID NO: 865098 - DNA, 33 bp, Homo sapien
agattagaaataatactgataacacacactgaa

SEQ ID NO: 865099 - DNA, 33 bp, Homo sapien
atccacaaaatttgaagctttctttacgggaaa

SEQ ID NO: 865100 - DNA, 33 bp, Homo sapien
atccacaaaatttgaatctttctttacgggaaa

SEQ ID NO: 865101 - DNA, 33 bp, Homo sapien
ttgttttttggcaaatgaagagtaagagaaaag

SEQ ID NO: 865102 - DNA, 33 bp, Homo sapien
ttgttttttggcaaattaagagtaagagaaaag

SEQ ID NO: 865103 - DNA, 33 bp, Homo sapien
gatctaattatatttaaagttttgcacaggtgc

SEQ ID NO: 865104 - DNA, 33 bp, Homo sapien
gatctaattatatttagagttttgcacaggtgc

SEQ ID NO: 865105 - DNA, 33 bp, Homo sapien
gttgccctggcattcaacaccttctatcttgta

SEQ ID NO: 865106 - DNA, 33 bp, Homo sapien
gttgccctggcattcatcaccttctatcttgta

SEQ ID NO: 865107 - DNA, 33 bp, Homo sapien
ttatgtttacaaatggaaagttttcgtttttga

SEQ ID NO: 865108 - DNA, 33 bp, Homo sapien
ttatgtttacaaatgggaagttttcgtttttga

SEQ ID NO: 865109 - DNA, 33 bp, Homo sapien
tgaattaggaatataccggatcaatcttcagtt

SEQ ID NO: 865110 - DNA, 33 bp, Homo sapien
tgaattaggaatatactggatcaatcttcagtt

SEQ ID NO: 865111 - DNA, 33 bp, Homo sapien
ttttgaaatgtaggaaactaaccaattagtgtc

SEQ ID NO: 865112 - DNA, 33 bp, Homo sapien
ttttgaaatgtaggaagctaaccaattagtgtc

SEQ ID NO: 865113 - DNA, 33 bp, Homo sapien
tgctactgcccttcaaagtcttctgataataga

SEQ ID NO: 865114 - DNA, 33 bp, Homo sapien
tgctactgcccttcaaggtcttctgataataga

SEQ ID NO: 865115 - DNA, 33 bp, Homo sapien
caaagtttgatggaaagtgctgtcaggctttta

SEQ ID NO: 865116 - DNA, 33 bp, Homo sapien
caaagtttgatggaaattgctgtcaggctttta

SEQ ID NO: 865117 - DNA, 33 bp, Homo sapien
acttttatatgacagccaagtaattttaagcaa

SEQ ID NO: 865118 - DNA, 33 bp, Homo sapien
acttttatatgacagcgaagtaattttaagcaa

SEQ ID NO: 865119 - DNA, 33 bp, Homo sapien
ttttagggtcattgaactaaccttatttctttc

SEQ ID NO: 865120 - DNA, 33 bp, Homo sapien
ttttagggtcattgaattaaccttatttctttc

SEQ ID NO: 865121 - DNA, 33 bp, Homo sapien
agtgaaggtttggagaaattgtgaattaatttc

SEQ ID NO: 865122 - DNA, 33 bp, Homo sapien
agtgaaggtttggagagattgtgaattaatttc

SEQ ID NO: 865123 - DNA, 33 bp, Homo sapien
gtatagtggagaaaatcagcgtgagagagtttc

SEQ ID NO: 865124 - DNA, 33 bp, Homo sapien
gtatagtggagaaaattagcgtgagagagtttc

SEQ ID NO: 865125 - DNA, 33 bp, Homo sapien
caagtagaggtgaacaaatacctttcaaaggaa

SEQ ID NO: 865126 - DNA, 33 bp, Homo sapien
caagtagaggtgaacagatacctttcaaaggaa

SEQ ID NO: 865127 - DNA, 33 bp, Homo sapien
ttgaaaactgctaagaaagtaaattttaagtgc

SEQ ID NO: 865128 - DNA, 33 bp, Homo sapien
ttgaaaactgctaagacagtaaattttaagtgc

SEQ ID NO: 865129 - DNA, 33 bp, Homo sapien
gttttaacctacttacgactttcttagtgttaa

SEQ ID NO: 865130 - DNA, 33 bp, Homo sapien
gttttaacctacttactactttcttagtgttaa

SEQ ID NO: 865131 - DNA, 33 bp, Homo sapien
gtttaaacttattggccatgtaaacttgagtac

SEQ ID NO: 865132 - DNA, 33 bp, Homo sapien
gtttaaacttattggctatgtaaacttgagtac

SEQ ID NO: 865133 - DNA, 33 bp, Homo sapien
tgagcatagtatctaacaggaagtgaacactca

SEQ ID NO: 865134 - DNA, 33 bp, Homo sapien
tgagcatagtatctaataggaagtgaacactca

SEQ ID NO: 865135 - DNA, 33 bp, Homo sapien
cctgagttgggcaatacgagagaagtgatgttt

SEQ ID NO: 865136 - DNA, 33 bp, Homo sapien
cctgagttgggcaatatgagagaagtgatgttt

SEQ ID NO: 865137 - DNA, 33 bp, Homo sapien
caaaaccatatctttcaacaggagcctgcagga

SEQ ID NO: 865138 - DNA, 33 bp, Homo sapien
caaaaccatatctttcgacaggagcctgcagga

SEQ ID NO: 865139 - DNA, 33 bp, Homo sapien
aagaaagctacacacactgaaggaaaactatac

SEQ ID NO: 865140 - DNA, 33 bp, Homo sapien
aagaaagctacacacagtgaaggaaaactatac

SEQ ID NO: 865141 - DNA, 33 bp, Homo sapien
ttgggtttggtagctggagagtcttaaaatgtt

SEQ ID NO: 865142 - DNA, 33 bp, Homo sapien
ttgggtttggtagctgtagagtcttaaaatgtt

SEQ ID NO: 865143 - DNA, 33 bp, Homo sapien
ttaaatgtacctcacaacactgtactgaccaag

SEQ ID NO: 865144 - DNA, 33 bp, Homo sapien
ttaaatgtacctcacagcactgtactgaccaag

SEQ ID NO: 865145 - DNA, 33 bp, Homo sapien
caatggtgaattgaataaagaaaatatggtgca

SEQ ID NO: 865146 - DNA, 33 bp, Homo sapien
caatggtgaattgaatcaagaaaatatggtgca

SEQ ID NO: 865147 - DNA, 33 bp, Homo sapien
agaggacatagggtgacgtaactttttattcta

SEQ ID NO: 865148 - DNA, 33 bp, Homo sapien
agaggacatagggtgatgtaactttttattcta

SEQ ID NO: 865149 - DNA, 33 bp, Homo sapien
atggtttacaaaattcaagttacacaaagtagg

SEQ ID NO: 865150 - DNA, 33 bp, Homo sapien
atggtttacaaaattcgagttacacaaagtagg

SEQ ID NO: 865151 - DNA, 33 bp, Homo sapien
ttctccattcccattaccagcaaggtacgttga

SEQ ID NO: 865152 - DNA, 33 bp, Homo sapien
ttctccattcccattatcagcaaggtacgttga

SEQ ID NO: 865153 - DNA, 33 bp, Homo sapien
ctaacttttgagaagaagccaagttatgctgta

SEQ ID NO: 865154 - DNA, 33 bp, Homo sapien
ctaacttttgagaagaggccaagttatgctgta

SEQ ID NO: 865155 - DNA, 33 bp, Homo sapien
aggattctacaatctaaagtgacataagaaaga

SEQ ID NO: 865156 - DNA, 33 bp, Homo sapien
aggattctacaatctacagtgacataagaaaga

SEQ ID NO: 865157 - DNA, 33 bp, Homo sapien
tccataaagcagggtacacaatagttactctgg

SEQ ID NO: 865158 - DNA, 33 bp, Homo sapien
tccataaagcagggtatacaatagttactctgg

SEQ ID NO: 865159 - DNA, 33 bp, Homo sapien
gtctgaatgctaagccaatgaatcctaactcta

SEQ ID NO: 865160 - DNA, 33 bp, Homo sapien
gtctgaatgctaagccgatgaatcctaactcta

SEQ ID NO: 865161 - DNA, 33 bp, Homo sapien
ccagtttatcatgttacatttcgttttcaaaaa

SEQ ID NO: 865162 - DNA, 33 bp, Homo sapien
ccagtttatcatgttatatttcgttttcaaaaa

SEQ ID NO: 865163 - DNA, 33 bp, Homo sapien
gatatacgtgtaggaccctctcttcttccagtt

SEQ ID NO: 865164 - DNA, 33 bp, Homo sapien
gatatacgtgtaggactctctcttcttccagtt

SEQ ID NO: 865165 - DNA, 33 bp, Homo sapien
tcaccctattttcaggaaagataaactagacaa

SEQ ID NO: 865166 - DNA, 33 bp, Homo sapien
tcaccctattttcagggaagataaactagacaa

SEQ ID NO: 865167 - DNA, 33 bp, Homo sapien
ataatctaaacgtgtaacagttaatgagacaaa

SEQ ID NO: 865168 - DNA, 33 bp, Homo sapien
ataatctaaacgtgtatcagttaatgagacaaa

SEQ ID NO: 865169 - DNA, 33 bp, Homo sapien
tagctcaaggctgccaacaagagggaggtggga

SEQ ID NO: 865170 - DNA, 33 bp, Homo sapien
tagctcaaggctgccagcaagagggaggtggga

SEQ ID NO: 865171 - DNA, 33 bp, Homo sapien
ctctttcctttcactcgataaagtagaccactc

SEQ ID NO: 865172 - DNA, 33 bp, Homo sapien
ctctttcctttcactctataaagtagaccactc

SEQ ID NO: 865173 - DNA, 33 bp, Homo sapien
ataccaagaccatgaaagagaaagagatcacat

SEQ ID NO: 865174 - DNA, 33 bp, Homo sapien
ataccaagaccatgaaggagaaagagatcacat

SEQ ID NO: 865175 - DNA, 33 bp, Homo sapien
gtgcctggcaggataccgaagcagtgaggagag

SEQ ID NO: 865176 - DNA, 33 bp, Homo sapien
gtgcctggcaggatactgaagcagtgaggagag

SEQ ID NO: 865177 - DNA, 33 bp, Homo sapien
gttcactttgtgaaaactgagttagacacagga

SEQ ID NO: 865178 - DNA, 33 bp, Homo sapien
gttcactttgtgaaaattgagttagacacagga

SEQ ID NO: 865179 - DNA, 33 bp, Homo sapien
cacactagatttctcacggttacctgaatcttg

SEQ ID NO: 865180 - DNA, 33 bp, Homo sapien
cacactagatttctcatggttacctgaatcttg

SEQ ID NO: 865181 - DNA, 33 bp, Homo sapien
gtaactcctcaaattacacactaaaaagggcaa

SEQ ID NO: 865182 - DNA, 33 bp, Homo sapien
gtaactcctcaaattatacactaaaaagggcaa

SEQ ID NO: 865183 - DNA, 33 bp, Homo sapien
acctgagaagtacacaatgcaccgaatttgtag

SEQ ID NO: 865184 - DNA, 33 bp, Homo sapien
acctgagaagtacacagtgcaccgaatttgtag

SEQ ID NO: 865185 - DNA, 33 bp, Homo sapien
acgggatagcaaaaaaatgtggactatttaaaa

SEQ ID NO: 865186 - DNA, 33 bp, Homo sapien
acgggatagcaaaaaattgtggactatttaaaa

SEQ ID NO: 865187 - DNA, 33 bp, Homo sapien
aagcctattctctaacccaaatcttgtgttcat

SEQ ID NO: 865188 - DNA, 33 bp, Homo sapien
aagcctattctctaactcaaatcttgtgttcat

SEQ ID NO: 865189 - DNA, 33 bp, Homo sapien
ttttgcctttcattggcagttctagctctctct

SEQ ID NO: 865190 - DNA, 33 bp, Homo sapien
ttttgcctttcattggtagttctagctctctct

SEQ ID NO: 865191 - DNA, 33 bp, Homo sapien
gaaatgattgctattgaagattgtagagaggta

SEQ ID NO: 865192 - DNA, 33 bp, Homo sapien
gaaatgattgctattgcagattgtagagaggta

SEQ ID NO: 865193 - DNA, 33 bp, Homo sapien
ataatgctaaaagagagaaaacatggtagtaca

SEQ ID NO: 865194 - DNA, 33 bp, Homo sapien
ataatgctaaaagagataaaacatggtagtaca

SEQ ID NO: 865195 - DNA, 33 bp, Homo sapien
ctccacattatcaaagcaaactcgtcacttaaa

SEQ ID NO: 865196 - DNA, 33 bp, Homo sapien
ctccacattatcaaaggaaactcgtcacttaaa

SEQ ID NO: 865197 - DNA, 33 bp, Homo sapien
tcacattccagagctacaccctgtgtcttatag

SEQ ID NO: 865198 - DNA, 33 bp, Homo sapien
tcacattccagagctataccctgtgtcttatag

SEQ ID NO: 865199 - DNA, 33 bp, Homo sapien
aaatgcaaacattggacctaatgagaattgtaa

SEQ ID NO: 865200 - DNA, 33 bp, Homo sapien
aaatgcaaacattggatctaatgagaattgtaa

SEQ ID NO: 865201 - DNA, 33 bp, Homo sapien
aacatttagagccagactcgtcaaagtgcaaaa

SEQ ID NO: 865202 - DNA, 33 bp, Homo sapien
aacatttagagccagagtcgtcaaagtgcaaaa

SEQ ID NO: 865203 - DNA, 33 bp, Homo sapien
tgggccagataactaccggagatgatgttcctt

SEQ ID NO: 865204 - DNA, 33 bp, Homo sapien
tgggccagataactacgggagatgatgttcctt

SEQ ID NO: 865205 - DNA, 33 bp, Homo sapien
tattttaaaagaaaacagttacatcactcaaat

SEQ ID NO: 865206 - DNA, 33 bp, Homo sapien
tattttaaaagaaaacggttacatcactcaaat

SEQ ID NO: 865207 - DNA, 33 bp, Homo sapien
ctataacacaaacagaactgacacatgcccctt

SEQ ID NO: 865208 - DNA, 33 bp, Homo sapien
ctataacacaaacagagctgacacatgcccctt

SEQ ID NO: 865209 - DNA, 33 bp, Homo sapien
ataatccaatgaaagaaactgccaattaaacaa

SEQ ID NO: 865210 - DNA, 33 bp, Homo sapien
ataatccaatgaaagagactgccaattaaacaa

SEQ ID NO: 865211 - DNA, 33 bp, Homo sapien
taatataagctgaaaaaaacatttgcttcttaa

SEQ ID NO: 865212 - DNA, 33 bp, Homo sapien
taatataagctgaaaacaacatttgcttcttaa

SEQ ID NO: 865213 - DNA, 33 bp, Homo sapien
ctggggttggccataaaagctgacgtcagagca

SEQ ID NO: 865214 - DNA, 33 bp, Homo sapien
ctggggttggccataagagctgacgtcagagca

SEQ ID NO: 865215 - DNA, 33 bp, Homo sapien
taaagacttgaaattcacacattcaggcattat

SEQ ID NO: 865216 - DNA, 33 bp, Homo sapien
taaagacttgaaattcgcacattcaggcattat

SEQ ID NO: 865217 - DNA, 33 bp, Homo sapien
atattgatgctacaaaagataattttattgtaa

SEQ ID NO: 865218 - DNA, 33 bp, Homo sapien
atattgatgctacaaaggataattttattgtaa

SEQ ID NO: 865219 - DNA, 33 bp, Homo sapien
gcaggcagaaactgaaactctggatattccagc

SEQ ID NO: 865220 - DNA, 33 bp, Homo sapien
gcaggcagaaactgaagctctggatattccagc

SEQ ID NO: 865221 - DNA, 33 bp, Homo sapien
tgtccagtcaatggaaaagttgtccagtcaact

SEQ ID NO: 865222 - DNA, 33 bp, Homo sapien
tgtccagtcaatggaagagttgtccagtcaact

SEQ ID NO: 865223 - DNA, 33 bp, Homo sapien
tgtctggtcaggctacaacattaccaacatcta

SEQ ID NO: 865224 - DNA, 33 bp, Homo sapien
tgtctggtcaggctacgacattaccaacatcta

SEQ ID NO: 865225 - DNA, 33 bp, Homo sapien
atccctaaagacaaaaatgtgtaaatgctaatc

SEQ ID NO: 865226 - DNA, 33 bp, Homo sapien
atccctaaagacaaaagtgtgtaaatgctaatc

SEQ ID NO: 865227 - DNA, 33 bp, Homo sapien
catagcatattacagaagtcttccctggctact

SEQ ID NO: 865228 - DNA, 33 bp, Homo sapien
catagcatattacagaggtcttccctggctact

SEQ ID NO: 865229 - DNA, 33 bp, Homo sapien
ctagggttaaaaagtaagtggcttccacaccta

SEQ ID NO: 865230 - DNA, 33 bp, Homo sapien
ctagggttaaaaagtaggtggcttccacaccta

SEQ ID NO: 865231 - DNA, 33 bp, Homo sapien
accaccaagaaatccactattgggcatatacct

SEQ ID NO: 865232 - DNA, 33 bp, Homo sapien
accaccaagaaatccattattgggcatatacct

SEQ ID NO: 865233 - DNA, 33 bp, Homo sapien
gggggcacctaagatcaaaggagctggtcacag

SEQ ID NO: 865234 - DNA, 33 bp, Homo sapien
gggggcacctaagatcgaaggagctggtcacag

SEQ ID NO: 865235 - DNA, 33 bp, Homo sapien
catggagaattacctacacttttgcatccttga

SEQ ID NO: 865236 - DNA, 33 bp, Homo sapien
catggagaattacctatacttttgcatccttga

SEQ ID NO: 865237 - DNA, 33 bp, Homo sapien
tataagagccttaccacgaagagctggaagaag

SEQ ID NO: 865238 - DNA, 33 bp, Homo sapien
tataagagccttaccatgaagagctggaagaag

SEQ ID NO: 865239 - DNA, 33 bp, Homo sapien
cttccagactccacaaaacaatgaagcatatgg

SEQ ID NO: 865240 - DNA, 33 bp, Homo sapien
cttccagactccacaacacaatgaagcatatgg

SEQ ID NO: 865241 - DNA, 33 bp, Homo sapien
tggacatatcatggaaccacagaaaagatttag

SEQ ID NO: 865242 - DNA, 33 bp, Homo sapien
tggacatatcatggaagcacagaaaagatttag

SEQ ID NO: 865243 - DNA, 33 bp, Homo sapien
gtgtcatcagaaaccaaacggggagcctggaat

SEQ ID NO: 865244 - DNA, 33 bp, Homo sapien
gtgtcatcagaaaccacacggggagcctggaat

SEQ ID NO: 865245 - DNA, 33 bp, Homo sapien
aagtaacctttatctacaatgctgttcacctcc

SEQ ID NO: 865246 - DNA, 33 bp, Homo sapien
aagtaacctttatctagaatgctgttcacctcc

SEQ ID NO: 865247 - DNA, 33 bp, Homo sapien
actatgtgatcctcaactgaatacacagcatgg

SEQ ID NO: 865248 - DNA, 33 bp, Homo sapien
actatgtgatcctcaattgaatacacagcatgg

SEQ ID NO: 865249 - DNA, 33 bp, Homo sapien
ggcttgcaacagctgcaattccatcttgactat

SEQ ID NO: 865250 - DNA, 33 bp, Homo sapien
ggcttgcaacagctgcgattccatcttgactat

SEQ ID NO: 865251 - DNA, 33 bp, Homo sapien
gtatgtgaggtgattacacaattgctctatgtc

SEQ ID NO: 865252 - DNA, 33 bp, Homo sapien
gtatgtgaggtgattatacaattgctctatgtc

SEQ ID NO: 865253 - DNA, 33 bp, Homo sapien
ataagaggaaaaaagaaaactcaatgcttcaga

SEQ ID NO: 865254 - DNA, 33 bp, Homo sapien
ataagaggaaaaaagagaactcaatgcttcaga

SEQ ID NO: 865255 - DNA, 33 bp, Homo sapien
ggaaaccacactataacaaactttacagccagt

SEQ ID NO: 865256 - DNA, 33 bp, Homo sapien
ggaaaccacactataataaactttacagccagt

SEQ ID NO: 865257 - DNA, 33 bp, Homo sapien
tgttgttatgactaacagaaattggtccaaagt

SEQ ID NO: 865258 - DNA, 33 bp, Homo sapien
tgttgttatgactaacggaaattggtccaaagt

SEQ ID NO: 865259 - DNA, 33 bp, Homo sapien
acccagtcttggcttgcagattagaaaacttta

SEQ ID NO: 865260 - DNA, 33 bp, Homo sapien
acccagtcttggcttgtagattagaaaacttta

SEQ ID NO: 865261 - DNA, 33 bp, Homo sapien
aactctttttctatgaggtttatttcagacagg

SEQ ID NO: 865262 - DNA, 33 bp, Homo sapien
aactctttttctatgatgtttatttcagacagg

SEQ ID NO: 865263 - DNA, 33 bp, Homo sapien
ctgctataacaaaataccatgaactgagtagct

SEQ ID NO: 865264 - DNA, 33 bp, Homo sapien
ctgctataacaaaatatcatgaactgagtagct

SEQ ID NO: 865265 - DNA, 33 bp, Homo sapien
ttcaaggtgagtttgccgagtaggagtgatgta

SEQ ID NO: 865266 - DNA, 33 bp, Homo sapien
ttcaaggtgagtttgctgagtaggagtgatgta

SEQ ID NO: 865267 - DNA, 33 bp, Homo sapien
gggattatagggaataaaattcgagaggagatt

SEQ ID NO: 865268 - DNA, 33 bp, Homo sapien
gggattatagggaatacaattcgagaggagatt

SEQ ID NO: 865269 - DNA, 33 bp, Homo sapien
actaatgcaattccataaccatttggagaaatc

SEQ ID NO: 865270 - DNA, 33 bp, Homo sapien
actaatgcaattccattaccatttggagaaatc

SEQ ID NO: 865271 - DNA, 33 bp, Homo sapien
cctcaaaccatggctacgaagttacctatgact

SEQ ID NO: 865272 - DNA, 33 bp, Homo sapien
cctcaaaccatggctatgaagttacctatgact

SEQ ID NO: 865273 - DNA, 33 bp, Homo sapien
gaaaggctgaaccctacagagtgcatggcatgg

SEQ ID NO: 865274 - DNA, 33 bp, Homo sapien
gaaaggctgaaccctagagagtgcatggcatgg

SEQ ID NO: 865275 - DNA, 33 bp, Homo sapien
tggttgcaatgaaaaaagcaagataaacattac

SEQ ID NO: 865276 - DNA, 33 bp, Homo sapien
tggttgcaatgaaaaaggcaagataaacattac

SEQ ID NO: 865277 - DNA, 33 bp, Homo sapien
tgccaagaagtgacaaatgtgagagggcagata

SEQ ID NO: 865278 - DNA, 33 bp, Homo sapien
tgccaagaagtgacaagtgtgagagggcagata

SEQ ID NO: 865279 - DNA, 33 bp, Homo sapien
aaagctgggttaaatccgaagtatcagggtcag

SEQ ID NO: 865280 - DNA, 33 bp, Homo sapien
aaagctgggttaaatctgaagtatcagggtcag

SEQ ID NO: 865281 - DNA, 33 bp, Homo sapien
gaaaccttatcatatcgcacagctttctccttc

SEQ ID NO: 865282 - DNA, 33 bp, Homo sapien
gaaaccttatcatatctcacagctttctccttc

SEQ ID NO: 865283 - DNA, 33 bp, Homo sapien
cagtagaccagagaccaagactgtcccctttcc

SEQ ID NO: 865284 - DNA, 33 bp, Homo sapien
cagtagaccagagacccagactgtcccctttcc

SEQ ID NO: 865285 - DNA, 33 bp, Homo sapien
aaatgtttggctggaacagattaaatattccgt

SEQ ID NO: 865286 - DNA, 33 bp, Homo sapien
aaatgtttggctggaatagattaaatattccgt

SEQ ID NO: 865287 - DNA, 33 bp, Homo sapien
gaagtccacaagagacaatcaggcttccactgg

SEQ ID NO: 865288 - DNA, 33 bp, Homo sapien
gaagtccacaagagacgatcaggcttccactgg

SEQ ID NO: 865289 - DNA, 33 bp, Homo sapien
gtcttaaactcaaacacgcagagagagccctga

SEQ ID NO: 865290 - DNA, 33 bp, Homo sapien
gtcttaaactcaaacatgcagagagagccctga

SEQ ID NO: 865291 - DNA, 33 bp, Homo sapien
tagtacctaactgaaacggtcttgagatcattc

SEQ ID NO: 865292 - DNA, 33 bp, Homo sapien
tagtacctaactgaaatggtcttgagatcattc

SEQ ID NO: 865293 - DNA, 33 bp, Homo sapien
gacaatatgttaagcactatagaggacaaagaa

SEQ ID NO: 865294 - DNA, 33 bp, Homo sapien
gacaatatgttaagcattatagaggacaaagaa

SEQ ID NO: 865295 - DNA, 33 bp, Homo sapien
tgtagaactgagaccagtgaagaggttattgca

SEQ ID NO: 865296 - DNA, 33 bp, Homo sapien
tgtagaactgagaccattgaagaggttattgca

SEQ ID NO: 865297 - DNA, 33 bp, Homo sapien
accatttgactcaacaacaccattactgggtat

SEQ ID NO: 865298 - DNA, 33 bp, Homo sapien
accatttgactcaacaccaccattactgggtat

SEQ ID NO: 865299 - DNA, 33 bp, Homo sapien
aattatagcatttttaagtttttatgcatcatt

SEQ ID NO: 865300 - DNA, 33 bp, Homo sapien
aattatagcatttttatgtttttatgcatcatt

SEQ ID NO: 865301 - DNA, 33 bp, Homo sapien
gttttgacacctccaaatgatctctacttttaa

SEQ ID NO: 865302 - DNA, 33 bp, Homo sapien
gttttgacacctccaattgatctctacttttaa

SEQ ID NO: 865303 - DNA, 33 bp, Homo sapien
catatcctacctcaaacgaagggatcctagata

SEQ ID NO: 865304 - DNA, 33 bp, Homo sapien
catatcctacctcaaatgaagggatcctagata

SEQ ID NO: 865305 - DNA, 33 bp, Homo sapien
cattctgacttgtagactcaaatattcaactac

SEQ ID NO: 865306 - DNA, 33 bp, Homo sapien
cattctgacttgtagattcaaatattcaactac

SEQ ID NO: 865307 - DNA, 33 bp, Homo sapien
ccttcaattgatcagaagagacccacacacatt

SEQ ID NO: 865308 - DNA, 33 bp, Homo sapien
ccttcaattgatcagatgagacccacacacatt

SEQ ID NO: 865309 - DNA, 33 bp, Homo sapien
agataaaaaggaactcagaataagatcaaagtc

SEQ ID NO: 865310 - DNA, 33 bp, Homo sapien
agataaaaaggaactccgaataagatcaaagtc

SEQ ID NO: 865311 - DNA, 33 bp, Homo sapien
aacataatcagggaaccatgtttttattaactc

SEQ ID NO: 865312 - DNA, 33 bp, Homo sapien
aacataatcagggaacgatgtttttattaactc

SEQ ID NO: 865313 - DNA, 33 bp, Homo sapien
accattgtagtaacaaacatcagacattactga

SEQ ID NO: 865314 - DNA, 33 bp, Homo sapien
accattgtagtaacaagcatcagacattactga

SEQ ID NO: 865315 - DNA, 33 bp, Homo sapien
tctgggccctcaccctcaaatgtccaagtgctg

SEQ ID NO: 865316 - DNA, 33 bp, Homo sapien
tctgggccctcacccttaaatgtccaagtgctg

SEQ ID NO: 865317 - DNA, 33 bp, Homo sapien
gaaatgctcaaaataaaggaagcccatattgca

SEQ ID NO: 865318 - DNA, 33 bp, Homo sapien
gaaatgctcaaaataatggaagcccatattgca

SEQ ID NO: 865319 - DNA, 33 bp, Homo sapien
cattcattttgcaagcactgaaagcaatctttt

SEQ ID NO: 865320 - DNA, 33 bp, Homo sapien
cattcattttgcaagcgctgaaagcaatctttt

SEQ ID NO: 865321 - DNA, 33 bp, Homo sapien
ggttgaacctctgctacatttttttttctagta

SEQ ID NO: 865322 - DNA, 33 bp, Homo sapien
ggttgaacctctgctatatttttttttctagta

SEQ ID NO: 865323 - DNA, 33 bp, Homo sapien
ctcaggaaacctagcacggactggtgcataaaa

SEQ ID NO: 865324 - DNA, 33 bp, Homo sapien
ctcaggaaacctagcatggactggtgcataaaa

SEQ ID NO: 865325 - DNA, 33 bp, Homo sapien
atctgtgtagttaatgcaaccagcagaacacta

SEQ ID NO: 865326 - DNA, 33 bp, Homo sapien
atctgtgtagttaatgtaaccagcagaacacta

SEQ ID NO: 865327 - DNA, 33 bp, Homo sapien
ttttctcaacactctaacaaagtgggcgacgta

SEQ ID NO: 865328 - DNA, 33 bp, Homo sapien
ttttctcaacactctagcaaagtgggcgacgta

SEQ ID NO: 865329 - DNA, 33 bp, Homo sapien
tgagactgtttcggcccactgtttattaccagt

SEQ ID NO: 865330 - DNA, 33 bp, Homo sapien
tgagactgtttcggcctactgtttattaccagt

SEQ ID NO: 865331 - DNA, 33 bp, Homo sapien
ctaacatacgtgtatgcatcttggaagtaagag

SEQ ID NO: 865332 - DNA, 33 bp, Homo sapien
ctaacatacgtgtatggatcttggaagtaagag

SEQ ID NO: 865333 - DNA, 33 bp, Homo sapien
tctgaaagcaagtttaactaggaaatcgacatc

SEQ ID NO: 865334 - DNA, 33 bp, Homo sapien
tctgaaagcaagtttatctaggaaatcgacatc

SEQ ID NO: 865335 - DNA, 33 bp, Homo sapien
ataatgaacatgtgtaacccaaattaagtaata

SEQ ID NO: 865336 - DNA, 33 bp, Homo sapien
ataatgaacatgtgtagcccaaattaagtaata

SEQ ID NO: 865337 - DNA, 33 bp, Homo sapien
ttaagaataatttcagaattcagagctgtaggc

SEQ ID NO: 865338 - DNA, 33 bp, Homo sapien
ttaagaataatttcaggattcagagctgtaggc

SEQ ID NO: 865339 - DNA, 33 bp, Homo sapien
tcaaaatatggcaaagaactatattctaagtaa

SEQ ID NO: 865340 - DNA, 33 bp, Homo sapien
tcaaaatatggcaaaggactatattctaagtaa

SEQ ID NO: 865341 - DNA, 33 bp, Homo sapien
agccctagtggattaacatacgaagataaaaga

SEQ ID NO: 865342 - DNA, 33 bp, Homo sapien
agccctagtggattaatatacgaagataaaaga

SEQ ID NO: 865343 - DNA, 33 bp, Homo sapien
cctcttttttaatgccactaatgcccatattta

SEQ ID NO: 865344 - DNA, 33 bp, Homo sapien
cctcttttttaatgccgctaatgcccatattta

SEQ ID NO: 865345 - DNA, 33 bp, Homo sapien
atgtcctaccaaagagaacgaaatgagaaatgc

SEQ ID NO: 865346 - DNA, 33 bp, Homo sapien
atgtcctaccaaagaggacgaaatgagaaatgc

SEQ ID NO: 865347 - DNA, 33 bp, Homo sapien
accatatcagccaaaactttaagctaaaacaaa

SEQ ID NO: 865348 - DNA, 33 bp, Homo sapien
accatatcagccaaaattttaagctaaaacaaa

SEQ ID NO: 865349 - DNA, 33 bp, Homo sapien
actgttttccctggccaatatggttatggaatc

SEQ ID NO: 865350 - DNA, 33 bp, Homo sapien
actgttttccctggccgatatggttatggaatc

SEQ ID NO: 865351 - DNA, 33 bp, Homo sapien
gaacgtattatgtgccagacactatttgaaatg

SEQ ID NO: 865352 - DNA, 33 bp, Homo sapien
gaacgtattatgtgccggacactatttgaaatg

SEQ ID NO: 865353 - DNA, 33 bp, Homo sapien
cttgagttgccatgagaactgactgaaaacatc

SEQ ID NO: 865354 - DNA, 33 bp, Homo sapien
cttgagttgccatgaggactgactgaaaacatc

SEQ ID NO: 865355 - DNA, 33 bp, Homo sapien
tgttcttctccaaaaaagcatctttatgaaaga

SEQ ID NO: 865356 - DNA, 33 bp, Homo sapien
tgttcttctccaaaaaggcatctttatgaaaga

SEQ ID NO: 865357 - DNA, 33 bp, Homo sapien
tctgatgtttctattaactgtgattttctttaa

SEQ ID NO: 865358 - DNA, 33 bp, Homo sapien
tctgatgtttctattagctgtgattttctttaa

SEQ ID NO: 865359 - DNA, 33 bp, Homo sapien
tttactattgctatatctctttcctcattgacc

SEQ ID NO: 865360 - DNA, 33 bp, Homo sapien
tttactattgctatatgtctttcctcattgacc

SEQ ID NO: 865361 - DNA, 33 bp, Homo sapien
atttcgtttcagtagaaaaggacactgttcaat

SEQ ID NO: 865362 - DNA, 33 bp, Homo sapien
atttcgtttcagtagacaaggacactgttcaat

SEQ ID NO: 865363 - DNA, 33 bp, Homo sapien
gattctgtgttaaatacgctggctagagaagac

SEQ ID NO: 865364 - DNA, 33 bp, Homo sapien
gattctgtgttaaatatgctggctagagaagac

SEQ ID NO: 865365 - DNA, 33 bp, Homo sapien
tgggggcagaaaataaattatatggacaataag

SEQ ID NO: 865366 - DNA, 33 bp, Homo sapien
tgggggcagaaaataatttatatggacaataag

SEQ ID NO: 865367 - DNA, 33 bp, Homo sapien
tgtgcacacacttgcaaagaaattatatttgga

SEQ ID NO: 865368 - DNA, 33 bp, Homo sapien
tgtgcacacacttgcagagaaattatatttgga

SEQ ID NO: 865369 - DNA, 33 bp, Homo sapien
tatgatctctcaaatcactagaaaagatgtcgg

SEQ ID NO: 865370 - DNA, 33 bp, Homo sapien
tatgatctctcaaatccctagaaaagatgtcgg

SEQ ID NO: 865371 - DNA, 33 bp, Homo sapien
gagaaagatgaaaggaaatgaacagtcagtata

SEQ ID NO: 865372 - DNA, 33 bp, Homo sapien
gagaaagatgaaaggatatgaacagtcagtata

SEQ ID NO: 865373 - DNA, 33 bp, Homo sapien
atcttaagcctgaactcaaataccatgaactgt

SEQ ID NO: 865374 - DNA, 33 bp, Homo sapien
atcttaagcctgaactgaaataccatgaactgt

SEQ ID NO: 865375 - DNA, 33 bp, Homo sapien
ctctcaccagccctcaaccaaaactactacagt

SEQ ID NO: 865376 - DNA, 33 bp, Homo sapien
ctctcaccagccctcagccaaaactactacagt

SEQ ID NO: 865377 - DNA, 33 bp, Homo sapien
aggtaacacatccatacgtgtcagtagttagaa

SEQ ID NO: 865378 - DNA, 33 bp, Homo sapien
aggtaacacatccataggtgtcagtagttagaa

SEQ ID NO: 865379 - DNA, 33 bp, Homo sapien
tctatgcagtttagtaaatattctatacacatc

SEQ ID NO: 865380 - DNA, 33 bp, Homo sapien
tctatgcagtttagtacatattctatacacatc

SEQ ID NO: 865381 - DNA, 33 bp, Homo sapien
tttatcgtttataactcagatttgaaaaggttt

SEQ ID NO: 865382 - DNA, 33 bp, Homo sapien
tttatcgtttataactgagatttgaaaaggttt

SEQ ID NO: 865383 - DNA, 33 bp, Homo sapien
cagacagacaggaagaaatagaatatgaagaac

SEQ ID NO: 865384 - DNA, 33 bp, Homo sapien
cagacagacaggaagagatagaatatgaagaac

SEQ ID NO: 865385 - DNA, 33 bp, Homo sapien
ttgaaatctaactagaaaaattccattatgttt

SEQ ID NO: 865386 - DNA, 33 bp, Homo sapien
ttgaaatctaactagacaaattccattatgttt

SEQ ID NO: 865387 - DNA, 33 bp, Homo sapien
catatcttttttgaccacaatggtatgatacta

SEQ ID NO: 865388 - DNA, 33 bp, Homo sapien
catatcttttttgacctcaatggtatgatacta

SEQ ID NO: 865389 - DNA, 33 bp, Homo sapien
aatttaaaagtcgtgacctttaacaatgaacga

SEQ ID NO: 865390 - DNA, 33 bp, Homo sapien
aatttaaaagtcgtgatctttaacaatgaacga

SEQ ID NO: 865391 - DNA, 33 bp, Homo sapien
ttttgttcaagggtccactgtacatacatacat

SEQ ID NO: 865392 - DNA, 33 bp, Homo sapien
ttttgttcaagggtccgctgtacatacatacat

SEQ ID NO: 865393 - DNA, 33 bp, Homo sapien
ggcacgtaaacatgaacacaggaggcagaattt

SEQ ID NO: 865394 - DNA, 33 bp, Homo sapien
ggcacgtaaacatgaatacaggaggcagaattt

SEQ ID NO: 865395 - DNA, 33 bp, Homo sapien
gacctagaaaactgtcaagatgctttttcagtc

SEQ ID NO: 865396 - DNA, 33 bp, Homo sapien
gacctagaaaactgtcgagatgctttttcagtc

SEQ ID NO: 865397 - DNA, 33 bp, Homo sapien
ttggagctagttttccacatataattgtaatag

SEQ ID NO: 865398 - DNA, 33 bp, Homo sapien
ttggagctagttttcctcatataattgtaatag

SEQ ID NO: 865399 - DNA, 33 bp, Homo sapien
tcaaaatagcttaagaaaaaaatgagactgcat

SEQ ID NO: 865400 - DNA, 33 bp, Homo sapien
tcaaaatagcttaagagaaaaatgagactgcat

SEQ ID NO: 865401 - DNA, 33 bp, Homo sapien
atgacttcaacactcacataaaataaaatatta

SEQ ID NO: 865402 - DNA, 33 bp, Homo sapien
atgacttcaacactcagataaaataaaatatta

SEQ ID NO: 865403 - DNA, 33 bp, Homo sapien
gacaccatgtttctataagacagtgagcattct

SEQ ID NO: 865404 - DNA, 33 bp, Homo sapien
gacaccatgtttctatcagacagtgagcattct

SEQ ID NO: 865405 - DNA, 33 bp, Homo sapien
ttgagtttctgtcttacgagtgggaagcacttt

SEQ ID NO: 865406 - DNA, 33 bp, Homo sapien
ttgagtttctgtcttatgagtgggaagcacttt

SEQ ID NO: 865407 - DNA, 33 bp, Homo sapien
tttgctccctctattacggtgtagccctctagg

SEQ ID NO: 865408 - DNA, 33 bp, Homo sapien
tttgctccctctattatggtgtagccctctagg

SEQ ID NO: 865409 - DNA, 33 bp, Homo sapien
aaaattatgaataaaaatgtcaccaaaatggcc

SEQ ID NO: 865410 - DNA, 33 bp, Homo sapien
aaaattatgaataaaactgtcaccaaaatggcc

SEQ ID NO: 865411 - DNA, 33 bp, Homo sapien
atactggagaatacaacgtcaaataaatataca

SEQ ID NO: 865412 - DNA, 33 bp, Homo sapien
atactggagaatacaatgtcaaataaatataca

SEQ ID NO: 865413 - DNA, 33 bp, Homo sapien
acaagaaatttggcagaaaggctcatgctacag

SEQ ID NO: 865414 - DNA, 33 bp, Homo sapien
acaagaaatttggcaggaaggctcatgctacag

SEQ ID NO: 865415 - DNA, 33 bp, Homo sapien
agggatgcataaaatacgtctggttcacttgac

SEQ ID NO: 865416 - DNA, 33 bp, Homo sapien
agggatgcataaaatatgtctggttcacttgac

SEQ ID NO: 865417 - DNA, 33 bp, Homo sapien
ttatagcactacttgaggagcattataaaacaa

SEQ ID NO: 865418 - DNA, 33 bp, Homo sapien
ttatagcactacttgatgagcattataaaacaa

SEQ ID NO: 865419 - DNA, 33 bp, Homo sapien
gtaagatagggatcacagtacagcttcttcccc

SEQ ID NO: 865420 - DNA, 33 bp, Homo sapien
gtaagatagggatcactgtacagcttcttcccc

SEQ ID NO: 865421 - DNA, 33 bp, Homo sapien
gcagaaaagaattaaaactcgagatctagtaat

SEQ ID NO: 865422 - DNA, 33 bp, Homo sapien
gcagaaaagaattaaacctcgagatctagtaat

SEQ ID NO: 865423 - DNA, 33 bp, Homo sapien
gtctaatattttgaaagtggtctccaaaagtca

SEQ ID NO: 865424 - DNA, 33 bp, Homo sapien
gtctaatattttgaaattggtctccaaaagtca

SEQ ID NO: 865425 - DNA, 33 bp, Homo sapien
tctgagtcagtcttgagccatgctggagaggaa

SEQ ID NO: 865426 - DNA, 33 bp, Homo sapien
tctgagtcagtcttgatccatgctggagaggaa

SEQ ID NO: 865427 - DNA, 33 bp, Homo sapien
ctgttattattcagaacgccaaagctgtttgaa

SEQ ID NO: 865428 - DNA, 33 bp, Homo sapien
ctgttattattcagaatgccaaagctgtttgaa

SEQ ID NO: 865429 - DNA, 33 bp, Homo sapien
gatgagactactttgccgacctctaatgaaata

SEQ ID NO: 865430 - DNA, 33 bp, Homo sapien
gatgagactactttgctgacctctaatgaaata

SEQ ID NO: 865431 - DNA, 33 bp, Homo sapien
atacaattagatctaaacagccagagtaacatg

SEQ ID NO: 865432 - DNA, 33 bp, Homo sapien
atacaattagatctaagcagccagagtaacatg

SEQ ID NO: 865433 - DNA, 33 bp, Homo sapien
gctccttacattcccaggctctagatcctaact

SEQ ID NO: 865434 - DNA, 33 bp, Homo sapien
gctccttacattcccatgctctagatcctaact

SEQ ID NO: 865435 - DNA, 33 bp, Homo sapien
aggacccaaactggaaatggagatagctgagat

SEQ ID NO: 865436 - DNA, 33 bp, Homo sapien
aggacccaaactggaagtggagatagctgagat

SEQ ID NO: 865437 - DNA, 33 bp, Homo sapien
ttgatccatcacaatcaagtaggctttaaggct

SEQ ID NO: 865438 - DNA, 33 bp, Homo sapien
ttgatccatcacaatctagtaggctttaaggct

SEQ ID NO: 865439 - DNA, 33 bp, Homo sapien
tgaagtagagtggagacggaaagcactagggct

SEQ ID NO: 865440 - DNA, 33 bp, Homo sapien
tgaagtagagtggagatggaaagcactagggct

SEQ ID NO: 865441 - DNA, 33 bp, Homo sapien
tgaaactggagttccacgctagattatttcctt

SEQ ID NO: 865442 - DNA, 33 bp, Homo sapien
tgaaactggagttccatgctagattatttcctt

SEQ ID NO: 865443 - DNA, 33 bp, Homo sapien
tctgtaaatcgaacacacaaattgaaatgagaa

SEQ ID NO: 865444 - DNA, 33 bp, Homo sapien
tctgtaaatcgaacacgcaaattgaaatgagaa

SEQ ID NO: 865445 - DNA, 33 bp, Homo sapien
aagtctgtctgatgaaaagatatttcagggaat

SEQ ID NO: 865446 - DNA, 33 bp, Homo sapien
aagtctgtctgatgaagagatatttcagggaat

SEQ ID NO: 865447 - DNA, 33 bp, Homo sapien
taggtttttggacacactgctcaccaagacatt

SEQ ID NO: 865448 - DNA, 33 bp, Homo sapien
taggtttttggacacattgctcaccaagacatt

SEQ ID NO: 865449 - DNA, 33 bp, Homo sapien
aaattcttaatagctgaataactgaatagcaga

SEQ ID NO: 865450 - DNA, 33 bp, Homo sapien
aaattcttaatagctggataactgaatagcaga

SEQ ID NO: 865451 - DNA, 33 bp, Homo sapien
catcaggtttacttatcacctgcaaaataaagt

SEQ ID NO: 865452 - DNA, 33 bp, Homo sapien
catcaggtttacttatgacctgcaaaataaagt

SEQ ID NO: 865453 - DNA, 33 bp, Homo sapien
caattttacaatgttacagtaagcttcacaagc

SEQ ID NO: 865454 - DNA, 33 bp, Homo sapien
caattttacaatgttatagtaagcttcacaagc

SEQ ID NO: 865455 - DNA, 33 bp, Homo sapien
agctgaggtatgctggaaaaaggcttcaaggca

SEQ ID NO: 865456 - DNA, 33 bp, Homo sapien
agctgaggtatgctgggaaaaggcttcaaggca

SEQ ID NO: 865457 - DNA, 33 bp, Homo sapien
atttaaaagcagtctgcaattaaccattgaata

SEQ ID NO: 865458 - DNA, 33 bp, Homo sapien
atttaaaagcagtctgtaattaaccattgaata

SEQ ID NO: 865459 - DNA, 33 bp, Homo sapien
ttttaggatgaaagaagtagagggtgaatgata

SEQ ID NO: 865460 - DNA, 33 bp, Homo sapien
ttttaggatgaaagaattagagggtgaatgata

SEQ ID NO: 865461 - DNA, 33 bp, Homo sapien
tatattgtgatttagacagaaggatgattttgg

SEQ ID NO: 865462 - DNA, 33 bp, Homo sapien
tatattgtgatttagatagaaggatgattttgg

SEQ ID NO: 865463 - DNA, 33 bp, Homo sapien
aagtcctgattgtccaacacaagctaggtggga

SEQ ID NO: 865464 - DNA, 33 bp, Homo sapien
aagtcctgattgtccagcacaagctaggtggga

SEQ ID NO: 865465 - DNA, 33 bp, Homo sapien
aaattgtggtaagaagaatccagtagcatgaac

SEQ ID NO: 865466 - DNA, 33 bp, Homo sapien
aaattgtggtaagaaggatccagtagcatgaac

SEQ ID NO: 865467 - DNA, 33 bp, Homo sapien
tcaatattcctatctgccaactggaagcagtta

SEQ ID NO: 865468 - DNA, 33 bp, Homo sapien
tcaatattcctatctggcaactggaagcagtta

SEQ ID NO: 865469 - DNA, 33 bp, Homo sapien
ggccaggaattgaccaatggaaaaacaagaggt

SEQ ID NO: 865470 - DNA, 33 bp, Homo sapien
ggccaggaattgaccagtggaaaaacaagaggt

SEQ ID NO: 865471 - DNA, 33 bp, Homo sapien
tcctgaataggcaccaaataaaatcagaagaca

SEQ ID NO: 865472 - DNA, 33 bp, Homo sapien
tcctgaataggcaccagataaaatcagaagaca

SEQ ID NO: 865473 - DNA, 33 bp, Homo sapien
aaaaccagcagttacaaggtaagagttgttcta

SEQ ID NO: 865474 - DNA, 33 bp, Homo sapien
aaaaccagcagttacagggtaagagttgttcta

SEQ ID NO: 865475 - DNA, 33 bp, Homo sapien
aatgctaggtgtgatacacaaaaccagcagtta

SEQ ID NO: 865476 - DNA, 33 bp, Homo sapien
aatgctaggtgtgatatacaaaaccagcagtta

SEQ ID NO: 865477 - DNA, 33 bp, Homo sapien
taagtaaaaaattatcacaagaacttctttagt

SEQ ID NO: 865478 - DNA, 33 bp, Homo sapien
taagtaaaaaattatcgcaagaacttctttagt

SEQ ID NO: 865479 - DNA, 33 bp, Homo sapien
tgcgccaacctagtagaaactattctaagtccc

SEQ ID NO: 865480 - DNA, 33 bp, Homo sapien
tgcgccaacctagtaggaactattctaagtccc

SEQ ID NO: 865481 - DNA, 33 bp, Homo sapien
ggtcaatgtgtgggcaaaaaaagcagactttgt

SEQ ID NO: 865482 - DNA, 33 bp, Homo sapien
ggtcaatgtgtgggcagaaaaagcagactttgt

SEQ ID NO: 865483 - DNA, 33 bp, Homo sapien
ctctaacaagacaggaactaaagagatttgcaa

SEQ ID NO: 865484 - DNA, 33 bp, Homo sapien
ctctaacaagacaggagctaaagagatttgcaa

SEQ ID NO: 865485 - DNA, 33 bp, Homo sapien
caggctgtacaaataaaattttgaagacagaag

SEQ ID NO: 865486 - DNA, 33 bp, Homo sapien
caggctgtacaaataagattttgaagacagaag

SEQ ID NO: 865487 - DNA, 33 bp, Homo sapien
aatcctatatatgtccactctaagttgggcttc

SEQ ID NO: 865488 - DNA, 33 bp, Homo sapien
aatcctatatatgtccgctctaagttgggcttc

SEQ ID NO: 865489 - DNA, 33 bp, Homo sapien
ataaaatttggaaaacacaggtgtatcaattat

SEQ ID NO: 865490 - DNA, 33 bp, Homo sapien
ataaaatttggaaaactcaggtgtatcaattat

SEQ ID NO: 865491 - DNA, 33 bp, Homo sapien
tgcattgttagaaatacgcactgaagccaaggc

SEQ ID NO: 865492 - DNA, 33 bp, Homo sapien
tgcattgttagaaatatgcactgaagccaaggc

SEQ ID NO: 865493 - DNA, 33 bp, Homo sapien
gactaagttttgaaacaaaaatgactaaaacat

SEQ ID NO: 865494 - DNA, 33 bp, Homo sapien
gactaagttttgaaacgaaaatgactaaaacat

SEQ ID NO: 865495 - DNA, 33 bp, Homo sapien
tgatcttttactgctacgtccaagagttaagat

SEQ ID NO: 865496 - DNA, 33 bp, Homo sapien
tgatcttttactgctatgtccaagagttaagat

SEQ ID NO: 865497 - DNA, 33 bp, Homo sapien
aaagaaaaacacagtcaaaaattggtatactat

SEQ ID NO: 865498 - DNA, 33 bp, Homo sapien
aaagaaaaacacagtcgaaaattggtatactat

SEQ ID NO: 865499 - DNA, 33 bp, Homo sapien
gaataaagacaaggtacgaatggggagaaagta

SEQ ID NO: 865500 - DNA, 33 bp, Homo sapien
gaataaagacaaggtatgaatggggagaaagta

SEQ ID NO: 865501 - DNA, 33 bp, Homo sapien
acataagcggaatcaggatttacctgatggagc

SEQ ID NO: 865502 - DNA, 33 bp, Homo sapien
acataagcggaatcagtatttacctgatggagc

SEQ ID NO: 865503 - DNA, 33 bp, Homo sapien
ccagcagatgctatgacgaaagctgagagcaga

SEQ ID NO: 865504 - DNA, 33 bp, Homo sapien
ccagcagatgctatgatgaaagctgagagcaga

SEQ ID NO: 865505 - DNA, 33 bp, Homo sapien
agtcacatgcaggcaggcctatgtctgattttg

SEQ ID NO: 865506 - DNA, 33 bp, Homo sapien
agtcacatgcaggcagtcctatgtctgattttg

SEQ ID NO: 865507 - DNA, 33 bp, Homo sapien
tagttcaagagagtcaataagtaccaaacctct

SEQ ID NO: 865508 - DNA, 33 bp, Homo sapien
tagttcaagagagtcagtaagtaccaaacctct

SEQ ID NO: 865509 - DNA, 33 bp, Homo sapien
caaaaaatgctttacaaaacatttagcctgttg

SEQ ID NO: 865510 - DNA, 33 bp, Homo sapien
caaaaaatgctttacagaacatttagcctgttg

SEQ ID NO: 865511 - DNA, 33 bp, Homo sapien
acatggtggatttacaatgaattgatttagata

SEQ ID NO: 865512 - DNA, 33 bp, Homo sapien
acatggtggatttacactgaattgatttagata

SEQ ID NO: 865513 - DNA, 33 bp, Homo sapien
atttctaagaagcttcactaagagagcaagttt

SEQ ID NO: 865514 - DNA, 33 bp, Homo sapien
atttctaagaagcttcgctaagagagcaagttt

SEQ ID NO: 865515 - DNA, 33 bp, Homo sapien
tataaagagttttagacaagtcgtaataaaact

SEQ ID NO: 865516 - DNA, 33 bp, Homo sapien
tataaagagttttagataagtcgtaataaaact

SEQ ID NO: 865517 - DNA, 33 bp, Homo sapien
agatatagtgaaagcacgtcttatctaaactgg

SEQ ID NO: 865518 - DNA, 33 bp, Homo sapien
agatatagtgaaagcaggtcttatctaaactgg

SEQ ID NO: 865519 - DNA, 33 bp, Homo sapien
gtgttcaccataaatcgcattttctgtacagca

SEQ ID NO: 865520 - DNA, 33 bp, Homo sapien
gtgttcaccataaatctcattttctgtacagca

SEQ ID NO: 865521 - DNA, 33 bp, Homo sapien
gtgaatgccaagtgaactgagactgacggtacc

SEQ ID NO: 865522 - DNA, 33 bp, Homo sapien
gtgaatgccaagtgaattgagactgacggtacc

SEQ ID NO: 865523 - DNA, 33 bp, Homo sapien
agtcctgtattcttaccgtaactcagaattaaa

SEQ ID NO: 865524 - DNA, 33 bp, Homo sapien
agtcctgtattcttactgtaactcagaattaaa

SEQ ID NO: 865525 - DNA, 33 bp, Homo sapien
ttgataatcattggccaagaaatgtattacaat

SEQ ID NO: 865526 - DNA, 33 bp, Homo sapien
ttgataatcattggccgagaaatgtattacaat

SEQ ID NO: 865527 - DNA, 33 bp, Homo sapien
actttgtgatgaacaaataggtctcttagctga

SEQ ID NO: 865528 - DNA, 33 bp, Homo sapien
actttgtgatgaacaagtaggtctcttagctga

SEQ ID NO: 865529 - DNA, 33 bp, Homo sapien
ttagctcatttaactccaattctcttgctcctg

SEQ ID NO: 865530 - DNA, 33 bp, Homo sapien
ttagctcatttaactctaattctcttgctcctg

SEQ ID NO: 865531 - DNA, 33 bp, Homo sapien
agaagatgtgatgatccagataaccatagccaa

SEQ ID NO: 865532 - DNA, 33 bp, Homo sapien
agaagatgtgatgatctagataaccatagccaa

SEQ ID NO: 865533 - DNA, 33 bp, Homo sapien
ttcattttaactatgacaaaagtggcggctgaa

SEQ ID NO: 865534 - DNA, 33 bp, Homo sapien
ttcattttaactatgataaaagtggcggctgaa

SEQ ID NO: 865535 - DNA, 33 bp, Homo sapien
gtttattgtcctcatacattttctgttatttta

SEQ ID NO: 865536 - DNA, 33 bp, Homo sapien
gtttattgtcctcatatattttctgttatttta

SEQ ID NO: 865537 - DNA, 33 bp, Homo sapien
attttccaagaaaatcgagacgctcagattatt

SEQ ID NO: 865538 - DNA, 33 bp, Homo sapien
attttccaagaaaatctagacgctcagattatt

SEQ ID NO: 865539 - DNA, 33 bp, Homo sapien
tacaatataatgtttgcaattagcttctaaata

SEQ ID NO: 865540 - DNA, 33 bp, Homo sapien
tacaatataatgtttggaattagcttctaaata

SEQ ID NO: 865541 - DNA, 33 bp, Homo sapien
ttttgaatgtggtcaacagttttaatgaatacc

SEQ ID NO: 865542 - DNA, 33 bp, Homo sapien
ttttgaatgtggtcaatagttttaatgaatacc

SEQ ID NO: 865543 - DNA, 33 bp, Homo sapien
acaggtggataacaaaatctctatactctgaag

SEQ ID NO: 865544 - DNA, 33 bp, Homo sapien
acaggtggataacaaactctctatactctgaag

SEQ ID NO: 865545 - DNA, 33 bp, Homo sapien
cctaggaaagccagccccgtggtccctctaaaa

SEQ ID NO: 865546 - DNA, 33 bp, Homo sapien
cctaggaaagccagcctcgtggtccctctaaaa

SEQ ID NO: 865547 - DNA, 33 bp, Homo sapien
ttcttacagttgatgaaattctaaaagctttta

SEQ ID NO: 865548 - DNA, 33 bp, Homo sapien
ttcttacagttgatgatattctaaaagctttta

SEQ ID NO: 865549 - DNA, 33 bp, Homo sapien
tacattctttgcaaaaaacccaggttgctgtgt

SEQ ID NO: 865550 - DNA, 33 bp, Homo sapien
tacattctttgcaaaagacccaggttgctgtgt

SEQ ID NO: 865551 - DNA, 33 bp, Homo sapien
atttctgctcattccaagttaacaaccatatta

SEQ ID NO: 865552 - DNA, 33 bp, Homo sapien
atttctgctcattccaggttaacaaccatatta

SEQ ID NO: 865553 - DNA, 33 bp, Homo sapien
accagccaaaataacacaaacacaccaacacaa

SEQ ID NO: 865554 - DNA, 33 bp, Homo sapien
accagccaaaataacagaaacacaccaacacaa

SEQ ID NO: 865555 - DNA, 33 bp, Homo sapien
tcacagataggatatgaaaatcaaaactctgag

SEQ ID NO: 865556 - DNA, 33 bp, Homo sapien
tcacagataggatatgcaaatcaaaactctgag

SEQ ID NO: 865557 - DNA, 33 bp, Homo sapien
gataataatatgtaacaacagctattgaaataa

SEQ ID NO: 865558 - DNA, 33 bp, Homo sapien
gataataatatgtaacgacagctattgaaataa

SEQ ID NO: 865559 - DNA, 33 bp, Homo sapien
gacttcataacaaaaacttcaaaagctattgca

SEQ ID NO: 865560 - DNA, 33 bp, Homo sapien
gacttcataacaaaaatttcaaaagctattgca

SEQ ID NO: 865561 - DNA, 33 bp, Homo sapien
ccctacagaagaaggacctcactattgaaagaa

SEQ ID NO: 865562 - DNA, 33 bp, Homo sapien
ccctacagaagaaggatctcactattgaaagaa

SEQ ID NO: 865563 - DNA, 33 bp, Homo sapien
aagtagatgcttttggccacattcccccaattt

SEQ ID NO: 865564 - DNA, 33 bp, Homo sapien
aagtagatgcttttgggcacattcccccaattt

SEQ ID NO: 865565 - DNA, 33 bp, Homo sapien
tggcacaggcagctacaacaaagaagcgggtaa

SEQ ID NO: 865566 - DNA, 33 bp, Homo sapien
tggcacaggcagctactacaaagaagcgggtaa

SEQ ID NO: 865567 - DNA, 33 bp, Homo sapien
cccctacagggaatgaagacttatgctagaatg

SEQ ID NO: 865568 - DNA, 33 bp, Homo sapien
cccctacagggaatgatgacttatgctagaatg

SEQ ID NO: 865569 - DNA, 33 bp, Homo sapien
gaaaaggacgctgagaaatcatgtagttttaaa

SEQ ID NO: 865570 - DNA, 33 bp, Homo sapien
gaaaaggacgctgagagatcatgtagttttaaa

SEQ ID NO: 865571 - DNA, 33 bp, Homo sapien
gataattgtaaagtacagcatcaaggaagactt

SEQ ID NO: 865572 - DNA, 33 bp, Homo sapien
gataattgtaaagtacggcatcaaggaagactt

SEQ ID NO: 865573 - DNA, 33 bp, Homo sapien
gagcttgtacctagaaaagaagatatcacacta

SEQ ID NO: 865574 - DNA, 33 bp, Homo sapien
gagcttgtacctagaagagaagatatcacacta

SEQ ID NO: 865575 - DNA, 33 bp, Homo sapien
cctataatgacaataacagctacttgggaggct

SEQ ID NO: 865576 - DNA, 33 bp, Homo sapien
cctataatgacaataagagctacttgggaggct

SEQ ID NO: 865577 - DNA, 33 bp, Homo sapien
tggagcctgattatagcatcacgtcaagataaa

SEQ ID NO: 865578 - DNA, 33 bp, Homo sapien
tggagcctgattataggatcacgtcaagataaa

SEQ ID NO: 865579 - DNA, 33 bp, Homo sapien
taactattggataccaagctttttacctgggtg

SEQ ID NO: 865580 - DNA, 33 bp, Homo sapien
taactattggataccaggctttttacctgggtg

SEQ ID NO: 865581 - DNA, 33 bp, Homo sapien
atggtgttgtctcaaccgagtaaaaatgctgca

SEQ ID NO: 865582 - DNA, 33 bp, Homo sapien
atggtgttgtctcaactgagtaaaaatgctgca

SEQ ID NO: 865583 - DNA, 33 bp, Homo sapien
caaaagttcaagtagagaattcagtttgagact

SEQ ID NO: 865584 - DNA, 33 bp, Homo sapien
caaaagttcaagtagataattcagtttgagact

SEQ ID NO: 865585 - DNA, 33 bp, Homo sapien
ctcctagtgtttcttacattagaactggctcct

SEQ ID NO: 865586 - DNA, 33 bp, Homo sapien
ctcctagtgtttcttatattagaactggctcct

SEQ ID NO: 865587 - DNA, 33 bp, Homo sapien
aggctaccttttcctccctactaagagactcct

SEQ ID NO: 865588 - DNA, 33 bp, Homo sapien
aggctaccttttcctcgctactaagagactcct

SEQ ID NO: 865589 - DNA, 33 bp, Homo sapien
attagaatttggagcaatatgtgtctggatgct

SEQ ID NO: 865590 - DNA, 33 bp, Homo sapien
attagaatttggagcagtatgtgtctggatgct

SEQ ID NO: 865591 - DNA, 33 bp, Homo sapien
caaaaatttcttaagtaacaggcaaaaaggtca

SEQ ID NO: 865592 - DNA, 33 bp, Homo sapien
caaaaatttcttaagtcacaggcaaaaaggtca

SEQ ID NO: 865593 - DNA, 33 bp, Homo sapien
cccaacagtctcccaaagtctttattcattcca

SEQ ID NO: 865594 - DNA, 33 bp, Homo sapien
cccaacagtctcccaacgtctttattcattcca

SEQ ID NO: 865595 - DNA, 33 bp, Homo sapien
tatgactgtaaaatgacactttggctgaaatgt

SEQ ID NO: 865596 - DNA, 33 bp, Homo sapien
tatgactgtaaaatgatactttggctgaaatgt

SEQ ID NO: 865597 - DNA, 33 bp, Homo sapien
cagctccccgcacaccacgttcaaatgattctc

SEQ ID NO: 865598 - DNA, 33 bp, Homo sapien
cagctccccgcacaccgcgttcaaatgattctc

SEQ ID NO: 865599 - DNA, 33 bp, Homo sapien
accacactcatttttcgagggtccaaatattcc

SEQ ID NO: 865600 - DNA, 33 bp, Homo sapien
accacactcatttttctagggtccaaatattcc

SEQ ID NO: 865601 - DNA, 33 bp, Homo sapien
attgtggctcacataaagaatcatcggaaggtc

SEQ ID NO: 865602 - DNA, 33 bp, Homo sapien
attgtggctcacataaggaatcatcggaaggtc

SEQ ID NO: 865603 - DNA, 33 bp, Homo sapien
ctaatagttttacggactcagaacttatattta

SEQ ID NO: 865604 - DNA, 33 bp, Homo sapien
ctaatagttttacggattcagaacttatattta

SEQ ID NO: 865605 - DNA, 33 bp, Homo sapien
tagctgcaaattctcaagcgggtttgtttggat

SEQ ID NO: 865606 - DNA, 33 bp, Homo sapien
tagctgcaaattctcaggcgggtttgtttggat

SEQ ID NO: 865607 - DNA, 33 bp, Homo sapien
ggttgcaaactctagaacctatgagataagctc

SEQ ID NO: 865608 - DNA, 33 bp, Homo sapien
ggttgcaaactctagaccctatgagataagctc

SEQ ID NO: 865609 - DNA, 33 bp, Homo sapien
tgtatagaagctgaaagaattcattaccagcaa

SEQ ID NO: 865610 - DNA, 33 bp, Homo sapien
tgtatagaagctgaaataattcattaccagcaa

SEQ ID NO: 865611 - DNA, 33 bp, Homo sapien
tatcatgcttaaactacatgaaacagaatagaa

SEQ ID NO: 865612 - DNA, 33 bp, Homo sapien
tatcatgcttaaactatatgaaacagaatagaa

SEQ ID NO: 865613 - DNA, 33 bp, Homo sapien
catttacacttgtttagctagcactaggacaat

SEQ ID NO: 865614 - DNA, 33 bp, Homo sapien
catttacacttgtttatctagcactaggacaat

SEQ ID NO: 865615 - DNA, 33 bp, Homo sapien
taacttggttgctccacaattatccataatttg

SEQ ID NO: 865616 - DNA, 33 bp, Homo sapien
taacttggttgctccagaattatccataatttg

SEQ ID NO: 865617 - DNA, 33 bp, Homo sapien
cagggtaatccagcaaaataatataatgccctg

SEQ ID NO: 865618 - DNA, 33 bp, Homo sapien
cagggtaatccagcaagataatataatgccctg

SEQ ID NO: 865619 - DNA, 33 bp, Homo sapien
ggtttgcttccataaaataccaagaaagcagaa

SEQ ID NO: 865620 - DNA, 33 bp, Homo sapien
ggtttgcttccataaagtaccaagaaagcagaa

SEQ ID NO: 865621 - DNA, 33 bp, Homo sapien
acagtattttatttcaccacagatatatgttgg

SEQ ID NO: 865622 - DNA, 33 bp, Homo sapien
acagtattttatttcatcacagatatatgttgg

SEQ ID NO: 865623 - DNA, 33 bp, Homo sapien
aagctgattacctccaaagacttgctaattatt

SEQ ID NO: 865624 - DNA, 33 bp, Homo sapien
aagctgattacctccacagacttgctaattatt

SEQ ID NO: 865625 - DNA, 33 bp, Homo sapien
tttaatttacatttcccgaatcactgttcattc

SEQ ID NO: 865626 - DNA, 33 bp, Homo sapien
tttaatttacatttcctgaatcactgttcattc

SEQ ID NO: 865627 - DNA, 33 bp, Homo sapien
acatcaaaaagttcccaaaattcaataataaga

SEQ ID NO: 865628 - DNA, 33 bp, Homo sapien
acatcaaaaagttccccaaattcaataataaga

SEQ ID NO: 865629 - DNA, 33 bp, Homo sapien
ttaaaatgtccttagactatctacgtctatttc

SEQ ID NO: 865630 - DNA, 33 bp, Homo sapien
ttaaaatgtccttagattatctacgtctatttc

SEQ ID NO: 865631 - DNA, 33 bp, Homo sapien
aagggagaaataggcaagacggattagagggag

SEQ ID NO: 865632 - DNA, 33 bp, Homo sapien
aagggagaaataggcaggacggattagagggag

SEQ ID NO: 865633 - DNA, 33 bp, Homo sapien
aatacatggaacagccaagtaatctggactaag

SEQ ID NO: 865634 - DNA, 33 bp, Homo sapien
aatacatggaacagcccagtaatctggactaag

SEQ ID NO: 865635 - DNA, 33 bp, Homo sapien
aacagtgaaggccctccagcacagccgctgttt

SEQ ID NO: 865636 - DNA, 33 bp, Homo sapien
aacagtgaaggccctctagcacagccgctgttt

SEQ ID NO: 865637 - DNA, 33 bp, Homo sapien
caccctgcataggatacggagagttgccttcta

SEQ ID NO: 865638 - DNA, 33 bp, Homo sapien
caccctgcataggatatggagagttgccttcta

SEQ ID NO: 865639 - DNA, 33 bp, Homo sapien
gagtccaggtcaaaaacggcagcagctgctgag

SEQ ID NO: 865640 - DNA, 33 bp, Homo sapien
gagtccaggtcaaaaatggcagcagctgctgag

SEQ ID NO: 865641 - DNA, 33 bp, Homo sapien
aggtgtttactacctcaatctacatatttgtga

SEQ ID NO: 865642 - DNA, 33 bp, Homo sapien
aggtgtttactacctcgatctacatatttgtga

SEQ ID NO: 865643 - DNA, 33 bp, Homo sapien
aacaagaacaatgtaaataatgcggcactttgt

SEQ ID NO: 865644 - DNA, 33 bp, Homo sapien
aacaagaacaatgtaagtaatgcggcactttgt

SEQ ID NO: 865645 - DNA, 33 bp, Homo sapien
gtacagaaggaaatgaagactaaactgcaacat

SEQ ID NO: 865646 - DNA, 33 bp, Homo sapien
gtacagaaggaaatgaggactaaactgcaacat

SEQ ID NO: 865647 - DNA, 33 bp, Homo sapien
tttagagtaagggtgacggagaatatcagttca

SEQ ID NO: 865648 - DNA, 33 bp, Homo sapien
tttagagtaagggtgatggagaatatcagttca

SEQ ID NO: 865649 - DNA, 33 bp, Homo sapien
tactcatgtggccacaactggaacaccattccc

SEQ ID NO: 865650 - DNA, 33 bp, Homo sapien
tactcatgtggccacagctggaacaccattccc

SEQ ID NO: 865651 - DNA, 33 bp, Homo sapien
agcattgtgatgataactgcatttaaagttatt

SEQ ID NO: 865652 - DNA, 33 bp, Homo sapien
agcattgtgatgataattgcatttaaagttatt

SEQ ID NO: 865653 - DNA, 33 bp, Homo sapien
atttaagggcagacaaagatttcctatttcctt

SEQ ID NO: 865654 - DNA, 33 bp, Homo sapien
atttaagggcagacaaggatttcctatttcctt

SEQ ID NO: 865655 - DNA, 33 bp, Homo sapien
atctgctatgacactagatgcaatcacactgag

SEQ ID NO: 865656 - DNA, 33 bp, Homo sapien
atctgctatgacactatatgcaatcacactgag

SEQ ID NO: 865657 - DNA, 33 bp, Homo sapien
acatacaagatcttcaatgaaaacacagtgaat

SEQ ID NO: 865658 - DNA, 33 bp, Homo sapien
acatacaagatcttcagtgaaaacacagtgaat

SEQ ID NO: 865659 - DNA, 33 bp, Homo sapien
tctctcttctttaaacaatactcagcttcaaat

SEQ ID NO: 865660 - DNA, 33 bp, Homo sapien
tctctcttctttaaacgatactcagcttcaaat

SEQ ID NO: 865661 - DNA, 33 bp, Homo sapien
cattgagatgatgaagccttaacttgttgcttt

SEQ ID NO: 865662 - DNA, 33 bp, Homo sapien
cattgagatgatgaaggcttaacttgttgcttt

SEQ ID NO: 865663 - DNA, 33 bp, Homo sapien
actctgctgttgaccacaccttcagcagacgtg

SEQ ID NO: 865664 - DNA, 33 bp, Homo sapien
actctgctgttgaccagaccttcagcagacgtg

SEQ ID NO: 865665 - DNA, 33 bp, Homo sapien
gtatatatttacagtgcacaaagtgatattttg

SEQ ID NO: 865666 - DNA, 33 bp, Homo sapien
gtatatatttacagtgtacaaagtgatattttg

SEQ ID NO: 865667 - DNA, 33 bp, Homo sapien
cttttgcccaagactacgcttcttgcaacctgg

SEQ ID NO: 865668 - DNA, 33 bp, Homo sapien
cttttgcccaagactatgcttcttgcaacctgg

SEQ ID NO: 865669 - DNA, 33 bp, Homo sapien
acagctatactcaacacgatcaggtgtactgag

SEQ ID NO: 865670 - DNA, 33 bp, Homo sapien
acagctatactcaacatgatcaggtgtactgag

SEQ ID NO: 865671 - DNA, 33 bp, Homo sapien
gttctgagttagaaaacaatggaaacacaaata

SEQ ID NO: 865672 - DNA, 33 bp, Homo sapien
gttctgagttagaaaataatggaaacacaaata

SEQ ID NO: 865673 - DNA, 33 bp, Homo sapien
ggaggtcaatacatggacaggaagatatttcaa

SEQ ID NO: 865674 - DNA, 33 bp, Homo sapien
ggaggtcaatacatgggcaggaagatatttcaa

SEQ ID NO: 865675 - DNA, 33 bp, Homo sapien
aatcacttaggcttgccatttagccttcagcgt

SEQ ID NO: 865676 - DNA, 33 bp, Homo sapien
aatcacttaggcttgctatttagccttcagcgt

SEQ ID NO: 865677 - DNA, 33 bp, Homo sapien
tcctatgctaaataaaccgctactatgtccatg

SEQ ID NO: 865678 - DNA, 33 bp, Homo sapien
tcctatgctaaataaatcgctactatgtccatg

SEQ ID NO: 865679 - DNA, 33 bp, Homo sapien
acccattggtttctaacgatactggccttttct

SEQ ID NO: 865680 - DNA, 33 bp, Homo sapien
acccattggtttctaatgatactggccttttct

SEQ ID NO: 865681 - DNA, 33 bp, Homo sapien
atgattatttgagtttcaaaattttacaaatat

SEQ ID NO: 865682 - DNA, 33 bp, Homo sapien
atgattatttgagtttgaaaattttacaaatat

SEQ ID NO: 865683 - DNA, 33 bp, Homo sapien
acttggagtttctactcacactgacctctcttc

SEQ ID NO: 865684 - DNA, 33 bp, Homo sapien
acttggagtttctactgacactgacctctcttc

SEQ ID NO: 865685 - DNA, 33 bp, Homo sapien
cttggcagtaggcatagataactttgcttttgt

SEQ ID NO: 865686 - DNA, 33 bp, Homo sapien
cttggcagtaggcatatataactttgcttttgt

SEQ ID NO: 865687 - DNA, 33 bp, Homo sapien
tcttgagaaaattgcaatgaagtagcaggacat

SEQ ID NO: 865688 - DNA, 33 bp, Homo sapien
tcttgagaaaattgcactgaagtagcaggacat

SEQ ID NO: 865689 - DNA, 33 bp, Homo sapien
tggaattggttagaaaagttgtatctgacaaaa

SEQ ID NO: 865690 - DNA, 33 bp, Homo sapien
tggaattggttagaaacgttgtatctgacaaaa

SEQ ID NO: 865691 - DNA, 33 bp, Homo sapien
catacaaattcagacaccatttgccaacaacta

SEQ ID NO: 865692 - DNA, 33 bp, Homo sapien
catacaaattcagacatcatttgccaacaacta

SEQ ID NO: 865693 - DNA, 33 bp, Homo sapien
agtttattttgtaggcactaccagtcaattgca

SEQ ID NO: 865694 - DNA, 33 bp, Homo sapien
agtttattttgtaggcgctaccagtcaattgca

SEQ ID NO: 865695 - DNA, 33 bp, Homo sapien
tccctggattggaaaggcatattcttgaaaagc

SEQ ID NO: 865696 - DNA, 33 bp, Homo sapien
tccctggattggaaagtcatattcttgaaaagc

SEQ ID NO: 865697 - DNA, 33 bp, Homo sapien
ctatgagggcatataagaaatcctgttttatat

SEQ ID NO: 865698 - DNA, 33 bp, Homo sapien
ctatgagggcatataataaatcctgttttatat

SEQ ID NO: 865699 - DNA, 33 bp, Homo sapien
tggatgtagaacccacacagatacagatggctg

SEQ ID NO: 865700 - DNA, 33 bp, Homo sapien
tggatgtagaacccacgcagatacagatggctg

SEQ ID NO: 865701 - DNA, 33 bp, Homo sapien
ttaatgtacagaagtcaagaaaagctgagttca

SEQ ID NO: 865702 - DNA, 33 bp, Homo sapien
ttaatgtacagaagtccagaaaagctgagttca

SEQ ID NO: 865703 - DNA, 33 bp, Homo sapien
atatcatctcttgcccaataaaatgcttgggga

SEQ ID NO: 865704 - DNA, 33 bp, Homo sapien
atatcatctcttgcccgataaaatgcttgggga

SEQ ID NO: 865705 - DNA, 33 bp, Homo sapien
aggctatgtcattcagaacttgtttatatgata

SEQ ID NO: 865706 - DNA, 33 bp, Homo sapien
aggctatgtcattcaggacttgtttatatgata

SEQ ID NO: 865707 - DNA, 33 bp, Homo sapien
accccagtatcgaggtgacattcactaccttaa

SEQ ID NO: 865708 - DNA, 33 bp, Homo sapien
accccagtatcgaggttacattcactaccttaa

SEQ ID NO: 865709 - DNA, 33 bp, Homo sapien
cagattcatttgatacaaatctttggagtttcc

SEQ ID NO: 865710 - DNA, 33 bp, Homo sapien
cagattcatttgatactaatctttggagtttcc

SEQ ID NO: 865711 - DNA, 33 bp, Homo sapien
tttctctttggagttcaatctcatatttaattc

SEQ ID NO: 865712 - DNA, 33 bp, Homo sapien
tttctctttggagttctatctcatatttaattc

SEQ ID NO: 865713 - DNA, 33 bp, Homo sapien
gaaattggactttatcaattagggattattaac

SEQ ID NO: 865714 - DNA, 33 bp, Homo sapien
gaaattggactttatcgattagggattattaac

SEQ ID NO: 865715 - DNA, 33 bp, Homo sapien
cgagaacattacttacggctgtggaaaatggag

SEQ ID NO: 865716 - DNA, 33 bp, Homo sapien
cgagaacattacttactgctgtggaaaatggag

SEQ ID NO: 865717 - DNA, 33 bp, Homo sapien
ggggctggattctgggaataactgaattgaggg

SEQ ID NO: 865718 - DNA, 33 bp, Homo sapien
ggggctggattctggggataactgaattgaggg

SEQ ID NO: 865719 - DNA, 33 bp, Homo sapien
ttgctgtgagaatcaacgaggcaatttatgtga

SEQ ID NO: 865720 - DNA, 33 bp, Homo sapien
ttgctgtgagaatcaatgaggcaatttatgtga

SEQ ID NO: 865721 - DNA, 33 bp, Homo sapien
agtcattgtgtgttatcactgtaagagttatga

SEQ ID NO: 865722 - DNA, 33 bp, Homo sapien
agtcattgtgtgttattactgtaagagttatga

SEQ ID NO: 865723 - DNA, 33 bp, Homo sapien
tcataaacattagtgaacaatcttaggctcaga

SEQ ID NO: 865724 - DNA, 33 bp, Homo sapien
tcataaacattagtgagcaatcttaggctcaga

SEQ ID NO: 865725 - DNA, 33 bp, Homo sapien
agtacagggaagcttacggagaaacactgaagc

SEQ ID NO: 865726 - DNA, 33 bp, Homo sapien
agtacagggaagcttatggagaaacactgaagc

SEQ ID NO: 865727 - DNA, 33 bp, Homo sapien
atgtatgtaattttcacgtggaacatattttcg

SEQ ID NO: 865728 - DNA, 33 bp, Homo sapien
atgtatgtaattttcatgtggaacatattttcg

SEQ ID NO: 865729 - DNA, 33 bp, Homo sapien
tgtattttgattaagcactaagcttttcactgg

SEQ ID NO: 865730 - DNA, 33 bp, Homo sapien
tgtattttgattaagccctaagcttttcactgg

SEQ ID NO: 865731 - DNA, 33 bp, Homo sapien
tttcctttaaccaatgcatatggtggacagaag

SEQ ID NO: 865732 - DNA, 33 bp, Homo sapien
tttcctttaaccaatgtatatggtggacagaag

SEQ ID NO: 865733 - DNA, 33 bp, Homo sapien
tatcaaagaagtcccaagatcaacttaatctta

SEQ ID NO: 865734 - DNA, 33 bp, Homo sapien
tatcaaagaagtcccaggatcaacttaatctta

SEQ ID NO: 865735 - DNA, 33 bp, Homo sapien
agaaaaaatgatgctacggaaggcactgcatta

SEQ ID NO: 865736 - DNA, 33 bp, Homo sapien
agaaaaaatgatgctatggaaggcactgcatta

SEQ ID NO: 865737 - DNA, 33 bp, Homo sapien
tgcctctccaaccatgaatttgtcctccagtgg

SEQ ID NO: 865738 - DNA, 33 bp, Homo sapien
tgcctctccaaccatggatttgtcctccagtgg

SEQ ID NO: 865739 - DNA, 33 bp, Homo sapien
agggttttgaacatagacatgacatcctaattt

SEQ ID NO: 865740 - DNA, 33 bp, Homo sapien
agggttttgaacataggcatgacatcctaattt

SEQ ID NO: 865741 - DNA, 33 bp, Homo sapien
cacatcccctgctgaactgtggtaaaaaaaaaa

SEQ ID NO: 865742 - DNA, 33 bp, Homo sapien
cacatcccctgctgaagtgtggtaaaaaaaaaa

SEQ ID NO: 865743 - DNA, 33 bp, Homo sapien
ctttcagacctacatacaagaagtgctaaaggg

SEQ ID NO: 865744 - DNA, 33 bp, Homo sapien
ctttcagacctacatataagaagtgctaaaggg

SEQ ID NO: 865745 - DNA, 33 bp, Homo sapien
caatgtttattaccgaaaaattgtgtttgctcc

SEQ ID NO: 865746 - DNA, 33 bp, Homo sapien
caatgtttattaccgacaaattgtgtttgctcc

SEQ ID NO: 865747 - DNA, 33 bp, Homo sapien
ccagcttcattttgtacctaagagagtagagtg

SEQ ID NO: 865748 - DNA, 33 bp, Homo sapien
ccagcttcattttgtagctaagagagtagagtg

SEQ ID NO: 865749 - DNA, 33 bp, Homo sapien
aggatcactcttattacgaggaagtatcaggta

SEQ ID NO: 865750 - DNA, 33 bp, Homo sapien
aggatcactcttattatgaggaagtatcaggta

SEQ ID NO: 865751 - DNA, 33 bp, Homo sapien
gtctttataacagaatcacttaaaatcctctgg

SEQ ID NO: 865752 - DNA, 33 bp, Homo sapien
gtctttataacagaatgacttaaaatcctctgg

SEQ ID NO: 865753 - DNA, 33 bp, Homo sapien
aatgcatctaactaatcatgggaagtagttcta

SEQ ID NO: 865754 - DNA, 33 bp, Homo sapien
aatgcatctaactaatgatgggaagtagttcta

SEQ ID NO: 865755 - DNA, 33 bp, Homo sapien
tgcaagatactatacaagatgacgatccccaag

SEQ ID NO: 865756 - DNA, 33 bp, Homo sapien
tgcaagatactatacaggatgacgatccccaag

SEQ ID NO: 865757 - DNA, 33 bp, Homo sapien
tggaaggagaggtactcaatgtttccaataaaa

SEQ ID NO: 865758 - DNA, 33 bp, Homo sapien
tggaaggagaggtacttaatgtttccaataaaa

SEQ ID NO: 865759 - DNA, 33 bp, Homo sapien
ttttccattcctatataaatttgctgaggataa

SEQ ID NO: 865760 - DNA, 33 bp, Homo sapien
ttttccattcctatattaatttgctgaggataa

SEQ ID NO: 865761 - DNA, 33 bp, Homo sapien
ttattattttgtgatacgttccttcagttacat

SEQ ID NO: 865762 - DNA, 33 bp, Homo sapien
ttattattttgtgatatgttccttcagttacat

SEQ ID NO: 865763 - DNA, 33 bp, Homo sapien
agacgtgtccagacaaaaactgagatagtaaac

SEQ ID NO: 865764 - DNA, 33 bp, Homo sapien
agacgtgtccagacaataactgagatagtaaac

SEQ ID NO: 865765 - DNA, 33 bp, Homo sapien
gcagggtcagcttgccaataaaattgtgtaaga

SEQ ID NO: 865766 - DNA, 33 bp, Homo sapien
gcagggtcagcttgccgataaaattgtgtaaga

SEQ ID NO: 865767 - DNA, 33 bp, Homo sapien
taagtaattcatagagcaagctttgtgttgaag

SEQ ID NO: 865768 - DNA, 33 bp, Homo sapien
taagtaattcatagagtaagctttgtgttgaag

SEQ ID NO: 865769 - DNA, 33 bp, Homo sapien
gagactatctgcctcacgtaaatcagtggtttc

SEQ ID NO: 865770 - DNA, 33 bp, Homo sapien
gagactatctgcctcatgtaaatcagtggtttc

SEQ ID NO: 865771 - DNA, 33 bp, Homo sapien
ttcctttttgtttttccagtatggcctcagtct

SEQ ID NO: 865772 - DNA, 33 bp, Homo sapien
ttcctttttgtttttctagtatggcctcagtct

SEQ ID NO: 865773 - DNA, 33 bp, Homo sapien
actatagtccttccaaatcaggtaacatgatgc

SEQ ID NO: 865774 - DNA, 33 bp, Homo sapien
actatagtccttccaagtcaggtaacatgatgc

SEQ ID NO: 865775 - DNA, 33 bp, Homo sapien
agggactctggggcaaaataataaattctatat

SEQ ID NO: 865776 - DNA, 33 bp, Homo sapien
agggactctggggcaagataataaattctatat

SEQ ID NO: 865777 - DNA, 33 bp, Homo sapien
aaatatgacttctttaacatcacagtactctag

SEQ ID NO: 865778 - DNA, 33 bp, Homo sapien
aaatatgacttctttagcatcacagtactctag

SEQ ID NO: 865779 - DNA, 33 bp, Homo sapien
aactaaaataactagcaaatcaagagcaaacaa

SEQ ID NO: 865780 - DNA, 33 bp, Homo sapien
aactaaaataactagcgaatcaagagcaaacaa

SEQ ID NO: 865781 - DNA, 33 bp, Homo sapien
gtttggctgtgaaataatatgtctgaaaaaaat

SEQ ID NO: 865782 - DNA, 33 bp, Homo sapien
gtttggctgtgaaatagtatgtctgaaaaaaat

SEQ ID NO: 865783 - DNA, 33 bp, Homo sapien
tattaaaagtcaattacctactgagtgctcatt

SEQ ID NO: 865784 - DNA, 33 bp, Homo sapien
tattaaaagtcaattatctactgagtgctcatt

SEQ ID NO: 865785 - DNA, 33 bp, Homo sapien
ttgtattttcagaatcaagggtcaaattttgtg

SEQ ID NO: 865786 - DNA, 33 bp, Homo sapien
ttgtattttcagaatcgagggtcaaattttgtg

SEQ ID NO: 865787 - DNA, 33 bp, Homo sapien
agatcacataaaaggcaaattgcttcattatcc

SEQ ID NO: 865788 - DNA, 33 bp, Homo sapien
agatcacataaaaggcgaattgcttcattatcc

SEQ ID NO: 865789 - DNA, 33 bp, Homo sapien
tcctagcagtaccatacaaaattctgctcttaa

SEQ ID NO: 865790 - DNA, 33 bp, Homo sapien
tcctagcagtaccatataaaattctgctcttaa

SEQ ID NO: 865791 - DNA, 33 bp, Homo sapien
tgtcttcctttccaaaatgtttatttcagaatt

SEQ ID NO: 865792 - DNA, 33 bp, Homo sapien
tgtcttcctttccaaagtgtttatttcagaatt

SEQ ID NO: 865793 - DNA, 33 bp, Homo sapien
tatcaccaccatccatcactaacctagtccaca

SEQ ID NO: 865794 - DNA, 33 bp, Homo sapien
tatcaccaccatccattactaacctagtccaca

SEQ ID NO: 865795 - DNA, 33 bp, Homo sapien
agaattatggatgagccatttcaagtctttttg

SEQ ID NO: 865796 - DNA, 33 bp, Homo sapien
agaattatggatgagctatttcaagtctttttg

SEQ ID NO: 865797 - DNA, 33 bp, Homo sapien
ctatgagaagttgaaactcccgggcaaccacag

SEQ ID NO: 865798 - DNA, 33 bp, Homo sapien
ctatgagaagttgaaattcccgggcaaccacag

SEQ ID NO: 865799 - DNA, 33 bp, Homo sapien
taggcggatatactcacaggaaaagcatttggt

SEQ ID NO: 865800 - DNA, 33 bp, Homo sapien
taggcggatatactcagaggaaaagcatttggt

SEQ ID NO: 865801 - DNA, 33 bp, Homo sapien
aacttgttggttaggaatacaatttttgaaggt

SEQ ID NO: 865802 - DNA, 33 bp, Homo sapien
aacttgttggttaggagtacaatttttgaaggt

SEQ ID NO: 865803 - DNA, 33 bp, Homo sapien
cagagatattagtaaacgaaattgctttctgaa

SEQ ID NO: 865804 - DNA, 33 bp, Homo sapien
cagagatattagtaaatgaaattgctttctgaa

SEQ ID NO: 865805 - DNA, 33 bp, Homo sapien
gctttagccatacaggaattgctcattttagca

SEQ ID NO: 865806 - DNA, 33 bp, Homo sapien
gctttagccatacaggcattgctcattttagca

SEQ ID NO: 865807 - DNA, 33 bp, Homo sapien
tcaaatggaaaaatagccagtagcacacaatat

SEQ ID NO: 865808 - DNA, 33 bp, Homo sapien
tcaaatggaaaaatagtcagtagcacacaatat

SEQ ID NO: 865809 - DNA, 33 bp, Homo sapien
ttcttgagagcttagacggaataggaaacaaat

SEQ ID NO: 865810 - DNA, 33 bp, Homo sapien
ttcttgagagcttagatggaataggaaacaaat

SEQ ID NO: 865811 - DNA, 33 bp, Homo sapien
tgcatggataattaaacgagtaaatgcatggct

SEQ ID NO: 865812 - DNA, 33 bp, Homo sapien
tgcatggataattaaatgagtaaatgcatggct

SEQ ID NO: 865813 - DNA, 33 bp, Homo sapien
aaaccattagactgtcacattcaagggcatctg

SEQ ID NO: 865814 - DNA, 33 bp, Homo sapien
aaaccattagactgtcgcattcaagggcatctg

SEQ ID NO: 865815 - DNA, 33 bp, Homo sapien
caatctggactttccaatgatgccgctgagatg

SEQ ID NO: 865816 - DNA, 33 bp, Homo sapien
caatctggactttccagtgatgccgctgagatg

SEQ ID NO: 865817 - DNA, 33 bp, Homo sapien
aaaagaaacagaattcaccaggtatggtgttgc

SEQ ID NO: 865818 - DNA, 33 bp, Homo sapien
aaaagaaacagaattcgccaggtatggtgttgc

SEQ ID NO: 865819 - DNA, 33 bp, Homo sapien
cacagcttttactttaaccacttatcatcaaga

SEQ ID NO: 865820 - DNA, 33 bp, Homo sapien
cacagcttttactttagccacttatcatcaaga

SEQ ID NO: 865821 - DNA, 33 bp, Homo sapien
tgttattaataactggaaatgagtagtacttta

SEQ ID NO: 865822 - DNA, 33 bp, Homo sapien
tgttattaataactggcaatgagtagtacttta

SEQ ID NO: 865823 - DNA, 33 bp, Homo sapien
aacatggtgcatagacagcaaaaagcgtggtcc

SEQ ID NO: 865824 - DNA, 33 bp, Homo sapien
aacatggtgcatagacggcaaaaagcgtggtcc

SEQ ID NO: 865825 - DNA, 33 bp, Homo sapien
gaaatgtataactctaagtttttcaaagcagaa

SEQ ID NO: 865826 - DNA, 33 bp, Homo sapien
gaaatgtataactctaggtttttcaaagcagaa

SEQ ID NO: 865827 - DNA, 33 bp, Homo sapien
ttgtaataatgtcaaaaggaggaaaaacttgag

SEQ ID NO: 865828 - DNA, 33 bp, Homo sapien
ttgtaataatgtcaaatggaggaaaaacttgag

SEQ ID NO: 865829 - DNA, 33 bp, Homo sapien
gggcagatgaattagaagtctctgactgagctc

SEQ ID NO: 865830 - DNA, 33 bp, Homo sapien
gggcagatgaattagaggtctctgactgagctc

SEQ ID NO: 865831 - DNA, 33 bp, Homo sapien
ttttgctattataggtaacacttgatgaacaac

SEQ ID NO: 865832 - DNA, 33 bp, Homo sapien
ttttgctattataggtgacacttgatgaacaac

SEQ ID NO: 865833 - DNA, 33 bp, Homo sapien
tttcatctttctttcacccagggatttgatatt

SEQ ID NO: 865834 - DNA, 33 bp, Homo sapien
tttcatctttctttcatccagggatttgatatt

SEQ ID NO: 865835 - DNA, 33 bp, Homo sapien
catgtcaaaggtatacagtagccaacctgaaag

SEQ ID NO: 865836 - DNA, 33 bp, Homo sapien
catgtcaaaggtatacggtagccaacctgaaag

SEQ ID NO: 865837 - DNA, 33 bp, Homo sapien
ttttttaaaaggcgaaatgattcactattatat

SEQ ID NO: 865838 - DNA, 33 bp, Homo sapien
ttttttaaaaggcgaagtgattcactattatat

SEQ ID NO: 865839 - DNA, 33 bp, Homo sapien
gccaacttaccttttcacacgctgaaatcgtgc

SEQ ID NO: 865840 - DNA, 33 bp, Homo sapien
gccaacttaccttttctcacgctgaaatcgtgc

SEQ ID NO: 865841 - DNA, 33 bp, Homo sapien
aatgcttacttacctcacataggctacccatct

SEQ ID NO: 865842 - DNA, 33 bp, Homo sapien
aatgcttacttacctcgcataggctacccatct

SEQ ID NO: 865843 - DNA, 33 bp, Homo sapien
aaaactggctattaaacagagataaacgttgcc

SEQ ID NO: 865844 - DNA, 33 bp, Homo sapien
aaaactggctattaaagagagataaacgttgcc

SEQ ID NO: 865845 - DNA, 33 bp, Homo sapien
aaaagaggttgattcacgagctacctatacccc

SEQ ID NO: 865846 - DNA, 33 bp, Homo sapien
aaaagaggttgattcatgagctacctatacccc

SEQ ID NO: 865847 - DNA, 33 bp, Homo sapien
accttcatcgaagacaacctcctattagcattc

SEQ ID NO: 865848 - DNA, 33 bp, Homo sapien
accttcatcgaagacatcctcctattagcattc

SEQ ID NO: 865849 - DNA, 33 bp, Homo sapien
tatataatgctctaaaagtaaaacgagatctta

SEQ ID NO: 865850 - DNA, 33 bp, Homo sapien
tatataatgctctaaatgtaaaacgagatctta

SEQ ID NO: 865851 - DNA, 33 bp, Homo sapien
ctttattgactcattgaatgcttgttattatag

SEQ ID NO: 865852 - DNA, 33 bp, Homo sapien
ctttattgactcattgcatgcttgttattatag

SEQ ID NO: 865853 - DNA, 33 bp, Homo sapien
aatatgttgaaatttacgagtatttattctatc

SEQ ID NO: 865854 - DNA, 33 bp, Homo sapien
aatatgttgaaatttatgagtatttattctatc

SEQ ID NO: 865855 - DNA, 33 bp, Homo sapien
aggagaatcaggtgaaacgctctaaaatcaaac

SEQ ID NO: 865856 - DNA, 33 bp, Homo sapien
aggagaatcaggtgaagcgctctaaaatcaaac

SEQ ID NO: 865857 - DNA, 33 bp, Homo sapien
agtataaaattactaaaccttcgatagtttgaa

SEQ ID NO: 865858 - DNA, 33 bp, Homo sapien
agtataaaattactaacccttcgatagtttgaa

SEQ ID NO: 865859 - DNA, 33 bp, Homo sapien
agcgtgagaacggacgaatacaacctccttacg

SEQ ID NO: 865860 - DNA, 33 bp, Homo sapien
agcgtgagaacggacgcatacaacctccttacg

SEQ ID NO: 865861 - DNA, 33 bp, Homo sapien
cctatatttatgcgtacgtagcagaagatgcct

SEQ ID NO: 865862 - DNA, 33 bp, Homo sapien
cctatatttatgcgtatgtagcagaagatgcct

SEQ ID NO: 865863 - DNA, 33 bp, Homo sapien
ttaaaaatataatgacactacctgcttcccggt

SEQ ID NO: 865864 - DNA, 33 bp, Homo sapien
ttaaaaatataatgacgctacctgcttcccggt

SEQ ID NO: 865865 - DNA, 33 bp, Homo sapien
gtaagaaccaaaaccaatctttgagctcaatgg

SEQ ID NO: 865866 - DNA, 33 bp, Homo sapien
gtaagaaccaaaaccattctttgagctcaatgg

SEQ ID NO: 865867 - DNA, 33 bp, Homo sapien
tcaagttggtcacccacaaaatgtagacagcac

SEQ ID NO: 865868 - DNA, 33 bp, Homo sapien
tcaagttggtcacccataaaatgtagacagcac

SEQ ID NO: 865869 - DNA, 33 bp, Homo sapien
atttatgaactacaaccggtttctaacagtctt

SEQ ID NO: 865870 - DNA, 33 bp, Homo sapien
atttatgaactacaactggtttctaacagtctt

SEQ ID NO: 865871 - DNA, 33 bp, Homo sapien
tttaccaaaaattccccacccctgatactgggg

SEQ ID NO: 865872 - DNA, 33 bp, Homo sapien
tttaccaaaaattccctacccctgatactgggg

SEQ ID NO: 865873 - DNA, 33 bp, Homo sapien
gaactaaaaagtggcccaaaccgacataacaca

SEQ ID NO: 865874 - DNA, 33 bp, Homo sapien
gaactaaaaagtggcctaaaccgacataacaca

SEQ ID NO: 865875 - DNA, 33 bp, Homo sapien
gttcaagacagcactaccaatatccatctgaat

SEQ ID NO: 865876 - DNA, 33 bp, Homo sapien
gttcaagacagcactatcaatatccatctgaat

SEQ ID NO: 865877 - DNA, 33 bp, Homo sapien
ccaaaggaaaatgcaacggcagcaggtaacatg

SEQ ID NO: 865878 - DNA, 33 bp, Homo sapien
ccaaaggaaaatgcaatggcagcaggtaacatg

SEQ ID NO: 865879 - DNA, 33 bp, Homo sapien
tcttttcctttctagaagtgtatgtattatcat

SEQ ID NO: 865880 - DNA, 33 bp, Homo sapien
tcttttcctttctagaggtgtatgtattatcat

SEQ ID NO: 865881 - DNA, 33 bp, Homo sapien
gcaaataactctctaacggggtgcagtattttg

SEQ ID NO: 865882 - DNA, 33 bp, Homo sapien
gcaaataactctctaatggggtgcagtattttg

SEQ ID NO: 865883 - DNA, 33 bp, Homo sapien
aggacttcagacataaaatttagtctcctaatg

SEQ ID NO: 865884 - DNA, 33 bp, Homo sapien
aggacttcagacataacatttagtctcctaatg

SEQ ID NO: 865885 - DNA, 33 bp, Homo sapien
ccccaagtaagtcacaccaaatcctattgtcga

SEQ ID NO: 865886 - DNA, 33 bp, Homo sapien
ccccaagtaagtcacatcaaatcctattgtcga

SEQ ID NO: 865887 - DNA, 33 bp, Homo sapien
aagattcacactgcaaatatttaatgtactctt

SEQ ID NO: 865888 - DNA, 33 bp, Homo sapien
aagattcacactgcaattatttaatgtactctt

SEQ ID NO: 865889 - DNA, 33 bp, Homo sapien
acttctacatagctcacgccaccagcaacagga

SEQ ID NO: 865890 - DNA, 33 bp, Homo sapien
acttctacatagctcatgccaccagcaacagga

SEQ ID NO: 865891 - DNA, 33 bp, Homo sapien
ggttaaggaactttcacgaggtcacatagtaaa

SEQ ID NO: 865892 - DNA, 33 bp, Homo sapien
ggttaaggaactttcatgaggtcacatagtaaa

SEQ ID NO: 865893 - DNA, 33 bp, Homo sapien
acttacatcatcatcaaccggatgatcgcaaag

SEQ ID NO: 865894 - DNA, 33 bp, Homo sapien
acttacatcatcatcagccggatgatcgcaaag

SEQ ID NO: 865895 - DNA, 33 bp, Homo sapien
atacactaaagctcccaatttttttgtgtagtt

SEQ ID NO: 865896 - DNA, 33 bp, Homo sapien
atacactaaagctcccgatttttttgtgtagtt

SEQ ID NO: 865897 - DNA, 33 bp, Homo sapien
aaaaccagggtaaaggaccatgaaacttgctta

SEQ ID NO: 865898 - DNA, 33 bp, Homo sapien
aaaaccagggtaaagggccatgaaacttgctta

SEQ ID NO: 865899 - DNA, 33 bp, Homo sapien
tcctgcatatgtgagcaatagtagccaaagtga

SEQ ID NO: 865900 - DNA, 33 bp, Homo sapien
tcctgcatatgtgagcgatagtagccaaagtga

SEQ ID NO: 865901 - DNA, 33 bp, Homo sapien
gcgacccgaggagtaacttaacctctctatact

SEQ ID NO: 865902 - DNA, 33 bp, Homo sapien
gcgacccgaggagtaatttaacctctctatact

SEQ ID NO: 865903 - DNA, 33 bp, Homo sapien
ctgttatcaaattagccgaaatgagatacctat

SEQ ID NO: 865904 - DNA, 33 bp, Homo sapien
ctgttatcaaattagctgaaatgagatacctat

SEQ ID NO: 865905 - DNA, 33 bp, Homo sapien
gtgtcttctctgtttcccttcaggttctagccc

SEQ ID NO: 865906 - DNA, 33 bp, Homo sapien
gtgtcttctctgtttctcttcaggttctagccc

SEQ ID NO: 865907 - DNA, 33 bp, Homo sapien
gcatgtgtttaatagacatactctaagtagcta

SEQ ID NO: 865908 - DNA, 33 bp, Homo sapien
gcatgtgtttaatagatatactctaagtagcta

SEQ ID NO: 865909 - DNA, 33 bp, Homo sapien
ttaaaagtcgtacttaagttcctttcgccagtt

SEQ ID NO: 865910 - DNA, 33 bp, Homo sapien
ttaaaagtcgtacttaggttcctttcgccagtt

SEQ ID NO: 865911 - DNA, 33 bp, Homo sapien
taagtacgacttttaacaataagtggcttatac

SEQ ID NO: 865912 - DNA, 33 bp, Homo sapien
taagtacgacttttaataataagtggcttatac

SEQ ID NO: 865913 - DNA, 33 bp, Homo sapien
cacacactactgccaccatgggttgatttttct

SEQ ID NO: 865914 - DNA, 33 bp, Homo sapien
cacacactactgccactatgggttgatttttct

SEQ ID NO: 865915 - DNA, 33 bp, Homo sapien
cacactgacgaaggcaaaataggagtaccagat

SEQ ID NO: 865916 - DNA, 33 bp, Homo sapien
cacactgacgaaggcataataggagtaccagat

SEQ ID NO: 865917 - DNA, 33 bp, Homo sapien
taaaagtgaagcatgccctggaaggatatggca

SEQ ID NO: 865918 - DNA, 33 bp, Homo sapien
taaaagtgaagcatgctctggaaggatatggca

SEQ ID NO: 865919 - DNA, 33 bp, Homo sapien
acctcttcaactttacggcttgctactcctcca

SEQ ID NO: 865920 - DNA, 33 bp, Homo sapien
acctcttcaactttactgcttgctactcctcca

SEQ ID NO: 865921 - DNA, 33 bp, Homo sapien
atgatcttccttcaagaaatttgttttgaattt

SEQ ID NO: 865922 - DNA, 33 bp, Homo sapien
atgatcttccttcaaggaatttgttttgaattt

SEQ ID NO: 865923 - DNA, 33 bp, Homo sapien
agatgctttacaataactgctcccagtttagat

SEQ ID NO: 865924 - DNA, 33 bp, Homo sapien
agatgctttacaataattgctcccagtttagat

SEQ ID NO: 865925 - DNA, 33 bp, Homo sapien
gtatgcttattagcgcacgttctagagacaaat

SEQ ID NO: 865926 - DNA, 33 bp, Homo sapien
gtatgcttattagcgcgcgttctagagacaaat

SEQ ID NO: 865927 - DNA, 33 bp, Homo sapien
cagcctctttcagcaaatctagatcacccatgg

SEQ ID NO: 865928 - DNA, 33 bp, Homo sapien
cagcctctttcagcaagtctagatcacccatgg

SEQ ID NO: 865929 - DNA, 33 bp, Homo sapien
cttccatcttgcaaataatgcccagcccttact

SEQ ID NO: 865930 - DNA, 33 bp, Homo sapien
cttccatcttgcaaatgatgcccagcccttact

SEQ ID NO: 865931 - DNA, 33 bp, Homo sapien
aatccctggccttcaacgtttcagctctctcat

SEQ ID NO: 865932 - DNA, 33 bp, Homo sapien
aatccctggccttcaatgtttcagctctctcat

SEQ ID NO: 865933 - DNA, 33 bp, Homo sapien
ggaaacatacatttcaagtgtgatacattaaat

SEQ ID NO: 865934 - DNA, 33 bp, Homo sapien
ggaaacatacatttcaggtgtgatacattaaat

SEQ ID NO: 865935 - DNA, 33 bp, Homo sapien
attttataggaatacaatagtcactagccacat

SEQ ID NO: 865936 - DNA, 33 bp, Homo sapien
attttataggaatacagtagtcactagccacat

SEQ ID NO: 865937 - DNA, 33 bp, Homo sapien
acagcaatggcagaagcagtctaattgggcaga

SEQ ID NO: 865938 - DNA, 33 bp, Homo sapien
acagcaatggcagaaggagtctaattgggcaga

SEQ ID NO: 865939 - DNA, 33 bp, Homo sapien
aggataatgccaaacgcacaaatggtagctatt

SEQ ID NO: 865940 - DNA, 33 bp, Homo sapien
aggataatgccaaacgtacaaatggtagctatt

SEQ ID NO: 865941 - DNA, 33 bp, Homo sapien
ggcagaagtttgaaaacaagcccatcttacttc

SEQ ID NO: 865942 - DNA, 33 bp, Homo sapien
ggcagaagtttgaaaagaagcccatcttacttc

SEQ ID NO: 865943 - DNA, 33 bp, Homo sapien
tgatagcaggccatcaatccttccttaagacag

SEQ ID NO: 865944 - DNA, 33 bp, Homo sapien
tgatagcaggccatcagtccttccttaagacag

SEQ ID NO: 865945 - DNA, 33 bp, Homo sapien
aaccatcaatccgataaagtagaaagacaaagg

SEQ ID NO: 865946 - DNA, 33 bp, Homo sapien
aaccatcaatccgatatagtagaaagacaaagg

SEQ ID NO: 865947 - DNA, 33 bp, Homo sapien
tgtatcacgacaataaagatcacagtcagaggg

SEQ ID NO: 865948 - DNA, 33 bp, Homo sapien
tgtatcacgacaataaggatcacagtcagaggg

SEQ ID NO: 865949 - DNA, 33 bp, Homo sapien
gtgctcagttggaaagaatgacctcaagtggca

SEQ ID NO: 865950 - DNA, 33 bp, Homo sapien
gtgctcagttggaaagcatgacctcaagtggca

SEQ ID NO: 865951 - DNA, 33 bp, Homo sapien
ggattcagattttcccaatgacaagggtgatta

SEQ ID NO: 865952 - DNA, 33 bp, Homo sapien
ggattcagattttcccgatgacaagggtgatta

SEQ ID NO: 865953 - DNA, 33 bp, Homo sapien
ccctctgtagctggccactagcataaattgatg

SEQ ID NO: 865954 - DNA, 33 bp, Homo sapien
ccctctgtagctggccgctagcataaattgatg

SEQ ID NO: 865955 - DNA, 33 bp, Homo sapien
ctacaagacagtcagcactttctgctcaatgtt

SEQ ID NO: 865956 - DNA, 33 bp, Homo sapien
ctacaagacagtcagccctttctgctcaatgtt

SEQ ID NO: 865957 - DNA, 33 bp, Homo sapien
cacattcaggaaaacactgatttgaataaaaaa

SEQ ID NO: 865958 - DNA, 33 bp, Homo sapien
cacattcaggaaaacattgatttgaataaaaaa

SEQ ID NO: 865959 - DNA, 33 bp, Homo sapien
atggctttttgaattaacctagaatgtcacata

SEQ ID NO: 865960 - DNA, 33 bp, Homo sapien
atggctttttgaattagcctagaatgtcacata

SEQ ID NO: 865961 - DNA, 33 bp, Homo sapien
ctctacagggaacataaagataatcagtgtatt

SEQ ID NO: 865962 - DNA, 33 bp, Homo sapien
ctctacagggaacatagagataatcagtgtatt

SEQ ID NO: 865963 - DNA, 33 bp, Homo sapien
attaaatatgtgcattaaacccaagtgtcatga

SEQ ID NO: 865964 - DNA, 33 bp, Homo sapien
attaaatatgtgcattgaacccaagtgtcatga

SEQ ID NO: 865965 - DNA, 33 bp, Homo sapien
cctaccaccacatgaaataatatgaaaggggct

SEQ ID NO: 865966 - DNA, 33 bp, Homo sapien
cctaccaccacatgaattaatatgaaaggggct

SEQ ID NO: 865967 - DNA, 33 bp, Homo sapien
tctagaaaacagtagaaccactcaagagggaag

SEQ ID NO: 865968 - DNA, 33 bp, Homo sapien
tctagaaaacagtagatccactcaagagggaag

SEQ ID NO: 865969 - DNA, 33 bp, Homo sapien
ttcagataaatacgaaaaagttggattgctaga

SEQ ID NO: 865970 - DNA, 33 bp, Homo sapien
ttcagataaatacgaagaagttggattgctaga

SEQ ID NO: 865971 - DNA, 33 bp, Homo sapien
ctgtataccaaatagacctgaaaaacataaaca

SEQ ID NO: 865972 - DNA, 33 bp, Homo sapien
ctgtataccaaatagatctgaaaaacataaaca

SEQ ID NO: 865973 - DNA, 33 bp, Homo sapien
gacagagaggaaaagacgtgcaaaaaattataa

SEQ ID NO: 865974 - DNA, 33 bp, Homo sapien
gacagagaggaaaagatgtgcaaaaaattataa

SEQ ID NO: 865975 - DNA, 33 bp, Homo sapien
ttcttttctctgctcactatcaattctagctct

SEQ ID NO: 865976 - DNA, 33 bp, Homo sapien
ttcttttctctgctcagtatcaattctagctct

SEQ ID NO: 865977 - DNA, 33 bp, Homo sapien
gagaacactgctaagacactccaagagaagatc

SEQ ID NO: 865978 - DNA, 33 bp, Homo sapien
gagaacactgctaagatactccaagagaagatc

SEQ ID NO: 865979 - DNA, 33 bp, Homo sapien
ctccaaatgtctgcaacgcctttcctgcaagtg

SEQ ID NO: 865980 - DNA, 33 bp, Homo sapien
ctccaaatgtctgcaatgcctttcctgcaagtg

SEQ ID NO: 865981 - DNA, 33 bp, Homo sapien
acataaaacaatgtctaacaggattagtgatta

SEQ ID NO: 865982 - DNA, 33 bp, Homo sapien
acataaaacaatgtctgacaggattagtgatta

SEQ ID NO: 865983 - DNA, 33 bp, Homo sapien
atgtgcgcttatatcccgatcttttttagaaat

SEQ ID NO: 865984 - DNA, 33 bp, Homo sapien
atgtgcgcttatatcctgatcttttttagaaat

SEQ ID NO: 865985 - DNA, 33 bp, Homo sapien
tgagtcagttctacaccaagagtgttgggaagc

SEQ ID NO: 865986 - DNA, 33 bp, Homo sapien
tgagtcagttctacacgaagagtgttgggaagc

SEQ ID NO: 865987 - DNA, 33 bp, Homo sapien
tgtaaaatgctttgaaaatgcagactgatgcat

SEQ ID NO: 865988 - DNA, 33 bp, Homo sapien
tgtaaaatgctttgaagatgcagactgatgcat

SEQ ID NO: 865989 - DNA, 33 bp, Homo sapien
tgggtgaattatataccatgtgaggtttatctc

SEQ ID NO: 865990 - DNA, 33 bp, Homo sapien
tgggtgaattatatactatgtgaggtttatctc

SEQ ID NO: 865991 - DNA, 33 bp, Homo sapien
atttttcttacaaaaccgtaggccaagaacaca

SEQ ID NO: 865992 - DNA, 33 bp, Homo sapien
atttttcttacaaaactgtaggccaagaacaca

SEQ ID NO: 865993 - DNA, 33 bp, Homo sapien
taaacatctcaaaaccaaagttcgctttctaga

SEQ ID NO: 865994 - DNA, 33 bp, Homo sapien
taaacatctcaaaaccgaagttcgctttctaga

SEQ ID NO: 865995 - DNA, 33 bp, Homo sapien
catcaaacaccttgtccccaaagctcactgcag

SEQ ID NO: 865996 - DNA, 33 bp, Homo sapien
catcaaacaccttgtctccaaagctcactgcag

SEQ ID NO: 865997 - DNA, 33 bp, Homo sapien
acttcatccccatcagcataagaactcagtcta

SEQ ID NO: 865998 - DNA, 33 bp, Homo sapien
acttcatccccatcagtataagaactcagtcta

SEQ ID NO: 865999 - DNA, 33 bp, Homo sapien
gtgctattgatttttacggtgtatttgttgagt

SEQ ID NO: 866000 - DNA, 33 bp, Homo sapien
gtgctattgatttttatggtgtatttgttgagt

SEQ ID NO: 866001 - DNA, 33 bp, Homo sapien
tatttcaaatatgtcaacaattaaagtttatta

SEQ ID NO: 866002 - DNA, 33 bp, Homo sapien
tatttcaaatatgtcagcaattaaagtttatta

SEQ ID NO: 866003 - DNA, 33 bp, Homo sapien
tcattatttggccagccgaggattggattcgct

SEQ ID NO: 866004 - DNA, 33 bp, Homo sapien
tcattatttggccagctgaggattggattcgct

SEQ ID NO: 866005 - DNA, 33 bp, Homo sapien
atactattaaccaagaaaatgaaatgaggacac

SEQ ID NO: 866006 - DNA, 33 bp, Homo sapien
atactattaaccaagacaatgaaatgaggacac

SEQ ID NO: 866007 - DNA, 33 bp, Homo sapien
gggcatatcttatgggcaggtgcttttgcttct

SEQ ID NO: 866008 - DNA, 33 bp, Homo sapien
gggcatatcttatggggaggtgcttttgcttct

SEQ ID NO: 866009 - DNA, 33 bp, Homo sapien
atggttttagccacaccgagtttcttgaagttc

SEQ ID NO: 866010 - DNA, 33 bp, Homo sapien
atggttttagccacactgagtttcttgaagttc

SEQ ID NO: 866011 - DNA, 33 bp, Homo sapien
cccgtatttatccctgaaactcatctcctatct

SEQ ID NO: 866012 - DNA, 33 bp, Homo sapien
cccgtatttatccctgcaactcatctcctatct

SEQ ID NO: 866013 - DNA, 33 bp, Homo sapien
atcaacatgacttaaccactgttgacattaagc

SEQ ID NO: 866014 - DNA, 33 bp, Homo sapien
atcaacatgacttaacgactgttgacattaagc

SEQ ID NO: 866015 - DNA, 33 bp, Homo sapien
cattaagcttgaggtacagtttgtcaaatttct

SEQ ID NO: 866016 - DNA, 33 bp, Homo sapien
cattaagcttgaggtagagtttgtcaaatttct

SEQ ID NO: 866017 - DNA, 33 bp, Homo sapien
taatgtcacctggtataactaaatggagaagct

SEQ ID NO: 866018 - DNA, 33 bp, Homo sapien
taatgtcacctggtatgactaaatggagaagct

SEQ ID NO: 866019 - DNA, 33 bp, Homo sapien
aacagaaagcacttgacgatgacctaagatgag

SEQ ID NO: 866020 - DNA, 33 bp, Homo sapien
aacagaaagcacttgatgatgacctaagatgag

SEQ ID NO: 866021 - DNA, 33 bp, Homo sapien
accatgtactatttgcactggcagaatctgtct

SEQ ID NO: 866022 - DNA, 33 bp, Homo sapien
accatgtactatttgcgctggcagaatctgtct

SEQ ID NO: 866023 - DNA, 33 bp, Homo sapien
agagatactttacttacggtaacactggtaatg

SEQ ID NO: 866024 - DNA, 33 bp, Homo sapien
agagatactttacttatggtaacactggtaatg

SEQ ID NO: 866025 - DNA, 33 bp, Homo sapien
aaacagtagaatgatgaagtaacaccatgcctg

SEQ ID NO: 866026 - DNA, 33 bp, Homo sapien
aaacagtagaatgatggagtaacaccatgcctg

SEQ ID NO: 866027 - DNA, 33 bp, Homo sapien
ctgttaagcctgtagaactgtgaacccattaaa

SEQ ID NO: 866028 - DNA, 33 bp, Homo sapien
ctgttaagcctgtagagctgtgaacccattaaa

SEQ ID NO: 866029 - DNA, 33 bp, Homo sapien
agtggttttcaaccaaaactagagaacagaatc

SEQ ID NO: 866030 - DNA, 33 bp, Homo sapien
agtggttttcaaccaagactagagaacagaatc

SEQ ID NO: 866031 - DNA, 33 bp, Homo sapien
gaaagtgtaggtttaaaatcaaattgactgaga

SEQ ID NO: 866032 - DNA, 33 bp, Homo sapien
gaaagtgtaggtttaacatcaaattgactgaga

SEQ ID NO: 866033 - DNA, 33 bp, Homo sapien
ttattagaccacataaaattttcatagtcagag

SEQ ID NO: 866034 - DNA, 33 bp, Homo sapien
ttattagaccacataacattttcatagtcagag

SEQ ID NO: 866035 - DNA, 33 bp, Homo sapien
ctgtctcagcttcccaaaatgttaaaattacag

SEQ ID NO: 866036 - DNA, 33 bp, Homo sapien
ctgtctcagcttcccagaatgttaaaattacag

SEQ ID NO: 866037 - DNA, 33 bp, Homo sapien
tgtagttattagactacgtgtgattaatttggt

SEQ ID NO: 866038 - DNA, 33 bp, Homo sapien
tgtagttattagactatgtgtgattaatttggt

SEQ ID NO: 866039 - DNA, 33 bp, Homo sapien
ggattgtaaagataagaagagaaatggaaatga

SEQ ID NO: 866040 - DNA, 33 bp, Homo sapien
ggattgtaaagataaggagagaaatggaaatga

SEQ ID NO: 866041 - DNA, 33 bp, Homo sapien
tctggataatctaataactctcctgctgtgtct

SEQ ID NO: 866042 - DNA, 33 bp, Homo sapien
tctggataatctaatacctctcctgctgtgtct

SEQ ID NO: 866043 - DNA, 33 bp, Homo sapien
gggttatacttgcaaccgagtattaattttacc

SEQ ID NO: 866044 - DNA, 33 bp, Homo sapien
gggttatacttgcaactgagtattaattttacc

SEQ ID NO: 866045 - DNA, 33 bp, Homo sapien
tacttggagttaaaacagaattgtattggaaga

SEQ ID NO: 866046 - DNA, 33 bp, Homo sapien
tacttggagttaaaaccgaattgtattggaaga

SEQ ID NO: 866047 - DNA, 33 bp, Homo sapien
ctccaggtgaattttcaaaacttctcaaatact

SEQ ID NO: 866048 - DNA, 33 bp, Homo sapien
ctccaggtgaattttccaaacttctcaaatact

SEQ ID NO: 866049 - DNA, 33 bp, Homo sapien
atattgggtttgattcaagagaaaagtctgctc

SEQ ID NO: 866050 - DNA, 33 bp, Homo sapien
atattgggtttgattccagagaaaagtctgctc

SEQ ID NO: 866051 - DNA, 33 bp, Homo sapien
ataattccataagtaacgggtgaagtcctatga

SEQ ID NO: 866052 - DNA, 33 bp, Homo sapien
ataattccataagtaaggggtgaagtcctatga

SEQ ID NO: 866053 - DNA, 33 bp, Homo sapien
gattaagtcctcctgacctaatctactcctctt

SEQ ID NO: 866054 - DNA, 33 bp, Homo sapien
gattaagtcctcctgatctaatctactcctctt

SEQ ID NO: 866055 - DNA, 33 bp, Homo sapien
attcattttgccaaagcccaatccctattttga

SEQ ID NO: 866056 - DNA, 33 bp, Homo sapien
attcattttgccaaaggccaatccctattttga

SEQ ID NO: 866057 - DNA, 33 bp, Homo sapien
aagatgcataactctacagtaaaggttattgag

SEQ ID NO: 866058 - DNA, 33 bp, Homo sapien
aagatgcataactctagagtaaaggttattgag

SEQ ID NO: 866059 - DNA, 33 bp, Homo sapien
gaaagattaagcataacatggacagacatagaa

SEQ ID NO: 866060 - DNA, 33 bp, Homo sapien
gaaagattaagcataatatggacagacatagaa

SEQ ID NO: 866061 - DNA, 33 bp, Homo sapien
acacatcttttatcaccgtaagggctctgttta

SEQ ID NO: 866062 - DNA, 33 bp, Homo sapien
acacatcttttatcactgtaagggctctgttta

SEQ ID NO: 866063 - DNA, 33 bp, Homo sapien
tgtcgttaatccatgacgtacttaaggagactg

SEQ ID NO: 866064 - DNA, 33 bp, Homo sapien
tgtcgttaatccatgatgtacttaaggagactg

SEQ ID NO: 866065 - DNA, 33 bp, Homo sapien
agacattttcagaatacactatccaacatttgc

SEQ ID NO: 866066 - DNA, 33 bp, Homo sapien
agacattttcagaatagactatccaacatttgc

SEQ ID NO: 866067 - DNA, 33 bp, Homo sapien
ttaaaatggagaagacaggttagactgccaatt

SEQ ID NO: 866068 - DNA, 33 bp, Homo sapien
ttaaaatggagaagacgggttagactgccaatt

SEQ ID NO: 866069 - DNA, 33 bp, Homo sapien
ttggtttgtgatacttaaaaacttacatattta

SEQ ID NO: 866070 - DNA, 33 bp, Homo sapien
ttggtttgtgatactttaaaacttacatattta

SEQ ID NO: 866071 - DNA, 33 bp, Homo sapien
gcagctgctattactacgttgaatgtctcaaaa

SEQ ID NO: 866072 - DNA, 33 bp, Homo sapien
gcagctgctattactatgttgaatgtctcaaaa

SEQ ID NO: 866073 - DNA, 33 bp, Homo sapien
aattttataggcaatgaactacactgaaagagt

SEQ ID NO: 866074 - DNA, 33 bp, Homo sapien
aattttataggcaatggactacactgaaagagt

SEQ ID NO: 866075 - DNA, 33 bp, Homo sapien
ttactgtgaagaaaacaagatatagttaactta

SEQ ID NO: 866076 - DNA, 33 bp, Homo sapien
ttactgtgaagaaaaccagatatagttaactta

SEQ ID NO: 866077 - DNA, 33 bp, Homo sapien
gcacataattgtgttcaaaatgttcaattgtgc

SEQ ID NO: 866078 - DNA, 33 bp, Homo sapien
gcacataattgtgttccaaatgttcaattgtgc

SEQ ID NO: 866079 - DNA, 33 bp, Homo sapien
agcacaatttatagcacgagactgaaacttgga

SEQ ID NO: 866080 - DNA, 33 bp, Homo sapien
agcacaatttatagcatgagactgaaacttgga

SEQ ID NO: 866081 - DNA, 33 bp, Homo sapien
tgaatgctcaaagtaacgttctgtcctgatctt

SEQ ID NO: 866082 - DNA, 33 bp, Homo sapien
tgaatgctcaaagtaatgttctgtcctgatctt

SEQ ID NO: 866083 - DNA, 33 bp, Homo sapien
gattgctgctacttacgatttccagttctgtta

SEQ ID NO: 866084 - DNA, 33 bp, Homo sapien
gattgctgctacttactatttccagttctgtta

SEQ ID NO: 866085 - DNA, 33 bp, Homo sapien
gatctcttggctgcataactactttgaacagac

SEQ ID NO: 866086 - DNA, 33 bp, Homo sapien
gatctcttggctgcatgactactttgaacagac

SEQ ID NO: 866087 - DNA, 33 bp, Homo sapien
attctctgtatattcaagagaagcaactcctaa

SEQ ID NO: 866088 - DNA, 33 bp, Homo sapien
attctctgtatattcatgagaagcaactcctaa

SEQ ID NO: 866089 - DNA, 33 bp, Homo sapien
attcaaagtggagcttgaaaatatgactcaatt

SEQ ID NO: 866090 - DNA, 33 bp, Homo sapien
attcaaagtggagctttaaaatatgactcaatt

SEQ ID NO: 866091 - DNA, 33 bp, Homo sapien
tcatgaaccaacctacaatagctttaaactttt

SEQ ID NO: 866092 - DNA, 33 bp, Homo sapien
tcatgaaccaacctacgatagctttaaactttt

SEQ ID NO: 866093 - DNA, 33 bp, Homo sapien
tcaaaacgaagcataaacagaagtagagccaca

SEQ ID NO: 866094 - DNA, 33 bp, Homo sapien
tcaaaacgaagcataagcagaagtagagccaca

SEQ ID NO: 866095 - DNA, 33 bp, Homo sapien
ttttttcagggtgctccaaacactggaaggcgt

SEQ ID NO: 866096 - DNA, 33 bp, Homo sapien
ttttttcagggtgctctaaacactggaaggcgt

SEQ ID NO: 866097 - DNA, 33 bp, Homo sapien
caggctctgttttgaaaggagtttgcagatgta

SEQ ID NO: 866098 - DNA, 33 bp, Homo sapien
caggctctgttttgaagggagtttgcagatgta

SEQ ID NO: 866099 - DNA, 33 bp, Homo sapien
gggatgcatcctattacgaaaggctaaatgatc

SEQ ID NO: 866100 - DNA, 33 bp, Homo sapien
gggatgcatcctattatgaaaggctaaatgatc

SEQ ID NO: 866101 - DNA, 33 bp, Homo sapien
acattcctgctggtcaaaaaatgcttatgttaa

SEQ ID NO: 866102 - DNA, 33 bp, Homo sapien
acattcctgctggtcagaaaatgcttatgttaa

SEQ ID NO: 866103 - DNA, 33 bp, Homo sapien
ctaataggctgatacagagcaaacgtaggaaag

SEQ ID NO: 866104 - DNA, 33 bp, Homo sapien
ctaataggctgatacatagcaaacgtaggaaag

SEQ ID NO: 866105 - DNA, 33 bp, Homo sapien
taatattttggatgtgaaccatcttaaacttta

SEQ ID NO: 866106 - DNA, 33 bp, Homo sapien
taatattttggatgtggaccatcttaaacttta

SEQ ID NO: 866107 - DNA, 33 bp, Homo sapien
tgtcagattgcagtaacagaagtctaaagttta

SEQ ID NO: 866108 - DNA, 33 bp, Homo sapien
tgtcagattgcagtaatagaagtctaaagttta

SEQ ID NO: 866109 - DNA, 33 bp, Homo sapien
gttgttttcatacaaacgggctctgaaaaccat

SEQ ID NO: 866110 - DNA, 33 bp, Homo sapien
gttgttttcatacaaatgggctctgaaaaccat

SEQ ID NO: 866111 - DNA, 33 bp, Homo sapien
tcagcatcgtgagtaaaaactaccattaagtaa

SEQ ID NO: 866112 - DNA, 33 bp, Homo sapien
tcagcatcgtgagtaataactaccattaagtaa

SEQ ID NO: 866113 - DNA, 33 bp, Homo sapien
gcttagatatttctacccttgcacatttgttta

SEQ ID NO: 866114 - DNA, 33 bp, Homo sapien
gcttagatatttctactcttgcacatttgttta

SEQ ID NO: 866115 - DNA, 33 bp, Homo sapien
gagctatgatagtctccctggtaacagaaggtc

SEQ ID NO: 866116 - DNA, 33 bp, Homo sapien
gagctatgatagtctctctggtaacagaaggtc

SEQ ID NO: 866117 - DNA, 33 bp, Homo sapien
gcttattgtcttcaggcattcttccagagggcc

SEQ ID NO: 866118 - DNA, 33 bp, Homo sapien
gcttattgtcttcaggtattcttccagagggcc

SEQ ID NO: 866119 - DNA, 33 bp, Homo sapien
caagggaaaataaaacacaaggcaagcagaata

SEQ ID NO: 866120 - DNA, 33 bp, Homo sapien
caagggaaaataaaacgcaaggcaagcagaata

SEQ ID NO: 866121 - DNA, 33 bp, Homo sapien
aggccagtcagtaaaagtgaaacctgtatctct

SEQ ID NO: 866122 - DNA, 33 bp, Homo sapien
aggccagtcagtaaaattgaaacctgtatctct

SEQ ID NO: 866123 - DNA, 33 bp, Homo sapien
agtcccaggttctgccacaatcccagcgggtta

SEQ ID NO: 866124 - DNA, 33 bp, Homo sapien
agtcccaggttctgccgcaatcccagcgggtta

SEQ ID NO: 866125 - DNA, 33 bp, Homo sapien
caatcccagcgggttaactccactcatcaatac

SEQ ID NO: 866126 - DNA, 33 bp, Homo sapien
caatcccagcgggttacctccactcatcaatac

SEQ ID NO: 866127 - DNA, 33 bp, Homo sapien
ttcgtcttacccagccagataacgcccaagaat

SEQ ID NO: 866128 - DNA, 33 bp, Homo sapien
ttcgtcttacccagccggataacgcccaagaat

SEQ ID NO: 866129 - DNA, 33 bp, Homo sapien
attgcttctctatcaacgaataccagagctcgg

SEQ ID NO: 866130 - DNA, 33 bp, Homo sapien
attgcttctctatcaatgaataccagagctcgg

SEQ ID NO: 866131 - DNA, 33 bp, Homo sapien
ggcactctggctaaaccatgcctcattaggaat

SEQ ID NO: 866132 - DNA, 33 bp, Homo sapien
ggcactctggctaaactatgcctcattaggaat

SEQ ID NO: 866133 - DNA, 33 bp, Homo sapien
atgtgtgtatccctgcaattttggcagcggccc

SEQ ID NO: 866134 - DNA, 33 bp, Homo sapien
atgtgtgtatccctgcgattttggcagcggccc

SEQ ID NO: 866135 - DNA, 33 bp, Homo sapien
gcatgaatacagaacccaaaggaaccatgggga

SEQ ID NO: 866136 - DNA, 33 bp, Homo sapien
gcatgaatacagaaccgaaaggaaccatgggga

SEQ ID NO: 866137 - DNA, 33 bp, Homo sapien
agggagcagcaacctacgactaatgtttctgct

SEQ ID NO: 866138 - DNA, 33 bp, Homo sapien
agggagcagcaacctatgactaatgtttctgct

SEQ ID NO: 866139 - DNA, 33 bp, Homo sapien
ggcagtgcgtaataaaaccatgtcccgcctgcc

SEQ ID NO: 866140 - DNA, 33 bp, Homo sapien
ggcagtgcgtaataaagccatgtcccgcctgcc

SEQ ID NO: 866141 - DNA, 33 bp, Homo sapien
catttaattagcaaaaagttctgacctatatca

SEQ ID NO: 866142 - DNA, 33 bp, Homo sapien
catttaattagcaaaatgttctgacctatatca

SEQ ID NO: 866143 - DNA, 33 bp, Homo sapien
gaaataaggtcatatacatctacaacaaactga

SEQ ID NO: 866144 - DNA, 33 bp, Homo sapien
gaaataaggtcatatatatctacaacaaactga

SEQ ID NO: 866145 - DNA, 33 bp, Homo sapien
taactaccacactatacactcctctttaaattg

SEQ ID NO: 866146 - DNA, 33 bp, Homo sapien
taactaccacactatatactcctctttaaattg

SEQ ID NO: 866147 - DNA, 33 bp, Homo sapien
gaccgcattttgagaactgctgttatagaggaa

SEQ ID NO: 866148 - DNA, 33 bp, Homo sapien
gaccgcattttgagaattgctgttatagaggaa

SEQ ID NO: 866149 - DNA, 33 bp, Homo sapien
ttattccatactcgcagataatgtctcagtagc

SEQ ID NO: 866150 - DNA, 33 bp, Homo sapien
ttattccatactcgcatataatgtctcagtagc

SEQ ID NO: 866151 - DNA, 33 bp, Homo sapien
gcagttgcagcctgtaacctagtcaacatagat

SEQ ID NO: 866152 - DNA, 33 bp, Homo sapien
gcagttgcagcctgtagcctagtcaacatagat

SEQ ID NO: 866153 - DNA, 33 bp, Homo sapien
aattgttctttttggaaaacaagcacatactca

SEQ ID NO: 866154 - DNA, 33 bp, Homo sapien
aattgttctttttggacaacaagcacatactca

SEQ ID NO: 866155 - DNA, 33 bp, Homo sapien
tctaaaatgccactgtcaaagagaggaccatct

SEQ ID NO: 866156 - DNA, 33 bp, Homo sapien
tctaaaatgccactgttaaagagaggaccatct

SEQ ID NO: 866157 - DNA, 33 bp, Homo sapien
gcacattgttaaaaaaccaagacagcttacaca

SEQ ID NO: 866158 - DNA, 33 bp, Homo sapien
gcacattgttaaaaaagcaagacagcttacaca

SEQ ID NO: 866159 - DNA, 33 bp, Homo sapien
ctttataaaagaataaaacttgagtaagcagta

SEQ ID NO: 866160 - DNA, 33 bp, Homo sapien
ctttataaaagaataagacttgagtaagcagta

SEQ ID NO: 866161 - DNA, 33 bp, Homo sapien
agttgttagagtaaaactattttcagtatagtg

SEQ ID NO: 866162 - DNA, 33 bp, Homo sapien
agttgttagagtaaaattattttcagtatagtg

SEQ ID NO: 866163 - DNA, 33 bp, Homo sapien
taaccactaagggacaatcttgctttattcttc

SEQ ID NO: 866164 - DNA, 33 bp, Homo sapien
taaccactaagggacagtcttgctttattcttc

SEQ ID NO: 866165 - DNA, 33 bp, Homo sapien
ttcttattttgctgaaatctaagcctataattc

SEQ ID NO: 866166 - DNA, 33 bp, Homo sapien
ttcttattttgctgaattctaagcctataattc

SEQ ID NO: 866167 - DNA, 33 bp, Homo sapien
aatacatctgcccttgaaaagtgaaatgtttta

SEQ ID NO: 866168 - DNA, 33 bp, Homo sapien
aatacatctgcccttggaaagtgaaatgtttta

SEQ ID NO: 866169 - DNA, 33 bp, Homo sapien
tagtcaagatggcccaataggaacagctctctg

SEQ ID NO: 866170 - DNA, 33 bp, Homo sapien
tagtcaagatggcccagtaggaacagctctctg

SEQ ID NO: 866171 - DNA, 33 bp, Homo sapien
gtagacagtgaaaagcaagaaacagtatatgct

SEQ ID NO: 866172 - DNA, 33 bp, Homo sapien
gtagacagtgaaaagccagaaacagtatatgct

SEQ ID NO: 866173 - DNA, 33 bp, Homo sapien
cactgattggctgaaaattaaataagctagtgt

SEQ ID NO: 866174 - DNA, 33 bp, Homo sapien
cactgattggctgaaagttaaataagctagtgt

SEQ ID NO: 866175 - DNA, 33 bp, Homo sapien
atagactctcagacaaaaggtactacttatgag

SEQ ID NO: 866176 - DNA, 33 bp, Homo sapien
atagactctcagacaagaggtactacttatgag

SEQ ID NO: 866177 - DNA, 33 bp, Homo sapien
gttagtacttagtagacgtggttcagggtcctg

SEQ ID NO: 866178 - DNA, 33 bp, Homo sapien
gttagtacttagtagaggtggttcagggtcctg

SEQ ID NO: 866179 - DNA, 33 bp, Homo sapien
ccaagtattgcgagagacaaaaaataataatta

SEQ ID NO: 866180 - DNA, 33 bp, Homo sapien
ccaagtattgcgagagccaaaaaataataatta

SEQ ID NO: 866181 - DNA, 33 bp, Homo sapien
gctcatagttaggaaaaccttaccagaagtgaa

SEQ ID NO: 866182 - DNA, 33 bp, Homo sapien
gctcatagttaggaaacccttaccagaagtgaa

SEQ ID NO: 866183 - DNA, 33 bp, Homo sapien
gttttactcatcagaacaataatttttcaagca

SEQ ID NO: 866184 - DNA, 33 bp, Homo sapien
gttttactcatcagaagaataatttttcaagca

SEQ ID NO: 866185 - DNA, 33 bp, Homo sapien
atacacctgagaattacagtagcttaaagatga

SEQ ID NO: 866186 - DNA, 33 bp, Homo sapien
atacacctgagaattatagtagcttaaagatga

SEQ ID NO: 866187 - DNA, 33 bp, Homo sapien
tttcctttatgaattacccagtctttggtatgt

SEQ ID NO: 866188 - DNA, 33 bp, Homo sapien
tttcctttatgaattagccagtctttggtatgt

SEQ ID NO: 866189 - DNA, 33 bp, Homo sapien
ggtctatgggaagttacctatggcttctgtcga

SEQ ID NO: 866190 - DNA, 33 bp, Homo sapien
ggtctatgggaagttatctatggcttctgtcga

SEQ ID NO: 866191 - DNA, 33 bp, Homo sapien
tcaccatcaagttatacgacatttccataatct

SEQ ID NO: 866192 - DNA, 33 bp, Homo sapien
tcaccatcaagttataggacatttccataatct

SEQ ID NO: 866193 - DNA, 33 bp, Homo sapien
cacaggttatgtcagacaaggtattcagtgcaa

SEQ ID NO: 866194 - DNA, 33 bp, Homo sapien
cacaggttatgtcagagaaggtattcagtgcaa

SEQ ID NO: 866195 - DNA, 33 bp, Homo sapien
tcttgcatgggtgaagcaagaatcagtatttac

SEQ ID NO: 866196 - DNA, 33 bp, Homo sapien
tcttgcatgggtgaagtaagaatcagtatttac

SEQ ID NO: 866197 - DNA, 33 bp, Homo sapien
ttttgaaaaaaatgtcacaatatttctcagaaa

SEQ ID NO: 866198 - DNA, 33 bp, Homo sapien
ttttgaaaaaaatgtcgcaatatttctcagaaa

SEQ ID NO: 866199 - DNA, 33 bp, Homo sapien
acacagttcagaatggaagcaatccaatcaact

SEQ ID NO: 866200 - DNA, 33 bp, Homo sapien
acacagttcagaatggcagcaatccaatcaact

SEQ ID NO: 866201 - DNA, 33 bp, Homo sapien
tgtggcatgatcaacaagtcatagacataagag

SEQ ID NO: 866202 - DNA, 33 bp, Homo sapien
tgtggcatgatcaacaggtcatagacataagag

SEQ ID NO: 866203 - DNA, 33 bp, Homo sapien
gagtcaggtcaggctaggttataaggaatcctg

SEQ ID NO: 866204 - DNA, 33 bp, Homo sapien
gagtcaggtcaggctatgttataaggaatcctg

SEQ ID NO: 866205 - DNA, 33 bp, Homo sapien
attagcataattactacactctgaggaccaaat

SEQ ID NO: 866206 - DNA, 33 bp, Homo sapien
attagcataattactagactctgaggaccaaat

SEQ ID NO: 866207 - DNA, 33 bp, Homo sapien
ataacaagagacctccaattgaactgtacggaa

SEQ ID NO: 866208 - DNA, 33 bp, Homo sapien
ataacaagagacctcccattgaactgtacggaa

SEQ ID NO: 866209 - DNA, 33 bp, Homo sapien
gtgcagactcatgtgacggtcaccttttgaaaa

SEQ ID NO: 866210 - DNA, 33 bp, Homo sapien
gtgcagactcatgtgatggtcaccttttgaaaa

SEQ ID NO: 866211 - DNA, 33 bp, Homo sapien
gacaactttgatacaaacagccttgcctttttt

SEQ ID NO: 866212 - DNA, 33 bp, Homo sapien
gacaactttgatacaatcagccttgcctttttt

SEQ ID NO: 866213 - DNA, 33 bp, Homo sapien
ctgactgataaaattgcatatagattgtgaggg

SEQ ID NO: 866214 - DNA, 33 bp, Homo sapien
ctgactgataaaattggatatagattgtgaggg

SEQ ID NO: 866215 - DNA, 33 bp, Homo sapien
aagacataaattgctccgacaggattgcaggtg

SEQ ID NO: 866216 - DNA, 33 bp, Homo sapien
aagacataaattgctctgacaggattgcaggtg

SEQ ID NO: 866217 - DNA, 33 bp, Homo sapien
ctgtgctgtttccctcagagattatgcaaaatt

SEQ ID NO: 866218 - DNA, 33 bp, Homo sapien
ctgtgctgtttccctcggagattatgcaaaatt

SEQ ID NO: 866219 - DNA, 33 bp, Homo sapien
ctttgggggaaataggaagtcacaactaatgtt

SEQ ID NO: 866220 - DNA, 33 bp, Homo sapien
ctttgggggaaatagggagtcacaactaatgtt

SEQ ID NO: 866221 - DNA, 33 bp, Homo sapien
gtctaaaactgcaaataagataaggaatatcct

SEQ ID NO: 866222 - DNA, 33 bp, Homo sapien
gtctaaaactgcaaatgagataaggaatatcct

SEQ ID NO: 866223 - DNA, 33 bp, Homo sapien
tccctggtgcttacagaatacgttcacatattg

SEQ ID NO: 866224 - DNA, 33 bp, Homo sapien
tccctggtgcttacaggatacgttcacatattg

SEQ ID NO: 866225 - DNA, 33 bp, Homo sapien
agttgaaaaaaattacacaggtctacatttcat

SEQ ID NO: 866226 - DNA, 33 bp, Homo sapien
agttgaaaaaaattacgcaggtctacatttcat

SEQ ID NO: 866227 - DNA, 33 bp, Homo sapien
attatgttatgtttgccaaccaaggcagctgac

SEQ ID NO: 866228 - DNA, 33 bp, Homo sapien
attatgttatgtttgctaaccaaggcagctgac

SEQ ID NO: 866229 - DNA, 33 bp, Homo sapien
gtagaaaaaatacacaaaaggatataggcttac

SEQ ID NO: 866230 - DNA, 33 bp, Homo sapien
gtagaaaaaatacacagaaggatataggcttac

SEQ ID NO: 866231 - DNA, 33 bp, Homo sapien
agaatccctatagaaactaatgctgtgttcatt

SEQ ID NO: 866232 - DNA, 33 bp, Homo sapien
agaatccctatagaaagtaatgctgtgttcatt

SEQ ID NO: 866233 - DNA, 33 bp, Homo sapien
attccttcagccttccaggaaagcagacagatg

SEQ ID NO: 866234 - DNA, 33 bp, Homo sapien
attccttcagccttccgggaaagcagacagatg

SEQ ID NO: 866235 - DNA, 33 bp, Homo sapien
aaagttgccctgtcaactaccatctggttactg

SEQ ID NO: 866236 - DNA, 33 bp, Homo sapien
aaagttgccctgtcaattaccatctggttactg

SEQ ID NO: 866237 - DNA, 33 bp, Homo sapien
ttcataatgactcatactatccttttcctaaac

SEQ ID NO: 866238 - DNA, 33 bp, Homo sapien
ttcataatgactcatattatccttttcctaaac

SEQ ID NO: 866239 - DNA, 33 bp, Homo sapien
gaaacttggtctaaaccggaatgttgtgtgata

SEQ ID NO: 866240 - DNA, 33 bp, Homo sapien
gaaacttggtctaaactggaatgttgtgtgata

SEQ ID NO: 866241 - DNA, 33 bp, Homo sapien
tacaaaggcacagcaaaacagatagcccaagtt

SEQ ID NO: 866242 - DNA, 33 bp, Homo sapien
tacaaaggcacagcaatacagatagcccaagtt

SEQ ID NO: 866243 - DNA, 33 bp, Homo sapien
gtttaggtggagaacactgtaattgaaagggac

SEQ ID NO: 866244 - DNA, 33 bp, Homo sapien
gtttaggtggagaacattgtaattgaaagggac

SEQ ID NO: 866245 - DNA, 33 bp, Homo sapien
cttctacgacattgcacctaatatctgaggaca

SEQ ID NO: 866246 - DNA, 33 bp, Homo sapien
cttctacgacattgcatctaatatctgaggaca

SEQ ID NO: 866247 - DNA, 33 bp, Homo sapien
ttgatttagcaaaacactcaaatccctcaataa

SEQ ID NO: 866248 - DNA, 33 bp, Homo sapien
ttgatttagcaaaacattcaaatccctcaataa

SEQ ID NO: 866249 - DNA, 33 bp, Homo sapien
attcaaactatgtgccaaaaataaactattgca

SEQ ID NO: 866250 - DNA, 33 bp, Homo sapien
attcaaactatgtgcccaaaataaactattgca

SEQ ID NO: 866251 - DNA, 33 bp, Homo sapien
gagatcagcatcctcacaaacggtgagagaagg

SEQ ID NO: 866252 - DNA, 33 bp, Homo sapien
gagatcagcatcctcataaacggtgagagaagg

SEQ ID NO: 866253 - DNA, 33 bp, Homo sapien
aactatgttgggaagaaacaaccaccaaaagat

SEQ ID NO: 866254 - DNA, 33 bp, Homo sapien
aactatgttgggaagagacaaccaccaaaagat

SEQ ID NO: 866255 - DNA, 33 bp, Homo sapien
gtagtagtcagtgctcaagtagtgtttacatta

SEQ ID NO: 866256 - DNA, 33 bp, Homo sapien
gtagtagtcagtgctccagtagtgtttacatta

SEQ ID NO: 866257 - DNA, 33 bp, Homo sapien
caggccccgtgctatcacttccaacatattgag

SEQ ID NO: 866258 - DNA, 33 bp, Homo sapien
caggccccgtgctatcgcttccaacatattgag

SEQ ID NO: 866259 - DNA, 33 bp, Homo sapien
gacagaggtaaatacaatgaagaaattagtgag

SEQ ID NO: 866260 - DNA, 33 bp, Homo sapien
gacagaggtaaatacagtgaagaaattagtgag

SEQ ID NO: 866261 - DNA, 33 bp, Homo sapien
aatcattatgattttcgctggttgcgggcttca

SEQ ID NO: 866262 - DNA, 33 bp, Homo sapien
aatcattatgattttctctggttgcgggcttca

SEQ ID NO: 866263 - DNA, 33 bp, Homo sapien
ctttaaaaaacagcagacagaaaaattctaaac

SEQ ID NO: 866264 - DNA, 33 bp, Homo sapien
ctttaaaaaacagcaggcagaaaaattctaaac

SEQ ID NO: 866265 - DNA, 33 bp, Homo sapien
agccactattaatggaaaagaattggcaattca

SEQ ID NO: 866266 - DNA, 33 bp, Homo sapien
agccactattaatggagaagaattggcaattca

SEQ ID NO: 866267 - DNA, 33 bp, Homo sapien
gagattgcactggctaactctttgtgaagggta

SEQ ID NO: 866268 - DNA, 33 bp, Homo sapien
gagattgcactggctatctctttgtgaagggta

SEQ ID NO: 866269 - DNA, 33 bp, Homo sapien
caagacttttaacctaacatcaaagaattagct

SEQ ID NO: 866270 - DNA, 33 bp, Homo sapien
caagacttttaacctagcatcaaagaattagct

SEQ ID NO: 866271 - DNA, 33 bp, Homo sapien
aattgtatcaacagaacttagcacagggcaagg

SEQ ID NO: 866272 - DNA, 33 bp, Homo sapien
aattgtatcaacagaatttagcacagggcaagg

SEQ ID NO: 866273 - DNA, 33 bp, Homo sapien
aattagccaacttgcaacattaacataagcaaa

SEQ ID NO: 866274 - DNA, 33 bp, Homo sapien
aattagccaacttgcagcattaacataagcaaa

SEQ ID NO: 866275 - DNA, 33 bp, Homo sapien
aactaaattgaggtcactattagctgagtaagg

SEQ ID NO: 866276 - DNA, 33 bp, Homo sapien
aactaaattgaggtcattattagctgagtaagg

SEQ ID NO: 866277 - DNA, 33 bp, Homo sapien
cctgctcttagactgccacatgagaacaagctt

SEQ ID NO: 866278 - DNA, 33 bp, Homo sapien
cctgctcttagactgctacatgagaacaagctt

SEQ ID NO: 866279 - DNA, 33 bp, Homo sapien
tgtgtatgaaagaagacagggatagtagatgct

SEQ ID NO: 866280 - DNA, 33 bp, Homo sapien
tgtgtatgaaagaagatagggatagtagatgct

SEQ ID NO: 866281 - DNA, 33 bp, Homo sapien
gtaccattctataccaccagaaaatggactaag

SEQ ID NO: 866282 - DNA, 33 bp, Homo sapien
gtaccattctataccagcagaaaatggactaag

SEQ ID NO: 866283 - DNA, 33 bp, Homo sapien
tggatagatgctagaagaattttgaggagcagg

SEQ ID NO: 866284 - DNA, 33 bp, Homo sapien
tggatagatgctagaataattttgaggagcagg

SEQ ID NO: 866285 - DNA, 33 bp, Homo sapien
gtgagagttgagaataaatgtaaagaagcctgg

SEQ ID NO: 866286 - DNA, 33 bp, Homo sapien
gtgagagttgagaatagatgtaaagaagcctgg

SEQ ID NO: 866287 - DNA, 33 bp, Homo sapien
actctgtctgggtttgaagttggacacggtgag

SEQ ID NO: 866288 - DNA, 33 bp, Homo sapien
actctgtctgggtttggagttggacacggtgag

SEQ ID NO: 866289 - DNA, 33 bp, Homo sapien
atacagcagtgttttaagtctcagctgtaaaga

SEQ ID NO: 866290 - DNA, 33 bp, Homo sapien
atacagcagtgttttaggtctcagctgtaaaga

SEQ ID NO: 866291 - DNA, 33 bp, Homo sapien
cccttaatcctaaggcaaaatatggaattggag

SEQ ID NO: 866292 - DNA, 33 bp, Homo sapien
cccttaatcctaaggcgaaatatggaattggag

SEQ ID NO: 866293 - DNA, 33 bp, Homo sapien
ctaaagtctctagcaacgctctctccttcactg

SEQ ID NO: 866294 - DNA, 33 bp, Homo sapien
ctaaagtctctagcaatgctctctccttcactg

SEQ ID NO: 866295 - DNA, 33 bp, Homo sapien
tctttgctgaatatgacagatggcctttaactt

SEQ ID NO: 866296 - DNA, 33 bp, Homo sapien
tctttgctgaatatgatagatggcctttaactt

SEQ ID NO: 866297 - DNA, 33 bp, Homo sapien
tgcatatgtgttccaactggctctgttataagg

SEQ ID NO: 866298 - DNA, 33 bp, Homo sapien
tgcatatgtgttccaattggctctgttataagg

SEQ ID NO: 866299 - DNA, 33 bp, Homo sapien
tatcactaaataaatagctggatcagacaattc

SEQ ID NO: 866300 - DNA, 33 bp, Homo sapien
tatcactaaataaatatctggatcagacaattc

SEQ ID NO: 866301 - DNA, 33 bp, Homo sapien
aaagctactgactgccaaattcagagaaaccga

SEQ ID NO: 866302 - DNA, 33 bp, Homo sapien
aaagctactgactgccgaattcagagaaaccga

SEQ ID NO: 866303 - DNA, 33 bp, Homo sapien
ttccttatcttatgaccgcactattgggtctct

SEQ ID NO: 866304 - DNA, 33 bp, Homo sapien
ttccttatcttatgactgcactattgggtctct

SEQ ID NO: 866305 - DNA, 33 bp, Homo sapien
cctcaggtggaaggtaagcttcaaaagaagagg

SEQ ID NO: 866306 - DNA, 33 bp, Homo sapien
cctcaggtggaaggtaggcttcaaaagaagagg

SEQ ID NO: 866307 - DNA, 33 bp, Homo sapien
cttggaagtggaaataagacttcagtctgataa

SEQ ID NO: 866308 - DNA, 33 bp, Homo sapien
cttggaagtggaaataggacttcagtctgataa

SEQ ID NO: 866309 - DNA, 33 bp, Homo sapien
tgggtcattaatggaacaaacagtagccctcca

SEQ ID NO: 866310 - DNA, 33 bp, Homo sapien
tgggtcattaatggaataaacagtagccctcca

SEQ ID NO: 866311 - DNA, 33 bp, Homo sapien
aatgcaagcagttagacgctgggccataaaaac

SEQ ID NO: 866312 - DNA, 33 bp, Homo sapien
aatgcaagcagttagaggctgggccataaaaac

SEQ ID NO: 866313 - DNA, 33 bp, Homo sapien
gacctcacatatagcaacccaactctaaggttc

SEQ ID NO: 866314 - DNA, 33 bp, Homo sapien
gacctcacatatagcaccccaactctaaggttc

SEQ ID NO: 866315 - DNA, 33 bp, Homo sapien
ttcaacaaaaaagtaactgctttccatctttct

SEQ ID NO: 866316 - DNA, 33 bp, Homo sapien
ttcaacaaaaaagtaattgctttccatctttct

SEQ ID NO: 866317 - DNA, 33 bp, Homo sapien
ataagaacctagatgcaaaagtgtccagaatta

SEQ ID NO: 866318 - DNA, 33 bp, Homo sapien
ataagaacctagatgcgaaagtgtccagaatta

SEQ ID NO: 866319 - DNA, 33 bp, Homo sapien
aaaccaagtgccaaaggctgcatattaaataaa

SEQ ID NO: 866320 - DNA, 33 bp, Homo sapien
aaaccaagtgccaaagtctgcatattaaataaa

SEQ ID NO: 866321 - DNA, 33 bp, Homo sapien
ggatttaaaatgaagaaatccgttggttgctat

SEQ ID NO: 866322 - DNA, 33 bp, Homo sapien
ggatttaaaatgaagagatccgttggttgctat

SEQ ID NO: 866323 - DNA, 33 bp, Homo sapien
tgttcactgtgccttacgaggtctttgtttcat

SEQ ID NO: 866324 - DNA, 33 bp, Homo sapien
tgttcactgtgccttatgaggtctttgtttcat

SEQ ID NO: 866325 - DNA, 33 bp, Homo sapien
cagatgatcatgacacaagctacattgaagctg

SEQ ID NO: 866326 - DNA, 33 bp, Homo sapien
cagatgatcatgacaccagctacattgaagctg

SEQ ID NO: 866327 - DNA, 33 bp, Homo sapien
ggaactttcctcccaaatggactgtgctgtcct

SEQ ID NO: 866328 - DNA, 33 bp, Homo sapien
ggaactttcctcccaactggactgtgctgtcct

SEQ ID NO: 866329 - DNA, 33 bp, Homo sapien
gtttcattcttttacgcatggcttgtgaattat

SEQ ID NO: 866330 - DNA, 33 bp, Homo sapien
gtttcattcttttacgtatggcttgtgaattat

SEQ ID NO: 866331 - DNA, 33 bp, Homo sapien
aataatattatgcccaatacaacatatacatct

SEQ ID NO: 866332 - DNA, 33 bp, Homo sapien
aataatattatgcccagtacaacatatacatct

SEQ ID NO: 866333 - DNA, 33 bp, Homo sapien
gtggaaacattaagagcctccatttctgcatta

SEQ ID NO: 866334 - DNA, 33 bp, Homo sapien
gtggaaacattaagagtctccatttctgcatta

SEQ ID NO: 866335 - DNA, 33 bp, Homo sapien
aaactgccagagaaaaattaaaagcaattcatc

SEQ ID NO: 866336 - DNA, 33 bp, Homo sapien
aaactgccagagaaaagttaaaagcaattcatc

SEQ ID NO: 866337 - DNA, 33 bp, Homo sapien
tgatttgaaaagccacagtatcactggtagtgg

SEQ ID NO: 866338 - DNA, 33 bp, Homo sapien
tgatttgaaaagccacggtatcactggtagtgg

SEQ ID NO: 866339 - DNA, 33 bp, Homo sapien
aacttacttcctataagctctatttcaccctca

SEQ ID NO: 866340 - DNA, 33 bp, Homo sapien
aacttacttcctataatctctatttcaccctca

SEQ ID NO: 866341 - DNA, 33 bp, Homo sapien
gacagagggtctcagaaaaaattaaacagtttg

SEQ ID NO: 866342 - DNA, 33 bp, Homo sapien
gacagagggtctcagagaaaattaaacagtttg

SEQ ID NO: 866343 - DNA, 33 bp, Homo sapien
atctcctcctctaccacagctttcagtcagtgc

SEQ ID NO: 866344 - DNA, 33 bp, Homo sapien
atctcctcctctaccatagctttcagtcagtgc

SEQ ID NO: 866345 - DNA, 33 bp, Homo sapien
cacagtgtgcagcgaacagtatttggtgctgaa

SEQ ID NO: 866346 - DNA, 33 bp, Homo sapien
cacagtgtgcagcgaatagtatttggtgctgaa

SEQ ID NO: 866347 - DNA, 33 bp, Homo sapien
atagctccacaatcctcacctttccagctatgc

SEQ ID NO: 866348 - DNA, 33 bp, Homo sapien
atagctccacaatcctgacctttccagctatgc

SEQ ID NO: 866349 - DNA, 33 bp, Homo sapien
ctacctgtttttgtccacttagcaaactttcac

SEQ ID NO: 866350 - DNA, 33 bp, Homo sapien
ctacctgtttttgtccgcttagcaaactttcac

SEQ ID NO: 866351 - DNA, 33 bp, Homo sapien
ctgtgtgtttactttcaaaaagataggcattgc

SEQ ID NO: 866352 - DNA, 33 bp, Homo sapien
ctgtgtgtttactttcgaaaagataggcattgc

SEQ ID NO: 866353 - DNA, 33 bp, Homo sapien
caattctgagagaccacctcaactccagagctt

SEQ ID NO: 866354 - DNA, 33 bp, Homo sapien
caattctgagagaccagctcaactccagagctt

SEQ ID NO: 866355 - DNA, 33 bp, Homo sapien
catggaccctaccaaaatttcaaatctactgct

SEQ ID NO: 866356 - DNA, 33 bp, Homo sapien
catggaccctaccaaagtttcaaatctactgct

SEQ ID NO: 866357 - DNA, 33 bp, Homo sapien
tggctcagaggtgtacaacacatataatatcac

SEQ ID NO: 866358 - DNA, 33 bp, Homo sapien
tggctcagaggtgtacgacacatataatatcac

SEQ ID NO: 866359 - DNA, 33 bp, Homo sapien
caatattcaataatcacaagtgcgtatcatgaa

SEQ ID NO: 866360 - DNA, 33 bp, Homo sapien
caatattcaataatcagaagtgcgtatcatgaa

SEQ ID NO: 866361 - DNA, 33 bp, Homo sapien
aagacttctcatacaccgatataaagacatcgg

SEQ ID NO: 866362 - DNA, 33 bp, Homo sapien
aagacttctcatacactgatataaagacatcgg

SEQ ID NO: 866363 - DNA, 33 bp, Homo sapien
tagtaggtcttcattgcacttgcaactcttact

SEQ ID NO: 866364 - DNA, 33 bp, Homo sapien
tagtaggtcttcattgtacttgcaactcttact

SEQ ID NO: 866365 - DNA, 33 bp, Homo sapien
gatactgcatgggagagagttcttcccaaacgt

SEQ ID NO: 866366 - DNA, 33 bp, Homo sapien
gatactgcatgggagatagttcttcccaaacgt

SEQ ID NO: 866367 - DNA, 33 bp, Homo sapien
tctgagcaatgtttgaaaggtttcatgttggtc

SEQ ID NO: 866368 - DNA, 33 bp, Homo sapien
tctgagcaatgtttgataggtttcatgttggtc

SEQ ID NO: 866369 - DNA, 33 bp, Homo sapien
tcacaaaaatcctgagaaatacaaaggaggaaa

SEQ ID NO: 866370 - DNA, 33 bp, Homo sapien
tcacaaaaatcctgaggaatacaaaggaggaaa

SEQ ID NO: 866371 - DNA, 33 bp, Homo sapien
ctatattcacagaacactagaagctatttcctg

SEQ ID NO: 866372 - DNA, 33 bp, Homo sapien
ctatattcacagaacagtagaagctatttcctg

SEQ ID NO: 866373 - DNA, 33 bp, Homo sapien
gggaatacattggcgaatatgtcaatgaagtca

SEQ ID NO: 866374 - DNA, 33 bp, Homo sapien
gggaatacattggcgactatgtcaatgaagtca

SEQ ID NO: 866375 - DNA, 33 bp, Homo sapien
tggtcacaactcttcaccagtttccaccttcaa

SEQ ID NO: 866376 - DNA, 33 bp, Homo sapien
tggtcacaactcttcatcagtttccaccttcaa

SEQ ID NO: 866377 - DNA, 33 bp, Homo sapien
caaggataagacgtaccctaaaacaagcataag

SEQ ID NO: 866378 - DNA, 33 bp, Homo sapien
caaggataagacgtactctaaaacaagcataag

SEQ ID NO: 866379 - DNA, 33 bp, Homo sapien
ttaaagagttagtgaccatcttcctcagccctt

SEQ ID NO: 866380 - DNA, 33 bp, Homo sapien
ttaaagagttagtgactatcttcctcagccctt

SEQ ID NO: 866381 - DNA, 33 bp, Homo sapien
caaccaaaaaaaggagaacaataactgcagaat

SEQ ID NO: 866382 - DNA, 33 bp, Homo sapien
caaccaaaaaaaggagtacaataactgcagaat

SEQ ID NO: 866383 - DNA, 33 bp, Homo sapien
taccatctaaaaatacccacagaaaagacaatc

SEQ ID NO: 866384 - DNA, 33 bp, Homo sapien
taccatctaaaaatactcacagaaaagacaatc

SEQ ID NO: 866385 - DNA, 33 bp, Homo sapien
ttgttgttgaaggttaccaggtcttaataaaag

SEQ ID NO: 866386 - DNA, 33 bp, Homo sapien
ttgttgttgaaggttatcaggtcttaataaaag

SEQ ID NO: 866387 - DNA, 33 bp, Homo sapien
taattgcagattcctaagtccatctcaggtcta

SEQ ID NO: 866388 - DNA, 33 bp, Homo sapien
taattgcagattcctacgtccatctcaggtcta

SEQ ID NO: 866389 - DNA, 33 bp, Homo sapien
actatttctcgtggtccctgtagttactccact

SEQ ID NO: 866390 - DNA, 33 bp, Homo sapien
actatttctcgtggtctctgtagttactccact

SEQ ID NO: 866391 - DNA, 33 bp, Homo sapien
tgatcagccacttgtacgtattttctatcctgt

SEQ ID NO: 866392 - DNA, 33 bp, Homo sapien
tgatcagccacttgtatgtattttctatcctgt

SEQ ID NO: 866393 - DNA, 33 bp, Homo sapien
ctattctgcccaagaacatcaagatgaatcaga

SEQ ID NO: 866394 - DNA, 33 bp, Homo sapien
ctattctgcccaagaatatcaagatgaatcaga

SEQ ID NO: 866395 - DNA, 33 bp, Homo sapien
aattgaagtaacagtaagaaccctgctttcaaa

SEQ ID NO: 866396 - DNA, 33 bp, Homo sapien
aattgaagtaacagtatgaaccctgctttcaaa

SEQ ID NO: 866397 - DNA, 33 bp, Homo sapien
aggacttagagaagaggcctgagtactgctcgt

SEQ ID NO: 866398 - DNA, 33 bp, Homo sapien
aggacttagagaagagtcctgagtactgctcgt

SEQ ID NO: 866399 - DNA, 33 bp, Homo sapien
tcccctcttcctattacgctctaagagagtaag

SEQ ID NO: 866400 - DNA, 33 bp, Homo sapien
tcccctcttcctattatgctctaagagagtaag

SEQ ID NO: 866401 - DNA, 33 bp, Homo sapien
gagagtaaacagtttccaaaagtattatctcca

SEQ ID NO: 866402 - DNA, 33 bp, Homo sapien
gagagtaaacagtttctaaaagtattatctcca

SEQ ID NO: 866403 - DNA, 33 bp, Homo sapien
taaaactgtctaatagcattttgtggtaacatg

SEQ ID NO: 866404 - DNA, 33 bp, Homo sapien
taaaactgtctaatagtattttgtggtaacatg

SEQ ID NO: 866405 - DNA, 33 bp, Homo sapien
aaaataatattcagaacgtgtaatgatatcttt

SEQ ID NO: 866406 - DNA, 33 bp, Homo sapien
aaaataatattcagaatgtgtaatgatatcttt

SEQ ID NO: 866407 - DNA, 33 bp, Homo sapien
tgaaataaaacattaactgggtctgcatatcag

SEQ ID NO: 866408 - DNA, 33 bp, Homo sapien
tgaaataaaacattaattgggtctgcatatcag

SEQ ID NO: 866409 - DNA, 33 bp, Homo sapien
tagccaagaatcaagaatccaaaattctagaga

SEQ ID NO: 866410 - DNA, 33 bp, Homo sapien
tagccaagaatcaagagtccaaaattctagaga

SEQ ID NO: 866411 - DNA, 33 bp, Homo sapien
ttgccaaagatgaaagcccttttgctgctgtag

SEQ ID NO: 866412 - DNA, 33 bp, Homo sapien
ttgccaaagatgaaagtccttttgctgctgtag

SEQ ID NO: 866413 - DNA, 33 bp, Homo sapien
ttgtacagtagattcaatataaaagtcctcacc

SEQ ID NO: 866414 - DNA, 33 bp, Homo sapien
ttgtacagtagattcagtataaaagtcctcacc

SEQ ID NO: 866415 - DNA, 33 bp, Homo sapien
agaggctcgtattagccgaatctaaacagccat

SEQ ID NO: 866416 - DNA, 33 bp, Homo sapien
agaggctcgtattagctgaatctaaacagccat

SEQ ID NO: 866417 - DNA, 33 bp, Homo sapien
tgaagtaatgtgaaaacggccttatgagatttc

SEQ ID NO: 866418 - DNA, 33 bp, Homo sapien
tgaagtaatgtgaaaatggccttatgagatttc

SEQ ID NO: 866419 - DNA, 33 bp, Homo sapien
ctctgcctctattatcgcgtggtcatcttctct

SEQ ID NO: 866420 - DNA, 33 bp, Homo sapien
ctctgcctctattatctcgtggtcatcttctct

SEQ ID NO: 866421 - DNA, 33 bp, Homo sapien
tattgtaaaagaggtcaagttcttgattcgagt

SEQ ID NO: 866422 - DNA, 33 bp, Homo sapien
tattgtaaaagaggtcgagttcttgattcgagt

SEQ ID NO: 866423 - DNA, 33 bp, Homo sapien
gggactcagaattgtgacaaacagccattcctt

SEQ ID NO: 866424 - DNA, 33 bp, Homo sapien
gggactcagaattgtggcaaacagccattcctt

SEQ ID NO: 866425 - DNA, 33 bp, Homo sapien
aaaaaataaggctaaaatccctatcattacaat

SEQ ID NO: 866426 - DNA, 33 bp, Homo sapien
aaaaaataaggctaaagtccctatcattacaat

SEQ ID NO: 866427 - DNA, 33 bp, Homo sapien
cataggttaaccctggacagatgtactcagcta

SEQ ID NO: 866428 - DNA, 33 bp, Homo sapien
cataggttaaccctgggcagatgtactcagcta

SEQ ID NO: 866429 - DNA, 33 bp, Homo sapien
gtgtcccccttttgtacctgtgactcgtaagac

SEQ ID NO: 866430 - DNA, 33 bp, Homo sapien
gtgtcccccttttgtagctgtgactcgtaagac

SEQ ID NO: 866431 - DNA, 33 bp, Homo sapien
agtatattccatgccaatctatcaaatttattg

SEQ ID NO: 866432 - DNA, 33 bp, Homo sapien
agtatattccatgccagtctatcaaatttattg

SEQ ID NO: 866433 - DNA, 33 bp, Homo sapien
gatagtttgttgatgaaattcgaggttagatga

SEQ ID NO: 866434 - DNA, 33 bp, Homo sapien
gatagtttgttgatgagattcgaggttagatga

SEQ ID NO: 866435 - DNA, 33 bp, Homo sapien
taaaaacaggttttgcaagggaagaagtcaaga

SEQ ID NO: 866436 - DNA, 33 bp, Homo sapien
taaaaacaggttttgcgagggaagaagtcaaga

SEQ ID NO: 866437 - DNA, 33 bp, Homo sapien
ccattgacctattggccattaatttgaaagctg

SEQ ID NO: 866438 - DNA, 33 bp, Homo sapien
ccattgacctattggctattaatttgaaagctg

SEQ ID NO: 866439 - DNA, 33 bp, Homo sapien
ataataccttttcataagagtgcttacaaaatt

SEQ ID NO: 866440 - DNA, 33 bp, Homo sapien
ataataccttttcataggagtgcttacaaaatt

SEQ ID NO: 866441 - DNA, 33 bp, Homo sapien
gctccagtttgtaatgcaggcgcttaagtcatg

SEQ ID NO: 866442 - DNA, 33 bp, Homo sapien
gctccagtttgtaatgtaggcgcttaagtcatg

SEQ ID NO: 866443 - DNA, 33 bp, Homo sapien
tagttttaggaaatacaaataaagctgatataa

SEQ ID NO: 866444 - DNA, 33 bp, Homo sapien
tagttttaggaaatacgaataaagctgatataa

SEQ ID NO: 866445 - DNA, 33 bp, Homo sapien
tgcaatccagcaattacgctccttggtatttat

SEQ ID NO: 866446 - DNA, 33 bp, Homo sapien
tgcaatccagcaattatgctccttggtatttat

SEQ ID NO: 866447 - DNA, 33 bp, Homo sapien
tttaagtgtaatgtaaagtatcagcaaaacttt

SEQ ID NO: 866448 - DNA, 33 bp, Homo sapien
tttaagtgtaatgtaacgtatcagcaaaacttt

SEQ ID NO: 866449 - DNA, 33 bp, Homo sapien
gagtccccagaagccaaaataaattggaaaaca

SEQ ID NO: 866450 - DNA, 33 bp, Homo sapien
gagtccccagaagccagaataaattggaaaaca

SEQ ID NO: 866451 - DNA, 33 bp, Homo sapien
acaagaaagaggaggacgccacaaaatggtatg

SEQ ID NO: 866452 - DNA, 33 bp, Homo sapien
acaagaaagaggaggatgccacaaaatggtatg

SEQ ID NO: 866453 - DNA, 33 bp, Homo sapien
ctttgcatggaggtaactgagcttgtctggtca

SEQ ID NO: 866454 - DNA, 33 bp, Homo sapien
ctttgcatggaggtaattgagcttgtctggtca

SEQ ID NO: 866455 - DNA, 33 bp, Homo sapien
gagccatagttaaatcactcacgtattttctgt

SEQ ID NO: 866456 - DNA, 33 bp, Homo sapien
gagccatagttaaatcgctcacgtattttctgt

SEQ ID NO: 866457 - DNA, 33 bp, Homo sapien
cacagcaggtctttacaagcctcccgtctttct

SEQ ID NO: 866458 - DNA, 33 bp, Homo sapien
cacagcaggtctttacgagcctcccgtctttct

SEQ ID NO: 866459 - DNA, 33 bp, Homo sapien
tgtgttccacgtgtcccacttctggtcctcaaa

SEQ ID NO: 866460 - DNA, 33 bp, Homo sapien
tgtgttccacgtgtcctacttctggtcctcaaa

SEQ ID NO: 866461 - DNA, 33 bp, Homo sapien
acagagtgcacataccccatcttttaagccgag

SEQ ID NO: 866462 - DNA, 33 bp, Homo sapien
acagagtgcacataccgcatcttttaagccgag

SEQ ID NO: 866463 - DNA, 33 bp, Homo sapien
aatatcttttgccaaaactgaattcagtctacc

SEQ ID NO: 866464 - DNA, 33 bp, Homo sapien
aatatcttttgccaaagctgaattcagtctacc

SEQ ID NO: 866465 - DNA, 33 bp, Homo sapien
cattttcctcccttcaactgctatcttttatct

SEQ ID NO: 866466 - DNA, 33 bp, Homo sapien
cattttcctcccttcatctgctatcttttatct

SEQ ID NO: 866467 - DNA, 33 bp, Homo sapien
gtttaaagtcaacccactctctcttacaattat

SEQ ID NO: 866468 - DNA, 33 bp, Homo sapien
gtttaaagtcaacccagtctctcttacaattat

SEQ ID NO: 866469 - DNA, 33 bp, Homo sapien
tctgaatctttccaaaagttgtagcctttattt

SEQ ID NO: 866470 - DNA, 33 bp, Homo sapien
tctgaatctttccaaaggttgtagcctttattt

SEQ ID NO: 866471 - DNA, 33 bp, Homo sapien
ggatggggaaagttctcactatgtggcaatatt

SEQ ID NO: 866472 - DNA, 33 bp, Homo sapien
ggatggggaaagttcttactatgtggcaatatt

SEQ ID NO: 866473 - DNA, 33 bp, Homo sapien
ttaaaaagatacctgcagatggtagaggggatg

SEQ ID NO: 866474 - DNA, 33 bp, Homo sapien
ttaaaaagatacctgcggatggtagaggggatg

SEQ ID NO: 866475 - DNA, 33 bp, Homo sapien
agctgaaccaagtaagaaagagcagaactcaca

SEQ ID NO: 866476 - DNA, 33 bp, Homo sapien
agctgaaccaagtaagtaagagcagaactcaca

SEQ ID NO: 866477 - DNA, 33 bp, Homo sapien
tgttttctctgattctaaaacgattgtcaaagt

SEQ ID NO: 866478 - DNA, 33 bp, Homo sapien
tgttttctctgattctgaaacgattgtcaaagt

SEQ ID NO: 866479 - DNA, 33 bp, Homo sapien
ctttttcaatgttgtagctagtccatctcatca

SEQ ID NO: 866480 - DNA, 33 bp, Homo sapien
ctttttcaatgttgtatctagtccatctcatca

SEQ ID NO: 866481 - DNA, 33 bp, Homo sapien
aaatacaaggcctcacacaaaaatcaaggcaga

SEQ ID NO: 866482 - DNA, 33 bp, Homo sapien
aaatacaaggcctcacgcaaaaatcaaggcaga

SEQ ID NO: 866483 - DNA, 33 bp, Homo sapien
atacagtaattgaaaaaatttgatggaaataga

SEQ ID NO: 866484 - DNA, 33 bp, Homo sapien
atacagtaattgaaaatatttgatggaaataga

SEQ ID NO: 866485 - DNA, 33 bp, Homo sapien
agaaaaagggaatacaatccaggatcaagacct

SEQ ID NO: 866486 - DNA, 33 bp, Homo sapien
agaaaaagggaatacagtccaggatcaagacct

SEQ ID NO: 866487 - DNA, 33 bp, Homo sapien
cagtggagaaaataaacttaaggcaatgataga

SEQ ID NO: 866488 - DNA, 33 bp, Homo sapien
cagtggagaaaataaatttaaggcaatgataga

SEQ ID NO: 866489 - DNA, 33 bp, Homo sapien
gtttacaaataatgaacgtgatagtttgaactt

SEQ ID NO: 866490 - DNA, 33 bp, Homo sapien
gtttacaaataatgaatgtgatagtttgaactt

SEQ ID NO: 866491 - DNA, 33 bp, Homo sapien
gtggttgtatcaacaaagctgttcaatctttgc

SEQ ID NO: 866492 - DNA, 33 bp, Homo sapien
gtggttgtatcaacaaggctgttcaatctttgc

SEQ ID NO: 866493 - DNA, 33 bp, Homo sapien
caaaatccaatgagacacttgaccacctagcaa

SEQ ID NO: 866494 - DNA, 33 bp, Homo sapien
caaaatccaatgagactcttgaccacctagcaa

SEQ ID NO: 866495 - DNA, 33 bp, Homo sapien
tagctgaggggtgccacgtctgttctttctcac

SEQ ID NO: 866496 - DNA, 33 bp, Homo sapien
tagctgaggggtgccatgtctgttctttctcac

SEQ ID NO: 866497 - DNA, 33 bp, Homo sapien
ttattgtaagctttcccaaagtgtcttgtagaa

SEQ ID NO: 866498 - DNA, 33 bp, Homo sapien
ttattgtaagctttcctaaagtgtcttgtagaa

SEQ ID NO: 866499 - DNA, 33 bp, Homo sapien
ttattttacctgttacaataaatgactcataac

SEQ ID NO: 866500 - DNA, 33 bp, Homo sapien
ttattttacctgttaccataaatgactcataac

SEQ ID NO: 866501 - DNA, 33 bp, Homo sapien
catgaattatagaaaacggaaaaggtctacatc

SEQ ID NO: 866502 - DNA, 33 bp, Homo sapien
catgaattatagaaaatggaaaaggtctacatc

SEQ ID NO: 866503 - DNA, 33 bp, Homo sapien
tgacactatgacataaatcccaagttttgcctt

SEQ ID NO: 866504 - DNA, 33 bp, Homo sapien
tgacactatgacataagtcccaagttttgcctt

SEQ ID NO: 866505 - DNA, 33 bp, Homo sapien
taattaaaatcttcacacttcagagagtcttct

SEQ ID NO: 866506 - DNA, 33 bp, Homo sapien
taattaaaatcttcacgcttcagagagtcttct

SEQ ID NO: 866507 - DNA, 33 bp, Homo sapien
atagcctgctctgtaacaaaattgtaagatttc

SEQ ID NO: 866508 - DNA, 33 bp, Homo sapien
atagcctgctctgtaataaaattgtaagatttc

SEQ ID NO: 866509 - DNA, 33 bp, Homo sapien
ttggtgtttcttggagacattgcaaaaccaaat

SEQ ID NO: 866510 - DNA, 33 bp, Homo sapien
ttggtgtttcttggaggcattgcaaaaccaaat

SEQ ID NO: 866511 - DNA, 33 bp, Homo sapien
ggaaactgaaaaagaaacttgagaactgtcttc

SEQ ID NO: 866512 - DNA, 33 bp, Homo sapien
ggaaactgaaaaagaatcttgagaactgtcttc

SEQ ID NO: 866513 - DNA, 33 bp, Homo sapien
gtagtcaattaagtgcaataccacagatgattt

SEQ ID NO: 866514 - DNA, 33 bp, Homo sapien
gtagtcaattaagtgcgataccacagatgattt

SEQ ID NO: 866515 - DNA, 33 bp, Homo sapien
gcagactcaagatggcccccagtgactcccaac

SEQ ID NO: 866516 - DNA, 33 bp, Homo sapien
gcagactcaagatggctcccagtgactcccaac

SEQ ID NO: 866517 - DNA, 33 bp, Homo sapien
acattgctaaaaaccacatttgaatctttcaac

SEQ ID NO: 866518 - DNA, 33 bp, Homo sapien
acattgctaaaaaccatatttgaatctttcaac

SEQ ID NO: 866519 - DNA, 33 bp, Homo sapien
gcctgatgtgggcttacctaattctaatagctt

SEQ ID NO: 866520 - DNA, 33 bp, Homo sapien
gcctgatgtgggcttatctaattctaatagctt

SEQ ID NO: 866521 - DNA, 33 bp, Homo sapien
agagacaaattctagaacctatggctatgagca

SEQ ID NO: 866522 - DNA, 33 bp, Homo sapien
agagacaaattctagatcctatggctatgagca

SEQ ID NO: 866523 - DNA, 33 bp, Homo sapien
gtggtggttttggggactagaaagacggtcctt

SEQ ID NO: 866524 - DNA, 33 bp, Homo sapien
gtggtggttttggggagtagaaagacggtcctt

SEQ ID NO: 866525 - DNA, 33 bp, Homo sapien
taggtagtagcagtaactgaaatgagcaaggga

SEQ ID NO: 866526 - DNA, 33 bp, Homo sapien
taggtagtagcagtaagtgaaatgagcaaggga

SEQ ID NO: 866527 - DNA, 33 bp, Homo sapien
gacctgagagtaatgacgtagtgtatctgctgg

SEQ ID NO: 866528 - DNA, 33 bp, Homo sapien
gacctgagagtaatgatgtagtgtatctgctgg

SEQ ID NO: 866529 - DNA, 33 bp, Homo sapien
tagatttaactttctacgagtcaagtgtagccc

SEQ ID NO: 866530 - DNA, 33 bp, Homo sapien
tagatttaactttctatgagtcaagtgtagccc

SEQ ID NO: 866531 - DNA, 33 bp, Homo sapien
aagatattttcagggaatcaaaaaaggattctc

SEQ ID NO: 866532 - DNA, 33 bp, Homo sapien
aagatattttcagggactcaaaaaaggattctc

SEQ ID NO: 866533 - DNA, 33 bp, Homo sapien
ctaagtggcaaaaacaccctctgaaattgcatt

SEQ ID NO: 866534 - DNA, 33 bp, Homo sapien
ctaagtggcaaaaacatcctctgaaattgcatt

SEQ ID NO: 866535 - DNA, 33 bp, Homo sapien
cactaaatctcataaaacaacctctgctacctt

SEQ ID NO: 866536 - DNA, 33 bp, Homo sapien
cactaaatctcataaaccaacctctgctacctt

SEQ ID NO: 866537 - DNA, 33 bp, Homo sapien
ctcttttaatctagaaaagtaactgacatagta

SEQ ID NO: 866538 - DNA, 33 bp, Homo sapien
ctcttttaatctagaagagtaactgacatagta

SEQ ID NO: 866539 - DNA, 33 bp, Homo sapien
gccatcatcattgtccaaagctaaatctttccc

SEQ ID NO: 866540 - DNA, 33 bp, Homo sapien
gccatcatcattgtccgaagctaaatctttccc

SEQ ID NO: 866541 - DNA, 33 bp, Homo sapien
tgtgtccaacactgtcacggtaagcactcaata

SEQ ID NO: 866542 - DNA, 33 bp, Homo sapien
tgtgtccaacactgtcgcggtaagcactcaata

SEQ ID NO: 866543 - DNA, 33 bp, Homo sapien
catatcttcttgtatcacacattctgatcccca

SEQ ID NO: 866544 - DNA, 33 bp, Homo sapien
catatcttcttgtatcccacattctgatcccca

SEQ ID NO: 866545 - DNA, 33 bp, Homo sapien
gaacatacagtgaaaacgacttccaaggttaga

SEQ ID NO: 866546 - DNA, 33 bp, Homo sapien
gaacatacagtgaaaatgacttccaaggttaga

SEQ ID NO: 866547 - DNA, 33 bp, Homo sapien
acccatgctcttcacaaagttttacaaatagaa

SEQ ID NO: 866548 - DNA, 33 bp, Homo sapien
acccatgctcttcacagagttttacaaatagaa

SEQ ID NO: 866549 - DNA, 33 bp, Homo sapien
gcaaaaactcagttgccctcaccagtgcccagg

SEQ ID NO: 866550 - DNA, 33 bp, Homo sapien
gcaaaaactcagttgctctcaccagtgcccagg

SEQ ID NO: 866551 - DNA, 33 bp, Homo sapien
tgatatcaaagaacaacggtcacagatcaccga

SEQ ID NO: 866552 - DNA, 33 bp, Homo sapien
tgatatcaaagaacaatggtcacagatcaccga

SEQ ID NO: 866553 - DNA, 33 bp, Homo sapien
cctgccctggataatacgaatgacaggcttggt

SEQ ID NO: 866554 - DNA, 33 bp, Homo sapien
cctgccctggataatatgaatgacaggcttggt

SEQ ID NO: 866555 - DNA, 33 bp, Homo sapien
tatatgactttgagaacatgaactgctgtataa

SEQ ID NO: 866556 - DNA, 33 bp, Homo sapien
tatatgactttgagaatatgaactgctgtataa

SEQ ID NO: 866557 - DNA, 33 bp, Homo sapien
cagaggtggaagaaagcccgcatatacatggac

SEQ ID NO: 866558 - DNA, 33 bp, Homo sapien
cagaggtggaagaaagtccgcatatacatggac

SEQ ID NO: 866559 - DNA, 33 bp, Homo sapien
gaaccccacaggaagacaagctcataacttggg

SEQ ID NO: 866560 - DNA, 33 bp, Homo sapien
gaaccccacaggaagagaagctcataacttggg

SEQ ID NO: 866561 - DNA, 33 bp, Homo sapien
ctggtaattgttcccacgacttatttgattgct

SEQ ID NO: 866562 - DNA, 33 bp, Homo sapien
ctggtaattgttcccatgacttatttgattgct

SEQ ID NO: 866563 - DNA, 33 bp, Homo sapien
aattcaacagtgtcaaatactaggggaaaaaaa

SEQ ID NO: 866564 - DNA, 33 bp, Homo sapien
aattcaacagtgtcaagtactaggggaaaaaaa

SEQ ID NO: 866565 - DNA, 33 bp, Homo sapien
acagtttgtttggtacagtaaacatggggtgaa

SEQ ID NO: 866566 - DNA, 33 bp, Homo sapien
acagtttgtttggtacggtaaacatggggtgaa

SEQ ID NO: 866567 - DNA, 33 bp, Homo sapien
taagccagaggtagaacggtttcttcttgtagc

SEQ ID NO: 866568 - DNA, 33 bp, Homo sapien
taagccagaggtagaatggtttcttcttgtagc

SEQ ID NO: 866569 - DNA, 33 bp, Homo sapien
catcaacaagaaagaacgcgaaaataaccatat

SEQ ID NO: 866570 - DNA, 33 bp, Homo sapien
catcaacaagaaagaatgcgaaaataaccatat

SEQ ID NO: 866571 - DNA, 33 bp, Homo sapien
agggggttggagtagaataggagggaatgatat

SEQ ID NO: 866572 - DNA, 33 bp, Homo sapien
agggggttggagtagagtaggagggaatgatat

SEQ ID NO: 866573 - DNA, 33 bp, Homo sapien
agagtgaaatgaaaagcccttcttcaactacaa

SEQ ID NO: 866574 - DNA, 33 bp, Homo sapien
agagtgaaatgaaaagtccttcttcaactacaa

SEQ ID NO: 866575 - DNA, 33 bp, Homo sapien
cctttcaacagattccacttcatcttaagttaa

SEQ ID NO: 866576 - DNA, 33 bp, Homo sapien
cctttcaacagattccgcttcatcttaagttaa

SEQ ID NO: 866577 - DNA, 33 bp, Homo sapien
aaaaaattgaaaccacactctaagaaagtgaaa

SEQ ID NO: 866578 - DNA, 33 bp, Homo sapien
aaaaaattgaaaccactctctaagaaagtgaaa

SEQ ID NO: 866579 - DNA, 33 bp, Homo sapien
atgccttcttagaagacgttaaggggctgggag

SEQ ID NO: 866580 - DNA, 33 bp, Homo sapien
atgccttcttagaagatgttaaggggctgggag

SEQ ID NO: 866581 - DNA, 33 bp, Homo sapien
gggtttaaagccaataaaggcaaaggcaagagt

SEQ ID NO: 866582 - DNA, 33 bp, Homo sapien
gggtttaaagccaatacaggcaaaggcaagagt

SEQ ID NO: 866583 - DNA, 33 bp, Homo sapien
gggacacatacattgaaattgacataagtagta

SEQ ID NO: 866584 - DNA, 33 bp, Homo sapien
gggacacatacattgagattgacataagtagta

SEQ ID NO: 866585 - DNA, 33 bp, Homo sapien
aaatggtccaaaatccaaaagtttttgagtgcc

SEQ ID NO: 866586 - DNA, 33 bp, Homo sapien
aaatggtccaaaatccgaaagtttttgagtgcc

SEQ ID NO: 866587 - DNA, 33 bp, Homo sapien
tgccagaagtggaaaactgctcacataagcact

SEQ ID NO: 866588 - DNA, 33 bp, Homo sapien
tgccagaagtggaaaattgctcacataagcact

SEQ ID NO: 866589 - DNA, 33 bp, Homo sapien
attgcttcttgctagacgaggcaacagtttctg

SEQ ID NO: 866590 - DNA, 33 bp, Homo sapien
attgcttcttgctagatgaggcaacagtttctg

SEQ ID NO: 866591 - DNA, 33 bp, Homo sapien
taatgaaacttggttacgtagatccccagaata

SEQ ID NO: 866592 - DNA, 33 bp, Homo sapien
taatgaaacttggttatgtagatccccagaata

SEQ ID NO: 866593 - DNA, 33 bp, Homo sapien
gtcacaaatgtgtgcagaccattgcttatctgt

SEQ ID NO: 866594 - DNA, 33 bp, Homo sapien
gtcacaaatgtgtgcataccattgcttatctgt

SEQ ID NO: 866595 - DNA, 33 bp, Homo sapien
tatatatcctggcttggaaaaatttagatctgc

SEQ ID NO: 866596 - DNA, 33 bp, Homo sapien
tatatatcctggcttgtaaaaatttagatctgc

SEQ ID NO: 866597 - DNA, 33 bp, Homo sapien
atgccagccttgatcactcattgcttgtgggcc

SEQ ID NO: 866598 - DNA, 33 bp, Homo sapien
atgccagccttgatcattcattgcttgtgggcc

SEQ ID NO: 866599 - DNA, 33 bp, Homo sapien
tacttcaggaggttgcacccaaatcaaaaaact

SEQ ID NO: 866600 - DNA, 33 bp, Homo sapien
tacttcaggaggttgcgcccaaatcaaaaaact

SEQ ID NO: 866601 - DNA, 33 bp, Homo sapien
ggatatgagacagagccatcagaagttcaagac

SEQ ID NO: 866602 - DNA, 33 bp, Homo sapien
ggatatgagacagagctatcagaagttcaagac

SEQ ID NO: 866603 - DNA, 33 bp, Homo sapien
atttgtagcatgggcaaaatttaggtacataat

SEQ ID NO: 866604 - DNA, 33 bp, Homo sapien
atttgtagcatgggcacaatttaggtacataat

SEQ ID NO: 866605 - DNA, 33 bp, Homo sapien
tacccaatatttgttccatgctataccctgata

SEQ ID NO: 866606 - DNA, 33 bp, Homo sapien
tacccaatatttgttctatgctataccctgata

SEQ ID NO: 866607 - DNA, 33 bp, Homo sapien
tcctttctagataggaaaaatcttagagcttcc

SEQ ID NO: 866608 - DNA, 33 bp, Homo sapien
tcctttctagataggagaaatcttagagcttcc

SEQ ID NO: 866609 - DNA, 33 bp, Homo sapien
acatttactgaaaacaaccaattattacctttt

SEQ ID NO: 866610 - DNA, 33 bp, Homo sapien
acatttactgaaaacatccaattattacctttt

SEQ ID NO: 866611 - DNA, 33 bp, Homo sapien
aagccatgttcatgcaaagccattttcataagt

SEQ ID NO: 866612 - DNA, 33 bp, Homo sapien
aagccatgttcatgcagagccattttcataagt

SEQ ID NO: 866613 - DNA, 33 bp, Homo sapien
atgatagtagattgtacgtatctggggtaaact

SEQ ID NO: 866614 - DNA, 33 bp, Homo sapien
atgatagtagattgtatgtatctggggtaaact

SEQ ID NO: 866615 - DNA, 33 bp, Homo sapien
aaacaaatgcttgtgcaaaagtccagaatgtta

SEQ ID NO: 866616 - DNA, 33 bp, Homo sapien
aaacaaatgcttgtgcgaaagtccagaatgtta

SEQ ID NO: 866617 - DNA, 33 bp, Homo sapien
caaagttaggaatgaacgcgatctgaatcaatc

SEQ ID NO: 866618 - DNA, 33 bp, Homo sapien
caaagttaggaatgaatgcgatctgaatcaatc

SEQ ID NO: 866619 - DNA, 33 bp, Homo sapien
gagcagctggtgtatgcactagagaataaaagg

SEQ ID NO: 866620 - DNA, 33 bp, Homo sapien
gagcagctggtgtatggactagagaataaaagg

SEQ ID NO: 866621 - DNA, 33 bp, Homo sapien
ggagtagttaaagggaagtttatggccaatggc

SEQ ID NO: 866622 - DNA, 33 bp, Homo sapien
ggagtagttaaagggatgtttatggccaatggc

SEQ ID NO: 866623 - DNA, 33 bp, Homo sapien
attcagtgattgcctaaacaatatttaaaggtt

SEQ ID NO: 866624 - DNA, 33 bp, Homo sapien
attcagtgattgcctacacaatatttaaaggtt

SEQ ID NO: 866625 - DNA, 33 bp, Homo sapien
tcaaattggatcaagcaaaattatacagcagga

SEQ ID NO: 866626 - DNA, 33 bp, Homo sapien
tcaaattggatcaagcgaaattatacagcagga

SEQ ID NO: 866627 - DNA, 33 bp, Homo sapien
agaactgatcaaggccacttataatacaggcat

SEQ ID NO: 866628 - DNA, 33 bp, Homo sapien
agaactgatcaaggccgcttataatacaggcat

SEQ ID NO: 866629 - DNA, 33 bp, Homo sapien
ttacagatgaataagtcaagccaggatctaggt

SEQ ID NO: 866630 - DNA, 33 bp, Homo sapien
ttacagatgaataagttaagccaggatctaggt

SEQ ID NO: 866631 - DNA, 33 bp, Homo sapien
tgaattgtagctagacaggtttttgcaccttta

SEQ ID NO: 866632 - DNA, 33 bp, Homo sapien
tgaattgtagctagacgggtttttgcaccttta

SEQ ID NO: 866633 - DNA, 33 bp, Homo sapien
actttgtgtttgtcataaaattttacttcccat

SEQ ID NO: 866634 - DNA, 33 bp, Homo sapien
actttgtgtttgtcatgaaattttacttcccat

SEQ ID NO: 866635 - DNA, 33 bp, Homo sapien
gcatgaacctctgagacgagaagaagtttgaga

SEQ ID NO: 866636 - DNA, 33 bp, Homo sapien
gcatgaacctctgagatgagaagaagtttgaga

SEQ ID NO: 866637 - DNA, 33 bp, Homo sapien
aatagatgttgaagtgcaatattctgattatag

SEQ ID NO: 866638 - DNA, 33 bp, Homo sapien
aatagatgttgaagtggaatattctgattatag

SEQ ID NO: 866639 - DNA, 33 bp, Homo sapien
tgattataggtttatacgcttggagtgaatcaa

SEQ ID NO: 866640 - DNA, 33 bp, Homo sapien
tgattataggtttatatgcttggagtgaatcaa

SEQ ID NO: 866641 - DNA, 33 bp, Homo sapien
cactttagaatcatacggtagttggcagtggtc

SEQ ID NO: 866642 - DNA, 33 bp, Homo sapien
cactttagaatcatactgtagttggcagtggtc

SEQ ID NO: 866643 - DNA, 33 bp, Homo sapien
acttgaagcactgaaaacacatctactctctaa

SEQ ID NO: 866644 - DNA, 33 bp, Homo sapien
acttgaagcactgaaagcacatctactctctaa

SEQ ID NO: 866645 - DNA, 33 bp, Homo sapien
gttcctagcgtttaaaataatagtgtatgtatt

SEQ ID NO: 866646 - DNA, 33 bp, Homo sapien
gttcctagcgtttaaagtaatagtgtatgtatt

SEQ ID NO: 866647 - DNA, 33 bp, Homo sapien
gtcagtgcactgcttaaaattctcatagcttcc

SEQ ID NO: 866648 - DNA, 33 bp, Homo sapien
gtcagtgcactgcttacaattctcatagcttcc

SEQ ID NO: 866649 - DNA, 33 bp, Homo sapien
ataacaaagaaatctgaaatacagtggctttta

SEQ ID NO: 866650 - DNA, 33 bp, Homo sapien
ataacaaagaaatctggaatacagtggctttta

SEQ ID NO: 866651 - DNA, 33 bp, Homo sapien
cctattagctagaacactgaggtgcttgtgtcc

SEQ ID NO: 866652 - DNA, 33 bp, Homo sapien
cctattagctagaacattgaggtgcttgtgtcc

SEQ ID NO: 866653 - DNA, 33 bp, Homo sapien
tcttcagatggatagaacaaattcaatatacta

SEQ ID NO: 866654 - DNA, 33 bp, Homo sapien
tcttcagatggatagagcaaattcaatatacta

SEQ ID NO: 866655 - DNA, 33 bp, Homo sapien
aaggacaagcaatacactatgttaaatgaaatg

SEQ ID NO: 866656 - DNA, 33 bp, Homo sapien
aaggacaagcaatacagtatgttaaatgaaatg

SEQ ID NO: 866657 - DNA, 33 bp, Homo sapien
agaagaatcggttttgcaactcatttgctactg

SEQ ID NO: 866658 - DNA, 33 bp, Homo sapien
agaagaatcggttttgtaactcatttgctactg

SEQ ID NO: 866659 - DNA, 33 bp, Homo sapien
ctactccaccagtggaagtctttttacatgagg

SEQ ID NO: 866660 - DNA, 33 bp, Homo sapien
ctactccaccagtggatgtctttttacatgagg

SEQ ID NO: 866661 - DNA, 33 bp, Homo sapien
gtatgaactgaaagaacttcgtggagcaagtca

SEQ ID NO: 866662 - DNA, 33 bp, Homo sapien
gtatgaactgaaagaagttcgtggagcaagtca

SEQ ID NO: 866663 - DNA, 33 bp, Homo sapien
aattttgacatacttacggctccctggacacac

SEQ ID NO: 866664 - DNA, 33 bp, Homo sapien
aattttgacatacttatggctccctggacacac

SEQ ID NO: 866665 - DNA, 33 bp, Homo sapien
gttttctgtagtcataccgattccaaaatgtga

SEQ ID NO: 866666 - DNA, 33 bp, Homo sapien
gttttctgtagtcatatcgattccaaaatgtga

SEQ ID NO: 866667 - DNA, 33 bp, Homo sapien
gttacttgcttaaaaaatgagtaactctactac

SEQ ID NO: 866668 - DNA, 33 bp, Homo sapien
gttacttgcttaaaaagtgagtaactctactac

SEQ ID NO: 866669 - DNA, 33 bp, Homo sapien
ggagcttcaacgtacaaaccttcagttcataac

SEQ ID NO: 866670 - DNA, 33 bp, Homo sapien
ggagcttcaacgtacacaccttcagttcataac

SEQ ID NO: 866671 - DNA, 33 bp, Homo sapien
gagatattttatgatacggataagagatgagaa

SEQ ID NO: 866672 - DNA, 33 bp, Homo sapien
gagatattttatgatatggataagagatgagaa

SEQ ID NO: 866673 - DNA, 33 bp, Homo sapien
tggacacctcttcgagaagctgtgaattttaaa

SEQ ID NO: 866674 - DNA, 33 bp, Homo sapien
tggacacctcttcgaggagctgtgaattttaaa

SEQ ID NO: 866675 - DNA, 33 bp, Homo sapien
tacaattatgtttgggccaagcactgggccatg

SEQ ID NO: 866676 - DNA, 33 bp, Homo sapien
tacaattatgtttgggtcaagcactgggccatg

SEQ ID NO: 866677 - DNA, 33 bp, Homo sapien
gtaagctcttgctcaacgcaaaaatctgatatg

SEQ ID NO: 866678 - DNA, 33 bp, Homo sapien
gtaagctcttgctcaatgcaaaaatctgatatg

SEQ ID NO: 866679 - DNA, 33 bp, Homo sapien
atacgatgtaaattgcacctgagcaacacacca

SEQ ID NO: 866680 - DNA, 33 bp, Homo sapien
atacgatgtaaattgcgcctgagcaacacacca

SEQ ID NO: 866681 - DNA, 33 bp, Homo sapien
tagaaaattttacaacagagatttgaaaagata

SEQ ID NO: 866682 - DNA, 33 bp, Homo sapien
tagaaaattttacaactgagatttgaaaagata

SEQ ID NO: 866683 - DNA, 33 bp, Homo sapien
tgtgaagataggcgcaccaccataaattagaac

SEQ ID NO: 866684 - DNA, 33 bp, Homo sapien
tgtgaagataggcgcatcaccataaattagaac

SEQ ID NO: 866685 - DNA, 33 bp, Homo sapien
tttttctttttcctcacggtagccaggctcttt

SEQ ID NO: 866686 - DNA, 33 bp, Homo sapien
tttttctttttcctcatggtagccaggctcttt

SEQ ID NO: 866687 - DNA, 33 bp, Homo sapien
ccatgcctctgcgaaaggcaacaaaggctttct

SEQ ID NO: 866688 - DNA, 33 bp, Homo sapien
ccatgcctctgcgaaatgcaacaaaggctttct

SEQ ID NO: 866689 - DNA, 33 bp, Homo sapien
tttcagactgtcctcacaagtgatatcacctac

SEQ ID NO: 866690 - DNA, 33 bp, Homo sapien
tttcagactgtcctcagaagtgatatcacctac

SEQ ID NO: 866691 - DNA, 33 bp, Homo sapien
tcttcatctatgtaacaagtggactggactcaa

SEQ ID NO: 866692 - DNA, 33 bp, Homo sapien
tcttcatctatgtaacgagtggactggactcaa

SEQ ID NO: 866693 - DNA, 33 bp, Homo sapien
tttttactgcaggtcaaatttttcactcattta

SEQ ID NO: 866694 - DNA, 33 bp, Homo sapien
tttttactgcaggtcatatttttcactcattta

SEQ ID NO: 866695 - DNA, 33 bp, Homo sapien
taaacagtttgtatggccacttagtgtttaaag

SEQ ID NO: 866696 - DNA, 33 bp, Homo sapien
taaacagtttgtatggtcacttagtgtttaaag

SEQ ID NO: 866697 - DNA, 33 bp, Homo sapien
taggactgtttgggacggtcactagagaaataa

SEQ ID NO: 866698 - DNA, 33 bp, Homo sapien
taggactgtttgggactgtcactagagaaataa

SEQ ID NO: 866699 - DNA, 33 bp, Homo sapien
aaaaaactccacactacatgttcctacctgggt

SEQ ID NO: 866700 - DNA, 33 bp, Homo sapien
aaaaaactccacactatatgttcctacctgggt

SEQ ID NO: 866701 - DNA, 33 bp, Homo sapien
tgatttgtaaatggaacagagtcattgaagagt

SEQ ID NO: 866702 - DNA, 33 bp, Homo sapien
tgatttgtaaatggaagagagtcattgaagagt

SEQ ID NO: 866703 - DNA, 33 bp, Homo sapien
atgtagtgtgaccttaaacaaagatatctttct

SEQ ID NO: 866704 - DNA, 33 bp, Homo sapien
atgtagtgtgaccttatacaaagatatctttct

SEQ ID NO: 866705 - DNA, 33 bp, Homo sapien
tatttgaattagatgacgatcctgtattaactc

SEQ ID NO: 866706 - DNA, 33 bp, Homo sapien
tatttgaattagatgatgatcctgtattaactc

SEQ ID NO: 866707 - DNA, 33 bp, Homo sapien
aggaagaatcccggaacgaaatgttatcagggc

SEQ ID NO: 866708 - DNA, 33 bp, Homo sapien
aggaagaatcccggaaggaaatgttatcagggc

SEQ ID NO: 866709 - DNA, 33 bp, Homo sapien
gcacagatttgtataccgcagtgttaccacaaa

SEQ ID NO: 866710 - DNA, 33 bp, Homo sapien
gcacagatttgtatactgcagtgttaccacaaa

SEQ ID NO: 866711 - DNA, 33 bp, Homo sapien
ccatcccaacctggtaggaattaggataaaaat

SEQ ID NO: 866712 - DNA, 33 bp, Homo sapien
ccatcccaacctggtatgaattaggataaaaat

SEQ ID NO: 866713 - DNA, 33 bp, Homo sapien
gaaacagatgttaccacaaattacagtctaata

SEQ ID NO: 866714 - DNA, 33 bp, Homo sapien
gaaacagatgttaccataaattacagtctaata

SEQ ID NO: 866715 - DNA, 33 bp, Homo sapien
ttgcagatgatataaacttgtatctggaaaagc

SEQ ID NO: 866716 - DNA, 33 bp, Homo sapien
ttgcagatgatataaatttgtatctggaaaagc

SEQ ID NO: 866717 - DNA, 33 bp, Homo sapien
ctggaactgccaggacaatggtagcaatttcag

SEQ ID NO: 866718 - DNA, 33 bp, Homo sapien
ctggaactgccaggacgatggtagcaatttcag

SEQ ID NO: 866719 - DNA, 33 bp, Homo sapien
ctggatgggagtgctacgataaaaagcagtatg

SEQ ID NO: 866720 - DNA, 33 bp, Homo sapien
ctggatgggagtgctatgataaaaagcagtatg

SEQ ID NO: 866721 - DNA, 33 bp, Homo sapien
atatctcatttaggaaaaaatatgctaataggt

SEQ ID NO: 866722 - DNA, 33 bp, Homo sapien
atatctcatttaggaacaaatatgctaataggt

SEQ ID NO: 866723 - DNA, 33 bp, Homo sapien
tgctagacttaacctacagaaaatgtttcaagc

SEQ ID NO: 866724 - DNA, 33 bp, Homo sapien
tgctagacttaacctatagaaaatgtttcaagc

SEQ ID NO: 866725 - DNA, 33 bp, Homo sapien
atctgttgacattttccatattaccatttttag

SEQ ID NO: 866726 - DNA, 33 bp, Homo sapien
atctgttgacattttcgatattaccatttttag

SEQ ID NO: 866727 - DNA, 33 bp, Homo sapien
ccaaagcaaatggttccctactatcctgccttc

SEQ ID NO: 866728 - DNA, 33 bp, Homo sapien
ccaaagcaaatggttctctactatcctgccttc

SEQ ID NO: 866729 - DNA, 33 bp, Homo sapien
aggaagagtaggattacaaagtctgatgtagac

SEQ ID NO: 866730 - DNA, 33 bp, Homo sapien
aggaagagtaggattagaaagtctgatgtagac

SEQ ID NO: 866731 - DNA, 33 bp, Homo sapien
caactaaatataggaacacaaagaaacagaggc

SEQ ID NO: 866732 - DNA, 33 bp, Homo sapien
caactaaatataggaagacaaagaaacagaggc

SEQ ID NO: 866733 - DNA, 33 bp, Homo sapien
ttcatgttgagtttaacgatctgtatgcatata

SEQ ID NO: 866734 - DNA, 33 bp, Homo sapien
ttcatgttgagtttaatgatctgtatgcatata

SEQ ID NO: 866735 - DNA, 33 bp, Homo sapien
atttgcattccatcaacaagttctgaacaagtt

SEQ ID NO: 866736 - DNA, 33 bp, Homo sapien
atttgcattccatcaataagttctgaacaagtt

SEQ ID NO: 866737 - DNA, 33 bp, Homo sapien
aaatagcttttgtgacggacctaaggaaattta

SEQ ID NO: 866738 - DNA, 33 bp, Homo sapien
aaatagcttttgtgactgacctaaggaaattta

SEQ ID NO: 866739 - DNA, 33 bp, Homo sapien
cacataactgtagttaaattcttctgatacatt

SEQ ID NO: 866740 - DNA, 33 bp, Homo sapien
cacataactgtagttagattcttctgatacatt

SEQ ID NO: 866741 - DNA, 33 bp, Homo sapien
aactccacaatgttgagattgccaccaatgagt

SEQ ID NO: 866742 - DNA, 33 bp, Homo sapien
aactccacaatgttgatattgccaccaatgagt

SEQ ID NO: 866743 - DNA, 33 bp, Homo sapien
taaacctgagctctccaatcgcgctgctttggt

SEQ ID NO: 866744 - DNA, 33 bp, Homo sapien
taaacctgagctctccgatcgcgctgctttggt

SEQ ID NO: 866745 - DNA, 33 bp, Homo sapien
taaacacttttgttcaaggggaaccagataatc

SEQ ID NO: 866746 - DNA, 33 bp, Homo sapien
taaacacttttgttcagggggaaccagataatc

SEQ ID NO: 866747 - DNA, 33 bp, Homo sapien
tcagagtcacttatcacgatgacaaacaggagg

SEQ ID NO: 866748 - DNA, 33 bp, Homo sapien
tcagagtcacttatcaggatgacaaacaggagg

SEQ ID NO: 866749 - DNA, 33 bp, Homo sapien
agtgattagagactaccgcttcaaaacttgtca

SEQ ID NO: 866750 - DNA, 33 bp, Homo sapien
agtgattagagactactgcttcaaaacttgtca

SEQ ID NO: 866751 - DNA, 33 bp, Homo sapien
atatccaactatttgcagaatccaaacaacttt

SEQ ID NO: 866752 - DNA, 33 bp, Homo sapien
atatccaactatttgcggaatccaaacaacttt

SEQ ID NO: 866753 - DNA, 33 bp, Homo sapien
agtggccagaaagaagccaaatggtcatgaact

SEQ ID NO: 866754 - DNA, 33 bp, Homo sapien
agtggccagaaagaagtcaaatggtcatgaact

SEQ ID NO: 866755 - DNA, 33 bp, Homo sapien
ctttctagccataaaaagtaaacaataaggact

SEQ ID NO: 866756 - DNA, 33 bp, Homo sapien
ctttctagccataaaatgtaaacaataaggact

SEQ ID NO: 866757 - DNA, 33 bp, Homo sapien
agtaattttctgcattcctcaacataggagtga

SEQ ID NO: 866758 - DNA, 33 bp, Homo sapien
agtaattttctgcattgctcaacataggagtga

SEQ ID NO: 866759 - DNA, 33 bp, Homo sapien
gtattatattactctgaatactatcttctccaa

SEQ ID NO: 866760 - DNA, 33 bp, Homo sapien
gtattatattactctggatactatcttctccaa

SEQ ID NO: 866761 - DNA, 33 bp, Homo sapien
actagtccatgctaaggataagatgcctgggaa

SEQ ID NO: 866762 - DNA, 33 bp, Homo sapien
actagtccatgctaagtataagatgcctgggaa

SEQ ID NO: 866763 - DNA, 33 bp, Homo sapien
tctcagaccagcaataaacactatttgtgagtt

SEQ ID NO: 866764 - DNA, 33 bp, Homo sapien
tctcagaccagcaatacacactatttgtgagtt

SEQ ID NO: 866765 - DNA, 33 bp, Homo sapien
acatcatgatgaacaccatagaactggagaatg

SEQ ID NO: 866766 - DNA, 33 bp, Homo sapien
acatcatgatgaacacgatagaactggagaatg

SEQ ID NO: 866767 - DNA, 33 bp, Homo sapien
gcttaccctggcatagaaactgaggtcagcctt

SEQ ID NO: 866768 - DNA, 33 bp, Homo sapien
gcttaccctggcataggaactgaggtcagcctt

SEQ ID NO: 866769 - DNA, 33 bp, Homo sapien
gcagtgctgtggtaacacttgtcaaaactagta

SEQ ID NO: 866770 - DNA, 33 bp, Homo sapien
gcagtgctgtggtaacccttgtcaaaactagta

SEQ ID NO: 866771 - DNA, 33 bp, Homo sapien
gttctgtgagctcatacaggttttacaatccct

SEQ ID NO: 866772 - DNA, 33 bp, Homo sapien
gttctgtgagctcatataggttttacaatccct

SEQ ID NO: 866773 - DNA, 33 bp, Homo sapien
ccagtatcctacaaggaagtaatgctggtagca

SEQ ID NO: 866774 - DNA, 33 bp, Homo sapien
ccagtatcctacaaggcagtaatgctggtagca

SEQ ID NO: 866775 - DNA, 33 bp, Homo sapien
tgtgtacttgattaaacggtttctgctgctttt

SEQ ID NO: 866776 - DNA, 33 bp, Homo sapien
tgtgtacttgattaaatggtttctgctgctttt

SEQ ID NO: 866777 - DNA, 33 bp, Homo sapien
attaaatagggcacaaatgattcccctccagag

SEQ ID NO: 866778 - DNA, 33 bp, Homo sapien
attaaatagggcacaattgattcccctccagag

SEQ ID NO: 866779 - DNA, 33 bp, Homo sapien
gggctttcagttacataaaccaattttcctttt

SEQ ID NO: 866780 - DNA, 33 bp, Homo sapien
gggctttcagttacattaaccaattttcctttt

SEQ ID NO: 866781 - DNA, 33 bp, Homo sapien
ttcagtcattcacagaactgtcattaactttgc

SEQ ID NO: 866782 - DNA, 33 bp, Homo sapien
ttcagtcattcacagagctgtcattaactttgc

SEQ ID NO: 866783 - DNA, 33 bp, Homo sapien
gtattgtttagaaatgaaaagaagttcagtgta

SEQ ID NO: 866784 - DNA, 33 bp, Homo sapien
gtattgtttagaaatggaaagaagttcagtgta

SEQ ID NO: 866785 - DNA, 33 bp, Homo sapien
atacagagaaattttacatctaagaaggcagag

SEQ ID NO: 866786 - DNA, 33 bp, Homo sapien
atacagagaaattttatatctaagaaggcagag

SEQ ID NO: 866787 - DNA, 33 bp, Homo sapien
aagacttcttctactcaagttattatccacttt

SEQ ID NO: 866788 - DNA, 33 bp, Homo sapien
aagacttcttctactcgagttattatccacttt

SEQ ID NO: 866789 - DNA, 33 bp, Homo sapien
ataaaagagagaaggaatcctagtgaaagaagc

SEQ ID NO: 866790 - DNA, 33 bp, Homo sapien
ataaaagagagaaggagtcctagtgaaagaagc

SEQ ID NO: 866791 - DNA, 33 bp, Homo sapien
ggggaagagtttgtcaatacaggctttgcagac

SEQ ID NO: 866792 - DNA, 33 bp, Homo sapien
ggggaagagtttgtcagtacaggctttgcagac

SEQ ID NO: 866793 - DNA, 33 bp, Homo sapien
agtcacttatgtccacacaactctctattttca

SEQ ID NO: 866794 - DNA, 33 bp, Homo sapien
agtcacttatgtccacgcaactctctattttca

SEQ ID NO: 866795 - DNA, 33 bp, Homo sapien
tgcctgaatttggtccaatagcatcatatcatg

SEQ ID NO: 866796 - DNA, 33 bp, Homo sapien
tgcctgaatttggtccgatagcatcatatcatg

SEQ ID NO: 866797 - DNA, 33 bp, Homo sapien
gtgcaatgttttgttgaagttgcaaattcttaa

SEQ ID NO: 866798 - DNA, 33 bp, Homo sapien
gtgcaatgttttgttggagttgcaaattcttaa

SEQ ID NO: 866799 - DNA, 33 bp, Homo sapien
ctaggtttaagtgtcacgaaagatgaaatatgc

SEQ ID NO: 866800 - DNA, 33 bp, Homo sapien
ctaggtttaagtgtcatgaaagatgaaatatgc

SEQ ID NO: 866801 - DNA, 33 bp, Homo sapien
tctccaagaagtatcccaattgtttgtttgttt

SEQ ID NO: 866802 - DNA, 33 bp, Homo sapien
tctccaagaagtatcctaattgtttgtttgttt

SEQ ID NO: 866803 - DNA, 33 bp, Homo sapien
ttgtttttttcactaagtcgttcatatcctttt

SEQ ID NO: 866804 - DNA, 33 bp, Homo sapien
ttgtttttttcactaattcgttcatatcctttt

SEQ ID NO: 866805 - DNA, 33 bp, Homo sapien
tagatttttgccttgacagcaaatgaatattta

SEQ ID NO: 866806 - DNA, 33 bp, Homo sapien
tagatttttgccttgatagcaaatgaatattta

SEQ ID NO: 866807 - DNA, 33 bp, Homo sapien
ttcttacatccaagaaccatccccactttatac

SEQ ID NO: 866808 - DNA, 33 bp, Homo sapien
ttcttacatccaagaatcatccccactttatac

SEQ ID NO: 866809 - DNA, 33 bp, Homo sapien
aggatgtggctatttactgaacaggaatgaaag

SEQ ID NO: 866810 - DNA, 33 bp, Homo sapien
aggatgtggctatttattgaacaggaatgaaag

SEQ ID NO: 866811 - DNA, 33 bp, Homo sapien
tttgtaaggcatccaggctcttatactttgtta

SEQ ID NO: 866812 - DNA, 33 bp, Homo sapien
tttgtaaggcatccagtctcttatactttgtta

SEQ ID NO: 866813 - DNA, 33 bp, Homo sapien
taaaatgtgatgtgtacgagctaaagtaataaa

SEQ ID NO: 866814 - DNA, 33 bp, Homo sapien
taaaatgtgatgtgtatgagctaaagtaataaa

SEQ ID NO: 866815 - DNA, 33 bp, Homo sapien
tctgatgggatagttacgctttgaggttatata

SEQ ID NO: 866816 - DNA, 33 bp, Homo sapien
tctgatgggatagttatgctttgaggttatata

SEQ ID NO: 866817 - DNA, 33 bp, Homo sapien
aacatatgtgtttagcaatacagacataggtgc

SEQ ID NO: 866818 - DNA, 33 bp, Homo sapien
aacatatgtgtttagcgatacagacataggtgc

SEQ ID NO: 866819 - DNA, 33 bp, Homo sapien
acctatacctttaaaactaagcccaaggcagag

SEQ ID NO: 866820 - DNA, 33 bp, Homo sapien
acctatacctttaaaattaagcccaaggcagag

SEQ ID NO: 866821 - DNA, 33 bp, Homo sapien
tggatgtaagtacaaacgtagaagttagaattt

SEQ ID NO: 866822 - DNA, 33 bp, Homo sapien
tggatgtaagtacaaatgtagaagttagaattt

SEQ ID NO: 866823 - DNA, 33 bp, Homo sapien
gatggaaaaatagcataaaagattggctacagt

SEQ ID NO: 866824 - DNA, 33 bp, Homo sapien
gatggaaaaatagcatgaaagattggctacagt

SEQ ID NO: 866825 - DNA, 33 bp, Homo sapien
ttccctcatctgtgcaataaagataatggtaga

SEQ ID NO: 866826 - DNA, 33 bp, Homo sapien
ttccctcatctgtgcagtaaagataatggtaga

SEQ ID NO: 866827 - DNA, 33 bp, Homo sapien
ctgaaaatcaagtaacactttgcgattaggcat

SEQ ID NO: 866828 - DNA, 33 bp, Homo sapien
ctgaaaatcaagtaactctttgcgattaggcat

SEQ ID NO: 866829 - DNA, 33 bp, Homo sapien
ttacacatgagaaaaccgggcccaattaagttc

SEQ ID NO: 866830 - DNA, 33 bp, Homo sapien
ttacacatgagaaaactgggcccaattaagttc

SEQ ID NO: 866831 - DNA, 33 bp, Homo sapien
atcatcattggttaagacaaagctccttttttg

SEQ ID NO: 866832 - DNA, 33 bp, Homo sapien
atcatcattggttaaggcaaagctccttttttg

SEQ ID NO: 866833 - DNA, 33 bp, Homo sapien
taatctgcaaaatgggacaatcctatttacctc

SEQ ID NO: 866834 - DNA, 33 bp, Homo sapien
taatctgcaaaatgggccaatcctatttacctc

SEQ ID NO: 866835 - DNA, 33 bp, Homo sapien
tctgggttctagatgacggagagaacaggtcat

SEQ ID NO: 866836 - DNA, 33 bp, Homo sapien
tctgggttctagatgatggagagaacaggtcat

SEQ ID NO: 866837 - DNA, 33 bp, Homo sapien
cctctggaaatcacaaatgctgtaatgaatttt

SEQ ID NO: 866838 - DNA, 33 bp, Homo sapien
cctctggaaatcacaagtgctgtaatgaatttt

SEQ ID NO: 866839 - DNA, 33 bp, Homo sapien
agactatcaccaacaacaataaatcaggagcac

SEQ ID NO: 866840 - DNA, 33 bp, Homo sapien
agactatcaccaacaataataaatcaggagcac

SEQ ID NO: 866841 - DNA, 33 bp, Homo sapien
tagataaacaggagacaaggcatactcattatt

SEQ ID NO: 866842 - DNA, 33 bp, Homo sapien
tagataaacaggagacgaggcatactcattatt

SEQ ID NO: 866843 - DNA, 33 bp, Homo sapien
aattgttttatttgccagatgctttgtgattgc

SEQ ID NO: 866844 - DNA, 33 bp, Homo sapien
aattgttttatttgccggatgctttgtgattgc

SEQ ID NO: 866845 - DNA, 33 bp, Homo sapien
gttttactgaaactcaatagcaataacacctca

SEQ ID NO: 866846 - DNA, 33 bp, Homo sapien
gttttactgaaactcagtagcaataacacctca

SEQ ID NO: 866847 - DNA, 33 bp, Homo sapien
gatatgcttctgggccaccctgaaaatatttat

SEQ ID NO: 866848 - DNA, 33 bp, Homo sapien
gatatgcttctgggccgccctgaaaatatttat

SEQ ID NO: 866849 - DNA, 33 bp, Homo sapien
aagcaggaagcaaaacacaaatagggaggaaca

SEQ ID NO: 866850 - DNA, 33 bp, Homo sapien
aagcaggaagcaaaacgcaaatagggaggaaca

SEQ ID NO: 866851 - DNA, 33 bp, Homo sapien
cctatgtctttggagaacaactaggtatgaaac

SEQ ID NO: 866852 - DNA, 33 bp, Homo sapien
cctatgtctttggagatcaactaggtatgaaac

SEQ ID NO: 866853 - DNA, 33 bp, Homo sapien
tgcttttcatgacctccagtaactgcgagtgct

SEQ ID NO: 866854 - DNA, 33 bp, Homo sapien
tgcttttcatgacctctagtaactgcgagtgct

SEQ ID NO: 866855 - DNA, 33 bp, Homo sapien
agactgacatatagaaaaatggaacatactaat

SEQ ID NO: 866856 - DNA, 33 bp, Homo sapien
agactgacatatagaataatggaacatactaat

SEQ ID NO: 866857 - DNA, 33 bp, Homo sapien
gagtgtaaattatggacaaaagagaatcctgtg

SEQ ID NO: 866858 - DNA, 33 bp, Homo sapien
gagtgtaaattatggataaaagagaatcctgtg

SEQ ID NO: 866859 - DNA, 33 bp, Homo sapien
taaaatacctgtcaaccaagtatgttcttgaaa

SEQ ID NO: 866860 - DNA, 33 bp, Homo sapien
taaaatacctgtcaacgaagtatgttcttgaaa

SEQ ID NO: 866861 - DNA, 33 bp, Homo sapien
tttggaatgattactacacacgacactctaatt

SEQ ID NO: 866862 - DNA, 33 bp, Homo sapien
tttggaatgattactatacacgacactctaatt

SEQ ID NO: 866863 - DNA, 33 bp, Homo sapien
ctttgcttcagtaagacgatacaaattcaacta

SEQ ID NO: 866864 - DNA, 33 bp, Homo sapien
ctttgcttcagtaagatgatacaaattcaacta

SEQ ID NO: 866865 - DNA, 33 bp, Homo sapien
tgaatcaagcttaaaacgaatggacttaaaagc

SEQ ID NO: 866866 - DNA, 33 bp, Homo sapien
tgaatcaagcttaaaatgaatggacttaaaagc

SEQ ID NO: 866867 - DNA, 33 bp, Homo sapien
atgatgactgcaggcacagaataaagctggtga

SEQ ID NO: 866868 - DNA, 33 bp, Homo sapien
atgatgactgcaggcagagaataaagctggtga

SEQ ID NO: 866869 - DNA, 33 bp, Homo sapien
ctaagtgctacgctgaaacttaaatatttcgaa

SEQ ID NO: 866870 - DNA, 33 bp, Homo sapien
ctaagtgctacgctgagacttaaatatttcgaa

SEQ ID NO: 866871 - DNA, 33 bp, Homo sapien
ttacacccatcacacaacattgcaattatgctt

SEQ ID NO: 866872 - DNA, 33 bp, Homo sapien
ttacacccatcacacaccattgcaattatgctt

SEQ ID NO: 866873 - DNA, 33 bp, Homo sapien
tttatatccatcataaatgaaatcagcaacagt

SEQ ID NO: 866874 - DNA, 33 bp, Homo sapien
tttatatccatcataactgaaatcagcaacagt

SEQ ID NO: 866875 - DNA, 33 bp, Homo sapien
ttatgttcctagagaacggctaatactgataat

SEQ ID NO: 866876 - DNA, 33 bp, Homo sapien
ttatgttcctagagaatggctaatactgataat

SEQ ID NO: 866877 - DNA, 33 bp, Homo sapien
ttggaatctattcttgcaatttcagggatatta

SEQ ID NO: 866878 - DNA, 33 bp, Homo sapien
ttggaatctattcttgtaatttcagggatatta

SEQ ID NO: 866879 - DNA, 33 bp, Homo sapien
atatattttcttttagccagctatgaggtataa

SEQ ID NO: 866880 - DNA, 33 bp, Homo sapien
atatattttcttttagtcagctatgaggtataa

SEQ ID NO: 866881 - DNA, 33 bp, Homo sapien
tccatgccctcttcaacaagcaatatctaccta

SEQ ID NO: 866882 - DNA, 33 bp, Homo sapien
tccatgccctcttcaagaagcaatatctaccta

SEQ ID NO: 866883 - DNA, 33 bp, Homo sapien
caagcagaacattcgcaacttaattatgcatac

SEQ ID NO: 866884 - DNA, 33 bp, Homo sapien
caagcagaacattcgcgacttaattatgcatac

SEQ ID NO: 866885 - DNA, 33 bp, Homo sapien
ttaggtccaggtttctcaacagcagtgctactg

SEQ ID NO: 866886 - DNA, 33 bp, Homo sapien
ttaggtccaggtttcttaacagcagtgctactg

SEQ ID NO: 866887 - DNA, 33 bp, Homo sapien
attgaggttgtgatgaaccaggatagtgccact

SEQ ID NO: 866888 - DNA, 33 bp, Homo sapien
attgaggttgtgatgatccaggatagtgccact

SEQ ID NO: 866889 - DNA, 33 bp, Homo sapien
aaacaacaacattaaaacaggcagagtaaatgc

SEQ ID NO: 866890 - DNA, 33 bp, Homo sapien
aaacaacaacattaaagcaggcagagtaaatgc

SEQ ID NO: 866891 - DNA, 33 bp, Homo sapien
taaaagctacagcaggaaaaaacagaagcaaaa

SEQ ID NO: 866892 - DNA, 33 bp, Homo sapien
taaaagctacagcagggaaaaacagaagcaaaa

SEQ ID NO: 866893 - DNA, 33 bp, Homo sapien
tccttccatctctttacagtatctccatgtggt

SEQ ID NO: 866894 - DNA, 33 bp, Homo sapien
tccttccatctctttatagtatctccatgtggt

SEQ ID NO: 866895 - DNA, 33 bp, Homo sapien
tggtagctcagagctacgaagatgtatatttca

SEQ ID NO: 866896 - DNA, 33 bp, Homo sapien
tggtagctcagagctatgaagatgtatatttca

SEQ ID NO: 866897 - DNA, 33 bp, Homo sapien
gaaggacagaaaccaaaagtgaaaaagctctga

SEQ ID NO: 866898 - DNA, 33 bp, Homo sapien
gaaggacagaaaccaatagtgaaaaagctctga

SEQ ID NO: 866899 - DNA, 33 bp, Homo sapien
tcttaaccccaggtaacggtctgatggtaagtt

SEQ ID NO: 866900 - DNA, 33 bp, Homo sapien
tcttaaccccaggtaatggtctgatggtaagtt

SEQ ID NO: 866901 - DNA, 33 bp, Homo sapien
acgtgacttacaaagccagattagaaaaggtga

SEQ ID NO: 866902 - DNA, 33 bp, Homo sapien
acgtgacttacaaagctagattagaaaaggtga

SEQ ID NO: 866903 - DNA, 33 bp, Homo sapien
tacacctgaattatgacgcagtagttctgatag

SEQ ID NO: 866904 - DNA, 33 bp, Homo sapien
tacacctgaattatgatgcagtagttctgatag

SEQ ID NO: 866905 - DNA, 33 bp, Homo sapien
taccttataggctacacaatcttctgagcatag

SEQ ID NO: 866906 - DNA, 33 bp, Homo sapien
taccttataggctacataatcttctgagcatag

SEQ ID NO: 866907 - DNA, 33 bp, Homo sapien
aaagatgatattctccaaggtgtccagacaatc

SEQ ID NO: 866908 - DNA, 33 bp, Homo sapien
aaagatgatattctccgaggtgtccagacaatc

SEQ ID NO: 866909 - DNA, 33 bp, Homo sapien
tctctaattgcaaccactataccagacatggca

SEQ ID NO: 866910 - DNA, 33 bp, Homo sapien
tctctaattgcaaccattataccagacatggca

SEQ ID NO: 866911 - DNA, 33 bp, Homo sapien
tagtgcctggtagtcaatagccactaaataata

SEQ ID NO: 866912 - DNA, 33 bp, Homo sapien
tagtgcctggtagtcagtagccactaaataata

SEQ ID NO: 866913 - DNA, 33 bp, Homo sapien
tactaaatgccttcaaaaaaactttataatgac

SEQ ID NO: 866914 - DNA, 33 bp, Homo sapien
tactaaatgccttcaacaaaactttataatgac

SEQ ID NO: 866915 - DNA, 33 bp, Homo sapien
gcttcattctggagataagtatttagtgactgc

SEQ ID NO: 866916 - DNA, 33 bp, Homo sapien
gcttcattctggagatgagtatttagtgactgc

SEQ ID NO: 866917 - DNA, 33 bp, Homo sapien
tttatgatccatcaaaacaactatttggaagac

SEQ ID NO: 866918 - DNA, 33 bp, Homo sapien
tttatgatccatcaaaccaactatttggaagac

SEQ ID NO: 866919 - DNA, 33 bp, Homo sapien
ctcacatcattgttataaagattgggtgcacgt

SEQ ID NO: 866920 - DNA, 33 bp, Homo sapien
ctcacatcattgttatcaagattgggtgcacgt

SEQ ID NO: 866921 - DNA, 33 bp, Homo sapien
tatgtcaggagcaccagactagagtcactggca

SEQ ID NO: 866922 - DNA, 33 bp, Homo sapien
tatgtcaggagcaccatactagagtcactggca

SEQ ID NO: 866923 - DNA, 33 bp, Homo sapien
gtaccatggattgcctcaccttatattttgaag

SEQ ID NO: 866924 - DNA, 33 bp, Homo sapien
gtaccatggattgcctgaccttatattttgaag

SEQ ID NO: 866925 - DNA, 33 bp, Homo sapien
ccttgagtaagctggaacctatttgtgtttcat

SEQ ID NO: 866926 - DNA, 33 bp, Homo sapien
ccttgagtaagctggagcctatttgtgtttcat

SEQ ID NO: 866927 - DNA, 33 bp, Homo sapien
ggtgtattgcccatggccagagaggaaattaag

SEQ ID NO: 866928 - DNA, 33 bp, Homo sapien
ggtgtattgcccatggtcagagaggaaattaag

SEQ ID NO: 866929 - DNA, 33 bp, Homo sapien
caaagcaccactaataaaaataaataggcatcg

SEQ ID NO: 866930 - DNA, 33 bp, Homo sapien
caaagcaccactaatacaaataaataggcatcg

SEQ ID NO: 866931 - DNA, 33 bp, Homo sapien
cacaatattagtgagaacaaaatggcctcagaa

SEQ ID NO: 866932 - DNA, 33 bp, Homo sapien
cacaatattagtgagagcaaaatggcctcagaa

SEQ ID NO: 866933 - DNA, 33 bp, Homo sapien
agttctgtcagttgtgaataaccctcaagaatt

SEQ ID NO: 866934 - DNA, 33 bp, Homo sapien
agttctgtcagttgtgcataaccctcaagaatt

SEQ ID NO: 866935 - DNA, 33 bp, Homo sapien
gctagaactcatcacaagttttgataaattctc

SEQ ID NO: 866936 - DNA, 33 bp, Homo sapien
gctagaactcatcacatgttttgataaattctc

SEQ ID NO: 866937 - DNA, 33 bp, Homo sapien
tccatatttcaacatcaacctactttcttcata

SEQ ID NO: 866938 - DNA, 33 bp, Homo sapien
tccatatttcaacatcgacctactttcttcata

SEQ ID NO: 866939 - DNA, 33 bp, Homo sapien
aatctcataagtggcaatattgttgctaaaacc

SEQ ID NO: 866940 - DNA, 33 bp, Homo sapien
aatctcataagtggcattattgttgctaaaacc

SEQ ID NO: 866941 - DNA, 33 bp, Homo sapien
ttattaatgaaggaatcacagtaatggtaaagc

SEQ ID NO: 866942 - DNA, 33 bp, Homo sapien
ttattaatgaaggaatgacagtaatggtaaagc

SEQ ID NO: 866943 - DNA, 33 bp, Homo sapien
tgtggaatttagcttccaggaagaaatgggaaa

SEQ ID NO: 866944 - DNA, 33 bp, Homo sapien
tgtggaatttagcttctaggaagaaatgggaaa

SEQ ID NO: 866945 - DNA, 33 bp, Homo sapien
tgatatgctaagcaaactgaaggtatagtaaat

SEQ ID NO: 866946 - DNA, 33 bp, Homo sapien
tgatatgctaagcaaagtgaaggtatagtaaat

SEQ ID NO: 866947 - DNA, 33 bp, Homo sapien
gtatacatcaatgtcaaatgttaaggtggaaga

SEQ ID NO: 866948 - DNA, 33 bp, Homo sapien
gtatacatcaatgtcagatgttaaggtggaaga

SEQ ID NO: 866949 - DNA, 33 bp, Homo sapien
gtggttcggtctcctcaactaagcattgtggtc

SEQ ID NO: 866950 - DNA, 33 bp, Homo sapien
gtggttcggtctcctcgactaagcattgtggtc

SEQ ID NO: 866951 - DNA, 33 bp, Homo sapien
agaggccaaatgaaacaagctaaggaaagaagg

SEQ ID NO: 866952 - DNA, 33 bp, Homo sapien
agaggccaaatgaaacgagctaaggaaagaagg

SEQ ID NO: 866953 - DNA, 33 bp, Homo sapien
aaaatttgcacgttcaataatgaataaactaaa

SEQ ID NO: 866954 - DNA, 33 bp, Homo sapien
aaaatttgcacgttcagtaatgaataaactaaa

SEQ ID NO: 866955 - DNA, 33 bp, Homo sapien
tctaatttaatgtttagcaagtgctgtgaaata

SEQ ID NO: 866956 - DNA, 33 bp, Homo sapien
tctaatttaatgtttatcaagtgctgtgaaata

SEQ ID NO: 866957 - DNA, 33 bp, Homo sapien
ggatagctctctcaggaatagcctgcatctgct

SEQ ID NO: 866958 - DNA, 33 bp, Homo sapien
ggatagctctctcagggatagcctgcatctgct

SEQ ID NO: 866959 - DNA, 33 bp, Homo sapien
ttgtgaaagtaggcacagacattggaagtgata

SEQ ID NO: 866960 - DNA, 33 bp, Homo sapien
ttgtgaaagtaggcacggacattggaagtgata

SEQ ID NO: 866961 - DNA, 33 bp, Homo sapien
aagtgatagtgaatagaagaagaacatctcagg

SEQ ID NO: 866962 - DNA, 33 bp, Homo sapien
aagtgatagtgaataggagaagaacatctcagg

SEQ ID NO: 866963 - DNA, 33 bp, Homo sapien
aatgaaacgttaagtaccccaagatggcacttg

SEQ ID NO: 866964 - DNA, 33 bp, Homo sapien
aatgaaacgttaagtagcccaagatggcacttg

SEQ ID NO: 866965 - DNA, 33 bp, Homo sapien
aatcctctatgtacaacgtatgttatttcaggt

SEQ ID NO: 866966 - DNA, 33 bp, Homo sapien
aatcctctatgtacaatgtatgttatttcaggt

SEQ ID NO: 866967 - DNA, 33 bp, Homo sapien
actctagatcgctttacgtagtatagataatta

SEQ ID NO: 866968 - DNA, 33 bp, Homo sapien
actctagatcgctttatgtagtatagataatta

SEQ ID NO: 866969 - DNA, 33 bp, Homo sapien
catataaaagatgtccaaaattattaatcatta

SEQ ID NO: 866970 - DNA, 33 bp, Homo sapien
catataaaagatgtccgaaattattaatcatta

SEQ ID NO: 866971 - DNA, 33 bp, Homo sapien
tttaagtttggacaaaattcaatttatcacttt

SEQ ID NO: 866972 - DNA, 33 bp, Homo sapien
tttaagtttggacaaagttcaatttatcacttt

SEQ ID NO: 866973 - DNA, 33 bp, Homo sapien
accctcagagacacccaattttcccatgtaaca

SEQ ID NO: 866974 - DNA, 33 bp, Homo sapien
accctcagagacacccgattttcccatgtaaca

SEQ ID NO: 866975 - DNA, 33 bp, Homo sapien
gatgatgaataaaaccgagtgcttcagtgtact

SEQ ID NO: 866976 - DNA, 33 bp, Homo sapien
gatgatgaataaaacctagtgcttcagtgtact

SEQ ID NO: 866977 - DNA, 33 bp, Homo sapien
accaacatcctctttacgacttaatccatattt

SEQ ID NO: 866978 - DNA, 33 bp, Homo sapien
accaacatcctctttatgacttaatccatattt

SEQ ID NO: 866979 - DNA, 33 bp, Homo sapien
tataactttcttttcaaatgtcaacacactaac

SEQ ID NO: 866980 - DNA, 33 bp, Homo sapien
tataactttcttttcagatgtcaacacactaac

SEQ ID NO: 866981 - DNA, 33 bp, Homo sapien
atatatcacagtatgaaggtattaactatgaag

SEQ ID NO: 866982 - DNA, 33 bp, Homo sapien
atatatcacagtatgagggtattaactatgaag

SEQ ID NO: 866983 - DNA, 33 bp, Homo sapien
atttgggagctctggaaaccttaactggcatag

SEQ ID NO: 866984 - DNA, 33 bp, Homo sapien
atttgggagctctggacaccttaactggcatag

SEQ ID NO: 866985 - DNA, 33 bp, Homo sapien
ttctgacttcctgctcaccaagctaccttccga

SEQ ID NO: 866986 - DNA, 33 bp, Homo sapien
ttctgacttcctgctcgccaagctaccttccga

SEQ ID NO: 866987 - DNA, 33 bp, Homo sapien
actaagcactagacaaagagtgatgaaggcaac

SEQ ID NO: 866988 - DNA, 33 bp, Homo sapien
actaagcactagacaacgagtgatgaaggcaac

SEQ ID NO: 866989 - DNA, 33 bp, Homo sapien
ttcaggaggctgttagaaatgcaaatctgactt

SEQ ID NO: 866990 - DNA, 33 bp, Homo sapien
ttcaggaggctgttaggaatgcaaatctgactt

SEQ ID NO: 866991 - DNA, 33 bp, Homo sapien
tcagcaccgtaaacaactgtgagtgtgatagag

SEQ ID NO: 866992 - DNA, 33 bp, Homo sapien
tcagcaccgtaaacaattgtgagtgtgatagag

SEQ ID NO: 866993 - DNA, 33 bp, Homo sapien
aatcagtgtgacatcactgaagaacacatggct

SEQ ID NO: 866994 - DNA, 33 bp, Homo sapien
aatcagtgtgacatcattgaagaacacatggct

SEQ ID NO: 866995 - DNA, 33 bp, Homo sapien
atcctcacaacaagcaagtgaggaacccatggc

SEQ ID NO: 866996 - DNA, 33 bp, Homo sapien
atcctcacaacaagcaggtgaggaacccatggc

SEQ ID NO: 866997 - DNA, 33 bp, Homo sapien
cttagaatggaggcaacgttgaaaccaagagta

SEQ ID NO: 866998 - DNA, 33 bp, Homo sapien
cttagaatggaggcaatgttgaaaccaagagta

SEQ ID NO: 866999 - DNA, 33 bp, Homo sapien
cattcttcccctagacacagagatttgtaaaag

SEQ ID NO: 867000 - DNA, 33 bp, Homo sapien
cattcttcccctagacgcagagatttgtaaaag

SEQ ID NO: 867001 - DNA, 33 bp, Homo sapien
gaactcatgctccatcactttaattggtgtaat

SEQ ID NO: 867002 - DNA, 33 bp, Homo sapien
gaactcatgctccatctctttaattggtgtaat

SEQ ID NO: 867003 - DNA, 33 bp, Homo sapien
gactcagaattgttaacatgataaaacttttaa

SEQ ID NO: 867004 - DNA, 33 bp, Homo sapien
gactcagaattgttaagatgataaaacttttaa

SEQ ID NO: 867005 - DNA, 33 bp, Homo sapien
ccacaaaagtaggagacctgctatttattttat

SEQ ID NO: 867006 - DNA, 33 bp, Homo sapien
ccacaaaagtaggagatctgctatttattttat

SEQ ID NO: 867007 - DNA, 33 bp, Homo sapien
caggagagatatctagactaacagaatttggtg

SEQ ID NO: 867008 - DNA, 33 bp, Homo sapien
caggagagatatctaggctaacagaatttggtg

SEQ ID NO: 867009 - DNA, 33 bp, Homo sapien
tatgtaacatgaaaaactcagttatgtgatgcc

SEQ ID NO: 867010 - DNA, 33 bp, Homo sapien
tatgtaacatgaaaaagtcagttatgtgatgcc

SEQ ID NO: 867011 - DNA, 33 bp, Homo sapien
agaagaagaaggaaaacatgtcttgtgttgaaa

SEQ ID NO: 867012 - DNA, 33 bp, Homo sapien
agaagaagaaggaaaagatgtcttgtgttgaaa

SEQ ID NO: 867013 - DNA, 33 bp, Homo sapien
gccatagtcatgataaacttctctttgttgtca

SEQ ID NO: 867014 - DNA, 33 bp, Homo sapien
gccatagtcatgataaccttctctttgttgtca

SEQ ID NO: 867015 - DNA, 33 bp, Homo sapien
caactggtgaacagataagcaaaatgtgacaca

SEQ ID NO: 867016 - DNA, 33 bp, Homo sapien
caactggtgaacagatgagcaaaatgtgacaca

SEQ ID NO: 867017 - DNA, 33 bp, Homo sapien
acaggatagaagattcagaagattttttagtat

SEQ ID NO: 867018 - DNA, 33 bp, Homo sapien
acaggatagaagattcggaagattttttagtat

SEQ ID NO: 867019 - DNA, 33 bp, Homo sapien
agcagctacttaacatcatggttcatttgaaaa

SEQ ID NO: 867020 - DNA, 33 bp, Homo sapien
agcagctacttaacatgatggttcatttgaaaa

SEQ ID NO: 867021 - DNA, 33 bp, Homo sapien
aacagcaaatagggtcaagatttaagagatttt

SEQ ID NO: 867022 - DNA, 33 bp, Homo sapien
aacagcaaatagggtccagatttaagagatttt

SEQ ID NO: 867023 - DNA, 33 bp, Homo sapien
tgtttgctttattttcaaaagtgcattatgcct

SEQ ID NO: 867024 - DNA, 33 bp, Homo sapien
tgtttgctttattttccaaagtgcattatgcct

SEQ ID NO: 867025 - DNA, 33 bp, Homo sapien
caatgataacagactacgtaaccttgagctggc

SEQ ID NO: 867026 - DNA, 33 bp, Homo sapien
caatgataacagactatgtaaccttgagctggc

SEQ ID NO: 867027 - DNA, 33 bp, Homo sapien
aaaaacatactctcaaacatttcctagatataa

SEQ ID NO: 867028 - DNA, 33 bp, Homo sapien
aaaaacatactctcaatcatttcctagatataa

SEQ ID NO: 867029 - DNA, 33 bp, Homo sapien
gtaatgtggaagtaccccactcctgtgccagct

SEQ ID NO: 867030 - DNA, 33 bp, Homo sapien
gtaatgtggaagtacctcactcctgtgccagct

SEQ ID NO: 867031 - DNA, 33 bp, Homo sapien
ttaatcattgcttacacgatggacagtatgaac

SEQ ID NO: 867032 - DNA, 33 bp, Homo sapien
ttaatcattgcttacaggatggacagtatgaac

SEQ ID NO: 867033 - DNA, 33 bp, Homo sapien
gccagtgtagggtacaataaacccaagggctag

SEQ ID NO: 867034 - DNA, 33 bp, Homo sapien
gccagtgtagggtacagtaaacccaagggctag

SEQ ID NO: 867035 - DNA, 33 bp, Homo sapien
aagcagaaacagggaaacatttatggacagcca

SEQ ID NO: 867036 - DNA, 33 bp, Homo sapien
aagcagaaacagggaagcatttatggacagcca

SEQ ID NO: 867037 - DNA, 33 bp, Homo sapien
tgtctgaagataaaaacgcactggtatcattgt

SEQ ID NO: 867038 - DNA, 33 bp, Homo sapien
tgtctgaagataaaaatgcactggtatcattgt

SEQ ID NO: 867039 - DNA, 33 bp, Homo sapien
cctactcctgccactacgtttcactgcaaataa

SEQ ID NO: 867040 - DNA, 33 bp, Homo sapien
cctactcctgccactatgtttcactgcaaataa

SEQ ID NO: 867041 - DNA, 33 bp, Homo sapien
attactaagagccttaggaggaacagcggacag

SEQ ID NO: 867042 - DNA, 33 bp, Homo sapien
attactaagagccttatgaggaacagcggacag

SEQ ID NO: 867043 - DNA, 33 bp, Homo sapien
agcttcatgttgacttaaagaacattttgtcca

SEQ ID NO: 867044 - DNA, 33 bp, Homo sapien
agcttcatgttgacttcaagaacattttgtcca

SEQ ID NO: 867045 - DNA, 33 bp, Homo sapien
aacttcagaggaaagacgcagaaacctccagga

SEQ ID NO: 867046 - DNA, 33 bp, Homo sapien
aacttcagaggaaagaggcagaaacctccagga

SEQ ID NO: 867047 - DNA, 33 bp, Homo sapien
taaatctgatatttccaagtcaagaatatgagg

SEQ ID NO: 867048 - DNA, 33 bp, Homo sapien
taaatctgatatttccgagtcaagaatatgagg

SEQ ID NO: 867049 - DNA, 33 bp, Homo sapien
atccctagtgacaataaatagcctaccacccag

SEQ ID NO: 867050 - DNA, 33 bp, Homo sapien
atccctagtgacaatacatagcctaccacccag

SEQ ID NO: 867051 - DNA, 33 bp, Homo sapien
tccagtgcacaatttacgagagaaagagaaatt

SEQ ID NO: 867052 - DNA, 33 bp, Homo sapien
tccagtgcacaatttatgagagaaagagaaatt

SEQ ID NO: 867053 - DNA, 33 bp, Homo sapien
agtacgtcttcctataaaggattgcattttcct

SEQ ID NO: 867054 - DNA, 33 bp, Homo sapien
agtacgtcttcctatacaggattgcattttcct

SEQ ID NO: 867055 - DNA, 33 bp, Homo sapien
tgattcataaaatccaactcatttctaatacat

SEQ ID NO: 867056 - DNA, 33 bp, Homo sapien
tgattcataaaatccagctcatttctaatacat

SEQ ID NO: 867057 - DNA, 33 bp, Homo sapien
tagtagtcctgtgaacacttttgagatttttag

SEQ ID NO: 867058 - DNA, 33 bp, Homo sapien
tagtagtcctgtgaacccttttgagatttttag

SEQ ID NO: 867059 - DNA, 33 bp, Homo sapien
aaacagtcatggaaaccaagtccactagtggca

SEQ ID NO: 867060 - DNA, 33 bp, Homo sapien
aaacagtcatggaaacgaagtccactagtggca

SEQ ID NO: 867061 - DNA, 33 bp, Homo sapien
atccaggaagggaatcgctgtttttctgcatgg

SEQ ID NO: 867062 - DNA, 33 bp, Homo sapien
atccaggaagggaatctctgtttttctgcatgg

SEQ ID NO: 867063 - DNA, 33 bp, Homo sapien
gctctcagagaatgccaaagtaagatagcgatc

SEQ ID NO: 867064 - DNA, 33 bp, Homo sapien
gctctcagagaatgcccaagtaagatagcgatc

SEQ ID NO: 867065 - DNA, 33 bp, Homo sapien
aatgttttgtgaagccaaaagacacttttatat

SEQ ID NO: 867066 - DNA, 33 bp, Homo sapien
aatgttttgtgaagccgaaagacacttttatat

SEQ ID NO: 867067 - DNA, 33 bp, Homo sapien
caacttaattccagcaaagttacatacaaaaga

SEQ ID NO: 867068 - DNA, 33 bp, Homo sapien
caacttaattccagcatagttacatacaaaaga

SEQ ID NO: 867069 - DNA, 33 bp, Homo sapien
acatattccattcgtggattgaagggctcaaca

SEQ ID NO: 867070 - DNA, 33 bp, Homo sapien
acatattccattcgtgtattgaagggctcaaca

SEQ ID NO: 867071 - DNA, 33 bp, Homo sapien
aggctctagaaggaacacagtgattagagacta

SEQ ID NO: 867072 - DNA, 33 bp, Homo sapien
aggctctagaaggaacgcagtgattagagacta

SEQ ID NO: 867073 - DNA, 33 bp, Homo sapien
aggtcttctaatgtcacagatatagcagatttt

SEQ ID NO: 867074 - DNA, 33 bp, Homo sapien
aggtcttctaatgtcagagatatagcagatttt

SEQ ID NO: 867075 - DNA, 33 bp, Homo sapien
tatatgaatttgtctacattggctactgggtat

SEQ ID NO: 867076 - DNA, 33 bp, Homo sapien
tatatgaatttgtctatattggctactgggtat

SEQ ID NO: 867077 - DNA, 33 bp, Homo sapien
tcctgttatacccagacaaataataatcttctt

SEQ ID NO: 867078 - DNA, 33 bp, Homo sapien
tcctgttatacccagagaaataataatcttctt

SEQ ID NO: 867079 - DNA, 33 bp, Homo sapien
aagagttgaaagaataagacaatgaacacctat

SEQ ID NO: 867080 - DNA, 33 bp, Homo sapien
aagagttgaaagaataggacaatgaacacctat

SEQ ID NO: 867081 - DNA, 33 bp, Homo sapien
atcttaaaacataaccaccttgaagcttctttc

SEQ ID NO: 867082 - DNA, 33 bp, Homo sapien
atcttaaaacataaccgccttgaagcttctttc

SEQ ID NO: 867083 - DNA, 33 bp, Homo sapien
ctttgaatgaatggacaaggtttcataacacat

SEQ ID NO: 867084 - DNA, 33 bp, Homo sapien
ctttgaatgaatggacgaggtttcataacacat

SEQ ID NO: 867085 - DNA, 33 bp, Homo sapien
gtatatatgattatgccacagagaaagtccaga

SEQ ID NO: 867086 - DNA, 33 bp, Homo sapien
gtatatatgattatgctacagagaaagtccaga

SEQ ID NO: 867087 - DNA, 33 bp, Homo sapien
atggaagttgatttcaccgtggttgagtaagtc

SEQ ID NO: 867088 - DNA, 33 bp, Homo sapien
atggaagttgatttcatcgtggttgagtaagtc

SEQ ID NO: 867089 - DNA, 33 bp, Homo sapien
taagtgccctatgcaggcgcgtcattttttatc

SEQ ID NO: 867090 - DNA, 33 bp, Homo sapien
taagtgccctatgcagtcgcgtcattttttatc

SEQ ID NO: 867091 - DNA, 33 bp, Homo sapien
ttgctcaatggctttccaaagttaagttcaata

SEQ ID NO: 867092 - DNA, 33 bp, Homo sapien
ttgctcaatggctttctaaagttaagttcaata

SEQ ID NO: 867093 - DNA, 33 bp, Homo sapien
agactagattctggacaagcatttctcaactct

SEQ ID NO: 867094 - DNA, 33 bp, Homo sapien
agactagattctggacgagcatttctcaactct

SEQ ID NO: 867095 - DNA, 33 bp, Homo sapien
ttgacagatgtgtagccccttgaggttttaaaa

SEQ ID NO: 867096 - DNA, 33 bp, Homo sapien
ttgacagatgtgtagctccttgaggttttaaaa

SEQ ID NO: 867097 - DNA, 33 bp, Homo sapien
tcactataatatcagacagattttggtggatac

SEQ ID NO: 867098 - DNA, 33 bp, Homo sapien
tcactataatatcagagagattttggtggatac

SEQ ID NO: 867099 - DNA, 33 bp, Homo sapien
ctgaaccacatcaaaaaggcatagtgagtgctt

SEQ ID NO: 867100 - DNA, 33 bp, Homo sapien
ctgaaccacatcaaaagggcatagtgagtgctt

SEQ ID NO: 867101 - DNA, 33 bp, Homo sapien
ctttctgactagttgcaagattaacatcaggga

SEQ ID NO: 867102 - DNA, 33 bp, Homo sapien
ctttctgactagttgccagattaacatcaggga

SEQ ID NO: 867103 - DNA, 33 bp, Homo sapien
atgctaggttttacaactctgtgtatcagctgc

SEQ ID NO: 867104 - DNA, 33 bp, Homo sapien
atgctaggttttacaagtctgtgtatcagctgc

SEQ ID NO: 867105 - DNA, 33 bp, Homo sapien
tgggatttaatttttgaatcatgacagtttagc

SEQ ID NO: 867106 - DNA, 33 bp, Homo sapien
tgggatttaatttttggatcatgacagtttagc

SEQ ID NO: 867107 - DNA, 33 bp, Homo sapien
cattactagcataagcactcatcaaaatattgc

SEQ ID NO: 867108 - DNA, 33 bp, Homo sapien
cattactagcataagcgctcatcaaaatattgc

SEQ ID NO: 867109 - DNA, 33 bp, Homo sapien
tttctcattactattgaatacgtcaaaagaaga

SEQ ID NO: 867110 - DNA, 33 bp, Homo sapien
tttctcattactattgcatacgtcaaaagaaga

SEQ ID NO: 867111 - DNA, 33 bp, Homo sapien
ggaagaaatattaaaactttgctctgaacatat

SEQ ID NO: 867112 - DNA, 33 bp, Homo sapien
ggaagaaatattaaaagtttgctctgaacatat

SEQ ID NO: 867113 - DNA, 33 bp, Homo sapien
tcccaaagtgttgcgactacaggtttgagccac

SEQ ID NO: 867114 - DNA, 33 bp, Homo sapien
tcccaaagtgttgcgattacaggtttgagccac

SEQ ID NO: 867115 - DNA, 33 bp, Homo sapien
ttatcaatgaggttcacgttaaattataatcat

SEQ ID NO: 867116 - DNA, 33 bp, Homo sapien
ttatcaatgaggttcatgttaaattataatcat

SEQ ID NO: 867117 - DNA, 33 bp, Homo sapien
taaggagcaccaaaggaaaacataggaacaaat

SEQ ID NO: 867118 - DNA, 33 bp, Homo sapien
taaggagcaccaaagggaaacataggaacaaat

SEQ ID NO: 867119 - DNA, 33 bp, Homo sapien
aaaaagtagtctgaaaactttggctgttttctt

SEQ ID NO: 867120 - DNA, 33 bp, Homo sapien
aaaaagtagtctgaaagctttggctgttttctt

SEQ ID NO: 867121 - DNA, 33 bp, Homo sapien
ttagtaaagacttatacagttcgtattcagcta

SEQ ID NO: 867122 - DNA, 33 bp, Homo sapien
ttagtaaagacttatagagttcgtattcagcta

SEQ ID NO: 867123 - DNA, 33 bp, Homo sapien
tgagtgattgctatcactatttccaaaatctct

SEQ ID NO: 867124 - DNA, 33 bp, Homo sapien
tgagtgattgctatcattatttccaaaatctct

SEQ ID NO: 867125 - DNA, 33 bp, Homo sapien
atatactggatgtagcaataccaatatatatac

SEQ ID NO: 867126 - DNA, 33 bp, Homo sapien
atatactggatgtagcgataccaatatatatac

SEQ ID NO: 867127 - DNA, 33 bp, Homo sapien
tatttacgttccatgacagtaattacaacttgc

SEQ ID NO: 867128 - DNA, 33 bp, Homo sapien
tatttacgttccatgatagtaattacaacttgc

SEQ ID NO: 867129 - DNA, 33 bp, Homo sapien
ttggactaggaaggatgagcaggctgacagggc

SEQ ID NO: 867130 - DNA, 33 bp, Homo sapien
ttggactaggaaggattagcaggctgacagggc

SEQ ID NO: 867131 - DNA, 33 bp, Homo sapien
aaggtattagagatgcaagaataaacaaggcac

SEQ ID NO: 867132 - DNA, 33 bp, Homo sapien
aaggtattagagatgccagaataaacaaggcac

SEQ ID NO: 867133 - DNA, 33 bp, Homo sapien
cttatcctattctagcaaaattgtttgttttcc

SEQ ID NO: 867134 - DNA, 33 bp, Homo sapien
cttatcctattctagcgaaattgtttgttttcc

SEQ ID NO: 867135 - DNA, 33 bp, Homo sapien
tgatacagttttgagggattacaaaaggcttcc

SEQ ID NO: 867136 - DNA, 33 bp, Homo sapien
tgatacagttttgaggtattacaaaaggcttcc

SEQ ID NO: 867137 - DNA, 33 bp, Homo sapien
agttttcactttatcccgaacacaagggcatta

SEQ ID NO: 867138 - DNA, 33 bp, Homo sapien
agttttcactttatcctgaacacaagggcatta

SEQ ID NO: 867139 - DNA, 33 bp, Homo sapien
cacaagtctgatcatacaactccactaattaaa

SEQ ID NO: 867140 - DNA, 33 bp, Homo sapien
cacaagtctgatcatataactccactaattaaa

SEQ ID NO: 867141 - DNA, 33 bp, Homo sapien
tggagcactctttttaaaacacaagtctgatca

SEQ ID NO: 867142 - DNA, 33 bp, Homo sapien
tggagcactctttttacaacacaagtctgatca

SEQ ID NO: 867143 - DNA, 33 bp, Homo sapien
tgtatcctcctttgtgaattttccctgcatcta

SEQ ID NO: 867144 - DNA, 33 bp, Homo sapien
tgtatcctcctttgtggattttccctgcatcta

SEQ ID NO: 867145 - DNA, 33 bp, Homo sapien
tattgttcactacttacgaaaaatactctagct

SEQ ID NO: 867146 - DNA, 33 bp, Homo sapien
tattgttcactacttatgaaaaatactctagct

SEQ ID NO: 867147 - DNA, 33 bp, Homo sapien
tatagtaactgccagaatagaagctgggacaag

SEQ ID NO: 867148 - DNA, 33 bp, Homo sapien
tatagtaactgccagactagaagctgggacaag

SEQ ID NO: 867149 - DNA, 33 bp, Homo sapien
ttactacaggaaagaactgctttggcaaggatg

SEQ ID NO: 867150 - DNA, 33 bp, Homo sapien
ttactacaggaaagaattgctttggcaaggatg

SEQ ID NO: 867151 - DNA, 33 bp, Homo sapien
cacttaaaacaccagacgaattggcaggtaggg

SEQ ID NO: 867152 - DNA, 33 bp, Homo sapien
cacttaaaacaccagatgaattggcaggtaggg

SEQ ID NO: 867153 - DNA, 33 bp, Homo sapien
ttttatggtatgccaaactctagaccttagttg

SEQ ID NO: 867154 - DNA, 33 bp, Homo sapien
ttttatggtatgccaagctctagaccttagttg

SEQ ID NO: 867155 - DNA, 33 bp, Homo sapien
acaggggcccagatcaggtacttctttttcatt

SEQ ID NO: 867156 - DNA, 33 bp, Homo sapien
acaggggcccagatcatgtacttctttttcatt

SEQ ID NO: 867157 - DNA, 33 bp, Homo sapien
tcttcttctagtgtggacaaaagattggacacc

SEQ ID NO: 867158 - DNA, 33 bp, Homo sapien
tcttcttctagtgtggtcaaaagattggacacc

SEQ ID NO: 867159 - DNA, 33 bp, Homo sapien
ttgtatagaaattagaaccatctttatctgtgc

SEQ ID NO: 867160 - DNA, 33 bp, Homo sapien
ttgtatagaaattagagccatctttatctgtgc

SEQ ID NO: 867161 - DNA, 33 bp, Homo sapien
ggcttatcttgaccaacataaaagcaaacacat

SEQ ID NO: 867162 - DNA, 33 bp, Homo sapien
ggcttatcttgaccaatataaaagcaaacacat

SEQ ID NO: 867163 - DNA, 33 bp, Homo sapien
tggtattagaggttaaagttagattccctagtt

SEQ ID NO: 867164 - DNA, 33 bp, Homo sapien
tggtattagaggttaaggttagattccctagtt

SEQ ID NO: 867165 - DNA, 33 bp, Homo sapien
gcaagcccacgagacacagaaaatgggagccaa

SEQ ID NO: 867166 - DNA, 33 bp, Homo sapien
gcaagcccacgagacagagaaaatgggagccaa

SEQ ID NO: 867167 - DNA, 33 bp, Homo sapien
aaaatgatgttttagaccaatgttactaaccta

SEQ ID NO: 867168 - DNA, 33 bp, Homo sapien
aaaatgatgttttagagcaatgttactaaccta

SEQ ID NO: 867169 - DNA, 33 bp, Homo sapien
ggccatagagagaatacgagtgtaaatgtaata

SEQ ID NO: 867170 - DNA, 33 bp, Homo sapien
ggccatagagagaatatgagtgtaaatgtaata

SEQ ID NO: 867171 - DNA, 33 bp, Homo sapien
acacataaggtgcagaacttcttttccttgatg

SEQ ID NO: 867172 - DNA, 33 bp, Homo sapien
acacataaggtgcagagcttcttttccttgatg

SEQ ID NO: 867173 - DNA, 33 bp, Homo sapien
atttgacaaaggtcagcaaggaattctaatgtt

SEQ ID NO: 867174 - DNA, 33 bp, Homo sapien
atttgacaaaggtcaggaaggaattctaatgtt

SEQ ID NO: 867175 - DNA, 33 bp, Homo sapien
cattagggagttgccaccttttctcatgctccc

SEQ ID NO: 867176 - DNA, 33 bp, Homo sapien
cattagggagttgccatcttttctcatgctccc

SEQ ID NO: 867177 - DNA, 33 bp, Homo sapien
tctgccacctacaacagatggtcatgtgactaa

SEQ ID NO: 867178 - DNA, 33 bp, Homo sapien
tctgccacctacaacatatggtcatgtgactaa

SEQ ID NO: 867179 - DNA, 33 bp, Homo sapien
tattgcaaagcaacccgaagtcaatcagccaat

SEQ ID NO: 867180 - DNA, 33 bp, Homo sapien
tattgcaaagcaaccctaagtcaatcagccaat

SEQ ID NO: 867181 - DNA, 33 bp, Homo sapien
caaattaggcaggtcacatattaggtttactaa

SEQ ID NO: 867182 - DNA, 33 bp, Homo sapien
caaattaggcaggtcagatattaggtttactaa

SEQ ID NO: 867183 - DNA, 33 bp, Homo sapien
gtctagagcatttagcccattttctattgatga

SEQ ID NO: 867184 - DNA, 33 bp, Homo sapien
gtctagagcatttagcgcattttctattgatga

SEQ ID NO: 867185 - DNA, 33 bp, Homo sapien
aagaaaatgcacttacaaaattgtgcagagaaa

SEQ ID NO: 867186 - DNA, 33 bp, Homo sapien
aagaaaatgcacttaccaaattgtgcagagaaa

SEQ ID NO: 867187 - DNA, 33 bp, Homo sapien
aactcaggtctctaccaatagcactataactca

SEQ ID NO: 867188 - DNA, 33 bp, Homo sapien
aactcaggtctctaccgatagcactataactca

SEQ ID NO: 867189 - DNA, 33 bp, Homo sapien
atagtgaccagggatgaatgaagtgaagaatca

SEQ ID NO: 867190 - DNA, 33 bp, Homo sapien
atagtgaccagggatgcatgaagtgaagaatca

SEQ ID NO: 867191 - DNA, 33 bp, Homo sapien
tggaaacctaccttcgcatctccactaagagtg

SEQ ID NO: 867192 - DNA, 33 bp, Homo sapien
tggaaacctaccttcgtatctccactaagagtg

SEQ ID NO: 867193 - DNA, 33 bp, Homo sapien
attgtagggttattaacgagcgtaactacaata

SEQ ID NO: 867194 - DNA, 33 bp, Homo sapien
attgtagggttattaatgagcgtaactacaata

SEQ ID NO: 867195 - DNA, 33 bp, Homo sapien
atttctttaagtgaaaatctaatccagagaagg

SEQ ID NO: 867196 - DNA, 33 bp, Homo sapien
atttctttaagtgaaagtctaatccagagaagg

SEQ ID NO: 867197 - DNA, 33 bp, Homo sapien
ttgttggggacatttcacaacagaagtaatggt

SEQ ID NO: 867198 - DNA, 33 bp, Homo sapien
ttgttggggacatttcgcaacagaagtaatggt

SEQ ID NO: 867199 - DNA, 33 bp, Homo sapien
cttccatgatccttgacaagacgctcttgctat

SEQ ID NO: 867200 - DNA, 33 bp, Homo sapien
cttccatgatccttgataagacgctcttgctat

SEQ ID NO: 867201 - DNA, 33 bp, Homo sapien
ctgtctgccacaagcactgataggcgccttatg

SEQ ID NO: 867202 - DNA, 33 bp, Homo sapien
ctgtctgccacaagcattgataggcgccttatg

SEQ ID NO: 867203 - DNA, 33 bp, Homo sapien
catttttctcttgattaaaccctttggagaggc

SEQ ID NO: 867204 - DNA, 33 bp, Homo sapien
catttttctcttgattgaaccctttggagaggc

SEQ ID NO: 867205 - DNA, 33 bp, Homo sapien
cttgaggttgtacaagcactggagatttggctt

SEQ ID NO: 867206 - DNA, 33 bp, Homo sapien
cttgaggttgtacaaggactggagatttggctt

SEQ ID NO: 867207 - DNA, 33 bp, Homo sapien
ctccctgacttccaaaaggaaacttgtagccct

SEQ ID NO: 867208 - DNA, 33 bp, Homo sapien
ctccctgacttccaaagggaaacttgtagccct

SEQ ID NO: 867209 - DNA, 33 bp, Homo sapien
cccacccaagtggaacgacctttgacacagccc

SEQ ID NO: 867210 - DNA, 33 bp, Homo sapien
cccacccaagtggaactacctttgacacagccc

SEQ ID NO: 867211 - DNA, 33 bp, Homo sapien
gaccactcagtcttaacagacatatctggctga

SEQ ID NO: 867212 - DNA, 33 bp, Homo sapien
gaccactcagtcttaagagacatatctggctga

SEQ ID NO: 867213 - DNA, 33 bp, Homo sapien
tcctcttgaagttctccatcctcttggagagct

SEQ ID NO: 867214 - DNA, 33 bp, Homo sapien
tcctcttgaagttctctatcctcttggagagct

SEQ ID NO: 867215 - DNA, 33 bp, Homo sapien
gtgcagaatctaataccgacttgctcccagtta

SEQ ID NO: 867216 - DNA, 33 bp, Homo sapien
gtgcagaatctaatactgacttgctcccagtta

SEQ ID NO: 867217 - DNA, 33 bp, Homo sapien
tggtccagatcatagacgacgttgaattccatg

SEQ ID NO: 867218 - DNA, 33 bp, Homo sapien
tggtccagatcatagaggacgttgaattccatg

SEQ ID NO: 867219 - DNA, 33 bp, Homo sapien
cttggctccagttaaacaagaagcagccaagat

SEQ ID NO: 867220 - DNA, 33 bp, Homo sapien
cttggctccagttaaataagaagcagccaagat

SEQ ID NO: 867221 - DNA, 33 bp, Homo sapien
ttcctaaggatgaaggaaatcagctaaactcat

SEQ ID NO: 867222 - DNA, 33 bp, Homo sapien
ttcctaaggatgaaggcaatcagctaaactcat

SEQ ID NO: 867223 - DNA, 33 bp, Homo sapien
ttagcaaagcaaggtaacaaagaggaagtcaat

SEQ ID NO: 867224 - DNA, 33 bp, Homo sapien
ttagcaaagcaaggtaccaaagaggaagtcaat

SEQ ID NO: 867225 - DNA, 33 bp, Homo sapien
ttggcttctcagtggaagtttatcttgtcaggt

SEQ ID NO: 867226 - DNA, 33 bp, Homo sapien
ttggcttctcagtggaggtttatcttgtcaggt

SEQ ID NO: 867227 - DNA, 33 bp, Homo sapien
ttttcctcatacactacgggagtttgttcacag

SEQ ID NO: 867228 - DNA, 33 bp, Homo sapien
ttttcctcatacactatgggagtttgttcacag

SEQ ID NO: 867229 - DNA, 33 bp, Homo sapien
catcttctcattgaaaatagagctgttgtttgt

SEQ ID NO: 867230 - DNA, 33 bp, Homo sapien
catcttctcattgaaagtagagctgttgtttgt

SEQ ID NO: 867231 - DNA, 33 bp, Homo sapien
tcctctgccctgagaaatgccagatgggcgttc

SEQ ID NO: 867232 - DNA, 33 bp, Homo sapien
tcctctgccctgagaattgccagatgggcgttc

SEQ ID NO: 867233 - DNA, 33 bp, Homo sapien
gattggtctctccaggaatattcactatagtcc

SEQ ID NO: 867234 - DNA, 33 bp, Homo sapien
gattggtctctccagggatattcactatagtcc

SEQ ID NO: 867235 - DNA, 33 bp, Homo sapien
agtaccaaatactccaatagcagggtagcaaca

SEQ ID NO: 867236 - DNA, 33 bp, Homo sapien
agtaccaaatactccagtagcagggtagcaaca

SEQ ID NO: 867237 - DNA, 33 bp, Homo sapien
gcagaagagtgagttgaagaattaaacacgagg

SEQ ID NO: 867238 - DNA, 33 bp, Homo sapien
gcagaagagtgagttggagaattaaacacgagg

SEQ ID NO: 867239 - DNA, 33 bp, Homo sapien
ccacaactagaattccagatctcctgactccca

SEQ ID NO: 867240 - DNA, 33 bp, Homo sapien
ccacaactagaattccggatctcctgactccca

SEQ ID NO: 867241 - DNA, 33 bp, Homo sapien
cttccctatcttcataacgtgagaagacatgct

SEQ ID NO: 867242 - DNA, 33 bp, Homo sapien
cttccctatcttcatagcgtgagaagacatgct

SEQ ID NO: 867243 - DNA, 33 bp, Homo sapien
ctaatgttgctactgacctgatgggaggcagag

SEQ ID NO: 867244 - DNA, 33 bp, Homo sapien
ctaatgttgctactgatctgatgggaggcagag

SEQ ID NO: 867245 - DNA, 33 bp, Homo sapien
aaaatgaagataaaacaatgtactcagattcat

SEQ ID NO: 867246 - DNA, 33 bp, Homo sapien
aaaatgaagataaaaccatgtactcagattcat

SEQ ID NO: 867247 - DNA, 33 bp, Homo sapien
cacagtatgaagagaaccaattttataaacatg

SEQ ID NO: 867248 - DNA, 33 bp, Homo sapien
cacagtatgaagagaatcaattttataaacatg

SEQ ID NO: 867249 - DNA, 33 bp, Homo sapien
cccttctgctcaggaaaacagtaaggagcaaaa

SEQ ID NO: 867250 - DNA, 33 bp, Homo sapien
cccttctgctcaggaagacagtaaggagcaaaa

SEQ ID NO: 867251 - DNA, 33 bp, Homo sapien
tctgcatgagcttgcccgaaactaacttaaaaa

SEQ ID NO: 867252 - DNA, 33 bp, Homo sapien
tctgcatgagcttgcctgaaactaacttaaaaa

SEQ ID NO: 867253 - DNA, 33 bp, Homo sapien
cacaggcccacagtgaagaaatggttcatgggt

SEQ ID NO: 867254 - DNA, 33 bp, Homo sapien
cacaggcccacagtgaggaaatggttcatgggt

SEQ ID NO: 867255 - DNA, 33 bp, Homo sapien
gtgggcatccctggtcactggcctatgctgggc

SEQ ID NO: 867256 - DNA, 33 bp, Homo sapien
gtgggcatccctggtctctggcctatgctgggc

SEQ ID NO: 867257 - DNA, 33 bp, Homo sapien
attgatcacctcagcacaggtgtgggcgcagtt

SEQ ID NO: 867258 - DNA, 33 bp, Homo sapien
attgatcacctcagcataggtgtgggcgcagtt

SEQ ID NO: 867259 - DNA, 33 bp, Homo sapien
aatcataggcttgtaaacctactaataggctct

SEQ ID NO: 867260 - DNA, 33 bp, Homo sapien
aatcataggcttgtaatcctactaataggctct

SEQ ID NO: 867261 - DNA, 33 bp, Homo sapien
attaatgatggtggtaaatacaactgtcattct

SEQ ID NO: 867262 - DNA, 33 bp, Homo sapien
attaatgatggtggtatatacaactgtcattct

SEQ ID NO: 867263 - DNA, 33 bp, Homo sapien
aaaaggatacgcaccacaatagagaagtggtta

SEQ ID NO: 867264 - DNA, 33 bp, Homo sapien
aaaaggatacgcaccataatagagaagtggtta

SEQ ID NO: 867265 - DNA, 33 bp, Homo sapien
atttctaaaaccaatcaactgtcattttctatg

SEQ ID NO: 867266 - DNA, 33 bp, Homo sapien
atttctaaaaccaatcgactgtcattttctatg

SEQ ID NO: 867267 - DNA, 33 bp, Homo sapien
atcccaagtgaattacacaggcccaaaatagct

SEQ ID NO: 867268 - DNA, 33 bp, Homo sapien
atcccaagtgaattacgcaggcccaaaatagct

SEQ ID NO: 867269 - DNA, 33 bp, Homo sapien
gtgcacccgtttttaccactgagacccatgtca

SEQ ID NO: 867270 - DNA, 33 bp, Homo sapien
gtgcacccgtttttactactgagacccatgtca

SEQ ID NO: 867271 - DNA, 33 bp, Homo sapien
gtgcacacccatagaccagaatctctcacgagc

SEQ ID NO: 867272 - DNA, 33 bp, Homo sapien
gtgcacacccatagactagaatctctcacgagc

SEQ ID NO: 867273 - DNA, 33 bp, Homo sapien
tgcagtgtaacccttacggttccttctgagcag

SEQ ID NO: 867274 - DNA, 33 bp, Homo sapien
tgcagtgtaacccttatggttccttctgagcag

SEQ ID NO: 867275 - DNA, 33 bp, Homo sapien
tttcaaagatgcccaacgagaaggtaagtgaga

SEQ ID NO: 867276 - DNA, 33 bp, Homo sapien
tttcaaagatgcccaatgagaaggtaagtgaga

SEQ ID NO: 867277 - DNA, 33 bp, Homo sapien
agggacatagctctgaagatgagagtgaggaag

SEQ ID NO: 867278 - DNA, 33 bp, Homo sapien
agggacatagctctgaggatgagagtgaggaag

SEQ ID NO: 867279 - DNA, 33 bp, Homo sapien
gcgcacaacaaagtccaacattttcttgaaaca

SEQ ID NO: 867280 - DNA, 33 bp, Homo sapien
gcgcacaacaaagtcccacattttcttgaaaca

SEQ ID NO: 867281 - DNA, 33 bp, Homo sapien
ccttgtgagggcttacaaataaaaaggtgagga

SEQ ID NO: 867282 - DNA, 33 bp, Homo sapien
ccttgtgagggcttacgaataaaaaggtgagga

SEQ ID NO: 867283 - DNA, 33 bp, Homo sapien
ttatttattttgttccaagcattatgttaagca

SEQ ID NO: 867284 - DNA, 33 bp, Homo sapien
ttatttattttgttccgagcattatgttaagca

SEQ ID NO: 867285 - DNA, 33 bp, Homo sapien
tatctacacaccctcagacaattccttcttccc

SEQ ID NO: 867286 - DNA, 33 bp, Homo sapien
tatctacacaccctcatacaattccttcttccc

SEQ ID NO: 867287 - DNA, 33 bp, Homo sapien
tagaaatatggtcaaaacccattatacaatgtc

SEQ ID NO: 867288 - DNA, 33 bp, Homo sapien
tagaaatatggtcaaaccccattatacaatgtc

SEQ ID NO: 867289 - DNA, 33 bp, Homo sapien
acaactcaaatctttccacacagagcagctaga

SEQ ID NO: 867290 - DNA, 33 bp, Homo sapien
acaactcaaatctttctacacagagcagctaga

SEQ ID NO: 867291 - DNA, 33 bp, Homo sapien
agacaatggcggcttcaattaggatagtagcag

SEQ ID NO: 867292 - DNA, 33 bp, Homo sapien
agacaatggcggcttcgattaggatagtagcag

SEQ ID NO: 867293 - DNA, 33 bp, Homo sapien
tcaaatacattcccaaaaacatgtgaacacatc

SEQ ID NO: 867294 - DNA, 33 bp, Homo sapien
tcaaatacattcccaacaacatgtgaacacatc

SEQ ID NO: 867295 - DNA, 33 bp, Homo sapien
attcataacctcaacccatctcaacatatcatg

SEQ ID NO: 867296 - DNA, 33 bp, Homo sapien
attcataacctcaacctatctcaacatatcatg

SEQ ID NO: 867297 - DNA, 33 bp, Homo sapien
atcagcttttcctaagacaattagctttaaaaa

SEQ ID NO: 867298 - DNA, 33 bp, Homo sapien
atcagcttttcctaagtcaattagctttaaaaa

SEQ ID NO: 867299 - DNA, 33 bp, Homo sapien
gaaaaacctcttcagccattagattttatttaa

SEQ ID NO: 867300 - DNA, 33 bp, Homo sapien
gaaaaacctcttcagcgattagattttatttaa

SEQ ID NO: 867301 - DNA, 33 bp, Homo sapien
acttggcctggacttcaaaggatggatacaatt

SEQ ID NO: 867302 - DNA, 33 bp, Homo sapien
acttggcctggacttcgaaggatggatacaatt

SEQ ID NO: 867303 - DNA, 33 bp, Homo sapien
tcagcttatgacaagacggcagcaacatgtccc

SEQ ID NO: 867304 - DNA, 33 bp, Homo sapien
tcagcttatgacaagatggcagcaacatgtccc

SEQ ID NO: 867305 - DNA, 33 bp, Homo sapien
tttcccttgatggttcaacaaaagttcttgtac

SEQ ID NO: 867306 - DNA, 33 bp, Homo sapien
tttcccttgatggttcgacaaaagttcttgtac

SEQ ID NO: 867307 - DNA, 33 bp, Homo sapien
atttggacaaaaacatgaaatacgttcttacat

SEQ ID NO: 867308 - DNA, 33 bp, Homo sapien
atttggacaaaaacattaaatacgttcttacat

SEQ ID NO: 867309 - DNA, 33 bp, Homo sapien
ttttctgtcaccattacggacgtttaaataaca

SEQ ID NO: 867310 - DNA, 33 bp, Homo sapien
ttttctgtcaccattatggacgtttaaataaca

SEQ ID NO: 867311 - DNA, 33 bp, Homo sapien
gctttcagtccagttaaactctacctcaaagac

SEQ ID NO: 867312 - DNA, 33 bp, Homo sapien
gctttcagtccagttagactctacctcaaagac

SEQ ID NO: 867313 - DNA, 33 bp, Homo sapien
atacaaaaatcagcaactctaaaagtccaggaa

SEQ ID NO: 867314 - DNA, 33 bp, Homo sapien
atacaaaaatcagcaagtctaaaagtccaggaa

SEQ ID NO: 867315 - DNA, 33 bp, Homo sapien
tctacttctctctaggccaatgatccatggttt

SEQ ID NO: 867316 - DNA, 33 bp, Homo sapien
tctacttctctctaggtcaatgatccatggttt

SEQ ID NO: 867317 - DNA, 33 bp, Homo sapien
gactattgaaacagcccacactattgtacctca

SEQ ID NO: 867318 - DNA, 33 bp, Homo sapien
gactattgaaacagccgacactattgtacctca

SEQ ID NO: 867319 - DNA, 33 bp, Homo sapien
ggaatcatttctctgacatggagattaagggta

SEQ ID NO: 867320 - DNA, 33 bp, Homo sapien
ggaatcatttctctgagatggagattaagggta

SEQ ID NO: 867321 - DNA, 33 bp, Homo sapien
ggacgtatgcctagaactgacccttaccaagtt

SEQ ID NO: 867322 - DNA, 33 bp, Homo sapien
ggacgtatgcctagaattgacccttaccaagtt

SEQ ID NO: 867323 - DNA, 33 bp, Homo sapien
ctgtatcctttccttcacccagtgtatcctttc

SEQ ID NO: 867324 - DNA, 33 bp, Homo sapien
ctgtatcctttccttctcccagtgtatcctttc

SEQ ID NO: 867325 - DNA, 33 bp, Homo sapien
tttattcattcagacaatctctcctaagggctt

SEQ ID NO: 867326 - DNA, 33 bp, Homo sapien
tttattcattcagacagtctctcctaagggctt

SEQ ID NO: 867327 - DNA, 33 bp, Homo sapien
cccagtgattctgatacaagtgagctgggtctt

SEQ ID NO: 867328 - DNA, 33 bp, Homo sapien
cccagtgattctgatataagtgagctgggtctt

SEQ ID NO: 867329 - DNA, 33 bp, Homo sapien
acaacatttatttagacgtctgaagtttcttaa

SEQ ID NO: 867330 - DNA, 33 bp, Homo sapien
acaacatttatttagatgtctgaagtttcttaa

SEQ ID NO: 867331 - DNA, 33 bp, Homo sapien
gagggcttcttgaaacacaaattgctgggctcc

SEQ ID NO: 867332 - DNA, 33 bp, Homo sapien
gagggcttcttgaaacgcaaattgctgggctcc

SEQ ID NO: 867333 - DNA, 33 bp, Homo sapien
gtgaaataggtggatacgaaggatgtcgtgagg

SEQ ID NO: 867334 - DNA, 33 bp, Homo sapien
gtgaaataggtggatatgaaggatgtcgtgagg

SEQ ID NO: 867335 - DNA, 33 bp, Homo sapien
atacacaagtgctacgaatgtacaaagacatct

SEQ ID NO: 867336 - DNA, 33 bp, Homo sapien
atacacaagtgctacgtatgtacaaagacatct

SEQ ID NO: 867337 - DNA, 33 bp, Homo sapien
ccccattacatcattcaaaaatatatactgtgg

SEQ ID NO: 867338 - DNA, 33 bp, Homo sapien
ccccattacatcattccaaaatatatactgtgg

SEQ ID NO: 867339 - DNA, 33 bp, Homo sapien
aaaagtaggaaacaagacatccactttgctggt

SEQ ID NO: 867340 - DNA, 33 bp, Homo sapien
aaaagtaggaaacaaggcatccactttgctggt

SEQ ID NO: 867341 - DNA, 33 bp, Homo sapien
ttagaaaagacaaaatcaagcctgaatgcatcc

SEQ ID NO: 867342 - DNA, 33 bp, Homo sapien
ttagaaaagacaaaatgaagcctgaatgcatcc

SEQ ID NO: 867343 - DNA, 33 bp, Homo sapien
ggagggaacttgattccgaagagaggatagggg

SEQ ID NO: 867344 - DNA, 33 bp, Homo sapien
ggagggaacttgattctgaagagaggatagggg

SEQ ID NO: 867345 - DNA, 33 bp, Homo sapien
caaaggcattattataagactaggtaattcagg

SEQ ID NO: 867346 - DNA, 33 bp, Homo sapien
caaaggcattattataggactaggtaattcagg

SEQ ID NO: 867347 - DNA, 33 bp, Homo sapien
gagaaaagactagagacgcaaaagatatttttg

SEQ ID NO: 867348 - DNA, 33 bp, Homo sapien
gagaaaagactagagatgcaaaagatatttttg

SEQ ID NO: 867349 - DNA, 33 bp, Homo sapien
aagtcccaaaaggaaacatgaacagcttgagac

SEQ ID NO: 867350 - DNA, 33 bp, Homo sapien
aagtcccaaaaggaaatatgaacagcttgagac

SEQ ID NO: 867351 - DNA, 33 bp, Homo sapien
ggcaggaaaggaagataacactgcaccataatt

SEQ ID NO: 867352 - DNA, 33 bp, Homo sapien
ggcaggaaaggaagattacactgcaccataatt

SEQ ID NO: 867353 - DNA, 33 bp, Homo sapien
gaggctggctttcctcgaggtcataagttgccc

SEQ ID NO: 867354 - DNA, 33 bp, Homo sapien
gaggctggctttcctctaggtcataagttgccc

SEQ ID NO: 867355 - DNA, 33 bp, Homo sapien
ctgttctcatctttgtcaaacttatccaaatag

SEQ ID NO: 867356 - DNA, 33 bp, Homo sapien
ctgttctcatctttgtgaaacttatccaaatag

SEQ ID NO: 867357 - DNA, 33 bp, Homo sapien
ggtcctagaacctcagaatcgaaaggaagttca

SEQ ID NO: 867358 - DNA, 33 bp, Homo sapien
ggtcctagaacctcaggatcgaaaggaagttca

SEQ ID NO: 867359 - DNA, 33 bp, Homo sapien
aacttacaaatagccacctaactaataagagat

SEQ ID NO: 867360 - DNA, 33 bp, Homo sapien
aacttacaaatagccatctaactaataagagat

SEQ ID NO: 867361 - DNA, 33 bp, Homo sapien
tatctccttatttccactagaaccctttgcata

SEQ ID NO: 867362 - DNA, 33 bp, Homo sapien
tatctccttatttccattagaaccctttgcata

SEQ ID NO: 867363 - DNA, 33 bp, Homo sapien
tgatccagcatttaagcagtttggaagtcacct

SEQ ID NO: 867364 - DNA, 33 bp, Homo sapien
tgatccagcatttaaggagtttggaagtcacct

SEQ ID NO: 867365 - DNA, 33 bp, Homo sapien
ctggatgaggttgctcacaaacaaagcaggtga

SEQ ID NO: 867366 - DNA, 33 bp, Homo sapien
ctggatgaggttgctcgcaaacaaagcaggtga

SEQ ID NO: 867367 - DNA, 33 bp, Homo sapien
ctgtatggaagaattcaaaataatttgtttagc

SEQ ID NO: 867368 - DNA, 33 bp, Homo sapien
ctgtatggaagaattccaaataatttgtttagc

SEQ ID NO: 867369 - DNA, 33 bp, Homo sapien
cacatggctggggaaacctcagaatcatgagtg

SEQ ID NO: 867370 - DNA, 33 bp, Homo sapien
cacatggctggggaaagctcagaatcatgagtg

SEQ ID NO: 867371 - DNA, 33 bp, Homo sapien
cagaaacagagaaccactcacgactttccaata

SEQ ID NO: 867372 - DNA, 33 bp, Homo sapien
cagaaacagagaaccattcacgactttccaata

SEQ ID NO: 867373 - DNA, 33 bp, Homo sapien
ctgaaggtcttactcacgttcctatatcctgta

SEQ ID NO: 867374 - DNA, 33 bp, Homo sapien
ctgaaggtcttactcatgttcctatatcctgta

SEQ ID NO: 867375 - DNA, 33 bp, Homo sapien
tctgctgcttcctcagccacgtatctcctatag

SEQ ID NO: 867376 - DNA, 33 bp, Homo sapien
tctgctgcttcctcagtcacgtatctcctatag

SEQ ID NO: 867377 - DNA, 33 bp, Homo sapien
atctgctcagtacatacaggttaagtgctttgt

SEQ ID NO: 867378 - DNA, 33 bp, Homo sapien
atctgctcagtacatataggttaagtgctttgt

SEQ ID NO: 867379 - DNA, 33 bp, Homo sapien
ccttcacaaaagaaagaatcaactgatgaggga

SEQ ID NO: 867380 - DNA, 33 bp, Homo sapien
ccttcacaaaagaaagtatcaactgatgaggga

SEQ ID NO: 867381 - DNA, 33 bp, Homo sapien
atatgcaacaacttgacgggtattatgctgcat

SEQ ID NO: 867382 - DNA, 33 bp, Homo sapien
atatgcaacaacttgatgggtattatgctgcat

SEQ ID NO: 867383 - DNA, 33 bp, Homo sapien
tgatgaagtttagatgaaggttatgtaattgtc

SEQ ID NO: 867384 - DNA, 33 bp, Homo sapien
tgatgaagtttagatggaggttatgtaattgtc

SEQ ID NO: 867385 - DNA, 33 bp, Homo sapien
ccaaatcctgaacttgcaggtagatggtgtaaa

SEQ ID NO: 867386 - DNA, 33 bp, Homo sapien
ccaaatcctgaacttgtaggtagatggtgtaaa

SEQ ID NO: 867387 - DNA, 33 bp, Homo sapien
atttatttaacacttacgccttaactgctggag

SEQ ID NO: 867388 - DNA, 33 bp, Homo sapien
atttatttaacacttatgccttaactgctggag

SEQ ID NO: 867389 - DNA, 33 bp, Homo sapien
taaatatggtataatacggcagaaacagggaac

SEQ ID NO: 867390 - DNA, 33 bp, Homo sapien
taaatatggtataatatggcagaaacagggaac

SEQ ID NO: 867391 - DNA, 33 bp, Homo sapien
tcctttcgtgctgtgaagggaagaatggaggtg

SEQ ID NO: 867392 - DNA, 33 bp, Homo sapien
tcctttcgtgctgtgacgggaagaatggaggtg

SEQ ID NO: 867393 - DNA, 33 bp, Homo sapien
ccaggctgtgaccaaacctgtgacttacttctt

SEQ ID NO: 867394 - DNA, 33 bp, Homo sapien
ccaggctgtgaccaaatctgtgacttacttctt

SEQ ID NO: 867395 - DNA, 33 bp, Homo sapien
tgcagctcaagatgtgcagacttgtggggttgt

SEQ ID NO: 867396 - DNA, 33 bp, Homo sapien
tgcagctcaagatgtggagacttgtggggttgt

SEQ ID NO: 867397 - DNA, 33 bp, Homo sapien
gttggaacaaataacaagagcattccttatgtg

SEQ ID NO: 867398 - DNA, 33 bp, Homo sapien
gttggaacaaataacaggagcattccttatgtg

SEQ ID NO: 867399 - DNA, 33 bp, Homo sapien
acaggggcaaggaaaaatatcagagtagactgg

SEQ ID NO: 867400 - DNA, 33 bp, Homo sapien
acaggggcaaggaaaattatcagagtagactgg

SEQ ID NO: 867401 - DNA, 33 bp, Homo sapien
ctatttttgtacctaaaattgaattatgacatt

SEQ ID NO: 867402 - DNA, 33 bp, Homo sapien
ctatttttgtacctaacattgaattatgacatt

SEQ ID NO: 867403 - DNA, 33 bp, Homo sapien
aggcttactgagggtacagtgagtctatatgtc

SEQ ID NO: 867404 - DNA, 33 bp, Homo sapien
aggcttactgagggtagagtgagtctatatgtc

SEQ ID NO: 867405 - DNA, 33 bp, Homo sapien
tgaatgggaatgagaaatgataaagggctagat

SEQ ID NO: 867406 - DNA, 33 bp, Homo sapien
tgaatgggaatgagaactgataaagggctagat

SEQ ID NO: 867407 - DNA, 33 bp, Homo sapien
atttagtagtggtagaagaaaaatggttgtcca

SEQ ID NO: 867408 - DNA, 33 bp, Homo sapien
atttagtagtggtagaggaaaaatggttgtcca

SEQ ID NO: 867409 - DNA, 33 bp, Homo sapien
ccaatacaaagttttccacactcaaagctagaa

SEQ ID NO: 867410 - DNA, 33 bp, Homo sapien
ccaatacaaagttttctacactcaaagctagaa

SEQ ID NO: 867411 - DNA, 33 bp, Homo sapien
aacttcctaaagctgaagataacctttctgtga

SEQ ID NO: 867412 - DNA, 33 bp, Homo sapien
aacttcctaaagctgaggataacctttctgtga

SEQ ID NO: 867413 - DNA, 33 bp, Homo sapien
ttgcattccacattgccaactttggaggcatat

SEQ ID NO: 867414 - DNA, 33 bp, Homo sapien
ttgcattccacattgctaactttggaggcatat

SEQ ID NO: 867415 - DNA, 33 bp, Homo sapien
gcgtgtttggcaaaaccgtttcccctcaatgtt

SEQ ID NO: 867416 - DNA, 33 bp, Homo sapien
gcgtgtttggcaaaactgtttcccctcaatgtt

SEQ ID NO: 867417 - DNA, 33 bp, Homo sapien
ggcattttaggtagcacgaaaaagaaatagaat

SEQ ID NO: 867418 - DNA, 33 bp, Homo sapien
ggcattttaggtagcatgaaaaagaaatagaat

SEQ ID NO: 867419 - DNA, 33 bp, Homo sapien
tcctggttaatacttccagtcatttttggtgag

SEQ ID NO: 867420 - DNA, 33 bp, Homo sapien
tcctggttaatacttctagtcatttttggtgag

SEQ ID NO: 867421 - DNA, 33 bp, Homo sapien
ataaactgaaagactaagggtttaacagaaggc

SEQ ID NO: 867422 - DNA, 33 bp, Homo sapien
ataaactgaaagactaggggtttaacagaaggc

SEQ ID NO: 867423 - DNA, 33 bp, Homo sapien
ccagtaagatacagcaaggaatgtccatatttc

SEQ ID NO: 867424 - DNA, 33 bp, Homo sapien
ccagtaagatacagcagggaatgtccatatttc

SEQ ID NO: 867425 - DNA, 33 bp, Homo sapien
tttaaataatgttgaactcgaagaaaaggtgac

SEQ ID NO: 867426 - DNA, 33 bp, Homo sapien
tttaaataatgttgaattcgaagaaaaggtgac

SEQ ID NO: 867427 - DNA, 33 bp, Homo sapien
ctacctagtttttcacaagcagggattctagac

SEQ ID NO: 867428 - DNA, 33 bp, Homo sapien
ctacctagtttttcacgagcagggattctagac

SEQ ID NO: 867429 - DNA, 33 bp, Homo sapien
gccacacagacccaaagatatatgaatcccact

SEQ ID NO: 867430 - DNA, 33 bp, Homo sapien
gccacacagacccaaatatatatgaatcccact

SEQ ID NO: 867431 - DNA, 33 bp, Homo sapien
cagtgcctggcacatagaaacatctcaacaaat

SEQ ID NO: 867432 - DNA, 33 bp, Homo sapien
cagtgcctggcacatataaacatctcaacaaat

SEQ ID NO: 867433 - DNA, 33 bp, Homo sapien
ataggaaaactgagcaaaagaaagattaatcca

SEQ ID NO: 867434 - DNA, 33 bp, Homo sapien
ataggaaaactgagcagaagaaagattaatcca

SEQ ID NO: 867435 - DNA, 33 bp, Homo sapien
tgaagcctatgaataaatggagctataaatgaa

SEQ ID NO: 867436 - DNA, 33 bp, Homo sapien
tgaagcctatgaataagtggagctataaatgaa

SEQ ID NO: 867437 - DNA, 33 bp, Homo sapien
tgccagggttggtacaaataagtattgaaatag

SEQ ID NO: 867438 - DNA, 33 bp, Homo sapien
tgccagggttggtacagataagtattgaaatag

SEQ ID NO: 867439 - DNA, 33 bp, Homo sapien
cccctttaatccctcacgtcctgcttacagtta

SEQ ID NO: 867440 - DNA, 33 bp, Homo sapien
cccctttaatccctcatgtcctgcttacagtta

SEQ ID NO: 867441 - DNA, 33 bp, Homo sapien
tggattcttgggtcaacgattttacttctactg

SEQ ID NO: 867442 - DNA, 33 bp, Homo sapien
tggattcttgggtcaatgattttacttctactg

SEQ ID NO: 867443 - DNA, 33 bp, Homo sapien
ggagcagccaaaaccactgcaaagaggggttgg

SEQ ID NO: 867444 - DNA, 33 bp, Homo sapien
ggagcagccaaaaccattgcaaagaggggttgg

SEQ ID NO: 867445 - DNA, 33 bp, Homo sapien
aacagaaggtgttgaaagagttagaaactagat

SEQ ID NO: 867446 - DNA, 33 bp, Homo sapien
aacagaaggtgttgaaggagttagaaactagat

SEQ ID NO: 867447 - DNA, 33 bp, Homo sapien
cttacaattcatcaccacaggacgaaatatgca

SEQ ID NO: 867448 - DNA, 33 bp, Homo sapien
cttacaattcatcaccgcaggacgaaatatgca

SEQ ID NO: 867449 - DNA, 33 bp, Homo sapien
aaatactttgcaacaactagtctccccatttca

SEQ ID NO: 867450 - DNA, 33 bp, Homo sapien
aaatactttgcaacaattagtctccccatttca

SEQ ID NO: 867451 - DNA, 33 bp, Homo sapien
atttttacagttttaacagttccttttggagtt

SEQ ID NO: 867452 - DNA, 33 bp, Homo sapien
atttttacagttttaagagttccttttggagtt

SEQ ID NO: 867453 - DNA, 33 bp, Homo sapien
aaatgagatagatggcaatgcaataatagtggg

SEQ ID NO: 867454 - DNA, 33 bp, Homo sapien
aaatgagatagatggccatgcaataatagtggg

SEQ ID NO: 867455 - DNA, 33 bp, Homo sapien; identical to SEQ ID NO: 867453

SEQ ID NO: 867456 - DNA, 33 bp, Homo sapien; identical to SEQ ID NO: 867454

SEQ ID NO: 867457 - DNA, 33 bp, Homo sapien
ggtgcatatatacttaaaattgtggtattttcc

SEQ ID NO: 867458 - DNA, 33 bp, Homo sapien
ggtgcatatatacttagaattgtggtattttcc

SEQ ID NO: 867459 - DNA, 33 bp, Homo sapien; identical to SEQ ID NO: 867457

SEQ ID NO: 867460 - DNA, 33 bp, Homo sapien; identical to SEQ ID NO: 867458

SEQ ID NO: 867461 - DNA, 33 bp, Homo sapien
tggtttagactgggaacaatttttttcttagtg

SEQ ID NO: 867462 - DNA, 33 bp, Homo sapien
tggtttagactgggaagaatttttttcttagtg

SEQ ID NO: 867463 - DNA, 33 bp, Homo sapien
tcctctcctcccctagacctaagcaatcacaaa

SEQ ID NO: 867464 - DNA, 33 bp, Homo sapien
tcctctcctcccctagccctaagcaatcacaaa

SEQ ID NO: 867465 - DNA, 33 bp, Homo sapien
gagaaatatatgcacaagcgagaggcatgggct

SEQ ID NO: 867466 - DNA, 33 bp, Homo sapien
gagaaatatatgcacaggcgagaggcatgggct

SEQ ID NO: 867467 - DNA, 33 bp, Homo sapien
tttagtaaaaaagtaaatgctagccaacaaaag

SEQ ID NO: 867468 - DNA, 33 bp, Homo sapien
tttagtaaaaaagtaagtgctagccaacaaaag

SEQ ID NO: 867469 - DNA, 33 bp, Homo sapien
tagtccctcatcctggaaatatcacaaccacat

SEQ ID NO: 867470 - DNA, 33 bp, Homo sapien
tagtccctcatcctgggaatatcacaaccacat

SEQ ID NO: 867471 - DNA, 33 bp, Homo sapien
aaaagaagatgatttaactcagcagctgtagaa

SEQ ID NO: 867472 - DNA, 33 bp, Homo sapien
aaaagaagatgatttatctcagcagctgtagaa

SEQ ID NO: 867473 - DNA, 33 bp, Homo sapien
tgttcatggacaaataacaacggtatagtaaaa

SEQ ID NO: 867474 - DNA, 33 bp, Homo sapien
tgttcatggacaaatagcaacggtatagtaaaa

SEQ ID NO: 867475 - DNA, 33 bp, Homo sapien
gaccgaattgtccctaagttgtgaatgttacat

SEQ ID NO: 867476 - DNA, 33 bp, Homo sapien
gaccgaattgtccctaggttgtgaatgttacat

SEQ ID NO: 867477 - DNA, 33 bp, Homo sapien
ataataaagaaagaaacgcgctttggaatcaga

SEQ ID NO: 867478 - DNA, 33 bp, Homo sapien
ataataaagaaagaaatgcgctttggaatcaga

SEQ ID NO: 867479 - DNA, 33 bp, Homo sapien
ttgagatttttacaaccgaaatcattttgctgt

SEQ ID NO: 867480 - DNA, 33 bp, Homo sapien
ttgagatttttacaactgaaatcattttgctgt

SEQ ID NO: 867481 - DNA, 33 bp, Homo sapien
aagtgtttgaaacgcgaatgttcttaatttttt

SEQ ID NO: 867482 - DNA, 33 bp, Homo sapien
aagtgtttgaaacgcggatgttcttaatttttt

SEQ ID NO: 867483 - DNA, 33 bp, Homo sapien
cctcgtagtgaggtgaaggattttgtcttcaca

SEQ ID NO: 867484 - DNA, 33 bp, Homo sapien
cctcgtagtgaggtgagggattttgtcttcaca

SEQ ID NO: 867485 - DNA, 33 bp, Homo sapien
tctttcagatctcaacaaatggatcactcctct

SEQ ID NO: 867486 - DNA, 33 bp, Homo sapien
tctttcagatctcaacgaatggatcactcctct

SEQ ID NO: 867487 - DNA, 33 bp, Homo sapien
cttctctcagcagaaacgtagcgctgtcattca

SEQ ID NO: 867488 - DNA, 33 bp, Homo sapien
cttctctcagcagaaatgtagcgctgtcattca

SEQ ID NO: 867489 - DNA, 33 bp, Homo sapien
aagaagtgctcaaaaacgtatagggacattcca

SEQ ID NO: 867490 - DNA, 33 bp, Homo sapien
aagaagtgctcaaaaatgtatagggacattcca

SEQ ID NO: 867491 - DNA, 33 bp, Homo sapien
gaggttgcgctgcgctcagatcgcgcttatgca

SEQ ID NO: 867492 - DNA, 33 bp, Homo sapien
gaggttgcgctgcgctgagatcgcgcttatgca

SEQ ID NO: 867493 - DNA, 33 bp, Homo sapien
ctggggaaaagctctaactcctgctctgctgtc

SEQ ID NO: 867494 - DNA, 33 bp, Homo sapien
ctggggaaaagctctatctcctgctctgctgtc

SEQ ID NO: 867495 - DNA, 33 bp, Homo sapien
tatcatgtcttttatcacaggcaaaagtagaaa

SEQ ID NO: 867496 - DNA, 33 bp, Homo sapien
tatcatgtcttttatcgcaggcaaaagtagaaa

SEQ ID NO: 867497 - DNA, 33 bp, Homo sapien
tgatgtgtttctataccgaggagaaaacagttt

SEQ ID NO: 867498 - DNA, 33 bp, Homo sapien
tgatgtgtttctatactgaggagaaaacagttt

SEQ ID NO: 867499 - DNA, 33 bp, Homo sapien
taaacacctgcaaccacagaactgagcagacct

SEQ ID NO: 867500 - DNA, 33 bp, Homo sapien
taaacacctgcaaccatagaactgagcagacct

SEQ ID NO: 867501 - DNA, 33 bp, Homo sapien
agaacacaggaaaatcagatgttgttgtgttga

SEQ ID NO: 867502 - DNA, 33 bp, Homo sapien
agaacacaggaaaatcggatgttgttgtgttga

SEQ ID NO: 867503 - DNA, 33 bp, Homo sapien
tgaaactaaatcagcacggagaagtgcaaggat

SEQ ID NO: 867504 - DNA, 33 bp, Homo sapien
tgaaactaaatcagcatggagaagtgcaaggat

SEQ ID NO: 867505 - DNA, 33 bp, Homo sapien
tgcaagggctggtagacgagaggacattcaggg

SEQ ID NO: 867506 - DNA, 33 bp, Homo sapien
tgcaagggctggtagatgagaggacattcaggg

SEQ ID NO: 867507 - DNA, 33 bp, Homo sapien
cagggaaggctttgaaatagaattgggccttgt

SEQ ID NO: 867508 - DNA, 33 bp, Homo sapien
cagggaaggctttgaagtagaattgggccttgt

SEQ ID NO: 867509 - DNA, 33 bp, Homo sapien
gcggctgagtgtctaactctcatgagctcagtt

SEQ ID NO: 867510 - DNA, 33 bp, Homo sapien
gcggctgagtgtctaagtctcatgagctcagtt

SEQ ID NO: 867511 - DNA, 33 bp, Homo sapien
tttcaattccagaaagcaggaatgccagagcaa

SEQ ID NO: 867512 - DNA, 33 bp, Homo sapien
tttcaattccagaaagtaggaatgccagagcaa

SEQ ID NO: 867513 - DNA, 33 bp, Homo sapien
agtggagttggagacactcaccagacgtttgat

SEQ ID NO: 867514 - DNA, 33 bp, Homo sapien
agtggagttggagacattcaccagacgtttgat

SEQ ID NO: 867515 - DNA, 33 bp, Homo sapien
gcagaaggaggtaagaaatcggttgtggacatt

SEQ ID NO: 867516 - DNA, 33 bp, Homo sapien
gcagaaggaggtaagagatcggttgtggacatt

SEQ ID NO: 867517 - DNA, 33 bp, Homo sapien
aactgttaaataaaagactgttaggtttctcaa

SEQ ID NO: 867518 - DNA, 33 bp, Homo sapien
aactgttaaataaaaggctgttaggtttctcaa

SEQ ID NO: 867519 - DNA, 33 bp, Homo sapien
gagattctatgatttacgcttcttggaaacaaa

SEQ ID NO: 867520 - DNA, 33 bp, Homo sapien
gagattctatgatttatgcttcttggaaacaaa

SEQ ID NO: 867521 - DNA, 33 bp, Homo sapien
agagagttaaggactacgaagggctttgttatc

SEQ ID NO: 867522 - DNA, 33 bp, Homo sapien
agagagttaaggactaggaagggctttgttatc

SEQ ID NO: 867523 - DNA, 33 bp, Homo sapien
gaaggcaaggtgaaagccaaaagaaaagacaaa

SEQ ID NO: 867524 - DNA, 33 bp, Homo sapien
gaaggcaaggtgaaagtcaaaagaaaagacaaa

SEQ ID NO: 867525 - DNA, 33 bp, Homo sapien
gtaactttggtattaacgaggaccaagttgagg

SEQ ID NO: 867526 - DNA, 33 bp, Homo sapien
gtaactttggtattaatgaggaccaagttgagg

SEQ ID NO: 867527 - DNA, 33 bp, Homo sapien
aacataaacaggtcaaaccacaaatgtctaata

SEQ ID NO: 867528 - DNA, 33 bp, Homo sapien
aacataaacaggtcaagccacaaatgtctaata

SEQ ID NO: 867529 - DNA, 33 bp, Homo sapien
tcaaaagtaatgatcgacctggtactttagatc

SEQ ID NO: 867530 - DNA, 33 bp, Homo sapien
tcaaaagtaatgatcgtcctggtactttagatc

SEQ ID NO: 867531 - DNA, 33 bp, Homo sapien
tatcacgtggctatgaaaatgtgtcatggttgc

SEQ ID NO: 867532 - DNA, 33 bp, Homo sapien
tatcacgtggctatgagaatgtgtcatggttgc

SEQ ID NO: 867533 - DNA, 33 bp, Homo sapien
ctgaagtcttggatgaagctatgacatcaagag

SEQ ID NO: 867534 - DNA, 33 bp, Homo sapien
ctgaagtcttggatgaggctatgacatcaagag

SEQ ID NO: 867535 - DNA, 33 bp, Homo sapien
ctccatctcagaaaaaaacaaaagattatattt

SEQ ID NO: 867536 - DNA, 33 bp, Homo sapien
ctccatctcagaaaaagacaaaagattatattt

SEQ ID NO: 867537 - DNA, 33 bp, Homo sapien
taggtcgtaatcatgcactgaacatgatactgt

SEQ ID NO: 867538 - DNA, 33 bp, Homo sapien
taggtcgtaatcatgcgctgaacatgatactgt

SEQ ID NO: 867539 - DNA, 33 bp, Homo sapien
aaacagacacagtagaacgaaaggacagtaaaa

SEQ ID NO: 867540 - DNA, 33 bp, Homo sapien
aaacagacacagtagagcgaaaggacagtaaaa

SEQ ID NO: 867541 - DNA, 33 bp, Homo sapien
atcttcagctgtctcaagagaatgacctgattt

SEQ ID NO: 867542 - DNA, 33 bp, Homo sapien
atcttcagctgtctcaggagaatgacctgattt

SEQ ID NO: 867543 - DNA, 33 bp, Homo sapien
ggctcctcctgctttcactcttggtgctagttt

SEQ ID NO: 867544 - DNA, 33 bp, Homo sapien
ggctcctcctgctttctctcttggtgctagttt

SEQ ID NO: 867545 - DNA, 33 bp, Homo sapien
ttgacattttggactacgtagtttgttgttgga

SEQ ID NO: 867546 - DNA, 33 bp, Homo sapien
ttgacattttggactatgtagtttgttgttgga

SEQ ID NO: 867547 - DNA, 33 bp, Homo sapien
taaagaagcctatttaaggaataaaaactatga

SEQ ID NO: 867548 - DNA, 33 bp, Homo sapien
taaagaagcctatttagggaataaaaactatga

SEQ ID NO: 867549 - DNA, 33 bp, Homo sapien
ctgttaaacatgactacaaggactagcaatgtg

SEQ ID NO: 867550 - DNA, 33 bp, Homo sapien
ctgttaaacatgactataaggactagcaatgtg

SEQ ID NO: 867551 - DNA, 33 bp, Homo sapien
gaacatgatagaacaaaacctgcaaatgtgtct

SEQ ID NO: 867552 - DNA, 33 bp, Homo sapien
gaacatgatagaacaacacctgcaaatgtgtct

SEQ ID NO: 867553 - DNA, 33 bp, Homo sapien
cagcttataaagtgacaagagagctgagttccc

SEQ ID NO: 867554 - DNA, 33 bp, Homo sapien
cagcttataaagtgacgagagagctgagttccc

SEQ ID NO: 867555 - DNA, 33 bp, Homo sapien
agtgatgtcaaggtgaagatatttttttagctg

SEQ ID NO: 867556 - DNA, 33 bp, Homo sapien
agtgatgtcaaggtgaggatatttttttagctg

SEQ ID NO: 867557 - DNA, 33 bp, Homo sapien
gccctgtgaagttagcaaatagcacctgatttc

SEQ ID NO: 867558 - DNA, 33 bp, Homo sapien
gccctgtgaagttagccaatagcacctgatttc

SEQ ID NO: 867559 - DNA, 33 bp, Homo sapien
agacagtgactggttaagctgagaaacttacaa

SEQ ID NO: 867560 - DNA, 33 bp, Homo sapien
agacagtgactggttaggctgagaaacttacaa

SEQ ID NO: 867561 - DNA, 33 bp, Homo sapien
tgctcagtgaactataccataaaacagtgataa

SEQ ID NO: 867562 - DNA, 33 bp, Homo sapien
tgctcagtgaactatatcataaaacagtgataa

SEQ ID NO: 867563 - DNA, 33 bp, Homo sapien
ttatggacctcttcaaaaatgtggttagccaat

SEQ ID NO: 867564 - DNA, 33 bp, Homo sapien
ttatggacctcttcaagaatgtggttagccaat

SEQ ID NO: 867565 - DNA, 33 bp, Homo sapien
actggatcactagttacgtggcagagtggtaag

SEQ ID NO: 867566 - DNA, 33 bp, Homo sapien
actggatcactagttatgtggcagagtggtaag

SEQ ID NO: 867567 - DNA, 33 bp, Homo sapien
ttaacaagactattcccacagactcctagtctc

SEQ ID NO: 867568 - DNA, 33 bp, Homo sapien
ttaacaagactattccgacagactcctagtctc

SEQ ID NO: 867569 - DNA, 33 bp, Homo sapien
ttatgccacttaaaaaaatcctgtgaataagag

SEQ ID NO: 867570 - DNA, 33 bp, Homo sapien
ttatgccacttaaaaatatcctgtgaataagag

SEQ ID NO: 867571 - DNA, 33 bp, Homo sapien
gggccccatccctaataatctttctccttaaag

SEQ ID NO: 867572 - DNA, 33 bp, Homo sapien
gggccccatccctaatcatctttctccttaaag

SEQ ID NO: 867573 - DNA, 33 bp, Homo sapien
gagttcaaggttacaggaaactgtgattatgcc

SEQ ID NO: 867574 - DNA, 33 bp, Homo sapien
gagttcaaggttacagtaaactgtgattatgcc

SEQ ID NO: 867575 - DNA, 33 bp, Homo sapien
ttcttccataccaatacgcaaaggccactggaa

SEQ ID NO: 867576 - DNA, 33 bp, Homo sapien
ttcttccataccaatatgcaaaggccactggaa

SEQ ID NO: 867577 - DNA, 33 bp, Homo sapien
atcaggttaattgccaatgcaccaggaattcta

SEQ ID NO: 867578 - DNA, 33 bp, Homo sapien
atcaggttaattgccagtgcaccaggaattcta

SEQ ID NO: 867579 - DNA, 33 bp, Homo sapien
ctgaagcctataagagcatgtggaggaaaggct

SEQ ID NO: 867580 - DNA, 33 bp, Homo sapien
ctgaagcctataagaggatgtggaggaaaggct

SEQ ID NO: 867581 - DNA, 33 bp, Homo sapien
tttgccaggtgcctgaaatcatctttcttgtct

SEQ ID NO: 867582 - DNA, 33 bp, Homo sapien
tttgccaggtgcctgatatcatctttcttgtct

SEQ ID NO: 867583 - DNA, 33 bp, Homo sapien
tcctagactccttcaccgtcttgacactttcct

SEQ ID NO: 867584 - DNA, 33 bp, Homo sapien
tcctagactccttcactgtcttgacactttcct

SEQ ID NO: 867585 - DNA, 33 bp, Homo sapien
tggatttttttttcagacactgctaatcatgta

SEQ ID NO: 867586 - DNA, 33 bp, Homo sapien
tggatttttttttcaggcactgctaatcatgta

SEQ ID NO: 867587 - DNA, 33 bp, Homo sapien
tacaaccataaaacagcattgcttaggaatatg

SEQ ID NO: 867588 - DNA, 33 bp, Homo sapien
tacaaccataaaacagtattgcttaggaatatg

SEQ ID NO: 867589 - DNA, 33 bp, Homo sapien
gcatttgaatttttaacgtttggtctataggaa

SEQ ID NO: 867590 - DNA, 33 bp, Homo sapien
gcatttgaatttttaatgtttggtctataggaa

SEQ ID NO: 867591 - DNA, 33 bp, Homo sapien
tgaggatgtagagaaaagttaatggtcatacag

SEQ ID NO: 867592 - DNA, 33 bp, Homo sapien
tgaggatgtagagaaatgttaatggtcatacag

SEQ ID NO: 867593 - DNA, 33 bp, Homo sapien
tgcaagccttagaaaccggatgaaattctgact

SEQ ID NO: 867594 - DNA, 33 bp, Homo sapien
tgcaagccttagaaactggatgaaattctgact

SEQ ID NO: 867595 - DNA, 33 bp, Homo sapien
aattctataaatgaataaggtcatcagctgtca

SEQ ID NO: 867596 - DNA, 33 bp, Homo sapien
aattctataaatgaatgaggtcatcagctgtca

SEQ ID NO: 867597 - DNA, 33 bp, Homo sapien
ggaacaacacacatcacgtcatatggaagggtg

SEQ ID NO: 867598 - DNA, 33 bp, Homo sapien
ggaacaacacacatcaggtcatatggaagggtg

SEQ ID NO: 867599 - DNA, 33 bp, Homo sapien
accttcacttaacccaatagctggtcccgcagc

SEQ ID NO: 867600 - DNA, 33 bp, Homo sapien
accttcacttaacccagtagctggtcccgcagc

SEQ ID NO: 867601 - DNA, 33 bp, Homo sapien
cacctttagagacaacgccaataaattatagac

SEQ ID NO: 867602 - DNA, 33 bp, Homo sapien
cacctttagagacaactccaataaattatagac

SEQ ID NO: 867603 - DNA, 33 bp, Homo sapien
tgaattgcctaatgctaaaagtacaaagtgaag

SEQ ID NO: 867604 - DNA, 33 bp, Homo sapien
tgaattgcctaatgctgaaagtacaaagtgaag

SEQ ID NO: 867605 - DNA, 33 bp, Homo sapien
gaatgtaaggcttgagaatttaatcagttatac

SEQ ID NO: 867606 - DNA, 33 bp, Homo sapien
gaatgtaaggcttgaggatttaatcagttatac

SEQ ID NO: 867607 - DNA, 33 bp, Homo sapien
ggcattattctaaacccctgtctcactagggca

SEQ ID NO: 867608 - DNA, 33 bp, Homo sapien
ggcattattctaaacctctgtctcactagggca

SEQ ID NO: 867609 - DNA, 33 bp, Homo sapien
caaggagagataaaaaagagattatgcactatc

SEQ ID NO: 867610 - DNA, 33 bp, Homo sapien
caaggagagataaaaaggagattatgcactatc

SEQ ID NO: 867611 - DNA, 33 bp, Homo sapien
ctcattttatgaaacaacttttgacaactcaga

SEQ ID NO: 867612 - DNA, 33 bp, Homo sapien
ctcattttatgaaacatcttttgacaactcaga

SEQ ID NO: 867613 - DNA, 33 bp, Homo sapien
tcaaatctggattctactactattatgccactg

SEQ ID NO: 867614 - DNA, 33 bp, Homo sapien
tcaaatctggattctattactattatgccactg

SEQ ID NO: 867615 - DNA, 33 bp, Homo sapien
ccaatgtgggaccagaactattggtatcttata

SEQ ID NO: 867616 - DNA, 33 bp, Homo sapien
ccaatgtgggaccagacctattggtatcttata

SEQ ID NO: 867617 - DNA, 33 bp, Homo sapien
cactggctaaaaaatccaacaaggcatttaact

SEQ ID NO: 867618 - DNA, 33 bp, Homo sapien
cactggctaaaaaatctaacaaggcatttaact

SEQ ID NO: 867619 - DNA, 33 bp, Homo sapien
ctactacagattacaaaagcacggccaaaagcc

SEQ ID NO: 867620 - DNA, 33 bp, Homo sapien
ctactacagattacaagagcacggccaaaagcc

SEQ ID NO: 867621 - DNA, 33 bp, Homo sapien
ttggtcctacattggaacaagagcaaagtactt

SEQ ID NO: 867622 - DNA, 33 bp, Homo sapien
ttggtcctacattggatcaagagcaaagtactt

SEQ ID NO: 867623 - DNA, 33 bp, Homo sapien
agattctaagagctcaagaaaaatcagattgtt

SEQ ID NO: 867624 - DNA, 33 bp, Homo sapien
agattctaagagctcaggaaaaatcagattgtt

SEQ ID NO: 867625 - DNA, 33 bp, Homo sapien
atagagacaattggcaaaatgttttctaaagct

SEQ ID NO: 867626 - DNA, 33 bp, Homo sapien
atagagacaattggcacaatgttttctaaagct

SEQ ID NO: 867627 - DNA, 33 bp, Homo sapien
aaagatgagatttttagagtcagctgtttattt

SEQ ID NO: 867628 - DNA, 33 bp, Homo sapien
aaagatgagatttttatagtcagctgtttattt

SEQ ID NO: 867629 - DNA, 33 bp, Homo sapien
ttgggaaaggtttccaagcattcaaagagtgtt

SEQ ID NO: 867630 - DNA, 33 bp, Homo sapien
ttgggaaaggtttccaggcattcaaagagtgtt

SEQ ID NO: 867631 - DNA, 33 bp, Homo sapien
agctactcattagctacactaacaaaaaaagag

SEQ ID NO: 867632 - DNA, 33 bp, Homo sapien
agctactcattagctagactaacaaaaaaagag

SEQ ID NO: 867633 - DNA, 33 bp, Homo sapien
caggtatttcattcagcactcataatttctggt

SEQ ID NO: 867634 - DNA, 33 bp, Homo sapien
caggtatttcattcaggactcataatttctggt

SEQ ID NO: 867635 - DNA, 33 bp, Homo sapien
tatgtgaatagatgtcaaagggcaaaacctatg

SEQ ID NO: 867636 - DNA, 33 bp, Homo sapien
tatgtgaatagatgtcgaagggcaaaacctatg

SEQ ID NO: 867637 - DNA, 33 bp, Homo sapien
tatgacattgtaccagaagagcaaaaagtttcc

SEQ ID NO: 867638 - DNA, 33 bp, Homo sapien
tatgacattgtaccaggagagcaaaaagtttcc

SEQ ID NO: 867639 - DNA, 33 bp, Homo sapien
aaatacttaattttgacactagagaaatctcat

SEQ ID NO: 867640 - DNA, 33 bp, Homo sapien
aaatacttaattttgatactagagaaatctcat

SEQ ID NO: 867641 - DNA, 33 bp, Homo sapien
attgtatacatctaaccatttctgggaacgtgt

SEQ ID NO: 867642 - DNA, 33 bp, Homo sapien
attgtatacatctaactatttctgggaacgtgt

SEQ ID NO: 867643 - DNA, 33 bp, Homo sapien
agtagaccggaggcaaaattagctgttgagcta

SEQ ID NO: 867644 - DNA, 33 bp, Homo sapien
agtagaccggaggcaagattagctgttgagcta

SEQ ID NO: 867645 - DNA, 33 bp, Homo sapien
ctttcaatccttatccaaacaaccattgtgtca

SEQ ID NO: 867646 - DNA, 33 bp, Homo sapien
ctttcaatccttatcctaacaaccattgtgtca

SEQ ID NO: 867647 - DNA, 33 bp, Homo sapien
ttgaagagcttagccacatgattttaattattt

SEQ ID NO: 867648 - DNA, 33 bp, Homo sapien
ttgaagagcttagccatatgattttaattattt

SEQ ID NO: 867649 - DNA, 33 bp, Homo sapien
cctttctgattattcaggttgatactaatagtc

SEQ ID NO: 867650 - DNA, 33 bp, Homo sapien
cctttctgattattcatgttgatactaatagtc

SEQ ID NO: 867651 - DNA, 33 bp, Homo sapien
gattttggttgaaaaactcatctaagtctttct

SEQ ID NO: 867652 - DNA, 33 bp, Homo sapien
gattttggttgaaaaattcatctaagtctttct

SEQ ID NO: 867653 - DNA, 33 bp, Homo sapien
gctcctggccttcctgacaacctccaattgcca

SEQ ID NO: 867654 - DNA, 33 bp, Homo sapien
gctcctggccttcctggcaacctccaattgcca

SEQ ID NO: 867655 - DNA, 33 bp, Homo sapien
ctttgctgaataacaacaagggacacctttgct

SEQ ID NO: 867656 - DNA, 33 bp, Homo sapien
ctttgctgaataacaagaagggacacctttgct

SEQ ID NO: 867657 - DNA, 33 bp, Homo sapien
aaaaaggtcttaacaaatgtggaaattacagag

SEQ ID NO: 867658 - DNA, 33 bp, Homo sapien
aaaaaggtcttaacaagtgtggaaattacagag

SEQ ID NO: 867659 - DNA, 33 bp, Homo sapien
tttccttttcttggtacagtatggtgtatgtaa

SEQ ID NO: 867660 - DNA, 33 bp, Homo sapien
tttccttttcttggtatagtatggtgtatgtaa

SEQ ID NO: 867661 - DNA, 33 bp, Homo sapien
tcttcaaatagctccaatggaattcttttcagt

SEQ ID NO: 867662 - DNA, 33 bp, Homo sapien
tcttcaaatagctccagtggaattcttttcagt

SEQ ID NO: 867663 - DNA, 33 bp, Homo sapien
atgaacatggctgtaccagtatctgttcaagtc

SEQ ID NO: 867664 - DNA, 33 bp, Homo sapien
atgaacatggctgtactagtatctgttcaagtc

SEQ ID NO: 867665 - DNA, 33 bp, Homo sapien; identical to SEQ ID NO: 867663

SEQ ID NO: 867666 - DNA, 33 bp, Homo sapien; identical to SEQ ID NO: 867664

SEQ ID NO: 867667 - DNA, 33 bp, Homo sapien
aaaggtgatgggcctacatgaatctatcaacag

SEQ ID NO: 867668 - DNA, 33 bp, Homo sapien
aaaggtgatgggcctatatgaatctatcaacag

SEQ ID NO: 867669 - DNA, 33 bp, Homo sapien
tgtccatgaatattacaaggctttgagattttt

SEQ ID NO: 867670 - DNA, 33 bp, Homo sapien
tgtccatgaatattacgaggctttgagattttt

SEQ ID NO: 867671 - DNA, 33 bp, Homo sapien
acagaatttaatttgcactagtcagctaaagac

SEQ ID NO: 867672 - DNA, 33 bp, Homo sapien
acagaatttaatttgcgctagtcagctaaagac

SEQ ID NO: 867673 - DNA, 33 bp, Homo sapien
gaagataaagtcctccagaaaatgccccaccct

SEQ ID NO: 867674 - DNA, 33 bp, Homo sapien
gaagataaagtcctccggaaaatgccccaccct

SEQ ID NO: 867675 - DNA, 33 bp, Homo sapien
tgtaagtacatggagaacaaaggctaaagtcca

SEQ ID NO: 867676 - DNA, 33 bp, Homo sapien
tgtaagtacatggagaccaaaggctaaagtcca

SEQ ID NO: 867677 - DNA, 33 bp, Homo sapien
cagactgaaataatgaagagactcagtcgtcta

SEQ ID NO: 867678 - DNA, 33 bp, Homo sapien
cagactgaaataatgacgagactcagtcgtcta

SEQ ID NO: 867679 - DNA, 33 bp, Homo sapien
gcatttccaagaatcacgaagcaagccggctgg

SEQ ID NO: 867680 - DNA, 33 bp, Homo sapien
gcatttccaagaatcatgaagcaagccggctgg

SEQ ID NO: 867681 - DNA, 33 bp, Homo sapien
tgggctaatgcaactacaagagaggtttgctca

SEQ ID NO: 867682 - DNA, 33 bp, Homo sapien
tgggctaatgcaactagaagagaggtttgctca

SEQ ID NO: 867683 - DNA, 33 bp, Homo sapien
gacagaattcatgacaaaaatctaattgttgga

SEQ ID NO: 867684 - DNA, 33 bp, Homo sapien
gacagaattcatgacagaaatctaattgttgga

SEQ ID NO: 867685 - DNA, 33 bp, Homo sapien
tttgtgcaagaatgacaaattactattaccata

SEQ ID NO: 867686 - DNA, 33 bp, Homo sapien
tttgtgcaagaatgacgaattactattaccata

SEQ ID NO: 867687 - DNA, 33 bp, Homo sapien
agacgtgagtctttgtaaaagtaattcatcctc

SEQ ID NO: 867688 - DNA, 33 bp, Homo sapien
agacgtgagtctttgtgaaagtaattcatcctc

SEQ ID NO: 867689 - DNA, 33 bp, Homo sapien
catctctacagacgcaacattatagagatgaga

SEQ ID NO: 867690 - DNA, 33 bp, Homo sapien
catctctacagacgcagcattatagagatgaga

SEQ ID NO: 867691 - DNA, 33 bp, Homo sapien
attgggagccaatttaagaattttcaggataat

SEQ ID NO: 867692 - DNA, 33 bp, Homo sapien
attgggagccaatttaggaattttcaggataat

SEQ ID NO: 867693 - DNA, 33 bp, Homo sapien
tagaacatgaaacaacagaaattactatgtccc

SEQ ID NO: 867694 - DNA, 33 bp, Homo sapien
tagaacatgaaacaacggaaattactatgtccc

SEQ ID NO: 867695 - DNA, 33 bp, Homo sapien
tgtgtgcatggtaagacggatgcacatatattt

SEQ ID NO: 867696 - DNA, 33 bp, Homo sapien
tgtgtgcatggtaagatggatgcacatatattt

SEQ ID NO: 867697 - DNA, 33 bp, Homo sapien
aaacttacaggcaacacccaaataaaatgaggt

SEQ ID NO: 867698 - DNA, 33 bp, Homo sapien
aaacttacaggcaacatccaaataaaatgaggt

SEQ ID NO: 867699 - DNA, 33 bp, Homo sapien
tataaacacaaatccacgtatacacacatatat

SEQ ID NO: 867700 - DNA, 33 bp, Homo sapien
tataaacacaaatccatgtatacacacatatat

SEQ ID NO: 867701 - DNA, 33 bp, Homo sapien
ttggtaattctcaaaaatcatcattcgtcaggc

SEQ ID NO: 867702 - DNA, 33 bp, Homo sapien
ttggtaattctcaaaactcatcattcgtcaggc

SEQ ID NO: 867703 - DNA, 33 bp, Homo sapien
tttctgagcaccaatcaaaactaaaagcttttc

SEQ ID NO: 867704 - DNA, 33 bp, Homo sapien
tttctgagcaccaatccaaactaaaagcttttc

SEQ ID NO: 867705 - DNA, 33 bp, Homo sapien
ataacaacataacaaccggcccagactcttcag

SEQ ID NO: 867706 - DNA, 33 bp, Homo sapien
ataacaacataacaactggcccagactcttcag

SEQ ID NO: 867707 - DNA, 33 bp, Homo sapien
agtccactgttgtgaaaaacctgaatagcatcc

SEQ ID NO: 867708 - DNA, 33 bp, Homo sapien
agtccactgttgtgaagaacctgaatagcatcc

SEQ ID NO: 867709 - DNA, 33 bp, Homo sapien
ccaatataaaataagccctcttctgtgaggctt

SEQ ID NO: 867710 - DNA, 33 bp, Homo sapien
ccaatataaaataagctctcttctgtgaggctt

SEQ ID NO: 867711 - DNA, 33 bp, Homo sapien
ttcttttgcaaatgtcaaagtcatgcttgtaaa

SEQ ID NO: 867712 - DNA, 33 bp, Homo sapien
ttcttttgcaaatgtcgaagtcatgcttgtaaa

SEQ ID NO: 867713 - DNA, 33 bp, Homo sapien
taaaattgatgaaaaaatacctcggaatatcag

SEQ ID NO: 867714 - DNA, 33 bp, Homo sapien
taaaattgatgaaaaagtacctcggaatatcag

SEQ ID NO: 867715 - DNA, 33 bp, Homo sapien
gcatcccagtatcatccattggcaagcaaccag

SEQ ID NO: 867716 - DNA, 33 bp, Homo sapien
gcatcccagtatcatctattggcaagcaaccag

SEQ ID NO: 867717 - DNA, 33 bp, Homo sapien
gcaaagtcaggaaaagcattggaacacagtctt

SEQ ID NO: 867718 - DNA, 33 bp, Homo sapien
gcaaagtcaggaaaagtattggaacacagtctt

SEQ ID NO: 867719 - DNA, 33 bp, Homo sapien
aaacttgtaactttaaatgactgcgcaggggta

SEQ ID NO: 867720 - DNA, 33 bp, Homo sapien
aaacttgtaactttaagtgactgcgcaggggta

SEQ ID NO: 867721 - DNA, 33 bp, Homo sapien
tgttcactgctgtttacgacctgggcttgggtc

SEQ ID NO: 867722 - DNA, 33 bp, Homo sapien
tgttcactgctgtttatgacctgggcttgggtc

SEQ ID NO: 867723 - DNA, 33 bp, Homo sapien
ctgcttcactatgaaaatattgtgccacagaaa

SEQ ID NO: 867724 - DNA, 33 bp, Homo sapien
ctgcttcactatgaaagtattgtgccacagaaa

SEQ ID NO: 867725 - DNA, 33 bp, Homo sapien
tgcacacattaatccacgtaagtaactatttgt

SEQ ID NO: 867726 - DNA, 33 bp, Homo sapien
tgcacacattaatccatgtaagtaactatttgt

SEQ ID NO: 867727 - DNA, 33 bp, Homo sapien
gaaaataaaatagcaaacatccctcacacgaaa

SEQ ID NO: 867728 - DNA, 33 bp, Homo sapien
gaaaataaaatagcaagcatccctcacacgaaa

SEQ ID NO: 867729 - DNA, 33 bp, Homo sapien
aatcagaagatgggccagaatgctaaatgtaat

SEQ ID NO: 867730 - DNA, 33 bp, Homo sapien
aatcagaagatgggccggaatgctaaatgtaat

SEQ ID NO: 867731 - DNA, 33 bp, Homo sapien
ttcaacaaacctaccacgaagaacttagcataa

SEQ ID NO: 867732 - DNA, 33 bp, Homo sapien
ttcaacaaacctaccatgaagaacttagcataa

SEQ ID NO: 867733 - DNA, 33 bp, Homo sapien
gtacagtcatctgttggagtagtaatctgagaa

SEQ ID NO: 867734 - DNA, 33 bp, Homo sapien
gtacagtcatctgttgtagtagtaatctgagaa

SEQ ID NO: 867735 - DNA, 33 bp, Homo sapien
tatggggaaattgctacgtaacgtattttaaat

SEQ ID NO: 867736 - DNA, 33 bp, Homo sapien
tatggggaaattgctaggtaacgtattttaaat

SEQ ID NO: 867737 - DNA, 33 bp, Homo sapien
agccattcatcttataaagtggggagttctgga

SEQ ID NO: 867738 - DNA, 33 bp, Homo sapien
agccattcatcttatagagtggggagttctgga

SEQ ID NO: 867739 - DNA, 33 bp, Homo sapien
atatgaagctaaaggaagcagacagagcccctt

SEQ ID NO: 867740 - DNA, 33 bp, Homo sapien
atatgaagctaaaggatgcagacagagcccctt

SEQ ID NO: 867741 - DNA, 33 bp, Homo sapien
atatgtcaccatgaagcctaaaaagcttgatgc

SEQ ID NO: 867742 - DNA, 33 bp, Homo sapien
atatgtcaccatgaagtctaaaaagcttgatgc

SEQ ID NO: 867743 - DNA, 33 bp, Homo sapien
gtgttttctagtttaaccctatctctctgatca

SEQ ID NO: 867744 - DNA, 33 bp, Homo sapien
gtgttttctagtttaatcctatctctctgatca

SEQ ID NO: 867745 - DNA, 33 bp, Homo sapien
acaactccactgtagactagaacatggctctag

SEQ ID NO: 867746 - DNA, 33 bp, Homo sapien
acaactccactgtagattagaacatggctctag

SEQ ID NO: 867747 - DNA, 33 bp, Homo sapien
ttttattgtgagttcaccttactggaaatcatt

SEQ ID NO: 867748 - DNA, 33 bp, Homo sapien
ttttattgtgagttcatcttactggaaatcatt

SEQ ID NO: 867749 - DNA, 33 bp, Homo sapien
ataaatgatcttgaacaagtaatactcttaatt

SEQ ID NO: 867750 - DNA, 33 bp, Homo sapien
ataaatgatcttgaacgagtaatactcttaatt

SEQ ID NO: 867751 - DNA, 33 bp, Homo sapien
agtaatttgccaaaagccacatatctcatttgt

SEQ ID NO: 867752 - DNA, 33 bp, Homo sapien
agtaatttgccaaaagtcacatatctcatttgt

SEQ ID NO: 867753 - DNA, 33 bp, Homo sapien
gcatacaagtaagtcactacaggtataggtgga

SEQ ID NO: 867754 - DNA, 33 bp, Homo sapien
gcatacaagtaagtcattacaggtataggtgga

SEQ ID NO: 867755 - DNA, 33 bp, Homo sapien
cttctctgtggctataataactggttggtgtat

SEQ ID NO: 867756 - DNA, 33 bp, Homo sapien
cttctctgtggctatagtaactggttggtgtat

SEQ ID NO: 867757 - DNA, 33 bp, Homo sapien
attaaccatcactaaaataaacagactctgaag

SEQ ID NO: 867758 - DNA, 33 bp, Homo sapien
attaaccatcactaaagtaaacagactctgaag

SEQ ID NO: 867759 - DNA, 33 bp, Homo sapien
tatacatattaaaaccaacttagaagaggttaa

SEQ ID NO: 867760 - DNA, 33 bp, Homo sapien
tatacatattaaaaccgacttagaagaggttaa

SEQ ID NO: 867761 - DNA, 33 bp, Homo sapien
gaaggaaatgatgatgaacaaggccctcctttc

SEQ ID NO: 867762 - DNA, 33 bp, Homo sapien
gaaggaaatgatgatgcacaaggccctcctttc

SEQ ID NO: 867763 - DNA, 33 bp, Homo sapien
gagccagtagctcctggagaaatcttggaagtc

SEQ ID NO: 867764 - DNA, 33 bp, Homo sapien
gagccagtagctcctgtagaaatcttggaagtc

SEQ ID NO: 867765 - DNA, 33 bp, Homo sapien
attgagacccatattgcagtttattattccatt

SEQ ID NO: 867766 - DNA, 33 bp, Homo sapien
attgagacccatattgtagtttattattccatt

SEQ ID NO: 867767 - DNA, 33 bp, Homo sapien
atgtgccctttcaacaccagtcctttctcaaac

SEQ ID NO: 867768 - DNA, 33 bp, Homo sapien
atgtgccctttcaacatcagtcctttctcaaac

SEQ ID NO: 867769 - DNA, 33 bp, Homo sapien
catgaagggttctcaaactttaatatgcattca

SEQ ID NO: 867770 - DNA, 33 bp, Homo sapien
catgaagggttctcaagctttaatatgcattca

SEQ ID NO: 867771 - DNA, 33 bp, Homo sapien
ctccatgcccaagcaccctctatacattctggt

SEQ ID NO: 867772 - DNA, 33 bp, Homo sapien
ctccatgcccaagcactctctatacattctggt

SEQ ID NO: 867773 - DNA, 33 bp, Homo sapien
tttaatgttttccttaagtttcctctgagcaga

SEQ ID NO: 867774 - DNA, 33 bp, Homo sapien
tttaatgttttccttatgtttcctctgagcaga

SEQ ID NO: 867775 - DNA, 33 bp, Homo sapien
tgttatctgtaacttcactggttcaaagtgata

SEQ ID NO: 867776 - DNA, 33 bp, Homo sapien
tgttatctgtaacttcgctggttcaaagtgata

SEQ ID NO: 867777 - DNA, 33 bp, Homo sapien
ctttatctgttgcaaaatgtctacttataaatg

SEQ ID NO: 867778 - DNA, 33 bp, Homo sapien
ctttatctgttgcaaagtgtctacttataaatg

SEQ ID NO: 867779 - DNA, 33 bp, Homo sapien
ttttgcagatgaaaaactttagcttggtatagt

SEQ ID NO: 867780 - DNA, 33 bp, Homo sapien
ttttgcagatgaaaaagtttagcttggtatagt

SEQ ID NO: 867781 - DNA, 33 bp, Homo sapien
atcctcaagatggtaactctcagtcccctccac

SEQ ID NO: 867782 - DNA, 33 bp, Homo sapien
atcctcaagatggtaattctcagtcccctccac

SEQ ID NO: 867783 - DNA, 33 bp, Homo sapien
gatatcatttctaagccgaatagtacctctttt

SEQ ID NO: 867784 - DNA, 33 bp, Homo sapien
gatatcatttctaagctgaatagtacctctttt

SEQ ID NO: 867785 - DNA, 33 bp, Homo sapien
ggtattacagaatggccacaggagttatttcta

SEQ ID NO: 867786 - DNA, 33 bp, Homo sapien
ggtattacagaatggctacaggagttatttcta

SEQ ID NO: 867787 - DNA, 33 bp, Homo sapien
ccaatagttaagagaacataatgcaagcatatt

SEQ ID NO: 867788 - DNA, 33 bp, Homo sapien
ccaatagttaagagaatataatgcaagcatatt

SEQ ID NO: 867789 - DNA, 33 bp, Homo sapien
gagagactttaaagatgagtagtgaggtaggag

SEQ ID NO: 867790 - DNA, 33 bp, Homo sapien
gagagactttaaagattagtagtgaggtaggag

SEQ ID NO: 867791 - DNA, 33 bp, Homo sapien
ttgtaaattcagtggaaaagtatcagaatttat

SEQ ID NO: 867792 - DNA, 33 bp, Homo sapien
ttgtaaattcagtggacaagtatcagaatttat

SEQ ID NO: 867793 - DNA, 33 bp, Homo sapien
tttatatcctccagcaacttcttcatagaagca

SEQ ID NO: 867794 - DNA, 33 bp, Homo sapien
tttatatcctccagcagcttcttcatagaagca

SEQ ID NO: 867795 - DNA, 33 bp, Homo sapien
gctaagatacagttaccaaagtatttcattggc

SEQ ID NO: 867796 - DNA, 33 bp, Homo sapien
gctaagatacagttactaaagtatttcattggc

SEQ ID NO: 867797 - DNA, 33 bp, Homo sapien
ttacctggttatataaatctgggaacctataca

SEQ ID NO: 867798 - DNA, 33 bp, Homo sapien
ttacctggttatataattctgggaacctataca

SEQ ID NO: 867799 - DNA, 33 bp, Homo sapien
tacttcaatgcaaaaacgtgattttccccagct

SEQ ID NO: 867800 - DNA, 33 bp, Homo sapien
tacttcaatgcaaaaaggtgattttccccagct

SEQ ID NO: 867801 - DNA, 33 bp, Homo sapien
ctgagacaggtagaaacggggatacgtgatcaa

SEQ ID NO: 867802 - DNA, 33 bp, Homo sapien
ctgagacaggtagaaatggggatacgtgatcaa

SEQ ID NO: 867803 - DNA, 33 bp, Homo sapien
catgtacatttttatgaatactatcacatatca

SEQ ID NO: 867804 - DNA, 33 bp, Homo sapien
catgtacatttttatggatactatcacatatca

SEQ ID NO: 867805 - DNA, 33 bp, Homo sapien
ttcctgttcacacttcccaaatctcttgccaga

SEQ ID NO: 867806 - DNA, 33 bp, Homo sapien
ttcctgttcacacttcgcaaatctcttgccaga

SEQ ID NO: 867807 - DNA, 33 bp, Homo sapien
acactcggatgagtaacagttttaagtatagga

SEQ ID NO: 867808 - DNA, 33 bp, Homo sapien
acactcggatgagtaatagttttaagtatagga

SEQ ID NO: 867809 - DNA, 33 bp, Homo sapien
agagaaatgtgataagcagaagcgaaaaagaca

SEQ ID NO: 867810 - DNA, 33 bp, Homo sapien
agagaaatgtgataagtagaagcgaaaaagaca

SEQ ID NO: 867811 - DNA, 33 bp, Homo sapien
gcccccagggacaaaacaagaagtcagatcaca

SEQ ID NO: 867812 - DNA, 33 bp, Homo sapien
gcccccagggacaaaataagaagtcagatcaca

SEQ ID NO: 867813 - DNA, 33 bp, Homo sapien
ttcctatagggaggtaaggcctatttgctatct

SEQ ID NO: 867814 - DNA, 33 bp, Homo sapien
ttcctatagggaggtagggcctatttgctatct

SEQ ID NO: 867815 - DNA, 33 bp, Homo sapien
gttattgaggtcaaatgattgccatgactcatt

SEQ ID NO: 867816 - DNA, 33 bp, Homo sapien
gttattgaggtcaaattattgccatgactcatt

SEQ ID NO: 867817 - DNA, 33 bp, Homo sapien
ggagtcatatcctactcacttaaagatggcacc

SEQ ID NO: 867818 - DNA, 33 bp, Homo sapien
ggagtcatatcctacttacttaaagatggcacc

SEQ ID NO: 867819 - DNA, 33 bp, Homo sapien
actaaacttacctcacagaatattggtagtaaa

SEQ ID NO: 867820 - DNA, 33 bp, Homo sapien
actaaacttacctcacggaatattggtagtaaa

SEQ ID NO: 867821 - DNA, 33 bp, Homo sapien
tttcatggggacctaccatctcttgaccatctc

SEQ ID NO: 867822 - DNA, 33 bp, Homo sapien
tttcatggggacctacgatctcttgaccatctc

SEQ ID NO: 867823 - DNA, 33 bp, Homo sapien
tggtgctggcataggacagataaatacaccaat

SEQ ID NO: 867824 - DNA, 33 bp, Homo sapien
tggtgctggcataggatagataaatacaccaat

SEQ ID NO: 867825 - DNA, 33 bp, Homo sapien
gcattctttgagcaaactcctgtgtcttcagtt

SEQ ID NO: 867826 - DNA, 33 bp, Homo sapien
gcattctttgagcaaattcctgtgtcttcagtt

SEQ ID NO: 867827 - DNA, 33 bp, Homo sapien
ccatatttaacttcaccgtattgatgaaacatt

SEQ ID NO: 867828 - DNA, 33 bp, Homo sapien
ccatatttaacttcactgtattgatgaaacatt

SEQ ID NO: 867829 - DNA, 33 bp, Homo sapien
agatggcaattttctaataaaggaagcaacaca

SEQ ID NO: 867830 - DNA, 33 bp, Homo sapien
agatggcaattttctagtaaaggaagcaacaca

SEQ ID NO: 867831 - DNA, 33 bp, Homo sapien
aagatgtcagagattgaaagcttaaaatgaatg

SEQ ID NO: 867832 - DNA, 33 bp, Homo sapien
aagatgtcagagattggaagcttaaaatgaatg

SEQ ID NO: 867833 - DNA, 33 bp, Homo sapien
atggaaagcatgagaaagaattcagaaagcatc

SEQ ID NO: 867834 - DNA, 33 bp, Homo sapien
atggaaagcatgagaaggaattcagaaagcatc

SEQ ID NO: 867835 - DNA, 33 bp, Homo sapien
caaacttgaatatccacgcaataaaatactttt

SEQ ID NO: 867836 - DNA, 33 bp, Homo sapien
caaacttgaatatccatgcaataaaatactttt

SEQ ID NO: 867837 - DNA, 33 bp, Homo sapien
ctagcaacatttacacacctggttctcttattt

SEQ ID NO: 867838 - DNA, 33 bp, Homo sapien
ctagcaacatttacactcctggttctcttattt

SEQ ID NO: 867839 - DNA, 33 bp, Homo sapien
aaagataagacatagacctgacttctcagcaat

SEQ ID NO: 867840 - DNA, 33 bp, Homo sapien
aaagataagacatagatctgacttctcagcaat

SEQ ID NO: 867841 - DNA, 33 bp, Homo sapien
attagccataagaaagaatagctgcattagtca

SEQ ID NO: 867842 - DNA, 33 bp, Homo sapien
attagccataagaaaggatagctgcattagtca

SEQ ID NO: 867843 - DNA, 33 bp, Homo sapien
ataatcatgaagtgcacaactgaaaaggagaga

SEQ ID NO: 867844 - DNA, 33 bp, Homo sapien
ataatcatgaagtgcataactgaaaaggagaga

SEQ ID NO: 867845 - DNA, 33 bp, Homo sapien
ctctgacatttaaaccgatagcttatgttcata

SEQ ID NO: 867846 - DNA, 33 bp, Homo sapien
ctctgacatttaaacctatagcttatgttcata

SEQ ID NO: 867847 - DNA, 33 bp, Homo sapien
tgctttggctatttgaagctttcgtggttccat

SEQ ID NO: 867848 - DNA, 33 bp, Homo sapien
tgctttggctatttgaggctttcgtggttccat

SEQ ID NO: 867849 - DNA, 33 bp, Homo sapien
agtcttagagcaaccacgaaaaaacaaaaaact

SEQ ID NO: 867850 - DNA, 33 bp, Homo sapien
agtcttagagcaaccaggaaaaaacaaaaaact

SEQ ID NO: 867851 - DNA, 33 bp, Homo sapien
tcagaagctaaatgaaaaaacaggcaaataata

SEQ ID NO: 867852 - DNA, 33 bp, Homo sapien
tcagaagctaaatgaagaaacaggcaaataata

SEQ ID NO: 867853 - DNA, 33 bp, Homo sapien
gccaagaaatctctggacactctactgtgactg

SEQ ID NO: 867854 - DNA, 33 bp, Homo sapien
gccaagaaatctctggccactctactgtgactg

SEQ ID NO: 867855 - DNA, 33 bp, Homo sapien
aggtcagcacaatatgcagatcacaaagacctt

SEQ ID NO: 867856 - DNA, 33 bp, Homo sapien
aggtcagcacaatatgtagatcacaaagacctt

SEQ ID NO: 867857 - DNA, 33 bp, Homo sapien
catgtggtaaagaagcagaccacatccaaccaa

SEQ ID NO: 867858 - DNA, 33 bp, Homo sapien
catgtggtaaagaagctgaccacatccaaccaa

SEQ ID NO: 867859 - DNA, 33 bp, Homo sapien
ttaaaagagatatttgcatgagctagtaacttt

SEQ ID NO: 867860 - DNA, 33 bp, Homo sapien
ttaaaagagatatttgtatgagctagtaacttt

SEQ ID NO: 867861 - DNA, 33 bp, Homo sapien
ttctgtagggcaaagacgcagaaatacgttatt

SEQ ID NO: 867862 - DNA, 33 bp, Homo sapien
ttctgtagggcaaagatgcagaaatacgttatt

SEQ ID NO: 867863 - DNA, 33 bp, Homo sapien
ggttcaaggtgctgcactctcttcctgttcaca

SEQ ID NO: 867864 - DNA, 33 bp, Homo sapien
ggttcaaggtgctgcattctcttcctgttcaca

SEQ ID NO: 867865 - DNA, 33 bp, Homo sapien
tagataaaactactcaccaagcagtctaaagcc

SEQ ID NO: 867866 - DNA, 33 bp, Homo sapien
tagataaaactactcagcaagcagtctaaagcc

SEQ ID NO: 867867 - DNA, 33 bp, Homo sapien
atcctctttcctgacaacacttatcaccatgcc

SEQ ID NO: 867868 - DNA, 33 bp, Homo sapien
atcctctttcctgacagcacttatcaccatgcc

SEQ ID NO: 867869 - DNA, 33 bp, Homo sapien
ggacagtcttggttacagcataacttcccagta

SEQ ID NO: 867870 - DNA, 33 bp, Homo sapien
ggacagtcttggttacggcataacttcccagta

SEQ ID NO: 867871 - DNA, 33 bp, Homo sapien
tatgtgccttaagcaactgcctgtaacccaggt

SEQ ID NO: 867872 - DNA, 33 bp, Homo sapien
tatgtgccttaagcaagtgcctgtaacccaggt

SEQ ID NO: 867873 - DNA, 33 bp, Homo sapien
tggcagagggtactacacagaaatgtcaaactg

SEQ ID NO: 867874 - DNA, 33 bp, Homo sapien
tggcagagggtactacccagaaatgtcaaactg

SEQ ID NO: 867875 - DNA, 33 bp, Homo sapien
aaccaataaatagccaatcagtattcatctcta

SEQ ID NO: 867876 - DNA, 33 bp, Homo sapien
aaccaataaatagccactcagtattcatctcta

SEQ ID NO: 867877 - DNA, 33 bp, Homo sapien
gtgttgcttttatctacagtagtagcgatgtct

SEQ ID NO: 867878 - DNA, 33 bp, Homo sapien
gtgttgcttttatctatagtagtagcgatgtct

SEQ ID NO: 867879 - DNA, 33 bp, Homo sapien
atgatgctttaccacaatgagccttgcttgggt

SEQ ID NO: 867880 - DNA, 33 bp, Homo sapien
atgatgctttaccacagtgagccttgcttgggt

SEQ ID NO: 867881 - DNA, 33 bp, Homo sapien
agctaattgtaaacaccgggtcaaaataaaaag

SEQ ID NO: 867882 - DNA, 33 bp, Homo sapien
agctaattgtaaacactgggtcaaaataaaaag

SEQ ID NO: 867883 - DNA, 33 bp, Homo sapien
caaccaggttgtcataccataaagagaacaaat

SEQ ID NO: 867884 - DNA, 33 bp, Homo sapien
caaccaggttgtcatagcataaagagaacaaat

SEQ ID NO: 867885 - DNA, 33 bp, Homo sapien
atggataaagcctggcaaaagaatagtggaact

SEQ ID NO: 867886 - DNA, 33 bp, Homo sapien
atggataaagcctggcgaaagaatagtggaact

SEQ ID NO: 867887 - DNA, 33 bp, Homo sapien
accaatataagaagaagggtctctgtatgtaaa

SEQ ID NO: 867888 - DNA, 33 bp, Homo sapien
accaatataagaagaatggtctctgtatgtaaa

SEQ ID NO: 867889 - DNA, 33 bp, Homo sapien
aacaattacagtgcaaattgataaatgctatgc

SEQ ID NO: 867890 - DNA, 33 bp, Homo sapien
aacaattacagtgcaagttgataaatgctatgc

SEQ ID NO: 867891 - DNA, 33 bp, Homo sapien
taggaatattactgtgaaagtccttggtggata

SEQ ID NO: 867892 - DNA, 33 bp, Homo sapien
taggaatattactgtgcaagtccttggtggata

SEQ ID NO: 867893 - DNA, 33 bp, Homo sapien
aacaataagtaatttcaaaaagagaataaatgg

SEQ ID NO: 867894 - DNA, 33 bp, Homo sapien
aacaataagtaatttcgaaaagagaataaatgg

SEQ ID NO: 867895 - DNA, 33 bp, Homo sapien
aatcatgaagaaaatcaatatagtacaacaaaa

SEQ ID NO: 867896 - DNA, 33 bp, Homo sapien
aatcatgaagaaaatccatatagtacaacaaaa

SEQ ID NO: 867897 - DNA, 33 bp, Homo sapien
ctgggaatgtactcaacaggagatgcttaatca

SEQ ID NO: 867898 - DNA, 33 bp, Homo sapien
ctgggaatgtactcaataggagatgcttaatca

SEQ ID NO: 867899 - DNA, 33 bp, Homo sapien
gaaaaattataacataagccaagactaaccaag

SEQ ID NO: 867900 - DNA, 33 bp, Homo sapien
gaaaaattataacataggccaagactaaccaag

SEQ ID NO: 867901 - DNA, 33 bp, Homo sapien
gatacatagaagctaggcaatacaaattgatta

SEQ ID NO: 867902 - DNA, 33 bp, Homo sapien
gatacatagaagctagtcaatacaaattgatta

SEQ ID NO: 867903 - DNA, 33 bp, Homo sapien
acaactttagcttagtaaccccaggagacatga

SEQ ID NO: 867904 - DNA, 33 bp, Homo sapien
acaactttagcttagtgaccccaggagacatga

SEQ ID NO: 867905 - DNA, 33 bp, Homo sapien
tgcatagaaagaatacagaaggttatctaccaa

SEQ ID NO: 867906 - DNA, 33 bp, Homo sapien
tgcatagaaagaatacggaaggttatctaccaa

SEQ ID NO: 867907 - DNA, 33 bp, Homo sapien
ctctatgctgagaccacatcaagaggctccata

SEQ ID NO: 867908 - DNA, 33 bp, Homo sapien
ctctatgctgagaccatatcaagaggctccata

SEQ ID NO: 867909 - DNA, 33 bp, Homo sapien
aaaacagatcacattcaaagctttcagcagatt

SEQ ID NO: 867910 - DNA, 33 bp, Homo sapien
aaaacagatcacattcgaagctttcagcagatt

SEQ ID NO: 867911 - DNA, 33 bp, Homo sapien
cttcttctcagccctacaaattgttccaatctc

SEQ ID NO: 867912 - DNA, 33 bp, Homo sapien
cttcttctcagccctagaaattgttccaatctc

SEQ ID NO: 867913 - DNA, 33 bp, Homo sapien
ctgtagtttggagacacgattatctatcggtga

SEQ ID NO: 867914 - DNA, 33 bp, Homo sapien
ctgtagtttggagacatgattatctatcggtga

SEQ ID NO: 867915 - DNA, 33 bp, Homo sapien
tccttcacatctctgccgaaataactatcccca

SEQ ID NO: 867916 - DNA, 33 bp, Homo sapien
tccttcacatctctgctgaaataactatcccca

SEQ ID NO: 867917 - DNA, 33 bp, Homo sapien
tcaatctctataaatacatcgtgcaccgaactc

SEQ ID NO: 867918 - DNA, 33 bp, Homo sapien
tcaatctctataaatatatcgtgcaccgaactc

SEQ ID NO: 867919 - DNA, 33 bp, Homo sapien
ggaggtgcaggatttccaattatctgaattctg

SEQ ID NO: 867920 - DNA, 33 bp, Homo sapien
ggaggtgcaggatttctaattatctgaattctg

SEQ ID NO: 867921 - DNA, 33 bp, Homo sapien
tagctaatttcaattccctgccagacagtttca

SEQ ID NO: 867922 - DNA, 33 bp, Homo sapien
tagctaatttcaattctctgccagacagtttca

SEQ ID NO: 867923 - DNA, 33 bp, Homo sapien
tttcctcagctatgtaaagtctgctgatgagct

SEQ ID NO: 867924 - DNA, 33 bp, Homo sapien
tttcctcagctatgtagagtctgctgatgagct

SEQ ID NO: 867925 - DNA, 33 bp, Homo sapien
cccagctcctccccaacataaagcaagaattcc

SEQ ID NO: 867926 - DNA, 33 bp, Homo sapien
cccagctcctccccaatataaagcaagaattcc

SEQ ID NO: 867927 - DNA, 33 bp, Homo sapien
catgccaagtcaggaaaggtctatactataagc

SEQ ID NO: 867928 - DNA, 33 bp, Homo sapien
catgccaagtcaggaagggtctatactataagc

SEQ ID NO: 867929 - DNA, 33 bp, Homo sapien
tgttggagctaaataacccacagataaaaccca

SEQ ID NO: 867930 - DNA, 33 bp, Homo sapien
tgttggagctaaataatccacagataaaaccca

SEQ ID NO: 867931 - DNA, 33 bp, Homo sapien
aatctaagcgtttataactggtctctcaatttt

SEQ ID NO: 867932 - DNA, 33 bp, Homo sapien
aatctaagcgtttatatctggtctctcaatttt

SEQ ID NO: 867933 - DNA, 33 bp, Homo sapien
gcgattcaaaattatcaaacacatttcaaatac

SEQ ID NO: 867934 - DNA, 33 bp, Homo sapien
gcgattcaaaattatccaacacatttcaaatac

SEQ ID NO: 867935 - DNA, 33 bp, Homo sapien
ttacttatgggtactacgttgattccatatttt

SEQ ID NO: 867936 - DNA, 33 bp, Homo sapien
ttacttatgggtactaggttgattccatatttt

SEQ ID NO: 867937 - DNA, 33 bp, Homo sapien
ggccagtcgactacagacaaatctaaaagaaat

SEQ ID NO: 867938 - DNA, 33 bp, Homo sapien
ggccagtcgactacagccaaatctaaaagaaat

SEQ ID NO: 867939 - DNA, 33 bp, Homo sapien
gagaaacaggtagatccgagaataatcaatgcc

SEQ ID NO: 867940 - DNA, 33 bp, Homo sapien
gagaaacaggtagatctgagaataatcaatgcc

SEQ ID NO: 867941 - DNA, 33 bp, Homo sapien
aacaagcaattgtaaaaggactcactattcaat

SEQ ID NO: 867942 - DNA, 33 bp, Homo sapien
aacaagcaattgtaaatggactcactattcaat

SEQ ID NO: 867943 - DNA, 33 bp, Homo sapien
tcaggtgggtttttcaataggagaccaggaagc

SEQ ID NO: 867944 - DNA, 33 bp, Homo sapien
tcaggtgggtttttcagtaggagaccaggaagc

SEQ ID NO: 867945 - DNA, 33 bp, Homo sapien
aacaatccttcagagacgacagttgccggaatc

SEQ ID NO: 867946 - DNA, 33 bp, Homo sapien
aacaatccttcagagatgacagttgccggaatc

SEQ ID NO: 867947 - DNA, 33 bp, Homo sapien
tctgacactcctataaaaaagtcccatagagct

SEQ ID NO: 867948 - DNA, 33 bp, Homo sapien
tctgacactcctataagaaagtcccatagagct

SEQ ID NO: 867949 - DNA, 33 bp, Homo sapien
ccagggatgaatcagacagaatgtttatgtaga

SEQ ID NO: 867950 - DNA, 33 bp, Homo sapien
ccagggatgaatcagatagaatgtttatgtaga

SEQ ID NO: 867951 - DNA, 33 bp, Homo sapien
ctctgtgaccacgctgcagtcgtacttcaaaaa

SEQ ID NO: 867952 - DNA, 33 bp, Homo sapien
ctctgtgaccacgctgtagtcgtacttcaaaaa

SEQ ID NO: 867953 - DNA, 33 bp, Homo sapien
ttatggacctttataacgcacaatgatgaatta

SEQ ID NO: 867954 - DNA, 33 bp, Homo sapien
ttatggacctttataatgcacaatgatgaatta

SEQ ID NO: 867955 - DNA, 33 bp, Homo sapien
tctcgtaaagctggtacctgtttataatcattg

SEQ ID NO: 867956 - DNA, 33 bp, Homo sapien
tctcgtaaagctggtagctgtttataatcattg

SEQ ID NO: 867957 - DNA, 33 bp, Homo sapien
gatcatgtgaaacagactagcctatttaatgct

SEQ ID NO: 867958 - DNA, 33 bp, Homo sapien
gatcatgtgaaacagagtagcctatttaatgct

SEQ ID NO: 867959 - DNA, 33 bp, Homo sapien
tttaaaatgcaacaaacgtgatttaatcaaact

SEQ ID NO: 867960 - DNA, 33 bp, Homo sapien
tttaaaatgcaacaaatgtgatttaatcaaact

SEQ ID NO: 867961 - DNA, 33 bp, Homo sapien
tatgtagaagaataaacgaactacaggtgatac

SEQ ID NO: 867962 - DNA, 33 bp, Homo sapien
tatgtagaagaataaatgaactacaggtgatac

SEQ ID NO: 867963 - DNA, 33 bp, Homo sapien
aaggctttatgattggcaatatttactgagtgt

SEQ ID NO: 867964 - DNA, 33 bp, Homo sapien
aaggctttatgattggtaatatttactgagtgt

SEQ ID NO: 867965 - DNA, 33 bp, Homo sapien
aggcattgttctctacagccagtcatgcttgtt

SEQ ID NO: 867966 - DNA, 33 bp, Homo sapien
aggcattgttctctacggccagtcatgcttgtt

SEQ ID NO: 867967 - DNA, 33 bp, Homo sapien
aacttcatgtgttatacctgcaggatgtacata

SEQ ID NO: 867968 - DNA, 33 bp, Homo sapien
aacttcatgtgttatatctgcaggatgtacata

SEQ ID NO: 867969 - DNA, 33 bp, Homo sapien
tggacaaagtgtatgaaaaagtttacggctata

SEQ ID NO: 867970 - DNA, 33 bp, Homo sapien
tggacaaagtgtatgagaaagtttacggctata

SEQ ID NO: 867971 - DNA, 33 bp, Homo sapien
tctccctgcttaaagcactttactgatttgccc

SEQ ID NO: 867972 - DNA, 33 bp, Homo sapien
tctccctgcttaaagccctttactgatttgccc

SEQ ID NO: 867973 - DNA, 33 bp, Homo sapien
actgcaaaacctaacaaatttgggatgcttaac

SEQ ID NO: 867974 - DNA, 33 bp, Homo sapien
actgcaaaacctaacacatttgggatgcttaac

SEQ ID NO: 867975 - DNA, 33 bp, Homo sapien
atcctgcctaaaatcaacactgggctcatgaac

SEQ ID NO: 867976 - DNA, 33 bp, Homo sapien
atcctgcctaaaatcagcactgggctcatgaac

SEQ ID NO: 867977 - DNA, 33 bp, Homo sapien
actacttgtaaccctgaatctatggaaataata

SEQ ID NO: 867978 - DNA, 33 bp, Homo sapien
actacttgtaaccctgcatctatggaaataata

SEQ ID NO: 867979 - DNA, 33 bp, Homo sapien
caaagctgtcaaacaactggagtgtattcaggg

SEQ ID NO: 867980 - DNA, 33 bp, Homo sapien
caaagctgtcaaacaattggagtgtattcaggg

SEQ ID NO: 867981 - DNA, 33 bp, Homo sapien
ataaaccaagcagtgaagtggtagtaaaatcag

SEQ ID NO: 867982 - DNA, 33 bp, Homo sapien
ataaaccaagcagtgatgtggtagtaaaatcag

SEQ ID NO: 867983 - DNA, 33 bp, Homo sapien
tcatctaccatactaccagtctagactcttcaa

SEQ ID NO: 867984 - DNA, 33 bp, Homo sapien
tcatctaccatactactagtctagactcttcaa

SEQ ID NO: 867985 - DNA, 33 bp, Homo sapien
acatttgagaattaaagattgcaggccctatca

SEQ ID NO: 867986 - DNA, 33 bp, Homo sapien
acatttgagaattaaatattgcaggccctatca

SEQ ID NO: 867987 - DNA, 33 bp, Homo sapien
tgtgacccagtgattcaaatggttctaattaat

SEQ ID NO: 867988 - DNA, 33 bp, Homo sapien
tgtgacccagtgattcgaatggttctaattaat

SEQ ID NO: 867989 - DNA, 33 bp, Homo sapien
tttttcgcatttttagaagggacaggatttcac

SEQ ID NO: 867990 - DNA, 33 bp, Homo sapien
tttttcgcatttttagtagggacaggatttcac

SEQ ID NO: 867991 - DNA, 33 bp, Homo sapien
acaaaaacataaacccagatagactacagatct

SEQ ID NO: 867992 - DNA, 33 bp, Homo sapien
acaaaaacataaaccccgatagactacagatct

SEQ ID NO: 867993 - DNA, 33 bp, Homo sapien
acattcacccttggaaactaatgaaaagcaagt

SEQ ID NO: 867994 - DNA, 33 bp, Homo sapien
acattcacccttggaagctaatgaaaagcaagt

SEQ ID NO: 867995 - DNA, 33 bp, Homo sapien
ttattttgcatattgaataacaagtggccttta

SEQ ID NO: 867996 - DNA, 33 bp, Homo sapien
ttattttgcatattgactaacaagtggccttta

SEQ ID NO: 867997 - DNA, 33 bp, Homo sapien
gcttgacaaagtactgcattattcagttgctaa

SEQ ID NO: 867998 - DNA, 33 bp, Homo sapien
gcttgacaaagtactggattattcagttgctaa

SEQ ID NO: 867999 - DNA, 33 bp, Homo sapien
tctatacctttcagaaaagactacaacaaattg

SEQ ID NO: 868000 - DNA, 33 bp, Homo sapien
tctatacctttcagaagagactacaacaaattg

SEQ ID NO: 868001 - DNA, 33 bp, Homo sapien
ggtataaagagactaaagtaaccagaggtcaac

SEQ ID NO: 868002 - DNA, 33 bp, Homo sapien
ggtataaagagactaaggtaaccagaggtcaac

SEQ ID NO: 868003 - DNA, 33 bp, Homo sapien
tctagttttcacagtaagctctatatttataaa

SEQ ID NO: 868004 - DNA, 33 bp, Homo sapien
tctagttttcacagtaggctctatatttataaa

SEQ ID NO: 868005 - DNA, 33 bp, Homo sapien
ccattccagtccaaacgcataaatgataacaac

SEQ ID NO: 868006 - DNA, 33 bp, Homo sapien
ccattccagtccaaactcataaatgataacaac

SEQ ID NO: 868007 - DNA, 33 bp, Homo sapien
caagacaaatgttggacagtaatatgtgctaag

SEQ ID NO: 868008 - DNA, 33 bp, Homo sapien
caagacaaatgttggatagtaatatgtgctaag

SEQ ID NO: 868009 - DNA, 33 bp, Homo sapien
tgtctctgctgctttacgaccaatactgaactc

SEQ ID NO: 868010 - DNA, 33 bp, Homo sapien
tgtctctgctgctttatgaccaatactgaactc

SEQ ID NO: 868011 - DNA, 33 bp, Homo sapien
gatcacatttgatcacaggcaataaaaaacttg

SEQ ID NO: 868012 - DNA, 33 bp, Homo sapien
gatcacatttgatcacgggcaataaaaaacttg

SEQ ID NO: 868013 - DNA, 33 bp, Homo sapien
catcacaatctggaaacgcgatgcttccacaga

SEQ ID NO: 868014 - DNA, 33 bp, Homo sapien
catcacaatctggaaatgcgatgcttccacaga

SEQ ID NO: 868015 - DNA, 33 bp, Homo sapien
aagaagacaaagagaaagttgaagaagggggtg

SEQ ID NO: 868016 - DNA, 33 bp, Homo sapien
aagaagacaaagagaaggttgaagaagggggtg

SEQ ID NO: 868017 - DNA, 33 bp, Homo sapien
ttttttctagttaggagagtataaagcagattt

SEQ ID NO: 868018 - DNA, 33 bp, Homo sapien
ttttttctagttaggatagtataaagcagattt

SEQ ID NO: 868019 - DNA, 33 bp, Homo sapien
tactggtcctacattgaagtgtattgtatctgt

SEQ ID NO: 868020 - DNA, 33 bp, Homo sapien
tactggtcctacattgcagtgtattgtatctgt

SEQ ID NO: 868021 - DNA, 33 bp, Homo sapien
agaaacattattgccccggacataacccgtcac

SEQ ID NO: 868022 - DNA, 33 bp, Homo sapien
agaaacattattgccctggacataacccgtcac

SEQ ID NO: 868023 - DNA, 33 bp, Homo sapien
taatgcagttagattccagtacaaaattaaagc

SEQ ID NO: 868024 - DNA, 33 bp, Homo sapien
taatgcagttagattctagtacaaaattaaagc

SEQ ID NO: 868025 - DNA, 33 bp, Homo sapien
agcataagttgtaaaaatgttgatgatatgatc

SEQ ID NO: 868026 - DNA, 33 bp, Homo sapien
agcataagttgtaaaactgttgatgatatgatc

SEQ ID NO: 868027 - DNA, 33 bp, Homo sapien
actaaattctgaacacacagtacagagacagaa

SEQ ID NO: 868028 - DNA, 33 bp, Homo sapien
actaaattctgaacacccagtacagagacagaa

SEQ ID NO: 868029 - DNA, 33 bp, Homo sapien
aatattgtcctgtcccactcacttaccatttat

SEQ ID NO: 868030 - DNA, 33 bp, Homo sapien
aatattgtcctgtcccgctcacttaccatttat

SEQ ID NO: 868031 - DNA, 33 bp, Homo sapien
tattaagaggtcacataaaataagactagaaaa

SEQ ID NO: 868032 - DNA, 33 bp, Homo sapien
tattaagaggtcacatgaaataagactagaaaa

SEQ ID NO: 868033 - DNA, 33 bp, Homo sapien
tatctggtacttcataaagcctcagtaagtatt

SEQ ID NO: 868034 - DNA, 33 bp, Homo sapien
tatctggtacttcatagagcctcagtaagtatt

SEQ ID NO: 868035 - DNA, 33 bp, Homo sapien
ctattttaaaacagaactattcgatctcttatt

SEQ ID NO: 868036 - DNA, 33 bp, Homo sapien
ctattttaaaacagaattattcgatctcttatt

SEQ ID NO: 868037 - DNA, 33 bp, Homo sapien
aagagctctgtaaacacctggacaaatcttatt

SEQ ID NO: 868038 - DNA, 33 bp, Homo sapien
aagagctctgtaaacatctggacaaatcttatt

SEQ ID NO: 868039 - DNA, 33 bp, Homo sapien
gaaaaagaagggttagacaatcagaagtaggtg

SEQ ID NO: 868040 - DNA, 33 bp, Homo sapien
gaaaaagaagggttaggcaatcagaagtaggtg

SEQ ID NO: 868041 - DNA, 33 bp, Homo sapien
gcaatggttctcagtacagcagatagtgccttc

SEQ ID NO: 868042 - DNA, 33 bp, Homo sapien
gcaatggttctcagtatagcagatagtgccttc

SEQ ID NO: 868043 - DNA, 33 bp, Homo sapien
tcttccctttcatttcaaactgtcaaaataatg

SEQ ID NO: 868044 - DNA, 33 bp, Homo sapien
tcttccctttcatttccaactgtcaaaataatg

SEQ ID NO: 868045 - DNA, 33 bp, Homo sapien
attatttgagtaaaagccagacaacaaagaata

SEQ ID NO: 868046 - DNA, 33 bp, Homo sapien
attatttgagtaaaaggcagacaacaaagaata

SEQ ID NO: 868047 - DNA, 33 bp, Homo sapien
tagtcttaacctggtacactcttttcagctatt

SEQ ID NO: 868048 - DNA, 33 bp, Homo sapien
tagtcttaacctggtatactcttttcagctatt

SEQ ID NO: 868049 - DNA, 33 bp, Homo sapien
catggcaacatctacacagtaaaaaaactaaca

SEQ ID NO: 868050 - DNA, 33 bp, Homo sapien
catggcaacatctacagagtaaaaaaactaaca

SEQ ID NO: 868051 - DNA, 33 bp, Homo sapien
attctaattcaccaacaaagtgaaagcaaaaga

SEQ ID NO: 868052 - DNA, 33 bp, Homo sapien
attctaattcaccaacgaagtgaaagcaaaaga

SEQ ID NO: 868053 - DNA, 33 bp, Homo sapien
gcttctgtgtacttaaaaaacacctcacaagga

SEQ ID NO: 868054 - DNA, 33 bp, Homo sapien
gcttctgtgtacttaagaaacacctcacaagga

SEQ ID NO: 868055 - DNA, 33 bp, Homo sapien
tggaaatctatcaaaaagacagcatacacactg

SEQ ID NO: 868056 - DNA, 33 bp, Homo sapien
tggaaatctatcaaaatgacagcatacacactg

SEQ ID NO: 868057 - DNA, 33 bp, Homo sapien
tcatctgtttcaaatgaatctttttggtacttc

SEQ ID NO: 868058 - DNA, 33 bp, Homo sapien
tcatctgtttcaaatgcatctttttggtacttc

SEQ ID NO: 868059 - DNA, 33 bp, Homo sapien
taattgagcttttgtacatgacatcactattaa

SEQ ID NO: 868060 - DNA, 33 bp, Homo sapien
taattgagcttttgtatatgacatcactattaa

SEQ ID NO: 868061 - DNA, 33 bp, Homo sapien
ctccccatatcatagcaaacataacagtccttc

SEQ ID NO: 868062 - DNA, 33 bp, Homo sapien
ctccccatatcatagccaacataacagtccttc

SEQ ID NO: 868063 - DNA, 33 bp, Homo sapien
aaatgctagtgttataaatattgcaaactagca

SEQ ID NO: 868064 - DNA, 33 bp, Homo sapien
aaatgctagtgttatagatattgcaaactagca

SEQ ID NO: 868065 - DNA, 33 bp, Homo sapien
tactccctaaaaacgcaccattttccacatcat

SEQ ID NO: 868066 - DNA, 33 bp, Homo sapien
tactccctaaaaacgcgccattttccacatcat

SEQ ID NO: 868067 - DNA, 33 bp, Homo sapien
gaatgaaacttgtcaaatgaatactgcatgcac

SEQ ID NO: 868068 - DNA, 33 bp, Homo sapien
gaatgaaacttgtcaagtgaatactgcatgcac

SEQ ID NO: 868069 - DNA, 33 bp, Homo sapien
tttaatgaaataactgcagattgtagcataggc

SEQ ID NO: 868070 - DNA, 33 bp, Homo sapien
tttaatgaaataactggagattgtagcataggc

SEQ ID NO: 868071 - DNA, 33 bp, Homo sapien
acaagatggataaaaacgcaagtaatgcctgta

SEQ ID NO: 868072 - DNA, 33 bp, Homo sapien
acaagatggataaaaatgcaagtaatgcctgta

SEQ ID NO: 868073 - DNA, 33 bp, Homo sapien
attattacttacacatcatctagcttcaaatac

SEQ ID NO: 868074 - DNA, 33 bp, Homo sapien
attattacttacacattatctagcttcaaatac

SEQ ID NO: 868075 - DNA, 33 bp, Homo sapien
ttatattcaaactgcaaaaaattctgtagatcc

SEQ ID NO: 868076 - DNA, 33 bp, Homo sapien
ttatattcaaactgcagaaaattctgtagatcc

SEQ ID NO: 868077 - DNA, 33 bp, Homo sapien
atgtgttttatttcagaaaaggaaatctctaac

SEQ ID NO: 868078 - DNA, 33 bp, Homo sapien
atgtgttttatttcaggaaaggaaatctctaac

SEQ ID NO: 868079 - DNA, 33 bp, Homo sapien
atttatcttcttatgccatcttactcaccaatc

SEQ ID NO: 868080 - DNA, 33 bp, Homo sapien
atttatcttcttatgctatcttactcaccaatc

SEQ ID NO: 868081 - DNA, 33 bp, Homo sapien
gatgccactgtttacacacgtatctgaaatctt

SEQ ID NO: 868082 - DNA, 33 bp, Homo sapien
gatgccactgtttacatacgtatctgaaatctt

SEQ ID NO: 868083 - DNA, 33 bp, Homo sapien
ttacagttaaagggtacgaactaggccaggtgt

SEQ ID NO: 868084 - DNA, 33 bp, Homo sapien
ttacagttaaagggtatgaactaggccaggtgt

SEQ ID NO: 868085 - DNA, 33 bp, Homo sapien
acaggagatgacaacaactgtgtggcaccttga

SEQ ID NO: 868086 - DNA, 33 bp, Homo sapien
acaggagatgacaacatctgtgtggcaccttga

SEQ ID NO: 868087 - DNA, 33 bp, Homo sapien
caagagcggcttgtacagactctcaaatgctaa

SEQ ID NO: 868088 - DNA, 33 bp, Homo sapien
caagagcggcttgtacggactctcaaatgctaa

SEQ ID NO: 868089 - DNA, 33 bp, Homo sapien
atattcttaatgatgacgacttatgtatttaaa

SEQ ID NO: 868090 - DNA, 33 bp, Homo sapien
atattcttaatgatgatgacttatgtatttaaa

SEQ ID NO: 868091 - DNA, 33 bp, Homo sapien
caggaagcacacaaaaacttccgagttgaaagc

SEQ ID NO: 868092 - DNA, 33 bp, Homo sapien
caggaagcacacaaaagcttccgagttgaaagc

SEQ ID NO: 868093 - DNA, 33 bp, Homo sapien
gtgttaactataatgaagttctgcatgactgat

SEQ ID NO: 868094 - DNA, 33 bp, Homo sapien
gtgttaactataatgacgttctgcatgactgat

SEQ ID NO: 868095 - DNA, 33 bp, Homo sapien
gcttttgtagaaaaggcaatgcagctaatccac

SEQ ID NO: 868096 - DNA, 33 bp, Homo sapien
gcttttgtagaaaaggtaatgcagctaatccac

SEQ ID NO: 868097 - DNA, 33 bp, Homo sapien
tgtagtaaacctaagaacctgtaattcagataa

SEQ ID NO: 868098 - DNA, 33 bp, Homo sapien
tgtagtaaacctaagagcctgtaattcagataa

SEQ ID NO: 868099 - DNA, 33 bp, Homo sapien
caaacttgttttgcaactctctagtacagacaa

SEQ ID NO: 868100 - DNA, 33 bp, Homo sapien
caaacttgttttgcaattctctagtacagacaa

SEQ ID NO: 868101 - DNA, 33 bp, Homo sapien
agagaagcaacatataacgagttaagtacaaac

SEQ ID NO: 868102 - DNA, 33 bp, Homo sapien
agagaagcaacatatagcgagttaagtacaaac

SEQ ID NO: 868103 - DNA, 33 bp, Homo sapien
tctctgacctacagtcactaaatctgcaggcta

SEQ ID NO: 868104 - DNA, 33 bp, Homo sapien
tctctgacctacagtcgctaaatctgcaggcta

SEQ ID NO: 868105 - DNA, 33 bp, Homo sapien
ggagtgaaagcggccccataggtgagaagtaag

SEQ ID NO: 868106 - DNA, 33 bp, Homo sapien
ggagtgaaagcggccctataggtgagaagtaag

SEQ ID NO: 868107 - DNA, 33 bp, Homo sapien
ggagtaatacactaacagatatgatctccaaat

SEQ ID NO: 868108 - DNA, 33 bp, Homo sapien
ggagtaatacactaacggatatgatctccaaat

SEQ ID NO: 868109 - DNA, 33 bp, Homo sapien
tgcttttctttgtgcaaagttgcatttctttaa

SEQ ID NO: 868110 - DNA, 33 bp, Homo sapien
tgcttttctttgtgcacagttgcatttctttaa

SEQ ID NO: 868111 - DNA, 33 bp, Homo sapien
tgaacctcagacctccaaaatgtttcaagtata

SEQ ID NO: 868112 - DNA, 33 bp, Homo sapien
tgaacctcagacctccgaaatgtttcaagtata

SEQ ID NO: 868113 - DNA, 33 bp, Homo sapien
aagaaaattaaatacacgaactgcttgcattta

SEQ ID NO: 868114 - DNA, 33 bp, Homo sapien
aagaaaattaaatacatgaactgcttgcattta

SEQ ID NO: 868115 - DNA, 33 bp, Homo sapien
caaaaaggaactctcaacatgaacaaggagctt

SEQ ID NO: 868116 - DNA, 33 bp, Homo sapien
caaaaaggaactctcagcatgaacaaggagctt

SEQ ID NO: 868117 - DNA, 33 bp, Homo sapien
agagaccactgagtgcagaggtattaagcaaag

SEQ ID NO: 868118 - DNA, 33 bp, Homo sapien
agagaccactgagtgcggaggtattaagcaaag

SEQ ID NO: 868119 - DNA, 33 bp, Homo sapien
ttgggaatcactcacaacatttaagggaagtgg

SEQ ID NO: 868120 - DNA, 33 bp, Homo sapien
ttgggaatcactcacagcatttaagggaagtgg

SEQ ID NO: 868121 - DNA, 33 bp, Homo sapien
gtccttcattacctgccctgtcatagtagcact

SEQ ID NO: 868122 - DNA, 33 bp, Homo sapien
gtccttcattacctgctctgtcatagtagcact

SEQ ID NO: 868123 - DNA, 33 bp, Homo sapien
gttatatagatgcttacgtggtaaaaaagacat

SEQ ID NO: 868124 - DNA, 33 bp, Homo sapien
gttatatagatgcttatgtggtaaaaaagacat

SEQ ID NO: 868125 - DNA, 33 bp, Homo sapien
tagtttaaattcctacacttcatagtccatgta

SEQ ID NO: 868126 - DNA, 33 bp, Homo sapien
tagtttaaattcctacgcttcatagtccatgta

SEQ ID NO: 868127 - DNA, 33 bp, Homo sapien
aagaaaaaatcatggacgaaaggaatcagacta

SEQ ID NO: 868128 - DNA, 33 bp, Homo sapien
aagaaaaaatcatggatgaaaggaatcagacta

SEQ ID NO: 868129 - DNA, 33 bp, Homo sapien
atgagacagcagataacatatgtgtttctaaag

SEQ ID NO: 868130 - DNA, 33 bp, Homo sapien
atgagacagcagataatatatgtgtttctaaag

SEQ ID NO: 868131 - DNA, 33 bp, Homo sapien
catatccattgtagcaagggatcccgaagtgtg

SEQ ID NO: 868132 - DNA, 33 bp, Homo sapien
catatccattgtagcaggggatcccgaagtgtg

SEQ ID NO: 868133 - DNA, 33 bp, Homo sapien
attcctgctgctctctaaatgctcacatcactt

SEQ ID NO: 868134 - DNA, 33 bp, Homo sapien
attcctgctgctctctcaatgctcacatcactt

SEQ ID NO: 868135 - DNA, 33 bp, Homo sapien
agatagttctggaatgaagtaaagcaggtagac

SEQ ID NO: 868136 - DNA, 33 bp, Homo sapien
agatagttctggaatggagtaaagcaggtagac

SEQ ID NO: 868137 - DNA, 33 bp, Homo sapien
ccattctctaagtaacagtgatgaactcaccta

SEQ ID NO: 868138 - DNA, 33 bp, Homo sapien
ccattctctaagtaacggtgatgaactcaccta

SEQ ID NO: 868139 - DNA, 33 bp, Homo sapien
atatcttgttagataaaccctcttaaatgctct

SEQ ID NO: 868140 - DNA, 33 bp, Homo sapien
atatcttgttagataacccctcttaaatgctct

SEQ ID NO: 868141 - DNA, 33 bp, Homo sapien
ggtcctgcagtgaagtcaaatgtaggatcctga

SEQ ID NO: 868142 - DNA, 33 bp, Homo sapien
ggtcctgcagtgaagttaaatgtaggatcctga

SEQ ID NO: 868143 - DNA, 33 bp, Homo sapien
atttgtatatttgacagtataaggtgtttgagg

SEQ ID NO: 868144 - DNA, 33 bp, Homo sapien
atttgtatatttgacattataaggtgtttgagg

SEQ ID NO: 868145 - DNA, 33 bp, Homo sapien
tcctaatgaaaagccacaattcatcagatgttg

SEQ ID NO: 868146 - DNA, 33 bp, Homo sapien
tcctaatgaaaagccagaattcatcagatgttg

SEQ ID NO: 868147 - DNA, 33 bp, Homo sapien
acatcagagaaagacaagaatggctagaaagga

SEQ ID NO: 868148 - DNA, 33 bp, Homo sapien
acatcagagaaagacaggaatggctagaaagga

SEQ ID NO: 868149 - DNA, 33 bp, Homo sapien
attagaacagaaagtgaatgagaacaatgagct

SEQ ID NO: 868150 - DNA, 33 bp, Homo sapien
attagaacagaaagtggatgagaacaatgagct

SEQ ID NO: 868151 - DNA, 33 bp, Homo sapien
cctgggaattgattcactactgttcacatttgt

SEQ ID NO: 868152 - DNA, 33 bp, Homo sapien
cctgggaattgattcattactgttcacatttgt

SEQ ID NO: 868153 - DNA, 33 bp, Homo sapien
tcctgagatgtggcaaatgtcaaagctctgtct

SEQ ID NO: 868154 - DNA, 33 bp, Homo sapien
tcctgagatgtggcaagtgtcaaagctctgtct

SEQ ID NO: 868155 - DNA, 33 bp, Homo sapien
aggcactgggacaagtcactgctggcttacttg

SEQ ID NO: 868156 - DNA, 33 bp, Homo sapien
aggcactgggacaagttactgctggcttacttg

SEQ ID NO: 868157 - DNA, 33 bp, Homo sapien
ccctttatctaaaccaacacttaaatgctcagg

SEQ ID NO: 868158 - DNA, 33 bp, Homo sapien
ccctttatctaaaccagcacttaaatgctcagg

SEQ ID NO: 868159 - DNA, 33 bp, Homo sapien
aatagacaaaagtgtacgaaaacaagcctccag

SEQ ID NO: 868160 - DNA, 33 bp, Homo sapien
aatagacaaaagtgtatgaaaacaagcctccag

SEQ ID NO: 868161 - DNA, 33 bp, Homo sapien
aattttgtcagcacaaagatcgattatccttaa

SEQ ID NO: 868162 - DNA, 33 bp, Homo sapien
aattttgtcagcacaatgatcgattatccttaa

SEQ ID NO: 868163 - DNA, 33 bp, Homo sapien
agagagaatttggaagcagtaaaaagctgagac

SEQ ID NO: 868164 - DNA, 33 bp, Homo sapien
agagagaatttggaaggagtaaaaagctgagac

SEQ ID NO: 868165 - DNA, 33 bp, Homo sapien
ttatttagacagttgcaaagatttaaatgctta

SEQ ID NO: 868166 - DNA, 33 bp, Homo sapien
ttatttagacagttgcgaagatttaaatgctta

SEQ ID NO: 868167 - DNA, 33 bp, Homo sapien
ctagtatggcaattcccctctgcgtcttccatc

SEQ ID NO: 868168 - DNA, 33 bp, Homo sapien
ctagtatggcaattcctctctgcgtcttccatc

SEQ ID NO: 868169 - DNA, 33 bp, Homo sapien
tacaactcagtataaacgtcttccctgtggctt

SEQ ID NO: 868170 - DNA, 33 bp, Homo sapien
tacaactcagtataaatgtcttccctgtggctt

SEQ ID NO: 868171 - DNA, 33 bp, Homo sapien
gtgaattaaacatcaacggtgtatgtaacatca

SEQ ID NO: 868172 - DNA, 33 bp, Homo sapien
gtgaattaaacatcaatggtgtatgtaacatca

SEQ ID NO: 868173 - DNA, 33 bp, Homo sapien
tattgagggaagcaacagaatggttggtgtgct

SEQ ID NO: 868174 - DNA, 33 bp, Homo sapien
tattgagggaagcaacggaatggttggtgtgct

SEQ ID NO: 868175 - DNA, 33 bp, Homo sapien
taatccactaatctcccattctccagtgatttt

SEQ ID NO: 868176 - DNA, 33 bp, Homo sapien
taatccactaatctcctattctccagtgatttt

SEQ ID NO: 868177 - DNA, 33 bp, Homo sapien
agtctaaagagaattgacaatatctacacctgt

SEQ ID NO: 868178 - DNA, 33 bp, Homo sapien
agtctaaagagaattggcaatatctacacctgt

SEQ ID NO: 868179 - DNA, 33 bp, Homo sapien
gactcattgttgaaacggcaagtgttgaggatt

SEQ ID NO: 868180 - DNA, 33 bp, Homo sapien
gactcattgttgaaactgcaagtgttgaggatt

SEQ ID NO: 868181 - DNA, 33 bp, Homo sapien
atgaggaacatggaaaatagtagacaataaata

SEQ ID NO: 868182 - DNA, 33 bp, Homo sapien
atgaggaacatggaaagtagtagacaataaata

SEQ ID NO: 868183 - DNA, 33 bp, Homo sapien
ataatatattgtgtcaaaaggtaaagagtgtca

SEQ ID NO: 868184 - DNA, 33 bp, Homo sapien
ataatatattgtgtcagaaggtaaagagtgtca

SEQ ID NO: 868185 - DNA, 33 bp, Homo sapien
actctttactgccctacgtagaatcagcatttg

SEQ ID NO: 868186 - DNA, 33 bp, Homo sapien
actctttactgccctatgtagaatcagcatttg

SEQ ID NO: 868187 - DNA, 33 bp, Homo sapien
aacaaacactgatacccggctcctactcctaga

SEQ ID NO: 868188 - DNA, 33 bp, Homo sapien
aacaaacactgatacctggctcctactcctaga

SEQ ID NO: 868189 - DNA, 33 bp, Homo sapien
aaaaggtgattgaatagattggcaaagtttgtt

SEQ ID NO: 868190 - DNA, 33 bp, Homo sapien
aaaaggtgattgaatatattggcaaagtttgtt

SEQ ID NO: 868191 - DNA, 33 bp, Homo sapien
caaaggagagagagccacacagagataaaactc

SEQ ID NO: 868192 - DNA, 33 bp, Homo sapien
caaaggagagagagccccacagagataaaactc

SEQ ID NO: 868193 - DNA, 33 bp, Homo sapien
agtaatttgctgaataataaagggcaatttttc

SEQ ID NO: 868194 - DNA, 33 bp, Homo sapien
agtaatttgctgaatattaaagggcaatttttc

SEQ ID NO: 868195 - DNA, 33 bp, Homo sapien
tctgtcccttaggaaactgtaatgtctacctga

SEQ ID NO: 868196 - DNA, 33 bp, Homo sapien
tctgtcccttaggaaagtgtaatgtctacctga

SEQ ID NO: 868197 - DNA, 33 bp, Homo sapien
tttttctgacgcctgccaagaatgcggctacca

SEQ ID NO: 868198 - DNA, 33 bp, Homo sapien
tttttctgacgcctgcgaagaatgcggctacca

SEQ ID NO: 868199 - DNA, 33 bp, Homo sapien
tctatttctattactacgtaaggcattgtatta

SEQ ID NO: 868200 - DNA, 33 bp, Homo sapien
tctatttctattactatgtaaggcattgtatta

SEQ ID NO: 868201 - DNA, 33 bp, Homo sapien
cagagacaactctgcaaaaatacatggctgtat

SEQ ID NO: 868202 - DNA, 33 bp, Homo sapien
cagagacaactctgcacaaatacatggctgtat

SEQ ID NO: 868203 - DNA, 33 bp, Homo sapien
aaaatccctggacaacaattcttatagctatat

SEQ ID NO: 868204 - DNA, 33 bp, Homo sapien
aaaatccctggacaaccattcttatagctatat

SEQ ID NO: 868205 - DNA, 33 bp, Homo sapien
gatgacagtgataagaaatgtggcatattcagc

SEQ ID NO: 868206 - DNA, 33 bp, Homo sapien
gatgacagtgataagagatgtggcatattcagc

SEQ ID NO: 868207 - DNA, 33 bp, Homo sapien
gtcccagtgacattacaatctttgctaattagt

SEQ ID NO: 868208 - DNA, 33 bp, Homo sapien
gtcccagtgacattacgatctttgctaattagt

SEQ ID NO: 868209 - DNA, 33 bp, Homo sapien
ggtctaaagtttcaaactcctgctttagggaac

SEQ ID NO: 868210 - DNA, 33 bp, Homo sapien
ggtctaaagtttcaaattcctgctttagggaac

SEQ ID NO: 868211 - DNA, 33 bp, Homo sapien
cttcattaaagtggtacatatgcctcggggtct

SEQ ID NO: 868212 - DNA, 33 bp, Homo sapien
cttcattaaagtggtatatatgcctcggggtct

SEQ ID NO: 868213 - DNA, 33 bp, Homo sapien
gaaacctatgactttacggacttcctggttctt

SEQ ID NO: 868214 - DNA, 33 bp, Homo sapien
gaaacctatgactttatggacttcctggttctt

SEQ ID NO: 868215 - DNA, 33 bp, Homo sapien
ctgttcacacagttaacataaggcaaaggtgag

SEQ ID NO: 868216 - DNA, 33 bp, Homo sapien
ctgttcacacagttaatataaggcaaaggtgag

SEQ ID NO: 868217 - DNA, 33 bp, Homo sapien
ggaaataaaaatgccaggaacaatattctgaga

SEQ ID NO: 868218 - DNA, 33 bp, Homo sapien
ggaaataaaaatgccatgaacaatattctgaga

SEQ ID NO: 868219 - DNA, 33 bp, Homo sapien
ttatgctaggaaacaacttgtacaggatcgtat

SEQ ID NO: 868220 - DNA, 33 bp, Homo sapien
ttatgctaggaaacaatttgtacaggatcgtat

SEQ ID NO: 868221 - DNA, 33 bp, Homo sapien
ttagagactgtttgcaatagtagaaatctggaa

SEQ ID NO: 868222 - DNA, 33 bp, Homo sapien
ttagagactgtttgcagtagtagaaatctggaa

SEQ ID NO: 868223 - DNA, 33 bp, Homo sapien
ctcatcaaatcactgacaataagaatgcttaga

SEQ ID NO: 868224 - DNA, 33 bp, Homo sapien
ctcatcaaatcactgataataagaatgcttaga

SEQ ID NO: 868225 - DNA, 33 bp, Homo sapien
ctagtcacgaaagaccacatactatataatttc

SEQ ID NO: 868226 - DNA, 33 bp, Homo sapien
ctagtcacgaaagaccgcatactatataatttc

SEQ ID NO: 868227 - DNA, 33 bp, Homo sapien
accttaattgcctttaaacacataaatcgctat

SEQ ID NO: 868228 - DNA, 33 bp, Homo sapien
accttaattgcctttagacacataaatcgctat

SEQ ID NO: 868229 - DNA, 33 bp, Homo sapien
ctaagaatgttatataagagttggagacataac

SEQ ID NO: 868230 - DNA, 33 bp, Homo sapien
ctaagaatgttatatatgagttggagacataac

SEQ ID NO: 868231 - DNA, 33 bp, Homo sapien
ttggcaggctaaagtgccacactatggagtatt

SEQ ID NO: 868232 - DNA, 33 bp, Homo sapien
ttggcaggctaaagtgtcacactatggagtatt

SEQ ID NO: 868233 - DNA, 33 bp, Homo sapien
cttgcatacgttagaaacacgctatagtatcaa

SEQ ID NO: 868234 - DNA, 33 bp, Homo sapien
cttgcatacgttagaagcacgctatagtatcaa

SEQ ID NO: 868235 - DNA, 33 bp, Homo sapien
ggaactcaacttgagtaaataatcctgcacttt

SEQ ID NO: 868236 - DNA, 33 bp, Homo sapien
ggaactcaacttgagtgaataatcctgcacttt

SEQ ID NO: 868237 - DNA, 33 bp, Homo sapien
cgccacacaatctggaaatactatctttcttct

SEQ ID NO: 868238 - DNA, 33 bp, Homo sapien
cgccacacaatctggagatactatctttcttct

SEQ ID NO: 868239 - DNA, 33 bp, Homo sapien
attttacctgggtcacagaaatgtttttctttt

SEQ ID NO: 868240 - DNA, 33 bp, Homo sapien
attttacctgggtcacggaaatgtttttctttt

SEQ ID NO: 868241 - DNA, 33 bp, Homo sapien
ttatgaaattagtgaaaccacaggatggaagta

SEQ ID NO: 868242 - DNA, 33 bp, Homo sapien
ttatgaaattagtgaacccacaggatggaagta

SEQ ID NO: 868243 - DNA, 33 bp, Homo sapien
aatagacaaaaagaaacttcaagacataacaaa

SEQ ID NO: 868244 - DNA, 33 bp, Homo sapien
aatagacaaaaagaaagttcaagacataacaaa

SEQ ID NO: 868245 - DNA, 33 bp, Homo sapien
atgagagttgggtaggaacatatatccaaacta

SEQ ID NO: 868246 - DNA, 33 bp, Homo sapien
atgagagttgggtagggacatatatccaaacta

SEQ ID NO: 868247 - DNA, 33 bp, Homo sapien
attcctcaatctataacctgaacaacaaaccca

SEQ ID NO: 868248 - DNA, 33 bp, Homo sapien
attcctcaatctataatctgaacaacaaaccca

SEQ ID NO: 868249 - DNA, 33 bp, Homo sapien
ttttttttgcaaatcacaaaatcttaagcaatc

SEQ ID NO: 868250 - DNA, 33 bp, Homo sapien
ttttttttgcaaatcagaaaatcttaagcaatc

SEQ ID NO: 868251 - DNA, 33 bp, Homo sapien
tgcattctaaagtccaaaggattccttccaaca

SEQ ID NO: 868252 - DNA, 33 bp, Homo sapien
tgcattctaaagtccagaggattccttccaaca

SEQ ID NO: 868253 - DNA, 33 bp, Homo sapien
tcacttatgtaaagcactgagcaccagcctcct

SEQ ID NO: 868254 - DNA, 33 bp, Homo sapien
tcacttatgtaaagcattgagcaccagcctcct

SEQ ID NO: 868255 - DNA, 33 bp, Homo sapien
taagcaaatggaaaaccgcttgtcctttcaatg

SEQ ID NO: 868256 - DNA, 33 bp, Homo sapien
taagcaaatggaaaactgcttgtcctttcaatg

SEQ ID NO: 868257 - DNA, 33 bp, Homo sapien
tctgacaattttcacaagagaaactgccaacaa

SEQ ID NO: 868258 - DNA, 33 bp, Homo sapien
tctgacaattttcacaggagaaactgccaacaa

SEQ ID NO: 868259 - DNA, 33 bp, Homo sapien
caacactacataacaacggctgactttcgatct

SEQ ID NO: 868260 - DNA, 33 bp, Homo sapien
caacactacataacaatggctgactttcgatct

SEQ ID NO: 868261 - DNA, 33 bp, Homo sapien
gaagaataacgggaagcatctgcataaatgaaa

SEQ ID NO: 868262 - DNA, 33 bp, Homo sapien
gaagaataacgggaaggatctgcataaatgaaa

SEQ ID NO: 868263 - DNA, 33 bp, Homo sapien
tacatcattcctatccaacattttcccattact

SEQ ID NO: 868264 - DNA, 33 bp, Homo sapien
tacatcattcctatcccacattttcccattact

SEQ ID NO: 868265 - DNA, 33 bp, Homo sapien
tcaggacaaagtttgccatttaaatgttgctaa

SEQ ID NO: 868266 - DNA, 33 bp, Homo sapien
tcaggacaaagtttgcgatttaaatgttgctaa

SEQ ID NO: 868267 - DNA, 33 bp, Homo sapien
ttacaatctttcagagaaaacagaagatgagag

SEQ ID NO: 868268 - DNA, 33 bp, Homo sapien
ttacaatctttcagaggaaacagaagatgagag

SEQ ID NO: 868269 - DNA, 33 bp, Homo sapien
aatggtatgtggtacccaagccactaattaaat

SEQ ID NO: 868270 - DNA, 33 bp, Homo sapien
aatggtatgtggtacctaagccactaattaaat

SEQ ID NO: 868271 - DNA, 33 bp, Homo sapien
ttactatcttgctaggaaacaaaagcaccatag

SEQ ID NO: 868272 - DNA, 33 bp, Homo sapien
ttactatcttgctagggaacaaaagcaccatag

SEQ ID NO: 868273 - DNA, 33 bp, Homo sapien
tgcaagaaagcatatcacggacctctgcaaggc

SEQ ID NO: 868274 - DNA, 33 bp, Homo sapien
tgcaagaaagcatatcgcggacctctgcaaggc

SEQ ID NO: 868275 - DNA, 33 bp, Homo sapien
aatcaatatgtcaacaccttcattaacctgtga

SEQ ID NO: 868276 - DNA, 33 bp, Homo sapien
aatcaatatgtcaacatcttcattaacctgtga

SEQ ID NO: 868277 - DNA, 33 bp, Homo sapien
gaggttgcaataaagaagttagctagggttaca

SEQ ID NO: 868278 - DNA, 33 bp, Homo sapien
gaggttgcaataaagatgttagctagggttaca

SEQ ID NO: 868279 - DNA, 33 bp, Homo sapien
cttttgcaataaatcccccaacctccattccca

SEQ ID NO: 868280 - DNA, 33 bp, Homo sapien
cttttgcaataaatcctccaacctccattccca

SEQ ID NO: 868281 - DNA, 33 bp, Homo sapien
gatacaactgctatcaacatctgaccttttgca

SEQ ID NO: 868282 - DNA, 33 bp, Homo sapien
gatacaactgctatcagcatctgaccttttgca

SEQ ID NO: 868283 - DNA, 33 bp, Homo sapien
caggactggaagagataaaattgtgagtctgga

SEQ ID NO: 868284 - DNA, 33 bp, Homo sapien
caggactggaagagatgaaattgtgagtctgga

SEQ ID NO: 868285 - DNA, 33 bp, Homo sapien
ttgtcaataactacagaaacttacaaatgaaaa

SEQ ID NO: 868286 - DNA, 33 bp, Homo sapien
ttgtcaataactacaggaacttacaaatgaaaa

SEQ ID NO: 868287 - DNA, 33 bp, Homo sapien
ctggaggtcaagaaacacagtacctatattctt

SEQ ID NO: 868288 - DNA, 33 bp, Homo sapien
ctggaggtcaagaaacgcagtacctatattctt

SEQ ID NO: 868289 - DNA, 33 bp, Homo sapien
atggaaatactttcaactggaaatatttaaagg

SEQ ID NO: 868290 - DNA, 33 bp, Homo sapien
atggaaatactttcaagtggaaatatttaaagg

SEQ ID NO: 868291 - DNA, 33 bp, Homo sapien
ggagataacagaataacgtctcttttccaagat

SEQ ID NO: 868292 - DNA, 33 bp, Homo sapien
ggagataacagaataatgtctcttttccaagat

SEQ ID NO: 868293 - DNA, 33 bp, Homo sapien
aaggctacagtataaaatccaagtctttatagt

SEQ ID NO: 868294 - DNA, 33 bp, Homo sapien
aaggctacagtataaagtccaagtctttatagt

SEQ ID NO: 868295 - DNA, 33 bp, Homo sapien
cattgaggttaataggccatatataaaacaaag

SEQ ID NO: 868296 - DNA, 33 bp, Homo sapien
cattgaggttaataggtcatatataaaacaaag

SEQ ID NO: 868297 - DNA, 33 bp, Homo sapien
tggaaacatcataagcagaggacaactgggacc

SEQ ID NO: 868298 - DNA, 33 bp, Homo sapien
tggaaacatcataagcggaggacaactgggacc

SEQ ID NO: 868299 - DNA, 33 bp, Homo sapien
aaaacctgacaatctaatactttgtaggaacta

SEQ ID NO: 868300 - DNA, 33 bp, Homo sapien
aaaacctgacaatctagtactttgtaggaacta

SEQ ID NO: 868301 - DNA, 33 bp, Homo sapien
ttcagagctacctccactctttctccaaaagtg

SEQ ID NO: 868302 - DNA, 33 bp, Homo sapien
ttcagagctacctccattctttctccaaaagtg

SEQ ID NO: 868303 - DNA, 33 bp, Homo sapien
tcttattgtccccaaaactgttgatatagtatg

SEQ ID NO: 868304 - DNA, 33 bp, Homo sapien
tcttattgtccccaaagctgttgatatagtatg

SEQ ID NO: 868305 - DNA, 33 bp, Homo sapien
atattattcttgaagacggctatcattttagct

SEQ ID NO: 868306 - DNA, 33 bp, Homo sapien
atattattcttgaagatggctatcattttagct

SEQ ID NO: 868307 - DNA, 33 bp, Homo sapien
ctatgatcctgattagcaaagatcccgttacat

SEQ ID NO: 868308 - DNA, 33 bp, Homo sapien
ctatgatcctgattagtaaagatcccgttacat

SEQ ID NO: 868309 - DNA, 33 bp, Homo sapien
attctcctccatattcccacattcacctatgag

SEQ ID NO: 868310 - DNA, 33 bp, Homo sapien
attctcctccatattctcacattcacctatgag

SEQ ID NO: 868311 - DNA, 33 bp, Homo sapien
acactagatttcaagtcaaacagacctgacctt

SEQ ID NO: 868312 - DNA, 33 bp, Homo sapien
acactagatttcaagttaaacagacctgacctt

SEQ ID NO: 868313 - DNA, 33 bp, Homo sapien
tttctgggggtattgacgggactagagtcagga

SEQ ID NO: 868314 - DNA, 33 bp, Homo sapien
tttctgggggtattgatgggactagagtcagga

SEQ ID NO: 868315 - DNA, 33 bp, Homo sapien
ttgacatttcaagcggcatatagtgcaaaaagt

SEQ ID NO: 868316 - DNA, 33 bp, Homo sapien
ttgacatttcaagcggtatatagtgcaaaaagt

SEQ ID NO: 868317 - DNA, 33 bp, Homo sapien
aaatttttgtagggtacgcacgtgaccattcac

SEQ ID NO: 868318 - DNA, 33 bp, Homo sapien
aaatttttgtagggtatgcacgtgaccattcac

SEQ ID NO: 868319 - DNA, 33 bp, Homo sapien
ttaaaatatctactccaactttctaaaatggac

SEQ ID NO: 868320 - DNA, 33 bp, Homo sapien
ttaaaatatctactcctactttctaaaatggac

SEQ ID NO: 868321 - DNA, 33 bp, Homo sapien
agtcacacttaattaactgaacgattttcggtc

SEQ ID NO: 868322 - DNA, 33 bp, Homo sapien
agtcacacttaattaattgaacgattttcggtc

SEQ ID NO: 868323 - DNA, 33 bp, Homo sapien
aaaactctttcacacaccatttgaacctgagac

SEQ ID NO: 868324 - DNA, 33 bp, Homo sapien
aaaactctttcacacatcatttgaacctgagac

SEQ ID NO: 868325 - DNA, 33 bp, Homo sapien
aggatagccacactgcaaaaggtaggtagtaga

SEQ ID NO: 868326 - DNA, 33 bp, Homo sapien
aggatagccacactgcgaaaggtaggtagtaga

SEQ ID NO: 868327 - DNA, 33 bp, Homo sapien
tgtttcaccttagacaagtcagccaactttttt

SEQ ID NO: 868328 - DNA, 33 bp, Homo sapien
tgtttcaccttagacaggtcagccaactttttt

SEQ ID NO: 868329 - DNA, 33 bp, Homo sapien; identical to SEQ ID NO: 868327

SEQ ID NO: 868330 - DNA, 33 bp, Homo sapien; identical to SEQ ID NO: 868328

SEQ ID NO: 868331 - DNA, 33 bp, Homo sapien
cacagatctgtggtaacgattaaatgagatgac

SEQ ID NO: 868332 - DNA, 33 bp, Homo sapien
cacagatctgtggtaaggattaaatgagatgac

SEQ ID NO: 868333 - DNA, 33 bp, Homo sapien
ttaggtcctcggcctacgctattacagaaagaa

SEQ ID NO: 868334 - DNA, 33 bp, Homo sapien
ttaggtcctcggcctatgctattacagaaagaa

SEQ ID NO: 868335 - DNA, 33 bp, Homo sapien
tggtaaatatttaatcacctaactacaaagtcc

SEQ ID NO: 868336 - DNA, 33 bp, Homo sapien
tggtaaatatttaatcgcctaactacaaagtcc

SEQ ID NO: 868337 - DNA, 33 bp, Homo sapien
aaaggggatgtcttccggattacaagtttcagt

SEQ ID NO: 868338 - DNA, 33 bp, Homo sapien
aaaggggatgtcttcctgattacaagtttcagt

SEQ ID NO: 868339 - DNA, 33 bp, Homo sapien
aatcaagtacaccccaaagacaaactaatcaac

SEQ ID NO: 868340 - DNA, 33 bp, Homo sapien
aatcaagtacaccccagagacaaactaatcaac

SEQ ID NO: 868341 - DNA, 33 bp, Homo sapien
gcaacctgctatggtacgtgggctttattggct

SEQ ID NO: 868342 - DNA, 33 bp, Homo sapien
gcaacctgctatggtatgtgggctttattggct

SEQ ID NO: 868343 - DNA, 33 bp, Homo sapien
ggaagcttctcaaggacgtatttcattaggttt

SEQ ID NO: 868344 - DNA, 33 bp, Homo sapien
ggaagcttctcaaggatgtatttcattaggttt

SEQ ID NO: 868345 - DNA, 33 bp, Homo sapien
aggtaagtagcattcccaattagtcttcatctc

SEQ ID NO: 868346 - DNA, 33 bp, Homo sapien
aggtaagtagcattccgaattagtcttcatctc

SEQ ID NO: 868347 - DNA, 33 bp, Homo sapien
tcatcatacttcaaaagctttttctaacataac

SEQ ID NO: 868348 - DNA, 33 bp, Homo sapien
tcatcatacttcaaaatctttttctaacataac

SEQ ID NO: 868349 - DNA, 33 bp, Homo sapien
aaatatctaaactggaaacactaaataattttt

SEQ ID NO: 868350 - DNA, 33 bp, Homo sapien
aaatatctaaactggagacactaaataattttt

SEQ ID NO: 868351 - DNA, 33 bp, Homo sapien
atttttgtttaaaaaaagcaagaagcaagtgaa

SEQ ID NO: 868352 - DNA, 33 bp, Homo sapien
atttttgtttaaaaaaggcaagaagcaagtgaa

SEQ ID NO: 868353 - DNA, 33 bp, Homo sapien
cagatagaaacatggcagaaaggtactaacatt

SEQ ID NO: 868354 - DNA, 33 bp, Homo sapien
cagatagaaacatggcggaaaggtactaacatt

SEQ ID NO: 868355 - DNA, 33 bp, Homo sapien
aacatatctagaggcaactttttcatcgatagc

SEQ ID NO: 868356 - DNA, 33 bp, Homo sapien
aacatatctagaggcacctttttcatcgatagc

SEQ ID NO: 868357 - DNA, 33 bp, Homo sapien
atggtataaaaatggcacataaggcaatgagac

SEQ ID NO: 868358 - DNA, 33 bp, Homo sapien
atggtataaaaatggcgcataaggcaatgagac

SEQ ID NO: 868359 - DNA, 33 bp, Homo sapien
atatggcaaatgaaggacattaaactaatcaga

SEQ ID NO: 868360 - DNA, 33 bp, Homo sapien
atatggcaaatgaagggcattaaactaatcaga

SEQ ID NO: 868361 - DNA, 33 bp, Homo sapien
ttactttttgtctctacctcaaattcagctaca

SEQ ID NO: 868362 - DNA, 33 bp, Homo sapien
ttactttttgtctctatctcaaattcagctaca

SEQ ID NO: 868363 - DNA, 33 bp, Homo sapien
agccaagaaaagagaccagggataaagtatttt

SEQ ID NO: 868364 - DNA, 33 bp, Homo sapien
agccaagaaaagagacgagggataaagtatttt

SEQ ID NO: 868365 - DNA, 33 bp, Homo sapien
cttctaatgctcttatcacgaccaatgcaacat

SEQ ID NO: 868366 - DNA, 33 bp, Homo sapien
cttctaatgctcttattacgaccaatgcaacat

SEQ ID NO: 868367 - DNA, 33 bp, Homo sapien
ggtccgcagttaattaccctgcaaagaaaacga

SEQ ID NO: 868368 - DNA, 33 bp, Homo sapien
ggtccgcagttaattatcctgcaaagaaaacga

SEQ ID NO: 868369 - DNA, 33 bp, Homo sapien
tcttcacaaatctgaaaatgccaaatttagtga

SEQ ID NO: 868370 - DNA, 33 bp, Homo sapien
tcttcacaaatctgaatatgccaaatttagtga

SEQ ID NO: 868371 - DNA, 33 bp, Homo sapien
atattttccctttaaaagaatttgtgctgactt

SEQ ID NO: 868372 - DNA, 33 bp, Homo sapien
atattttccctttaaatgaatttgtgctgactt

SEQ ID NO: 868373 - DNA, 33 bp, Homo sapien
gcacttagaatagtgcacaacatataggaagca

SEQ ID NO: 868374 - DNA, 33 bp, Homo sapien
gcacttagaatagtgcccaacatataggaagca

SEQ ID NO: 868375 - DNA, 33 bp, Homo sapien
ttaacttaatacaaacacattgaatgcttccta

SEQ ID NO: 868376 - DNA, 33 bp, Homo sapien
ttaacttaatacaaacgcattgaatgcttccta

SEQ ID NO: 868377 - DNA, 33 bp, Homo sapien
aggtaaatgtaccaacacataagtcataggtaa

SEQ ID NO: 868378 - DNA, 33 bp, Homo sapien
aggtaaatgtaccaacgcataagtcataggtaa

SEQ ID NO: 868379 - DNA, 33 bp, Homo sapien
atctggaggatatcataacaacaacagaagagt

SEQ ID NO: 868380 - DNA, 33 bp, Homo sapien
atctggaggatatcatgacaacaacagaagagt

SEQ ID NO: 868381 - DNA, 33 bp, Homo sapien
aactgtcagcaaatcaataaaagtaccctgaga

SEQ ID NO: 868382 - DNA, 33 bp, Homo sapien
aactgtcagcaaatcagtaaaagtaccctgaga

SEQ ID NO: 868383 - DNA, 33 bp, Homo sapien
gtgccagtagtaactccctggagataaaaatgt

SEQ ID NO: 868384 - DNA, 33 bp, Homo sapien
gtgccagtagtaactctctggagataaaaatgt

SEQ ID NO: 868385 - DNA, 33 bp, Homo sapien
taagaaatcattcagaaattgtaggtccttgat

SEQ ID NO: 868386 - DNA, 33 bp, Homo sapien
taagaaatcattcagagattgtaggtccttgat

SEQ ID NO: 868387 - DNA, 33 bp, Homo sapien
agtgtttaacctattgaaattgaaattacccaa

SEQ ID NO: 868388 - DNA, 33 bp, Homo sapien
agtgtttaacctattgcaattgaaattacccaa

SEQ ID NO: 868389 - DNA, 33 bp, Homo sapien
caatgtggaaaatgctaaaacaacttgctatta

SEQ ID NO: 868390 - DNA, 33 bp, Homo sapien
caatgtggaaaatgctgaaacaacttgctatta

SEQ ID NO: 868391 - DNA, 33 bp, Homo sapien
ggtaaagaaaaatttgaacaggcaatacacctg

SEQ ID NO: 868392 - DNA, 33 bp, Homo sapien
ggtaaagaaaaatttgcacaggcaatacacctg

SEQ ID NO: 868393 - DNA, 33 bp, Homo sapien
gactacaagggatcaaatagaaaaggagtggta

SEQ ID NO: 868394 - DNA, 33 bp, Homo sapien
gactacaagggatcaagtagaaaaggagtggta

SEQ ID NO: 868395 - DNA, 33 bp, Homo sapien
agaatcctaattctgagatatcatggcatagaa

SEQ ID NO: 868396 - DNA, 33 bp, Homo sapien
agaatcctaattctgatatatcatggcatagaa

SEQ ID NO: 868397 - DNA, 33 bp, Homo sapien
ttataaagtgtaatcacaaccattccactcctg

SEQ ID NO: 868398 - DNA, 33 bp, Homo sapien
ttataaagtgtaatcataaccattccactcctg

SEQ ID NO: 868399 - DNA, 33 bp, Homo sapien
ctcgggtattctggatgatcattttgtagcatc

SEQ ID NO: 868400 - DNA, 33 bp, Homo sapien
ctcgggtattctggattatcattttgtagcatc

SEQ ID NO: 868401 - DNA, 33 bp, Homo sapien
gtttagtttccgcatccaagaatgaggaagtat

SEQ ID NO: 868402 - DNA, 33 bp, Homo sapien
gtttagtttccgcatctaagaatgaggaagtat

SEQ ID NO: 868403 - DNA, 33 bp, Homo sapien
cacttttgtgtggcaacgggccgcctctctgct

SEQ ID NO: 868404 - DNA, 33 bp, Homo sapien
cacttttgtgtggcaatgggccgcctctctgct

SEQ ID NO: 868405 - DNA, 33 bp, Homo sapien
aggattaaagttggcactgaaggggattgagaa

SEQ ID NO: 868406 - DNA, 33 bp, Homo sapien
aggattaaagttggcagtgaaggggattgagaa

SEQ ID NO: 868407 - DNA, 33 bp, Homo sapien
cggtttgtgggccatcaaataatttggttttat

SEQ ID NO: 868408 - DNA, 33 bp, Homo sapien
cggtttgtgggccatcgaataatttggttttat

SEQ ID NO: 868409 - DNA, 33 bp, Homo sapien
actaaggtaagaccaccgtcatcggttgcaaaa

SEQ ID NO: 868410 - DNA, 33 bp, Homo sapien
actaaggtaagaccactgtcatcggttgcaaaa

SEQ ID NO: 868411 - DNA, 33 bp, Homo sapien
tggaaggccaattccacgtggtaaattgagact

SEQ ID NO: 868412 - DNA, 33 bp, Homo sapien
tggaaggccaattccaggtggtaaattgagact

SEQ ID NO: 868413 - DNA, 33 bp, Homo sapien
gtaaccttcaagaatacggctagtaactgatca

SEQ ID NO: 868414 - DNA, 33 bp, Homo sapien
gtaaccttcaagaatatggctagtaactgatca

SEQ ID NO: 868415 - DNA, 33 bp, Homo sapien
catcattcgactatcaaaacgtatccgtttttt

SEQ ID NO: 868416 - DNA, 33 bp, Homo sapien
catcattcgactatcataacgtatccgtttttt

SEQ ID NO: 868417 - DNA, 33 bp, Homo sapien
aggaaagagtgtaagaggtggtctcatggtttg

SEQ ID NO: 868418 - DNA, 33 bp, Homo sapien
aggaaagagtgtaagatgtggtctcatggtttg

SEQ ID NO: 868419 - DNA, 33 bp, Homo sapien
gatgctttaaattagacgtgtagctgtaggcct

SEQ ID NO: 868420 - DNA, 33 bp, Homo sapien
gatgctttaaattagaggtgtagctgtaggcct

SEQ ID NO: 868421 - DNA, 33 bp, Homo sapien
aaatccctttcactgccaggttgtcagtgaagc

SEQ ID NO: 868422 - DNA, 33 bp, Homo sapien
aaatccctttcactgctaggttgtcagtgaagc

SEQ ID NO: 868423 - DNA, 33 bp, Homo sapien
tttatcatcataataacctattaccattgatag

SEQ ID NO: 868424 - DNA, 33 bp, Homo sapien
tttatcatcataataagctattaccattgatag

SEQ ID NO: 868425 - DNA, 33 bp, Homo sapien
atggggaaaccacagacgaggccgtggggacat

SEQ ID NO: 868426 - DNA, 33 bp, Homo sapien
atggggaaaccacagatgaggccgtggggacat

SEQ ID NO: 868427 - DNA, 33 bp, Homo sapien
aaatttgagggctggaaaagaatttggcatact

SEQ ID NO: 868428 - DNA, 33 bp, Homo sapien
aaatttgagggctggacaagaatttggcatact

SEQ ID NO: 868429 - DNA, 33 bp, Homo sapien
aacatatagaaaatgaacaacactgaaatgttt

SEQ ID NO: 868430 - DNA, 33 bp, Homo sapien
aacatatagaaaatgagcaacactgaaatgttt

SEQ ID NO: 868431 - DNA, 33 bp, Homo sapien
ggagctgttcctattccaattatactggtttct

SEQ ID NO: 868432 - DNA, 33 bp, Homo sapien
ggagctgttcctattcgaattatactggtttct

SEQ ID NO: 868433 - DNA, 33 bp, Homo sapien
aacttagacctcatgaagcttacattctagtta

SEQ ID NO: 868434 - DNA, 33 bp, Homo sapien
aacttagacctcatgacgcttacattctagtta

SEQ ID NO: 868435 - DNA, 33 bp, Homo sapien
aggtgactaggaaaaaattatgtgggtatctgg

SEQ ID NO: 868436 - DNA, 33 bp, Homo sapien
aggtgactaggaaaaagttatgtgggtatctgg

SEQ ID NO: 868437 - DNA, 33 bp, Homo sapien
ttaggacaaagagaaaataagtgaaaaggccct

SEQ ID NO: 868438 - DNA, 33 bp, Homo sapien
ttaggacaaagagaaagtaagtgaaaaggccct

SEQ ID NO: 868439 - DNA, 33 bp, Homo sapien
tgaataacgagacaaaatatgagatctaaggat

SEQ ID NO: 868440 - DNA, 33 bp, Homo sapien
tgaataacgagacaaagtatgagatctaaggat

SEQ ID NO: 868441 - DNA, 33 bp, Homo sapien
gtcttggctacagtaccaatagcatttagggag

SEQ ID NO: 868442 - DNA, 33 bp, Homo sapien
gtcttggctacagtactaatagcatttagggag

SEQ ID NO: 868443 - DNA, 33 bp, Homo sapien
atttgtaattagaaaaacctccagtaattaatg

SEQ ID NO: 868444 - DNA, 33 bp, Homo sapien
atttgtaattagaaaagcctccagtaattaatg

SEQ ID NO: 868445 - DNA, 33 bp, Homo sapien
tttaatcagccgtagcaagctatgtgccattct

SEQ ID NO: 868446 - DNA, 33 bp, Homo sapien
tttaatcagccgtagcgagctatgtgccattct

SEQ ID NO: 868447 - DNA, 33 bp, Homo sapien
gagtctggattctttcaacaaagacatccctcc

SEQ ID NO: 868448 - DNA, 33 bp, Homo sapien
gagtctggattctttccacaaagacatccctcc

SEQ ID NO: 868449 - DNA, 33 bp, Homo sapien
catggcaaaggatacaataaagactactagcca

SEQ ID NO: 868450 - DNA, 33 bp, Homo sapien
catggcaaaggatacagtaaagactactagcca

SEQ ID NO: 868451 - DNA, 33 bp, Homo sapien
agatgaccagtttgaacgattgatcagttggtt

SEQ ID NO: 868452 - DNA, 33 bp, Homo sapien
agatgaccagtttgaatgattgatcagttggtt

SEQ ID NO: 868453 - DNA, 33 bp, Homo sapien
taatttggtataattacgttgatcctgattttt

SEQ ID NO: 868454 - DNA, 33 bp, Homo sapien
taatttggtataattatgttgatcctgattttt

SEQ ID NO: 868455 - DNA, 33 bp, Homo sapien
agtaatatagatactcaacataacgcatccaaa

SEQ ID NO: 868456 - DNA, 33 bp, Homo sapien
agtaatatagatactcgacataacgcatccaaa

SEQ ID NO: 868457 - DNA, 33 bp, Homo sapien
actactcagagcagtcaaaagtcagttaataac

SEQ ID NO: 868458 - DNA, 33 bp, Homo sapien
actactcagagcagtcgaaagtcagttaataac

SEQ ID NO: 868459 - DNA, 33 bp, Homo sapien
aatagaactttgattcaagctgggagagaggag

SEQ ID NO: 868460 - DNA, 33 bp, Homo sapien
aatagaactttgattctagctgggagagaggag

SEQ ID NO: 868461 - DNA, 33 bp, Homo sapien
gctaaagcctttatgtgaattatccctacagct

SEQ ID NO: 868462 - DNA, 33 bp, Homo sapien
gctaaagcctttatgttaattatccctacagct

SEQ ID NO: 868463 - DNA, 33 bp, Homo sapien
agaatgcctaacagggcacttaacaaatcagaa

SEQ ID NO: 868464 - DNA, 33 bp, Homo sapien
agaatgcctaacagggtacttaacaaatcagaa

SEQ ID NO: 868465 - DNA, 33 bp, Homo sapien
agctagtgtttataaaaattagatgatgaaact

SEQ ID NO: 868466 - DNA, 33 bp, Homo sapien
agctagtgtttataaagattagatgatgaaact

SEQ ID NO: 868467 - DNA, 33 bp, Homo sapien
ataagctctagaaaagcagtgtttatcggtatg

SEQ ID NO: 868468 - DNA, 33 bp, Homo sapien
ataagctctagaaaagtagtgtttatcggtatg

SEQ ID NO: 868469 - DNA, 33 bp, Homo sapien
atgccttccacattcacctgaggaaagacaaga

SEQ ID NO: 868470 - DNA, 33 bp, Homo sapien
atgccttccacattcatctgaggaaagacaaga

SEQ ID NO: 868471 - DNA, 33 bp, Homo sapien
ctcactggaaaggtcactcatttcatatgtgcc

SEQ ID NO: 868472 - DNA, 33 bp, Homo sapien
ctcactggaaaggtcattcatttcatatgtgcc

SEQ ID NO: 868473 - DNA, 33 bp, Homo sapien
ccatgaataatttcaacagtggggaagagaact

SEQ ID NO: 868474 - DNA, 33 bp, Homo sapien
ccatgaataatttcaatagtggggaagagaact

SEQ ID NO: 868475 - DNA, 33 bp, Homo sapien
acataatcattctcacaaacttttgtctcagtt

SEQ ID NO: 868476 - DNA, 33 bp, Homo sapien
acataatcattctcacgaacttttgtctcagtt

SEQ ID NO: 868477 - DNA, 33 bp, Homo sapien
tctggcacgaagatgaaaaccgtcttgtgtttc

SEQ ID NO: 868478 - DNA, 33 bp, Homo sapien
tctggcacgaagatgagaaccgtcttgtgtttc

SEQ ID NO: 868479 - DNA, 33 bp, Homo sapien
cttctaattaactagacgctcttacatattctt

SEQ ID NO: 868480 - DNA, 33 bp, Homo sapien
cttctaattaactagatgctcttacatattctt

SEQ ID NO: 868481 - DNA, 33 bp, Homo sapien
aaagacattgtttacactcctggtctctacttc

SEQ ID NO: 868482 - DNA, 33 bp, Homo sapien
aaagacattgtttacattcctggtctctacttc

SEQ ID NO: 868483 - DNA, 33 bp, Homo sapien
aacctctgcctcctgaataaagggattctcctg

SEQ ID NO: 868484 - DNA, 33 bp, Homo sapien
aacctctgcctcctgagtaaagggattctcctg

SEQ ID NO: 868485 - DNA, 33 bp, Homo sapien
cattcttcttgattgactaaatgaagcagagcc

SEQ ID NO: 868486 - DNA, 33 bp, Homo sapien
cattcttcttgattgattaaatgaagcagagcc

SEQ ID NO: 868487 - DNA, 33 bp, Homo sapien
gctattgataatgttacgaatgaatgctaaata

SEQ ID NO: 868488 - DNA, 33 bp, Homo sapien
gctattgataatgttatgaatgaatgctaaata

SEQ ID NO: 868489 - DNA, 33 bp, Homo sapien
ggtcaaaaatacccacaagagacttcataaaga

SEQ ID NO: 868490 - DNA, 33 bp, Homo sapien
ggtcaaaaatacccacgagagacttcataaaga

SEQ ID NO: 868491 - DNA, 33 bp, Homo sapien
ttcctggcaagcatagcaccaggcatatggtca

SEQ ID NO: 868492 - DNA, 33 bp, Homo sapien
ttcctggcaagcatagtaccaggcatatggtca

SEQ ID NO: 868493 - DNA, 33 bp, Homo sapien
aaattgtcgtgggtcaaagatgttgggtgattg

SEQ ID NO: 868494 - DNA, 33 bp, Homo sapien
aaattgtcgtgggtcatagatgttgggtgattg

SEQ ID NO: 868495 - DNA, 33 bp, Homo sapien
acaacctctccaactgaaaggtaagctctaagg

SEQ ID NO: 868496 - DNA, 33 bp, Homo sapien
acaacctctccaactgtaaggtaagctctaagg

SEQ ID NO: 868497 - DNA, 33 bp, Homo sapien
ccctgggaatggccacactaaggagaagcactt

SEQ ID NO: 868498 - DNA, 33 bp, Homo sapien
ccctgggaatggccacgctaaggagaagcactt

SEQ ID NO: 868499 - DNA, 33 bp, Homo sapien
aaggacccagtctttaaaggtgttgaggagaag

SEQ ID NO: 868500 - DNA, 33 bp, Homo sapien
aaggacccagtctttacaggtgttgaggagaag

SEQ ID NO: 868501 - DNA, 33 bp, Homo sapien
tactttcacatattaccgaacaccataataagg

SEQ ID NO: 868502 - DNA, 33 bp, Homo sapien
tactttcacatattactgaacaccataataagg

SEQ ID NO: 868503 - DNA, 33 bp, Homo sapien
atcatctaacttctcaacctgcaagtgttaaca

SEQ ID NO: 868504 - DNA, 33 bp, Homo sapien
atcatctaacttctcatcctgcaagtgttaaca

SEQ ID NO: 868505 - DNA, 33 bp, Homo sapien
gatgagtacaataaaaacaaagagaggcacaga

SEQ ID NO: 868506 - DNA, 33 bp, Homo sapien
gatgagtacaataaaatcaaagagaggcacaga

SEQ ID NO: 868507 - DNA, 33 bp, Homo sapien
aggagacagtcactaaatcaataaataagcata

SEQ ID NO: 868508 - DNA, 33 bp, Homo sapien
aggagacagtcactaagtcaataaataagcata

SEQ ID NO: 868509 - DNA, 33 bp, Homo sapien
aaagactacgtatgggaccaaattttcaaaagc

SEQ ID NO: 868510 - DNA, 33 bp, Homo sapien
aaagactacgtatggggccaaattttcaaaagc

SEQ ID NO: 868511 - DNA, 33 bp, Homo sapien
gaacgtcctaattatacgaaatctggcttccaa

SEQ ID NO: 868512 - DNA, 33 bp, Homo sapien
gaacgtcctaattatatgaaatctggcttccaa

SEQ ID NO: 868513 - DNA, 33 bp, Homo sapien
agatgtcccagctcaacctgtaaggcagaaaag

SEQ ID NO: 868514 - DNA, 33 bp, Homo sapien
agatgtcccagctcaatctgtaaggcagaaaag

SEQ ID NO: 868515 - DNA, 33 bp, Homo sapien
caaagggattcgtctaggtatgacttacacaaa

SEQ ID NO: 868516 - DNA, 33 bp, Homo sapien
caaagggattcgtctatgtatgacttacacaaa

SEQ ID NO: 868517 - DNA, 33 bp, Homo sapien
tgacttacacaaataccgcaaatcttaggggaa

SEQ ID NO: 868518 - DNA, 33 bp, Homo sapien
tgacttacacaaatactgcaaatcttaggggaa

SEQ ID NO: 868519 - DNA, 33 bp, Homo sapien
aggaccacaacctagaccataaagcaagtatca

SEQ ID NO: 868520 - DNA, 33 bp, Homo sapien
aggaccacaacctagatcataaagcaagtatca

SEQ ID NO: 868521 - DNA, 33 bp, Homo sapien
gtattgcattatgataagaggatgtagtctaga

SEQ ID NO: 868522 - DNA, 33 bp, Homo sapien
gtattgcattatgatacgaggatgtagtctaga

SEQ ID NO: 868523 - DNA, 33 bp, Homo sapien
ttattgaaggcctgacaagacctggcctctgtt

SEQ ID NO: 868524 - DNA, 33 bp, Homo sapien
ttattgaaggcctgacgagacctggcctctgtt

SEQ ID NO: 868525 - DNA, 33 bp, Homo sapien
atcacgttcttcttttatcttgccacagctata

SEQ ID NO: 868526 - DNA, 33 bp, Homo sapien
atcacgttcttcttttctcttgccacagctata

SEQ ID NO: 868527 - DNA, 33 bp, Homo sapien
tacgtctcccacagaccgcataagtcatttatt

SEQ ID NO: 868528 - DNA, 33 bp, Homo sapien
tacgtctcccacagactgcataagtcatttatt

SEQ ID NO: 868529 - DNA, 33 bp, Homo sapien
ttactgttcaaactaaattacaataaactcttc

SEQ ID NO: 868530 - DNA, 33 bp, Homo sapien
ttactgttcaaactaagttacaataaactcttc

SEQ ID NO: 868531 - DNA, 33 bp, Homo sapien
agctcctcctttagtcgacatagccaccataga

SEQ ID NO: 868532 - DNA, 33 bp, Homo sapien
agctcctcctttagtctacatagccaccataga

SEQ ID NO: 868533 - DNA, 33 bp, Homo sapien
taggcaccagaatataatacagtcatgtgtcac

SEQ ID NO: 868534 - DNA, 33 bp, Homo sapien
taggcaccagaatatagtacagtcatgtgtcac

SEQ ID NO: 868535 - DNA, 33 bp, Homo sapien
ctagcattagcataaaagctgtgagcaatgggc

SEQ ID NO: 868536 - DNA, 33 bp, Homo sapien
ctagcattagcataaaggctgtgagcaatgggc

SEQ ID NO: 868537 - DNA, 33 bp, Homo sapien
atcacctgatatacaccgccaaggtctaatttg

SEQ ID NO: 868538 - DNA, 33 bp, Homo sapien
atcacctgatatacactgccaaggtctaatttg

SEQ ID NO: 868539 - DNA, 33 bp, Homo sapien
ttaccgatgctgattaacaccacataaagaatt

SEQ ID NO: 868540 - DNA, 33 bp, Homo sapien
ttaccgatgctgattaccaccacataaagaatt

SEQ ID NO: 868541 - DNA, 33 bp, Homo sapien
acatgtggctagtaacgactgatttggacagtg

SEQ ID NO: 868542 - DNA, 33 bp, Homo sapien
acatgtggctagtaactactgatttggacagtg

SEQ ID NO: 868543 - DNA, 33 bp, Homo sapien
tttttttcaccaaagacaagataattgcatagg

SEQ ID NO: 868544 - DNA, 33 bp, Homo sapien
tttttttcaccaaagagaagataattgcatagg

SEQ ID NO: 868545 - DNA, 33 bp, Homo sapien
agagctatacatttggaaaattggatcacaatt

SEQ ID NO: 868546 - DNA, 33 bp, Homo sapien
agagctatacatttgggaaattggatcacaatt

SEQ ID NO: 868547 - DNA, 33 bp, Homo sapien
tttttctggaaccattcaagtttacacaagtag

SEQ ID NO: 868548 - DNA, 33 bp, Homo sapien
tttttctggaaccattgaagtttacacaagtag

SEQ ID NO: 868549 - DNA, 33 bp, Homo sapien
tatgcactaatggctacggtgtaaattactact

SEQ ID NO: 868550 - DNA, 33 bp, Homo sapien
tatgcactaatggctatggtgtaaattactact

SEQ ID NO: 868551 - DNA, 33 bp, Homo sapien
gttgcacaagctgaagaaatagtcttttgggcc

SEQ ID NO: 868552 - DNA, 33 bp, Homo sapien
gttgcacaagctgaagtaatagtcttttgggcc

SEQ ID NO: 868553 - DNA, 33 bp, Homo sapien
gaatgctattgggataaaattgtccctgtctgt

SEQ ID NO: 868554 - DNA, 33 bp, Homo sapien
gaatgctattgggatataattgtccctgtctgt

SEQ ID NO: 868555 - DNA, 33 bp, Homo sapien
aacaaaacaagattataagtggaactgcattaa

SEQ ID NO: 868556 - DNA, 33 bp, Homo sapien
aacaaaacaagattatgagtggaactgcattaa

SEQ ID NO: 868557 - DNA, 33 bp, Homo sapien
tcatccacttgaactgcaaagatgctgataaaa

SEQ ID NO: 868558 - DNA, 33 bp, Homo sapien
tcatccacttgaactgtaaagatgctgataaaa

SEQ ID NO: 868559 - DNA, 33 bp, Homo sapien
caatgaggatcttcaacttagactgagaaaagc

SEQ ID NO: 868560 - DNA, 33 bp, Homo sapien
caatgaggatcttcaatttagactgagaaaagc

SEQ ID NO: 868561 - DNA, 33 bp, Homo sapien
ataactggaaataatgaaaaagcttgatgcata

SEQ ID NO: 868562 - DNA, 33 bp, Homo sapien
ataactggaaataatggaaaagcttgatgcata

SEQ ID NO: 868563 - DNA, 33 bp, Homo sapien
tagttaggaaattataaggccaaaagatgaata

SEQ ID NO: 868564 - DNA, 33 bp, Homo sapien
tagttaggaaattatacggccaaaagatgaata

SEQ ID NO: 868565 - DNA, 33 bp, Homo sapien
ccatctgaatacagaaagaattctatgtacatg

SEQ ID NO: 868566 - DNA, 33 bp, Homo sapien
ccatctgaatacagaaggaattctatgtacatg

SEQ ID NO: 868567 - DNA, 33 bp, Homo sapien
tgaacttgggtcaggaaaatgatttgctaataa

SEQ ID NO: 868568 - DNA, 33 bp, Homo sapien
tgaacttgggtcaggacaatgatttgctaataa

SEQ ID NO: 868569 - DNA, 33 bp, Homo sapien
aagcacacatttgatactacagtactaagaaag

SEQ ID NO: 868570 - DNA, 33 bp, Homo sapien
aagcacacatttgatagtacagtactaagaaag

SEQ ID NO: 868571 - DNA, 33 bp, Homo sapien
aactttattctacagaagcaattctcaagctta

SEQ ID NO: 868572 - DNA, 33 bp, Homo sapien
aactttattctacagaggcaattctcaagctta

SEQ ID NO: 868573 - DNA, 33 bp, Homo sapien
accatcactttttgaacgttttggtagaatggg

SEQ ID NO: 868574 - DNA, 33 bp, Homo sapien
accatcactttttgaatgttttggtagaatggg

SEQ ID NO: 868575 - DNA, 33 bp, Homo sapien
taattcaaaactaaaaaccagttcacacaatgt

SEQ ID NO: 868576 - DNA, 33 bp, Homo sapien
taattcaaaactaaaatccagttcacacaatgt

SEQ ID NO: 868577 - DNA, 33 bp, Homo sapien
tcagatgaggttttaccggagatgtagtttctc

SEQ ID NO: 868578 - DNA, 33 bp, Homo sapien
tcagatgaggttttactggagatgtagtttctc

SEQ ID NO: 868579 - DNA, 33 bp, Homo sapien
actgaagcagaaacacaatgggaaggaagcaaa

SEQ ID NO: 868580 - DNA, 33 bp, Homo sapien
actgaagcagaaacacgatgggaaggaagcaaa

SEQ ID NO: 868581 - DNA, 33 bp, Homo sapien
gctctgatcctgtccaatgcaattcagaaattc

SEQ ID NO: 868582 - DNA, 33 bp, Homo sapien
gctctgatcctgtccagtgcaattcagaaattc

SEQ ID NO: 868583 - DNA, 33 bp, Homo sapien
ggaggacatcctgctgaaaaccttattttagac

SEQ ID NO: 868584 - DNA, 33 bp, Homo sapien
ggaggacatcctgctgtaaaccttattttagac

SEQ ID NO: 868585 - DNA, 33 bp, Homo sapien
ggagtgcgaaaaagaaacacttaaaacaagacg

SEQ ID NO: 868586 - DNA, 33 bp, Homo sapien
ggagtgcgaaaaagaaccacttaaaacaagacg

SEQ ID NO: 868587 - DNA, 33 bp, Homo sapien
taggttgtaaacattacggcactgctttgctgt

SEQ ID NO: 868588 - DNA, 33 bp, Homo sapien
taggttgtaaacattatggcactgctttgctgt

SEQ ID NO: 868589 - DNA, 33 bp, Homo sapien
cacaactgtgaggatcaatttctgttgtttaaa

SEQ ID NO: 868590 - DNA, 33 bp, Homo sapien
cacaactgtgaggatcgatttctgttgtttaaa

SEQ ID NO: 868591 - DNA, 33 bp, Homo sapien
gatataaaaggaattcactactatcttgaacta

SEQ ID NO: 868592 - DNA, 33 bp, Homo sapien
gatataaaaggaattcgctactatcttgaacta

SEQ ID NO: 868593 - DNA, 33 bp, Homo sapien
ggtctccagtctggcacagaaaacggccactat

SEQ ID NO: 868594 - DNA, 33 bp, Homo sapien
ggtctccagtctggcatagaaaacggccactat

SEQ ID NO: 868595 - DNA, 33 bp, Homo sapien
aaattaatgtttggaaactcctcaaataagaga

SEQ ID NO: 868596 - DNA, 33 bp, Homo sapien
aaattaatgtttggaagctcctcaaataagaga

SEQ ID NO: 868597 - DNA, 33 bp, Homo sapien
ggtagggattttaggcgaactctgaaaaaatga

SEQ ID NO: 868598 - DNA, 33 bp, Homo sapien
ggtagggattttaggctaactctgaaaaaatga

SEQ ID NO: 868599 - DNA, 33 bp, Homo sapien
gaaggacagtggtagtaaaatagcattcaaaac

SEQ ID NO: 868600 - DNA, 33 bp, Homo sapien
gaaggacagtggtagtgaaatagcattcaaaac

SEQ ID NO: 868601 - DNA, 33 bp, Homo sapien
cctgagacaatgtttcaatgcatttcatcctga

SEQ ID NO: 868602 - DNA, 33 bp, Homo sapien
cctgagacaatgtttccatgcatttcatcctga

SEQ ID NO: 868603 - DNA, 33 bp, Homo sapien
caccaatactgagttccactttaaaagcataaa

SEQ ID NO: 868604 - DNA, 33 bp, Homo sapien
caccaatactgagttctactttaaaagcataaa

SEQ ID NO: 868605 - DNA, 33 bp, Homo sapien
ttctcaccttttacaactataatgacagaacta

SEQ ID NO: 868606 - DNA, 33 bp, Homo sapien
ttctcaccttttacaagtataatgacagaacta

SEQ ID NO: 868607 - DNA, 33 bp, Homo sapien
cacaaggaacatatacaggaaaatagtagacta

SEQ ID NO: 868608 - DNA, 33 bp, Homo sapien
cacaaggaacatatacgggaaaatagtagacta

SEQ ID NO: 868609 - DNA, 33 bp, Homo sapien
cccagctgtagagccacctggaaattaaacacc

SEQ ID NO: 868610 - DNA, 33 bp, Homo sapien
cccagctgtagagccatctggaaattaaacacc

SEQ ID NO: 868611 - DNA, 33 bp, Homo sapien
atgcggggaggctgcacaagcaagcttattcca

SEQ ID NO: 868612 - DNA, 33 bp, Homo sapien
atgcggggaggctgcagaagcaagcttattcca

SEQ ID NO: 868613 - DNA, 33 bp, Homo sapien
ataatacctgtcatgaaataagcactaacaaaa

SEQ ID NO: 868614 - DNA, 33 bp, Homo sapien
ataatacctgtcatgatataagcactaacaaaa

SEQ ID NO: 868615 - DNA, 33 bp, Homo sapien
caaataatttagccaaacttagaaacaattcat

SEQ ID NO: 868616 - DNA, 33 bp, Homo sapien
caaataatttagccaagcttagaaacaattcat

SEQ ID NO: 868617 - DNA, 33 bp, Homo sapien
ctttccatttctaatcccctaggtcatggtaaa

SEQ ID NO: 868618 - DNA, 33 bp, Homo sapien
ctttccatttctaatctcctaggtcatggtaaa

SEQ ID NO: 868619 - DNA, 33 bp, Homo sapien
aacgaaaacaaatttacgatgaaagaatctgtg

SEQ ID NO: 868620 - DNA, 33 bp, Homo sapien
aacgaaaacaaatttaggatgaaagaatctgtg

SEQ ID NO: 868621 - DNA, 33 bp, Homo sapien
ccatagtggagcataacttaaggcaagaggatg

SEQ ID NO: 868622 - DNA, 33 bp, Homo sapien
ccatagtggagcataatttaaggcaagaggatg

SEQ ID NO: 868623 - DNA, 33 bp, Homo sapien
ttaggaactttcaaaaatttgccctacaagaca

SEQ ID NO: 868624 - DNA, 33 bp, Homo sapien
ttaggaactttcaaaactttgccctacaagaca

SEQ ID NO: 868625 - DNA, 33 bp, Homo sapien
agtgaacatgttagaacgctgtgtgttagtttg

SEQ ID NO: 868626 - DNA, 33 bp, Homo sapien
agtgaacatgttagaatgctgtgtgttagtttg

SEQ ID NO: 868627 - DNA, 33 bp, Homo sapien
gctgtgtgttagtttggaaatttcatggaaaca

SEQ ID NO: 868628 - DNA, 33 bp, Homo sapien
gctgtgtgttagtttgtaaatttcatggaaaca

SEQ ID NO: 868629 - DNA, 33 bp, Homo sapien
cattactcacaagtacaattttagaatctatag

SEQ ID NO: 868630 - DNA, 33 bp, Homo sapien
cattactcacaagtacgattttagaatctatag

SEQ ID NO: 868631 - DNA, 33 bp, Homo sapien
caatctagaagattcacgtgagaccaaataaat

SEQ ID NO: 868632 - DNA, 33 bp, Homo sapien
caatctagaagattcatgtgagaccaaataaat

SEQ ID NO: 868633 - DNA, 33 bp, Homo sapien
ttctcacagttaccgacgaacagctctttttca

SEQ ID NO: 868634 - DNA, 33 bp, Homo sapien
ttctcacagttaccgatgaacagctctttttca

SEQ ID NO: 868635 - DNA, 33 bp, Homo sapien
attgagcactctctaagtctaagtactttaaga

SEQ ID NO: 868636 - DNA, 33 bp, Homo sapien
attgagcactctctaattctaagtactttaaga

SEQ ID NO: 868637 - DNA, 33 bp, Homo sapien
caagtgtatacagagcaagttaaaagtacaagg

SEQ ID NO: 868638 - DNA, 33 bp, Homo sapien
caagtgtatacagagccagttaaaagtacaagg

SEQ ID NO: 868639 - DNA, 33 bp, Homo sapien
tctttgctaggtacaaatgataagcctagaaaa

SEQ ID NO: 868640 - DNA, 33 bp, Homo sapien
tctttgctaggtacaagtgataagcctagaaaa

SEQ ID NO: 868641 - DNA, 33 bp, Homo sapien
tgattcatctaaagtcacaagaatgtatgtcat

SEQ ID NO: 868642 - DNA, 33 bp, Homo sapien
tgattcatctaaagtcccaagaatgtatgtcat

SEQ ID NO: 868643 - DNA, 33 bp, Homo sapien
ttctggctagtaaaaagaaattaatccataata

SEQ ID NO: 868644 - DNA, 33 bp, Homo sapien
ttctggctagtaaaaataaattaatccataata

SEQ ID NO: 868645 - DNA, 33 bp, Homo sapien
cccagcatgccaaatgcaagaggactatcatct

SEQ ID NO: 868646 - DNA, 33 bp, Homo sapien
cccagcatgccaaatggaagaggactatcatct

SEQ ID NO: 868647 - DNA, 33 bp, Homo sapien
gggaccacgggcatgcactaccatttctagttt

SEQ ID NO: 868648 - DNA, 33 bp, Homo sapien
gggaccacgggcatgcgctaccatttctagttt

SEQ ID NO: 868649 - DNA, 33 bp, Homo sapien
atgtcagtcaaaattgccaaaattatacaagct

SEQ ID NO: 868650 - DNA, 33 bp, Homo sapien
atgtcagtcaaaattgtcaaaattatacaagct

SEQ ID NO: 868651 - DNA, 33 bp, Homo sapien
agtttatgtaatgatggaattggaaacttgttc

SEQ ID NO: 868652 - DNA, 33 bp, Homo sapien
agtttatgtaatgatgtaattggaaacttgttc

SEQ ID NO: 868653 - DNA, 33 bp, Homo sapien
tggaaagacttgtatgaataaggtagcaggaat

SEQ ID NO: 868654 - DNA, 33 bp, Homo sapien
tggaaagacttgtatgtataaggtagcaggaat

SEQ ID NO: 868655 - DNA, 33 bp, Homo sapien
aataatctacagcaaaactaaggtccttaatca

SEQ ID NO: 868656 - DNA, 33 bp, Homo sapien
aataatctacagcaaacctaaggtccttaatca

SEQ ID NO: 868657 - DNA, 33 bp, Homo sapien
catcatcattgtgccaccatatctaaaattgtt

SEQ ID NO: 868658 - DNA, 33 bp, Homo sapien
catcatcattgtgccatcatatctaaaattgtt

SEQ ID NO: 868659 - DNA, 33 bp, Homo sapien
aaaaaaagtactctgaccactatgattatgaat

SEQ ID NO: 868660 - DNA, 33 bp, Homo sapien
aaaaaaagtactctgatcactatgattatgaat

SEQ ID NO: 868661 - DNA, 33 bp, Homo sapien
aatctcatctcttcaccagaaaagcaagtacac

SEQ ID NO: 868662 - DNA, 33 bp, Homo sapien
aatctcatctcttcactagaaaagcaagtacac

SEQ ID NO: 868663 - DNA, 33 bp, Homo sapien
cagcagagattggaaacaaatactagccaaaat

SEQ ID NO: 868664 - DNA, 33 bp, Homo sapien
cagcagagattggaaataaatactagccaaaat

SEQ ID NO: 868665 - DNA, 33 bp, Homo sapien
caaaaatctccagaaactgaatataactttttt

SEQ ID NO: 868666 - DNA, 33 bp, Homo sapien
caaaaatctccagaaagtgaatataactttttt

SEQ ID NO: 868667 - DNA, 33 bp, Homo sapien
actaaaggtccacttaacaatagagtatactta

SEQ ID NO: 868668 - DNA, 33 bp, Homo sapien
actaaaggtccacttagcaatagagtatactta

SEQ ID NO: 868669 - DNA, 33 bp, Homo sapien
gttgagcaaatatgccaaagtgccaaagtaaaa

SEQ ID NO: 868670 - DNA, 33 bp, Homo sapien
gttgagcaaatatgccgaagtgccaaagtaaaa

SEQ ID NO: 868671 - DNA, 33 bp, Homo sapien
accactgaaaaaacaacggctagtgtttgagtg

SEQ ID NO: 868672 - DNA, 33 bp, Homo sapien
accactgaaaaaacaatggctagtgtttgagtg

SEQ ID NO: 868673 - DNA, 33 bp, Homo sapien
ttagaaatccatgcaaatctcactaggctaaaa

SEQ ID NO: 868674 - DNA, 33 bp, Homo sapien
ttagaaatccatgcaagtctcactaggctaaaa

SEQ ID NO: 868675 - DNA, 33 bp, Homo sapien
agggagtatggatctacgtgacatttgtacatt

SEQ ID NO: 868676 - DNA, 33 bp, Homo sapien
agggagtatggatctatgtgacatttgtacatt

SEQ ID NO: 868677 - DNA, 33 bp, Homo sapien
ctgtctagctctctcccaattcaactgcagttt

SEQ ID NO: 868678 - DNA, 33 bp, Homo sapien
ctgtctagctctctcctaattcaactgcagttt

SEQ ID NO: 868679 - DNA, 33 bp, Homo sapien
ccaaggcctcatttgaccttgtgccaaaataac

SEQ ID NO: 868680 - DNA, 33 bp, Homo sapien
ccaaggcctcatttgagcttgtgccaaaataac

SEQ ID NO: 868681 - DNA, 33 bp, Homo sapien
ctatccctcacagatgacataatgcttgaaccc

SEQ ID NO: 868682 - DNA, 33 bp, Homo sapien
ctatccctcacagatggcataatgcttgaaccc

SEQ ID NO: 868683 - DNA, 33 bp, Homo sapien
gtgaggcagagtaagaagcaacaaacaaaaggt

SEQ ID NO: 868684 - DNA, 33 bp, Homo sapien
gtgaggcagagtaagaggcaacaaacaaaaggt

SEQ ID NO: 868685 - DNA, 33 bp, Homo sapien
tgaaaaagatgatagactcaagggatagtttta

SEQ ID NO: 868686 - DNA, 33 bp, Homo sapien
tgaaaaagatgatagagtcaagggatagtttta

SEQ ID NO: 868687 - DNA, 33 bp, Homo sapien
aacaggattgttctaccggattctctaattcat

SEQ ID NO: 868688 - DNA, 33 bp, Homo sapien
aacaggattgttctactggattctctaattcat

SEQ ID NO: 868689 - DNA, 33 bp, Homo sapien
ccttatttgtattcagacataatacttggcttc

SEQ ID NO: 868690 - DNA, 33 bp, Homo sapien
ccttatttgtattcaggcataatacttggcttc

SEQ ID NO: 868691 - DNA, 33 bp, Homo sapien
tcatcatacaaatcaaaatcaatcttagacatt

SEQ ID NO: 868692 - DNA, 33 bp, Homo sapien
tcatcatacaaatcaacatcaatcttagacatt

SEQ ID NO: 868693 - DNA, 33 bp, Homo sapien
tcaggaatgaagaggacgatgcctcttggaaaa

SEQ ID NO: 868694 - DNA, 33 bp, Homo sapien
tcaggaatgaagaggatgatgcctcttggaaaa

SEQ ID NO: 868695 - DNA, 33 bp, Homo sapien
caggttttgattatgacagtctccagcttttac

SEQ ID NO: 868696 - DNA, 33 bp, Homo sapien
caggttttgattatgatagtctccagcttttac

SEQ ID NO: 868697 - DNA, 33 bp, Homo sapien
caatgaacctggttctcaagggttgcccaaggt

SEQ ID NO: 868698 - DNA, 33 bp, Homo sapien
caatgaacctggttctgaagggttgcccaaggt

SEQ ID NO: 868699 - DNA, 33 bp, Homo sapien
aaaggtcagaccttgaagctctttcggttcagc

SEQ ID NO: 868700 - DNA, 33 bp, Homo sapien
aaaggtcagaccttgaggctctttcggttcagc

SEQ ID NO: 868701 - DNA, 33 bp, Homo sapien
tgtcccactcctctacaaaattctttcctcttt

SEQ ID NO: 868702 - DNA, 33 bp, Homo sapien
tgtcccactcctctacgaaattctttcctcttt

SEQ ID NO: 868703 - DNA, 33 bp, Homo sapien
tggaagaaggattgaagagtaagaaattaaaac

SEQ ID NO: 868704 - DNA, 33 bp, Homo sapien
tggaagaaggattgaatagtaagaaattaaaac

SEQ ID NO: 868705 - DNA, 33 bp, Homo sapien
cccacacatttcctcaaacatcattgctgcagt

SEQ ID NO: 868706 - DNA, 33 bp, Homo sapien
cccacacatttcctcagacatcattgctgcagt

SEQ ID NO: 868707 - DNA, 33 bp, Homo sapien
ataaattcaagaataccccaagactgagtgagt

SEQ ID NO: 868708 - DNA, 33 bp, Homo sapien
ataaattcaagaatactccaagactgagtgagt

SEQ ID NO: 868709 - DNA, 33 bp, Homo sapien
gagcacctcagcaggacacttgcagcttgtgat

SEQ ID NO: 868710 - DNA, 33 bp, Homo sapien
gagcacctcagcaggagacttgcagcttgtgat

SEQ ID NO: 868711 - DNA, 33 bp, Homo sapien
acagtcaccccagctaccttcacatcagtatgt

SEQ ID NO: 868712 - DNA, 33 bp, Homo sapien
acagtcaccccagctagcttcacatcagtatgt

SEQ ID NO: 868713 - DNA, 33 bp, Homo sapien
aatctaagtatggaacccttgactttttaccta

SEQ ID NO: 868714 - DNA, 33 bp, Homo sapien
aatctaagtatggaactcttgactttttaccta

SEQ ID NO: 868715 - DNA, 33 bp, Homo sapien
ctggccaaagccaaagcctattagtgagcttga

SEQ ID NO: 868716 - DNA, 33 bp, Homo sapien
ctggccaaagccaaagtctattagtgagcttga

SEQ ID NO: 868717 - DNA, 33 bp, Homo sapien
ccctgaaaccattaccaataagcaatgcaacaa

SEQ ID NO: 868718 - DNA, 33 bp, Homo sapien
ccctgaaaccattaccgataagcaatgcaacaa

SEQ ID NO: 868719 - DNA, 33 bp, Homo sapien
ttactctggccagaatgaggaggacagatgaga

SEQ ID NO: 868720 - DNA, 33 bp, Homo sapien
ttactctggccagaattaggaggacagatgaga

SEQ ID NO: 868721 - DNA, 33 bp, Homo sapien
ttgaacatcctgtgaaccatactgggactctaa

SEQ ID NO: 868722 - DNA, 33 bp, Homo sapien
ttgaacatcctgtgaatcatactgggactctaa

SEQ ID NO: 868723 - DNA, 33 bp, Homo sapien
aggtagattttaaaaacgaatcaataggtgaag

SEQ ID NO: 868724 - DNA, 33 bp, Homo sapien
aggtagattttaaaaatgaatcaataggtgaag

SEQ ID NO: 868725 - DNA, 33 bp, Homo sapien
gtttatagattggcacaaagaactatggtgagg

SEQ ID NO: 868726 - DNA, 33 bp, Homo sapien
gtttatagattggcacgaagaactatggtgagg

SEQ ID NO: 868727 - DNA, 33 bp, Homo sapien
ttgtaaggtaaggtaaaaagattcatctggatc

SEQ ID NO: 868728 - DNA, 33 bp, Homo sapien
ttgtaaggtaaggtaacaagattcatctggatc

SEQ ID NO: 868729 - DNA, 33 bp, Homo sapien
atctttggttcacctacgcatataatgtctcaa

SEQ ID NO: 868730 - DNA, 33 bp, Homo sapien
atctttggttcacctatgcatataatgtctcaa

SEQ ID NO: 868731 - DNA, 33 bp, Homo sapien
tactcctacgatcagaagaaataaaatgaagga

SEQ ID NO: 868732 - DNA, 33 bp, Homo sapien
tactcctacgatcagaggaaataaaatgaagga

SEQ ID NO: 868733 - DNA, 33 bp, Homo sapien
ttctgcaattaaaacccccattgacagcacaca

SEQ ID NO: 868734 - DNA, 33 bp, Homo sapien
ttctgcaattaaaacctccattgacagcacaca

SEQ ID NO: 868735 - DNA, 33 bp, Homo sapien
tatgttctttgattgacctctggtatttgttct

SEQ ID NO: 868736 - DNA, 33 bp, Homo sapien
tatgttctttgattgagctctggtatttgttct

SEQ ID NO: 868737 - DNA, 33 bp, Homo sapien
gccttttatggaacacactttgagagacactgc

SEQ ID NO: 868738 - DNA, 33 bp, Homo sapien
gccttttatggaacacgctttgagagacactgc

SEQ ID NO: 868739 - DNA, 33 bp, Homo sapien
tgtcaaatgatagtaaagagttcttaaaactca

SEQ ID NO: 868740 - DNA, 33 bp, Homo sapien
tgtcaaatgatagtaaggagttcttaaaactca

SEQ ID NO: 868741 - DNA, 33 bp, Homo sapien
agcagatttatgaaaactgtgtaaggccagatc

SEQ ID NO: 868742 - DNA, 33 bp, Homo sapien
agcagatttatgaaaattgtgtaaggccagatc

SEQ ID NO: 868743 - DNA, 33 bp, Homo sapien
cttctacatagaatccggaagctgctactgcac

SEQ ID NO: 868744 - DNA, 33 bp, Homo sapien
cttctacatagaatcctgaagctgctactgcac

SEQ ID NO: 868745 - DNA, 33 bp, Homo sapien
cttagtgactccgaaaatgctcctaaattatcc

SEQ ID NO: 868746 - DNA, 33 bp, Homo sapien
cttagtgactccgaaagtgctcctaaattatcc

SEQ ID NO: 868747 - DNA, 33 bp, Homo sapien
ggttgcctcttttggcccaaatatactctcagg

SEQ ID NO: 868748 - DNA, 33 bp, Homo sapien
ggttgcctcttttggctcaaatatactctcagg

SEQ ID NO: 868749 - DNA, 33 bp, Homo sapien
ctgctttaggtatatcaaaattgcttgtttaga

SEQ ID NO: 868750 - DNA, 33 bp, Homo sapien
ctgctttaggtatatcgaaattgcttgtttaga

SEQ ID NO: 868751 - DNA, 33 bp, Homo sapien
aggattcaggacggcccgaggatcatcacttaa

SEQ ID NO: 868752 - DNA, 33 bp, Homo sapien
aggattcaggacggcctgaggatcatcacttaa

SEQ ID NO: 868753 - DNA, 33 bp, Homo sapien
tctgtggaaactgatactaggtgatgaatatac

SEQ ID NO: 868754 - DNA, 33 bp, Homo sapien
tctgtggaaactgatagtaggtgatgaatatac

SEQ ID NO: 868755 - DNA, 33 bp, Homo sapien
acggcacctggcggagacagattatactatcaa

SEQ ID NO: 868756 - DNA, 33 bp, Homo sapien
acggcacctggcggaggcagattatactatcaa

SEQ ID NO: 868757 - DNA, 33 bp, Homo sapien
cttaccgactgcaatcactggcttgctggataa

SEQ ID NO: 868758 - DNA, 33 bp, Homo sapien
cttaccgactgcaatcgctggcttgctggataa

SEQ ID NO: 868759 - DNA, 33 bp, Homo sapien
tctgagatagacctgcaacgctgcatcttgatg

SEQ ID NO: 868760 - DNA, 33 bp, Homo sapien
tctgagatagacctgcgacgctgcatcttgatg

SEQ ID NO: 868761 - DNA, 33 bp, Homo sapien
gatggaattacctattaaagcttatgcatgcat

SEQ ID NO: 868762 - DNA, 33 bp, Homo sapien
gatggaattacctattgaagcttatgcatgcat

SEQ ID NO: 868763 - DNA, 33 bp, Homo sapien
agaattaaaaagctaaaattgaataggaaagat

SEQ ID NO: 868764 - DNA, 33 bp, Homo sapien
agaattaaaaagctaacattgaataggaaagat

SEQ ID NO: 868765 - DNA, 33 bp, Homo sapien
gcgtgatgtttgagtaagtagcacattgtcttc

SEQ ID NO: 868766 - DNA, 33 bp, Homo sapien
gcgtgatgtttgagtacgtagcacattgtcttc

SEQ ID NO: 868767 - DNA, 33 bp, Homo sapien
caggcatgaggtccaacagcctgggatttttca

SEQ ID NO: 868768 - DNA, 33 bp, Homo sapien
caggcatgaggtccaagagcctgggatttttca

SEQ ID NO: 868769 - DNA, 33 bp, Homo sapien
ccaacccaattttatcaactagatggacaataa

SEQ ID NO: 868770 - DNA, 33 bp, Homo sapien
ccaacccaattttatcgactagatggacaataa

SEQ ID NO: 868771 - DNA, 33 bp, Homo sapien
acaacaagaaaaactcaagagctgaatgaagag

SEQ ID NO: 868772 - DNA, 33 bp, Homo sapien
acaacaagaaaaactcgagagctgaatgaagag

SEQ ID NO: 868773 - DNA, 33 bp, Homo sapien
tggttcaatttaacaacgtttcaaatttacaac

SEQ ID NO: 868774 - DNA, 33 bp, Homo sapien
tggttcaatttaacaatgtttcaaatttacaac

SEQ ID NO: 868775 - DNA, 33 bp, Homo sapien
ctttttttctgaatacacaggctaattggaaag

SEQ ID NO: 868776 - DNA, 33 bp, Homo sapien
ctttttttctgaatacgcaggctaattggaaag

SEQ ID NO: 868777 - DNA, 33 bp, Homo sapien
taaacaaagcaacccacagaggaaacaatctca

SEQ ID NO: 868778 - DNA, 33 bp, Homo sapien
taaacaaagcaacccatagaggaaacaatctca

SEQ ID NO: 868779 - DNA, 33 bp, Homo sapien
ttgtcctggtgccttcactacattttctgacca

SEQ ID NO: 868780 - DNA, 33 bp, Homo sapien
ttgtcctggtgccttcgctacattttctgacca

SEQ ID NO: 868781 - DNA, 33 bp, Homo sapien
agctgcttgctagatacagtatacaccatgttt

SEQ ID NO: 868782 - DNA, 33 bp, Homo sapien
agctgcttgctagatatagtatacaccatgttt

SEQ ID NO: 868783 - DNA, 33 bp, Homo sapien
acatagtgagacccccaagaccctcatctctac

SEQ ID NO: 868784 - DNA, 33 bp, Homo sapien
acatagtgagacccccgagaccctcatctctac

SEQ ID NO: 868785 - DNA, 33 bp, Homo sapien
tcctgagattgctgaaactgccttaaaatcttt

SEQ ID NO: 868786 - DNA, 33 bp, Homo sapien
tcctgagattgctgaagctgccttaaaatcttt

SEQ ID NO: 868787 - DNA, 33 bp, Homo sapien
ggagtcaagtcctagaccttcctgtaactgatt

SEQ ID NO: 868788 - DNA, 33 bp, Homo sapien
ggagtcaagtcctagatcttcctgtaactgatt

SEQ ID NO: 868789 - DNA, 33 bp, Homo sapien
gaacctttagtgattcaatgactggctcaaagg

SEQ ID NO: 868790 - DNA, 33 bp, Homo sapien
gaacctttagtgattcgatgactggctcaaagg

SEQ ID NO: 868791 - DNA, 33 bp, Homo sapien
tcattattctgcttcccgatactttcaccgcat

SEQ ID NO: 868792 - DNA, 33 bp, Homo sapien
tcattattctgcttcctgatactttcaccgcat

SEQ ID NO: 868793 - DNA, 33 bp, Homo sapien
ctttgagttaatagcccactgtgaagaagtaaa

SEQ ID NO: 868794 - DNA, 33 bp, Homo sapien
ctttgagttaatagcctactgtgaagaagtaaa

SEQ ID NO: 868795 - DNA, 33 bp, Homo sapien
tggtgtgctaaagaaacgtggactctaactggg

SEQ ID NO: 868796 - DNA, 33 bp, Homo sapien
tggtgtgctaaagaaatgtggactctaactggg

SEQ ID NO: 868797 - DNA, 33 bp, Homo sapien
agttatgggctgaaaaatcctgagtaaatataa

SEQ ID NO: 868798 - DNA, 33 bp, Homo sapien
agttatgggctgaaaagtcctgagtaaatataa

SEQ ID NO: 868799 - DNA, 33 bp, Homo sapien
gtctcttaacttggcaactgaagaaaatatggg

SEQ ID NO: 868800 - DNA, 33 bp, Homo sapien
gtctcttaacttggcacctgaagaaaatatggg

SEQ ID NO: 868801 - DNA, 33 bp, Homo sapien
tatgtcgatgaagagacgtttacaatgatgttc

SEQ ID NO: 868802 - DNA, 33 bp, Homo sapien
tatgtcgatgaagagatgtttacaatgatgttc

SEQ ID NO: 868803 - DNA, 33 bp, Homo sapien
cagttacgtttgaaagcaacttggcaatatgta

SEQ ID NO: 868804 - DNA, 33 bp, Homo sapien
cagttacgtttgaaaggaacttggcaatatgta

SEQ ID NO: 868805 - DNA, 33 bp, Homo sapien
gtagaaaagtagtgagaccccaaagtgacacaa

SEQ ID NO: 868806 - DNA, 33 bp, Homo sapien
gtagaaaagtagtgagtccccaaagtgacacaa

SEQ ID NO: 868807 - DNA, 33 bp, Homo sapien
atggaatcatgctatacgcacagtctttatctt

SEQ ID NO: 868808 - DNA, 33 bp, Homo sapien
atggaatcatgctatatgcacagtctttatctt

SEQ ID NO: 868809 - DNA, 33 bp, Homo sapien
acttcatccatgataagagtagaacttttgaag

SEQ ID NO: 868810 - DNA, 33 bp, Homo sapien
acttcatccatgataatagtagaacttttgaag

SEQ ID NO: 868811 - DNA, 33 bp, Homo sapien
gatcttctaattcaaaagactgatgaaatgaaa

SEQ ID NO: 868812 - DNA, 33 bp, Homo sapien
gatcttctaattcaaaggactgatgaaatgaaa

SEQ ID NO: 868813 - DNA, 33 bp, Homo sapien
cctcctcttcacagtaagtctgatgcttggtgc

SEQ ID NO: 868814 - DNA, 33 bp, Homo sapien
cctcctcttcacagtaggtctgatgcttggtgc

SEQ ID NO: 868815 - DNA, 33 bp, Homo sapien
gaattttatcgtaaaaacaaggacctcttgaag

SEQ ID NO: 868816 - DNA, 33 bp, Homo sapien
gaattttatcgtaaaagcaaggacctcttgaag

SEQ ID NO: 868817 - DNA, 33 bp, Homo sapien
tctggcctcattcctcaagacattttccctttc

SEQ ID NO: 868818 - DNA, 33 bp, Homo sapien
tctggcctcattcctcgagacattttccctttc

SEQ ID NO: 868819 - DNA, 33 bp, Homo sapien
aggagccctagatatccaaacctttacaagccc

SEQ ID NO: 868820 - DNA, 33 bp, Homo sapien
aggagccctagatatctaaacctttacaagccc

SEQ ID NO: 868821 - DNA, 33 bp, Homo sapien
tgccagtgaagataggaatcctgctctacaagt

SEQ ID NO: 868822 - DNA, 33 bp, Homo sapien
tgccagtgaagatagggatcctgctctacaagt

SEQ ID NO: 868823 - DNA, 33 bp, Homo sapien
ccagttttgtaaggcccgatcactctgtggtta

SEQ ID NO: 868824 - DNA, 33 bp, Homo sapien
ccagttttgtaaggcctgatcactctgtggtta

SEQ ID NO: 868825 - DNA, 33 bp, Homo sapien
agaaaaagcatgggaagattagcgattagacag

SEQ ID NO: 868826 - DNA, 33 bp, Homo sapien
agaaaaagcatgggaatattagcgattagacag

SEQ ID NO: 868827 - DNA, 33 bp, Homo sapien
cttgagtgatccctgcagtattgtttctactag

SEQ ID NO: 868828 - DNA, 33 bp, Homo sapien
cttgagtgatccctgcggtattgtttctactag

SEQ ID NO: 868829 - DNA, 33 bp, Homo sapien
attgaggtatagtctgcacgttgaacatgaatt

SEQ ID NO: 868830 - DNA, 33 bp, Homo sapien
attgaggtatagtctgtacgttgaacatgaatt

SEQ ID NO: 868831 - DNA, 33 bp, Homo sapien
cagactaaatgacatacgacactttcctcagaa

SEQ ID NO: 868832 - DNA, 33 bp, Homo sapien
cagactaaatgacatatgacactttcctcagaa

SEQ ID NO: 868833 - DNA, 33 bp, Homo sapien
tttcagaagagtcagaagattggattttgaata

SEQ ID NO: 868834 - DNA, 33 bp, Homo sapien
tttcagaagagtcagacgattggattttgaata

SEQ ID NO: 868835 - DNA, 33 bp, Homo sapien
gcactggctttgacccacagactggagtttgct

SEQ ID NO: 868836 - DNA, 33 bp, Homo sapien
gcactggctttgacccgcagactggagtttgct

SEQ ID NO: 868837 - DNA, 33 bp, Homo sapien
gactggagtttgctgaaccttggtttaaattat

SEQ ID NO: 868838 - DNA, 33 bp, Homo sapien
gactggagtttgctgacccttggtttaaattat

SEQ ID NO: 868839 - DNA, 33 bp, Homo sapien
catgttatggaaagcacgaataccggtcaagta

SEQ ID NO: 868840 - DNA, 33 bp, Homo sapien
catgttatggaaagcaggaataccggtcaagta

SEQ ID NO: 868841 - DNA, 33 bp, Homo sapien
agcaccaacaattatcaacttatatccagtatg

SEQ ID NO: 868842 - DNA, 33 bp, Homo sapien
agcaccaacaattatcgacttatatccagtatg

SEQ ID NO: 868843 - DNA, 33 bp, Homo sapien
accaaaaatggtggtacggaaagaagggctgat

SEQ ID NO: 868844 - DNA, 33 bp, Homo sapien
accaaaaatggtggtatggaaagaagggctgat

SEQ ID NO: 868845 - DNA, 33 bp, Homo sapien
agagcagtcaatgcaaaacacctaaaagaccaa

SEQ ID NO: 868846 - DNA, 33 bp, Homo sapien
agagcagtcaatgcaagacacctaaaagaccaa

SEQ ID NO: 868847 - DNA, 33 bp, Homo sapien
cgtcataaagtccagaaatatctaaatacgaat

SEQ ID NO: 868848 - DNA, 33 bp, Homo sapien
cgtcataaagtccagagatatctaaatacgaat

SEQ ID NO: 868849 - DNA, 33 bp, Homo sapien
cctaattcagagttcacggatgcaggtgaccaa

SEQ ID NO: 868850 - DNA, 33 bp, Homo sapien
cctaattcagagttcatggatgcaggtgaccaa

SEQ ID NO: 868851 - DNA, 33 bp, Homo sapien
ctaccactgcttctcactcctggctgatctcag

SEQ ID NO: 868852 - DNA, 33 bp, Homo sapien
ctaccactgcttctcattcctggctgatctcag

SEQ ID NO: 868853 - DNA, 33 bp, Homo sapien
gcactcacctctgaacacttaagaaaaagactc

SEQ ID NO: 868854 - DNA, 33 bp, Homo sapien
gcactcacctctgaacccttaagaaaaagactc

SEQ ID NO: 868855 - DNA, 33 bp, Homo sapien
ctgggataatgttacaatacactctggagcaga

SEQ ID NO: 868856 - DNA, 33 bp, Homo sapien
ctgggataatgttacagtacactctggagcaga

SEQ ID NO: 868857 - DNA, 33 bp, Homo sapien
aacctaatgtattccactctcagggttcacaat

SEQ ID NO: 868858 - DNA, 33 bp, Homo sapien
aacctaatgtattccattctcagggttcacaat

SEQ ID NO: 868859 - DNA, 33 bp, Homo sapien
gaacttttaatgatcaagtaattccatacaata

SEQ ID NO: 868860 - DNA, 33 bp, Homo sapien
gaacttttaatgatcaggtaattccatacaata

SEQ ID NO: 868861 - DNA, 33 bp, Homo sapien
tgtttttcaagttgaaatagctcactcagtctc

SEQ ID NO: 868862 - DNA, 33 bp, Homo sapien
tgtttttcaagttgaagtagctcactcagtctc

SEQ ID NO: 868863 - DNA, 33 bp, Homo sapien
gactaaacgctacctacgctcaatgttccacac

SEQ ID NO: 868864 - DNA, 33 bp, Homo sapien
gactaaacgctacctatgctcaatgttccacac

SEQ ID NO: 868865 - DNA, 33 bp, Homo sapien
attaattagtaagttagaaagtgactcatgttg

SEQ ID NO: 868866 - DNA, 33 bp, Homo sapien
attaattagtaagttataaagtgactcatgttg

SEQ ID NO: 868867 - DNA, 33 bp, Homo sapien
ttaaatagccatacataaagactaaaaccatga

SEQ ID NO: 868868 - DNA, 33 bp, Homo sapien
ttaaatagccatacattaagactaaaaccatga

SEQ ID NO: 868869 - DNA, 33 bp, Homo sapien
attttctatgttagcgcatgttagaatatttat

SEQ ID NO: 868870 - DNA, 33 bp, Homo sapien
attttctatgttagcgtatgttagaatatttat

SEQ ID NO: 868871 - DNA, 33 bp, Homo sapien
cccctttttttagtgacaactgacaacattcta

SEQ ID NO: 868872 - DNA, 33 bp, Homo sapien
cccctttttttagtgataactgacaacattcta

SEQ ID NO: 868873 - DNA, 33 bp, Homo sapien
taaatagagatctccacgtaatgaaccactttc

SEQ ID NO: 868874 - DNA, 33 bp, Homo sapien
taaatagagatctccatgtaatgaaccactttc

SEQ ID NO: 868875 - DNA, 33 bp, Homo sapien
catctttgatagaccaatggaataagagagaat

SEQ ID NO: 868876 - DNA, 33 bp, Homo sapien
catctttgatagaccagtggaataagagagaat

SEQ ID NO: 868877 - DNA, 33 bp, Homo sapien
gagcaaaaatggcaaaaagaatgcagtgggtgg

SEQ ID NO: 868878 - DNA, 33 bp, Homo sapien
gagcaaaaatggcaaagagaatgcagtgggtgg

SEQ ID NO: 868879 - DNA, 33 bp, Homo sapien
ttgagtccatgtgtcacgtatattgaaaccagc

SEQ ID NO: 868880 - DNA, 33 bp, Homo sapien
ttgagtccatgtgtcatgtatattgaaaccagc

SEQ ID NO: 868881 - DNA, 33 bp, Homo sapien
agatgatgtgtcaacacaagaggtgggcttgta

SEQ ID NO: 868882 - DNA, 33 bp, Homo sapien
agatgatgtgtcaacagaagaggtgggcttgta

SEQ ID NO: 868883 - DNA, 33 bp, Homo sapien
tgtgacctcttatcccacggactgacccttgag

SEQ ID NO: 868884 - DNA, 33 bp, Homo sapien
tgtgacctcttatcccgcggactgacccttgag

SEQ ID NO: 868885 - DNA, 33 bp, Homo sapien
ccagagacatggacaacacctaggaagcacccc

SEQ ID NO: 868886 - DNA, 33 bp, Homo sapien
ccagagacatggacaatacctaggaagcacccc

SEQ ID NO: 868887 - DNA, 33 bp, Homo sapien
actgtgataagtgccaatgaagaaaggagagat

SEQ ID NO: 868888 - DNA, 33 bp, Homo sapien
actgtgataagtgccagtgaagaaaggagagat

SEQ ID NO: 868889 - DNA, 33 bp, Homo sapien
ctttataagaatgcacaagctataatgtgatat

SEQ ID NO: 868890 - DNA, 33 bp, Homo sapien
ctttataagaatgcacgagctataatgtgatat

SEQ ID NO: 868891 - DNA, 33 bp, Homo sapien
gaaccaggctcttcgacaaaatcagcaccacaa

SEQ ID NO: 868892 - DNA, 33 bp, Homo sapien
gaaccaggctcttcgataaaatcagcaccacaa

SEQ ID NO: 868893 - DNA, 33 bp, Homo sapien
tctcttttagtagctaataaggcatgaaagtag

SEQ ID NO: 868894 - DNA, 33 bp, Homo sapien
tctcttttagtagctagtaaggcatgaaagtag

SEQ ID NO: 868895 - DNA, 33 bp, Homo sapien
cccatcaggctctccagaaaggtagaatgacag

SEQ ID NO: 868896 - DNA, 33 bp, Homo sapien
cccatcaggctctccataaaggtagaatgacag

SEQ ID NO: 868897 - DNA, 33 bp, Homo sapien
tatacttattgtcactcaattgtaccctcaaaa

SEQ ID NO: 868898 - DNA, 33 bp, Homo sapien
tatacttattgtcactgaattgtaccctcaaaa

SEQ ID NO: 868899 - DNA, 33 bp, Homo sapien
agcaaaataatggtcaccagggactagggctgc

SEQ ID NO: 868900 - DNA, 33 bp, Homo sapien
agcaaaataatggtcatcagggactagggctgc

SEQ ID NO: 868901 - DNA, 33 bp, Homo sapien
tttcctaaatggaaacaagagaatttcagaaaa

SEQ ID NO: 868902 - DNA, 33 bp, Homo sapien
tttcctaaatggaaacgagagaatttcagaaaa

SEQ ID NO: 868903 - DNA, 33 bp, Homo sapien
tgcccaaggatgcacaactaattgaataaggat

SEQ ID NO: 868904 - DNA, 33 bp, Homo sapien
tgcccaaggatgcacagctaattgaataaggat

SEQ ID NO: 868905 - DNA, 33 bp, Homo sapien
tatacaaagccagatgaatatcttaacaaagag

SEQ ID NO: 868906 - DNA, 33 bp, Homo sapien
tatacaaagccagatggatatcttaacaaagag

SEQ ID NO: 868907 - DNA, 33 bp, Homo sapien
cagtgtggaaacaataaattattacaggtgttt

SEQ ID NO: 868908 - DNA, 33 bp, Homo sapien
cagtgtggaaacaatacattattacaggtgttt

SEQ ID NO: 868909 - DNA, 33 bp, Homo sapien
ggccatgcttgggcacaagaaattggtcaaggc

SEQ ID NO: 868910 - DNA, 33 bp, Homo sapien
ggccatgcttgggcacgagaaattggtcaaggc

SEQ ID NO: 868911 - DNA, 33 bp, Homo sapien
cttacctttggtcatcagacatgtagttttcta

SEQ ID NO: 868912 - DNA, 33 bp, Homo sapien
cttacctttggtcatcggacatgtagttttcta

SEQ ID NO: 868913 - DNA, 33 bp, Homo sapien
gtgtcatgaagtctacgacatgggcgctgctaa

SEQ ID NO: 868914 - DNA, 33 bp, Homo sapien
gtgtcatgaagtctactacatgggcgctgctaa

SEQ ID NO: 868915 - DNA, 33 bp, Homo sapien
aagagaaactggaggcaactaaacatgaattag

SEQ ID NO: 868916 - DNA, 33 bp, Homo sapien
aagagaaactggaggcgactaaacatgaattag

SEQ ID NO: 868917 - DNA, 33 bp, Homo sapien
tgatgagtaaatgaaccgcatagggaggagcta

SEQ ID NO: 868918 - DNA, 33 bp, Homo sapien
tgatgagtaaatgaactgcatagggaggagcta

SEQ ID NO: 868919 - DNA, 33 bp, Homo sapien
aactgtacctggttcacaaaactgaggcatcac

SEQ ID NO: 868920 - DNA, 33 bp, Homo sapien
aactgtacctggttcataaaactgaggcatcac

SEQ ID NO: 868921 - DNA, 33 bp, Homo sapien
gtatagtttcacatcacagaggcaaagagcaac

SEQ ID NO: 868922 - DNA, 33 bp, Homo sapien
gtatagtttcacatcatagaggcaaagagcaac

SEQ ID NO: 868923 - DNA, 33 bp, Homo sapien
tgttgatgctggaaaacggtattttagttgtgg

SEQ ID NO: 868924 - DNA, 33 bp, Homo sapien
tgttgatgctggaaaatggtattttagttgtgg

SEQ ID NO: 868925 - DNA, 33 bp, Homo sapien
gtatcagaaattcccacgaaaggaaataaaagg

SEQ ID NO: 868926 - DNA, 33 bp, Homo sapien
gtatcagaaattcccaggaaaggaaataaaagg

SEQ ID NO: 868927 - DNA, 33 bp, Homo sapien
aacaatgaggaaataactagagagccaggaata

SEQ ID NO: 868928 - DNA, 33 bp, Homo sapien
aacaatgaggaaataattagagagccaggaata

SEQ ID NO: 868929 - DNA, 33 bp, Homo sapien
ccaatctatgataaatcagtaggccatcgttaa

SEQ ID NO: 868930 - DNA, 33 bp, Homo sapien
ccaatctatgataaatgagtaggccatcgttaa

SEQ ID NO: 868931 - DNA, 33 bp, Homo sapien
ctgttcttcagaaatggagaggtaaagattgtc

SEQ ID NO: 868932 - DNA, 33 bp, Homo sapien
ctgttcttcagaaatgtagaggtaaagattgtc

SEQ ID NO: 868933 - DNA, 33 bp, Homo sapien
tgtcactcgactaaaacatggaaggacatccta

SEQ ID NO: 868934 - DNA, 33 bp, Homo sapien
tgtcactcgactaaaatatggaaggacatccta

SEQ ID NO: 868935 - DNA, 33 bp, Homo sapien
agggattatagaaaagaaagttatgaaacaatg

SEQ ID NO: 868936 - DNA, 33 bp, Homo sapien
agggattatagaaaagcaagttatgaaacaatg

SEQ ID NO: 868937 - DNA, 33 bp, Homo sapien
cattgacactaattgaccagccatactcttctt

SEQ ID NO: 868938 - DNA, 33 bp, Homo sapien
cattgacactaattgatcagccatactcttctt

SEQ ID NO: 868939 - DNA, 33 bp, Homo sapien
agcttgtgaatgaatgcaatgtcctcttatctc

SEQ ID NO: 868940 - DNA, 33 bp, Homo sapien
agcttgtgaatgaatgtaatgtcctcttatctc

SEQ ID NO: 868941 - DNA, 33 bp, Homo sapien
caaggcctcagccagggaagactttcctgagta

SEQ ID NO: 868942 - DNA, 33 bp, Homo sapien
caaggcctcagccaggtaagactttcctgagta

SEQ ID NO: 868943 - DNA, 33 bp, Homo sapien
aggcactacaaaaaacagcacatttgaaaaaga

SEQ ID NO: 868944 - DNA, 33 bp, Homo sapien
aggcactacaaaaaacggcacatttgaaaaaga

SEQ ID NO: 868945 - DNA, 33 bp, Homo sapien
ctctctcctaccttaactggtttccttgatgct

SEQ ID NO: 868946 - DNA, 33 bp, Homo sapien
ctctctcctaccttaattggtttccttgatgct

SEQ ID NO: 868947 - DNA, 33 bp, Homo sapien
tgaagcttcaaagggaagtcaaggttacggcac

SEQ ID NO: 868948 - DNA, 33 bp, Homo sapien
tgaagcttcaaagggatgtcaaggttacggcac

SEQ ID NO: 868949 - DNA, 33 bp, Homo sapien
aagttattcctgagaactgaatcacctaagttc

SEQ ID NO: 868950 - DNA, 33 bp, Homo sapien
aagttattcctgagaattgaatcacctaagttc

SEQ ID NO: 868951 - DNA, 33 bp, Homo sapien
tctgtatcagttacaaagttttcagcttcaact

SEQ ID NO: 868952 - DNA, 33 bp, Homo sapien
tctgtatcagttacaatgttttcagcttcaact

SEQ ID NO: 868953 - DNA, 33 bp, Homo sapien
gagagaagcccaacaaataatctatacatttat

SEQ ID NO: 868954 - DNA, 33 bp, Homo sapien
gagagaagcccaacaactaatctatacatttat

SEQ ID NO: 868955 - DNA, 33 bp, Homo sapien
aaaacaactgtctcaaattctatagatgctaaa

SEQ ID NO: 868956 - DNA, 33 bp, Homo sapien
aaaacaactgtctcaacttctatagatgctaaa

SEQ ID NO: 868957 - DNA, 33 bp, Homo sapien
ctgtctgagcataacactgcatttcaaatccaa

SEQ ID NO: 868958 - DNA, 33 bp, Homo sapien
ctgtctgagcataacattgcatttcaaatccaa

SEQ ID NO: 868959 - DNA, 33 bp, Homo sapien
tttcgactgcagagaagaaatggatcctccagt

SEQ ID NO: 868960 - DNA, 33 bp, Homo sapien
tttcgactgcagagaataaatggatcctccagt

SEQ ID NO: 868961 - DNA, 33 bp, Homo sapien
cctgaggggctgaaaccacagatagcaaagagg

SEQ ID NO: 868962 - DNA, 33 bp, Homo sapien
cctgaggggctgaaacgacagatagcaaagagg

SEQ ID NO: 868963 - DNA, 33 bp, Homo sapien
ccctcttctacctctacggaacagatttacctt

SEQ ID NO: 868964 - DNA, 33 bp, Homo sapien
ccctcttctacctctatggaacagatttacctt

SEQ ID NO: 868965 - DNA, 33 bp, Homo sapien
atttaaattgttgacaagaatagaatcatagaa

SEQ ID NO: 868966 - DNA, 33 bp, Homo sapien
atttaaattgttgacacgaatagaatcatagaa

SEQ ID NO: 868967 - DNA, 33 bp, Homo sapien
tatatttggacttaaaagatgagttgtttttgt

SEQ ID NO: 868968 - DNA, 33 bp, Homo sapien
tatatttggacttaaaggatgagttgtttttgt

SEQ ID NO: 868969 - DNA, 33 bp, Homo sapien
tgtttttgtagatagagaaatggcagaataagt

SEQ ID NO: 868970 - DNA, 33 bp, Homo sapien
tgtttttgtagatagataaatggcagaataagt

SEQ ID NO: 868971 - DNA, 33 bp, Homo sapien
tagaggccacagagtacaatgccagaaaagaga

SEQ ID NO: 868972 - DNA, 33 bp, Homo sapien
tagaggccacagagtagaatgccagaaaagaga

SEQ ID NO: 868973 - DNA, 33 bp, Homo sapien
tgtaaaatatccccaccgacacatacaattccc

SEQ ID NO: 868974 - DNA, 33 bp, Homo sapien
tgtaaaatatccccactgacacatacaattccc

SEQ ID NO: 868975 - DNA, 33 bp, Homo sapien
atgtaatggatatatacgtagcttggccaggca

SEQ ID NO: 868976 - DNA, 33 bp, Homo sapien
atgtaatggatatatatgtagcttggccaggca

SEQ ID NO: 868977 - DNA, 33 bp, Homo sapien
gcctgatccagccacaaggtgaaaatcactatg

SEQ ID NO: 868978 - DNA, 33 bp, Homo sapien
gcctgatccagccacagggtgaaaatcactatg

SEQ ID NO: 868979 - DNA, 33 bp, Homo sapien
gaaagtcagacaaggaatatcatgcaaaggcca

SEQ ID NO: 868980 - DNA, 33 bp, Homo sapien
gaaagtcagacaaggactatcatgcaaaggcca

SEQ ID NO: 868981 - DNA, 33 bp, Homo sapien
aagcatacaacataggacaagagtagagaaaca

SEQ ID NO: 868982 - DNA, 33 bp, Homo sapien
aagcatacaacatagggcaagagtagagaaaca

SEQ ID NO: 868983 - DNA, 33 bp, Homo sapien
ggcttaccaggagcaactgtggaaagggtatca

SEQ ID NO: 868984 - DNA, 33 bp, Homo sapien
ggcttaccaggagcaattgtggaaagggtatca

SEQ ID NO: 868985 - DNA, 33 bp, Homo sapien
gccatcaatgcccaggaaatactaatcccataa

SEQ ID NO: 868986 - DNA, 33 bp, Homo sapien
gccatcaatgcccaggcaatactaatcccataa

SEQ ID NO: 868987 - DNA, 33 bp, Homo sapien
gcaaacagaaaagtgacggttggatttgacaat

SEQ ID NO: 868988 - DNA, 33 bp, Homo sapien
gcaaacagaaaagtgatggttggatttgacaat

SEQ ID NO: 868989 - DNA, 33 bp, Homo sapien
aatatcttccaaatacaagtctctgggtaagat

SEQ ID NO: 868990 - DNA, 33 bp, Homo sapien
aatatcttccaaatacgagtctctgggtaagat

SEQ ID NO: 868991 - DNA, 33 bp, Homo sapien
gtgagaactttgacaacgaggagtggctttcat

SEQ ID NO: 868992 - DNA, 33 bp, Homo sapien
gtgagaactttgacaatgaggagtggctttcat

SEQ ID NO: 868993 - DNA, 33 bp, Homo sapien
cttacaatactgcagagatatgccttttattat

SEQ ID NO: 868994 - DNA, 33 bp, Homo sapien
cttacaatactgcagatatatgccttttattat

SEQ ID NO: 868995 - DNA, 33 bp, Homo sapien
agtctgacttccacgaaaggaatatgtggacaa

SEQ ID NO: 868996 - DNA, 33 bp, Homo sapien
agtctgacttccacgagaggaatatgtggacaa

SEQ ID NO: 868997 - DNA, 33 bp, Homo sapien
cccttggcatagctgacggtgctaattcaaatt

SEQ ID NO: 868998 - DNA, 33 bp, Homo sapien
cccttggcatagctgatggtgctaattcaaatt

SEQ ID NO: 868999 - DNA, 33 bp, Homo sapien
ggatctagcagcaaacaaatgttaaggctagga

SEQ ID NO: 869000 - DNA, 33 bp, Homo sapien
ggatctagcagcaaacgaatgttaaggctagga

SEQ ID NO: 869001 - DNA, 33 bp, Homo sapien
tattttctcactaacaatgtctccttaacccct

SEQ ID NO: 869002 - DNA, 33 bp, Homo sapien
tattttctcactaacagtgtctccttaacccct

SEQ ID NO: 869003 - DNA, 33 bp, Homo sapien
tgtgaagttttcatggacacttatcacttcccc

SEQ ID NO: 869004 - DNA, 33 bp, Homo sapien
tgtgaagttttcatgggcacttatcacttcccc

SEQ ID NO: 869005 - DNA, 33 bp, Homo sapien
aatgttgaggctgatacgactacttaaatattt

SEQ ID NO: 869006 - DNA, 33 bp, Homo sapien
aatgttgaggctgatatgactacttaaatattt

SEQ ID NO: 869007 - DNA, 33 bp, Homo sapien
gacactaaaaaatatagctctgtacaggcatca

SEQ ID NO: 869008 - DNA, 33 bp, Homo sapien
gacactaaaaaatatatctctgtacaggcatca

SEQ ID NO: 869009 - DNA, 33 bp, Homo sapien
tgtccattgaaacaaccgtaactcagggcttac

SEQ ID NO: 869010 - DNA, 33 bp, Homo sapien
tgtccattgaaacaactgtaactcagggcttac

SEQ ID NO: 869011 - DNA, 33 bp, Homo sapien
taaacaactcataacaaactcaaggaatttcta

SEQ ID NO: 869012 - DNA, 33 bp, Homo sapien
taaacaactcataacagactcaaggaatttcta

SEQ ID NO: 869013 - DNA, 33 bp, Homo sapien
ttacttctcagtcttacagcctggaaatagttt

SEQ ID NO: 869014 - DNA, 33 bp, Homo sapien
ttacttctcagtcttagagcctggaaatagttt

SEQ ID NO: 869015 - DNA, 33 bp, Homo sapien
tattcccaggatagtaataaaagtgccccgtag

SEQ ID NO: 869016 - DNA, 33 bp, Homo sapien
tattcccaggatagtactaaaagtgccccgtag

SEQ ID NO: 869017 - DNA, 33 bp, Homo sapien
aagtcagaaataatctcaaatacctggtctcag

SEQ ID NO: 869018 - DNA, 33 bp, Homo sapien
aagtcagaaataatcttaaatacctggtctcag

SEQ ID NO: 869019 - DNA, 33 bp, Homo sapien
ctgggtattttctctacgtatatctgttctcca

SEQ ID NO: 869020 - DNA, 33 bp, Homo sapien
ctgggtattttctctatgtatatctgttctcca

SEQ ID NO: 869021 - DNA, 33 bp, Homo sapien
ggaatcatgcctcagaaatttttagcttcaagt

SEQ ID NO: 869022 - DNA, 33 bp, Homo sapien
ggaatcatgcctcagatatttttagcttcaagt

SEQ ID NO: 869023 - DNA, 33 bp, Homo sapien
aaactaactgaaaatgaagaggaacatggtgcc

SEQ ID NO: 869024 - DNA, 33 bp, Homo sapien
aaactaactgaaaatgcagaggaacatggtgcc

SEQ ID NO: 869025 - DNA, 33 bp, Homo sapien
ttttcacaggtaatcactgagatttggaaaatg

SEQ ID NO: 869026 - DNA, 33 bp, Homo sapien
ttttcacaggtaatcattgagatttggaaaatg

SEQ ID NO: 869027 - DNA, 33 bp, Homo sapien
acacccagtgcaacaccgaagttagcagagtca

SEQ ID NO: 869028 - DNA, 33 bp, Homo sapien
acacccagtgcaacacggaagttagcagagtca

SEQ ID NO: 869029 - DNA, 33 bp, Homo sapien
attgaatatggatacaaacgtcttattttagtt

SEQ ID NO: 869030 - DNA, 33 bp, Homo sapien
attgaatatggatacagacgtcttattttagtt

SEQ ID NO: 869031 - DNA, 33 bp, Homo sapien
ctccatccagacagcaacactttctttttaata

SEQ ID NO: 869032 - DNA, 33 bp, Homo sapien
ctccatccagacagcatcactttctttttaata

SEQ ID NO: 869033 - DNA, 33 bp, Homo sapien
ggatggagcaacttgaagtagaccttgaaggat

SEQ ID NO: 869034 - DNA, 33 bp, Homo sapien
ggatggagcaacttgaggtagaccttgaaggat

SEQ ID NO: 869035 - DNA, 33 bp, Homo sapien
atctgttatatgaaaacggcttttgatatagtt

SEQ ID NO: 869036 - DNA, 33 bp, Homo sapien
atctgttatatgaaaatggcttttgatatagtt

SEQ ID NO: 869037 - DNA, 33 bp, Homo sapien
acgggggaatggcagacgaaaagcagaatgttc

SEQ ID NO: 869038 - DNA, 33 bp, Homo sapien
acgggggaatggcagatgaaaagcagaatgttc

SEQ ID NO: 869039 - DNA, 33 bp, Homo sapien
aatgagacagacagaaatggtcagcaaagcctc

SEQ ID NO: 869040 - DNA, 33 bp, Homo sapien
aatgagacagacagaattggtcagcaaagcctc

SEQ ID NO: 869041 - DNA, 33 bp, Homo sapien
agggcagggactcgaactgagagctggttaccc

SEQ ID NO: 869042 - DNA, 33 bp, Homo sapien
agggcagggactcgaagtgagagctggttaccc

SEQ ID NO: 869043 - DNA, 33 bp, Homo sapien
atatgccgtatgattcgaagaacctgttaaacc

SEQ ID NO: 869044 - DNA, 33 bp, Homo sapien
atatgccgtatgattctaagaacctgttaaacc

SEQ ID NO: 869045 - DNA, 33 bp, Homo sapien
gaacctgttaaacccacacaagagaaaacattt

SEQ ID NO: 869046 - DNA, 33 bp, Homo sapien
gaacctgttaaacccatacaagagaaaacattt

SEQ ID NO: 869047 - DNA, 33 bp, Homo sapien
tctttgtttctataacacaccatgtggtcatag

SEQ ID NO: 869048 - DNA, 33 bp, Homo sapien
tctttgtttctataactcaccatgtggtcatag

SEQ ID NO: 869049 - DNA, 33 bp, Homo sapien
aaaaacagttatcttcacaaaatgattgcaagg

SEQ ID NO: 869050 - DNA, 33 bp, Homo sapien
aaaaacagttatcttcgcaaaatgattgcaagg

SEQ ID NO: 869051 - DNA, 33 bp, Homo sapien
tggttttataataacaatgatactgtggtgacc

SEQ ID NO: 869052 - DNA, 33 bp, Homo sapien
tggttttataataacagtgatactgtggtgacc

SEQ ID NO: 869053 - DNA, 33 bp, Homo sapien
tttgtagcaagctaagacagcatttgagggtat

SEQ ID NO: 869054 - DNA, 33 bp, Homo sapien
tttgtagcaagctaagtcagcatttgagggtat

SEQ ID NO: 869055 - DNA, 33 bp, Homo sapien
cttcgaactgatagcaatgacagaaaaaataga

SEQ ID NO: 869056 - DNA, 33 bp, Homo sapien
cttcgaactgatagcagtgacagaaaaaataga

SEQ ID NO: 869057 - DNA, 33 bp, Homo sapien
aacatttattgagcacggatttcctttgcacaa

SEQ ID NO: 869058 - DNA, 33 bp, Homo sapien
aacatttattgagcactgatttcctttgcacaa

SEQ ID NO: 869059 - DNA, 33 bp, Homo sapien
ccagactggattgaaacgtaaggaaactctaat

SEQ ID NO: 869060 - DNA, 33 bp, Homo sapien
ccagactggattgaaatgtaaggaaactctaat

SEQ ID NO: 869061 - DNA, 33 bp, Homo sapien
atactggctcaataaccggaaagtccagggata

SEQ ID NO: 869062 - DNA, 33 bp, Homo sapien
atactggctcaataactggaaagtccagggata

SEQ ID NO: 869063 - DNA, 33 bp, Homo sapien
attagcacagagtgaactgctgtttctgtgcct

SEQ ID NO: 869064 - DNA, 33 bp, Homo sapien
attagcacagagtgaattgctgtttctgtgcct

SEQ ID NO: 869065 - DNA, 33 bp, Homo sapien
tgaaaaactgtgagtacccaaagtgtgaaaata

SEQ ID NO: 869066 - DNA, 33 bp, Homo sapien
tgaaaaactgtgagtatccaaagtgtgaaaata

SEQ ID NO: 869067 - DNA, 33 bp, Homo sapien
tacacagcttgttcaggcatggacaaaagcctt

SEQ ID NO: 869068 - DNA, 33 bp, Homo sapien
tacacagcttgttcagtcatggacaaaagcctt

SEQ ID NO: 869069 - DNA, 33 bp, Homo sapien
tcaccctcattctctccaggctggtacatcccg

SEQ ID NO: 869070 - DNA, 33 bp, Homo sapien
tcaccctcattctctctaggctggtacatcccg

SEQ ID NO: 869071 - DNA, 33 bp, Homo sapien
atctaacaggtccgacaagctgaataacacaat

SEQ ID NO: 869072 - DNA, 33 bp, Homo sapien
atctaacaggtccgacgagctgaataacacaat

SEQ ID NO: 869073 - DNA, 33 bp, Homo sapien
atcagtaatcaataaccgaccaaccaaaaaatg

SEQ ID NO: 869074 - DNA, 33 bp, Homo sapien
atcagtaatcaataactgaccaaccaaaaaatg

SEQ ID NO: 869075 - DNA, 33 bp, Homo sapien
tctttctgtgatgaaccgcatttattaatttgc

SEQ ID NO: 869076 - DNA, 33 bp, Homo sapien
tctttctgtgatgaactgcatttattaatttgc

SEQ ID NO: 869077 - DNA, 33 bp, Homo sapien
aatgagttggacttaacctatcagatattaaac

SEQ ID NO: 869078 - DNA, 33 bp, Homo sapien
aatgagttggacttaatctatcagatattaaac

SEQ ID NO: 869079 - DNA, 33 bp, Homo sapien
aactcagggtcaagaaggagagactacagaaat

SEQ ID NO: 869080 - DNA, 33 bp, Homo sapien
aactcagggtcaagaatgagagactacagaaat

SEQ ID NO: 869081 - DNA, 33 bp, Homo sapien
tttgctgcttctccaccactatgatgatgggac

SEQ ID NO: 869082 - DNA, 33 bp, Homo sapien
tttgctgcttctccactactatgatgatgggac

SEQ ID NO: 869083 - DNA, 33 bp, Homo sapien
ctgtgagctaagaaaaagttgtttagttggtag

SEQ ID NO: 869084 - DNA, 33 bp, Homo sapien
ctgtgagctaagaaaaggttgtttagttggtag

SEQ ID NO: 869085 - DNA, 33 bp, Homo sapien
ggacatgcaagaagataaaattcattttgcaat

SEQ ID NO: 869086 - DNA, 33 bp, Homo sapien
ggacatgcaagaagatgaaattcattttgcaat

SEQ ID NO: 869087 - DNA, 33 bp, Homo sapien
gtgacatttggttgtgcacgtagactgaatggg

SEQ ID NO: 869088 - DNA, 33 bp, Homo sapien
gtgacatttggttgtggacgtagactgaatggg

SEQ ID NO: 869089 - DNA, 33 bp, Homo sapien
tgatattgtgggcatgaatggactgtaattgat

SEQ ID NO: 869090 - DNA, 33 bp, Homo sapien
tgatattgtgggcatggatggactgtaattgat

SEQ ID NO: 869091 - DNA, 33 bp, Homo sapien
aatccagcctttctgcagatcaaataaacacca

SEQ ID NO: 869092 - DNA, 33 bp, Homo sapien
aatccagcctttctgcggatcaaataaacacca

SEQ ID NO: 869093 - DNA, 33 bp, Homo sapien
agctctctcacctaggaaaaaacttgatgtgtc

SEQ ID NO: 869094 - DNA, 33 bp, Homo sapien
agctctctcacctagggaaaaacttgatgtgtc

SEQ ID NO: 869095 - DNA, 33 bp, Homo sapien
gcttaaatgtatacacacggtgcttgtaatatt

SEQ ID NO: 869096 - DNA, 33 bp, Homo sapien
gcttaaatgtatacactcggtgcttgtaatatt

SEQ ID NO: 869097 - DNA, 33 bp, Homo sapien
tgatatacaaacagacaaaaataaccccataaa

SEQ ID NO: 869098 - DNA, 33 bp, Homo sapien
tgatatacaaacagaccaaaataaccccataaa

SEQ ID NO: 869099 - DNA, 33 bp, Homo sapien
gtggtgctgtttgggaataataaacattttgat

SEQ ID NO: 869100 - DNA, 33 bp, Homo sapien
gtggtgctgtttgggagtaataaacattttgat

SEQ ID NO: 869101 - DNA, 33 bp, Homo sapien
ttgttctgatttgctaaaaaccttcctgaagtg

SEQ ID NO: 869102 - DNA, 33 bp, Homo sapien
ttgttctgatttgctagaaaccttcctgaagtg

SEQ ID NO: 869103 - DNA, 33 bp, Homo sapien
acttgataatctccctcactagactgtcagctc

SEQ ID NO: 869104 - DNA, 33 bp, Homo sapien
acttgataatctcccttactagactgtcagctc

SEQ ID NO: 869105 - DNA, 33 bp, Homo sapien
cctcttggaggaatgccgatgtagaagagaaca

SEQ ID NO: 869106 - DNA, 33 bp, Homo sapien
cctcttggaggaatgctgatgtagaagagaaca

SEQ ID NO: 869107 - DNA, 33 bp, Homo sapien
taagacttcaagcatcacctttagaagcactct

SEQ ID NO: 869108 - DNA, 33 bp, Homo sapien
taagacttcaagcatcgcctttagaagcactct

SEQ ID NO: 869109 - DNA, 33 bp, Homo sapien
aaaatagaaaggaatcaacacttgggtaagtat

SEQ ID NO: 869110 - DNA, 33 bp, Homo sapien
aaaatagaaaggaatcgacacttgggtaagtat

SEQ ID NO: 869111 - DNA, 33 bp, Homo sapien
tttcaataatacctgacgatgaaccttccagag

SEQ ID NO: 869112 - DNA, 33 bp, Homo sapien
tttcaataatacctgatgatgaaccttccagag

SEQ ID NO: 869113 - DNA, 33 bp, Homo sapien
caggacagcaccacaacctagctctgagtgcca

SEQ ID NO: 869114 - DNA, 33 bp, Homo sapien
caggacagcaccacaatctagctctgagtgcca

SEQ ID NO: 869115 - DNA, 33 bp, Homo sapien
acacaatttcacagaacacccacatcagtcaag

SEQ ID NO: 869116 - DNA, 33 bp, Homo sapien
acacaatttcacagaatacccacatcagtcaag

SEQ ID NO: 869117 - DNA, 33 bp, Homo sapien
tatataaagattgtgaacatgaaagtaattttc

SEQ ID NO: 869118 - DNA, 33 bp, Homo sapien
tatataaagattgtgagcatgaaagtaattttc

SEQ ID NO: 869119 - DNA, 33 bp, Homo sapien
catttctataccaggcacaaaaggaaataatag

SEQ ID NO: 869120 - DNA, 33 bp, Homo sapien
catttctataccaggcgcaaaaggaaataatag

SEQ ID NO: 869121 - DNA, 33 bp, Homo sapien
cataagtagtcggcatcaaaattgatcaatata

SEQ ID NO: 869122 - DNA, 33 bp, Homo sapien
cataagtagtcggcattaaaattgatcaatata

SEQ ID NO: 869123 - DNA, 33 bp, Homo sapien
ccatctggttgactctgacttgtgaagccttca

SEQ ID NO: 869124 - DNA, 33 bp, Homo sapien
ccatctggttgactcttacttgtgaagccttca

SEQ ID NO: 869125 - DNA, 33 bp, Homo sapien
tcttggagaggagcaaagtcttctggtacctcc

SEQ ID NO: 869126 - DNA, 33 bp, Homo sapien
tcttggagaggagcaatgtcttctggtacctcc

SEQ ID NO: 869127 - DNA, 33 bp, Homo sapien
gcactcaacaggggacaggatacgcagggctta

SEQ ID NO: 869128 - DNA, 33 bp, Homo sapien
gcactcaacaggggacgggatacgcagggctta

SEQ ID NO: 869129 - DNA, 33 bp, Homo sapien
accttgtcatgattgcccagtgagtctgtactt

SEQ ID NO: 869130 - DNA, 33 bp, Homo sapien
accttgtcatgattgctcagtgagtctgtactt

SEQ ID NO: 869131 - DNA, 33 bp, Homo sapien
atagctgatttaaactaaaggacagatctctca

SEQ ID NO: 869132 - DNA, 33 bp, Homo sapien
atagctgatttaaactgaaggacagatctctca

SEQ ID NO: 869133 - DNA, 33 bp, Homo sapien
aagtagttggataatcccaaagtatcagttctc

SEQ ID NO: 869134 - DNA, 33 bp, Homo sapien
aagtagttggataatctcaaagtatcagttctc

SEQ ID NO: 869135 - DNA, 33 bp, Homo sapien
cagactttcaaaggcaagtgttcttagaggaaa

SEQ ID NO: 869136 - DNA, 33 bp, Homo sapien
cagactttcaaaggcacgtgttcttagaggaaa

SEQ ID NO: 869137 - DNA, 33 bp, Homo sapien
acagataattccactaactatagaaaaatctat

SEQ ID NO: 869138 - DNA, 33 bp, Homo sapien
acagataattccactagctatagaaaaatctat

SEQ ID NO: 869139 - DNA, 33 bp, Homo sapien
gtttgtgcacattgtacctttttcctttcactc

SEQ ID NO: 869140 - DNA, 33 bp, Homo sapien
gtttgtgcacattgtatctttttcctttcactc

SEQ ID NO: 869141 - DNA, 33 bp, Homo sapien
tcactggaaacagtgacgaaataaggcattata

SEQ ID NO: 869142 - DNA, 33 bp, Homo sapien
tcactggaaacagtgatgaaataaggcattata

SEQ ID NO: 869143 - DNA, 33 bp, Homo sapien
aatatttatatggctcactagtttctcagacag

SEQ ID NO: 869144 - DNA, 33 bp, Homo sapien
aatatttatatggctcgctagtttctcagacag

SEQ ID NO: 869145 - DNA, 33 bp, Homo sapien
tcctgccactgctagccataaaaaacacagtgt

SEQ ID NO: 869146 - DNA, 33 bp, Homo sapien
tcctgccactgctagcgataaaaaacacagtgt

SEQ ID NO: 869147 - DNA, 33 bp, Homo sapien
gaatttgaaataatacacactaaaaaggtagtg

SEQ ID NO: 869148 - DNA, 33 bp, Homo sapien
gaatttgaaataatactcactaaaaaggtagtg

SEQ ID NO: 869149 - DNA, 33 bp, Homo sapien
tttcatttttaagcagactatagctttcaaaat

SEQ ID NO: 869150 - DNA, 33 bp, Homo sapien
tttcatttttaagcagcctatagctttcaaaat

SEQ ID NO: 869151 - DNA, 33 bp, Homo sapien
atgcaattacagaaagcctccaattaaaggagc

SEQ ID NO: 869152 - DNA, 33 bp, Homo sapien
atgcaattacagaaaggctccaattaaaggagc

SEQ ID NO: 869153 - DNA, 33 bp, Homo sapien
aactcatattattaacagaagcatgtgattgat

SEQ ID NO: 869154 - DNA, 33 bp, Homo sapien
aactcatattattaacggaagcatgtgattgat

SEQ ID NO: 869155 - DNA, 33 bp, Homo sapien
ctaacatccttttctaccctgagttttaaatga

SEQ ID NO: 869156 - DNA, 33 bp, Homo sapien
ctaacatccttttctatcctgagttttaaatga

SEQ ID NO: 869157 - DNA, 33 bp, Homo sapien
ggagcagtcaatgtaacagcattcaagaaattc

SEQ ID NO: 869158 - DNA, 33 bp, Homo sapien
ggagcagtcaatgtaatagcattcaagaaattc

SEQ ID NO: 869159 - DNA, 33 bp, Homo sapien
gtgtatagagatattcccattttacagataagg

SEQ ID NO: 869160 - DNA, 33 bp, Homo sapien
gtgtatagagatattcgcattttacagataagg

SEQ ID NO: 869161 - DNA, 33 bp, Homo sapien
ttttgacagtcttcgacggccacttgctttcct

SEQ ID NO: 869162 - DNA, 33 bp, Homo sapien
ttttgacagtcttcgatggccacttgctttcct

SEQ ID NO: 869163 - DNA, 33 bp, Homo sapien
gattaaattggactcacctgtataatccataaa

SEQ ID NO: 869164 - DNA, 33 bp, Homo sapien
gattaaattggactcatctgtataatccataaa

SEQ ID NO: 869165 - DNA, 33 bp, Homo sapien
ccccttatctacaatacgcagcccatgaagcca

SEQ ID NO: 869166 - DNA, 33 bp, Homo sapien
ccccttatctacaatatgcagcccatgaagcca

SEQ ID NO: 869167 - DNA, 33 bp, Homo sapien
gtcctctttgtacaggcccgtgggagaaattaa

SEQ ID NO: 869168 - DNA, 33 bp, Homo sapien
gtcctctttgtacagggccgtgggagaaattaa

SEQ ID NO: 869169 - DNA, 33 bp, Homo sapien
gagaatatgaagcttcaaatggagcagaatttt

SEQ ID NO: 869170 - DNA, 33 bp, Homo sapien
gagaatatgaagcttcgaatggagcagaatttt

SEQ ID NO: 869171 - DNA, 33 bp, Homo sapien
taggatcaggaccataacttcagttttccatga

SEQ ID NO: 869172 - DNA, 33 bp, Homo sapien
taggatcaggaccatagcttcagttttccatga

SEQ ID NO: 869173 - DNA, 33 bp, Homo sapien
ggtggaaggacttgtacatagctagtaagcagt

SEQ ID NO: 869174 - DNA, 33 bp, Homo sapien
ggtggaaggacttgtatatagctagtaagcagt

SEQ ID NO: 869175 - DNA, 33 bp, Homo sapien
gaaagtgctggaaatcacaagagaggtaataag

SEQ ID NO: 869176 - DNA, 33 bp, Homo sapien
gaaagtgctggaaatcgcaagagaggtaataag

SEQ ID NO: 869177 - DNA, 33 bp, Homo sapien
cacattttgaatgaacactcaagtgctaataac

SEQ ID NO: 869178 - DNA, 33 bp, Homo sapien
cacattttgaatgaacgctcaagtgctaataac

SEQ ID NO: 869179 - DNA, 33 bp, Homo sapien
ccctctggcccctgaacaccaccattctaatct

SEQ ID NO: 869180 - DNA, 33 bp, Homo sapien
ccctctggcccctgaataccaccattctaatct

SEQ ID NO: 869181 - DNA, 33 bp, Homo sapien
tcacaagaggtctgaaattacacctaaagaaaa

SEQ ID NO: 869182 - DNA, 33 bp, Homo sapien
tcacaagaggtctgaagttacacctaaagaaaa

SEQ ID NO: 869183 - DNA, 33 bp, Homo sapien
aagattcaaaggagaaagaggcatcaaagataa

SEQ ID NO: 869184 - DNA, 33 bp, Homo sapien
aagattcaaaggagaaggaggcatcaaagataa

SEQ ID NO: 869185 - DNA, 33 bp, Homo sapien
atccaggtagaaatgcccagcaagtccttggag

SEQ ID NO: 869186 - DNA, 33 bp, Homo sapien
atccaggtagaaatgctcagcaagtccttggag

SEQ ID NO: 869187 - DNA, 33 bp, Homo sapien
atctaatatattttccagcaaattttttctatt

SEQ ID NO: 869188 - DNA, 33 bp, Homo sapien
atctaatatattttccggcaaattttttctatt

SEQ ID NO: 869189 - DNA, 33 bp, Homo sapien
tgaaatcagtacagaaaaaactccagcccaatc

SEQ ID NO: 869190 - DNA, 33 bp, Homo sapien
tgaaatcagtacagaagaaactccagcccaatc

SEQ ID NO: 869191 - DNA, 33 bp, Homo sapien
aaagctgaaaatagtacgtgagtctgtagcaat

SEQ ID NO: 869192 - DNA, 33 bp, Homo sapien
aaagctgaaaatagtatgtgagtctgtagcaat

SEQ ID NO: 869193 - DNA, 33 bp, Homo sapien
agttacctaaattttaccgtcaggctatactct

SEQ ID NO: 869194 - DNA, 33 bp, Homo sapien
agttacctaaattttagcgtcaggctatactct

SEQ ID NO: 869195 - DNA, 33 bp, Homo sapien
tgagatcaagcagaaaaaattcattgtttacag

SEQ ID NO: 869196 - DNA, 33 bp, Homo sapien
tgagatcaagcagaaataattcattgtttacag

SEQ ID NO: 869197 - DNA, 33 bp, Homo sapien
ggtgggaaagaatgaactgtgacatgaacaagc

SEQ ID NO: 869198 - DNA, 33 bp, Homo sapien
ggtgggaaagaatgaattgtgacatgaacaagc

SEQ ID NO: 869199 - DNA, 33 bp, Homo sapien
cagcagagaatggacccaatgtgggtagcccct

SEQ ID NO: 869200 - DNA, 33 bp, Homo sapien
cagcagagaatggaccgaatgtgggtagcccct

SEQ ID NO: 869201 - DNA, 33 bp, Homo sapien
aaattccatcaatcaaaaggtgaagcattgcag

SEQ ID NO: 869202 - DNA, 33 bp, Homo sapien
aaattccatcaatcaagaggtgaagcattgcag

SEQ ID NO: 869203 - DNA, 33 bp, Homo sapien
ctcccatatactttcaatctctctggattacat

SEQ ID NO: 869204 - DNA, 33 bp, Homo sapien
ctcccatatactttcagtctctctggattacat

SEQ ID NO: 869205 - DNA, 33 bp, Homo sapien
aatggcaacaaagccaatcggagcactcaactc

SEQ ID NO: 869206 - DNA, 33 bp, Homo sapien
aatggcaacaaagccactcggagcactcaactc

SEQ ID NO: 869207 - DNA, 33 bp, Homo sapien
tccagttttatgtaaacgtccagtccttggagt

SEQ ID NO: 869208 - DNA, 33 bp, Homo sapien
tccagttttatgtaaaggtccagtccttggagt

SEQ ID NO: 869209 - DNA, 33 bp, Homo sapien
aggtccctcttacagagaaactgcataaccata

SEQ ID NO: 869210 - DNA, 33 bp, Homo sapien
aggtccctcttacagataaactgcataaccata

SEQ ID NO: 869211 - DNA, 33 bp, Homo sapien
ttaggaagtagataataagactgttgcctctag

SEQ ID NO: 869212 - DNA, 33 bp, Homo sapien
ttaggaagtagataatcagactgttgcctctag

SEQ ID NO: 869213 - DNA, 33 bp, Homo sapien
cttccccttatccttcccaggttctggtaagca

SEQ ID NO: 869214 - DNA, 33 bp, Homo sapien
cttccccttatccttctcaggttctggtaagca

SEQ ID NO: 869215 - DNA, 33 bp, Homo sapien
ccttgaaagatgactcaagaatccagagatgga

SEQ ID NO: 869216 - DNA, 33 bp, Homo sapien
ccttgaaagatgactcgagaatccagagatgga

SEQ ID NO: 869217 - DNA, 33 bp, Homo sapien
ttacttctgctccaaacactgttaacaggtgca

SEQ ID NO: 869218 - DNA, 33 bp, Homo sapien
ttacttctgctccaaatactgttaacaggtgca

SEQ ID NO: 869219 - DNA, 33 bp, Homo sapien
agcaatattgtggaagccactggaaatcaagtg

SEQ ID NO: 869220 - DNA, 33 bp, Homo sapien
agcaatattgtggaagtcactggaaatcaagtg

SEQ ID NO: 869221 - DNA, 33 bp, Homo sapien
ttcatgtaagaaactacgcatgtaattttcaga

SEQ ID NO: 869222 - DNA, 33 bp, Homo sapien
ttcatgtaagaaactatgcatgtaattttcaga

SEQ ID NO: 869223 - DNA, 33 bp, Homo sapien
tgtaaagagctggaaacgagcagttaacaagac

SEQ ID NO: 869224 - DNA, 33 bp, Homo sapien
tgtaaagagctggaaatgagcagttaacaagac

SEQ ID NO: 869225 - DNA, 33 bp, Homo sapien
aattttgattgtacccagagagctctttccatg

SEQ ID NO: 869226 - DNA, 33 bp, Homo sapien
aattttgattgtacccggagagctctttccatg

SEQ ID NO: 869227 - DNA, 33 bp, Homo sapien
agtaactttcaattacaactcactgatcggaac

SEQ ID NO: 869228 - DNA, 33 bp, Homo sapien
agtaactttcaattacgactcactgatcggaac

SEQ ID NO: 869229 - DNA, 33 bp, Homo sapien
tttaaaatgaactgaaaaaactactgcacagtc

SEQ ID NO: 869230 - DNA, 33 bp, Homo sapien
tttaaaatgaactgaagaaactactgcacagtc

SEQ ID NO: 869231 - DNA, 33 bp, Homo sapien
agatagaaaagattgaactacctacctaatccc

SEQ ID NO: 869232 - DNA, 33 bp, Homo sapien
agatagaaaagattgacctacctacctaatccc

SEQ ID NO: 869233 - DNA, 33 bp, Homo sapien
taaagcaatattcgtccaatggaaatagatttg

SEQ ID NO: 869234 - DNA, 33 bp, Homo sapien
taaagcaatattcgtctaatggaaatagatttg

SEQ ID NO: 869235 - DNA, 33 bp, Homo sapien
agagcgagtttaaagcacaagtctgtattaatc

SEQ ID NO: 869236 - DNA, 33 bp, Homo sapien
agagcgagtttaaagcgcaagtctgtattaatc

SEQ ID NO: 869237 - DNA, 33 bp, Homo sapien
ttacagagtaacctgccagcaatcctatcagca

SEQ ID NO: 869238 - DNA, 33 bp, Homo sapien
ttacagagtaacctgctagcaatcctatcagca

SEQ ID NO: 869239 - DNA, 33 bp, Homo sapien
tgaaatataccgatgcactgtcagtgttttctg

SEQ ID NO: 869240 - DNA, 33 bp, Homo sapien
tgaaatataccgatgctctgtcagtgttttctg

SEQ ID NO: 869241 - DNA, 33 bp, Homo sapien
tgtcaatccaagacccaaatgtccattccaaat

SEQ ID NO: 869242 - DNA, 33 bp, Homo sapien
tgtcaatccaagacccgaatgtccattccaaat

SEQ ID NO: 869243 - DNA, 33 bp, Homo sapien
aaagggctgttcataaaaatgagacacacgaaa

SEQ ID NO: 869244 - DNA, 33 bp, Homo sapien
aaagggctgttcataacaatgagacacacgaaa

SEQ ID NO: 869245 - DNA, 33 bp, Homo sapien
gtcttccaagtcgaaacgtttttcagagttgtt

SEQ ID NO: 869246 - DNA, 33 bp, Homo sapien
gtcttccaagtcgaaatgtttttcagagttgtt

SEQ ID NO: 869247 - DNA, 33 bp, Homo sapien
tctagataacttgcacaggcagggaagtgctga

SEQ ID NO: 869248 - DNA, 33 bp, Homo sapien
tctagataacttgcacgggcagggaagtgctga

SEQ ID NO: 869249 - DNA, 33 bp, Homo sapien
aatattcgttgaataaatgaatgagaattatcg

SEQ ID NO: 869250 - DNA, 33 bp, Homo sapien
aatattcgttgaataagtgaatgagaattatcg

SEQ ID NO: 869251 - DNA, 33 bp, Homo sapien
tgcacatcctccttaacagacccaatgaaatga

SEQ ID NO: 869252 - DNA, 33 bp, Homo sapien
tgcacatcctccttaatagacccaatgaaatga

SEQ ID NO: 869253 - DNA, 33 bp, Homo sapien
tgggtgacctgaataacgagacagaaaaaaagt

SEQ ID NO: 869254 - DNA, 33 bp, Homo sapien
tgggtgacctgaataatgagacagaaaaaaagt

SEQ ID NO: 869255 - DNA, 33 bp, Homo sapien
agaaagggacattactaaagttgagcattggta

SEQ ID NO: 869256 - DNA, 33 bp, Homo sapien
agaaagggacattactgaagttgagcattggta

SEQ ID NO: 869257 - DNA, 33 bp, Homo sapien
ataggaacatctataaaagttaaatccgatatt

SEQ ID NO: 869258 - DNA, 33 bp, Homo sapien
ataggaacatctataacagttaaatccgatatt

SEQ ID NO: 869259 - DNA, 33 bp, Homo sapien
cctcttaacatgcagacgatccagaaaacttcc

SEQ ID NO: 869260 - DNA, 33 bp, Homo sapien
cctcttaacatgcagatgatccagaaaacttcc

SEQ ID NO: 869261 - DNA, 33 bp, Homo sapien
tgtgaactgatggtcaagtggtgtcaataactc

SEQ ID NO: 869262 - DNA, 33 bp, Homo sapien
tgtgaactgatggtcatgtggtgtcaataactc

SEQ ID NO: 869263 - DNA, 33 bp, Homo sapien
ttcctagaatatgtgaagcacaagctcacattt

SEQ ID NO: 869264 - DNA, 33 bp, Homo sapien
ttcctagaatatgtgaggcacaagctcacattt

SEQ ID NO: 869265 - DNA, 33 bp, Homo sapien
aacattcttagatatgccaactcagaaatggct

SEQ ID NO: 869266 - DNA, 33 bp, Homo sapien
aacattcttagatatgtcaactcagaaatggct

SEQ ID NO: 869267 - DNA, 33 bp, Homo sapien
attaaaggaaatattcaacggcttattaacatt

SEQ ID NO: 869268 - DNA, 33 bp, Homo sapien
attaaaggaaatattcgacggcttattaacatt

SEQ ID NO: 869269 - DNA, 33 bp, Homo sapien
catactcggcagactaaaatgttaataagccgt

SEQ ID NO: 869270 - DNA, 33 bp, Homo sapien
catactcggcagactacaatgttaataagccgt

SEQ ID NO: 869271 - DNA, 33 bp, Homo sapien
ttgtggattatctatacattggacatgaatctt

SEQ ID NO: 869272 - DNA, 33 bp, Homo sapien
ttgtggattatctatatattggacatgaatctt

SEQ ID NO: 869273 - DNA, 33 bp, Homo sapien
atatgtaatgttgaaaaaaaaaatggtcactgc

SEQ ID NO: 869274 - DNA, 33 bp, Homo sapien
atatgtaatgttgaaacaaaaaatggtcactgc

SEQ ID NO: 869275 - DNA, 33 bp, Homo sapien
agctaaattgtaaaagaaaacacttggagtcac

SEQ ID NO: 869276 - DNA, 33 bp, Homo sapien
agctaaattgtaaaaggaaacacttggagtcac

SEQ ID NO: 869277 - DNA, 33 bp, Homo sapien
ttcattaccatctctacgattacatcgtccctt

SEQ ID NO: 869278 - DNA, 33 bp, Homo sapien
ttcattaccatctctatgattacatcgtccctt

SEQ ID NO: 869279 - DNA, 33 bp, Homo sapien
ggggctgtgaatgagaacagagattattaataa

SEQ ID NO: 869280 - DNA, 33 bp, Homo sapien
ggggctgtgaatgagagcagagattattaataa

SEQ ID NO: 869281 - DNA, 33 bp, Homo sapien
atttacaggcaaaagtgaaaacctgtctcctca

SEQ ID NO: 869282 - DNA, 33 bp, Homo sapien
atttacaggcaaaagttaaaacctgtctcctca

SEQ ID NO: 869283 - DNA, 33 bp, Homo sapien
cccacagggtatatatcacatgtttctgcattt

SEQ ID NO: 869284 - DNA, 33 bp, Homo sapien
cccacagggtatatatgacatgtttctgcattt

SEQ ID NO: 869285 - DNA, 33 bp, Homo sapien
aagatgagtctacaggaagaggaaatgggaaaa

SEQ ID NO: 869286 - DNA, 33 bp, Homo sapien
aagatgagtctacagggagaggaaatgggaaaa

SEQ ID NO: 869287 - DNA, 33 bp, Homo sapien
gtgatctcaaaaaaaggaggtaatcctagccaa

SEQ ID NO: 869288 - DNA, 33 bp, Homo sapien
gtgatctcaaaaaaagtaggtaatcctagccaa

SEQ ID NO: 869289 - DNA, 33 bp, Homo sapien
aaaggacgaaaaaggcaaaatgttagctgttca

SEQ ID NO: 869290 - DNA, 33 bp, Homo sapien
aaaggacgaaaaaggcgaaatgttagctgttca

SEQ ID NO: 869291 - DNA, 33 bp, Homo sapien
gaccagttcctctatcagacctagttcctctat

SEQ ID NO: 869292 - DNA, 33 bp, Homo sapien
gaccagttcctctatcggacctagttcctctat

SEQ ID NO: 869293 - DNA, 33 bp, Homo sapien
tgattgcacatacacactacttaagcttccatc

SEQ ID NO: 869294 - DNA, 33 bp, Homo sapien
tgattgcacatacacattacttaagcttccatc

SEQ ID NO: 869295 - DNA, 33 bp, Homo sapien
gacgatgatgggaagcacacaatgcaatctata

SEQ ID NO: 869296 - DNA, 33 bp, Homo sapien
gacgatgatgggaagcgcacaatgcaatctata

SEQ ID NO: 869297 - DNA, 33 bp, Homo sapien
tccagtaactgtaaccggcaatcatttaaaagg

SEQ ID NO: 869298 - DNA, 33 bp, Homo sapien
tccagtaactgtaacctgcaatcatttaaaagg

SEQ ID NO: 869299 - DNA, 33 bp, Homo sapien
cagctgtttacttagaacaaatgaagatttaga

SEQ ID NO: 869300 - DNA, 33 bp, Homo sapien
cagctgtttacttagagcaaatgaagatttaga

SEQ ID NO: 869301 - DNA, 33 bp, Homo sapien
acatgcaaaataaaacggattatctagacacca

SEQ ID NO: 869302 - DNA, 33 bp, Homo sapien
acatgcaaaataaaactgattatctagacacca

SEQ ID NO: 869303 - DNA, 33 bp, Homo sapien
gaatcatgtgatggggaaagcaaaatgtggagt

SEQ ID NO: 869304 - DNA, 33 bp, Homo sapien
gaatcatgtgatgggggaagcaaaatgtggagt

SEQ ID NO: 869305 - DNA, 33 bp, Homo sapien
ttcacacttatttgcaaactttaaaacacatat

SEQ ID NO: 869306 - DNA, 33 bp, Homo sapien
ttcacacttatttgcagactttaaaacacatat

SEQ ID NO: 869307 - DNA, 33 bp, Homo sapien
atgaccttagcagcaacatcataaagagtgcta

SEQ ID NO: 869308 - DNA, 33 bp, Homo sapien
atgaccttagcagcaatatcataaagagtgcta

SEQ ID NO: 869309 - DNA, 33 bp, Homo sapien
agtcaagtccctgaagcaaacatgcaggatcca

SEQ ID NO: 869310 - DNA, 33 bp, Homo sapien
agtcaagtccctgaagtaaacatgcaggatcca

SEQ ID NO: 869311 - DNA, 33 bp, Homo sapien
agtctttaaaaatctgaaagttacagtgtttaa

SEQ ID NO: 869312 - DNA, 33 bp, Homo sapien
agtctttaaaaatctgcaagttacagtgtttaa

SEQ ID NO: 869313 - DNA, 33 bp, Homo sapien
agtagttctgaactaaatgaatcctcggagtag

SEQ ID NO: 869314 - DNA, 33 bp, Homo sapien
agtagttctgaactaagtgaatcctcggagtag

SEQ ID NO: 869315 - DNA, 33 bp, Homo sapien
accactgcaacaaaaacgtcctaataatcgccc

SEQ ID NO: 869316 - DNA, 33 bp, Homo sapien
accactgcaacaaaaatgtcctaataatcgccc

SEQ ID NO: 869317 - DNA, 33 bp, Homo sapien
ttagctacacgtataaaataaaagtagcagctg

SEQ ID NO: 869318 - DNA, 33 bp, Homo sapien
ttagctacacgtataacataaaagtagcagctg

SEQ ID NO: 869319 - DNA, 33 bp, Homo sapien
ggttttgttccagagagagtatttgtgtgcact

SEQ ID NO: 869320 - DNA, 33 bp, Homo sapien
ggttttgttccagagatagtatttgtgtgcact

SEQ ID NO: 869321 - DNA, 33 bp, Homo sapien
gtctggtgtgtcctcaaaaacttaacatagagt

SEQ ID NO: 869322 - DNA, 33 bp, Homo sapien
gtctggtgtgtcctcagaaacttaacatagagt

SEQ ID NO: 869323 - DNA, 33 bp, Homo sapien
agggaaatctcagtggcaaactaatctacctgc

SEQ ID NO: 869324 - DNA, 33 bp, Homo sapien
agggaaatctcagtggtaaactaatctacctgc

SEQ ID NO: 869325 - DNA, 33 bp, Homo sapien
gaaaaatttatgtatccacagttttgctggtca

SEQ ID NO: 869326 - DNA, 33 bp, Homo sapien
gaaaaatttatgtatctacagttttgctggtca

SEQ ID NO: 869327 - DNA, 33 bp, Homo sapien
gcctctgggcctgtgacgggaagcacctgctgt

SEQ ID NO: 869328 - DNA, 33 bp, Homo sapien
gcctctgggcctgtgatgggaagcacctgctgt

SEQ ID NO: 869329 - DNA, 33 bp, Homo sapien
atgaagtatacctagacattaaattgtgtgttg

SEQ ID NO: 869330 - DNA, 33 bp, Homo sapien
atgaagtatacctagatattaaattgtgtgttg

SEQ ID NO: 869331 - DNA, 33 bp, Homo sapien
actgttaccagggttacgttagcttaaaaattc

SEQ ID NO: 869332 - DNA, 33 bp, Homo sapien
actgttaccagggttatgttagcttaaaaattc

SEQ ID NO: 869333 - DNA, 33 bp, Homo sapien
gagattaaatgacttgaacagcagataaatatg

SEQ ID NO: 869334 - DNA, 33 bp, Homo sapien
gagattaaatgacttggacagcagataaatatg

SEQ ID NO: 869335 - DNA, 33 bp, Homo sapien
ggtgtgttcagtataacgggtcttgtatccagg

SEQ ID NO: 869336 - DNA, 33 bp, Homo sapien
ggtgtgttcagtataaggggtcttgtatccagg

SEQ ID NO: 869337 - DNA, 33 bp, Homo sapien
ctacgtaagagattgaacaggcaaaatacattg

SEQ ID NO: 869338 - DNA, 33 bp, Homo sapien
ctacgtaagagattgagcaggcaaaatacattg

SEQ ID NO: 869339 - DNA, 33 bp, Homo sapien
ctttattcttgagcgaatcacttggcagagcct

SEQ ID NO: 869340 - DNA, 33 bp, Homo sapien
ctttattcttgagcgagtcacttggcagagcct

SEQ ID NO: 869341 - DNA, 33 bp, Homo sapien
tcgcttacctcagtataaaacaattttcttaat

SEQ ID NO: 869342 - DNA, 33 bp, Homo sapien
tcgcttacctcagtatgaaacaattttcttaat

SEQ ID NO: 869343 - DNA, 33 bp, Homo sapien
atactacaaggtgtaacactactgcaagttgac

SEQ ID NO: 869344 - DNA, 33 bp, Homo sapien
atactacaaggtgtaatactactgcaagttgac

SEQ ID NO: 869345 - DNA, 33 bp, Homo sapien
acaaagggaatgttaactatggtttcctatcta

SEQ ID NO: 869346 - DNA, 33 bp, Homo sapien
acaaagggaatgttaattatggtttcctatcta

SEQ ID NO: 869347 - DNA, 33 bp, Homo sapien
tttaaaaaaggttattcaaatgtcctgaaaact

SEQ ID NO: 869348 - DNA, 33 bp, Homo sapien
tttaaaaaaggttattgaaatgtcctgaaaact

SEQ ID NO: 869349 - DNA, 33 bp, Homo sapien
aattttgtgttaaacagcatcttcattactttc

SEQ ID NO: 869350 - DNA, 33 bp, Homo sapien
aattttgtgttaaacatcatcttcattactttc

SEQ ID NO: 869351 - DNA, 33 bp, Homo sapien
ttggctatgaaaatacccttaccaaaaatgttt

SEQ ID NO: 869352 - DNA, 33 bp, Homo sapien
ttggctatgaaaatactcttaccaaaaatgttt

SEQ ID NO: 869353 - DNA, 33 bp, Homo sapien
tctggttacaagttcaaggataaactcctaact

SEQ ID NO: 869354 - DNA, 33 bp, Homo sapien
tctggttacaagttcatggataaactcctaact

SEQ ID NO: 869355 - DNA, 33 bp, Homo sapien
gcaaagcaagaggaaactggtctcttcagaaag

SEQ ID NO: 869356 - DNA, 33 bp, Homo sapien
gcaaagcaagaggaaagtggtctcttcagaaag

SEQ ID NO: 869357 - DNA, 33 bp, Homo sapien
gcatattttcactctaccttattagagccataa

SEQ ID NO: 869358 - DNA, 33 bp, Homo sapien
gcatattttcactctagcttattagagccataa

SEQ ID NO: 869359 - DNA, 33 bp, Homo sapien
agttgcaaagtttacactcattttctattttct

SEQ ID NO: 869360 - DNA, 33 bp, Homo sapien
agttgcaaagtttacattcattttctattttct

SEQ ID NO: 869361 - DNA, 33 bp, Homo sapien
aacagattggagttaaggagataggccaatcct

SEQ ID NO: 869362 - DNA, 33 bp, Homo sapien
aacagattggagttaatgagataggccaatcct

SEQ ID NO: 869363 - DNA, 33 bp, Homo sapien
tttgatatccatatcaactcagaaagtattttc

SEQ ID NO: 869364 - DNA, 33 bp, Homo sapien
tttgatatccatatcagctcagaaagtattttc

SEQ ID NO: 869365 - DNA, 33 bp, Homo sapien
aatgattttttaaatacgacatgacatcaaaag

SEQ ID NO: 869366 - DNA, 33 bp, Homo sapien
aatgattttttaaatatgacatgacatcaaaag

SEQ ID NO: 869367 - DNA, 33 bp, Homo sapien
ttgcatccttccaatacagcaagtggcttaggc

SEQ ID NO: 869368 - DNA, 33 bp, Homo sapien
ttgcatccttccaatagagcaagtggcttaggc

SEQ ID NO: 869369 - DNA, 33 bp, Homo sapien
tggtagaatgaaaatcgattactttaaatactt

SEQ ID NO: 869370 - DNA, 33 bp, Homo sapien
tggtagaatgaaaatctattactttaaatactt

SEQ ID NO: 869371 - DNA, 33 bp, Homo sapien
ggtgtgcaagtggttacgaaacacatgaaataa

SEQ ID NO: 869372 - DNA, 33 bp, Homo sapien
ggtgtgcaagtggttatgaaacacatgaaataa

SEQ ID NO: 869373 - DNA, 33 bp, Homo sapien
gtccccatagaaactaaagttgcaaatggttac

SEQ ID NO: 869374 - DNA, 33 bp, Homo sapien
gtccccatagaaactacagttgcaaatggttac

SEQ ID NO: 869375 - DNA, 33 bp, Homo sapien
ttttttccctgcaaagccaactgcaagtataac

SEQ ID NO: 869376 - DNA, 33 bp, Homo sapien
ttttttccctgcaaaggcaactgcaagtataac

SEQ ID NO: 869377 - DNA, 33 bp, Homo sapien
aaagaatgatgttgaacaagttatattatgctt

SEQ ID NO: 869378 - DNA, 33 bp, Homo sapien
aaagaatgatgttgaagaagttatattatgctt

SEQ ID NO: 869379 - DNA, 33 bp, Homo sapien
taaataagaaaagttcacaaaatcgcttaactt

SEQ ID NO: 869380 - DNA, 33 bp, Homo sapien
taaataagaaaagttcgcaaaatcgcttaactt

SEQ ID NO: 869381 - DNA, 33 bp, Homo sapien
gctcaacattttgtgacacacgtcaatattatc

SEQ ID NO: 869382 - DNA, 33 bp, Homo sapien
gctcaacattttgtgagacacgtcaatattatc

SEQ ID NO: 869383 - DNA, 33 bp, Homo sapien
aacgcagctgacaatcaagagacactaaccgtt

SEQ ID NO: 869384 - DNA, 33 bp, Homo sapien
aacgcagctgacaatcgagagacactaaccgtt

SEQ ID NO: 869385 - DNA, 33 bp, Homo sapien
cttttttgctaaccaacgaagttactctaaata

SEQ ID NO: 869386 - DNA, 33 bp, Homo sapien
cttttttgctaaccaatgaagttactctaaata

SEQ ID NO: 869387 - DNA, 33 bp, Homo sapien
gtcttgcctttttgcaactttaagattgatcag

SEQ ID NO: 869388 - DNA, 33 bp, Homo sapien
gtcttgcctttttgcagctttaagattgatcag

SEQ ID NO: 869389 - DNA, 33 bp, Homo sapien
aaggagagacgaacaacgacaaaacctcagaga

SEQ ID NO: 869390 - DNA, 33 bp, Homo sapien
aaggagagacgaacaatgacaaaacctcagaga

SEQ ID NO: 869391 - DNA, 33 bp, Homo sapien
cgttgacgtcacaaagaaaaacaaatgatagct

SEQ ID NO: 869392 - DNA, 33 bp, Homo sapien
cgttgacgtcacaaaggaaaacaaatgatagct

SEQ ID NO: 869393 - DNA, 33 bp, Homo sapien
gaattggttacttgaaaacttagaatccagttt

SEQ ID NO: 869394 - DNA, 33 bp, Homo sapien
gaattggttacttgaacacttagaatccagttt

SEQ ID NO: 869395 - DNA, 33 bp, Homo sapien
acattttgaactagtaaagtctaaattgatgag

SEQ ID NO: 869396 - DNA, 33 bp, Homo sapien
acattttgaactagtagagtctaaattgatgag

SEQ ID NO: 869397 - DNA, 33 bp, Homo sapien
agtctcctggtctacaatctgccgctttgcttc

SEQ ID NO: 869398 - DNA, 33 bp, Homo sapien
agtctcctggtctacagtctgccgctttgcttc

SEQ ID NO: 869399 - DNA, 33 bp, Homo sapien
acaggcaagaatcaagaagctgagaatcttaaa

SEQ ID NO: 869400 - DNA, 33 bp, Homo sapien
acaggcaagaatcaaggagctgagaatcttaaa

SEQ ID NO: 869401 - DNA, 33 bp, Homo sapien
agtcaagcacgaaagcagatcctagaaccagat

SEQ ID NO: 869402 - DNA, 33 bp, Homo sapien
agtcaagcacgaaagcggatcctagaaccagat

SEQ ID NO: 869403 - DNA, 33 bp, Homo sapien
taatgaaccgaaggacaacatattgttaaaatg

SEQ ID NO: 869404 - DNA, 33 bp, Homo sapien
taatgaaccgaaggactacatattgttaaaatg

SEQ ID NO: 869405 - DNA, 33 bp, Homo sapien
tcatctccttacacaacaccttgggcattcaaa

SEQ ID NO: 869406 - DNA, 33 bp, Homo sapien
tcatctccttacacaagaccttgggcattcaaa

SEQ ID NO: 869407 - DNA, 33 bp, Homo sapien
caaatgaggtttaaaacttctgctctctcctac

SEQ ID NO: 869408 - DNA, 33 bp, Homo sapien
caaatgaggtttaaaatttctgctctctcctac

SEQ ID NO: 869409 - DNA, 33 bp, Homo sapien
tctggcaccacctcgaggctcttcaggggatga

SEQ ID NO: 869410 - DNA, 33 bp, Homo sapien
tctggcaccacctcgatgctcttcaggggatga

SEQ ID NO: 869411 - DNA, 33 bp, Homo sapien
tctaccggaaaaatcacgggctaagagagtaac

SEQ ID NO: 869412 - DNA, 33 bp, Homo sapien
tctaccggaaaaatcatgggctaagagagtaac

SEQ ID NO: 869413 - DNA, 33 bp, Homo sapien
gagactgtctggaaaaaagctaaatgatatctc

SEQ ID NO: 869414 - DNA, 33 bp, Homo sapien
gagactgtctggaaaagagctaaatgatatctc

SEQ ID NO: 869415 - DNA, 33 bp, Homo sapien
tgttcttggcttggaacagtcttgtggtcactc

SEQ ID NO: 869416 - DNA, 33 bp, Homo sapien
tgttcttggcttggaatagtcttgtggtcactc

SEQ ID NO: 869417 - DNA, 33 bp, Homo sapien
cccaagaagttctcaaagttgcaggctcaatac

SEQ ID NO: 869418 - DNA, 33 bp, Homo sapien
cccaagaagttctcaaggttgcaggctcaatac

SEQ ID NO: 869419 - DNA, 33 bp, Homo sapien
acagcaaattttgaacactggagacgtgacaca

SEQ ID NO: 869420 - DNA, 33 bp, Homo sapien
acagcaaattttgaacgctggagacgtgacaca

SEQ ID NO: 869421 - DNA, 33 bp, Homo sapien
gaactctatatctgaaatgaagcccgagtctgg

SEQ ID NO: 869422 - DNA, 33 bp, Homo sapien
gaactctatatctgaagtgaagcccgagtctgg

SEQ ID NO: 869423 - DNA, 33 bp, Homo sapien
taaagaatggggggaaaaacagattatggaggt

SEQ ID NO: 869424 - DNA, 33 bp, Homo sapien
taaagaatggggggaacaacagattatggaggt

SEQ ID NO: 869425 - DNA, 33 bp, Homo sapien
ttccttgtacaatcaacacatactttcagtcac

SEQ ID NO: 869426 - DNA, 33 bp, Homo sapien
ttccttgtacaatcaatacatactttcagtcac

SEQ ID NO: 869427 - DNA, 33 bp, Homo sapien
agacaaagaagagagtaaccattcagtgctcaa

SEQ ID NO: 869428 - DNA, 33 bp, Homo sapien
agacaaagaagagagtgaccattcagtgctcaa

SEQ ID NO: 869429 - DNA, 33 bp, Homo sapien
tttgatatgattttaaagggtaaagttgaaggt

SEQ ID NO: 869430 - DNA, 33 bp, Homo sapien
tttgatatgattttaacgggtaaagttgaaggt

SEQ ID NO: 869431 - DNA, 33 bp, Homo sapien
aaagcttagaactgtaaagccttcctcagtccc

SEQ ID NO: 869432 - DNA, 33 bp, Homo sapien
aaagcttagaactgtagagccttcctcagtccc

SEQ ID NO: 869433 - DNA, 33 bp, Homo sapien
ctgcggccggccgacaactacataattgactct

SEQ ID NO: 869434 - DNA, 33 bp, Homo sapien
ctgcggccggccgacagctacataattgactct

SEQ ID NO: 869435 - DNA, 33 bp, Homo sapien
ttggctggaggcgaaactagaactctccgccct

SEQ ID NO: 869436 - DNA, 33 bp, Homo sapien
ttggctggaggcgaaagtagaactctccgccct

SEQ ID NO: 869437 - DNA, 33 bp, Homo sapien
gtacgtaccaattataatgctgttaaaaagaat

SEQ ID NO: 869438 - DNA, 33 bp, Homo sapien
gtacgtaccaattatactgctgttaaaaagaat

SEQ ID NO: 869439 - DNA, 33 bp, Homo sapien
tcaaggatagagatgcaatattaagcactaaga

SEQ ID NO: 869440 - DNA, 33 bp, Homo sapien
tcaaggatagagatgctatattaagcactaaga

SEQ ID NO: 869441 - DNA, 33 bp, Homo sapien
tcattatagcaaggaaaagcttactgtcgtatt

SEQ ID NO: 869442 - DNA, 33 bp, Homo sapien
tcattatagcaaggaagagcttactgtcgtatt

SEQ ID NO: 869443 - DNA, 33 bp, Homo sapien
agacattaaactcataccacatttttctttcaa

SEQ ID NO: 869444 - DNA, 33 bp, Homo sapien
agacattaaactcatatcacatttttctttcaa

SEQ ID NO: 869445 - DNA, 33 bp, Homo sapien
tatctatttgaaatcaacaacatagagcttatt

SEQ ID NO: 869446 - DNA, 33 bp, Homo sapien
tatctatttgaaatcagcaacatagagcttatt

SEQ ID NO: 869447 - DNA, 33 bp, Homo sapien
aggatctgcatcttatcaaccaaactgttttgc

SEQ ID NO: 869448 - DNA, 33 bp, Homo sapien
aggatctgcatcttattaaccaaactgttttgc

SEQ ID NO: 869449 - DNA, 33 bp, Homo sapien
gtatccgtagaaatacagatttcctggaagttg

SEQ ID NO: 869450 - DNA, 33 bp, Homo sapien
gtatccgtagaaatactgatttcctggaagttg

SEQ ID NO: 869451 - DNA, 33 bp, Homo sapien
gaaataaatgcttgaaaaaatgaagttctgaat

SEQ ID NO: 869452 - DNA, 33 bp, Homo sapien
gaaataaatgcttgaataaatgaagttctgaat

SEQ ID NO: 869453 - DNA, 33 bp, Homo sapien
ctgtccatttctctgaactaaagtgcttgtttg

SEQ ID NO: 869454 - DNA, 33 bp, Homo sapien
ctgtccatttctctgatctaaagtgcttgtttg

SEQ ID NO: 869455 - DNA, 33 bp, Homo sapien
ataccacctgggtttcactttcagcagaagagg

SEQ ID NO: 869456 - DNA, 33 bp, Homo sapien
ataccacctgggtttccctttcagcagaagagg

SEQ ID NO: 869457 - DNA, 33 bp, Homo sapien
tcaaacgtaatgaagaaagaccataaatagatg

SEQ ID NO: 869458 - DNA, 33 bp, Homo sapien
tcaaacgtaatgaagagagaccataaatagatg

SEQ ID NO: 869459 - DNA, 33 bp, Homo sapien
gatgcctttacagcaaaatgtagatcggggttt

SEQ ID NO: 869460 - DNA, 33 bp, Homo sapien
gatgcctttacagcaacatgtagatcggggttt

SEQ ID NO: 869461 - DNA, 33 bp, Homo sapien
gccagtagcaatcatcaaaatggttccagacag

SEQ ID NO: 869462 - DNA, 33 bp, Homo sapien
gccagtagcaatcatcgaaatggttccagacag

SEQ ID NO: 869463 - DNA, 33 bp, Homo sapien
gccgactgaacctggactagggctaaggctggg

SEQ ID NO: 869464 - DNA, 33 bp, Homo sapien
gccgactgaacctggagtagggctaaggctggg

SEQ ID NO: 869465 - DNA, 33 bp, Homo sapien
taggaagtgtcaataacacctgaatgtatacca

SEQ ID NO: 869466 - DNA, 33 bp, Homo sapien
taggaagtgtcaataatacctgaatgtatacca

SEQ ID NO: 869467 - DNA, 33 bp, Homo sapien
agattaataatatggacggaaccaaaatgtgag

SEQ ID NO: 869468 - DNA, 33 bp, Homo sapien
agattaataatatggatggaaccaaaatgtgag

SEQ ID NO: 869469 - DNA, 33 bp, Homo sapien
attgatagtcacttctaaatgatggtgttagtc

SEQ ID NO: 869470 - DNA, 33 bp, Homo sapien
attgatagtcacttctgaatgatggtgttagtc

SEQ ID NO: 869471 - DNA, 33 bp, Homo sapien
gctgatttccttcgagacctacagggtgtttgc

SEQ ID NO: 869472 - DNA, 33 bp, Homo sapien
gctgatttccttcgagccctacagggtgtttgc

SEQ ID NO: 869473 - DNA, 33 bp, Homo sapien
tggcagcgaatctgtacctgtctgcagcaacct

SEQ ID NO: 869474 - DNA, 33 bp, Homo sapien
tggcagcgaatctgtatctgtctgcagcaacct

SEQ ID NO: 869475 - DNA, 33 bp, Homo sapien
ttgaacagaaataggaacagattcatctttgga

SEQ ID NO: 869476 - DNA, 33 bp, Homo sapien
ttgaacagaaataggagcagattcatctttgga

SEQ ID NO: 869477 - DNA, 33 bp, Homo sapien
atgttcccagaagggaaagaaaaccaccatatt

SEQ ID NO: 869478 - DNA, 33 bp, Homo sapien
atgttcccagaagggagagaaaaccaccatatt

SEQ ID NO: 869479 - DNA, 33 bp, Homo sapien
gatccttaaatccaagcaaggggatgaaatggc

SEQ ID NO: 869480 - DNA, 33 bp, Homo sapien
gatccttaaatccaaggaaggggatgaaatggc

SEQ ID NO: 869481 - DNA, 33 bp, Homo sapien
aaacaaaaaccaagagaaattaccattagcaga

SEQ ID NO: 869482 - DNA, 33 bp, Homo sapien
aaacaaaaaccaagaggaattaccattagcaga

SEQ ID NO: 869483 - DNA, 33 bp, Homo sapien
attctttttctttcagcccttcaaatatgtcat

SEQ ID NO: 869484 - DNA, 33 bp, Homo sapien
attctttttctttcagtccttcaaatatgtcat

SEQ ID NO: 869485 - DNA, 33 bp, Homo sapien
tcctttccattcagctcaaaatacttactagga

SEQ ID NO: 869486 - DNA, 33 bp, Homo sapien
tcctttccattcagcttaaaatacttactagga

SEQ ID NO: 869487 - DNA, 33 bp, Homo sapien
gctaagtgtaaacaataaacctgttctacctgg

SEQ ID NO: 869488 - DNA, 33 bp, Homo sapien
gctaagtgtaaacaattaacctgttctacctgg

SEQ ID NO: 869489 - DNA, 33 bp, Homo sapien
ttaaaatgctcaaatcgcatggcttatgaagtc

SEQ ID NO: 869490 - DNA, 33 bp, Homo sapien
ttaaaatgctcaaatctcatggcttatgaagtc

SEQ ID NO: 869491 - DNA, 33 bp, Homo sapien
gataaaaaagacaagaaccaactgatgtctcca

SEQ ID NO: 869492 - DNA, 33 bp, Homo sapien
gataaaaaagacaagacccaactgatgtctcca

SEQ ID NO: 869493 - DNA, 33 bp, Homo sapien
cctattagcaacataaatattctgtcaaatgcc

SEQ ID NO: 869494 - DNA, 33 bp, Homo sapien
cctattagcaacataagtattctgtcaaatgcc

SEQ ID NO: 869495 - DNA, 33 bp, Homo sapien
agatgaccaaatgtcaacagtgaatatgttata

SEQ ID NO: 869496 - DNA, 33 bp, Homo sapien
agatgaccaaatgtcagcagtgaatatgttata

SEQ ID NO: 869497 - DNA, 33 bp, Homo sapien
tggaaagtgctaacaccaaactccaactggttc

SEQ ID NO: 869498 - DNA, 33 bp, Homo sapien
tggaaagtgctaacacgaaactccaactggttc

SEQ ID NO: 869499 - DNA, 33 bp, Homo sapien
aaagggcatgctatataaagcctactctcaaat

SEQ ID NO: 869500 - DNA, 33 bp, Homo sapien
aaagggcatgctatatgaagcctactctcaaat

SEQ ID NO: 869501 - DNA, 33 bp, Homo sapien
tgccagaaattctgaacgcaaatcttcttaata

SEQ ID NO: 869502 - DNA, 33 bp, Homo sapien
tgccagaaattctgaaggcaaatcttcttaata

SEQ ID NO: 869503 - DNA, 33 bp, Homo sapien
aaaggatgtatgcaacaaaaattatatatagca

SEQ ID NO: 869504 - DNA, 33 bp, Homo sapien
aaaggatgtatgcaaccaaaattatatatagca

SEQ ID NO: 869505 - DNA, 33 bp, Homo sapien
atagagtccttttacgcccttagtgtgctaagt

SEQ ID NO: 869506 - DNA, 33 bp, Homo sapien
atagagtccttttacggccttagtgtgctaagt

SEQ ID NO: 869507 - DNA, 33 bp, Homo sapien
tctatggaattaaacactcaaagatcaatgata

SEQ ID NO: 869508 - DNA, 33 bp, Homo sapien
tctatggaattaaacagtcaaagatcaatgata

SEQ ID NO: 869509 - DNA, 33 bp, Homo sapien
gagagttccctgaccccccttgcaagagatgtg

SEQ ID NO: 869510 - DNA, 33 bp, Homo sapien
gagagttccctgacccgccttgcaagagatgtg

SEQ ID NO: 869511 - DNA, 33 bp, Homo sapien
atactctttagcaataactaggtatagtcttca

SEQ ID NO: 869512 - DNA, 33 bp, Homo sapien
atactctttagcaatatctaggtatagtcttca

SEQ ID NO: 869513 - DNA, 33 bp, Homo sapien
caccctttttcttatcaatttgtcagtggtaca

SEQ ID NO: 869514 - DNA, 33 bp, Homo sapien
caccctttttcttatcgatttgtcagtggtaca

SEQ ID NO: 869515 - DNA, 33 bp, Homo sapien
tagttttttgaggaaccgttatactattttcca

SEQ ID NO: 869516 - DNA, 33 bp, Homo sapien
tagttttttgaggaacggttatactattttcca

SEQ ID NO: 869517 - DNA, 33 bp, Homo sapien
tgcttgagttattgcagtctggcgcatctgcca

SEQ ID NO: 869518 - DNA, 33 bp, Homo sapien
tgcttgagttattgcattctggcgcatctgcca

SEQ ID NO: 869519 - DNA, 33 bp, Homo sapien
gcccggcgaactctccacaatagtgtgtgtctc

SEQ ID NO: 869520 - DNA, 33 bp, Homo sapien
gcccggcgaactctccgcaatagtgtgtgtctc

SEQ ID NO: 869521 - DNA, 33 bp, Homo sapien
gtcataggtgaaaatactaaacagcactagatg

SEQ ID NO: 869522 - DNA, 33 bp, Homo sapien
gtcataggtgaaaatattaaacagcactagatg

SEQ ID NO: 869523 - DNA, 33 bp, Homo sapien
ctgaagtcagctgaaacagacattgccttattc

SEQ ID NO: 869524 - DNA, 33 bp, Homo sapien
ctgaagtcagctgaaatagacattgccttattc

SEQ ID NO: 869525 - DNA, 33 bp, Homo sapien
attattcatctgcaaaatggagtataagaaaat

SEQ ID NO: 869526 - DNA, 33 bp, Homo sapien
attattcatctgcaaagtggagtataagaaaat

SEQ ID NO: 869527 - DNA, 33 bp, Homo sapien
gtattagttggattcacattgctatgtttataa

SEQ ID NO: 869528 - DNA, 33 bp, Homo sapien
gtattagttggattcatattgctatgtttataa

SEQ ID NO: 869529 - DNA, 33 bp, Homo sapien
tcaaactcattgacccacacagttaaaattagt

SEQ ID NO: 869530 - DNA, 33 bp, Homo sapien
tcaaactcattgacccgcacagttaaaattagt

SEQ ID NO: 869531 - DNA, 33 bp, Homo sapien
taccatatttaatggccaattagttcagaacac

SEQ ID NO: 869532 - DNA, 33 bp, Homo sapien
taccatatttaatggctaattagttcagaacac

SEQ ID NO: 869533 - DNA, 33 bp, Homo sapien
acagaggcctctatagaaactaaccctatcaac

SEQ ID NO: 869534 - DNA, 33 bp, Homo sapien
acagaggcctctataggaactaaccctatcaac

SEQ ID NO: 869535 - DNA, 33 bp, Homo sapien
taggaagagaaaattacgacacagacatgtaca

SEQ ID NO: 869536 - DNA, 33 bp, Homo sapien
taggaagagaaaattaggacacagacatgtaca

SEQ ID NO: 869537 - DNA, 33 bp, Homo sapien
ggttctgctttaaaaaaaaaacctgctgatagt

SEQ ID NO: 869538 - DNA, 33 bp, Homo sapien
ggttctgctttaaaaagaaaacctgctgatagt

SEQ ID NO: 869539 - DNA, 33 bp, Homo sapien
atattatcaataatagcaaggaatttactagat

SEQ ID NO: 869540 - DNA, 33 bp, Homo sapien
atattatcaataataggaaggaatttactagat

SEQ ID NO: 869541 - DNA, 33 bp, Homo sapien
catggcagcctttgcaactttccactgtgtcca

SEQ ID NO: 869542 - DNA, 33 bp, Homo sapien
catggcagcctttgcatctttccactgtgtcca

SEQ ID NO: 869543 - DNA, 33 bp, Homo sapien
gcatgaacacattgcaagtatacacttcaccag

SEQ ID NO: 869544 - DNA, 33 bp, Homo sapien
gcatgaacacattgcatgtatacacttcaccag

SEQ ID NO: 869545 - DNA, 33 bp, Homo sapien
atttttccccagttgcaaagatttattcctaaa

SEQ ID NO: 869546 - DNA, 33 bp, Homo sapien
atttttccccagttgcgaagatttattcctaaa

SEQ ID NO: 869547 - DNA, 33 bp, Homo sapien
cactccttccactatacgagctcagagtgagaa

SEQ ID NO: 869548 - DNA, 33 bp, Homo sapien
cactccttccactatatgagctcagagtgagaa

SEQ ID NO: 869549 - DNA, 33 bp, Homo sapien
aggagacagtggtccacgttcttctgcagtacc

SEQ ID NO: 869550 - DNA, 33 bp, Homo sapien
aggagacagtggtccatgttcttctgcagtacc

SEQ ID NO: 869551 - DNA, 33 bp, Homo sapien
gtaaacatactgtctagccctttttgcagactt

SEQ ID NO: 869552 - DNA, 33 bp, Homo sapien
gtaaacatactgtctatccctttttgcagactt

SEQ ID NO: 869553 - DNA, 33 bp, Homo sapien
aaattacagttaaatacgccttcaaatttctcc

SEQ ID NO: 869554 - DNA, 33 bp, Homo sapien
aaattacagttaaatatgccttcaaatttctcc

SEQ ID NO: 869555 - DNA, 33 bp, Homo sapien
ggcaattattaaggcaaaatttcatgttattta

SEQ ID NO: 869556 - DNA, 33 bp, Homo sapien
ggcaattattaaggcagaatttcatgttattta

SEQ ID NO: 869557 - DNA, 33 bp, Homo sapien
attatgatttattgagaaaaaaattggatcttc

SEQ ID NO: 869558 - DNA, 33 bp, Homo sapien
attatgatttattgaggaaaaaattggatcttc

SEQ ID NO: 869559 - DNA, 33 bp, Homo sapien
tgaaaagaaaaccccaagtgcttgccctgagag

SEQ ID NO: 869560 - DNA, 33 bp, Homo sapien
tgaaaagaaaaccccaggtgcttgccctgagag

SEQ ID NO: 869561 - DNA, 33 bp, Homo sapien
tcggtggaggtctcctcaagtggagtattgaat

SEQ ID NO: 869562 - DNA, 33 bp, Homo sapien
tcggtggaggtctccttaagtggagtattgaat

SEQ ID NO: 869563 - DNA, 33 bp, Homo sapien
accctcatgcaaaataactgtattcatttttag

SEQ ID NO: 869564 - DNA, 33 bp, Homo sapien
accctcatgcaaaatacctgtattcatttttag

SEQ ID NO: 869565 - DNA, 33 bp, Homo sapien
tgttttcattgaaaaggcatcctctaagtgctg

SEQ ID NO: 869566 - DNA, 33 bp, Homo sapien
tgttttcattgaaaagtcatcctctaagtgctg

SEQ ID NO: 869567 - DNA, 33 bp, Homo sapien
ctaagtgctgggtacacggtagtcagtcagtaa

SEQ ID NO: 869568 - DNA, 33 bp, Homo sapien
ctaagtgctgggtacatggtagtcagtcagtaa

SEQ ID NO: 869569 - DNA, 33 bp, Homo sapien
acacattttttctgtacggagacaaatatagct

SEQ ID NO: 869570 - DNA, 33 bp, Homo sapien
acacattttttctgtatggagacaaatatagct

SEQ ID NO: 869571 - DNA, 33 bp, Homo sapien
tgtttcttgatcccctaaatggcagttacatga

SEQ ID NO: 869572 - DNA, 33 bp, Homo sapien
tgtttcttgatcccctcaatggcagttacatga

SEQ ID NO: 869573 - DNA, 33 bp, Homo sapien
tcaagaaacatataaggatcatgcctgaaactg

SEQ ID NO: 869574 - DNA, 33 bp, Homo sapien
tcaagaaacatataagtatcatgcctgaaactg

SEQ ID NO: 869575 - DNA, 33 bp, Homo sapien
gtagagaatgcagggaacataaaatctttagcc

SEQ ID NO: 869576 - DNA, 33 bp, Homo sapien
gtagagaatgcagggaccataaaatctttagcc

SEQ ID NO: 869577 - DNA, 33 bp, Homo sapien
atagaaccaaatggaaccaaaacactggacatg

SEQ ID NO: 869578 - DNA, 33 bp, Homo sapien
atagaaccaaatggaatcaaaacactggacatg

SEQ ID NO: 869579 - DNA, 33 bp, Homo sapien
tgtccacctcctgccaataaacatccagacaca

SEQ ID NO: 869580 - DNA, 33 bp, Homo sapien
tgtccacctcctgccagtaaacatccagacaca

SEQ ID NO: 869581 - DNA, 33 bp, Homo sapien
tgaaggctgaggaaaaattttaatcctttgcag

SEQ ID NO: 869582 - DNA, 33 bp, Homo sapien
tgaaggctgaggaaaagttttaatcctttgcag

SEQ ID NO: 869583 - DNA, 33 bp, Homo sapien
catatgacttaacaatgaaactcccagttatct

SEQ ID NO: 869584 - DNA, 33 bp, Homo sapien
catatgacttaacaattaaactcccagttatct

SEQ ID NO: 869585 - DNA, 33 bp, Homo sapien
ttacgtgtgttcagtacatgtgaacccacgtat

SEQ ID NO: 869586 - DNA, 33 bp, Homo sapien
ttacgtgtgttcagtatatgtgaacccacgtat

SEQ ID NO: 869587 - DNA, 33 bp, Homo sapien
tattaggcagaggataatacctgacactcaatg

SEQ ID NO: 869588 - DNA, 33 bp, Homo sapien
tattaggcagaggatagtacctgacactcaatg

SEQ ID NO: 869589 - DNA, 33 bp, Homo sapien
tgatccttacacaaaactgatgaagatagcgag

SEQ ID NO: 869590 - DNA, 33 bp, Homo sapien
tgatccttacacaaaattgatgaagatagcgag

SEQ ID NO: 869591 - DNA, 33 bp, Homo sapien
cacttactaccagcaacggtctactctaagtgg

SEQ ID NO: 869592 - DNA, 33 bp, Homo sapien
cacttactaccagcaagggtctactctaagtgg

SEQ ID NO: 869593 - DNA, 33 bp, Homo sapien
cgagtgggatcggaaactgatgtcccgggatta

SEQ ID NO: 869594 - DNA, 33 bp, Homo sapien
cgagtgggatcggaaagtgatgtcccgggatta

SEQ ID NO: 869595 - DNA, 33 bp, Homo sapien
ctacttttatttaacgacatatctttcttgata

SEQ ID NO: 869596 - DNA, 33 bp, Homo sapien
ctacttttatttaacggcatatctttcttgata

SEQ ID NO: 869597 - DNA, 33 bp, Homo sapien
ctaagtgacatatgggcaccacttaaggatttc

SEQ ID NO: 869598 - DNA, 33 bp, Homo sapien
ctaagtgacatatggggaccacttaaggatttc

SEQ ID NO: 869599 - DNA, 33 bp, Homo sapien
ggttgagaagttttacaattacgacacgaaatg

SEQ ID NO: 869600 - DNA, 33 bp, Homo sapien
ggttgagaagttttacgattacgacacgaaatg

SEQ ID NO: 869601 - DNA, 33 bp, Homo sapien
agttcttctactcataaactcatatccaatttg

SEQ ID NO: 869602 - DNA, 33 bp, Homo sapien
agttcttctactcatatactcatatccaatttg

SEQ ID NO: 869603 - DNA, 33 bp, Homo sapien
ggctgggttttagggagacagtatgctgggcaa

SEQ ID NO: 869604 - DNA, 33 bp, Homo sapien
ggctgggttttagggatacagtatgctgggcaa

SEQ ID NO: 869605 - DNA, 33 bp, Homo sapien
gttatccagtgttatacaagttccctaccacct

SEQ ID NO: 869606 - DNA, 33 bp, Homo sapien
gttatccagtgttatagaagttccctaccacct

SEQ ID NO: 869607 - DNA, 33 bp, Homo sapien
gagttaaccacttgtactaaggtccaaacagaa

SEQ ID NO: 869608 - DNA, 33 bp, Homo sapien
gagttaaccacttgtattaaggtccaaacagaa

SEQ ID NO: 869609 - DNA, 33 bp, Homo sapien
tatgagacacaattccagaagaggaaaacagct

SEQ ID NO: 869610 - DNA, 33 bp, Homo sapien
tatgagacacaattccggaagaggaaaacagct

SEQ ID NO: 869611 - DNA, 33 bp, Homo sapien
gatcttccagggctaccgctttacaatactact

SEQ ID NO: 869612 - DNA, 33 bp, Homo sapien
gatcttccagggctactgctttacaatactact

SEQ ID NO: 869613 - DNA, 33 bp, Homo sapien
gcaacacctaatccaactgtgaaatgcaaatta

SEQ ID NO: 869614 - DNA, 33 bp, Homo sapien
gcaacacctaatccaattgtgaaatgcaaatta

SEQ ID NO: 869615 - DNA, 33 bp, Homo sapien
ctaataaaaacaagccaaaaactacgaaatagc

SEQ ID NO: 869616 - DNA, 33 bp, Homo sapien
ctaataaaaacaagccgaaaactacgaaatagc

SEQ ID NO: 869617 - DNA, 33 bp, Homo sapien
ttcttgcttttgtatcccaacattctctcatgg

SEQ ID NO: 869618 - DNA, 33 bp, Homo sapien
ttcttgcttttgtatctcaacattctctcatgg

SEQ ID NO: 869619 - DNA, 33 bp, Homo sapien
gtttgcttcagtcagacacccgagatatttgta

SEQ ID NO: 869620 - DNA, 33 bp, Homo sapien
gtttgcttcagtcagatacccgagatatttgta

SEQ ID NO: 869621 - DNA, 33 bp, Homo sapien
ttttttccagactatacgaccaacccactaggt

SEQ ID NO: 869622 - DNA, 33 bp, Homo sapien
ttttttccagactatatgaccaacccactaggt

SEQ ID NO: 869623 - DNA, 33 bp, Homo sapien
cagaacagtgctttcaaatctcacttttggtgt

SEQ ID NO: 869624 - DNA, 33 bp, Homo sapien
cagaacagtgctttcagatctcacttttggtgt

SEQ ID NO: 869625 - DNA, 33 bp, Homo sapien
tggactctcagtagaccattttaatttgaggtc

SEQ ID NO: 869626 - DNA, 33 bp, Homo sapien
tggactctcagtagactattttaatttgaggtc

SEQ ID NO: 869627 - DNA, 33 bp, Homo sapien
tgcactgaatctgaccactccatctacgtccac

SEQ ID NO: 869628 - DNA, 33 bp, Homo sapien
tgcactgaatctgacctctccatctacgtccac

SEQ ID NO: 869629 - DNA, 33 bp, Homo sapien
cctccttcctcttgtacatctagttcctaaggg

SEQ ID NO: 869630 - DNA, 33 bp, Homo sapien
cctccttcctcttgtatatctagttcctaaggg

SEQ ID NO: 869631 - DNA, 33 bp, Homo sapien
taaaaaatttgactaccggtactactaatggca

SEQ ID NO: 869632 - DNA, 33 bp, Homo sapien
taaaaaatttgactactggtactactaatggca

SEQ ID NO: 869633 - DNA, 33 bp, Homo sapien
gttgagtttgtctcaaaacgtgggatagaggct

SEQ ID NO: 869634 - DNA, 33 bp, Homo sapien
gttgagtttgtctcaagacgtgggatagaggct

SEQ ID NO: 869635 - DNA, 33 bp, Homo sapien
gccgatctttgcaccacaaacagatatgcttat

SEQ ID NO: 869636 - DNA, 33 bp, Homo sapien
gccgatctttgcaccagaaacagatatgcttat

SEQ ID NO: 869637 - DNA, 33 bp, Homo sapien
aaactagttatgattcaaatcaaatccttccat

SEQ ID NO: 869638 - DNA, 33 bp, Homo sapien
aaactagttatgattccaatcaaatccttccat

SEQ ID NO: 869639 - DNA, 33 bp, Homo sapien
gttgttaatggaatgcaatttgtcataactaca

SEQ ID NO: 869640 - DNA, 33 bp, Homo sapien
gttgttaatggaatgcgatttgtcataactaca

SEQ ID NO: 869641 - DNA, 33 bp, Homo sapien
atattataacactgacagtcaaaaacatggtta

SEQ ID NO: 869642 - DNA, 33 bp, Homo sapien
atattataacactgaccgtcaaaaacatggtta

SEQ ID NO: 869643 - DNA, 33 bp, Homo sapien
cgatcaggtcaaaacactgatgtgaagaataaa

SEQ ID NO: 869644 - DNA, 33 bp, Homo sapien
cgatcaggtcaaaacattgatgtgaagaataaa

SEQ ID NO: 869645 - DNA, 33 bp, Homo sapien
ggctggaggttttcacacctggtagtctcatgt

SEQ ID NO: 869646 - DNA, 33 bp, Homo sapien
ggctggaggttttcacgcctggtagtctcatgt

SEQ ID NO: 869647 - DNA, 33 bp, Homo sapien
ttccataggagacttaagcttttggatctaaag

SEQ ID NO: 869648 - DNA, 33 bp, Homo sapien
ttccataggagacttatgcttttggatctaaag

SEQ ID NO: 869649 - DNA, 33 bp, Homo sapien
ctgagagttgatgaacaggtaaaagttggccag

SEQ ID NO: 869650 - DNA, 33 bp, Homo sapien
ctgagagttgatgaacgggtaaaagttggccag

SEQ ID NO: 869651 - DNA, 33 bp, Homo sapien
tggtccataactatcacgggtttgaggtagaca

SEQ ID NO: 869652 - DNA, 33 bp, Homo sapien
tggtccataactatcatgggtttgaggtagaca

SEQ ID NO: 869653 - DNA, 33 bp, Homo sapien
attaaagtccaataacactattctaggctttac

SEQ ID NO: 869654 - DNA, 33 bp, Homo sapien
attaaagtccaataacgctattctaggctttac

SEQ ID NO: 869655 - DNA, 33 bp, Homo sapien
gtaatccattcagttcactatggccaatctaca

SEQ ID NO: 869656 - DNA, 33 bp, Homo sapien
gtaatccattcagttcgctatggccaatctaca

SEQ ID NO: 869657 - DNA, 33 bp, Homo sapien
agaaattatttgctccaaagttgtaaaagtaca

SEQ ID NO: 869658 - DNA, 33 bp, Homo sapien
agaaattatttgctccgaagttgtaaaagtaca

SEQ ID NO: 869659 - DNA, 33 bp, Homo sapien
tccagtgagtcattccacagtcatggatcatgt

SEQ ID NO: 869660 - DNA, 33 bp, Homo sapien
tccagtgagtcattccgcagtcatggatcatgt

SEQ ID NO: 869661 - DNA, 33 bp, Homo sapien
aactcccaaatcctaacggcttaacacaataaa

SEQ ID NO: 869662 - DNA, 33 bp, Homo sapien
aactcccaaatcctaatggcttaacacaataaa

SEQ ID NO: 869663 - DNA, 33 bp, Homo sapien
attgtttacatagacacagaagaagtagatgat

SEQ ID NO: 869664 - DNA, 33 bp, Homo sapien
attgtttacatagacatagaagaagtagatgat

SEQ ID NO: 869665 - DNA, 33 bp, Homo sapien
caaaaatcagaaaaaacccaagttatacacagt

SEQ ID NO: 869666 - DNA, 33 bp, Homo sapien
caaaaatcagaaaaaatccaagttatacacagt

SEQ ID NO: 869667 - DNA, 33 bp, Homo sapien
tgagggagcaggccatcaagcttataggatata

SEQ ID NO: 869668 - DNA, 33 bp, Homo sapien
tgagggagcaggccatgaagcttataggatata

SEQ ID NO: 869669 - DNA, 33 bp, Homo sapien
agtagacacattgaagaataaaatttaaagctg

SEQ ID NO: 869670 - DNA, 33 bp, Homo sapien
agtagacacattgaaggataaaatttaaagctg

SEQ ID NO: 869671 - DNA, 33 bp, Homo sapien
tgactctttgttagtcgaccctacttcgcttac

SEQ ID NO: 869672 - DNA, 33 bp, Homo sapien
tgactctttgttagtctaccctacttcgcttac

SEQ ID NO: 869673 - DNA, 33 bp, Homo sapien
attacgaggcattaaaatcaaactatgtcctcc

SEQ ID NO: 869674 - DNA, 33 bp, Homo sapien
attacgaggcattaaagtcaaactatgtcctcc

SEQ ID NO: 869675 - DNA, 33 bp, Homo sapien
catttccaatctgagacggctggcgacctgggt

SEQ ID NO: 869676 - DNA, 33 bp, Homo sapien
catttccaatctgagatggctggcgacctgggt

SEQ ID NO: 869677 - DNA, 33 bp, Homo sapien
aactagctgggcacatgaatgaggaagcaatgg

SEQ ID NO: 869678 - DNA, 33 bp, Homo sapien
aactagctgggcacattaatgaggaagcaatgg

SEQ ID NO: 869679 - DNA, 33 bp, Homo sapien
tttcgtatgctcatacaggttttggaaacacca

SEQ ID NO: 869680 - DNA, 33 bp, Homo sapien
tttcgtatgctcatacgggttttggaaacacca

SEQ ID NO: 869681 - DNA, 33 bp, Homo sapien
gcttgataggaattgaaattgaggtctgcagct

SEQ ID NO: 869682 - DNA, 33 bp, Homo sapien
gcttgataggaattgagattgaggtctgcagct

SEQ ID NO: 869683 - DNA, 33 bp, Homo sapien
ttttatatccatgataactaaaacagtaatcac

SEQ ID NO: 869684 - DNA, 33 bp, Homo sapien
ttttatatccatgatacctaaaacagtaatcac

SEQ ID NO: 869685 - DNA, 33 bp, Homo sapien
aaatgtaaatcaaaatcatggtgaaatatcatt

SEQ ID NO: 869686 - DNA, 33 bp, Homo sapien
aaatgtaaatcaaaatgatggtgaaatatcatt

SEQ ID NO: 869687 - DNA, 33 bp, Homo sapien
ttcccctgaagataaacaaaatgttgaatcctc

SEQ ID NO: 869688 - DNA, 33 bp, Homo sapien
ttcccctgaagataaataaaatgttgaatcctc

SEQ ID NO: 869689 - DNA, 33 bp, Homo sapien
cactggaaaccattagcaggtgccttaaatttc

SEQ ID NO: 869690 - DNA, 33 bp, Homo sapien
cactggaaaccattagtaggtgccttaaatttc

SEQ ID NO: 869691 - DNA, 33 bp, Homo sapien
ttaaggacaatgatgccgatgaaggtgtacaca

SEQ ID NO: 869692 - DNA, 33 bp, Homo sapien
ttaaggacaatgatgctgatgaaggtgtacaca

SEQ ID NO: 869693 - DNA, 33 bp, Homo sapien
gctggcactctcatgacgatgatgtaaaagatt

SEQ ID NO: 869694 - DNA, 33 bp, Homo sapien
gctggcactctcatgatgatgatgtaaaagatt

SEQ ID NO: 869695 - DNA, 33 bp, Homo sapien
tccttttaagcaggaaacttaagtgatagcttt

SEQ ID NO: 869696 - DNA, 33 bp, Homo sapien
tccttttaagcaggaaccttaagtgatagcttt

SEQ ID NO: 869697 - DNA, 33 bp, Homo sapien
cctggccttacaaaacaattcaaagttatatgc

SEQ ID NO: 869698 - DNA, 33 bp, Homo sapien
cctggccttacaaaaccattcaaagttatatgc

SEQ ID NO: 869699 - DNA, 33 bp, Homo sapien
ccttccagcaaaatcaatcatttgtcttgctcc

SEQ ID NO: 869700 - DNA, 33 bp, Homo sapien
ccttccagcaaaatcagtcatttgtcttgctcc

SEQ ID NO: 869701 - DNA, 33 bp, Homo sapien
ttctgattcacagccaagattatgacccactga

SEQ ID NO: 869702 - DNA, 33 bp, Homo sapien
ttctgattcacagccaggattatgacccactga

SEQ ID NO: 869703 - DNA, 33 bp, Homo sapien
tcgatgattattaccactcattctaaaatacca

SEQ ID NO: 869704 - DNA, 33 bp, Homo sapien
tcgatgattattaccagtcattctaaaatacca

SEQ ID NO: 869705 - DNA, 33 bp, Homo sapien
ctgtttataatctcccaccagactcatagaagt

SEQ ID NO: 869706 - DNA, 33 bp, Homo sapien
ctgtttataatctcccgccagactcatagaagt

SEQ ID NO: 869707 - DNA, 33 bp, Homo sapien
tggagttgcttctgaacctcttaaccaagacag

SEQ ID NO: 869708 - DNA, 33 bp, Homo sapien
tggagttgcttctgaatctcttaaccaagacag

SEQ ID NO: 869709 - DNA, 33 bp, Homo sapien
ttctgtcctacagtcccgaaggcaaaaatgaat

SEQ ID NO: 869710 - DNA, 33 bp, Homo sapien
ttctgtcctacagtcctgaaggcaaaaatgaat

SEQ ID NO: 869711 - DNA, 33 bp, Homo sapien
gcggaagactctgctagctcaacaagtcttggt

SEQ ID NO: 869712 - DNA, 33 bp, Homo sapien
gcggaagactctgctatctcaacaagtcttggt

SEQ ID NO: 869713 - DNA, 33 bp, Homo sapien
aataaagaggaagtaaataagtgtttaattcag

SEQ ID NO: 869714 - DNA, 33 bp, Homo sapien
aataaagaggaagtaactaagtgtttaattcag

SEQ ID NO: 869715 - DNA, 33 bp, Homo sapien
ctgaaagatgttctcaatccaagtgatgagaca

SEQ ID NO: 869716 - DNA, 33 bp, Homo sapien
ctgaaagatgttctcagtccaagtgatgagaca

SEQ ID NO: 869717 - DNA, 33 bp, Homo sapien
gctagggcaagatacaaggacaatgcacttttt

SEQ ID NO: 869718 - DNA, 33 bp, Homo sapien
gctagggcaagatacagggacaatgcacttttt

SEQ ID NO: 869719 - DNA, 33 bp, Homo sapien
tgcttttcggcagtccacagcgtggcagaatct

SEQ ID NO: 869720 - DNA, 33 bp, Homo sapien
tgcttttcggcagtccgcagcgtggcagaatct

SEQ ID NO: 869721 - DNA, 33 bp, Homo sapien
ctgggctgttaagtccaaatttaggctcctcat

SEQ ID NO: 869722 - DNA, 33 bp, Homo sapien
ctgggctgttaagtcccaatttaggctcctcat

SEQ ID NO: 869723 - DNA, 33 bp, Homo sapien
gaacccctccgtgactcacatacacagaaagcc

SEQ ID NO: 869724 - DNA, 33 bp, Homo sapien
gaacccctccgtgacttacatacacagaaagcc

SEQ ID NO: 869725 - DNA, 33 bp, Homo sapien
catatggattttcatcaacataaagaaattagc

SEQ ID NO: 869726 - DNA, 33 bp, Homo sapien
catatggattttcatcgacataaagaaattagc

SEQ ID NO: 869727 - DNA, 33 bp, Homo sapien
ctcaatttcacgttaaaatagagtttcccattt

SEQ ID NO: 869728 - DNA, 33 bp, Homo sapien
ctcaatttcacgttaagatagagtttcccattt

SEQ ID NO: 869729 - DNA, 33 bp, Homo sapien
tcactgccaattgaggcaatttggaaaagcaga

SEQ ID NO: 869730 - DNA, 33 bp, Homo sapien
tcactgccaattgaggtaatttggaaaagcaga

SEQ ID NO: 869731 - DNA, 33 bp, Homo sapien
gttttagagtttgatacagacaataaagatgtt

SEQ ID NO: 869732 - DNA, 33 bp, Homo sapien
gttttagagtttgatatagacaataaagatgtt

SEQ ID NO: 869733 - DNA, 33 bp, Homo sapien
catgggaggcaatcctaaagttacagaacataa

SEQ ID NO: 869734 - DNA, 33 bp, Homo sapien
catgggaggcaatccttaagttacagaacataa

SEQ ID NO: 869735 - DNA, 33 bp, Homo sapien
ataacagctaataaatcacttccaaattttaac

SEQ ID NO: 869736 - DNA, 33 bp, Homo sapien
ataacagctaataaatgacttccaaattttaac

SEQ ID NO: 869737 - DNA, 33 bp, Homo sapien
agaatgaggagcaaaaacacaaaggaatgaaaa

SEQ ID NO: 869738 - DNA, 33 bp, Homo sapien
agaatgaggagcaaaaccacaaaggaatgaaaa

SEQ ID NO: 869739 - DNA, 33 bp, Homo sapien
caagtattactgatgccaccttacagcttattt

SEQ ID NO: 869740 - DNA, 33 bp, Homo sapien
caagtattactgatgctaccttacagcttattt

SEQ ID NO: 869741 - DNA, 33 bp, Homo sapien
ctggcttcacagtgaaacattaactgggcacca

SEQ ID NO: 869742 - DNA, 33 bp, Homo sapien
ctggcttcacagtgaaccattaactgggcacca

SEQ ID NO: 869743 - DNA, 33 bp, Homo sapien
ggaattttggaagttaagataaagtagacctta

SEQ ID NO: 869744 - DNA, 33 bp, Homo sapien
ggaattttggaagttaggataaagtagacctta

SEQ ID NO: 869745 - DNA, 33 bp, Homo sapien
tatagtatagtttgaaaccggtaatgtgatgcc

SEQ ID NO: 869746 - DNA, 33 bp, Homo sapien
tatagtatagtttgaatccggtaatgtgatgcc

SEQ ID NO: 869747 - DNA, 33 bp, Homo sapien
tatcagtacattcaaaattcacaggttttgttt

SEQ ID NO: 869748 - DNA, 33 bp, Homo sapien
tatcagtacattcaaagttcacaggttttgttt

SEQ ID NO: 869749 - DNA, 33 bp, Homo sapien
catgatagttttctcacggttgagtagaaacct

SEQ ID NO: 869750 - DNA, 33 bp, Homo sapien
catgatagttttctcatggttgagtagaaacct

SEQ ID NO: 869751 - DNA, 33 bp, Homo sapien
agggaaatagcttcacagacttttgacagtgta

SEQ ID NO: 869752 - DNA, 33 bp, Homo sapien
agggaaatagcttcacggacttttgacagtgta

SEQ ID NO: 869753 - DNA, 33 bp, Homo sapien
gatcttctataaactacggacttaatgtgtaag

SEQ ID NO: 869754 - DNA, 33 bp, Homo sapien
gatcttctataaactatggacttaatgtgtaag

SEQ ID NO: 869755 - DNA, 33 bp, Homo sapien
tagtatttgctagcacaactggatgaatatagt

SEQ ID NO: 869756 - DNA, 33 bp, Homo sapien
tagtatttgctagcacgactggatgaatatagt

SEQ ID NO: 869757 - DNA, 33 bp, Homo sapien
actccacaccatgttaactttttgcataatata

SEQ ID NO: 869758 - DNA, 33 bp, Homo sapien
actccacaccatgttacctttttgcataatata

SEQ ID NO: 869759 - DNA, 33 bp, Homo sapien
agaaattataaggaaccgccaagagtttagaag

SEQ ID NO: 869760 - DNA, 33 bp, Homo sapien
agaaattataaggaacggccaagagtttagaag

SEQ ID NO: 869761 - DNA, 33 bp, Homo sapien
actgaggtaggacttaggagaaattataaggaa

SEQ ID NO: 869762 - DNA, 33 bp, Homo sapien
actgaggtaggacttatgagaaattataaggaa

SEQ ID NO: 869763 - DNA, 33 bp, Homo sapien
gttatatattcaaacacgactttatcattcatg

SEQ ID NO: 869764 - DNA, 33 bp, Homo sapien
gttatatattcaaacaggactttatcattcatg

SEQ ID NO: 869765 - DNA, 33 bp, Homo sapien
aataaccacaatgataatataaagacaaaatat

SEQ ID NO: 869766 - DNA, 33 bp, Homo sapien
aataaccacaatgatactataaagacaaaatat

SEQ ID NO: 869767 - DNA, 33 bp, Homo sapien
gaaattttgctttgaaagtataagtatcctcta

SEQ ID NO: 869768 - DNA, 33 bp, Homo sapien
gaaattttgctttgaaggtataagtatcctcta

SEQ ID NO: 869769 - DNA, 33 bp, Homo sapien
ggaacagggttatggaaacttatcaggattttc

SEQ ID NO: 869770 - DNA, 33 bp, Homo sapien
ggaacagggttatggagacttatcaggattttc

SEQ ID NO: 869771 - DNA, 33 bp, Homo sapien
gtgcaggtctgttgaacgattccagagctagga

SEQ ID NO: 869772 - DNA, 33 bp, Homo sapien
gtgcaggtctgttgaatgattccagagctagga

SEQ ID NO: 869773 - DNA, 33 bp, Homo sapien
ccactgtgtgatacaaactctcatttgaatgct

SEQ ID NO: 869774 - DNA, 33 bp, Homo sapien
ccactgtgtgatacaagctctcatttgaatgct

SEQ ID NO: 869775 - DNA, 33 bp, Homo sapien
ggtggatttcacaacacctgtgttcctgtagcc

SEQ ID NO: 869776 - DNA, 33 bp, Homo sapien
ggtggatttcacaacatctgtgttcctgtagcc

SEQ ID NO: 869777 - DNA, 33 bp, Homo sapien
catgtttagatcagtaagggtggacttgcccaa

SEQ ID NO: 869778 - DNA, 33 bp, Homo sapien
catgtttagatcagtaggggtggacttgcccaa

SEQ ID NO: 869779 - DNA, 33 bp, Homo sapien
tgaagttggtatctctaagaatgggcagacccc

SEQ ID NO: 869780 - DNA, 33 bp, Homo sapien
tgaagttggtatctctgagaatgggcagacccc

SEQ ID NO: 869781 - DNA, 33 bp, Homo sapien
atgactgtgttttaggcgataacatttcataga

SEQ ID NO: 869782 - DNA, 33 bp, Homo sapien
atgactgtgttttaggtgataacatttcataga

SEQ ID NO: 869783 - DNA, 33 bp, Homo sapien
gaaggtgaagtataaaatgcaagctacaacaaa

SEQ ID NO: 869784 - DNA, 33 bp, Homo sapien
gaaggtgaagtataaagtgcaagctacaacaaa

SEQ ID NO: 869785 - DNA, 33 bp, Homo sapien
gtttatatcatattgaacatcttagccctacaa

SEQ ID NO: 869786 - DNA, 33 bp, Homo sapien
gtttatatcatattgatcatcttagccctacaa

SEQ ID NO: 869787 - DNA, 33 bp, Homo sapien
tatattacacactctccatccatcaagcaagta

SEQ ID NO: 869788 - DNA, 33 bp, Homo sapien
tatattacacactctctatccatcaagcaagta

SEQ ID NO: 869789 - DNA, 33 bp, Homo sapien
aaatttttcctctgcaatagtctaccttgaata

SEQ ID NO: 869790 - DNA, 33 bp, Homo sapien
aaatttttcctctgcagtagtctaccttgaata

SEQ ID NO: 869791 - DNA, 33 bp, Homo sapien
cacaggcttgttgatcaatggcatctcatggag

SEQ ID NO: 869792 - DNA, 33 bp, Homo sapien
cacaggcttgttgatccatggcatctcatggag

SEQ ID NO: 869793 - DNA, 33 bp, Homo sapien
ctagagtcctttcccaatatagtagccaaattg

SEQ ID NO: 869794 - DNA, 33 bp, Homo sapien
ctagagtcctttcccagtatagtagccaaattg

SEQ ID NO: 869795 - DNA, 33 bp, Homo sapien
atgagagcaggtgggaacagatgatttaggact

SEQ ID NO: 869796 - DNA, 33 bp, Homo sapien
atgagagcaggtgggaccagatgatttaggact

SEQ ID NO: 869797 - DNA, 33 bp, Homo sapien
tcaacttgctccatgtaaaagctaaaacagcaa

SEQ ID NO: 869798 - DNA, 33 bp, Homo sapien
tcaacttgctccatgtgaaagctaaaacagcaa

SEQ ID NO: 869799 - DNA, 33 bp, Homo sapien
acaccgaggaagacccaattagcccacattaat

SEQ ID NO: 869800 - DNA, 33 bp, Homo sapien
acaccgaggaagacccgattagcccacattaat

SEQ ID NO: 869801 - DNA, 33 bp, Homo sapien
agcgaaagtgggtcaacggaattaaatgaatcg

SEQ ID NO: 869802 - DNA, 33 bp, Homo sapien
agcgaaagtgggtcaatggaattaaatgaatcg

SEQ ID NO: 869803 - DNA, 33 bp, Homo sapien
aactatttttaacttacgcaggtccaattaaga

SEQ ID NO: 869804 - DNA, 33 bp, Homo sapien
aactatttttaacttatgcaggtccaattaaga

SEQ ID NO: 869805 - DNA, 33 bp, Homo sapien
tggatagaattattagaccttgaaatcattaaa

SEQ ID NO: 869806 - DNA, 33 bp, Homo sapien
tggatagaattattaggccttgaaatcattaaa

SEQ ID NO: 869807 - DNA, 33 bp, Homo sapien
tttacagtttcaggaacgtggccaatctctttt

SEQ ID NO: 869808 - DNA, 33 bp, Homo sapien
tttacagtttcaggaatgtggccaatctctttt

SEQ ID NO: 869809 - DNA, 33 bp, Homo sapien
tgaaccaaaccaacccaaagttcaacaacttta

SEQ ID NO: 869810 - DNA, 33 bp, Homo sapien
tgaaccaaaccaacccgaagttcaacaacttta

SEQ ID NO: 869811 - DNA, 33 bp, Homo sapien
cagccctatgtacagacggaacctaaggctcaa

SEQ ID NO: 869812 - DNA, 33 bp, Homo sapien
cagccctatgtacagatggaacctaaggctcaa

SEQ ID NO: 869813 - DNA, 33 bp, Homo sapien
tctgtagacaatgagaaatttagatcagttaac

SEQ ID NO: 869814 - DNA, 33 bp, Homo sapien
tctgtagacaatgagagatttagatcagttaac

SEQ ID NO: 869815 - DNA, 33 bp, Homo sapien
ttgcctaaagccttgaacttcgtttgtcaattc

SEQ ID NO: 869816 - DNA, 33 bp, Homo sapien
ttgcctaaagccttgaccttcgtttgtcaattc

SEQ ID NO: 869817 - DNA, 33 bp, Homo sapien
tttgtggttcttcataaagattgcataggactt

SEQ ID NO: 869818 - DNA, 33 bp, Homo sapien
tttgtggttcttcatagagattgcataggactt

SEQ ID NO: 869819 - DNA, 33 bp, Homo sapien
aggcaccagctacttacatttcatagtctccat

SEQ ID NO: 869820 - DNA, 33 bp, Homo sapien
aggcaccagctacttatatttcatagtctccat

SEQ ID NO: 869821 - DNA, 33 bp, Homo sapien
atgaatacttgtaggacgagtgaacagatgcat

SEQ ID NO: 869822 - DNA, 33 bp, Homo sapien
atgaatacttgtaggatgagtgaacagatgcat

SEQ ID NO: 869823 - DNA, 33 bp, Homo sapien
cttcaaaggcttaacaaccattcccagaatatg

SEQ ID NO: 869824 - DNA, 33 bp, Homo sapien
cttcaaaggcttaacacccattcccagaatatg

SEQ ID NO: 869825 - DNA, 33 bp, Homo sapien
tcataatatgcttactcaggggtacaggtatgt

SEQ ID NO: 869826 - DNA, 33 bp, Homo sapien
tcataatatgcttactgaggggtacaggtatgt

SEQ ID NO: 869827 - DNA, 33 bp, Homo sapien
atcacaaggggtcacaagataaactcacaattt

SEQ ID NO: 869828 - DNA, 33 bp, Homo sapien
atcacaaggggtcacacgataaactcacaattt

SEQ ID NO: 869829 - DNA, 33 bp, Homo sapien
atggaaaactatgttaagctaagctcatccagg

SEQ ID NO: 869830 - DNA, 33 bp, Homo sapien
atggaaaactatgttacgctaagctcatccagg

SEQ ID NO: 869831 - DNA, 33 bp, Homo sapien
tggtccccagagtaaccgcctctgacgccactt

SEQ ID NO: 869832 - DNA, 33 bp, Homo sapien
tggtccccagagtaactgcctctgacgccactt

SEQ ID NO: 869833 - DNA, 33 bp, Homo sapien
tgctgacctctgaccaaatggaaagacctagtt

SEQ ID NO: 869834 - DNA, 33 bp, Homo sapien
tgctgacctctgaccagatggaaagacctagtt

SEQ ID NO: 869835 - DNA, 33 bp, Homo sapien
gtcaagctggataaaaagttaagacccatcggt

SEQ ID NO: 869836 - DNA, 33 bp, Homo sapien
gtcaagctggataaaacgttaagacccatcggt

SEQ ID NO: 869837 - DNA, 33 bp, Homo sapien
atgtgctgagaagatacaagcttgccagctccg

SEQ ID NO: 869838 - DNA, 33 bp, Homo sapien
atgtgctgagaagatagaagcttgccagctccg

SEQ ID NO: 869839 - DNA, 33 bp, Homo sapien
aaaggcaacaaaaccaataaggaattaagcgtg

SEQ ID NO: 869840 - DNA, 33 bp, Homo sapien
aaaggcaacaaaaccagtaaggaattaagcgtg

SEQ ID NO: 869841 - DNA, 33 bp, Homo sapien
ttggtttggagggaaccaggtgattctcagtag

SEQ ID NO: 869842 - DNA, 33 bp, Homo sapien
ttggtttggagggaacgaggtgattctcagtag

SEQ ID NO: 869843 - DNA, 33 bp, Homo sapien
cactaggaatcaggaggcgtattgcagaaggga

SEQ ID NO: 869844 - DNA, 33 bp, Homo sapien
cactaggaatcaggagtcgtattgcagaaggga

SEQ ID NO: 869845 - DNA, 33 bp, Homo sapien
ttctctttccatcccacggcagcctcacgtcgt

SEQ ID NO: 869846 - DNA, 33 bp, Homo sapien
ttctctttccatcccagggcagcctcacgtcgt

SEQ ID NO: 869847 - DNA, 33 bp, Homo sapien
gcagggagggacaacaaggccctttgagaaaac

SEQ ID NO: 869848 - DNA, 33 bp, Homo sapien
gcagggagggacaacagggccctttgagaaaac

SEQ ID NO: 869849 - DNA, 33 bp, Homo sapien
gtcttgtatacattgcaaagcagagcctcaaag

SEQ ID NO: 869850 - DNA, 33 bp, Homo sapien
gtcttgtatacattgccaagcagagcctcaaag

SEQ ID NO: 869851 - DNA, 33 bp, Homo sapien
gaatgggctagtgcaaatgacaagtcctggaga

SEQ ID NO: 869852 - DNA, 33 bp, Homo sapien
gaatgggctagtgcaagtgacaagtcctggaga

SEQ ID NO: 869853 - DNA, 33 bp, Homo sapien
ggacaaagataataaaaaggagtgactgtcagt

SEQ ID NO: 869854 - DNA, 33 bp, Homo sapien
ggacaaagataataaacaggagtgactgtcagt

SEQ ID NO: 869855 - DNA, 33 bp, Homo sapien
gcattttctgagaactaacttaattatgggtca

SEQ ID NO: 869856 - DNA, 33 bp, Homo sapien
gcattttctgagaacttacttaattatgggtca

SEQ ID NO: 869857 - DNA, 33 bp, Homo sapien
tatctgttcagaaaccagaaattaccacatggt

SEQ ID NO: 869858 - DNA, 33 bp, Homo sapien
tatctgttcagaaaccggaaattaccacatggt

SEQ ID NO: 869859 - DNA, 33 bp, Homo sapien
tttttatggttggaaaaactgcggcttgtttca

SEQ ID NO: 869860 - DNA, 33 bp, Homo sapien
tttttatggttggaaagactgcggcttgtttca

SEQ ID NO: 869861 - DNA, 33 bp, Homo sapien
attattgaacaaagcacggtatataggaaatac

SEQ ID NO: 869862 - DNA, 33 bp, Homo sapien
attattgaacaaagcagggtatataggaaatac

SEQ ID NO: 869863 - DNA, 33 bp, Homo sapien
gcttaggaaaaaactaaaagtcatacaagatat

SEQ ID NO: 869864 - DNA, 33 bp, Homo sapien
gcttaggaaaaaactagaagtcatacaagatat

SEQ ID NO: 869865 - DNA, 33 bp, Homo sapien
gattagaaatgtttccgattatctcattgattt

SEQ ID NO: 869866 - DNA, 33 bp, Homo sapien
gattagaaatgtttcctattatctcattgattt

SEQ ID NO: 869867 - DNA, 33 bp, Homo sapien
atgaaatagaaacataagatttggatgcttggt

SEQ ID NO: 869868 - DNA, 33 bp, Homo sapien
atgaaatagaaacataggatttggatgcttggt

SEQ ID NO: 869869 - DNA, 33 bp, Homo sapien
acagacaggataggtaactacaaattgattaaa

SEQ ID NO: 869870 - DNA, 33 bp, Homo sapien
acagacaggataggtagctacaaattgattaaa

SEQ ID NO: 869871 - DNA, 33 bp, Homo sapien
gggatgggttgaataaaggttgttgtgaaaggg

SEQ ID NO: 869872 - DNA, 33 bp, Homo sapien
gggatgggttgaataagggttgttgtgaaaggg

SEQ ID NO: 869873 - DNA, 33 bp, Homo sapien
acagaattaattccaacgtaagtccagggactg

SEQ ID NO: 869874 - DNA, 33 bp, Homo sapien
acagaattaattccaatgtaagtccagggactg

SEQ ID NO: 869875 - DNA, 33 bp, Homo sapien
aaagtgacatacagaaaataggagtaagcacaa

SEQ ID NO: 869876 - DNA, 33 bp, Homo sapien
aaagtgacatacagaagataggagtaagcacaa

SEQ ID NO: 869877 - DNA, 33 bp, Homo sapien
atagccaggggcttgactaactccacgtctcca

SEQ ID NO: 869878 - DNA, 33 bp, Homo sapien
atagccaggggcttgagtaactccacgtctcca

SEQ ID NO: 869879 - DNA, 33 bp, Homo sapien
aaaactgtagccttataaagaaaagctcagtcc

SEQ ID NO: 869880 - DNA, 33 bp, Homo sapien
aaaactgtagccttatgaagaaaagctcagtcc

SEQ ID NO: 869881 - DNA, 33 bp, Homo sapien
tgctatccttcacttcaaacaactgcacacacc

SEQ ID NO: 869882 - DNA, 33 bp, Homo sapien
tgctatccttcacttctaacaactgcacacacc

SEQ ID NO: 869883 - DNA, 33 bp, Homo sapien
aagctcagtgagaaaacggcagctattgattgc

SEQ ID NO: 869884 - DNA, 33 bp, Homo sapien
aagctcagtgagaaaatggcagctattgattgc

SEQ ID NO: 869885 - DNA, 33 bp, Homo sapien
ttcattccttaatctcacttcttaatcccctaa

SEQ ID NO: 869886 - DNA, 33 bp, Homo sapien
ttcattccttaatctcgcttcttaatcccctaa

SEQ ID NO: 869887 - DNA, 33 bp, Homo sapien
ggactgtgatgacaccacttgatcaaaccatct

SEQ ID NO: 869888 - DNA, 33 bp, Homo sapien
ggactgtgatgacaccgcttgatcaaaccatct

SEQ ID NO: 869889 - DNA, 33 bp, Homo sapien
agtttctgcaaatctgccacttccctactttgt

SEQ ID NO: 869890 - DNA, 33 bp, Homo sapien
agtttctgcaaatctgtcacttccctactttgt

SEQ ID NO: 869891 - DNA, 33 bp, Homo sapien
aggaggaaaataactaacaactgacaaagtagg

SEQ ID NO: 869892 - DNA, 33 bp, Homo sapien
aggaggaaaataactagcaactgacaaagtagg

SEQ ID NO: 869893 - DNA, 33 bp, Homo sapien
aggcaaatccaatctacagaaagacatagaggg

SEQ ID NO: 869894 - DNA, 33 bp, Homo sapien
aggcaaatccaatctagagaaagacatagaggg

SEQ ID NO: 869895 - DNA, 33 bp, Homo sapien
ctaattgtcatgtgctcaatttaaatatcttaa

SEQ ID NO: 869896 - DNA, 33 bp, Homo sapien
ctaattgtcatgtgctgaatttaaatatcttaa

SEQ ID NO: 869897 - DNA, 33 bp, Homo sapien
gtattgagtcaactaacctataaccacgttgca

SEQ ID NO: 869898 - DNA, 33 bp, Homo sapien
gtattgagtcaactaatctataaccacgttgca

SEQ ID NO: 869899 - DNA, 33 bp, Homo sapien
ttaaaatcaccatgccaatttctgctcaaaaaa

SEQ ID NO: 869900 - DNA, 33 bp, Homo sapien
ttaaaatcaccatgccgatttctgctcaaaaaa

SEQ ID NO: 869901 - DNA, 33 bp, Homo sapien
aggttgtattaatataaggcttccactttgcta

SEQ ID NO: 869902 - DNA, 33 bp, Homo sapien
aggttgtattaatatacggcttccactttgcta

SEQ ID NO: 869903 - DNA, 33 bp, Homo sapien
ggatacaacaaaaagaaatggcagtaccaagtg

SEQ ID NO: 869904 - DNA, 33 bp, Homo sapien
ggatacaacaaaaagagatggcagtaccaagtg

SEQ ID NO: 869905 - DNA, 33 bp, Homo sapien
atcatcttacacagataaaatttgacattgtag

SEQ ID NO: 869906 - DNA, 33 bp, Homo sapien
atcatcttacacagatgaaatttgacattgtag

SEQ ID NO: 869907 - DNA, 33 bp, Homo sapien
ttgtgtaatttgtaaaccaggaaatatttaact

SEQ ID NO: 869908 - DNA, 33 bp, Homo sapien
ttgtgtaatttgtaaatcaggaaatatttaact

SEQ ID NO: 869909 - DNA, 33 bp, Homo sapien
tgtataaatccataagaaagtgaactgagaaaa

SEQ ID NO: 869910 - DNA, 33 bp, Homo sapien
tgtataaatccataaggaagtgaactgagaaaa

SEQ ID NO: 869911 - DNA, 33 bp, Homo sapien
cagcagtattggaaaacgagctccaagcaggca

SEQ ID NO: 869912 - DNA, 33 bp, Homo sapien
cagcagtattggaaaatgagctccaagcaggca

SEQ ID NO: 869913 - DNA, 33 bp, Homo sapien
tttggtgcattccagacctgtctttcattcatg

SEQ ID NO: 869914 - DNA, 33 bp, Homo sapien
tttggtgcattccagatctgtctttcattcatg

SEQ ID NO: 869915 - DNA, 33 bp, Homo sapien
agagtcacctggagtacaaagtggagcagtttg

SEQ ID NO: 869916 - DNA, 33 bp, Homo sapien
agagtcacctggagtataaagtggagcagtttg

SEQ ID NO: 869917 - DNA, 33 bp, Homo sapien
aagagcaattcatatgccaatagtcagataagt

SEQ ID NO: 869918 - DNA, 33 bp, Homo sapien
aagagcaattcatatgtcaatagtcagataagt

SEQ ID NO: 869919 - DNA, 33 bp, Homo sapien
taaagcaaagatctgaaccaagtgaccaattaa

SEQ ID NO: 869920 - DNA, 33 bp, Homo sapien
taaagcaaagatctgacccaagtgaccaattaa

SEQ ID NO: 869921 - DNA, 33 bp, Homo sapien
agtactcttctgttggccacaatgacaggtgtg

SEQ ID NO: 869922 - DNA, 33 bp, Homo sapien
agtactcttctgttggtcacaatgacaggtgtg

SEQ ID NO: 869923 - DNA, 33 bp, Homo sapien
gaaggctcatctataaatcctacctagatgttc

SEQ ID NO: 869924 - DNA, 33 bp, Homo sapien
gaaggctcatctataactcctacctagatgttc

SEQ ID NO: 869925 - DNA, 33 bp, Homo sapien
tttccatcgctcacttcaagcagctccactccc

SEQ ID NO: 869926 - DNA, 33 bp, Homo sapien
tttccatcgctcactttaagcagctccactccc

SEQ ID NO: 869927 - DNA, 33 bp, Homo sapien
gggtatctttcaacacacaaaaaatagcaaaca

SEQ ID NO: 869928 - DNA, 33 bp, Homo sapien
gggtatctttcaacacgcaaaaaatagcaaaca

SEQ ID NO: 869929 - DNA, 33 bp, Homo sapien
aaaccgtagtgtaacacataactcacctttcaa

SEQ ID NO: 869930 - DNA, 33 bp, Homo sapien
aaaccgtagtgtaacagataactcacctttcaa

SEQ ID NO: 869931 - DNA, 33 bp, Homo sapien
atttagccaaataccactgaaacatttgagttc

SEQ ID NO: 869932 - DNA, 33 bp, Homo sapien
atttagccaaataccattgaaacatttgagttc

SEQ ID NO: 869933 - DNA, 33 bp, Homo sapien
aggatgtctgaaagaccagagaacagagattaa

SEQ ID NO: 869934 - DNA, 33 bp, Homo sapien
aggatgtctgaaagacgagagaacagagattaa

SEQ ID NO: 869935 - DNA, 33 bp, Homo sapien
ttctcttgtgcctttcaacttaaaaattatgtc

SEQ ID NO: 869936 - DNA, 33 bp, Homo sapien
ttctcttgtgcctttccacttaaaaattatgtc

SEQ ID NO: 869937 - DNA, 33 bp, Homo sapien
tgatgtttggagtatgcatgaatccgtcatcaa

SEQ ID NO: 869938 - DNA, 33 bp, Homo sapien
tgatgtttggagtatggatgaatccgtcatcaa

SEQ ID NO: 869939 - DNA, 33 bp, Homo sapien
tatgggtcaatcagaacagcaagaaaacaaggc

SEQ ID NO: 869940 - DNA, 33 bp, Homo sapien
tatgggtcaatcagaagagcaagaaaacaaggc

SEQ ID NO: 869941 - DNA, 33 bp, Homo sapien
tttacaaattttggacaactggataggtcttcg

SEQ ID NO: 869942 - DNA, 33 bp, Homo sapien
tttacaaattttggaccactggataggtcttcg

SEQ ID NO: 869943 - DNA, 33 bp, Homo sapien
accaactttctgttacgaatgattcacagactt

SEQ ID NO: 869944 - DNA, 33 bp, Homo sapien
accaactttctgttactaatgattcacagactt

SEQ ID NO: 869945 - DNA, 33 bp, Homo sapien
caagaagatgatctaaaatgaaccaactttctg

SEQ ID NO: 869946 - DNA, 33 bp, Homo sapien
caagaagatgatctaatatgaaccaactttctg

SEQ ID NO: 869947 - DNA, 33 bp, Homo sapien
ataatagataacataaaaattttgttggcctcc

SEQ ID NO: 869948 - DNA, 33 bp, Homo sapien
ataatagataacataagaattttgttggcctcc

SEQ ID NO: 869949 - DNA, 33 bp, Homo sapien
tgctccagggaccgaccaacatagaagtagcaa

SEQ ID NO: 869950 - DNA, 33 bp, Homo sapien
tgctccagggaccgactaacatagaagtagcaa

SEQ ID NO: 869951 - DNA, 33 bp, Homo sapien
tgcaacagcaatcgacagcattatcaggatggc

SEQ ID NO: 869952 - DNA, 33 bp, Homo sapien
tgcaacagcaatcgacggcattatcaggatggc

SEQ ID NO: 869953 - DNA, 33 bp, Homo sapien
acctacagcatttaagcctctaagtctgctatt

SEQ ID NO: 869954 - DNA, 33 bp, Homo sapien
acctacagcatttaaggctctaagtctgctatt

SEQ ID NO: 869955 - DNA, 33 bp, Homo sapien
tctgctattacataaaagctgtgaaaacaaatc

SEQ ID NO: 869956 - DNA, 33 bp, Homo sapien
tctgctattacataaaggctgtgaaaacaaatc

SEQ ID NO: 869957 - DNA, 33 bp, Homo sapien
gttggacagacaaagaaggaaactagatgtcaa

SEQ ID NO: 869958 - DNA, 33 bp, Homo sapien
gttggacagacaaagacggaaactagatgtcaa

SEQ ID NO: 869959 - DNA, 33 bp, Homo sapien
tatgaactatatgctgcacattattcaaataca

SEQ ID NO: 869960 - DNA, 33 bp, Homo sapien
tatgaactatatgctgtacattattcaaataca

SEQ ID NO: 869961 - DNA, 33 bp, Homo sapien
tcaggctttggaaccacgtcagccggggttaaa

SEQ ID NO: 869962 - DNA, 33 bp, Homo sapien
tcaggctttggaaccatgtcagccggggttaaa

SEQ ID NO: 869963 - DNA, 33 bp, Homo sapien
tctatccttggtttagaaaagcactgaagatga

SEQ ID NO: 869964 - DNA, 33 bp, Homo sapien
tctatccttggtttaggaaagcactgaagatga

SEQ ID NO: 869965 - DNA, 33 bp, Homo sapien
tacagataaagaaaggacaccagcatattagga

SEQ ID NO: 869966 - DNA, 33 bp, Homo sapien
tacagataaagaaagggcaccagcatattagga

SEQ ID NO: 869967 - DNA, 33 bp, Homo sapien
tgctgtctgctcatccactgactgtgttcactc

SEQ ID NO: 869968 - DNA, 33 bp, Homo sapien
tgctgtctgctcatccgctgactgtgttcactc

SEQ ID NO: 869969 - DNA, 33 bp, Homo sapien
cttttattctgaaccaacatcaggaagctagca

SEQ ID NO: 869970 - DNA, 33 bp, Homo sapien
cttttattctgaaccagcatcaggaagctagca

SEQ ID NO: 869971 - DNA, 33 bp, Homo sapien
ttaatggttttgtgaacggaactgatatttgat

SEQ ID NO: 869972 - DNA, 33 bp, Homo sapien
ttaatggttttgtgaatggaactgatatttgat

SEQ ID NO: 869973 - DNA, 33 bp, Homo sapien
tttcagaacagcagtaccttcatgatataaaac

SEQ ID NO: 869974 - DNA, 33 bp, Homo sapien
tttcagaacagcagtagcttcatgatataaaac

SEQ ID NO: 869975 - DNA, 33 bp, Homo sapien
attttctgaacttaaaatattgagaaccagaac

SEQ ID NO: 869976 - DNA, 33 bp, Homo sapien
attttctgaacttaaagtattgagaaccagaac

SEQ ID NO: 869977 - DNA, 33 bp, Homo sapien
gttctccaaaatacaacaaaaacctggcacttt

SEQ ID NO: 869978 - DNA, 33 bp, Homo sapien
gttctccaaaatacaataaaaacctggcacttt

SEQ ID NO: 869979 - DNA, 33 bp, Homo sapien
ccaatagacactcttaaagaaggattgctgatg

SEQ ID NO: 869980 - DNA, 33 bp, Homo sapien
ccaatagacactcttagagaaggattgctgatg

SEQ ID NO: 869981 - DNA, 33 bp, Homo sapien
tttcttggggaaaaaaatgcattcacttccctt

SEQ ID NO: 869982 - DNA, 33 bp, Homo sapien
tttcttggggaaaaaagtgcattcacttccctt

SEQ ID NO: 869983 - DNA, 33 bp, Homo sapien
ggccattctagctaaactgggcctttagttcag

SEQ ID NO: 869984 - DNA, 33 bp, Homo sapien
ggccattctagctaaattgggcctttagttcag

SEQ ID NO: 869985 - DNA, 33 bp, Homo sapien
tataggagctttccacactttatcattactttc

SEQ ID NO: 869986 - DNA, 33 bp, Homo sapien
tataggagctttccacgctttatcattactttc

SEQ ID NO: 869987 - DNA, 33 bp, Homo sapien
ttattgataatgataaacacactttagaaatcg

SEQ ID NO: 869988 - DNA, 33 bp, Homo sapien
ttattgataatgataagcacactttagaaatcg

SEQ ID NO: 869989 - DNA, 33 bp, Homo sapien
aggctacagtgagttccactgcattccaacctg

SEQ ID NO: 869990 - DNA, 33 bp, Homo sapien
aggctacagtgagttctactgcattccaacctg

SEQ ID NO: 869991 - DNA, 33 bp, Homo sapien
ttttgttgttgtaggacgtttgtgttgaggatc

SEQ ID NO: 869992 - DNA, 33 bp, Homo sapien
ttttgttgttgtaggatgtttgtgttgaggatc

SEQ ID NO: 869993 - DNA, 33 bp, Homo sapien
agacatttgaatcttaccacatggttactctgg

SEQ ID NO: 869994 - DNA, 33 bp, Homo sapien
agacatttgaatcttatcacatggttactctgg

SEQ ID NO: 869995 - DNA, 33 bp, Homo sapien
caggctgtttggcgtacacataaaatgctccaa

SEQ ID NO: 869996 - DNA, 33 bp, Homo sapien
caggctgtttggcgtatacataaaatgctccaa

SEQ ID NO: 869997 - DNA, 33 bp, Homo sapien
aaaactctgaaataacagtatgaaataatatgc

SEQ ID NO: 869998 - DNA, 33 bp, Homo sapien
aaaactctgaaataacggtatgaaataatatgc

SEQ ID NO: 869999 - DNA, 33 bp, Homo sapien
ttcaaatggcaagttcccttgaatgagtgaata

SEQ ID NO: 870000 - DNA, 33 bp, Homo sapien
ttcaaatggcaagttctcttgaatgagtgaata

SEQ ID NO: 870001 - DNA, 33 bp, Homo sapien
tgctacagcagttagacgactgtaaagtagtta

SEQ ID NO: 870002 - DNA, 33 bp, Homo sapien
tgctacagcagttagatgactgtaaagtagtta

SEQ ID NO: 870003 - DNA, 33 bp, Homo sapien
ttaagttcatctgtgaaacattcaaatcaaagc

SEQ ID NO: 870004 - DNA, 33 bp, Homo sapien
ttaagttcatctgtgagacattcaaatcaaagc

SEQ ID NO: 870005 - DNA, 33 bp, Homo sapien
aaatatgaaatgctaacgacaagtctggaaagg

SEQ ID NO: 870006 - DNA, 33 bp, Homo sapien
aaatatgaaatgctaatgacaagtctggaaagg

SEQ ID NO: 870007 - DNA, 33 bp, Homo sapien
tagtttcttggcacccacaaggcaagtaatata

SEQ ID NO: 870008 - DNA, 33 bp, Homo sapien
tagtttcttggcaccctcaaggcaagtaatata

SEQ ID NO: 870009 - DNA, 33 bp, Homo sapien
aatagaaccttccagcaattgtcttcctgcagg

SEQ ID NO: 870010 - DNA, 33 bp, Homo sapien
aatagaaccttccagcgattgtcttcctgcagg

SEQ ID NO: 870011 - DNA, 33 bp, Homo sapien
actcatctcagttttaacttttatttcagtgct

SEQ ID NO: 870012 - DNA, 33 bp, Homo sapien
actcatctcagttttaccttttatttcagtgct

SEQ ID NO: 870013 - DNA, 33 bp, Homo sapien
taaacaaatgaaaatcaacaacttttctaggat

SEQ ID NO: 870014 - DNA, 33 bp, Homo sapien
taaacaaatgaaaatcgacaacttttctaggat

SEQ ID NO: 870015 - DNA, 33 bp, Homo sapien
gttcaggatacagttcaaaatggagtttcttat

SEQ ID NO: 870016 - DNA, 33 bp, Homo sapien
gttcaggatacagttccaaatggagtttcttat

SEQ ID NO: 870017 - DNA, 33 bp, Homo sapien
ggtctaaaccagtaggccattaatctgtccttt

SEQ ID NO: 870018 - DNA, 33 bp, Homo sapien
ggtctaaaccagtaggtcattaatctgtccttt

SEQ ID NO: 870019 - DNA, 33 bp, Homo sapien
taacacaaaactgaaacgttgtcatttgaataa

SEQ ID NO: 870020 - DNA, 33 bp, Homo sapien
taacacaaaactgaaaggttgtcatttgaataa

SEQ ID NO: 870021 - DNA, 33 bp, Homo sapien
cattatgaactcttacacctacttattcaaatg

SEQ ID NO: 870022 - DNA, 33 bp, Homo sapien
cattatgaactcttacccctacttattcaaatg

SEQ ID NO: 870023 - DNA, 33 bp, Homo sapien
gcattggagagtgcatcacaatgtacaaattcc

SEQ ID NO: 870024 - DNA, 33 bp, Homo sapien
gcattggagagtgcattacaatgtacaaattcc

SEQ ID NO: 870025 - DNA, 33 bp, Homo sapien
ccaatacagtgtttcaaataactcatagctgca

SEQ ID NO: 870026 - DNA, 33 bp, Homo sapien
ccaatacagtgtttcagataactcatagctgca

SEQ ID NO: 870027 - DNA, 33 bp, Homo sapien
tgcttgggatatagtaagtgatcaatgcttcct

SEQ ID NO: 870028 - DNA, 33 bp, Homo sapien
tgcttgggatatagtaggtgatcaatgcttcct

SEQ ID NO: 870029 - DNA, 33 bp, Homo sapien
accatatttaccctaacgtgattattacacatt

SEQ ID NO: 870030 - DNA, 33 bp, Homo sapien
accatatttaccctaatgtgattattacacatt

SEQ ID NO: 870031 - DNA, 33 bp, Homo sapien
tttatgggttacaggagatattttgatacagac

SEQ ID NO: 870032 - DNA, 33 bp, Homo sapien
tttatgggttacaggatatattttgatacagac

SEQ ID NO: 870033 - DNA, 33 bp, Homo sapien
atagaacctgtttaggcagaatctcatgagcaa

SEQ ID NO: 870034 - DNA, 33 bp, Homo sapien
atagaacctgtttaggtagaatctcatgagcaa

SEQ ID NO: 870035 - DNA, 33 bp, Homo sapien
ttctatggcagcaaagcattcctgatctttgga

SEQ ID NO: 870036 - DNA, 33 bp, Homo sapien
ttctatggcagcaaaggattcctgatctttgga

SEQ ID NO: 870037 - DNA, 33 bp, Homo sapien
cattcacaggaagtggcatttatgcaccaaatg

SEQ ID NO: 870038 - DNA, 33 bp, Homo sapien
cattcacaggaagtggtatttatgcaccaaatg

SEQ ID NO: 870039 - DNA, 33 bp, Homo sapien
cctctctctcagttaaaagccaaataccccccc

SEQ ID NO: 870040 - DNA, 33 bp, Homo sapien
cctctctctcagttaagagccaaataccccccc

SEQ ID NO: 870041 - DNA, 33 bp, Homo sapien
ttaagattataaagtaagccaagtgcagtggct

SEQ ID NO: 870042 - DNA, 33 bp, Homo sapien
ttaagattataaagtaggccaagtgcagtggct

SEQ ID NO: 870043 - DNA, 33 bp, Homo sapien
aacatttatctcagtaagaaggaaagcacagaa

SEQ ID NO: 870044 - DNA, 33 bp, Homo sapien
aacatttatctcagtatgaaggaaagcacagaa

SEQ ID NO: 870045 - DNA, 33 bp, Homo sapien
atgaggtaatcttccacctttagagttggatgg

SEQ ID NO: 870046 - DNA, 33 bp, Homo sapien
atgaggtaatcttccagctttagagttggatgg

SEQ ID NO: 870047 - DNA, 33 bp, Homo sapien
aaagccgaccaataaacatggtgatagaacaga

SEQ ID NO: 870048 - DNA, 33 bp, Homo sapien
aaagccgaccaataaatatggtgatagaacaga

SEQ ID NO: 870049 - DNA, 33 bp, Homo sapien
tttaaataacattttaacttctccatgtaaata

SEQ ID NO: 870050 - DNA, 33 bp, Homo sapien
tttaaataacattttagcttctccatgtaaata

SEQ ID NO: 870051 - DNA, 33 bp, Homo sapien
catcgccacattcttcacgttgtctttttgtag

SEQ ID NO: 870052 - DNA, 33 bp, Homo sapien
catcgccacattcttcgcgttgtctttttgtag

SEQ ID NO: 870053 - DNA, 33 bp, Homo sapien
agatctaaaggaagagaatgtaaccaccattca

SEQ ID NO: 870054 - DNA, 33 bp, Homo sapien
agatctaaaggaagaggatgtaaccaccattca

SEQ ID NO: 870055 - DNA, 33 bp, Homo sapien
cgtatagacctggtatcagtgacatatcagatt

SEQ ID NO: 870056 - DNA, 33 bp, Homo sapien
cgtatagacctggtattagtgacatatcagatt

SEQ ID NO: 870057 - DNA, 33 bp, Homo sapien
ggggatgatgttctaactacagtgtctcatacc

SEQ ID NO: 870058 - DNA, 33 bp, Homo sapien
ggggatgatgttctaattacagtgtctcatacc

SEQ ID NO: 870059 - DNA, 33 bp, Homo sapien
aaagaacacgcggacacacttgtttggcttctg

SEQ ID NO: 870060 - DNA, 33 bp, Homo sapien
aaagaacacgcggacagacttgtttggcttctg

SEQ ID NO: 870061 - DNA, 33 bp, Homo sapien
gaatcccagcaagaacacaacgagccacaaatt

SEQ ID NO: 870062 - DNA, 33 bp, Homo sapien
gaatcccagcaagaacgcaacgagccacaaatt

SEQ ID NO: 870063 - DNA, 33 bp, Homo sapien
cttgaacgcactaaaaaacaaaagcattgactt

SEQ ID NO: 870064 - DNA, 33 bp, Homo sapien
cttgaacgcactaaaacacaaaagcattgactt

SEQ ID NO: 870065 - DNA, 33 bp, Homo sapien
attttactttgctaacagggaccttattttact

SEQ ID NO: 870066 - DNA, 33 bp, Homo sapien
attttactttgctaacggggaccttattttact

SEQ ID NO: 870067 - DNA, 33 bp, Homo sapien
acaacctctctctccaaattctaggctagtcta

SEQ ID NO: 870068 - DNA, 33 bp, Homo sapien
acaacctctctctccagattctaggctagtcta

SEQ ID NO: 870069 - DNA, 33 bp, Homo sapien
acgggagaccctactccgagattctcaatcaag

SEQ ID NO: 870070 - DNA, 33 bp, Homo sapien
acgggagaccctactcggagattctcaatcaag

SEQ ID NO: 870071 - DNA, 33 bp, Homo sapien
acacacttcagaaaaaatctctcagagctcctt

SEQ ID NO: 870072 - DNA, 33 bp, Homo sapien
acacacttcagaaaaattctctcagagctcctt

SEQ ID NO: 870073 - DNA, 33 bp, Homo sapien
gctccaagtcattaaaatgtctccatcctcaga

SEQ ID NO: 870074 - DNA, 33 bp, Homo sapien
gctccaagtcattaaagtgtctccatcctcaga

SEQ ID NO: 870075 - DNA, 33 bp, Homo sapien
accacttggcagcttacgtcaactggcagggct

SEQ ID NO: 870076 - DNA, 33 bp, Homo sapien
accacttggcagcttatgtcaactggcagggct

SEQ ID NO: 870077 - DNA, 33 bp, Homo sapien
ctcacaaaaacgttataagacaggtattattat

SEQ ID NO: 870078 - DNA, 33 bp, Homo sapien
ctcacaaaaacgttatgagacaggtattattat

SEQ ID NO: 870079 - DNA, 33 bp, Homo sapien
ttaagatctgttaaaactcaaatattccctata

SEQ ID NO: 870080 - DNA, 33 bp, Homo sapien
ttaagatctgttaaaagtcaaatattccctata

SEQ ID NO: 870081 - DNA, 33 bp, Homo sapien
ccaaattgttcctttacaatatcctgtatttgt

SEQ ID NO: 870082 - DNA, 33 bp, Homo sapien
ccaaattgttcctttagaatatcctgtatttgt

SEQ ID NO: 870083 - DNA, 33 bp, Homo sapien
tctgcagtttgttttacagaatttgtacaaaag

SEQ ID NO: 870084 - DNA, 33 bp, Homo sapien
tctgcagtttgttttatagaatttgtacaaaag

SEQ ID NO: 870085 - DNA, 33 bp, Homo sapien
aataaatgtaacaatgaaagagattttgggtct

SEQ ID NO: 870086 - DNA, 33 bp, Homo sapien
aataaatgtaacaatggaagagattttgggtct

SEQ ID NO: 870087 - DNA, 33 bp, Homo sapien
tgctaatttactgatacgctagtttaggtcagt

SEQ ID NO: 870088 - DNA, 33 bp, Homo sapien
tgctaatttactgatatgctagtttaggtcagt

SEQ ID NO: 870089 - DNA, 33 bp, Homo sapien
aacagaaaagcgaaacaaaaaagtatctctgtg

SEQ ID NO: 870090 - DNA, 33 bp, Homo sapien
aacagaaaagcgaaaccaaaaagtatctctgtg

SEQ ID NO: 870091 - DNA, 33 bp, Homo sapien
agtctaacatgtttaacgaaggaatggacagca

SEQ ID NO: 870092 - DNA, 33 bp, Homo sapien
agtctaacatgtttaatgaaggaatggacagca

SEQ ID NO: 870093 - DNA, 33 bp, Homo sapien
tacaaacatcctttgaagcatggtttataatta

SEQ ID NO: 870094 - DNA, 33 bp, Homo sapien
tacaaacatcctttgaggcatggtttataatta

SEQ ID NO: 870095 - DNA, 33 bp, Homo sapien
gcctgggctcgagcacaaataatattctcagta

SEQ ID NO: 870096 - DNA, 33 bp, Homo sapien
gcctgggctcgagcacgaataatattctcagta

SEQ ID NO: 870097 - DNA, 33 bp, Homo sapien
ccctaatgaaatatcaatgaagacaagaatcca

SEQ ID NO: 870098 - DNA, 33 bp, Homo sapien
ccctaatgaaatatcagtgaagacaagaatcca

SEQ ID NO: 870099 - DNA, 33 bp, Homo sapien
ttgtttgcctagcagaaatgcagtttagcctgg

SEQ ID NO: 870100 - DNA, 33 bp, Homo sapien
ttgtttgcctagcagacatgcagtttagcctgg

SEQ ID NO: 870101 - DNA, 33 bp, Homo sapien
taaattctggtattcaaatcaagtctgtgtgtg

SEQ ID NO: 870102 - DNA, 33 bp, Homo sapien
taaattctggtattcacatcaagtctgtgtgtg

SEQ ID NO: 870103 - DNA, 33 bp, Homo sapien
acagagattggcattaactcctatgcagtaaat

SEQ ID NO: 870104 - DNA, 33 bp, Homo sapien
acagagattggcattatctcctatgcagtaaat

SEQ ID NO: 870105 - DNA, 33 bp, Homo sapien
ccacctcatagtaggaaggtgtcaagagttttg

SEQ ID NO: 870106 - DNA, 33 bp, Homo sapien
ccacctcatagtaggagggtgtcaagagttttg

SEQ ID NO: 870107 - DNA, 33 bp, Homo sapien
cccattacaaccaacacagttttgccaatgaga

SEQ ID NO: 870108 - DNA, 33 bp, Homo sapien
cccattacaaccaacatagttttgccaatgaga

SEQ ID NO: 870109 - DNA, 33 bp, Homo sapien
tgttgcagttttcggcacatctcatcgatttgc

SEQ ID NO: 870110 - DNA, 33 bp, Homo sapien
tgttgcagttttcggcgcatctcatcgatttgc

SEQ ID NO: 870111 - DNA, 33 bp, Homo sapien
tcaaaatatttgttgaactaatggtggtcatgt

SEQ ID NO: 870112 - DNA, 33 bp, Homo sapien
tcaaaatatttgttgagctaatggtggtcatgt

SEQ ID NO: 870113 - DNA, 33 bp, Homo sapien
gttatgccacctactcagaattccacaacactg

SEQ ID NO: 870114 - DNA, 33 bp, Homo sapien
gttatgccacctactcggaattccacaacactg

SEQ ID NO: 870115 - DNA, 33 bp, Homo sapien
tccttgagcaattcacactgcagtcagaagaat

SEQ ID NO: 870116 - DNA, 33 bp, Homo sapien
tccttgagcaattcacgctgcagtcagaagaat

SEQ ID NO: 870117 - DNA, 33 bp, Homo sapien
ctctcttcctgtgtccaactcctccagcaaagg

SEQ ID NO: 870118 - DNA, 33 bp, Homo sapien
ctctcttcctgtgtcccactcctccagcaaagg

SEQ ID NO: 870119 - DNA, 33 bp, Homo sapien
aaaagtagttgtagtcaatctctcagggtattg

SEQ ID NO: 870120 - DNA, 33 bp, Homo sapien
aaaagtagttgtagtctatctctcagggtattg

SEQ ID NO: 870121 - DNA, 33 bp, Homo sapien
ccctgccggcccttcactacccttcctagactc

SEQ ID NO: 870122 - DNA, 33 bp, Homo sapien
ccctgccggcccttcattacccttcctagactc

SEQ ID NO: 870123 - DNA, 33 bp, Homo sapien
taaaaagagaatgaaacgcagtcatttgcaatg

SEQ ID NO: 870124 - DNA, 33 bp, Homo sapien
taaaaagagaatgaaatgcagtcatttgcaatg

SEQ ID NO: 870125 - DNA, 33 bp, Homo sapien
tgctaaaaagaacagcaataacccttttctgtt

SEQ ID NO: 870126 - DNA, 33 bp, Homo sapien
tgctaaaaagaacagcgataacccttttctgtt

SEQ ID NO: 870127 - DNA, 33 bp, Homo sapien
aaccaaattatgcatcccccaattcaggaagct

SEQ ID NO: 870128 - DNA, 33 bp, Homo sapien
aaccaaattatgcatcgcccaattcaggaagct

SEQ ID NO: 870129 - DNA, 33 bp, Homo sapien
catcagacaaactcaaccttgaacggtggggtg

SEQ ID NO: 870130 - DNA, 33 bp, Homo sapien
catcagacaaactcaatcttgaacggtggggtg

SEQ ID NO: 870131 - DNA, 33 bp, Homo sapien
atatactaaccccaaaccaccaaccaaattatt

SEQ ID NO: 870132 - DNA, 33 bp, Homo sapien
atatactaaccccaaatcaccaaccaaattatt

SEQ ID NO: 870133 - DNA, 33 bp, Homo sapien
tcatccaagcgtatggacatggtcttttaaaat

SEQ ID NO: 870134 - DNA, 33 bp, Homo sapien
tcatccaagcgtatggtcatggtcttttaaaat

SEQ ID NO: 870135 - DNA, 33 bp, Homo sapien
cttggaaaagtcaaaaactggccttgtggcaga

SEQ ID NO: 870136 - DNA, 33 bp, Homo sapien
cttggaaaagtcaaaacctggccttgtggcaga

SEQ ID NO: 870137 - DNA, 33 bp, Homo sapien
aaagccattgagaaacccttcacagcataggca

SEQ ID NO: 870138 - DNA, 33 bp, Homo sapien
aaagccattgagaaactcttcacagcataggca

SEQ ID NO: 870139 - DNA, 33 bp, Homo sapien
aaaattacaccaacgcaaatcaaaaaattactc

SEQ ID NO: 870140 - DNA, 33 bp, Homo sapien
aaaattacaccaacgcgaatcaaaaaattactc

SEQ ID NO: 870141 - DNA, 33 bp, Homo sapien
gttcagataactcaaaattcagtttaaacacta

SEQ ID NO: 870142 - DNA, 33 bp, Homo sapien
gttcagataactcaaagttcagtttaaacacta

SEQ ID NO: 870143 - DNA, 33 bp, Homo sapien
aggagagttcagggggacaaagaataaattgta

SEQ ID NO: 870144 - DNA, 33 bp, Homo sapien
aggagagttcaggggggcaaagaataaattgta

SEQ ID NO: 870145 - DNA, 33 bp, Homo sapien
aagctgcaaagtagcagaagttcttaatagtta

SEQ ID NO: 870146 - DNA, 33 bp, Homo sapien
aagctgcaaagtagcataagttcttaatagtta

SEQ ID NO: 870147 - DNA, 33 bp, Homo sapien
tcttgtgtaggcagaggataatttttctctcat

SEQ ID NO: 870148 - DNA, 33 bp, Homo sapien
tcttgtgtaggcagagtataatttttctctcat

SEQ ID NO: 870149 - DNA, 33 bp, Homo sapien
tttgatgtggcttaacagaaaatcattaacaca

SEQ ID NO: 870150 - DNA, 33 bp, Homo sapien
tttgatgtggcttaacggaaaatcattaacaca

SEQ ID NO: 870151 - DNA, 33 bp, Homo sapien
tgctggacaggtatccacatcataagaaaccac

SEQ ID NO: 870152 - DNA, 33 bp, Homo sapien
tgctggacaggtatccgcatcataagaaaccac

SEQ ID NO: 870153 - DNA, 33 bp, Homo sapien
aatttggcacctagacaaactattattggcagc

SEQ ID NO: 870154 - DNA, 33 bp, Homo sapien
aatttggcacctagacgaactattattggcagc

SEQ ID NO: 870155 - DNA, 33 bp, Homo sapien
gcatctgcagctgttaaacctgccttaatcatg

SEQ ID NO: 870156 - DNA, 33 bp, Homo sapien
gcatctgcagctgttacacctgccttaatcatg

SEQ ID NO: 870157 - DNA, 33 bp, Homo sapien
caggacactgttggccccttgtcaaaactaaca

SEQ ID NO: 870158 - DNA, 33 bp, Homo sapien
caggacactgttggcctcttgtcaaaactaaca

SEQ ID NO: 870159 - DNA, 33 bp, Homo sapien
tggtcattccacaaaaagttctcaaactgtccc

SEQ ID NO: 870160 - DNA, 33 bp, Homo sapien
tggtcattccacaaaaggttctcaaactgtccc

SEQ ID NO: 870161 - DNA, 33 bp, Homo sapien
catattgtcagtttacaagaaacgcagagggac

SEQ ID NO: 870162 - DNA, 33 bp, Homo sapien
catattgtcagtttactagaaacgcagagggac

SEQ ID NO: 870163 - DNA, 33 bp, Homo sapien
tcatggaaagactttacgttagtgtgaaaagaa

SEQ ID NO: 870164 - DNA, 33 bp, Homo sapien
tcatggaaagactttatgttagtgtgaaaagaa

SEQ ID NO: 870165 - DNA, 33 bp, Homo sapien
ggatggcaatcaattacagaaacttagatctcc

SEQ ID NO: 870166 - DNA, 33 bp, Homo sapien
ggatggcaatcaattatagaaacttagatctcc

SEQ ID NO: 870167 - DNA, 33 bp, Homo sapien
cttccaattcttgaaaatggtatgtcttaccat

SEQ ID NO: 870168 - DNA, 33 bp, Homo sapien
cttccaattcttgaaagtggtatgtcttaccat

SEQ ID NO: 870169 - DNA, 33 bp, Homo sapien
ttgtcctagctaatgacgattatttcctgctta

SEQ ID NO: 870170 - DNA, 33 bp, Homo sapien
ttgtcctagctaatgatgattatttcctgctta

SEQ ID NO: 870171 - DNA, 33 bp, Homo sapien
ggagcctaataatttgaatttctagcaagtctc

SEQ ID NO: 870172 - DNA, 33 bp, Homo sapien
ggagcctaataatttggatttctagcaagtctc

SEQ ID NO: 870173 - DNA, 33 bp, Homo sapien
aagcacagaacactaaaactttcatcactctta

SEQ ID NO: 870174 - DNA, 33 bp, Homo sapien
aagcacagaacactaagactttcatcactctta

SEQ ID NO: 870175 - DNA, 33 bp, Homo sapien
ataaactttccgttccacctcttatccagccat

SEQ ID NO: 870176 - DNA, 33 bp, Homo sapien
ataaactttccgttccgcctcttatccagccat

SEQ ID NO: 870177 - DNA, 33 bp, Homo sapien
cagattcagctaagggaccatgtttgactgagt

SEQ ID NO: 870178 - DNA, 33 bp, Homo sapien
cagattcagctaagggtccatgtttgactgagt

SEQ ID NO: 870179 - DNA, 33 bp, Homo sapien
ctctttcataaaataacggttgtgttctggtgt

SEQ ID NO: 870180 - DNA, 33 bp, Homo sapien
ctctttcataaaataatggttgtgttctggtgt

SEQ ID NO: 870181 - DNA, 33 bp, Homo sapien
ttttgaccatttctcactatgcaaatttggtat

SEQ ID NO: 870182 - DNA, 33 bp, Homo sapien
ttttgaccatttctcattatgcaaatttggtat

SEQ ID NO: 870183 - DNA, 33 bp, Homo sapien
aactcctcatctaaacaaattattgcagaaaac

SEQ ID NO: 870184 - DNA, 33 bp, Homo sapien
aactcctcatctaaacgaattattgcagaaaac

SEQ ID NO: 870185 - DNA, 33 bp, Homo sapien
tattaatgttggtaaaagccatgaatgattgtt

SEQ ID NO: 870186 - DNA, 33 bp, Homo sapien
tattaatgttggtaaaggccatgaatgattgtt

SEQ ID NO: 870187 - DNA, 33 bp, Homo sapien
aaagttagtgagttggacatccagaattagtga

SEQ ID NO: 870188 - DNA, 33 bp, Homo sapien
aaagttagtgagttgggcatccagaattagtga

SEQ ID NO: 870189 - DNA, 33 bp, Homo sapien
attttactttctacaacgtggtgctcaattctc

SEQ ID NO: 870190 - DNA, 33 bp, Homo sapien
attttactttctacaatgtggtgctcaattctc

SEQ ID NO: 870191 - DNA, 33 bp, Homo sapien
tccatcgagccaaatcaagaaaaagattttcaa

SEQ ID NO: 870192 - DNA, 33 bp, Homo sapien
tccatcgagccaaatcgagaaaaagattttcaa

SEQ ID NO: 870193 - DNA, 33 bp, Homo sapien
ttgtactgggttcaagactaattgctagggttg

SEQ ID NO: 870194 - DNA, 33 bp, Homo sapien
ttgtactgggttcaagcctaattgctagggttg

SEQ ID NO: 870195 - DNA, 33 bp, Homo sapien
agcggctgttgtacgacatctgtgggtttcagg

SEQ ID NO: 870196 - DNA, 33 bp, Homo sapien
agcggctgttgtacgatatctgtgggtttcagg

SEQ ID NO: 870197 - DNA, 33 bp, Homo sapien
atgattttgaaggacacaaaatttggaaataaa

SEQ ID NO: 870198 - DNA, 33 bp, Homo sapien
atgattttgaaggacataaaatttggaaataaa

SEQ ID NO: 870199 - DNA, 33 bp, Homo sapien
gtgtaaccatgtaagacagcactactcagcaat

SEQ ID NO: 870200 - DNA, 33 bp, Homo sapien
gtgtaaccatgtaagagagcactactcagcaat

SEQ ID NO: 870201 - DNA, 33 bp, Homo sapien
atgtttgtgatgagaaatctggcctagttcaat

SEQ ID NO: 870202 - DNA, 33 bp, Homo sapien
atgtttgtgatgagaagtctggcctagttcaat

SEQ ID NO: 870203 - DNA, 33 bp, Homo sapien
tatttatttgccaacccccagagcatcagtgac

SEQ ID NO: 870204 - DNA, 33 bp, Homo sapien
tatttatttgccaaccgccagagcatcagtgac

SEQ ID NO: 870205 - DNA, 33 bp, Homo sapien
tgcagctagtacaccgaccattatctacggact

SEQ ID NO: 870206 - DNA, 33 bp, Homo sapien
tgcagctagtacaccggccattatctacggact

SEQ ID NO: 870207 - DNA, 33 bp, Homo sapien
caaagaaagccaatatcaagaggaaaatggcaa

SEQ ID NO: 870208 - DNA, 33 bp, Homo sapien
caaagaaagccaatatgaagaggaaaatggcaa

SEQ ID NO: 870209 - DNA, 33 bp, Homo sapien
tatgaaacactgaggaagtaaagatgacaaggc

SEQ ID NO: 870210 - DNA, 33 bp, Homo sapien
tatgaaacactgaggatgtaaagatgacaaggc

SEQ ID NO: 870211 - DNA, 33 bp, Homo sapien
atactaaaaatgctgacctagaagaaacgggaa

SEQ ID NO: 870212 - DNA, 33 bp, Homo sapien
atactaaaaatgctgatctagaagaaacgggaa

SEQ ID NO: 870213 - DNA, 33 bp, Homo sapien
tattttagttttttgaaagtgcaatacaattga

SEQ ID NO: 870214 - DNA, 33 bp, Homo sapien
tattttagttttttgagagtgcaatacaattga

SEQ ID NO: 870215 - DNA, 33 bp, Homo sapien
gagagctgaaaccagaaggcagaacatcatctc

SEQ ID NO: 870216 - DNA, 33 bp, Homo sapien
gagagctgaaaccagacggcagaacatcatctc

SEQ ID NO: 870217 - DNA, 33 bp, Homo sapien
ggaacaccatctgaaaaacagccatattcgcac

SEQ ID NO: 870218 - DNA, 33 bp, Homo sapien
ggaacaccatctgaaagacagccatattcgcac

SEQ ID NO: 870219 - DNA, 33 bp, Homo sapien
agataaacctaaatataacatagtggcagataa

SEQ ID NO: 870220 - DNA, 33 bp, Homo sapien
agataaacctaaatatgacatagtggcagataa

SEQ ID NO: 870221 - DNA, 33 bp, Homo sapien
aaaggaatcaggtgaacaggaaaagtcatttta

SEQ ID NO: 870222 - DNA, 33 bp, Homo sapien
aaaggaatcaggtgaataggaaaagtcatttta

SEQ ID NO: 870223 - DNA, 33 bp, Homo sapien
gccgcagttgaaaagcccgatcagtgcctggag

SEQ ID NO: 870224 - DNA, 33 bp, Homo sapien
gccgcagttgaaaagcgcgatcagtgcctggag

SEQ ID NO: 870225 - DNA, 33 bp, Homo sapien
tgcaaatgtatattcacgtgcggttatgactca

SEQ ID NO: 870226 - DNA, 33 bp, Homo sapien
tgcaaatgtatattcatgtgcggttatgactca

SEQ ID NO: 870227 - DNA, 33 bp, Homo sapien
attgtgcctgaaaaaaaagatgtaatttccctc

SEQ ID NO: 870228 - DNA, 33 bp, Homo sapien
attgtgcctgaaaaaacagatgtaatttccctc

SEQ ID NO: 870229 - DNA, 33 bp, Homo sapien
ttttccatacaaagatgagcaagacccttcaaa

SEQ ID NO: 870230 - DNA, 33 bp, Homo sapien
ttttccatacaaagattagcaagacccttcaaa

SEQ ID NO: 870231 - DNA, 33 bp, Homo sapien
gatctgatcatctgacgctgataaataaagtga

SEQ ID NO: 870232 - DNA, 33 bp, Homo sapien
gatctgatcatctgactctgataaataaagtga

SEQ ID NO: 870233 - DNA, 33 bp, Homo sapien
ctgtgtaacctggaaaccttttttgatcaagag

SEQ ID NO: 870234 - DNA, 33 bp, Homo sapien
ctgtgtaacctggaaatcttttttgatcaagag

SEQ ID NO: 870235 - DNA, 33 bp, Homo sapien
aaatgaacttatgacaaatgacccaaatgattc

SEQ ID NO: 870236 - DNA, 33 bp, Homo sapien
aaatgaacttatgacagatgacccaaatgattc

SEQ ID NO: 870237 - DNA, 33 bp, Homo sapien
aatattgtacaagatacgcttctgaaaatttac

SEQ ID NO: 870238 - DNA, 33 bp, Homo sapien
aatattgtacaagatatgcttctgaaaatttac

SEQ ID NO: 870239 - DNA, 33 bp, Homo sapien
ccagtccgattccccaaactgaagcacttggag

SEQ ID NO: 870240 - DNA, 33 bp, Homo sapien
ccagtccgattccccagactgaagcacttggag

SEQ ID NO: 870241 - DNA, 33 bp, Homo sapien
atctaaagaaacaatcagacactgtggtggtta

SEQ ID NO: 870242 - DNA, 33 bp, Homo sapien
atctaaagaaacaatcggacactgtggtggtta

SEQ ID NO: 870243 - DNA, 33 bp, Homo sapien
ccaattctgtatcgaaaaacttgacctttaaac

SEQ ID NO: 870244 - DNA, 33 bp, Homo sapien
ccaattctgtatcgaagaacttgacctttaaac

SEQ ID NO: 870245 - DNA, 33 bp, Homo sapien
aattactgttaactccaaattgccaattacagc

SEQ ID NO: 870246 - DNA, 33 bp, Homo sapien
aattactgttaactccgaattgccaattacagc

SEQ ID NO: 870247 - DNA, 33 bp, Homo sapien
cattctcaaaatgatcaacattatcacttctcc

SEQ ID NO: 870248 - DNA, 33 bp, Homo sapien
cattctcaaaatgatccacattatcacttctcc

SEQ ID NO: 870249 - DNA, 33 bp, Homo sapien
ttctgttctccattaacctcatcatcccttctg

SEQ ID NO: 870250 - DNA, 33 bp, Homo sapien
ttctgttctccattaatctcatcatcccttctg

SEQ ID NO: 870251 - DNA, 33 bp, Homo sapien
gaaaatatgaagccacagaatttcaagtacttt

SEQ ID NO: 870252 - DNA, 33 bp, Homo sapien
gaaaatatgaagccaccgaatttcaagtacttt

SEQ ID NO: 870253 - DNA, 33 bp, Homo sapien
gaagcagtcagtcctacagagagtgagctgagg

SEQ ID NO: 870254 - DNA, 33 bp, Homo sapien
gaagcagtcagtcctagagagagtgagctgagg

SEQ ID NO: 870255 - DNA, 33 bp, Homo sapien
tctcacagtgaggatgaaaacaatcaccccaaa

SEQ ID NO: 870256 - DNA, 33 bp, Homo sapien
tctcacagtgaggatggaaacaatcaccccaaa

SEQ ID NO: 870257 - DNA, 33 bp, Homo sapien
aaggttatagacgaggaaagaggttcagagcag

SEQ ID NO: 870258 - DNA, 33 bp, Homo sapien
aaggttatagacgaggtaagaggttcagagcag

SEQ ID NO: 870259 - DNA, 33 bp, Homo sapien
tgtatctagtcctaccaaatataaaattactgt

SEQ ID NO: 870260 - DNA, 33 bp, Homo sapien
tgtatctagtcctaccgaatataaaattactgt

SEQ ID NO: 870261 - DNA, 33 bp, Homo sapien
ggaatacagcactaaacgtgagataaatcctta

SEQ ID NO: 870262 - DNA, 33 bp, Homo sapien
ggaatacagcactaaatgtgagataaatcctta

SEQ ID NO: 870263 - DNA, 33 bp, Homo sapien
atcggacagaaaaggaaccagaagcatcacaga

SEQ ID NO: 870264 - DNA, 33 bp, Homo sapien
atcggacagaaaaggacccagaagcatcacaga

SEQ ID NO: 870265 - DNA, 33 bp, Homo sapien
tacagtactatgcctaatacctgagtgagtgga

SEQ ID NO: 870266 - DNA, 33 bp, Homo sapien
tacagtactatgcctactacctgagtgagtgga

SEQ ID NO: 870267 - DNA, 33 bp, Homo sapien
atataagaagccataactgcctaataagttaaa

SEQ ID NO: 870268 - DNA, 33 bp, Homo sapien
atataagaagccataattgcctaataagttaaa

SEQ ID NO: 870269 - DNA, 33 bp, Homo sapien
cacatctgctactgccagcttgtgataatccct

SEQ ID NO: 870270 - DNA, 33 bp, Homo sapien
cacatctgctactgccggcttgtgataatccct

SEQ ID NO: 870271 - DNA, 33 bp, Homo sapien
ttaacagcaggtaaccaccaatgctcctgcctt

SEQ ID NO: 870272 - DNA, 33 bp, Homo sapien
ttaacagcaggtaaccgccaatgctcctgcctt

SEQ ID NO: 870273 - DNA, 33 bp, Homo sapien
aactcattatggtgaacgtcaaatggaattgta

SEQ ID NO: 870274 - DNA, 33 bp, Homo sapien
aactcattatggtgaatgtcaaatggaattgta

SEQ ID NO: 870275 - DNA, 33 bp, Homo sapien
tagcacaatgaatatgcaggccgaggagaaggc

SEQ ID NO: 870276 - DNA, 33 bp, Homo sapien
tagcacaatgaatatgtaggccgaggagaaggc

SEQ ID NO: 870277 - DNA, 33 bp, Homo sapien
taaatctttcaccaacacagaaagtcaccccaa

SEQ ID NO: 870278 - DNA, 33 bp, Homo sapien
taaatctttcaccaactcagaaagtcaccccaa

SEQ ID NO: 870279 - DNA, 33 bp, Homo sapien
ccttgctacaccttccaatctgaatctgtgctt

SEQ ID NO: 870280 - DNA, 33 bp, Homo sapien
ccttgctacaccttccgatctgaatctgtgctt

SEQ ID NO: 870281 - DNA, 33 bp, Homo sapien
atgaatgaccaaagctcagagctcactataaaa

SEQ ID NO: 870282 - DNA, 33 bp, Homo sapien
atgaatgaccaaagcttagagctcactataaaa

SEQ ID NO: 870283 - DNA, 33 bp, Homo sapien
caaaggcccatctccaaataatctcacattgga

SEQ ID NO: 870284 - DNA, 33 bp, Homo sapien
caaaggcccatctccatataatctcacattgga

SEQ ID NO: 870285 - DNA, 33 bp, Homo sapien
ttgtattgcagcaaacaaccctgaatgtaggga

SEQ ID NO: 870286 - DNA, 33 bp, Homo sapien
ttgtattgcagcaaacgaccctgaatgtaggga

SEQ ID NO: 870287 - DNA, 33 bp, Homo sapien
tttgaaaggtgccctgcatgttactagccctgt

SEQ ID NO: 870288 - DNA, 33 bp, Homo sapien
tttgaaaggtgccctggatgttactagccctgt

SEQ ID NO: 870289 - DNA, 33 bp, Homo sapien
tacaaacccattctagaacaataacggcccaaa

SEQ ID NO: 870290 - DNA, 33 bp, Homo sapien
tacaaacccattctaggacaataacggcccaaa

SEQ ID NO: 870291 - DNA, 33 bp, Homo sapien
cagactccttaaaaaaaatagctgctgcgcagg

SEQ ID NO: 870292 - DNA, 33 bp, Homo sapien
cagactccttaaaaaatatagctgctgcgcagg

SEQ ID NO: 870293 - DNA, 33 bp, Homo sapien
atgatttgaaatgatgcaggtaagcaaaggtgg

SEQ ID NO: 870294 - DNA, 33 bp, Homo sapien
atgatttgaaatgatgtaggtaagcaaaggtgg

SEQ ID NO: 870295 - DNA, 33 bp, Homo sapien
taataacccctaagcaatcttggagaatactca

SEQ ID NO: 870296 - DNA, 33 bp, Homo sapien
taataacccctaagcagtcttggagaatactca

SEQ ID NO: 870297 - DNA, 33 bp, Homo sapien
taaatgcttattctcccccttaaaggtactatt

SEQ ID NO: 870298 - DNA, 33 bp, Homo sapien
taaatgcttattctcctccttaaaggtactatt

SEQ ID NO: 870299 - DNA, 33 bp, Homo sapien
gacagtgtggctagaagagagtgagcccagagt

SEQ ID NO: 870300 - DNA, 33 bp, Homo sapien
gacagtgtggctagaatagagtgagcccagagt

SEQ ID NO: 870301 - DNA, 33 bp, Homo sapien
ggttttcaataagccaatggatgaatgggttct

SEQ ID NO: 870302 - DNA, 33 bp, Homo sapien
ggttttcaataagccagtggatgaatgggttct

SEQ ID NO: 870303 - DNA, 33 bp, Homo sapien
atcccagcttaccccacgtagagtcccagttta

SEQ ID NO: 870304 - DNA, 33 bp, Homo sapien
atcccagcttaccccatgtagagtcccagttta

SEQ ID NO: 870305 - DNA, 33 bp, Homo sapien
tcttttcaagaacatacacagtcttattacatg

SEQ ID NO: 870306 - DNA, 33 bp, Homo sapien
tcttttcaagaacatagacagtcttattacatg

SEQ ID NO: 870307 - DNA, 33 bp, Homo sapien
attttctgtctgaagaatctacagtgtagtaga

SEQ ID NO: 870308 - DNA, 33 bp, Homo sapien
attttctgtctgaagagtctacagtgtagtaga

SEQ ID NO: 870309 - DNA, 33 bp, Homo sapien
aaaacatttgagactactaacttcctatgcatt

SEQ ID NO: 870310 - DNA, 33 bp, Homo sapien
aaaacatttgagactagtaacttcctatgcatt

SEQ ID NO: 870311 - DNA, 33 bp, Homo sapien
tattcagtcagaaccactggactataagaagta

SEQ ID NO: 870312 - DNA, 33 bp, Homo sapien
tattcagtcagaaccattggactataagaagta

SEQ ID NO: 870313 - DNA, 33 bp, Homo sapien
tttcctatgtatgaaaggtgaatactcttgagt

SEQ ID NO: 870314 - DNA, 33 bp, Homo sapien
tttcctatgtatgaaatgtgaatactcttgagt

SEQ ID NO: 870315 - DNA, 33 bp, Homo sapien
aattgtgcctggaacaaaattgacattcaataa

SEQ ID NO: 870316 - DNA, 33 bp, Homo sapien
aattgtgcctggaacataattgacattcaataa

SEQ ID NO: 870317 - DNA, 33 bp, Homo sapien
attgtataggctgtcaaacttcattcatatttt

SEQ ID NO: 870318 - DNA, 33 bp, Homo sapien
attgtataggctgtcagacttcattcatatttt

SEQ ID NO: 870319 - DNA, 33 bp, Homo sapien
acaggactcatgacacaagatgagctctcataa

SEQ ID NO: 870320 - DNA, 33 bp, Homo sapien
acaggactcatgacacgagatgagctctcataa

SEQ ID NO: 870321 - DNA, 33 bp, Homo sapien
accctgtaactaaccaaagttcacaaagctagt

SEQ ID NO: 870322 - DNA, 33 bp, Homo sapien
accctgtaactaaccagagttcacaaagctagt

SEQ ID NO: 870323 - DNA, 33 bp, Homo sapien
ttccagcaaatggtaaagcctttgctaatccct

SEQ ID NO: 870324 - DNA, 33 bp, Homo sapien
ttccagcaaatggtaatgcctttgctaatccct

SEQ ID NO: 870325 - DNA, 33 bp, Homo sapien
tgatattgcaaacagacaacagcagagacaaat

SEQ ID NO: 870326 - DNA, 33 bp, Homo sapien
tgatattgcaaacagataacagcagagacaaat

SEQ ID NO: 870327 - DNA, 33 bp, Homo sapien
cttcagtgctatcccacgaagtctgaattttag

SEQ ID NO: 870328 - DNA, 33 bp, Homo sapien
cttcagtgctatcccatgaagtctgaattttag

SEQ ID NO: 870329 - DNA, 33 bp, Homo sapien
atttcttgagtggaatcacaaaaccatattcac

SEQ ID NO: 870330 - DNA, 33 bp, Homo sapien
atttcttgagtggaattacaaaaccatattcac

SEQ ID NO: 870331 - DNA, 33 bp, Homo sapien
agctcaaaatttgacacgtactagatatgtgtt

SEQ ID NO: 870332 - DNA, 33 bp, Homo sapien
agctcaaaatttgacatgtactagatatgtgtt

SEQ ID NO: 870333 - DNA, 33 bp, Homo sapien
tagtcagtgatttctaactgggctctgatgaag

SEQ ID NO: 870334 - DNA, 33 bp, Homo sapien
tagtcagtgatttctatctgggctctgatgaag

SEQ ID NO: 870335 - DNA, 33 bp, Homo sapien
ggatcagaatgtgaaacgtgatgagagggccct

SEQ ID NO: 870336 - DNA, 33 bp, Homo sapien
ggatcagaatgtgaaatgtgatgagagggccct

SEQ ID NO: 870337 - DNA, 33 bp, Homo sapien
cactggcacatttcaaaaacagcttcctttctt

SEQ ID NO: 870338 - DNA, 33 bp, Homo sapien
cactggcacatttcaagaacagcttcctttctt

SEQ ID NO: 870339 - DNA, 33 bp, Homo sapien
catttggttacatggaatcaaatgtagtctagt

SEQ ID NO: 870340 - DNA, 33 bp, Homo sapien
catttggttacatggagtcaaatgtagtctagt

SEQ ID NO: 870341 - DNA, 33 bp, Homo sapien
agcacacaccatagaaaggagcagagaagaaac

SEQ ID NO: 870342 - DNA, 33 bp, Homo sapien
agcacacaccatagaacggagcagagaagaaac

SEQ ID NO: 870343 - DNA, 33 bp, Homo sapien
gacctgataaactaaaatgttgaagtcatacag

SEQ ID NO: 870344 - DNA, 33 bp, Homo sapien
gacctgataaactaaagtgttgaagtcatacag

SEQ ID NO: 870345 - DNA, 33 bp, Homo sapien
ctagatgggtatcaagactactccatttcacgc

SEQ ID NO: 870346 - DNA, 33 bp, Homo sapien
ctagatgggtatcaaggctactccatttcacgc

SEQ ID NO: 870347 - DNA, 33 bp, Homo sapien
gatacaactttgagtacagtaactgacagtaag

SEQ ID NO: 870348 - DNA, 33 bp, Homo sapien
gatacaactttgagtatagtaactgacagtaag

SEQ ID NO: 870349 - DNA, 33 bp, Homo sapien
atgacaatgcagattcacccaaagtgtaattta

SEQ ID NO: 870350 - DNA, 33 bp, Homo sapien
atgacaatgcagattcgcccaaagtgtaattta

SEQ ID NO: 870351 - DNA, 33 bp, Homo sapien
tgttgttacactctaaaatgcatattgtggaaa

SEQ ID NO: 870352 - DNA, 33 bp, Homo sapien
tgttgttacactctaacatgcatattgtggaaa

SEQ ID NO: 870353 - DNA, 33 bp, Homo sapien
gacaggtagatatgcacgtaggtatggtaattt

SEQ ID NO: 870354 - DNA, 33 bp, Homo sapien
gacaggtagatatgcaggtaggtatggtaattt

SEQ ID NO: 870355 - DNA, 33 bp, Homo sapien
agataatggtaactaagctcttaaaaacacata

SEQ ID NO: 870356 - DNA, 33 bp, Homo sapien
agataatggtaactaatctcttaaaaacacata

SEQ ID NO: 870357 - DNA, 33 bp, Homo sapien
tttgtggaagttctgaaatatattatacatatt

SEQ ID NO: 870358 - DNA, 33 bp, Homo sapien
tttgtggaagttctgatatatattatacatatt

SEQ ID NO: 870359 - DNA, 33 bp, Homo sapien
atcacctcattttagaccctaaactcaacattc

SEQ ID NO: 870360 - DNA, 33 bp, Homo sapien
atcacctcattttagatcctaaactcaacattc

SEQ ID NO: 870361 - DNA, 33 bp, Homo sapien
atgtgctctggagccacgcaaatctgcttcaaa

SEQ ID NO: 870362 - DNA, 33 bp, Homo sapien
atgtgctctggagccaggcaaatctgcttcaaa

SEQ ID NO: 870363 - DNA, 33 bp, Homo sapien
gaagtcctttctcaagaagagagcctcaatcat

SEQ ID NO: 870364 - DNA, 33 bp, Homo sapien
gaagtcctttctcaagtagagagcctcaatcat

SEQ ID NO: 870365 - DNA, 33 bp, Homo sapien
aatgcagagagatacaaatttatgtccatattg

SEQ ID NO: 870366 - DNA, 33 bp, Homo sapien
aatgcagagagatacagatttatgtccatattg

SEQ ID NO: 870367 - DNA, 33 bp, Homo sapien
atgtaatcgaaaagcaagtatggctgccaatac

SEQ ID NO: 870368 - DNA, 33 bp, Homo sapien
atgtaatcgaaaagcaggtatggctgccaatac

SEQ ID NO: 870369 - DNA, 33 bp, Homo sapien
aaatgcttccagtcacactgaactgaaatatct

SEQ ID NO: 870370 - DNA, 33 bp, Homo sapien
aaatgcttccagtcacgctgaactgaaatatct

SEQ ID NO: 870371 - DNA, 33 bp, Homo sapien
tctttagccggagatccattttttatatttcaa

SEQ ID NO: 870372 - DNA, 33 bp, Homo sapien
tctttagccggagatctattttttatatttcaa

SEQ ID NO: 870373 - DNA, 33 bp, Homo sapien
gttaacagaggatttacgtgtcccagtttatat

SEQ ID NO: 870374 - DNA, 33 bp, Homo sapien
gttaacagaggatttatgtgtcccagtttatat

SEQ ID NO: 870375 - DNA, 33 bp, Homo sapien
tgcttaccttaccatacattacctgatttaatt

SEQ ID NO: 870376 - DNA, 33 bp, Homo sapien
tgcttaccttaccatatattacctgatttaatt

SEQ ID NO: 870377 - DNA, 33 bp, Homo sapien
aaacatactgtaatcacgtggttcccttgccat

SEQ ID NO: 870378 - DNA, 33 bp, Homo sapien
aaacatactgtaatcatgtggttcccttgccat

SEQ ID NO: 870379 - DNA, 33 bp, Homo sapien
cacaaacctctcaagggcaataattaggtcttt

SEQ ID NO: 870380 - DNA, 33 bp, Homo sapien
cacaaacctctcaaggtcaataattaggtcttt

SEQ ID NO: 870381 - DNA, 33 bp, Homo sapien
actgacatcctgcaaacgaaaatcatatcccca

SEQ ID NO: 870382 - DNA, 33 bp, Homo sapien
actgacatcctgcaaatgaaaatcatatcccca

SEQ ID NO: 870383 - DNA, 33 bp, Homo sapien
aaacaaacataaaacacggtgggtgtggaaact

SEQ ID NO: 870384 - DNA, 33 bp, Homo sapien
aaacaaacataaaacatggtgggtgtggaaact

SEQ ID NO: 870385 - DNA, 33 bp, Homo sapien
cagttaaaatacatcgccctctggtgtccttct

SEQ ID NO: 870386 - DNA, 33 bp, Homo sapien
cagttaaaatacatcgtcctctggtgtccttct

SEQ ID NO: 870387 - DNA, 33 bp, Homo sapien
aaggccatataaggacacacccttcaaagaagg

SEQ ID NO: 870388 - DNA, 33 bp, Homo sapien
aaggccatataaggacgcacccttcaaagaagg

SEQ ID NO: 870389 - DNA, 33 bp, Homo sapien
aacttacaggcttctaaaagtaatacaaataat

SEQ ID NO: 870390 - DNA, 33 bp, Homo sapien
aacttacaggcttctagaagtaatacaaataat

SEQ ID NO: 870391 - DNA, 33 bp, Homo sapien
ccaaagctgacctcaaacatttattactgccta

SEQ ID NO: 870392 - DNA, 33 bp, Homo sapien
ccaaagctgacctcaatcatttattactgccta

SEQ ID NO: 870393 - DNA, 33 bp, Homo sapien
ctacaacatgaatgaaccttaaaaacattatgc

SEQ ID NO: 870394 - DNA, 33 bp, Homo sapien
ctacaacatgaatgaagcttaaaaacattatgc

SEQ ID NO: 870395 - DNA, 33 bp, Homo sapien
aaccaaaatatccgcaaacctagaggatcatca

SEQ ID NO: 870396 - DNA, 33 bp, Homo sapien
aaccaaaatatccgcagacctagaggatcatca

SEQ ID NO: 870397 - DNA, 33 bp, Homo sapien
agcacatttcagggaacattgtatggtggataa

SEQ ID NO: 870398 - DNA, 33 bp, Homo sapien
agcacatttcagggaatattgtatggtggataa

SEQ ID NO: 870399 - DNA, 33 bp, Homo sapien
taggaactcgttaggaactagtataatggccat

SEQ ID NO: 870400 - DNA, 33 bp, Homo sapien
taggaactcgttaggagctagtataatggccat

SEQ ID NO: 870401 - DNA, 33 bp, Homo sapien
tctgaagtttctcagactctcgtaaatatctca

SEQ ID NO: 870402 - DNA, 33 bp, Homo sapien
tctgaagtttctcagagtctcgtaaatatctca

SEQ ID NO: 870403 - DNA, 33 bp, Homo sapien
ataaattacatatgccccattaaaacttgtcag

SEQ ID NO: 870404 - DNA, 33 bp, Homo sapien
ataaattacatatgcctcattaaaacttgtcag

SEQ ID NO: 870405 - DNA, 33 bp, Homo sapien
attactgccacatgaaaatgatgtaacctggac

SEQ ID NO: 870406 - DNA, 33 bp, Homo sapien
attactgccacatgaagatgatgtaacctggac

SEQ ID NO: 870407 - DNA, 33 bp, Homo sapien
tttatcaggatcttcaacctattgacctccgtg

SEQ ID NO: 870408 - DNA, 33 bp, Homo sapien
tttatcaggatcttcagcctattgacctccgtg

SEQ ID NO: 870409 - DNA, 33 bp, Homo sapien
ctatgcttccctgataaaatagttcttaactta

SEQ ID NO: 870410 - DNA, 33 bp, Homo sapien
ctatgcttccctgatagaatagttcttaactta

SEQ ID NO: 870411 - DNA, 33 bp, Homo sapien
ccatacaactgagagacgatagggccaagatat

SEQ ID NO: 870412 - DNA, 33 bp, Homo sapien
ccatacaactgagagatgatagggccaagatat

SEQ ID NO: 870413 - DNA, 33 bp, Homo sapien
tttttttgacagtttacattttaatcactcaaa

SEQ ID NO: 870414 - DNA, 33 bp, Homo sapien
tttttttgacagtttatattttaatcactcaaa

SEQ ID NO: 870415 - DNA, 33 bp, Homo sapien
gtgtgggaaccagaggcccatagtgtgctggga

SEQ ID NO: 870416 - DNA, 33 bp, Homo sapien
gtgtgggaaccagaggtccatagtgtgctggga

SEQ ID NO: 870417 - DNA, 33 bp, Homo sapien
gaccaccaatgaaaagaccaagatacatataat

SEQ ID NO: 870418 - DNA, 33 bp, Homo sapien
gaccaccaatgaaaaggccaagatacatataat

SEQ ID NO: 870419 - DNA, 33 bp, Homo sapien
taagaagtagaatccacgtagaaaagtcagtca

SEQ ID NO: 870420 - DNA, 33 bp, Homo sapien
taagaagtagaatccatgtagaaaagtcagtca

SEQ ID NO: 870421 - DNA, 33 bp, Homo sapien
aggtaaaatccagtaaacgtgagtgaccactga

SEQ ID NO: 870422 - DNA, 33 bp, Homo sapien
aggtaaaatccagtaagcgtgagtgaccactga

SEQ ID NO: 870423 - DNA, 33 bp, Homo sapien
cataatcgcagttaaaataacaagacattgaca

SEQ ID NO: 870424 - DNA, 33 bp, Homo sapien
cataatcgcagttaaagtaacaagacattgaca

SEQ ID NO: 870425 - DNA, 33 bp, Homo sapien
tttgtctttagctttacagtagcccgtaaaaat

SEQ ID NO: 870426 - DNA, 33 bp, Homo sapien
tttgtctttagctttatagtagcccgtaaaaat

SEQ ID NO: 870427 - DNA, 33 bp, Homo sapien
ggctaggaaagaatacacagtggaggctaattt

SEQ ID NO: 870428 - DNA, 33 bp, Homo sapien
ggctaggaaagaatacccagtggaggctaattt

SEQ ID NO: 870429 - DNA, 33 bp, Homo sapien
catcagatttttcaaacgcttttgacagcaatc

SEQ ID NO: 870430 - DNA, 33 bp, Homo sapien
catcagatttttcaaatgcttttgacagcaatc

SEQ ID NO: 870431 - DNA, 33 bp, Homo sapien
gctgtagagaaagagaaggaatgtcaaagaggc

SEQ ID NO: 870432 - DNA, 33 bp, Homo sapien
gctgtagagaaagagagggaatgtcaaagaggc

SEQ ID NO: 870433 - DNA, 33 bp, Homo sapien
tgcaagtgaagattgtaaagacagaatatagaa

SEQ ID NO: 870434 - DNA, 33 bp, Homo sapien
tgcaagtgaagattgtgaagacagaatatagaa

SEQ ID NO: 870435 - DNA, 33 bp, Homo sapien
accaagaaaaaaacatgagtgctcttgtatacc

SEQ ID NO: 870436 - DNA, 33 bp, Homo sapien
accaagaaaaaaacattagtgctcttgtatacc

SEQ ID NO: 870437 - DNA, 33 bp, Homo sapien
caacccagagtatcaacagttgtcatagctgca

SEQ ID NO: 870438 - DNA, 33 bp, Homo sapien
caacccagagtatcaatagttgtcatagctgca

SEQ ID NO: 870439 - DNA, 33 bp, Homo sapien
aggctggcctgagctggatcttccaagtgttct

SEQ ID NO: 870440 - DNA, 33 bp, Homo sapien
aggctggcctgagctgtatcttccaagtgttct

SEQ ID NO: 870441 - DNA, 33 bp, Homo sapien
caggtcggcaaaacaacttggtctcattttgct

SEQ ID NO: 870442 - DNA, 33 bp, Homo sapien
caggtcggcaaaacaatttggtctcattttgct

SEQ ID NO: 870443 - DNA, 33 bp, Homo sapien
tgtaatccaacagaaacctctttagtgtgaccc

SEQ ID NO: 870444 - DNA, 33 bp, Homo sapien
tgtaatccaacagaaatctctttagtgtgaccc

SEQ ID NO: 870445 - DNA, 33 bp, Homo sapien
tccccacagctggctacgtaaattgttgactat

SEQ ID NO: 870446 - DNA, 33 bp, Homo sapien
tccccacagctggctatgtaaattgttgactat

SEQ ID NO: 870447 - DNA, 33 bp, Homo sapien
agacataatggaggtacggcattaggtaaatac

SEQ ID NO: 870448 - DNA, 33 bp, Homo sapien
agacataatggaggtatggcattaggtaaatac

SEQ ID NO: 870449 - DNA, 33 bp, Homo sapien
cttcaatgacagggtcaccactaccatggctag

SEQ ID NO: 870450 - DNA, 33 bp, Homo sapien
cttcaatgacagggtctccactaccatggctag

SEQ ID NO: 870451 - DNA, 33 bp, Homo sapien
aaaaaaaaagtaaacacatcaaagtggcatata

SEQ ID NO: 870452 - DNA, 33 bp, Homo sapien
aaaaaaaaagtaaacatatcaaagtggcatata

SEQ ID NO: 870453 - DNA, 33 bp, Homo sapien
attgatcaacagcctacgtaaacagtcatgcaa

SEQ ID NO: 870454 - DNA, 33 bp, Homo sapien
attgatcaacagcctatgtaaacagtcatgcaa

SEQ ID NO: 870455 - DNA, 33 bp, Homo sapien
cacagtttcttagggcagcattttttatttcat

SEQ ID NO: 870456 - DNA, 33 bp, Homo sapien
cacagtttcttagggcggcattttttatttcat

SEQ ID NO: 870457 - DNA, 33 bp, Homo sapien
agaacatgagccttaaagcctgtatagtaaaag

SEQ ID NO: 870458 - DNA, 33 bp, Homo sapien
agaacatgagccttaatgcctgtatagtaaaag

SEQ ID NO: 870459 - DNA, 33 bp, Homo sapien
ttatttgaaccagttgcaaacaagggatctaga

SEQ ID NO: 870460 - DNA, 33 bp, Homo sapien
ttatttgaaccagttggaaacaagggatctaga

SEQ ID NO: 870461 - DNA, 33 bp, Homo sapien
gattcttggatctttgcagaattgttcaaacta

SEQ ID NO: 870462 - DNA, 33 bp, Homo sapien
gattcttggatctttgtagaattgttcaaacta

SEQ ID NO: 870463 - DNA, 33 bp, Homo sapien
tttctccattgcctcacaccacttcctaattat

SEQ ID NO: 870464 - DNA, 33 bp, Homo sapien
tttctccattgcctcataccacttcctaattat

SEQ ID NO: 870465 - DNA, 33 bp, Homo sapien
tgtgtgtgtatttgtacaatctcacatcatcct

SEQ ID NO: 870466 - DNA, 33 bp, Homo sapien
tgtgtgtgtatttgtataatctcacatcatcct

SEQ ID NO: 870467 - DNA, 33 bp, Homo sapien
cactataaactagggagcccttttcgcttcaga

SEQ ID NO: 870468 - DNA, 33 bp, Homo sapien
cactataaactagggatcccttttcgcttcaga

SEQ ID NO: 870469 - DNA, 33 bp, Homo sapien
cagcatcttgtttaggccagcaggttgtacttt

SEQ ID NO: 870470 - DNA, 33 bp, Homo sapien
cagcatcttgtttaggtcagcaggttgtacttt

SEQ ID NO: 870471 - DNA, 33 bp, Homo sapien
gaaagaaggaagatacaaaggattacatattct

SEQ ID NO: 870472 - DNA, 33 bp, Homo sapien
gaaagaaggaagatacgaaggattacatattct

SEQ ID NO: 870473 - DNA, 33 bp, Homo sapien
gaaacgtgaaaggcaaacaattgaatcacactg

SEQ ID NO: 870474 - DNA, 33 bp, Homo sapien
gaaacgtgaaaggcaatcaattgaatcacactg

SEQ ID NO: 870475 - DNA, 33 bp, Homo sapien
tctgggaagaccggagaagagagacctatggtg

SEQ ID NO: 870476 - DNA, 33 bp, Homo sapien
tctgggaagaccggaggagagagacctatggtg

SEQ ID NO: 870477 - DNA, 33 bp, Homo sapien
aatattttctttcccactgcattaagtagtgtt

SEQ ID NO: 870478 - DNA, 33 bp, Homo sapien
aatattttctttcccattgcattaagtagtgtt

SEQ ID NO: 870479 - DNA, 33 bp, Homo sapien
taactctttgaggctacaagatagataagatag

SEQ ID NO: 870480 - DNA, 33 bp, Homo sapien
taactctttgaggctataagatagataagatag

SEQ ID NO: 870481 - DNA, 33 bp, Homo sapien
gatagagaccactactaacttcatctagaggct

SEQ ID NO: 870482 - DNA, 33 bp, Homo sapien
gatagagaccactactgacttcatctagaggct

SEQ ID NO: 870483 - DNA, 33 bp, Homo sapien
gtcacaagactttcatcactgggattgactaaa

SEQ ID NO: 870484 - DNA, 33 bp, Homo sapien
gtcacaagactttcatgactgggattgactaaa

SEQ ID NO: 870485 - DNA, 33 bp, Homo sapien
taaggtagttgtcctgaaggtttttattttccc

SEQ ID NO: 870486 - DNA, 33 bp, Homo sapien
taaggtagttgtcctggaggtttttattttccc

SEQ ID NO: 870487 - DNA, 33 bp, Homo sapien
tgctggagaaaatggacgttcacaggcagaaag

SEQ ID NO: 870488 - DNA, 33 bp, Homo sapien
tgctggagaaaatggatgttcacaggcagaaag

SEQ ID NO: 870489 - DNA, 33 bp, Homo sapien
agttcttgaagctgggaagtccaatttcatgtc

SEQ ID NO: 870490 - DNA, 33 bp, Homo sapien
agttcttgaagctggggagtccaatttcatgtc

SEQ ID NO: 870491 - DNA, 33 bp, Homo sapien
cactggagaagttcaccggagagaggagaggtt

SEQ ID NO: 870492 - DNA, 33 bp, Homo sapien
cactggagaagttcactggagagaggagaggtt

SEQ ID NO: 870493 - DNA, 33 bp, Homo sapien
tcatatggttggtatacatttcactatttaaca

SEQ ID NO: 870494 - DNA, 33 bp, Homo sapien
tcatatggttggtatagatttcactatttaaca

SEQ ID NO: 870495 - DNA, 33 bp, Homo sapien
agagaatgctagagacacattgaaataggaaag

SEQ ID NO: 870496 - DNA, 33 bp, Homo sapien
agagaatgctagagacgcattgaaataggaaag

SEQ ID NO: 870497 - DNA, 33 bp, Homo sapien
atggtgtatgggataaagtgataggtctattat

SEQ ID NO: 870498 - DNA, 33 bp, Homo sapien
atggtgtatgggataatgtgataggtctattat

SEQ ID NO: 870499 - DNA, 33 bp, Homo sapien
gattccctgaaacttaaatccattttgttgtgc

SEQ ID NO: 870500 - DNA, 33 bp, Homo sapien
gattccctgaaacttacatccattttgttgtgc

SEQ ID NO: 870501 - DNA, 33 bp, Homo sapien
taattatactctatgacgttcacgtgatgacaa

SEQ ID NO: 870502 - DNA, 33 bp, Homo sapien
taattatactctatgatgttcacgtgatgacaa

SEQ ID NO: 870503 - DNA, 33 bp, Homo sapien
ttgtagaggtgaatagcaggagataagtctggc

SEQ ID NO: 870504 - DNA, 33 bp, Homo sapien
ttgtagaggtgaatagtaggagataagtctggc

SEQ ID NO: 870505 - DNA, 33 bp, Homo sapien
tgagatgccaggacaccgatgacttccaaatct

SEQ ID NO: 870506 - DNA, 33 bp, Homo sapien
tgagatgccaggacactgatgacttccaaatct

SEQ ID NO: 870507 - DNA, 33 bp, Homo sapien
ctatgttgcaataatggaggaagttttggactt

SEQ ID NO: 870508 - DNA, 33 bp, Homo sapien
ctatgttgcaataatgtaggaagttttggactt

SEQ ID NO: 870509 - DNA, 33 bp, Homo sapien
ttaagatagtattaaaaccttagcctgacactt

SEQ ID NO: 870510 - DNA, 33 bp, Homo sapien
ttaagatagtattaaagccttagcctgacactt

SEQ ID NO: 870511 - DNA, 33 bp, Homo sapien
tccaattacagttctacgaccttgaaaatgata

SEQ ID NO: 870512 - DNA, 33 bp, Homo sapien
tccaattacagttctatgaccttgaaaatgata

SEQ ID NO: 870513 - DNA, 33 bp, Homo sapien
aagctactaaattgagaatgcaaggccatctgc

SEQ ID NO: 870514 - DNA, 33 bp, Homo sapien
aagctactaaattgagtatgcaaggccatctgc

SEQ ID NO: 870515 - DNA, 33 bp, Homo sapien
acatattcaagtgacaaatgacaccaaataacc

SEQ ID NO: 870516 - DNA, 33 bp, Homo sapien
acatattcaagtgacagatgacaccaaataacc

SEQ ID NO: 870517 - DNA, 33 bp, Homo sapien
aggattcacaattagcacttttccaaaaaatac

SEQ ID NO: 870518 - DNA, 33 bp, Homo sapien
aggattcacaattagcgcttttccaaaaaatac

SEQ ID NO: 870519 - DNA, 33 bp, Homo sapien
acattacagaagtggaaactacctggaggcttg

SEQ ID NO: 870520 - DNA, 33 bp, Homo sapien
acattacagaagtggagactacctggaggcttg

SEQ ID NO: 870521 - DNA, 33 bp, Homo sapien
ttccttagcttacaaaagatgtcacaaaacttt

SEQ ID NO: 870522 - DNA, 33 bp, Homo sapien
ttccttagcttacaaaggatgtcacaaaacttt

SEQ ID NO: 870523 - DNA, 33 bp, Homo sapien
gaggccagtagttttacggagcattctaaggag

SEQ ID NO: 870524 - DNA, 33 bp, Homo sapien
gaggccagtagttttatggagcattctaaggag

SEQ ID NO: 870525 - DNA, 33 bp, Homo sapien
agtggtcctccataaaggaacacgtctaaaaat

SEQ ID NO: 870526 - DNA, 33 bp, Homo sapien
agtggtcctccataaatgaacacgtctaaaaat

SEQ ID NO: 870527 - DNA, 33 bp, Homo sapien
gtacaagaatcacttgcaggttacagtgagctg

SEQ ID NO: 870528 - DNA, 33 bp, Homo sapien
gtacaagaatcacttggaggttacagtgagctg

SEQ ID NO: 870529 - DNA, 33 bp, Homo sapien
ggttaaaagaaagggaactcagacggagtgttt

SEQ ID NO: 870530 - DNA, 33 bp, Homo sapien
ggttaaaagaaagggagctcagacggagtgttt

SEQ ID NO: 870531 - DNA, 33 bp, Homo sapien
taggcctttacctagaccaaaatcaggttgaaa

SEQ ID NO: 870532 - DNA, 33 bp, Homo sapien
taggcctttacctagatcaaaatcaggttgaaa

SEQ ID NO: 870533 - DNA, 33 bp, Homo sapien
atcctcctcctacctacgcaaacatgaaaccta

SEQ ID NO: 870534 - DNA, 33 bp, Homo sapien
atcctcctcctacctaggcaaacatgaaaccta

SEQ ID NO: 870535 - DNA, 33 bp, Homo sapien
gagatgataatttgaaaagccccatcagttgcc

SEQ ID NO: 870536 - DNA, 33 bp, Homo sapien
gagatgataatttgaacagccccatcagttgcc

SEQ ID NO: 870537 - DNA, 33 bp, Homo sapien
tcactagctctcttggaatagaaaagacttcca

SEQ ID NO: 870538 - DNA, 33 bp, Homo sapien
tcactagctctcttggtatagaaaagacttcca

SEQ ID NO: 870539 - DNA, 33 bp, Homo sapien
ttgctttggctactgaaaagtgcaagtatgggt

SEQ ID NO: 870540 - DNA, 33 bp, Homo sapien
ttgctttggctactgagaagtgcaagtatgggt

SEQ ID NO: 870541 - DNA, 33 bp, Homo sapien
aatgacacaggggcgacctttaaggccactatc

SEQ ID NO: 870542 - DNA, 33 bp, Homo sapien
aatgacacaggggcgatctttaaggccactatc

SEQ ID NO: 870543 - DNA, 33 bp, Homo sapien
ttcaagtctttggtacagaaggaactggcctgg

SEQ ID NO: 870544 - DNA, 33 bp, Homo sapien
ttcaagtctttggtactgaaggaactggcctgg

SEQ ID NO: 870545 - DNA, 33 bp, Homo sapien
gggtggagagggaatacatagagttgagggagg

SEQ ID NO: 870546 - DNA, 33 bp, Homo sapien
gggtggagagggaatatatagagttgagggagg

SEQ ID NO: 870547 - DNA, 33 bp, Homo sapien
atcattaacatatttacaaggaggtctagtcaa

SEQ ID NO: 870548 - DNA, 33 bp, Homo sapien
atcattaacatatttagaaggaggtctagtcaa

SEQ ID NO: 870549 - DNA, 33 bp, Homo sapien
actggtttctagaatacggaaagaagatcgtgt

SEQ ID NO: 870550 - DNA, 33 bp, Homo sapien
actggtttctagaatatggaaagaagatcgtgt

SEQ ID NO: 870551 - DNA, 33 bp, Homo sapien
catgtctgactctcacaccggattaataattct

SEQ ID NO: 870552 - DNA, 33 bp, Homo sapien
catgtctgactctcacgccggattaataattct

SEQ ID NO: 870553 - DNA, 33 bp, Homo sapien
ataccttgcttatttcaaaaactctaaaggaaa

SEQ ID NO: 870554 - DNA, 33 bp, Homo sapien
ataccttgcttatttcgaaaactctaaaggaaa

SEQ ID NO: 870555 - DNA, 33 bp, Homo sapien
tctgccctggatcaaaataggtgactgagaatg

SEQ ID NO: 870556 - DNA, 33 bp, Homo sapien
tctgccctggatcaaagtaggtgactgagaatg

SEQ ID NO: 870557 - DNA, 33 bp, Homo sapien
tgagcgagaaaatcaaataccttgggaaaatca

SEQ ID NO: 870558 - DNA, 33 bp, Homo sapien
tgagcgagaaaatcaagtaccttgggaaaatca

SEQ ID NO: 870559 - DNA, 33 bp, Homo sapien
aaatacaaataattgaagtgatagctatcctga

SEQ ID NO: 870560 - DNA, 33 bp, Homo sapien
aaatacaaataattgatgtgatagctatcctga

SEQ ID NO: 870561 - DNA, 33 bp, Homo sapien
tctttccttggcaacactgaggatttgttatgg

SEQ ID NO: 870562 - DNA, 33 bp, Homo sapien
tctttccttggcaacagtgaggatttgttatgg

SEQ ID NO: 870563 - DNA, 33 bp, Homo sapien
aagtttgatcatctaacgaccttgttgaccaaa

SEQ ID NO: 870564 - DNA, 33 bp, Homo sapien
aagtttgatcatctaatgaccttgttgaccaaa

SEQ ID NO: 870565 - DNA, 33 bp, Homo sapien
catgaaaattcattcactatttttcagttgtgg

SEQ ID NO: 870566 - DNA, 33 bp, Homo sapien
catgaaaattcattcagtatttttcagttgtgg

SEQ ID NO: 870567 - DNA, 33 bp, Homo sapien
taattgtcctagaacaccgtcatgtgccatatt

SEQ ID NO: 870568 - DNA, 33 bp, Homo sapien
taattgtcctagaacagcgtcatgtgccatatt

SEQ ID NO: 870569 - DNA, 33 bp, Homo sapien
gttctatcatcagttccctgctcaaaaacattc

SEQ ID NO: 870570 - DNA, 33 bp, Homo sapien
gttctatcatcagttctctgctcaaaaacattc

SEQ ID NO: 870571 - DNA, 33 bp, Homo sapien
cattataaaaatgctaacgccttaaaaaatggt

SEQ ID NO: 870572 - DNA, 33 bp, Homo sapien
cattataaaaatgctagcgccttaaaaaatggt

SEQ ID NO: 870573 - DNA, 33 bp, Homo sapien
caactggaattagaaacgtcggtgtaaattcat

SEQ ID NO: 870574 - DNA, 33 bp, Homo sapien
caactggaattagaaatgtcggtgtaaattcat

SEQ ID NO: 870575 - DNA, 33 bp, Homo sapien
cccatacaccaacagccgacgtctagccccgct

SEQ ID NO: 870576 - DNA, 33 bp, Homo sapien
cccatacaccaacagctgacgtctagccccgct

SEQ ID NO: 870577 - DNA, 33 bp, Homo sapien
tgccggtgtcacaatcagagccactagacctaa

SEQ ID NO: 870578 - DNA, 33 bp, Homo sapien
tgccggtgtcacaatcggagccactagacctaa

SEQ ID NO: 870579 - DNA, 33 bp, Homo sapien
ttttagaattagagcaaatctgtagtgatgaag

SEQ ID NO: 870580 - DNA, 33 bp, Homo sapien
ttttagaattagagcagatctgtagtgatgaag

SEQ ID NO: 870581 - DNA, 33 bp, Homo sapien
tttgtaaatttgtaaaaggaagaggtctaattg

SEQ ID NO: 870582 - DNA, 33 bp, Homo sapien
tttgtaaatttgtaaagggaagaggtctaattg

SEQ ID NO: 870583 - DNA, 33 bp, Homo sapien; identical to SEQ ID NO: 870581

SEQ ID NO: 870584 - DNA, 33 bp, Homo sapien; identical to SEQ ID NO: 870582

SEQ ID NO: 870585 - DNA, 33 bp, Homo sapien
ttctagctagaaaaaacaaaatgaattggctgg

SEQ ID NO: 870586 - DNA, 33 bp, Homo sapien
ttctagctagaaaaaataaaatgaattggctgg

SEQ ID NO: 870587 - DNA, 33 bp, Homo sapien
tctgctttgtccactacgatatcctgagcactc

SEQ ID NO: 870588 - DNA, 33 bp, Homo sapien
tctgctttgtccactatgatatcctgagcactc

SEQ ID NO: 870589 - DNA, 33 bp, Homo sapien
ccttgcagagtccgaaatcagtaaggacaatgt

SEQ ID NO: 870590 - DNA, 33 bp, Homo sapien
ccttgcagagtccgaagtcagtaaggacaatgt

SEQ ID NO: 870591 - DNA, 33 bp, Homo sapien
agtcattctgggttgcaaatgaatttaattagt

SEQ ID NO: 870592 - DNA, 33 bp, Homo sapien
agtcattctgggttgcgaatgaatttaattagt

SEQ ID NO: 870593 - DNA, 33 bp, Homo sapien
ttctctccaaggtaaaactacgtgggcatctac

SEQ ID NO: 870594 - DNA, 33 bp, Homo sapien
ttctctccaaggtaaacctacgtgggcatctac

SEQ ID NO: 870595 - DNA, 33 bp, Homo sapien
tgaaatctgtggcaaactcagaaggcctgactc

SEQ ID NO: 870596 - DNA, 33 bp, Homo sapien
tgaaatctgtggcaaattcagaaggcctgactc

SEQ ID NO: 870597 - DNA, 33 bp, Homo sapien
atattccagccaaaaaataaggcaagataggta

SEQ ID NO: 870598 - DNA, 33 bp, Homo sapien
atattccagccaaaaagtaaggcaagataggta

SEQ ID NO: 870599 - DNA, 33 bp, Homo sapien
ctttaaataaggatgaactagaatggagacaga

SEQ ID NO: 870600 - DNA, 33 bp, Homo sapien
ctttaaataaggatgagctagaatggagacaga

SEQ ID NO: 870601 - DNA, 33 bp, Homo sapien
gcttgtttcctattagccagggaagttgttttt

SEQ ID NO: 870602 - DNA, 33 bp, Homo sapien
gcttgtttcctattaggcagggaagttgttttt

SEQ ID NO: 870603 - DNA, 33 bp, Homo sapien
acaatgtctagggagcaatgagttagcaactag

SEQ ID NO: 870604 - DNA, 33 bp, Homo sapien
acaatgtctagggagcgatgagttagcaactag

SEQ ID NO: 870605 - DNA, 33 bp, Homo sapien
tgaaaaatatcaaaataaaaaagaatgcaaatg

SEQ ID NO: 870606 - DNA, 33 bp, Homo sapien
tgaaaaatatcaaaatcaaaaagaatgcaaatg

SEQ ID NO: 870607 - DNA, 33 bp, Homo sapien
gtaggaacatttttcccagaacctcgcataaaa

SEQ ID NO: 870608 - DNA, 33 bp, Homo sapien
gtaggaacatttttcctagaacctcgcataaaa

SEQ ID NO: 870609 - DNA, 33 bp, Homo sapien
agccaccgcatcggcccacaattacattttgta

SEQ ID NO: 870610 - DNA, 33 bp, Homo sapien
agccaccgcatcggcctacaattacattttgta

SEQ ID NO: 870611 - DNA, 33 bp, Homo sapien
agatctggaatatcaaacatttcaattcacact

SEQ ID NO: 870612 - DNA, 33 bp, Homo sapien
agatctggaatatcaagcatttcaattcacact

SEQ ID NO: 870613 - DNA, 33 bp, Homo sapien
aacctggcagataagacgcagtcagagatatat

SEQ ID NO: 870614 - DNA, 33 bp, Homo sapien
aacctggcagataagatgcagtcagagatatat

SEQ ID NO: 870615 - DNA, 33 bp, Homo sapien
catccattcttttggcactacagtattttctgt

SEQ ID NO: 870616 - DNA, 33 bp, Homo sapien
catccattcttttggcgctacagtattttctgt

SEQ ID NO: 870617 - DNA, 33 bp, Homo sapien
agtcttgagagctaaaagtagatttgattattg

SEQ ID NO: 870618 - DNA, 33 bp, Homo sapien
agtcttgagagctaaatgtagatttgattattg

SEQ ID NO: 870619 - DNA, 33 bp, Homo sapien
ttgtttcttcctggcccattccatcttcaaagt

SEQ ID NO: 870620 - DNA, 33 bp, Homo sapien
ttgtttcttcctggccgattccatcttcaaagt

SEQ ID NO: 870621 - DNA, 33 bp, Homo sapien
ggtcttgagcaactaacttaatctctaaatcta

SEQ ID NO: 870622 - DNA, 33 bp, Homo sapien
ggtcttgagcaactaatttaatctctaaatcta

SEQ ID NO: 870623 - DNA, 33 bp, Homo sapien
aaacttgtcagattgccactgaagtttaagtat

SEQ ID NO: 870624 - DNA, 33 bp, Homo sapien
aaacttgtcagattgctactgaagtttaagtat

SEQ ID NO: 870625 - DNA, 33 bp, Homo sapien
ggtttcctgcttatggacatttcctggtgttgg

SEQ ID NO: 870626 - DNA, 33 bp, Homo sapien
ggtttcctgcttatggtcatttcctggtgttgg

SEQ ID NO: 870627 - DNA, 33 bp, Homo sapien
tgtactttaggatctacataatgtaaaatggct

SEQ ID NO: 870628 - DNA, 33 bp, Homo sapien
tgtactttaggatctagataatgtaaaatggct

SEQ ID NO: 870629 - DNA, 33 bp, Homo sapien
taagacattttttgaaatatacaaattgttttc

SEQ ID NO: 870630 - DNA, 33 bp, Homo sapien
taagacattttttgaagtatacaaattgttttc

SEQ ID NO: 870631 - DNA, 33 bp, Homo sapien
gcaaataaataaacacagatctaactctctcat

SEQ ID NO: 870632 - DNA, 33 bp, Homo sapien
gcaaataaataaacactgatctaactctctcat

SEQ ID NO: 870633 - DNA, 33 bp, Homo sapien
ggggagttatgccaagaagtgaagggagtgagg

SEQ ID NO: 870634 - DNA, 33 bp, Homo sapien
ggggagttatgccaaggagtgaagggagtgagg

SEQ ID NO: 870635 - DNA, 33 bp, Homo sapien
ggtaagcctgctcttacaccaaggaccagggta

SEQ ID NO: 870636 - DNA, 33 bp, Homo sapien
ggtaagcctgctcttagaccaaggaccagggta

SEQ ID NO: 870637 - DNA, 33 bp, Homo sapien
tatggggctcaagaaaattcagctcgcagggta

SEQ ID NO: 870638 - DNA, 33 bp, Homo sapien
tatggggctcaagaaagttcagctcgcagggta

SEQ ID NO: 870639 - DNA, 33 bp, Homo sapien
tgcctttatgctttcacattcggaaatctccaa

SEQ ID NO: 870640 - DNA, 33 bp, Homo sapien
tgcctttatgctttcatattcggaaatctccaa

SEQ ID NO: 870641 - DNA, 33 bp, Homo sapien
tgcagaataacaaaaacgtacgcaaataaatat

SEQ ID NO: 870642 - DNA, 33 bp, Homo sapien
tgcagaataacaaaaatgtacgcaaataaatat

SEQ ID NO: 870643 - DNA, 33 bp, Homo sapien
gaatgagcaattattcaaaggttgtcagagagt

SEQ ID NO: 870644 - DNA, 33 bp, Homo sapien
gaatgagcaattattcgaaggttgtcagagagt

SEQ ID NO: 870645 - DNA, 33 bp, Homo sapien
tagaaaagccagttaacctctctgacagtggct

SEQ ID NO: 870646 - DNA, 33 bp, Homo sapien
tagaaaagccagttaatctctctgacagtggct

SEQ ID NO: 870647 - DNA, 33 bp, Homo sapien
gtctgtatattgacggaccactgtgtcttcctt

SEQ ID NO: 870648 - DNA, 33 bp, Homo sapien
gtctgtatattgacgggccactgtgtcttcctt

SEQ ID NO: 870649 - DNA, 33 bp, Homo sapien
tgaagtctgatttacaaccttgtggtcttttgg

SEQ ID NO: 870650 - DNA, 33 bp, Homo sapien
tgaagtctgatttacacccttgtggtcttttgg

SEQ ID NO: 870651 - DNA, 33 bp, Homo sapien
gtgatgagcaactgataaagtatagaatccaaa

SEQ ID NO: 870652 - DNA, 33 bp, Homo sapien
gtgatgagcaactgatcaagtatagaatccaaa

SEQ ID NO: 870653 - DNA, 33 bp, Homo sapien
aatgaatactaacagaccatgtttgtttattct

SEQ ID NO: 870654 - DNA, 33 bp, Homo sapien
aatgaatactaacagatcatgtttgtttattct

SEQ ID NO: 870655 - DNA, 33 bp, Homo sapien
gataagtttgatagcaagggtaccataatatgg

SEQ ID NO: 870656 - DNA, 33 bp, Homo sapien
gataagtttgatagcaggggtaccataatatgg

SEQ ID NO: 870657 - DNA, 33 bp, Homo sapien
caggagaaactcaccacatcatcagcctagcta

SEQ ID NO: 870658 - DNA, 33 bp, Homo sapien
caggagaaactcaccatatcatcagcctagcta

SEQ ID NO: 870659 - DNA, 33 bp, Homo sapien
ctacatccgatttcaccggcgtccttagaaaaa

SEQ ID NO: 870660 - DNA, 33 bp, Homo sapien
ctacatccgatttcactggcgtccttagaaaaa

SEQ ID NO: 870661 - DNA, 33 bp, Homo sapien
gcacagacaatattctaagaaaataggaagcct

SEQ ID NO: 870662 - DNA, 33 bp, Homo sapien
gcacagacaatattctgagaaaataggaagcct

SEQ ID NO: 870663 - DNA, 33 bp, Homo sapien
ggaaaagctttcagaaatattactggcatttgg

SEQ ID NO: 870664 - DNA, 33 bp, Homo sapien
ggaaaagctttcagaagtattactggcatttgg

SEQ ID NO: 870665 - DNA, 33 bp, Homo sapien
atctggcttatagtaaatgcacaataaacaatg

SEQ ID NO: 870666 - DNA, 33 bp, Homo sapien
atctggcttatagtaagtgcacaataaacaatg

SEQ ID NO: 870667 - DNA, 33 bp, Homo sapien
ccctagatcaatcaatgagcctgttcctaccag

SEQ ID NO: 870668 - DNA, 33 bp, Homo sapien
ccctagatcaatcaattagcctgttcctaccag

SEQ ID NO: 870669 - DNA, 33 bp, Homo sapien
tgctagaataaatgtcagaaaatgtggaaatag

SEQ ID NO: 870670 - DNA, 33 bp, Homo sapien
tgctagaataaatgtctgaaaatgtggaaatag

SEQ ID NO: 870671 - DNA, 33 bp, Homo sapien
ataaatatcagaattacgagcaatgtgttttct

SEQ ID NO: 870672 - DNA, 33 bp, Homo sapien
ataaatatcagaattatgagcaatgtgttttct

SEQ ID NO: 870673 - DNA, 33 bp, Homo sapien
actatgtatgtatttacggttccgtgatatgga

SEQ ID NO: 870674 - DNA, 33 bp, Homo sapien
actatgtatgtatttatggttccgtgatatgga

SEQ ID NO: 870675 - DNA, 33 bp, Homo sapien
tggttccaagctgaaagtcttgtctatgaatga

SEQ ID NO: 870676 - DNA, 33 bp, Homo sapien
tggttccaagctgaaattcttgtctatgaatga

SEQ ID NO: 870677 - DNA, 33 bp, Homo sapien
taaaaataaaacagaaatacagacagctattag

SEQ ID NO: 870678 - DNA, 33 bp, Homo sapien
taaaaataaaacagaagtacagacagctattag

SEQ ID NO: 870679 - DNA, 33 bp, Homo sapien
ttgaacttccctggaacgcaaaacttggcttaa

SEQ ID NO: 870680 - DNA, 33 bp, Homo sapien
ttgaacttccctggaatgcaaaacttggcttaa

SEQ ID NO: 870681 - DNA, 33 bp, Homo sapien
cacctgaagagaggacaatgtcaggtcgacaga

SEQ ID NO: 870682 - DNA, 33 bp, Homo sapien
cacctgaagagaggacgatgtcaggtcgacaga

SEQ ID NO: 870683 - DNA, 33 bp, Homo sapien
ttagtgaggctcttgcaccacaggttttcattc

SEQ ID NO: 870684 - DNA, 33 bp, Homo sapien
ttagtgaggctcttgcgccacaggttttcattc

SEQ ID NO: 870685 - DNA, 33 bp, Homo sapien
tagggtatttgggagacaaagttcagagttcaa

SEQ ID NO: 870686 - DNA, 33 bp, Homo sapien
tagggtatttgggagagaaagttcagagttcaa

SEQ ID NO: 870687 - DNA, 33 bp, Homo sapien
gtcagccattcattagacaatgcaggtgactgg

SEQ ID NO: 870688 - DNA, 33 bp, Homo sapien
gtcagccattcattaggcaatgcaggtgactgg

SEQ ID NO: 870689 - DNA, 33 bp, Homo sapien
ttatggcacacctatacgatggaacacagtgca

SEQ ID NO: 870690 - DNA, 33 bp, Homo sapien
ttatggcacacctatatgatggaacacagtgca

SEQ ID NO: 870691 - DNA, 33 bp, Homo sapien
ctaccatctactttgcccaggtttacattccct

SEQ ID NO: 870692 - DNA, 33 bp, Homo sapien
ctaccatctactttgctcaggtttacattccct

SEQ ID NO: 870693 - DNA, 33 bp, Homo sapien
ttcattttactgccctcaaataaaatattttag

SEQ ID NO: 870694 - DNA, 33 bp, Homo sapien
ttcattttactgccctgaaataaaatattttag

SEQ ID NO: 870695 - DNA, 33 bp, Homo sapien
cagtgcttgttaggaacacatctaaaatatttt

SEQ ID NO: 870696 - DNA, 33 bp, Homo sapien
cagtgcttgttaggaagacatctaaaatatttt

SEQ ID NO: 870697 - DNA, 33 bp, Homo sapien
tcaagttgctttgaagacatctccaggtagggg

SEQ ID NO: 870698 - DNA, 33 bp, Homo sapien
tcaagttgctttgaagtcatctccaggtagggg

SEQ ID NO: 870699 - DNA, 33 bp, Homo sapien
gaaagtagtttttataccctgaagtcaaggagg

SEQ ID NO: 870700 - DNA, 33 bp, Homo sapien
gaaagtagtttttatatcctgaagtcaaggagg

SEQ ID NO: 870701 - DNA, 33 bp, Homo sapien
tatttctactatctggcattgggcaagttagaa

SEQ ID NO: 870702 - DNA, 33 bp, Homo sapien
tatttctactatctggtattgggcaagttagaa

SEQ ID NO: 870703 - DNA, 33 bp, Homo sapien
tttttttttgcaaggcacttggtatgtatctgg

SEQ ID NO: 870704 - DNA, 33 bp, Homo sapien
tttttttttgcaaggcgcttggtatgtatctgg

SEQ ID NO: 870705 - DNA, 33 bp, Homo sapien
agtgcggcatatgggaacctttgccaagttatt

SEQ ID NO: 870706 - DNA, 33 bp, Homo sapien
agtgcggcatatgggagcctttgccaagttatt

SEQ ID NO: 870707 - DNA, 33 bp, Homo sapien
atagaccctgcggcacagctttaaaacagttag

SEQ ID NO: 870708 - DNA, 33 bp, Homo sapien
atagaccctgcggcacggctttaaaacagttag

SEQ ID NO: 870709 - DNA, 33 bp, Homo sapien
actccctaccaaacagccattgttgactcctct

SEQ ID NO: 870710 - DNA, 33 bp, Homo sapien
actccctaccaaacaggcattgttgactcctct

SEQ ID NO: 870711 - DNA, 33 bp, Homo sapien
aggtttccaaggagaagcttatcaaatctttaa

SEQ ID NO: 870712 - DNA, 33 bp, Homo sapien
aggtttccaaggagaatcttatcaaatctttaa

SEQ ID NO: 870713 - DNA, 33 bp, Homo sapien
aggacaaaggctgaaacgaaagagtaacaggaa

SEQ ID NO: 870714 - DNA, 33 bp, Homo sapien
aggacaaaggctgaaatgaaagagtaacaggaa

SEQ ID NO: 870715 - DNA, 33 bp, Homo sapien
taatatactatatgccaaatggttctatttaga

SEQ ID NO: 870716 - DNA, 33 bp, Homo sapien
taatatactatatgccgaatggttctatttaga

SEQ ID NO: 870717 - DNA, 33 bp, Homo sapien
tttgaaaaatctgaaaccacttgaaaaacaatt

SEQ ID NO: 870718 - DNA, 33 bp, Homo sapien
tttgaaaaatctgaaatcacttgaaaaacaatt

SEQ ID NO: 870719 - DNA, 33 bp, Homo sapien
atggccatgtaaacaacaggcagagactgaagt

SEQ ID NO: 870720 - DNA, 33 bp, Homo sapien
atggccatgtaaacaagaggcagagactgaagt

SEQ ID NO: 870721 - DNA, 33 bp, Homo sapien
gtaataggagtaagggccacggatatgtaggcc

SEQ ID NO: 870722 - DNA, 33 bp, Homo sapien
gtaataggagtaagggtcacggatatgtaggcc

SEQ ID NO: 870723 - DNA, 33 bp, Homo sapien
gtttcatttcagagaacattagaaagtgaaaca

SEQ ID NO: 870724 - DNA, 33 bp, Homo sapien
gtttcatttcagagaatattagaaagtgaaaca

SEQ ID NO: 870725 - DNA, 33 bp, Homo sapien
atggttccattagacccgggaggtgaatttcag

SEQ ID NO: 870726 - DNA, 33 bp, Homo sapien
atggttccattagacctgggaggtgaatttcag

SEQ ID NO: 870727 - DNA, 33 bp, Homo sapien
atgaatgtagatctgccgcaatttgcaaataac

SEQ ID NO: 870728 - DNA, 33 bp, Homo sapien
atgaatgtagatctgctgcaatttgcaaataac

SEQ ID NO: 870729 - DNA, 33 bp, Homo sapien
tcatcatcaccattcacaagagaaatgcaaaac

SEQ ID NO: 870730 - DNA, 33 bp, Homo sapien
tcatcatcaccattcataagagaaatgcaaaac

SEQ ID NO: 870731 - DNA, 33 bp, Homo sapien; identical to SEQ ID NO: 870729

SEQ ID NO: 870732 - DNA, 33 bp, Homo sapien; identical to SEQ ID NO: 870730

SEQ ID NO: 870733 - DNA, 33 bp, Homo sapien
gagaacacactgacacagcaaggggaccatcac

SEQ ID NO: 870734 - DNA, 33 bp, Homo sapien
gagaacacactgacactgcaaggggaccatcac

SEQ ID NO: 870735 - DNA, 33 bp, Homo sapien; identical to SEQ ID NO: 870733

SEQ ID NO: 870736 - DNA, 33 bp, Homo sapien; identical to SEQ ID NO: 870734

SEQ ID NO: 870737 - DNA, 33 bp, Homo sapien
attattgtcactgtcaacctgttgtgctacatc

SEQ ID NO: 870738 - DNA, 33 bp, Homo sapien
attattgtcactgtcaccctgttgtgctacatc

SEQ ID NO: 870739 - DNA, 33 bp, Homo sapien
tcccatggagcccagaaaggtgaagggataaca

SEQ ID NO: 870740 - DNA, 33 bp, Homo sapien
tcccatggagcccagacaggtgaagggataaca

SEQ ID NO: 870741 - DNA, 33 bp, Homo sapien
gaaactttaacctttcaaaaaagcaatgatgaa

SEQ ID NO: 870742 - DNA, 33 bp, Homo sapien
gaaactttaacctttccaaaaagcaatgatgaa

SEQ ID NO: 870743 - DNA, 33 bp, Homo sapien
aaaaggtttgtttagacatagtgcaggaaagag

SEQ ID NO: 870744 - DNA, 33 bp, Homo sapien
aaaaggtttgtttagatatagtgcaggaaagag

SEQ ID NO: 870745 - DNA, 33 bp, Homo sapien
gcaagaccaaacttgaacttgtacttctgcagt

SEQ ID NO: 870746 - DNA, 33 bp, Homo sapien
gcaagaccaaacttgagcttgtacttctgcagt

SEQ ID NO: 870747 - DNA, 33 bp, Homo sapien
ccatggttgggatccacgagtccttctagtctc

SEQ ID NO: 870748 - DNA, 33 bp, Homo sapien
ccatggttgggatccatgagtccttctagtctc

SEQ ID NO: 870749 - DNA, 33 bp, Homo sapien
gggttaatcaggtgtcagacaaaagacctattt

SEQ ID NO: 870750 - DNA, 33 bp, Homo sapien
gggttaatcaggtgtcggacaaaagacctattt

SEQ ID NO: 870751 - DNA, 33 bp, Homo sapien
caggtgactaccacacaagtaagatgtagaata

SEQ ID NO: 870752 - DNA, 33 bp, Homo sapien
caggtgactaccacaccagtaagatgtagaata

SEQ ID NO: 870753 - DNA, 33 bp, Homo sapien
tgtgatggttaacaccaagtgtcaacttcatta

SEQ ID NO: 870754 - DNA, 33 bp, Homo sapien
tgtgatggttaacaccgagtgtcaacttcatta

SEQ ID NO: 870755 - DNA, 33 bp, Homo sapien
ctcaccagaactcaacaacactggcactttgat

SEQ ID NO: 870756 - DNA, 33 bp, Homo sapien
ctcaccagaactcaacgacactggcactttgat

SEQ ID NO: 870757 - DNA, 33 bp, Homo sapien
cagtatagcatgaataccgtcaggaaacacttt

SEQ ID NO: 870758 - DNA, 33 bp, Homo sapien
cagtatagcatgaatatcgtcaggaaacacttt

SEQ ID NO: 870759 - DNA, 33 bp, Homo sapien
aatgtagtctttctgaaatttatgtccctggtt

SEQ ID NO: 870760 - DNA, 33 bp, Homo sapien
aatgtagtctttctgatatttatgtccctggtt

SEQ ID NO: 870761 - DNA, 33 bp, Homo sapien
agaatgttatgttttcacttcagaattcattca

SEQ ID NO: 870762 - DNA, 33 bp, Homo sapien
agaatgttatgttttcgcttcagaattcattca

SEQ ID NO: 870763 - DNA, 33 bp, Homo sapien
atttgatgatgaagaactgaaaggtaaaatcag

SEQ ID NO: 870764 - DNA, 33 bp, Homo sapien
atttgatgatgaagaattgaaaggtaaaatcag

SEQ ID NO: 870765 - DNA, 33 bp, Homo sapien; identical to SEQ ID NO: 870763

SEQ ID NO: 870766 - DNA, 33 bp, Homo sapien; identical to SEQ ID NO: 870764

SEQ ID NO: 870767 - DNA, 33 bp, Homo sapien
acctcccaggcagaacccaggtcatccacacat

SEQ ID NO: 870768 - DNA, 33 bp, Homo sapien
acctcccaggcagaacgcaggtcatccacacat

SEQ ID NO: 870769 - DNA, 33 bp, Homo sapien
tagatttggttcttggaaaaatttcaactggct

SEQ ID NO: 870770 - DNA, 33 bp, Homo sapien
tagatttggttcttggcaaaatttcaactggct

SEQ ID NO: 870771 - DNA, 33 bp, Homo sapien
cagcaaacatttttagaagaacactgagtactg

SEQ ID NO: 870772 - DNA, 33 bp, Homo sapien
cagcaaacatttttaggagaacactgagtactg

SEQ ID NO: 870773 - DNA, 33 bp, Homo sapien
acagtaataggccagaagaggaagaagatagag

SEQ ID NO: 870774 - DNA, 33 bp, Homo sapien
acagtaataggccagatgaggaagaagatagag

SEQ ID NO: 870775 - DNA, 33 bp, Homo sapien
actagtgatttcagaggcaagggacaggttctt

SEQ ID NO: 870776 - DNA, 33 bp, Homo sapien
actagtgatttcagagtcaagggacaggttctt

SEQ ID NO: 870777 - DNA, 33 bp, Homo sapien
tggtaacttccacgcaataagggctcaagggtt

SEQ ID NO: 870778 - DNA, 33 bp, Homo sapien
tggtaacttccacgcagtaagggctcaagggtt

SEQ ID NO: 870779 - DNA, 33 bp, Homo sapien
acaatgcctcactaaacgaccaattttcagaaa

SEQ ID NO: 870780 - DNA, 33 bp, Homo sapien
acaatgcctcactaaatgaccaattttcagaaa

SEQ ID NO: 870781 - DNA, 33 bp, Homo sapien
tttatgtggttggcacaaactggcatagaacat

SEQ ID NO: 870782 - DNA, 33 bp, Homo sapien
tttatgtggttggcacgaactggcatagaacat

SEQ ID NO: 870783 - DNA, 33 bp, Homo sapien
ctctttcatcttacaactagcaatgttctatgc

SEQ ID NO: 870784 - DNA, 33 bp, Homo sapien
ctctttcatcttacaagtagcaatgttctatgc

SEQ ID NO: 870785 - DNA, 33 bp, Homo sapien
cataagcagtctttcacgtaacaggaagttgta

SEQ ID NO: 870786 - DNA, 33 bp, Homo sapien
cataagcagtctttcatgtaacaggaagttgta

SEQ ID NO: 870787 - DNA, 33 bp, Homo sapien
tccaaggaaggctcaccggagaagagacgcaac

SEQ ID NO: 870788 - DNA, 33 bp, Homo sapien
tccaaggaaggctcactggagaagagacgcaac

SEQ ID NO: 870789 - DNA, 33 bp, Homo sapien
aactatctatcgtaacagaaacaagagtacaac

SEQ ID NO: 870790 - DNA, 33 bp, Homo sapien
aactatctatcgtaacggaaacaagagtacaac

SEQ ID NO: 870791 - DNA, 33 bp, Homo sapien
atagagcaatttcttaaagctggtgaacatatg

SEQ ID NO: 870792 - DNA, 33 bp, Homo sapien
atagagcaatttcttacagctggtgaacatatg

SEQ ID NO: 870793 - DNA, 33 bp, Homo sapien
agcagctggagaatggccacataccgcagcatc

SEQ ID NO: 870794 - DNA, 33 bp, Homo sapien
agcagctggagaatggtcacataccgcagcatc

SEQ ID NO: 870795 - DNA, 33 bp, Homo sapien
aatcactatggttgcaaattgtgtgtactcagc

SEQ ID NO: 870796 - DNA, 33 bp, Homo sapien
aatcactatggttgcagattgtgtgtactcagc

SEQ ID NO: 870797 - DNA, 33 bp, Homo sapien
caccatgtacgcaatcacccaaagagccaagat

SEQ ID NO: 870798 - DNA, 33 bp, Homo sapien
caccatgtacgcaatcgcccaaagagccaagat

SEQ ID NO: 870799 - DNA, 33 bp, Homo sapien
ttcctaaggctctaaacgctttcaagaaactga

SEQ ID NO: 870800 - DNA, 33 bp, Homo sapien
ttcctaaggctctaaatgctttcaagaaactga

SEQ ID NO: 870801 - DNA, 33 bp, Homo sapien
gttttgcaataatgccacctgaaagatcaaaaa

SEQ ID NO: 870802 - DNA, 33 bp, Homo sapien
gttttgcaataatgccgcctgaaagatcaaaaa

SEQ ID NO: 870803 - DNA, 33 bp, Homo sapien
cagagatacccagcacaaggatgttggaataga

SEQ ID NO: 870804 - DNA, 33 bp, Homo sapien
cagagatacccagcacgaggatgttggaataga

SEQ ID NO: 870805 - DNA, 33 bp, Homo sapien
aaggagaatgatcttcaagatttctgtaacttc

SEQ ID NO: 870806 - DNA, 33 bp, Homo sapien
aaggagaatgatcttcgagatttctgtaacttc

SEQ ID NO: 870807 - DNA, 33 bp, Homo sapien
agaaatggagaagcaacgctttttgttggtctt

SEQ ID NO: 870808 - DNA, 33 bp, Homo sapien
agaaatggagaagcaatgctttttgttggtctt

SEQ ID NO: 870809 - DNA, 33 bp, Homo sapien
ctcaggtaggctaaaacatttggtaggaagaaa

SEQ ID NO: 870810 - DNA, 33 bp, Homo sapien
ctcaggtaggctaaaatatttggtaggaagaaa

SEQ ID NO: 870811 - DNA, 33 bp, Homo sapien
ggaaactctgctgatacgtattttttgtttttt

SEQ ID NO: 870812 - DNA, 33 bp, Homo sapien
ggaaactctgctgatatgtattttttgtttttt

SEQ ID NO: 870813 - DNA, 33 bp, Homo sapien
agtaacgtcatgcaaacaggagaaaggcttgct

SEQ ID NO: 870814 - DNA, 33 bp, Homo sapien
agtaacgtcatgcaaagaggagaaaggcttgct

SEQ ID NO: 870815 - DNA, 33 bp, Homo sapien
gatatcagttaggaaaccactcaaaccacttta

SEQ ID NO: 870816 - DNA, 33 bp, Homo sapien
gatatcagttaggaaagcactcaaaccacttta

SEQ ID NO: 870817 - DNA, 33 bp, Homo sapien
ctggtgttcaagtaaccgcttatcgtgttatat

SEQ ID NO: 870818 - DNA, 33 bp, Homo sapien
ctggtgttcaagtaactgcttatcgtgttatat

SEQ ID NO: 870819 - DNA, 33 bp, Homo sapien
gtccttttaattccagcccatgctgttgaaatg

SEQ ID NO: 870820 - DNA, 33 bp, Homo sapien
gtccttttaattccagtccatgctgttgaaatg

SEQ ID NO: 870821 - DNA, 33 bp, Homo sapien
aaatcattttgacttacgcatgacttaaaattt

SEQ ID NO: 870822 - DNA, 33 bp, Homo sapien
aaatcattttgacttatgcatgacttaaaattt

SEQ ID NO: 870823 - DNA, 33 bp, Homo sapien
tgccttccaaaatgaagaaaacggaatataagt

SEQ ID NO: 870824 - DNA, 33 bp, Homo sapien
tgccttccaaaatgaataaaacggaatataagt

SEQ ID NO: 870825 - DNA, 33 bp, Homo sapien
cagtgggaggtgtcaaaagaagccaacttcaag

SEQ ID NO: 870826 - DNA, 33 bp, Homo sapien
cagtgggaggtgtcaagagaagccaacttcaag

SEQ ID NO: 870827 - DNA, 33 bp, Homo sapien
tctcttgtggctctcacagttctgtatggcact

SEQ ID NO: 870828 - DNA, 33 bp, Homo sapien
tctcttgtggctctcatagttctgtatggcact

SEQ ID NO: 870829 - DNA, 33 bp, Homo sapien
tctgtgtattgacaaccattttgagtaactatg

SEQ ID NO: 870830 - DNA, 33 bp, Homo sapien
tctgtgtattgacaactattttgagtaactatg

SEQ ID NO: 870831 - DNA, 33 bp, Homo sapien
aaaatttccattttaacatgatattgcctgaga

SEQ ID NO: 870832 - DNA, 33 bp, Homo sapien
aaaatttccattttaatatgatattgcctgaga

SEQ ID NO: 870833 - DNA, 33 bp, Homo sapien
ctctccacttttcaaagaattagagtgatcatt

SEQ ID NO: 870834 - DNA, 33 bp, Homo sapien
ctctccacttttcaaataattagagtgatcatt

SEQ ID NO: 870835 - DNA, 33 bp, Homo sapien
ctgcaagtctctggtcacaatgtctgttaacca

SEQ ID NO: 870836 - DNA, 33 bp, Homo sapien
ctgcaagtctctggtcccaatgtctgttaacca

SEQ ID NO: 870837 - DNA, 33 bp, Homo sapien
gtggtcacatgcatataaaattcaaatgggcac

SEQ ID NO: 870838 - DNA, 33 bp, Homo sapien
gtggtcacatgcatatcaaattcaaatgggcac

SEQ ID NO: 870839 - DNA, 33 bp, Homo sapien
ctatgtatatctctcccatacctgaatacattc

SEQ ID NO: 870840 - DNA, 33 bp, Homo sapien
ctatgtatatctctccgatacctgaatacattc

SEQ ID NO: 870841 - DNA, 33 bp, Homo sapien
cagaaaaatcataataacaatcaattctgggcc

SEQ ID NO: 870842 - DNA, 33 bp, Homo sapien
cagaaaaatcataatagcaatcaattctgggcc

SEQ ID NO: 870843 - DNA, 33 bp, Homo sapien
gtagaaagacccagcccgaatctgatgcagggt

SEQ ID NO: 870844 - DNA, 33 bp, Homo sapien
gtagaaagacccagcctgaatctgatgcagggt

SEQ ID NO: 870845 - DNA, 33 bp, Homo sapien
ggctgcagagagccaccgagtttctctgctcaa

SEQ ID NO: 870846 - DNA, 33 bp, Homo sapien
ggctgcagagagccacggagtttctctgctcaa

SEQ ID NO: 870847 - DNA, 33 bp, Homo sapien
tccttgaaaactgcacaggttgcagaaaggcca

SEQ ID NO: 870848 - DNA, 33 bp, Homo sapien
tccttgaaaactgcaccggttgcagaaaggcca

SEQ ID NO: 870849 - DNA, 33 bp, Homo sapien
agataaaagaaggagcagagacactaaaaagtt

SEQ ID NO: 870850 - DNA, 33 bp, Homo sapien
agataaaagaaggagcggagacactaaaaagtt

SEQ ID NO: 870851 - DNA, 33 bp, Homo sapien
atagaaacaaagaaacacgctccatttcaacca

SEQ ID NO: 870852 - DNA, 33 bp, Homo sapien
atagaaacaaagaaacgcgctccatttcaacca

SEQ ID NO: 870853 - DNA, 33 bp, Homo sapien
ctaatgatctgattaccacattcaggatgcatt

SEQ ID NO: 870854 - DNA, 33 bp, Homo sapien
ctaatgatctgattactacattcaggatgcatt

SEQ ID NO: 870855 - DNA, 33 bp, Homo sapien
tttattggagagactacgttttcaccaatgcat

SEQ ID NO: 870856 - DNA, 33 bp, Homo sapien
tttattggagagactatgttttcaccaatgcat

SEQ ID NO: 870857 - DNA, 33 bp, Homo sapien
ctgccaggtcctgcacagtgaggacaggggact

SEQ ID NO: 870858 - DNA, 33 bp, Homo sapien
ctgccaggtcctgcacggtgaggacaggggact

SEQ ID NO: 870859 - DNA, 33 bp, Homo sapien
tggcgtttactcaaagaccctggccagaactat

SEQ ID NO: 870860 - DNA, 33 bp, Homo sapien
tggcgtttactcaaaggccctggccagaactat

SEQ ID NO: 870861 - DNA, 33 bp, Homo sapien
gtgtacacctcctccaatatggaaacactgcta

SEQ ID NO: 870862 - DNA, 33 bp, Homo sapien
gtgtacacctcctccagtatggaaacactgcta

SEQ ID NO: 870863 - DNA, 33 bp, Homo sapien
caaccagggcttcctcacagggtgaacaaataa

SEQ ID NO: 870864 - DNA, 33 bp, Homo sapien
caaccagggcttcctcgcagggtgaacaaataa

SEQ ID NO: 870865 - DNA, 33 bp, Homo sapien
gtgctgggaaaatggacggtgctggatagctac

SEQ ID NO: 870866 - DNA, 33 bp, Homo sapien
gtgctgggaaaatggatggtgctggatagctac

SEQ ID NO: 870867 - DNA, 33 bp, Homo sapien
agaggtcagagatagacaggtcagagaaataga

SEQ ID NO: 870868 - DNA, 33 bp, Homo sapien
agaggtcagagatagagaggtcagagaaataga

SEQ ID NO: 870869 - DNA, 33 bp, Homo sapien
tacttacacaaatctgaatggtaacatctttta

SEQ ID NO: 870870 - DNA, 33 bp, Homo sapien
tacttacacaaatctggatggtaacatctttta

SEQ ID NO: 870871 - DNA, 33 bp, Homo sapien
ttacctgcttttctaaccttatgtctcaccaca

SEQ ID NO: 870872 - DNA, 33 bp, Homo sapien
ttacctgcttttctaatcttatgtctcaccaca

SEQ ID NO: 870873 - DNA, 33 bp, Homo sapien
cagagccgaaacccaacgaaacaagggacaagt

SEQ ID NO: 870874 - DNA, 33 bp, Homo sapien
cagagccgaaacccaaggaaacaagggacaagt

SEQ ID NO: 870875 - DNA, 33 bp, Homo sapien
ccttggatgaaatggacgtttttctaagaaaat

SEQ ID NO: 870876 - DNA, 33 bp, Homo sapien
ccttggatgaaatggatgtttttctaagaaaat

SEQ ID NO: 870877 - DNA, 33 bp, Homo sapien
atacacacgaatgcaaataattttatgaataga

SEQ ID NO: 870878 - DNA, 33 bp, Homo sapien
atacacacgaatgcaagtaattttatgaataga

SEQ ID NO: 870879 - DNA, 33 bp, Homo sapien
tgttaagaaagaatgacattgatctgtatatgg

SEQ ID NO: 870880 - DNA, 33 bp, Homo sapien
tgttaagaaagaatgagattgatctgtatatgg

SEQ ID NO: 870881 - DNA, 33 bp, Homo sapien
aaaacttattctggccaaaataaactgaaaagt

SEQ ID NO: 870882 - DNA, 33 bp, Homo sapien
aaaacttattctggccgaaataaactgaaaagt

SEQ ID NO: 870883 - DNA, 33 bp, Homo sapien
gagtagcaggtgaagacagatgaaccaaggatg

SEQ ID NO: 870884 - DNA, 33 bp, Homo sapien
gagtagcaggtgaagagagatgaaccaaggatg

SEQ ID NO: 870885 - DNA, 33 bp, Homo sapien
caaagtttcagcaatgcaggatcaatagaagct

SEQ ID NO: 870886 - DNA, 33 bp, Homo sapien
caaagtttcagcaatggaggatcaatagaagct

SEQ ID NO: 870887 - DNA, 33 bp, Homo sapien
aaactctgatgagataagaaaaggaaattgaca

SEQ ID NO: 870888 - DNA, 33 bp, Homo sapien
aaactctgatgagataggaaaaggaaattgaca

SEQ ID NO: 870889 - DNA, 33 bp, Homo sapien
agggatacacagatgacaacacttaattcagaa

SEQ ID NO: 870890 - DNA, 33 bp, Homo sapien
agggatacacagatgagaacacttaattcagaa

SEQ ID NO: 870891 - DNA, 33 bp, Homo sapien
gtggtctaaaaggagaagattatacgagttaca

SEQ ID NO: 870892 - DNA, 33 bp, Homo sapien
gtggtctaaaaggagacgattatacgagttaca

SEQ ID NO: 870893 - DNA, 33 bp, Homo sapien
tggaaacttaggagacagtagaaaagacacatg

SEQ ID NO: 870894 - DNA, 33 bp, Homo sapien
tggaaacttaggagacggtagaaaagacacatg

SEQ ID NO: 870895 - DNA, 33 bp, Homo sapien
gccgtcgcgcggtgcacagctaagacgtcgcgc

SEQ ID NO: 870896 - DNA, 33 bp, Homo sapien
gccgtcgcgcggtgcatagctaagacgtcgcgc

SEQ ID NO: 870897 - DNA, 33 bp, Homo sapien
atacttttgggttcacactggggctgcaggctc

SEQ ID NO: 870898 - DNA, 33 bp, Homo sapien
atacttttgggttcacgctggggctgcaggctc

SEQ ID NO: 870899 - DNA, 33 bp, Homo sapien
ttattggtctcgttaaacaaattgtgattttaa

SEQ ID NO: 870900 - DNA, 33 bp, Homo sapien
ttattggtctcgttaaccaaattgtgattttaa

SEQ ID NO: 870901 - DNA, 33 bp, Homo sapien
taggttctttgagagacatgctaaatactggaa

SEQ ID NO: 870902 - DNA, 33 bp, Homo sapien
taggttctttgagagatatgctaaatactggaa

SEQ ID NO: 870903 - DNA, 33 bp, Homo sapien
atgtaatttgtagccacgcagggtgactcacac

SEQ ID NO: 870904 - DNA, 33 bp, Homo sapien
atgtaatttgtagccatgcagggtgactcacac

SEQ ID NO: 870905 - DNA, 33 bp, Homo sapien
atttctactagtctgagaaacccattcaagcca

SEQ ID NO: 870906 - DNA, 33 bp, Homo sapien
atttctactagtctgataaacccattcaagcca

SEQ ID NO: 870907 - DNA, 33 bp, Homo sapien
tacataatagtttataagcttctatcgcatccc

SEQ ID NO: 870908 - DNA, 33 bp, Homo sapien
tacataatagtttataggcttctatcgcatccc

SEQ ID NO: 870909 - DNA, 33 bp, Homo sapien
gctgcaaaccattctcaaggacccctcattcat

SEQ ID NO: 870910 - DNA, 33 bp, Homo sapien
gctgcaaaccattctcgaggacccctcattcat

SEQ ID NO: 870911 - DNA, 33 bp, Homo sapien
aatcatgtggttactacatattactttctgtag

SEQ ID NO: 870912 - DNA, 33 bp, Homo sapien
aatcatgtggttactatatattactttctgtag

SEQ ID NO: 870913 - DNA, 33 bp, Homo sapien
agaaaaataaagtttcaaaaagcaatgtatgtt

SEQ ID NO: 870914 - DNA, 33 bp, Homo sapien
agaaaaataaagtttcgaaaagcaatgtatgtt

SEQ ID NO: 870915 - DNA, 33 bp, Homo sapien
aggcatgtaatctgagacaggtactcttaatat

SEQ ID NO: 870916 - DNA, 33 bp, Homo sapien
aggcatgtaatctgaggcaggtactcttaatat

SEQ ID NO: 870917 - DNA, 33 bp, Homo sapien
gctttgacttcgtaaaggagcctagtattctca

SEQ ID NO: 870918 - DNA, 33 bp, Homo sapien
gctttgacttcgtaaatgagcctagtattctca

SEQ ID NO: 870919 - DNA, 33 bp, Homo sapien
tgatttgcagatagtcactaagtaaatcttgct

SEQ ID NO: 870920 - DNA, 33 bp, Homo sapien
tgatttgcagatagtcgctaagtaaatcttgct

SEQ ID NO: 870921 - DNA, 33 bp, Homo sapien
cattgttatgtagctcaagattacacaaaatga

SEQ ID NO: 870922 - DNA, 33 bp, Homo sapien
cattgttatgtagctccagattacacaaaatga

SEQ ID NO: 870923 - DNA, 33 bp, Homo sapien
aatgaccacattgatccatttgtaaccattacc

SEQ ID NO: 870924 - DNA, 33 bp, Homo sapien
aatgaccacattgatcgatttgtaaccattacc

SEQ ID NO: 870925 - DNA, 33 bp, Homo sapien
tgttaagtgttttcagcagattgccctgagcaa

SEQ ID NO: 870926 - DNA, 33 bp, Homo sapien
tgttaagtgttttcagtagattgccctgagcaa

SEQ ID NO: 870927 - DNA, 33 bp, Homo sapien
agcagtggctcttgagaagaatatcagtgtcat

SEQ ID NO: 870928 - DNA, 33 bp, Homo sapien
agcagtggctcttgagcagaatatcagtgtcat

SEQ ID NO: 870929 - DNA, 33 bp, Homo sapien
gtgcatacttctcttcacctcttgacttcccta

SEQ ID NO: 870930 - DNA, 33 bp, Homo sapien
gtgcatacttctcttcgcctcttgacttcccta

SEQ ID NO: 870931 - DNA, 33 bp, Homo sapien
ttccaggaggagattacgatatgttgtgtttcc

SEQ ID NO: 870932 - DNA, 33 bp, Homo sapien
ttccaggaggagattatgatatgttgtgtttcc

SEQ ID NO: 870933 - DNA, 33 bp, Homo sapien
ctaaaacacgctgaacagaaagctgaggggagt

SEQ ID NO: 870934 - DNA, 33 bp, Homo sapien
ctaaaacacgctgaaccgaaagctgaggggagt

SEQ ID NO: 870935 - DNA, 33 bp, Homo sapien
ttagaaagtctatcaacgtgaaaggtgaagaga

SEQ ID NO: 870936 - DNA, 33 bp, Homo sapien
ttagaaagtctatcaatgtgaaaggtgaagaga

SEQ ID NO: 870937 - DNA, 33 bp, Homo sapien
agctgggcttcaatcaatatagaattttcttgt

SEQ ID NO: 870938 - DNA, 33 bp, Homo sapien
agctgggcttcaatcagtatagaattttcttgt

SEQ ID NO: 870939 - DNA, 33 bp, Homo sapien
taccaggttagttacaatatttgaaatagttct

SEQ ID NO: 870940 - DNA, 33 bp, Homo sapien
taccaggttagttacagtatttgaaatagttct

SEQ ID NO: 870941 - DNA, 33 bp, Homo sapien
attcgtgtatgagtcaaagttatctgcggggac

SEQ ID NO: 870942 - DNA, 33 bp, Homo sapien
attcgtgtatgagtcacagttatctgcggggac

SEQ ID NO: 870943 - DNA, 33 bp, Homo sapien
atgaaacgagcagtaacgacgacccaggtcact

SEQ ID NO: 870944 - DNA, 33 bp, Homo sapien
atgaaacgagcagtaatgacgacccaggtcact

SEQ ID NO: 870945 - DNA, 33 bp, Homo sapien
aggtatttgaaacaaaatgactccatcttgaat

SEQ ID NO: 870946 - DNA, 33 bp, Homo sapien
aggtatttgaaacaaagtgactccatcttgaat

SEQ ID NO: 870947 - DNA, 33 bp, Homo sapien
ctctccaaacttccataaaaactctgtaggctt

SEQ ID NO: 870948 - DNA, 33 bp, Homo sapien
ctctccaaacttccattaaaactctgtaggctt

SEQ ID NO: 870949 - DNA, 33 bp, Homo sapien
ttgcaggattaaataacatgtgaaaacctcctg

SEQ ID NO: 870950 - DNA, 33 bp, Homo sapien
ttgcaggattaaataatatgtgaaaacctcctg

SEQ ID NO: 870951 - DNA, 33 bp, Homo sapien
attttacaggaagaaaatattgattggccaatt

SEQ ID NO: 870952 - DNA, 33 bp, Homo sapien
attttacaggaagaaactattgattggccaatt

SEQ ID NO: 870953 - DNA, 33 bp, Homo sapien
atgtctgtgatgaacaccttcttcctctcttag

SEQ ID NO: 870954 - DNA, 33 bp, Homo sapien
atgtctgtgatgaacagcttcttcctctcttag

SEQ ID NO: 870955 - DNA, 33 bp, Homo sapien
accggattcaacaaatcaaagtatagggcactc

SEQ ID NO: 870956 - DNA, 33 bp, Homo sapien
accggattcaacaaattaaagtatagggcactc

SEQ ID NO: 870957 - DNA, 33 bp, Homo sapien
agatttgaaccctgccactagcatagggccttt

SEQ ID NO: 870958 - DNA, 33 bp, Homo sapien
agatttgaaccctgccgctagcatagggccttt

SEQ ID NO: 870959 - DNA, 33 bp, Homo sapien
gtgttcccaaagaaaaatacgaagctcttctac

SEQ ID NO: 870960 - DNA, 33 bp, Homo sapien
gtgttcccaaagaaaagtacgaagctcttctac

SEQ ID NO: 870961 - DNA, 33 bp, Homo sapien
tttgcttcttcctttaataaagattgcccacat

SEQ ID NO: 870962 - DNA, 33 bp, Homo sapien
tttgcttcttcctttagtaaagattgcccacat

SEQ ID NO: 870963 - DNA, 33 bp, Homo sapien
ataatttaggatcctcaataattttaacactta

SEQ ID NO: 870964 - DNA, 33 bp, Homo sapien
ataatttaggatcctcgataattttaacactta

SEQ ID NO: 870965 - DNA, 33 bp, Homo sapien
tgtgaagagtaaatgaagtcatgtacataataa

SEQ ID NO: 870966 - DNA, 33 bp, Homo sapien
tgtgaagagtaaatgaggtcatgtacataataa

SEQ ID NO: 870967 - DNA, 33 bp, Homo sapien
ggtatgaaatgtagaccgagtgaggagtatgta

SEQ ID NO: 870968 - DNA, 33 bp, Homo sapien
ggtatgaaatgtagactgagtgaggagtatgta

SEQ ID NO: 870969 - DNA, 33 bp, Homo sapien
tgccaattctgctaagcctgttcatgtgaaatg

SEQ ID NO: 870970 - DNA, 33 bp, Homo sapien
tgccaattctgctaagtctgttcatgtgaaatg

SEQ ID NO: 870971 - DNA, 33 bp, Homo sapien
accaatatttgacttccaaacacctttactcac

SEQ ID NO: 870972 - DNA, 33 bp, Homo sapien
accaatatttgacttctaaacacctttactcac

SEQ ID NO: 870973 - DNA, 33 bp, Homo sapien
gagatacgtagagcgacctatgaaggaaggagg

SEQ ID NO: 870974 - DNA, 33 bp, Homo sapien
gagatacgtagagcgatctatgaaggaaggagg

SEQ ID NO: 870975 - DNA, 33 bp, Homo sapien
tcactgtgatattcaccgtattgcagtggtctg

SEQ ID NO: 870976 - DNA, 33 bp, Homo sapien
tcactgtgatattcacggtattgcagtggtctg

SEQ ID NO: 870977 - DNA, 33 bp, Homo sapien
tgagaccctgcctttacaataatctcctgtatc

SEQ ID NO: 870978 - DNA, 33 bp, Homo sapien
tgagaccctgcctttataataatctcctgtatc

SEQ ID NO: 870979 - DNA, 33 bp, Homo sapien
atggaaccatgggaacacaaacctgcttggttc

SEQ ID NO: 870980 - DNA, 33 bp, Homo sapien
atggaaccatgggaactcaaacctgcttggttc

SEQ ID NO: 870981 - DNA, 33 bp, Homo sapien
tgcttcctgctagtgactatattactgcttcct

SEQ ID NO: 870982 - DNA, 33 bp, Homo sapien
tgcttcctgctagtgattatattactgcttcct

SEQ ID NO: 870983 - DNA, 33 bp, Homo sapien
taactgaacttctgcactgatttcagggaagag

SEQ ID NO: 870984 - DNA, 33 bp, Homo sapien
taactgaacttctgcattgatttcagggaagag

SEQ ID NO: 870985 - DNA, 33 bp, Homo sapien
aaaagaacttgttttcacttatcaataaagtag

SEQ ID NO: 870986 - DNA, 33 bp, Homo sapien
aaaagaacttgttttcccttatcaataaagtag

SEQ ID NO: 870987 - DNA, 33 bp, Homo sapien
aatgataacaaaggcactcagccgtactctagt

SEQ ID NO: 870988 - DNA, 33 bp, Homo sapien
aatgataacaaaggcattcagccgtactctagt

SEQ ID NO: 870989 - DNA, 33 bp, Homo sapien
taaaccctttgacctgaagagtcttatcattct

SEQ ID NO: 870990 - DNA, 33 bp, Homo sapien
taaaccctttgacctgcagagtcttatcattct

SEQ ID NO: 870991 - DNA, 33 bp, Homo sapien
tagtttagtttctttcgaaagatctacaaagac

SEQ ID NO: 870992 - DNA, 33 bp, Homo sapien
tagtttagtttctttctaaagatctacaaagac

SEQ ID NO: 870993 - DNA, 33 bp, Homo sapien
ggtcagcatgtttgacggctttaacttagactg

SEQ ID NO: 870994 - DNA, 33 bp, Homo sapien
ggtcagcatgtttgactgctttaacttagactg

SEQ ID NO: 870995 - DNA, 33 bp, Homo sapien
tacaattcatggtacaaggccaagaaaagatca

SEQ ID NO: 870996 - DNA, 33 bp, Homo sapien
tacaattcatggtacacggccaagaaaagatca

SEQ ID NO: 870997 - DNA, 33 bp, Homo sapien
taaaatgtattaaagaaacagcccttttaacat

SEQ ID NO: 870998 - DNA, 33 bp, Homo sapien
taaaatgtattaaagacacagcccttttaacat

SEQ ID NO: 870999 - DNA, 33 bp, Homo sapien
cagcctcattacctagaattatcagacaatgct

SEQ ID NO: 871000 - DNA, 33 bp, Homo sapien
cagcctcattacctagcattatcagacaatgct

SEQ ID NO: 871001 - DNA, 33 bp, Homo sapien
tgacagcaaaactagcacaaacctctttttcgt

SEQ ID NO: 871002 - DNA, 33 bp, Homo sapien
tgacagcaaaactagcgcaaacctctttttcgt

SEQ ID NO: 871003 - DNA, 33 bp, Homo sapien
atcaacccagtcatcaccttgatctttgctatg

SEQ ID NO: 871004 - DNA, 33 bp, Homo sapien
atcaacccagtcatcatcttgatctttgctatg

SEQ ID NO: 871005 - DNA, 33 bp, Homo sapien
gcaatagcataaagtcagaaacatttttaaaag

SEQ ID NO: 871006 - DNA, 33 bp, Homo sapien
gcaatagcataaagtcggaaacatttttaaaag

SEQ ID NO: 871007 - DNA, 33 bp, Homo sapien
gatgaagaaggaaaaacctagagtataatacta

SEQ ID NO: 871008 - DNA, 33 bp, Homo sapien
gatgaagaaggaaaaagctagagtataatacta

SEQ ID NO: 871009 - DNA, 33 bp, Homo sapien
ttgaatttaaagtatgacaagaatcagagaagg

SEQ ID NO: 871010 - DNA, 33 bp, Homo sapien
ttgaatttaaagtatgtcaagaatcagagaagg

SEQ ID NO: 871011 - DNA, 33 bp, Homo sapien
tattaaacaattgccaaacagcttctcaaactg

SEQ ID NO: 871012 - DNA, 33 bp, Homo sapien
tattaaacaattgccagacagcttctcaaactg

SEQ ID NO: 871013 - DNA, 33 bp, Homo sapien
tgttgcatagcaggcaccataataagtgcttta

SEQ ID NO: 871014 - DNA, 33 bp, Homo sapien
tgttgcatagcaggcatcataataagtgcttta

SEQ ID NO: 871015 - DNA, 33 bp, Homo sapien
gggttctaggaaaattcaaatccacagtataca

SEQ ID NO: 871016 - DNA, 33 bp, Homo sapien
gggttctaggaaaatttaaatccacagtataca

SEQ ID NO: 871017 - DNA, 33 bp, Homo sapien
actgtttttcatgggaacttctgagacctaaac

SEQ ID NO: 871018 - DNA, 33 bp, Homo sapien
actgtttttcatgggaccttctgagacctaaac

SEQ ID NO: 871019 - DNA, 33 bp, Homo sapien
atagcaaactggtgcacggtaaaacagcaataa

SEQ ID NO: 871020 - DNA, 33 bp, Homo sapien
atagcaaactggtgcatggtaaaacagcaataa

SEQ ID NO: 871021 - DNA, 33 bp, Homo sapien
gccatgatcaagaggcaatttttgttctggtgt

SEQ ID NO: 871022 - DNA, 33 bp, Homo sapien
gccatgatcaagaggcgatttttgttctggtgt

SEQ ID NO: 871023 - DNA, 33 bp, Homo sapien
gatccatcaatggccacggaaaatacacacaac

SEQ ID NO: 871024 - DNA, 33 bp, Homo sapien
gatccatcaatggccatggaaaatacacacaac

SEQ ID NO: 871025 - DNA, 33 bp, Homo sapien
gaaggcttgagaaagcacaacagagatcaagaa

SEQ ID NO: 871026 - DNA, 33 bp, Homo sapien
gaaggcttgagaaagcgcaacagagatcaagaa

SEQ ID NO: 871027 - DNA, 33 bp, Homo sapien
agtatggtggccatgaacagagttgctgacaac

SEQ ID NO: 871028 - DNA, 33 bp, Homo sapien
agtatggtggccatgatcagagttgctgacaac

SEQ ID NO: 871029 - DNA, 33 bp, Homo sapien
atctaattcatatccaccagggaagtctggaat

SEQ ID NO: 871030 - DNA, 33 bp, Homo sapien
atctaattcatatccatcagggaagtctggaat

SEQ ID NO: 871031 - DNA, 33 bp, Homo sapien
ccaagagaaaggaagaccagtgtggttctgcgg

SEQ ID NO: 871032 - DNA, 33 bp, Homo sapien
ccaagagaaaggaagagcagtgtggttctgcgg

SEQ ID NO: 871033 - DNA, 33 bp, Homo sapien
attattcaggatgtagcatatgcattagactgg

SEQ ID NO: 871034 - DNA, 33 bp, Homo sapien
attattcaggatgtagtatatgcattagactgg

SEQ ID NO: 871035 - DNA, 33 bp, Homo sapien
atttactttgaagaaagaatttgataaccaatg

SEQ ID NO: 871036 - DNA, 33 bp, Homo sapien
atttactttgaagaaataatttgataaccaatg

SEQ ID NO: 871037 - DNA, 33 bp, Homo sapien
aaatacattgagaaataagaacatgttatacat

SEQ ID NO: 871038 - DNA, 33 bp, Homo sapien
aaatacattgagaaatgagaacatgttatacat

SEQ ID NO: 871039 - DNA, 33 bp, Homo sapien
ttctgagcccgtaagaacagtgggggccttctc

SEQ ID NO: 871040 - DNA, 33 bp, Homo sapien
ttctgagcccgtaagatcagtgggggccttctc

SEQ ID NO: 871041 - DNA, 33 bp, Homo sapien
gtattgttactcatacactttccttgaaactaa

SEQ ID NO: 871042 - DNA, 33 bp, Homo sapien
gtattgttactcatacgctttccttgaaactaa

SEQ ID NO: 871043 - DNA, 33 bp, Homo sapien
tcatagctattttctacggaatgttttgacttt

SEQ ID NO: 871044 - DNA, 33 bp, Homo sapien
tcatagctattttctatggaatgttttgacttt

SEQ ID NO: 871045 - DNA, 33 bp, Homo sapien
gcaaaatcattttggaagtacagaaggttggtt

SEQ ID NO: 871046 - DNA, 33 bp, Homo sapien
gcaaaatcattttggaggtacagaaggttggtt

SEQ ID NO: 871047 - DNA, 33 bp, Homo sapien
gccaactcacacagaacattgaaatacaaaacc

SEQ ID NO: 871048 - DNA, 33 bp, Homo sapien
gccaactcacacagaatattgaaatacaaaacc

SEQ ID NO: 871049 - DNA, 33 bp, Homo sapien
tttaaaatcaagaataccattgaggttttttgt

SEQ ID NO: 871050 - DNA, 33 bp, Homo sapien
tttaaaatcaagaatatcattgaggttttttgt

SEQ ID NO: 871051 - DNA, 33 bp, Homo sapien
tactttattgtgcagaagctttttactttgatg

SEQ ID NO: 871052 - DNA, 33 bp, Homo sapien
tactttattgtgcagaggctttttactttgatg

SEQ ID NO: 871053 - DNA, 33 bp, Homo sapien
ttcctgttattgcacccgagttcagcctctcct

SEQ ID NO: 871054 - DNA, 33 bp, Homo sapien
ttcctgttattgcacctgagttcagcctctcct

SEQ ID NO: 871055 - DNA, 33 bp, Homo sapien
ctcacactgttgcttagactagtctcaaactcc

SEQ ID NO: 871056 - DNA, 33 bp, Homo sapien
ctcacactgttgcttatactagtctcaaactcc

SEQ ID NO: 871057 - DNA, 33 bp, Homo sapien
gccataggagtctttacaatgattaggtgaaga

SEQ ID NO: 871058 - DNA, 33 bp, Homo sapien
gccataggagtctttataatgattaggtgaaga

SEQ ID NO: 871059 - DNA, 33 bp, Homo sapien
catagaactacaaaatgaaatccaggaagaacc

SEQ ID NO: 871060 - DNA, 33 bp, Homo sapien
catagaactacaaaattaaatccaggaagaacc

SEQ ID NO: 871061 - DNA, 33 bp, Homo sapien
agggaaaagtccttacactgtctggatttggtg

SEQ ID NO: 871062 - DNA, 33 bp, Homo sapien
agggaaaagtccttacgctgtctggatttggtg

SEQ ID NO: 871063 - DNA, 33 bp, Homo sapien
attttgtccagtagagcccttaacacatcaatc

SEQ ID NO: 871064 - DNA, 33 bp, Homo sapien
attttgtccagtagagtccttaacacatcaatc

SEQ ID NO: 871065 - DNA, 33 bp, Homo sapien
tgggaacctccggttaaattttagaggatgtat

SEQ ID NO: 871066 - DNA, 33 bp, Homo sapien
tgggaacctccggttagattttagaggatgtat

SEQ ID NO: 871067 - DNA, 33 bp, Homo sapien
gactcattattacttaagtgaatttttgcagct

SEQ ID NO: 871068 - DNA, 33 bp, Homo sapien
gactcattattacttatgtgaatttttgcagct

SEQ ID NO: 871069 - DNA, 33 bp, Homo sapien
gtggaggttcaaactgcatattatgatataaag

SEQ ID NO: 871070 - DNA, 33 bp, Homo sapien
gtggaggttcaaactgtatattatgatataaag

SEQ ID NO: 871071 - DNA, 33 bp, Homo sapien
ctaatcatttgagacaaagaatttcctgagtaa

SEQ ID NO: 871072 - DNA, 33 bp, Homo sapien
ctaatcatttgagacacagaatttcctgagtaa

SEQ ID NO: 871073 - DNA, 33 bp, Homo sapien
ttctttcacaaagaatcagtggagttttccagg

SEQ ID NO: 871074 - DNA, 33 bp, Homo sapien
ttctttcacaaagaatgagtggagttttccagg

SEQ ID NO: 871075 - DNA, 33 bp, Homo sapien
aagtacctgattgatacagaaaatgtgttaaca

SEQ ID NO: 871076 - DNA, 33 bp, Homo sapien
aagtacctgattgatatagaaaatgtgttaaca

SEQ ID NO: 871077 - DNA, 33 bp, Homo sapien
tttgagaaatttttgaaaagcaagatacaggta

SEQ ID NO: 871078 - DNA, 33 bp, Homo sapien
tttgagaaatttttgagaagcaagatacaggta

SEQ ID NO: 871079 - DNA, 33 bp, Homo sapien
cttcatatttcagtaaagtctcaagtgatgtac

SEQ ID NO: 871080 - DNA, 33 bp, Homo sapien
cttcatatttcagtaaggtctcaagtgatgtac

SEQ ID NO: 871081 - DNA, 33 bp, Homo sapien
tattatacctggaaataattggtatctagttta

SEQ ID NO: 871082 - DNA, 33 bp, Homo sapien
tattatacctggaaatcattggtatctagttta

SEQ ID NO: 871083 - DNA, 33 bp, Homo sapien
tgcaatgtttttatgacctagtcttggaagtga

SEQ ID NO: 871084 - DNA, 33 bp, Homo sapien
tgcaatgtttttatgatctagtcttggaagtga

SEQ ID NO: 871085 - DNA, 33 bp, Homo sapien
aaatacgtgccactcaaactctagatgaagagc

SEQ ID NO: 871086 - DNA, 33 bp, Homo sapien
aaatacgtgccactcacactctagatgaagagc

SEQ ID NO: 871087 - DNA, 33 bp, Homo sapien
agtacgcgtaaactctgaagacctaaacacatt

SEQ ID NO: 871088 - DNA, 33 bp, Homo sapien
agtacgcgtaaactcttaagacctaaacacatt

SEQ ID NO: 871089 - DNA, 33 bp, Homo sapien
tctcctgggcccagtaagatccaaaagggtctc

SEQ ID NO: 871090 - DNA, 33 bp, Homo sapien
tctcctgggcccagtatgatccaaaagggtctc

SEQ ID NO: 871091 - DNA, 33 bp, Homo sapien
agcgttccatagatatcagctaactgtgacaat

SEQ ID NO: 871092 - DNA, 33 bp, Homo sapien
agcgttccatagatattagctaactgtgacaat

SEQ ID NO: 871093 - DNA, 33 bp, Homo sapien
gagattgtggttgatacgaatttttttaaagtt

SEQ ID NO: 871094 - DNA, 33 bp, Homo sapien
gagattgtggttgatatgaatttttttaaagtt

SEQ ID NO: 871095 - DNA, 33 bp, Homo sapien
ctcttctctaccctcaactattaagacgtaggc

SEQ ID NO: 871096 - DNA, 33 bp, Homo sapien
ctcttctctaccctcatctattaagacgtaggc

SEQ ID NO: 871097 - DNA, 33 bp, Homo sapien
tatctggccttcttaccgagctcttaacctaca

SEQ ID NO: 871098 - DNA, 33 bp, Homo sapien
tatctggccttcttactgagctcttaacctaca

SEQ ID NO: 871099 - DNA, 33 bp, Homo sapien
ttcaaacttttcttcacgtgctagaagcttata

SEQ ID NO: 871100 - DNA, 33 bp, Homo sapien
ttcaaacttttcttcatgtgctagaagcttata

SEQ ID NO: 871101 - DNA, 33 bp, Homo sapien
ccctgcttatatcacacggtttggggaggattt

SEQ ID NO: 871102 - DNA, 33 bp, Homo sapien
ccctgcttatatcacatggtttggggaggattt

SEQ ID NO: 871103 - DNA, 33 bp, Homo sapien
tgagttttgaaccaaactattctgtctctagag

SEQ ID NO: 871104 - DNA, 33 bp, Homo sapien
tgagttttgaaccaaagtattctgtctctagag

SEQ ID NO: 871105 - DNA, 33 bp, Homo sapien
atgtttaccaaggtgaaaatatgggaaataagg

SEQ ID NO: 871106 - DNA, 33 bp, Homo sapien
atgtttaccaaggtgacaatatgggaaataagg

SEQ ID NO: 871107 - DNA, 33 bp, Homo sapien
cttcttaaaactctccaatggtttccattttct

SEQ ID NO: 871108 - DNA, 33 bp, Homo sapien
cttcttaaaactctccgatggtttccattttct

SEQ ID NO: 871109 - DNA, 33 bp, Homo sapien
ctttggcgaacttgtgcaagtctggttcctgta

SEQ ID NO: 871110 - DNA, 33 bp, Homo sapien
ctttggcgaacttgtgtaagtctggttcctgta

SEQ ID NO: 871111 - DNA, 33 bp, Homo sapien
tagatcgtgaccacacgggttaaggttgggtct

SEQ ID NO: 871112 - DNA, 33 bp, Homo sapien
tagatcgtgaccacactggttaaggttgggtct

SEQ ID NO: 871113 - DNA, 33 bp, Homo sapien
gggtataatgagggaaacttttactaatataaa

SEQ ID NO: 871114 - DNA, 33 bp, Homo sapien
gggtataatgagggaaccttttactaatataaa

SEQ ID NO: 871115 - DNA, 33 bp, Homo sapien
aaatcaaacagaacaaatattcatatcaacaaa

SEQ ID NO: 871116 - DNA, 33 bp, Homo sapien
aaatcaaacagaacaagtattcatatcaacaaa

SEQ ID NO: 871117 - DNA, 33 bp, Homo sapien
ttgtaaaatggaatcaatatcaatttattttac

SEQ ID NO: 871118 - DNA, 33 bp, Homo sapien
ttgtaaaatggaatcagtatcaatttattttac

SEQ ID NO: 871119 - DNA, 33 bp, Homo sapien
ctcagaagcaacccaaatacaagacaaacatta

SEQ ID NO: 871120 - DNA, 33 bp, Homo sapien
ctcagaagcaacccaagtacaagacaaacatta

SEQ ID NO: 871121 - DNA, 33 bp, Homo sapien
tgttaccattattccaatgcagtagcaaccatg

SEQ ID NO: 871122 - DNA, 33 bp, Homo sapien
tgttaccattattccagtgcagtagcaaccatg

SEQ ID NO: 871123 - DNA, 33 bp, Homo sapien
agtaacaaaataacaaagtggcaacattttttt

SEQ ID NO: 871124 - DNA, 33 bp, Homo sapien
agtaacaaaataacaaggtggcaacattttttt

SEQ ID NO: 871125 - DNA, 33 bp, Homo sapien
ctgccttgcaaatgaaccaaataaactttccct

SEQ ID NO: 871126 - DNA, 33 bp, Homo sapien
ctgccttgcaaatgaatcaaataaactttccct

SEQ ID NO: 871127 - DNA, 33 bp, Homo sapien
agggtccactcacccccaaacctagttgcaaaa

SEQ ID NO: 871128 - DNA, 33 bp, Homo sapien
agggtccactcaccccgaaacctagttgcaaaa

SEQ ID NO: 871129 - DNA, 33 bp, Homo sapien
agcttgatagtactagacacacatggtttatga

SEQ ID NO: 871130 - DNA, 33 bp, Homo sapien
agcttgatagtactaggcacacatggtttatga

SEQ ID NO: 871131 - DNA, 33 bp, Homo sapien
gtgtaactgagctccccgctagcctgcaggctt

SEQ ID NO: 871132 - DNA, 33 bp, Homo sapien
gtgtaactgagctccctgctagcctgcaggctt

SEQ ID NO: 871133 - DNA, 33 bp, Homo sapien
cactgtaaatgcatacaagaaaaatgcagtagt

SEQ ID NO: 871134 - DNA, 33 bp, Homo sapien
cactgtaaatgcatacgagaaaaatgcagtagt

SEQ ID NO: 871135 - DNA, 33 bp, Homo sapien
ttaatgacataagttacgaatcacagtagccaa

SEQ ID NO: 871136 - DNA, 33 bp, Homo sapien
ttaatgacataagttatgaatcacagtagccaa

SEQ ID NO: 871137 - DNA, 33 bp, Homo sapien
gacactgaatttgttaagacacttcctatgatg

SEQ ID NO: 871138 - DNA, 33 bp, Homo sapien
gacactgaatttgttaggacacttcctatgatg

SEQ ID NO: 871139 - DNA, 33 bp, Homo sapien
tttgcaatggtgttctcaaaaattagaatgtta

SEQ ID NO: 871140 - DNA, 33 bp, Homo sapien
tttgcaatggtgttcttaaaaattagaatgtta

SEQ ID NO: 871141 - DNA, 33 bp, Homo sapien
tcagtgtcaggaaaaccctcatggtggctcgga

SEQ ID NO: 871142 - DNA, 33 bp, Homo sapien
tcagtgtcaggaaaactctcatggtggctcgga

SEQ ID NO: 871143 - DNA, 33 bp, Homo sapien
gatagggagcccatcactcttatttgagtaact

SEQ ID NO: 871144 - DNA, 33 bp, Homo sapien
gatagggagcccatcattcttatttgagtaact

SEQ ID NO: 871145 - DNA, 33 bp, Homo sapien
gagagatttaagcaggaatcagaatttttctca

SEQ ID NO: 871146 - DNA, 33 bp, Homo sapien
gagagatttaagcagggatcagaatttttctca

SEQ ID NO: 871147 - DNA, 33 bp, Homo sapien
gataaggcaacttgtacagacatcagaattgaa

SEQ ID NO: 871148 - DNA, 33 bp, Homo sapien
gataaggcaacttgtatagacatcagaattgaa

SEQ ID NO: 871149 - DNA, 33 bp, Homo sapien
acttaactttgctgaactgttattatttaagca

SEQ ID NO: 871150 - DNA, 33 bp, Homo sapien
acttaactttgctgaattgttattatttaagca

SEQ ID NO: 871151 - DNA, 33 bp, Homo sapien
gcaagcaaactctgcagatgtgtgggatatgag

SEQ ID NO: 871152 - DNA, 33 bp, Homo sapien
gcaagcaaactctgcatatgtgtgggatatgag

SEQ ID NO: 871153 - DNA, 33 bp, Homo sapien
ccttaaaagcactcaacggtatcttagtatttt

SEQ ID NO: 871154 - DNA, 33 bp, Homo sapien
ccttaaaagcactcaatggtatcttagtatttt

SEQ ID NO: 871155 - DNA, 33 bp, Homo sapien
tctaaatagtccagaacagtgatgtttatttta

SEQ ID NO: 871156 - DNA, 33 bp, Homo sapien
tctaaatagtccagaagagtgatgtttatttta

SEQ ID NO: 871157 - DNA, 33 bp, Homo sapien
aaatatagatccaagaagaacaactaatgtcga

SEQ ID NO: 871158 - DNA, 33 bp, Homo sapien
aaatatagatccaagaggaacaactaatgtcga

SEQ ID NO: 871159 - DNA, 33 bp, Homo sapien
aacaggtatatgaaaaagcggggagagaacagc

SEQ ID NO: 871160 - DNA, 33 bp, Homo sapien
aacaggtatatgaaaacgcggggagagaacagc

SEQ ID NO: 871161 - DNA, 33 bp, Homo sapien
cagaagagttctacaacgttcatcttaataata

SEQ ID NO: 871162 - DNA, 33 bp, Homo sapien
cagaagagttctacaatgttcatcttaataata

SEQ ID NO: 871163 - DNA, 33 bp, Homo sapien
aaattaatgttgtaaacaaactgtctaaagtta

SEQ ID NO: 871164 - DNA, 33 bp, Homo sapien
aaattaatgttgtaaataaactgtctaaagtta

SEQ ID NO: 871165 - DNA, 33 bp, Homo sapien
aaaattctgagagccacatttgcaaagtaaacc

SEQ ID NO: 871166 - DNA, 33 bp, Homo sapien
aaaattctgagagccatatttgcaaagtaaacc

SEQ ID NO: 871167 - DNA, 33 bp, Homo sapien
tttgtcgatgctatgactaaaagtaagactatg

SEQ ID NO: 871168 - DNA, 33 bp, Homo sapien
tttgtcgatgctatgattaaaagtaagactatg

SEQ ID NO: 871169 - DNA, 33 bp, Homo sapien
ttcctggatgtaggaacagagtttgcagttcac

SEQ ID NO: 871170 - DNA, 33 bp, Homo sapien
ttcctggatgtaggaatagagtttgcagttcac

SEQ ID NO: 871171 - DNA, 33 bp, Homo sapien
gtagagaaacagaaggaatctcagaggtgtggt

SEQ ID NO: 871172 - DNA, 33 bp, Homo sapien
gtagagaaacagaagggatctcagaggtgtggt

SEQ ID NO: 871173 - DNA, 33 bp, Homo sapien
atccttgagttgacccagaaacattctgctgtt

SEQ ID NO: 871174 - DNA, 33 bp, Homo sapien
atccttgagttgacccggaaacattctgctgtt

SEQ ID NO: 871175 - DNA, 33 bp, Homo sapien
aaaagtccaaatctgcactatccaatatggtaa

SEQ ID NO: 871176 - DNA, 33 bp, Homo sapien
aaaagtccaaatctgccctatccaatatggtaa

SEQ ID NO: 871177 - DNA, 33 bp, Homo sapien
aagacttggacaaatactaacctcctcgttcat

SEQ ID NO: 871178 - DNA, 33 bp, Homo sapien
aagacttggacaaatattaacctcctcgttcat

SEQ ID NO: 871179 - DNA, 33 bp, Homo sapien
gtcctcactgtgaatcactctattagtccctac

SEQ ID NO: 871180 - DNA, 33 bp, Homo sapien
gtcctcactgtgaatcgctctattagtccctac

SEQ ID NO: 871181 - DNA, 33 bp, Homo sapien
gcttagctcttaaaagacgtggaaaggaaccta

SEQ ID NO: 871182 - DNA, 33 bp, Homo sapien
gcttagctcttaaaagtcgtggaaaggaaccta

SEQ ID NO: 871183 - DNA, 33 bp, Homo sapien
taactgtcgtttcttgaataacaggctatttcc

SEQ ID NO: 871184 - DNA, 33 bp, Homo sapien
taactgtcgtttcttggataacaggctatttcc

SEQ ID NO: 871185 - DNA, 33 bp, Homo sapien
ttattaagcacttgccacacagtagaagtcgtt

SEQ ID NO: 871186 - DNA, 33 bp, Homo sapien
ttattaagcacttgccgcacagtagaagtcgtt

SEQ ID NO: 871187 - DNA, 33 bp, Homo sapien
cccagagcacataccacaattattcccaaagta

SEQ ID NO: 871188 - DNA, 33 bp, Homo sapien
cccagagcacataccagaattattcccaaagta

SEQ ID NO: 871189 - DNA, 33 bp, Homo sapien
agatatatagattctcaaatattggctactttt

SEQ ID NO: 871190 - DNA, 33 bp, Homo sapien
agatatatagattctcgaatattggctactttt

SEQ ID NO: 871191 - DNA, 33 bp, Homo sapien
agcccataatgtgggcacaaatgttagcaagtc

SEQ ID NO: 871192 - DNA, 33 bp, Homo sapien
agcccataatgtgggcgcaaatgttagcaagtc

SEQ ID NO: 871193 - DNA, 33 bp, Homo sapien
acatgatctccttccacagcacagaggatatga

SEQ ID NO: 871194 - DNA, 33 bp, Homo sapien
acatgatctccttccatagcacagaggatatga

SEQ ID NO: 871195 - DNA, 33 bp, Homo sapien
aaggcaagttggtctcaatatttcaggcacaga

SEQ ID NO: 871196 - DNA, 33 bp, Homo sapien
aaggcaagttggtctcgatatttcaggcacaga

SEQ ID NO: 871197 - DNA, 33 bp, Homo sapien
gaaataggaacaaatactatgatcagactccat

SEQ ID NO: 871198 - DNA, 33 bp, Homo sapien
gaaataggaacaaatagtatgatcagactccat

SEQ ID NO: 871199 - DNA, 33 bp, Homo sapien
ttacatctcacacaagaaagtataaggagtctc

SEQ ID NO: 871200 - DNA, 33 bp, Homo sapien
ttacatctcacacaaggaagtataaggagtctc

SEQ ID NO: 871201 - DNA, 33 bp, Homo sapien
ctctgaaagttgatataataatgagcaaggtag

SEQ ID NO: 871202 - DNA, 33 bp, Homo sapien
ctctgaaagttgatatgataatgagcaaggtag

SEQ ID NO: 871203 - DNA, 33 bp, Homo sapien
ctacctgcagaataacaacacaagcgaagtcca

SEQ ID NO: 871204 - DNA, 33 bp, Homo sapien
ctacctgcagaataacgacacaagcgaagtcca

SEQ ID NO: 871205 - DNA, 33 bp, Homo sapien
acaaaaccacatggatcaaaacagatagtttcc

SEQ ID NO: 871206 - DNA, 33 bp, Homo sapien
acaaaaccacatggatgaaaacagatagtttcc

SEQ ID NO: 871207 - DNA, 33 bp, Homo sapien
caaattggacccaaaaagcatagttttgtctga

SEQ ID NO: 871208 - DNA, 33 bp, Homo sapien
caaattggacccaaaaggcatagttttgtctga

SEQ ID NO: 871209 - DNA, 33 bp, Homo sapien
atctgaaacatttgataagaatttttctaaggg

SEQ ID NO: 871210 - DNA, 33 bp, Homo sapien
atctgaaacatttgatcagaatttttctaaggg

SEQ ID NO: 871211 - DNA, 33 bp, Homo sapien
gcgatgcactgtgctacaatggttacaatgact

SEQ ID NO: 871212 - DNA, 33 bp, Homo sapien
gcgatgcactgtgctataatggttacaatgact

SEQ ID NO: 871213 - DNA, 33 bp, Homo sapien
gtcctgaagaaagatgaaccacatttatttgct

SEQ ID NO: 871214 - DNA, 33 bp, Homo sapien
gtcctgaagaaagatggaccacatttatttgct

SEQ ID NO: 871215 - DNA, 33 bp, Homo sapien
tgaatataaaccatccacaaactctagctacag

SEQ ID NO: 871216 - DNA, 33 bp, Homo sapien
tgaatataaaccatccgcaaactctagctacag

SEQ ID NO: 871217 - DNA, 33 bp, Homo sapien
tgagagtaaagaataaaatagcaactcctcata

SEQ ID NO: 871218 - DNA, 33 bp, Homo sapien
tgagagtaaagaataagatagcaactcctcata

SEQ ID NO: 871219 - DNA, 33 bp, Homo sapien
gacattacaattttcactctttttccatcactg

SEQ ID NO: 871220 - DNA, 33 bp, Homo sapien
gacattacaattttcattctttttccatcactg

SEQ ID NO: 871221 - DNA, 33 bp, Homo sapien
aaaaatcaactcaatacggatgaaagacttaaa

SEQ ID NO: 871222 - DNA, 33 bp, Homo sapien
aaaaatcaactcaatatggatgaaagacttaaa

SEQ ID NO: 871223 - DNA, 33 bp, Homo sapien
cctttccctttctttacagcagagatcagggta

SEQ ID NO: 871224 - DNA, 33 bp, Homo sapien
cctttccctttctttatagcagagatcagggta

SEQ ID NO: 871225 - DNA, 33 bp, Homo sapien
agcagcatagtttgagccagggcaagtagaaca

SEQ ID NO: 871226 - DNA, 33 bp, Homo sapien
agcagcatagtttgagtcagggcaagtagaaca

SEQ ID NO: 871227 - DNA, 33 bp, Homo sapien
tttattgtcagaacacgctctttaactagagga

SEQ ID NO: 871228 - DNA, 33 bp, Homo sapien
tttattgtcagaacactctctttaactagagga

SEQ ID NO: 871229 - DNA, 33 bp, Homo sapien
tcaatctggctcttcaagcacaaagatgagaaa

SEQ ID NO: 871230 - DNA, 33 bp, Homo sapien
tcaatctggctcttcaggcacaaagatgagaaa

SEQ ID NO: 871231 - DNA, 33 bp, Homo sapien
gggcgcagcactgagacgttaagttaagaagta

SEQ ID NO: 871232 - DNA, 33 bp, Homo sapien
gggcgcagcactgagatgttaagttaagaagta

SEQ ID NO: 871233 - DNA, 33 bp, Homo sapien
aggtccaggaagatcacggaggacaaagagtag

SEQ ID NO: 871234 - DNA, 33 bp, Homo sapien
aggtccaggaagatcatggaggacaaagagtag

SEQ ID NO: 871235 - DNA, 33 bp, Homo sapien
aaagtgccaaatacaaaactaccctactttcgt

SEQ ID NO: 871236 - DNA, 33 bp, Homo sapien
aaagtgccaaatacaatactaccctactttcgt

SEQ ID NO: 871237 - DNA, 33 bp, Homo sapien
catggcccacagttgaggttgccctcgattcaa

SEQ ID NO: 871238 - DNA, 33 bp, Homo sapien
catggcccacagttgatgttgccctcgattcaa

SEQ ID NO: 871239 - DNA, 33 bp, Homo sapien
ctgctgggtggaaatagcgctctagcacaggca

SEQ ID NO: 871240 - DNA, 33 bp, Homo sapien
ctgctgggtggaaatatcgctctagcacaggca

SEQ ID NO: 871241 - DNA, 33 bp, Homo sapien
atggaatcctatttaaacatattccagcagaag

SEQ ID NO: 871242 - DNA, 33 bp, Homo sapien
atggaatcctatttaaccatattccagcagaag

SEQ ID NO: 871243 - DNA, 33 bp, Homo sapien
ttttcgatacctttacagaagatttacgttcat

SEQ ID NO: 871244 - DNA, 33 bp, Homo sapien
ttttcgatacctttacggaagatttacgttcat

SEQ ID NO: 871245 - DNA, 33 bp, Homo sapien
cattggctccactgaacggtctctatgctaata

SEQ ID NO: 871246 - DNA, 33 bp, Homo sapien
cattggctccactgaatggtctctatgctaata

SEQ ID NO: 871247 - DNA, 33 bp, Homo sapien
tatgtagcaagagccacatcaagattcagcact

SEQ ID NO: 871248 - DNA, 33 bp, Homo sapien
tatgtagcaagagccagatcaagattcagcact

SEQ ID NO: 871249 - DNA, 33 bp, Homo sapien
aactctgtgatgtagacaaaattgctatgattt

SEQ ID NO: 871250 - DNA, 33 bp, Homo sapien
aactctgtgatgtagataaaattgctatgattt

SEQ ID NO: 871251 - DNA, 33 bp, Homo sapien
ctctgtgtccctgaaactgctaaaaaaaacaga

SEQ ID NO: 871252 - DNA, 33 bp, Homo sapien
ctctgtgtccctgaaagtgctaaaaaaaacaga

SEQ ID NO: 871253 - DNA, 33 bp, Homo sapien
ctcccttagcaatgcaaactgaaaaacaagaaa

SEQ ID NO: 871254 - DNA, 33 bp, Homo sapien
ctcccttagcaatgcacactgaaaaacaagaaa

SEQ ID NO: 871255 - DNA, 33 bp, Homo sapien
aattttgcatctctgccgacttgaattctaaaa

SEQ ID NO: 871256 - DNA, 33 bp, Homo sapien
aattttgcatctctgctgacttgaattctaaaa

SEQ ID NO: 871257 - DNA, 33 bp, Homo sapien
atgaggaactggcagaaatcttcaagttttcag

SEQ ID NO: 871258 - DNA, 33 bp, Homo sapien
atgaggaactggcagagatcttcaagttttcag

SEQ ID NO: 871259 - DNA, 33 bp, Homo sapien
caaagaaagtgtccaacaaatagaggaaaaaaa

SEQ ID NO: 871260 - DNA, 33 bp, Homo sapien
caaagaaagtgtccaataaatagaggaaaaaaa

SEQ ID NO: 871261 - DNA, 33 bp, Homo sapien
ataccacatcaggtaccatgtctgtctatcttt

SEQ ID NO: 871262 - DNA, 33 bp, Homo sapien
ataccacatcaggtactatgtctgtctatcttt

SEQ ID NO: 871263 - DNA, 33 bp, Homo sapien
ttcttatctctggcaagtcactaagaaacccca

SEQ ID NO: 871264 - DNA, 33 bp, Homo sapien
ttcttatctctggcaattcactaagaaacccca

SEQ ID NO: 871265 - DNA, 33 bp, Homo sapien
acatctaatcaggcaacagcgattcgagtgaca

SEQ ID NO: 871266 - DNA, 33 bp, Homo sapien
acatctaatcaggcaatagcgattcgagtgaca

SEQ ID NO: 871267 - DNA, 33 bp, Homo sapien
tagatgtccacttcccagacagatagtacattt

SEQ ID NO: 871268 - DNA, 33 bp, Homo sapien
tagatgtccacttccctgacagatagtacattt

SEQ ID NO: 871269 - DNA, 33 bp, Homo sapien
aatcttggttgtctgcaaatgagtagtgggagg

SEQ ID NO: 871270 - DNA, 33 bp, Homo sapien
aatcttggttgtctgcgaatgagtagtgggagg

SEQ ID NO: 871271 - DNA, 33 bp, Homo sapien
caaatcagaaccataaggactgcgactcaggag

SEQ ID NO: 871272 - DNA, 33 bp, Homo sapien
caaatcagaaccataatgactgcgactcaggag

SEQ ID NO: 871273 - DNA, 33 bp, Homo sapien
atccagaccagtgtgaagcaagtcaagaaggcc

SEQ ID NO: 871274 - DNA, 33 bp, Homo sapien
atccagaccagtgtgaggcaagtcaagaaggcc

SEQ ID NO: 871275 - DNA, 33 bp, Homo sapien
gaatgaccttagtccaaagttgcagatccattg

SEQ ID NO: 871276 - DNA, 33 bp, Homo sapien
gaatgaccttagtccatagttgcagatccattg

SEQ ID NO: 871277 - DNA, 33 bp, Homo sapien
atctgatgaagaggtgacaagggaaagggctac

SEQ ID NO: 871278 - DNA, 33 bp, Homo sapien
atctgatgaagaggtggcaagggaaagggctac

SEQ ID NO: 871279 - DNA, 33 bp, Homo sapien
tggttgtggctatcaactcccgacttctagcat

SEQ ID NO: 871280 - DNA, 33 bp, Homo sapien
tggttgtggctatcaattcccgacttctagcat

SEQ ID NO: 871281 - DNA, 33 bp, Homo sapien
tttttctgggtaacacaaagttaacatggcctc

SEQ ID NO: 871282 - DNA, 33 bp, Homo sapien
tttttctgggtaacacgaagttaacatggcctc

SEQ ID NO: 871283 - DNA, 33 bp, Homo sapien
atctttactttgactacgcatcatttttcagaa

SEQ ID NO: 871284 - DNA, 33 bp, Homo sapien
atctttactttgactatgcatcatttttcagaa

SEQ ID NO: 871285 - DNA, 33 bp, Homo sapien
tcttatttgagatatcaccagttggtacaggac

SEQ ID NO: 871286 - DNA, 33 bp, Homo sapien
tcttatttgagatatccccagttggtacaggac

SEQ ID NO: 871287 - DNA, 33 bp, Homo sapien
taagcccctctgtttacggtattttgttatagg

SEQ ID NO: 871288 - DNA, 33 bp, Homo sapien
taagcccctctgtttatggtattttgttatagg

SEQ ID NO: 871289 - DNA, 33 bp, Homo sapien
cagctttccagcttccagcatctggttgcaatt

SEQ ID NO: 871290 - DNA, 33 bp, Homo sapien
cagctttccagcttccggcatctggttgcaatt

SEQ ID NO: 871291 - DNA, 33 bp, Homo sapien
tgcgctcgtcactcaaaccaaaggaacctacaa

SEQ ID NO: 871292 - DNA, 33 bp, Homo sapien
tgcgctcgtcactcaagccaaaggaacctacaa

SEQ ID NO: 871293 - DNA, 33 bp, Homo sapien
aatgctagtagcgatagggtagcaaggaaagag

SEQ ID NO: 871294 - DNA, 33 bp, Homo sapien
aatgctagtagcgatatggtagcaaggaaagag

SEQ ID NO: 871295 - DNA, 33 bp, Homo sapien
ctgctcttggacctacactgaaaattcctaact

SEQ ID NO: 871296 - DNA, 33 bp, Homo sapien
ctgctcttggacctacgctgaaaattcctaact

SEQ ID NO: 871297 - DNA, 33 bp, Homo sapien
taatcgagagactgaaaataacagctgaacatt

SEQ ID NO: 871298 - DNA, 33 bp, Homo sapien
taatcgagagactgaagataacagctgaacatt

SEQ ID NO: 871299 - DNA, 33 bp, Homo sapien
gtataatgcaaacaaaatgttgtgtaatctata

SEQ ID NO: 871300 - DNA, 33 bp, Homo sapien
gtataatgcaaacaaactgttgtgtaatctata

SEQ ID NO: 871301 - DNA, 33 bp, Homo sapien
tttaaaatagtctgccactaaaaataatgccca

SEQ ID NO: 871302 - DNA, 33 bp, Homo sapien
tttaaaatagtctgcctctaaaaataatgccca

SEQ ID NO: 871303 - DNA, 33 bp, Homo sapien
atgtttatgctaggtactaaggatggaaagaca

SEQ ID NO: 871304 - DNA, 33 bp, Homo sapien
atgtttatgctaggtagtaaggatggaaagaca

SEQ ID NO: 871305 - DNA, 33 bp, Homo sapien
tgaggttagttgtttcaaataaagcctgttgcc

SEQ ID NO: 871306 - DNA, 33 bp, Homo sapien
tgaggttagttgtttccaataaagcctgttgcc

SEQ ID NO: 871307 - DNA, 33 bp, Homo sapien
gtcccagaaagtaagaatatgcccccaaaatta

SEQ ID NO: 871308 - DNA, 33 bp, Homo sapien
gtcccagaaagtaagactatgcccccaaaatta

SEQ ID NO: 871309 - DNA, 33 bp, Homo sapien
ccacataagagaaagaaactgatttacattaaa

SEQ ID NO: 871310 - DNA, 33 bp, Homo sapien
ccacataagagaaagagactgatttacattaaa

SEQ ID NO: 871311 - DNA, 33 bp, Homo sapien
aactggggccacatcacgtggggtcgcaaagat

SEQ ID NO: 871312 - DNA, 33 bp, Homo sapien
aactggggccacatcatgtggggtcgcaaagat

SEQ ID NO: 871313 - DNA, 33 bp, Homo sapien
ctgttgaatcctgttcacttccttcatgcctct

SEQ ID NO: 871314 - DNA, 33 bp, Homo sapien
ctgttgaatcctgttcgcttccttcatgcctct

SEQ ID NO: 871315 - DNA, 33 bp, Homo sapien
tagtttctaccagtcccgatgtcccctgaacat

SEQ ID NO: 871316 - DNA, 33 bp, Homo sapien
tagtttctaccagtcctgatgtcccctgaacat

SEQ ID NO: 871317 - DNA, 33 bp, Homo sapien
attattataaaactaaacctagcactgatccct

SEQ ID NO: 871318 - DNA, 33 bp, Homo sapien
attattataaaactaaccctagcactgatccct

SEQ ID NO: 871319 - DNA, 33 bp, Homo sapien
agaaacatagtctccaacttttgaagagagagt

SEQ ID NO: 871320 - DNA, 33 bp, Homo sapien
agaaacatagtctccaccttttgaagagagagt

SEQ ID NO: 871321 - DNA, 33 bp, Homo sapien
ccaactttggggccaacctgttctgtttaacta

SEQ ID NO: 871322 - DNA, 33 bp, Homo sapien
ccaactttggggccaagctgttctgtttaacta

SEQ ID NO: 871323 - DNA, 33 bp, Homo sapien
agaggaccataaaagcaaatgcctttgaaatct

SEQ ID NO: 871324 - DNA, 33 bp, Homo sapien
agaggaccataaaagcgaatgcctttgaaatct

SEQ ID NO: 871325 - DNA, 33 bp, Homo sapien
gtgtatttttgactaccatttatagcacactgg

SEQ ID NO: 871326 - DNA, 33 bp, Homo sapien
gtgtatttttgactactatttatagcacactgg

SEQ ID NO: 871327 - DNA, 33 bp, Homo sapien
aaagtgagccgccccccgggaagaatatgagtg

SEQ ID NO: 871328 - DNA, 33 bp, Homo sapien
aaagtgagccgccccctgggaagaatatgagtg

SEQ ID NO: 871329 - DNA, 33 bp, Homo sapien
tctacatagggatttacgacagcacattgttac

SEQ ID NO: 871330 - DNA, 33 bp, Homo sapien
tctacatagggatttatgacagcacattgttac

SEQ ID NO: 871331 - DNA, 33 bp, Homo sapien
cattcatctccacttaacattaaacaaacagtt

SEQ ID NO: 871332 - DNA, 33 bp, Homo sapien
cattcatctccacttaccattaaacaaacagtt

SEQ ID NO: 871333 - DNA, 33 bp, Homo sapien
aaggagaggacattagcaggtagcagggctgag

SEQ ID NO: 871334 - DNA, 33 bp, Homo sapien
aaggagaggacattagtaggtagcagggctgag

SEQ ID NO: 871335 - DNA, 33 bp, Homo sapien
gtacaaatatgccataacaccaagaacaaaata

SEQ ID NO: 871336 - DNA, 33 bp, Homo sapien
gtacaaatatgccataccaccaagaacaaaata

SEQ ID NO: 871337 - DNA, 33 bp, Homo sapien
tattttaacagagaaggcagttaagtgccctga

SEQ ID NO: 871338 - DNA, 33 bp, Homo sapien
tattttaacagagaagtcagttaagtgccctga

SEQ ID NO: 871339 - DNA, 33 bp, Homo sapien
gaattttacagatggactatgaggcagaattta

SEQ ID NO: 871340 - DNA, 33 bp, Homo sapien
gaattttacagatggattatgaggcagaattta

SEQ ID NO: 871341 - DNA, 33 bp, Homo sapien
gctcactctgctgccgaattaaaacaaaataat

SEQ ID NO: 871342 - DNA, 33 bp, Homo sapien
gctcactctgctgccgtattaaaacaaaataat

SEQ ID NO: 871343 - DNA, 33 bp, Homo sapien
tataagatgggtcactcaagctgaggttgttga

SEQ ID NO: 871344 - DNA, 33 bp, Homo sapien
tataagatgggtcacttaagctgaggttgttga

SEQ ID NO: 871345 - DNA, 33 bp, Homo sapien
gcagaccatggaaatcaaaaagacttcaacgta

SEQ ID NO: 871346 - DNA, 33 bp, Homo sapien
gcagaccatggaaatcgaaaagacttcaacgta

SEQ ID NO: 871347 - DNA, 33 bp, Homo sapien
ctgggactctctttccaacatactctaaaacaa

SEQ ID NO: 871348 - DNA, 33 bp, Homo sapien
ctgggactctctttccgacatactctaaaacaa

SEQ ID NO: 871349 - DNA, 33 bp, Homo sapien
ggaccagttattctgaacagttgagagaagact

SEQ ID NO: 871350 - DNA, 33 bp, Homo sapien
ggaccagttattctgagcagttgagagaagact

SEQ ID NO: 871351 - DNA, 33 bp, Homo sapien
ccctagaggttgaagacgggaactttgttgaga

SEQ ID NO: 871352 - DNA, 33 bp, Homo sapien
ccctagaggttgaagatgggaactttgttgaga

SEQ ID NO: 871353 - DNA, 33 bp, Homo sapien
catgaataatgtttacaactaagcaaagtacag

SEQ ID NO: 871354 - DNA, 33 bp, Homo sapien
catgaataatgtttacgactaagcaaagtacag

SEQ ID NO: 871355 - DNA, 33 bp, Homo sapien
gcccatcagtggtaaccggtggaccactctggt

SEQ ID NO: 871356 - DNA, 33 bp, Homo sapien
gcccatcagtggtaacgggtggaccactctggt

SEQ ID NO: 871357 - DNA, 33 bp, Homo sapien
aaacctgctttagaaacagtagaatctgagcaa

SEQ ID NO: 871358 - DNA, 33 bp, Homo sapien
aaacctgctttagaaatagtagaatctgagcaa

SEQ ID NO: 871359 - DNA, 33 bp, Homo sapien
agtgaaataagaattgccaaacttttaaagctg

SEQ ID NO: 871360 - DNA, 33 bp, Homo sapien
agtgaaataagaattggcaaacttttaaagctg

SEQ ID NO: 871361 - DNA, 33 bp, Homo sapien
gctagaggaatccaaaacacaaaaactgttaaa

SEQ ID NO: 871362 - DNA, 33 bp, Homo sapien
gctagaggaatccaaagcacaaaaactgttaaa

SEQ ID NO: 871363 - DNA, 33 bp, Homo sapien
actttgaaacaagcatcatacttgaatctgatg

SEQ ID NO: 871364 - DNA, 33 bp, Homo sapien
actttgaaacaagcattatacttgaatctgatg

SEQ ID NO: 871365 - DNA, 33 bp, Homo sapien
tgtctaatatgccaaaattggtgattaccctta

SEQ ID NO: 871366 - DNA, 33 bp, Homo sapien
tgtctaatatgccaaagttggtgattaccctta

SEQ ID NO: 871367 - DNA, 33 bp, Homo sapien
ctcaatgtatacatcactgactttttcgaatat

SEQ ID NO: 871368 - DNA, 33 bp, Homo sapien
ctcaatgtatacatcagtgactttttcgaatat

SEQ ID NO: 871369 - DNA, 33 bp, Homo sapien
aacccaaagtatctacaaggtatgcctgtactc

SEQ ID NO: 871370 - DNA, 33 bp, Homo sapien
aacccaaagtatctacgaggtatgcctgtactc

SEQ ID NO: 871371 - DNA, 33 bp, Homo sapien
atttaatttttacctcaacaatgactgaaacat

SEQ ID NO: 871372 - DNA, 33 bp, Homo sapien
atttaatttttacctcgacaatgactgaaacat

SEQ ID NO: 871373 - DNA, 33 bp, Homo sapien
cgtgacctcctctagaaaaaaagtgctctctgt

SEQ ID NO: 871374 - DNA, 33 bp, Homo sapien
cgtgacctcctctagacaaaaagtgctctctgt

SEQ ID NO: 871375 - DNA, 33 bp, Homo sapien
tctgctcatccattcactagtcatacgaacttg

SEQ ID NO: 871376 - DNA, 33 bp, Homo sapien
tctgctcatccattcattagtcatacgaacttg

SEQ ID NO: 871377 - DNA, 33 bp, Homo sapien
ggaaggcacaacctaccgacctctcaggttata

SEQ ID NO: 871378 - DNA, 33 bp, Homo sapien
ggaaggcacaacctactgacctctcaggttata

SEQ ID NO: 871379 - DNA, 33 bp, Homo sapien
tgaccagtcactatgaagcttcgggcaacagac

SEQ ID NO: 871380 - DNA, 33 bp, Homo sapien
tgaccagtcactatgaggcttcgggcaacagac

SEQ ID NO: 871381 - DNA, 33 bp, Homo sapien
gccctctgaattcacaagaggaatctttcctta

SEQ ID NO: 871382 - DNA, 33 bp, Homo sapien
gccctctgaattcacaggaggaatctttcctta

SEQ ID NO: 871383 - DNA, 33 bp, Homo sapien
tttagttaacaagaggaagcttagacttgcaga

SEQ ID NO: 871384 - DNA, 33 bp, Homo sapien
tttagttaacaagagggagcttagacttgcaga

SEQ ID NO: 871385 - DNA, 33 bp, Homo sapien
aattttcgtgtctttgcaaagatggagtttcac

SEQ ID NO: 871386 - DNA, 33 bp, Homo sapien
aattttcgtgtctttgtaaagatggagtttcac

SEQ ID NO: 871387 - DNA, 33 bp, Homo sapien
atgttcaattatagccacaaataacatttaatt

SEQ ID NO: 871388 - DNA, 33 bp, Homo sapien
atgttcaattatagccgcaaataacatttaatt

SEQ ID NO: 871389 - DNA, 33 bp, Homo sapien
cactggggatgccaaacgtatccaggcttattt

SEQ ID NO: 871390 - DNA, 33 bp, Homo sapien
cactggggatgccaaatgtatccaggcttattt

SEQ ID NO: 871391 - DNA, 33 bp, Homo sapien
aggacagaacctataccggggaattctccaaag

SEQ ID NO: 871392 - DNA, 33 bp, Homo sapien
aggacagaacctatactggggaattctccaaag

SEQ ID NO: 871393 - DNA, 33 bp, Homo sapien
tttaataaaaatcaagcctgcttagcaagtcaa

SEQ ID NO: 871394 - DNA, 33 bp, Homo sapien
tttaataaaaatcaagtctgcttagcaagtcaa

SEQ ID NO: 871395 - DNA, 33 bp, Homo sapien
tgaggaaaagtcttaaaacattctgaaatgaat

SEQ ID NO: 871396 - DNA, 33 bp, Homo sapien
tgaggaaaagtcttaacacattctgaaatgaat

SEQ ID NO: 871397 - DNA, 33 bp, Homo sapien
ctgtaaacgtcctgagccctcaacagaagcaaa

SEQ ID NO: 871398 - DNA, 33 bp, Homo sapien
ctgtaaacgtcctgagtcctcaacagaagcaaa

SEQ ID NO: 871399 - DNA, 33 bp, Homo sapien
ctaggcaaagtcaaaaaaaaagctgaatggtat

SEQ ID NO: 871400 - DNA, 33 bp, Homo sapien
ctaggcaaagtcaaaacaaaagctgaatggtat

SEQ ID NO: 871401 - DNA, 33 bp, Homo sapien
ttcaattgtactcataactgtattcacatctat

SEQ ID NO: 871402 - DNA, 33 bp, Homo sapien
ttcaattgtactcatacctgtattcacatctat

SEQ ID NO: 871403 - DNA, 33 bp, Homo sapien
actccagcacatgggcccaataatcatttcaac

SEQ ID NO: 871404 - DNA, 33 bp, Homo sapien
actccagcacatgggcgcaataatcatttcaac

SEQ ID NO: 871405 - DNA, 33 bp, Homo sapien
ttcctgcagaaatccacgcagtcattagcatgg

SEQ ID NO: 871406 - DNA, 33 bp, Homo sapien
ttcctgcagaaatccaggcagtcattagcatgg

SEQ ID NO: 871407 - DNA, 33 bp, Homo sapien
gatggtaaaaatattgaaggattagaagggagg

SEQ ID NO: 871408 - DNA, 33 bp, Homo sapien
gatggtaaaaatattggaggattagaagggagg

SEQ ID NO: 871409 - DNA, 33 bp, Homo sapien
ggagttgggagtcaccaggatccgggatggaag

SEQ ID NO: 871410 - DNA, 33 bp, Homo sapien
ggagttgggagtcaccgggatccgggatggaag

SEQ ID NO: 871411 - DNA, 33 bp, Homo sapien
cttaacctgggcctcaaagggaaagtattatta

SEQ ID NO: 871412 - DNA, 33 bp, Homo sapien
cttaacctgggcctcagagggaaagtattatta

SEQ ID NO: 871413 - DNA, 33 bp, Homo sapien
catctgcaactcgtgaacaaataaaataactga

SEQ ID NO: 871414 - DNA, 33 bp, Homo sapien
catctgcaactcgtgagcaaataaaataactga

SEQ ID NO: 871415 - DNA, 33 bp, Homo sapien
aaatgttctatgtgccaaagcatatggagtgaa

SEQ ID NO: 871416 - DNA, 33 bp, Homo sapien
aaatgttctatgtgccgaagcatatggagtgaa

SEQ ID NO: 871417 - DNA, 33 bp, Homo sapien
tgaacagcattgtgtacgtacgaggagcttcat

SEQ ID NO: 871418 - DNA, 33 bp, Homo sapien
tgaacagcattgtgtatgtacgaggagcttcat

SEQ ID NO: 871419 - DNA, 33 bp, Homo sapien
atttataccacaagcaacatcaagaaccctctt

SEQ ID NO: 871420 - DNA, 33 bp, Homo sapien
atttataccacaagcaccatcaagaaccctctt

SEQ ID NO: 871421 - DNA, 33 bp, Homo sapien
aagttgacattctagcagaagaagaaaaactat

SEQ ID NO: 871422 - DNA, 33 bp, Homo sapien
aagttgacattctagcggaagaagaaaaactat

SEQ ID NO: 871423 - DNA, 33 bp, Homo sapien
gaaactcaccaagtctcaaggatcagcagtgag

SEQ ID NO: 871424 - DNA, 33 bp, Homo sapien
gaaactcaccaagtctgaaggatcagcagtgag

SEQ ID NO: 871425 - DNA, 33 bp, Homo sapien
ccttgctgattccttaacatttcataaggagcc

SEQ ID NO: 871426 - DNA, 33 bp, Homo sapien
ccttgctgattccttatcatttcataaggagcc

SEQ ID NO: 871427 - DNA, 33 bp, Homo sapien
tagaaggagagtaagacgagctaataggtcatt

SEQ ID NO: 871428 - DNA, 33 bp, Homo sapien
tagaaggagagtaagatgagctaataggtcatt

SEQ ID NO: 871429 - DNA, 33 bp, Homo sapien
atggcctgcctcatgtcaattgaaacaatgacc

SEQ ID NO: 871430 - DNA, 33 bp, Homo sapien
atggcctgcctcatgttaattgaaacaatgacc

SEQ ID NO: 871431 - DNA, 33 bp, Homo sapien
atgggcactgacttcacaattacacagaagtgg

SEQ ID NO: 871432 - DNA, 33 bp, Homo sapien
atgggcactgacttcagaattacacagaagtgg

SEQ ID NO: 871433 - DNA, 33 bp, Homo sapien
gcacttagtgcagagcaaggtaacacagtaagc

SEQ ID NO: 871434 - DNA, 33 bp, Homo sapien
gcacttagtgcagagcgaggtaacacagtaagc

SEQ ID NO: 871435 - DNA, 33 bp, Homo sapien
aggtgatgcagaccaacttattgactgagcacc

SEQ ID NO: 871436 - DNA, 33 bp, Homo sapien
aggtgatgcagaccaatttattgactgagcacc

SEQ ID NO: 871437 - DNA, 33 bp, Homo sapien
ctagagccagaaggtaaaagcaaagagcaaaca

SEQ ID NO: 871438 - DNA, 33 bp, Homo sapien
ctagagccagaaggtagaagcaaagagcaaaca

SEQ ID NO: 871439 - DNA, 33 bp, Homo sapien
ttacattgtcaataagaagatgccctgcaccag

SEQ ID NO: 871440 - DNA, 33 bp, Homo sapien
ttacattgtcaataagcagatgccctgcaccag

SEQ ID NO: 871441 - DNA, 33 bp, Homo sapien
gttcttaaggagcatacgtatagatagtgtaga

SEQ ID NO: 871442 - DNA, 33 bp, Homo sapien
gttcttaaggagcatatgtatagatagtgtaga

SEQ ID NO: 871443 - DNA, 33 bp, Homo sapien
tatgctccttaagaacacataggactaaaagaa

SEQ ID NO: 871444 - DNA, 33 bp, Homo sapien
tatgctccttaagaacgcataggactaaaagaa

SEQ ID NO: 871445 - DNA, 33 bp, Homo sapien
acagtcttcagctttacgttaggcagccagaac

SEQ ID NO: 871446 - DNA, 33 bp, Homo sapien
acagtcttcagctttatgttaggcagccagaac

SEQ ID NO: 871447 - DNA, 33 bp, Homo sapien
gccaggtgtccaagtaaaagagattcaatctga

SEQ ID NO: 871448 - DNA, 33 bp, Homo sapien
gccaggtgtccaagtagaagagattcaatctga

SEQ ID NO: 871449 - DNA, 33 bp, Homo sapien
tcttcaatgtctgaagaatgacacttctccagg

SEQ ID NO: 871450 - DNA, 33 bp, Homo sapien
tcttcaatgtctgaaggatgacacttctccagg

SEQ ID NO: 871451 - DNA, 33 bp, Homo sapien
ccaagtccatctagtaacactgagcaataccga

SEQ ID NO: 871452 - DNA, 33 bp, Homo sapien
ccaagtccatctagtagcactgagcaataccga

SEQ ID NO: 871453 - DNA, 33 bp, Homo sapien
gatgagggggaaaacactgcattttagagtctt

SEQ ID NO: 871454 - DNA, 33 bp, Homo sapien
gatgagggggaaaacattgcattttagagtctt

SEQ ID NO: 871455 - DNA, 33 bp, Homo sapien
aggaaaattctttaaaaagccatgagggcctaa

SEQ ID NO: 871456 - DNA, 33 bp, Homo sapien
aggaaaattctttaaacagccatgagggcctaa

SEQ ID NO: 871457 - DNA, 33 bp, Homo sapien
gcttccatagtttgtacggcaaagtctactgtc

SEQ ID NO: 871458 - DNA, 33 bp, Homo sapien
gcttccatagtttgtatggcaaagtctactgtc

SEQ ID NO: 871459 - DNA, 33 bp, Homo sapien
gactaagcaaaaataaggttaatgcaacaacag

SEQ ID NO: 871460 - DNA, 33 bp, Homo sapien
gactaagcaaaaataatgttaatgcaacaacag

SEQ ID NO: 871461 - DNA, 33 bp, Homo sapien
tgcttaaaaaagaaaacgtggagataatctggc

SEQ ID NO: 871462 - DNA, 33 bp, Homo sapien
tgcttaaaaaagaaaatgtggagataatctggc

SEQ ID NO: 871463 - DNA, 33 bp, Homo sapien
ttgttcgctgattttccaccaattagactgtct

SEQ ID NO: 871464 - DNA, 33 bp, Homo sapien
ttgttcgctgattttctaccaattagactgtct

SEQ ID NO: 871465 - DNA, 33 bp, Homo sapien
tattcttctggcaaatgatttcctgaaaaacaa

SEQ ID NO: 871466 - DNA, 33 bp, Homo sapien
tattcttctggcaaattatttcctgaaaaacaa

SEQ ID NO: 871467 - DNA, 33 bp, Homo sapien
gcaaagaagaaccaacaaggactttcatgcaaa

SEQ ID NO: 871468 - DNA, 33 bp, Homo sapien
gcaaagaagaaccaacgaggactttcatgcaaa

SEQ ID NO: 871469 - DNA, 33 bp, Homo sapien
tctttacagaagagaaatgagacgcgtgatgac

SEQ ID NO: 871470 - DNA, 33 bp, Homo sapien
tctttacagaagagaagtgagacgcgtgatgac

SEQ ID NO: 871471 - DNA, 33 bp, Homo sapien
gcaacacctaattgggccacattattcaagtgc

SEQ ID NO: 871472 - DNA, 33 bp, Homo sapien
gcaacacctaattgggtcacattattcaagtgc

SEQ ID NO: 871473 - DNA, 33 bp, Homo sapien
atcaattgatagctacaaaaaaatcctgggatt

SEQ ID NO: 871474 - DNA, 33 bp, Homo sapien
atcaattgatagctaccaaaaaatcctgggatt

SEQ ID NO: 871475 - DNA, 33 bp, Homo sapien
acacatgtaatccttacagcagttttgtgcagt

SEQ ID NO: 871476 - DNA, 33 bp, Homo sapien
acacatgtaatccttatagcagttttgtgcagt

SEQ ID NO: 871477 - DNA, 33 bp, Homo sapien
gagaccctttgagcaaggtatcattaaaatgtg

SEQ ID NO: 871478 - DNA, 33 bp, Homo sapien
gagaccctttgagcaatgtatcattaaaatgtg

SEQ ID NO: 871479 - DNA, 33 bp, Homo sapien
agctagaatctgtagacggatgatagactacac

SEQ ID NO: 871480 - DNA, 33 bp, Homo sapien
agctagaatctgtagatggatgatagactacac

SEQ ID NO: 871481 - DNA, 33 bp, Homo sapien
taggagcttgagttcaaattggaacacactaaa

SEQ ID NO: 871482 - DNA, 33 bp, Homo sapien
taggagcttgagttcatattggaacacactaaa

SEQ ID NO: 871483 - DNA, 33 bp, Homo sapien
ttcttaatgtgtcaacaaatggaaacctctcac

SEQ ID NO: 871484 - DNA, 33 bp, Homo sapien
ttcttaatgtgtcaacgaatggaaacctctcac

SEQ ID NO: 871485 - DNA, 33 bp, Homo sapien
gctgatttctttgaccccttctcagtactttgc

SEQ ID NO: 871486 - DNA, 33 bp, Homo sapien
gctgatttctttgacctcttctcagtactttgc

SEQ ID NO: 871487 - DNA, 33 bp, Homo sapien
tggaacagacggctgacggcctaaggaacctgt

SEQ ID NO: 871488 - DNA, 33 bp, Homo sapien
tggaacagacggctgatggcctaaggaacctgt

SEQ ID NO: 871489 - DNA, 33 bp, Homo sapien
cctgctttggagctgacgtggctacaggttcct

SEQ ID NO: 871490 - DNA, 33 bp, Homo sapien
cctgctttggagctgatgtggctacaggttcct

SEQ ID NO: 871491 - DNA, 33 bp, Homo sapien
ccgtagaaggtgcagaaattttccagctgaata

SEQ ID NO: 871492 - DNA, 33 bp, Homo sapien
ccgtagaaggtgcagacattttccagctgaata

SEQ ID NO: 871493 - DNA, 33 bp, Homo sapien
taagtgtttatttgggaattatggcaatatctt

SEQ ID NO: 871494 - DNA, 33 bp, Homo sapien
taagtgtttatttggggattatggcaatatctt

SEQ ID NO: 871495 - DNA, 33 bp, Homo sapien
acgttcctggggtccactgacaagatctcgatg

SEQ ID NO: 871496 - DNA, 33 bp, Homo sapien
acgttcctggggtccattgacaagatctcgatg

SEQ ID NO: 871497 - DNA, 33 bp, Homo sapien
aacctcatatttctggaatgggcaactgcgtga

SEQ ID NO: 871498 - DNA, 33 bp, Homo sapien
aacctcatatttctgggatgggcaactgcgtga

SEQ ID NO: 871499 - DNA, 33 bp, Homo sapien
aactgaacgaaaatgaaaacagtctctgaattt

SEQ ID NO: 871500 - DNA, 33 bp, Homo sapien
aactgaacgaaaatgacaacagtctctgaattt

SEQ ID NO: 871501 - DNA, 33 bp, Homo sapien
taccagactgtgagcccctccaggaaagggatg

SEQ ID NO: 871502 - DNA, 33 bp, Homo sapien
taccagactgtgagccgctccaggaaagggatg

SEQ ID NO: 871503 - DNA, 33 bp, Homo sapien
tctgtcacccatggaaccctcactgtggctgta

SEQ ID NO: 871504 - DNA, 33 bp, Homo sapien
tctgtcacccatggaagcctcactgtggctgta

SEQ ID NO: 871505 - DNA, 33 bp, Homo sapien
ttaccccacatcatcaactgcatgttgtcatga

SEQ ID NO: 871506 - DNA, 33 bp, Homo sapien
ttaccccacatcatcagctgcatgttgtcatga

SEQ ID NO: 871507 - DNA, 33 bp, Homo sapien
aaaagctaagagatgtcaatactatcgtgttgc

SEQ ID NO: 871508 - DNA, 33 bp, Homo sapien
aaaagctaagagatgttaatactatcgtgttgc

SEQ ID NO: 871509 - DNA, 33 bp, Homo sapien
ttaaaaataccagaaccagaaagtcctagttta

SEQ ID NO: 871510 - DNA, 33 bp, Homo sapien
ttaaaaataccagaacgagaaagtcctagttta

SEQ ID NO: 871511 - DNA, 33 bp, Homo sapien
gagttgtgtaacttctaaacttggccaactctg

SEQ ID NO: 871512 - DNA, 33 bp, Homo sapien
gagttgtgtaacttctgaacttggccaactctg

SEQ ID NO: 871513 - DNA, 33 bp, Homo sapien
ggtatatggttaagataatcatacgacttggtt

SEQ ID NO: 871514 - DNA, 33 bp, Homo sapien
ggtatatggttaagatgatcatacgacttggtt

SEQ ID NO: 871515 - DNA, 33 bp, Homo sapien
aggaatagtgtctttgcagaagtcatttattcc

SEQ ID NO: 871516 - DNA, 33 bp, Homo sapien
aggaatagtgtctttggagaagtcatttattcc

SEQ ID NO: 871517 - DNA, 33 bp, Homo sapien
atatagtgtgaaaccactgaaaggctttgcaca

SEQ ID NO: 871518 - DNA, 33 bp, Homo sapien
atatagtgtgaaaccattgaaaggctttgcaca

SEQ ID NO: 871519 - DNA, 33 bp, Homo sapien
aattgattgaagttggcataatggaattcattc

SEQ ID NO: 871520 - DNA, 33 bp, Homo sapien
aattgattgaagttgggataatggaattcattc

SEQ ID NO: 871521 - DNA, 33 bp, Homo sapien
acctggaaccagaacccaaggagtctgggtccc

SEQ ID NO: 871522 - DNA, 33 bp, Homo sapien
acctggaaccagaacctaaggagtctgggtccc

SEQ ID NO: 871523 - DNA, 33 bp, Homo sapien
ttacttttatatctccaaattcctactttatgt

SEQ ID NO: 871524 - DNA, 33 bp, Homo sapien
ttacttttatatctccgaattcctactttatgt

SEQ ID NO: 871525 - DNA, 33 bp, Homo sapien
ggaatgtgccaacccacaattactctattgaat

SEQ ID NO: 871526 - DNA, 33 bp, Homo sapien
ggaatgtgccaacccataattactctattgaat

SEQ ID NO: 871527 - DNA, 33 bp, Homo sapien
ttaaccacaactgaacagcaagtcttctccttg

SEQ ID NO: 871528 - DNA, 33 bp, Homo sapien
ttaaccacaactgaacggcaagtcttctccttg

SEQ ID NO: 871529 - DNA, 33 bp, Homo sapien
ttgaaggcaaagctgaccatagaccgatgttaa

SEQ ID NO: 871530 - DNA, 33 bp, Homo sapien
ttgaaggcaaagctgatcatagaccgatgttaa

SEQ ID NO: 871531 - DNA, 33 bp, Homo sapien
acattatggtgcctaaactaagagaggttcatt

SEQ ID NO: 871532 - DNA, 33 bp, Homo sapien
acattatggtgcctaatctaagagaggttcatt

SEQ ID NO: 871533 - DNA, 33 bp, Homo sapien
aaatttgaagagagaaccaatcttattatttta

SEQ ID NO: 871534 - DNA, 33 bp, Homo sapien
aaatttgaagagagaatcaatcttattatttta

SEQ ID NO: 871535 - DNA, 33 bp, Homo sapien
atgaagccaatgatctaaatatctctaacatcc

SEQ ID NO: 871536 - DNA, 33 bp, Homo sapien
atgaagccaatgatctgaatatctctaacatcc

SEQ ID NO: 871537 - DNA, 33 bp, Homo sapien
ctccatgttaactgaaatctggtgtggatggct

SEQ ID NO: 871538 - DNA, 33 bp, Homo sapien
ctccatgttaactgaagtctggtgtggatggct

SEQ ID NO: 871539 - DNA, 33 bp, Homo sapien
tggtctaagcacctaacagcaatacttcacgaa

SEQ ID NO: 871540 - DNA, 33 bp, Homo sapien
tggtctaagcacctaatagcaatacttcacgaa

SEQ ID NO: 871541 - DNA, 33 bp, Homo sapien
atttgtgaagcataaacgtaggaatcagttgac

SEQ ID NO: 871542 - DNA, 33 bp, Homo sapien
atttgtgaagcataaatgtaggaatcagttgac

SEQ ID NO: 871543 - DNA, 33 bp, Homo sapien
ccacctccagctttaccatatcagactgaatgc

SEQ ID NO: 871544 - DNA, 33 bp, Homo sapien
ccacctccagctttacgatatcagactgaatgc

SEQ ID NO: 871545 - DNA, 33 bp, Homo sapien
tgttctttccgtggcaacaagtttattttatgg

SEQ ID NO: 871546 - DNA, 33 bp, Homo sapien
tgttctttccgtggcagcaagtttattttatgg

SEQ ID NO: 871547 - DNA, 33 bp, Homo sapien
tttttctaataagtaactgttctttccgtggca

SEQ ID NO: 871548 - DNA, 33 bp, Homo sapien
tttttctaataagtaattgttctttccgtggca

SEQ ID NO: 871549 - DNA, 33 bp, Homo sapien
agctagaggaaattgactaggctcttcagaaaa

SEQ ID NO: 871550 - DNA, 33 bp, Homo sapien
agctagaggaaattgattaggctcttcagaaaa

SEQ ID NO: 871551 - DNA, 33 bp, Homo sapien
cacatggaatgcttaccgcatgtcagaagcttt

SEQ ID NO: 871552 - DNA, 33 bp, Homo sapien
cacatggaatgcttactgcatgtcagaagcttt

SEQ ID NO: 871553 - DNA, 33 bp, Homo sapien
ccaaatgttggaccacaagatgatgatctccac

SEQ ID NO: 871554 - DNA, 33 bp, Homo sapien
ccaaatgttggaccacgagatgatgatctccac

SEQ ID NO: 871555 - DNA, 33 bp, Homo sapien
atcttttcttcaccaccgtgaggttttcgactg

SEQ ID NO: 871556 - DNA, 33 bp, Homo sapien
atcttttcttcaccacggtgaggttttcgactg

SEQ ID NO: 871557 - DNA, 33 bp, Homo sapien
aaaaagtcctctgagacggagccttcccttatg

SEQ ID NO: 871558 - DNA, 33 bp, Homo sapien
aaaaagtcctctgagatggagccttcccttatg

SEQ ID NO: 871559 - DNA, 33 bp, Homo sapien
ctagatcagatacacagagtcacccctgctcct

SEQ ID NO: 871560 - DNA, 33 bp, Homo sapien
ctagatcagatacacatagtcacccctgctcct

SEQ ID NO: 871561 - DNA, 33 bp, Homo sapien
tggtcctccaaccttccacttccctgcagtggg

SEQ ID NO: 871562 - DNA, 33 bp, Homo sapien
tggtcctccaaccttctacttccctgcagtggg

SEQ ID NO: 871563 - DNA, 33 bp, Homo sapien
aacagaaggttaagaactgaaagagagagagag

SEQ ID NO: 871564 - DNA, 33 bp, Homo sapien
aacagaaggttaagaattgaaagagagagagag

SEQ ID NO: 871565 - DNA, 33 bp, Homo sapien
agagatacggcttcctaagaatgtagccacacc

SEQ ID NO: 871566 - DNA, 33 bp, Homo sapien
agagatacggcttcctgagaatgtagccacacc

SEQ ID NO: 871567 - DNA, 33 bp, Homo sapien
gtataacagaaatttaaagacatacacatttaa

SEQ ID NO: 871568 - DNA, 33 bp, Homo sapien
gtataacagaaatttacagacatacacatttaa

SEQ ID NO: 871569 - DNA, 33 bp, Homo sapien
gaagcaggagagagtaccagataagtaaaacac

SEQ ID NO: 871570 - DNA, 33 bp, Homo sapien
gaagcaggagagagtatcagataagtaaaacac

SEQ ID NO: 871571 - DNA, 33 bp, Homo sapien
gagctttgtctttcaaccatttcagagcccaag

SEQ ID NO: 871572 - DNA, 33 bp, Homo sapien
gagctttgtctttcaatcatttcagagcccaag

SEQ ID NO: 871573 - DNA, 33 bp, Homo sapien
gatgctgtgaattatccccttgatgtcagtgaa

SEQ ID NO: 871574 - DNA, 33 bp, Homo sapien
gatgctgtgaattatctccttgatgtcagtgaa

SEQ ID NO: 871575 - DNA, 33 bp, Homo sapien
cgtaattacctttagacgtatggaattctggga

SEQ ID NO: 871576 - DNA, 33 bp, Homo sapien
cgtaattacctttagatgtatggaattctggga

SEQ ID NO: 871577 - DNA, 33 bp, Homo sapien
ttaaggagaccattaccaattccaatgtgatct

SEQ ID NO: 871578 - DNA, 33 bp, Homo sapien
ttaaggagaccattactaattccaatgtgatct

SEQ ID NO: 871579 - DNA, 33 bp, Homo sapien
gtttatgaactgaggcactattggcattttggg

SEQ ID NO: 871580 - DNA, 33 bp, Homo sapien
gtttatgaactgaggcgctattggcattttggg

SEQ ID NO: 871581 - DNA, 33 bp, Homo sapien
gatgattccttcagaccgtctcttgtcagggag

SEQ ID NO: 871582 - DNA, 33 bp, Homo sapien
gatgattccttcagactgtctcttgtcagggag

SEQ ID NO: 871583 - DNA, 33 bp, Homo sapien
agtggttttagaataacgctttgtttctagcaa

SEQ ID NO: 871584 - DNA, 33 bp, Homo sapien
agtggttttagaataatgctttgtttctagcaa

SEQ ID NO: 871585 - DNA, 33 bp, Homo sapien
gtgtgtgggaggtaggaattttggagtcaatgt

SEQ ID NO: 871586 - DNA, 33 bp, Homo sapien
gtgtgtgggaggtagggattttggagtcaatgt

SEQ ID NO: 871587 - DNA, 33 bp, Homo sapien
ctttagttgctatttccaggtcttctttctatc

SEQ ID NO: 871588 - DNA, 33 bp, Homo sapien
ctttagttgctatttctaggtcttctttctatc

SEQ ID NO: 871589 - DNA, 33 bp, Homo sapien
tcctctttctcaagacacactcttcccttgacc

SEQ ID NO: 871590 - DNA, 33 bp, Homo sapien
tcctctttctcaagacgcactcttcccttgacc

SEQ ID NO: 871591 - DNA, 33 bp, Homo sapien
ttcaaggcacattgaactgactacttttattaa

SEQ ID NO: 871592 - DNA, 33 bp, Homo sapien
ttcaaggcacattgaattgactacttttattaa

SEQ ID NO: 871593 - DNA, 33 bp, Homo sapien
ttcctgaaattagtcaatcatcccctggtgttt

SEQ ID NO: 871594 - DNA, 33 bp, Homo sapien
ttcctgaaattagtcagtcatcccctggtgttt

SEQ ID NO: 871595 - DNA, 33 bp, Homo sapien
cacacttcagaaataacgtcacgtgctgcaaaa

SEQ ID NO: 871596 - DNA, 33 bp, Homo sapien
cacacttcagaaataatgtcacgtgctgcaaaa

SEQ ID NO: 871597 - DNA, 33 bp, Homo sapien
aaaaagggcattattgaaaaaatgggtgatact

SEQ ID NO: 871598 - DNA, 33 bp, Homo sapien
aaaaagggcattattggaaaaatgggtgatact

SEQ ID NO: 871599 - DNA, 33 bp, Homo sapien
aataacttctcagtgaaataaaatacggaatgc

SEQ ID NO: 871600 - DNA, 33 bp, Homo sapien
aataacttctcagtgacataaaatacggaatgc

SEQ ID NO: 871601 - DNA, 33 bp, Homo sapien
taagatgacaggattacctcctgagaaatgtct

SEQ ID NO: 871602 - DNA, 33 bp, Homo sapien
taagatgacaggattatctcctgagaaatgtct

SEQ ID NO: 871603 - DNA, 33 bp, Homo sapien
gctaaatcctatatcacgcactctataattctt

SEQ ID NO: 871604 - DNA, 33 bp, Homo sapien
gctaaatcctatatcatgcactctataattctt

SEQ ID NO: 871605 - DNA, 33 bp, Homo sapien
tcttactgttttcaaacctcttctccatagttt

SEQ ID NO: 871606 - DNA, 33 bp, Homo sapien
tcttactgttttcaaagctcttctccatagttt

SEQ ID NO: 871607 - DNA, 33 bp, Homo sapien
cacagccatgctgcgacgcaggtattgtttatc

SEQ ID NO: 871608 - DNA, 33 bp, Homo sapien
cacagccatgctgcgaggcaggtattgtttatc

SEQ ID NO: 871609 - DNA, 33 bp, Homo sapien
gtgattttgaaagcaacgggagggggcataaat

SEQ ID NO: 871610 - DNA, 33 bp, Homo sapien
gtgattttgaaagcaatgggagggggcataaat

SEQ ID NO: 871611 - DNA, 33 bp, Homo sapien
actatgaaagttgaaaaatgcccctgagatcat

SEQ ID NO: 871612 - DNA, 33 bp, Homo sapien
actatgaaagttgaaagatgcccctgagatcat

SEQ ID NO: 871613 - DNA, 33 bp, Homo sapien
catctgaagctttcgacgtcaatctcaaagtta

SEQ ID NO: 871614 - DNA, 33 bp, Homo sapien
catctgaagctttcgatgtcaatctcaaagtta

SEQ ID NO: 871615 - DNA, 33 bp, Homo sapien
gaaatccataatgtgacgaactgaagccttctg

SEQ ID NO: 871616 - DNA, 33 bp, Homo sapien
gaaatccataatgtgatgaactgaagccttctg

SEQ ID NO: 871617 - DNA, 33 bp, Homo sapien
aggccaaaactcttaaatgaaaaatttcagaaa

SEQ ID NO: 871618 - DNA, 33 bp, Homo sapien
aggccaaaactcttaagtgaaaaatttcagaaa

SEQ ID NO: 871619 - DNA, 33 bp, Homo sapien
tgtgaatccactggacacaagaatgattcatgt

SEQ ID NO: 871620 - DNA, 33 bp, Homo sapien
tgtgaatccactggacgcaagaatgattcatgt

SEQ ID NO: 871621 - DNA, 33 bp, Homo sapien
gattttctcatgagacaaattggtagctgggta

SEQ ID NO: 871622 - DNA, 33 bp, Homo sapien
gattttctcatgagacgaattggtagctgggta

SEQ ID NO: 871623 - DNA, 33 bp, Homo sapien
tagactcttctaaagccgctcgtgatggcagca

SEQ ID NO: 871624 - DNA, 33 bp, Homo sapien
tagactcttctaaagcggctcgtgatggcagca

SEQ ID NO: 871625 - DNA, 33 bp, Homo sapien
accaacagaaaacaccaatgtgatgttcttaaa

SEQ ID NO: 871626 - DNA, 33 bp, Homo sapien
accaacagaaaacaccgatgtgatgttcttaaa

SEQ ID NO: 871627 - DNA, 33 bp, Homo sapien
aagctgccttctacttcaaccttttagctctgc

SEQ ID NO: 871628 - DNA, 33 bp, Homo sapien
aagctgccttctactttaaccttttagctctgc

SEQ ID NO: 871629 - DNA, 33 bp, Homo sapien
ttcttttcccttcttcaagtctgtttttgtttt

SEQ ID NO: 871630 - DNA, 33 bp, Homo sapien
ttcttttcccttcttcgagtctgtttttgtttt

SEQ ID NO: 871631 - DNA, 33 bp, Homo sapien
cctactatggctatacactgatcactagcacct

SEQ ID NO: 871632 - DNA, 33 bp, Homo sapien
cctactatggctatacgctgatcactagcacct

SEQ ID NO: 871633 - DNA, 33 bp, Homo sapien
acagtagtctaagtaacgcccactcagaagcca

SEQ ID NO: 871634 - DNA, 33 bp, Homo sapien
acagtagtctaagtaatgcccactcagaagcca

SEQ ID NO: 871635 - DNA, 33 bp, Homo sapien
ctctacaaaagtcatacgttggaatcctaatac

SEQ ID NO: 871636 - DNA, 33 bp, Homo sapien
ctctacaaaagtcatatgttggaatcctaatac

SEQ ID NO: 871637 - DNA, 33 bp, Homo sapien
tggaagactgccttatcagtgaggctaacttca

SEQ ID NO: 871638 - DNA, 33 bp, Homo sapien
tggaagactgccttattagtgaggctaacttca

SEQ ID NO: 871639 - DNA, 33 bp, Homo sapien
tgaaatattaccttcccgcactattcatgaaca

SEQ ID NO: 871640 - DNA, 33 bp, Homo sapien
tgaaatattaccttcctgcactattcatgaaca

SEQ ID NO: 871641 - DNA, 33 bp, Homo sapien
actattattagtaacccgctacttcacttatct

SEQ ID NO: 871642 - DNA, 33 bp, Homo sapien
actattattagtaacctgctacttcacttatct

SEQ ID NO: 871643 - DNA, 33 bp, Homo sapien
tgatcatatggctcctaaataaaattatgtttt

SEQ ID NO: 871644 - DNA, 33 bp, Homo sapien
tgatcatatggctcctgaataaaattatgtttt

SEQ ID NO: 871645 - DNA, 33 bp, Homo sapien
ctcgctaagtatcaaacgctgcttttaactgaa

SEQ ID NO: 871646 - DNA, 33 bp, Homo sapien
ctcgctaagtatcaaatgctgcttttaactgaa

SEQ ID NO: 871647 - DNA, 33 bp, Homo sapien
attgctccaatctcgcaatctgtattatccaag

SEQ ID NO: 871648 - DNA, 33 bp, Homo sapien
attgctccaatctcgcgatctgtattatccaag

SEQ ID NO: 871649 - DNA, 33 bp, Homo sapien
atgctgaaagtatctccagcaatgcacaaatct

SEQ ID NO: 871650 - DNA, 33 bp, Homo sapien
atgctgaaagtatctctagcaatgcacaaatct

SEQ ID NO: 871651 - DNA, 33 bp, Homo sapien
ctctgctcaaatattaccttatcagtgaattct

SEQ ID NO: 871652 - DNA, 33 bp, Homo sapien
ctctgctcaaatattatcttatcagtgaattct

SEQ ID NO: 871653 - DNA, 33 bp, Homo sapien
agtgaatcaaaaaaaaagaatgtgattttagca

SEQ ID NO: 871654 - DNA, 33 bp, Homo sapien
agtgaatcaaaaaaaaggaatgtgattttagca

SEQ ID NO: 871655 - DNA, 33 bp, Homo sapien
attctgtggactgtgaagttactatggtcagat

SEQ ID NO: 871656 - DNA, 33 bp, Homo sapien
attctgtggactgtgaggttactatggtcagat

SEQ ID NO: 871657 - DNA, 33 bp, Homo sapien
actgtagcatatgagcagccaccataactaact

SEQ ID NO: 871658 - DNA, 33 bp, Homo sapien
actgtagcatatgagccgccaccataactaact

SEQ ID NO: 871659 - DNA, 33 bp, Homo sapien
catatgggatgtctaaatgggttcagttaagga

SEQ ID NO: 871660 - DNA, 33 bp, Homo sapien
catatgggatgtctaagtgggttcagttaagga

SEQ ID NO: 871661 - DNA, 33 bp, Homo sapien
tttaataattgagtaacgcagactcctatgaac

SEQ ID NO: 871662 - DNA, 33 bp, Homo sapien
tttaataattgagtaatgcagactcctatgaac

SEQ ID NO: 871663 - DNA, 33 bp, Homo sapien
actgaacagactgaaccaatagaaaattgaagt

SEQ ID NO: 871664 - DNA, 33 bp, Homo sapien
actgaacagactgaactaatagaaaattgaagt

SEQ ID NO: 871665 - DNA, 33 bp, Homo sapien
tggaataatggaaaaacgtacaggactcatgaa

SEQ ID NO: 871666 - DNA, 33 bp, Homo sapien
tggaataatggaaaaaggtacaggactcatgaa

SEQ ID NO: 871667 - DNA, 33 bp, Homo sapien
taatcagctatagaaacgtaacaggtgctctca

SEQ ID NO: 871668 - DNA, 33 bp, Homo sapien
taatcagctatagaaatgtaacaggtgctctca

SEQ ID NO: 871669 - DNA, 33 bp, Homo sapien
tgcccgcaaaagccaaaagggtcaggtaatgca

SEQ ID NO: 871670 - DNA, 33 bp, Homo sapien
tgcccgcaaaagccaagagggtcaggtaatgca

SEQ ID NO: 871671 - DNA, 33 bp, Homo sapien
tttgactttataaacaacttaaacatctgtgtg

SEQ ID NO: 871672 - DNA, 33 bp, Homo sapien
tttgactttataaacatcttaaacatctgtgtg

SEQ ID NO: 871673 - DNA, 33 bp, Homo sapien
tccagtttcatcaacactctgctctctggggtg

SEQ ID NO: 871674 - DNA, 33 bp, Homo sapien
tccagtttcatcaacattctgctctctggggtg

SEQ ID NO: 871675 - DNA, 33 bp, Homo sapien
ggagataggttaggtgcagaagtaggaaccaaa

SEQ ID NO: 871676 - DNA, 33 bp, Homo sapien
ggagataggttaggtggagaagtaggaaccaaa

SEQ ID NO: 871677 - DNA, 33 bp, Homo sapien
aaagttcatgatactcagagaattgaaacaggt

SEQ ID NO: 871678 - DNA, 33 bp, Homo sapien
aaagttcatgatactctgagaattgaaacaggt

SEQ ID NO: 871679 - DNA, 33 bp, Homo sapien
attaagtccctgtttacgcacctataatcgtgt

SEQ ID NO: 871680 - DNA, 33 bp, Homo sapien
attaagtccctgtttatgcacctataatcgtgt

SEQ ID NO: 871681 - DNA, 33 bp, Homo sapien
tctgtgctgtcaaagaaggtgaagtctaaacta

SEQ ID NO: 871682 - DNA, 33 bp, Homo sapien
tctgtgctgtcaaagagggtgaagtctaaacta

SEQ ID NO: 871683 - DNA, 33 bp, Homo sapien
tgttaccttagcaaaacggacttcaccgatatt

SEQ ID NO: 871684 - DNA, 33 bp, Homo sapien
tgttaccttagcaaaatggacttcaccgatatt

SEQ ID NO: 871685 - DNA, 33 bp, Homo sapien
cttcaataatttaaccaggaaaagcaagctgga

SEQ ID NO: 871686 - DNA, 33 bp, Homo sapien
cttcaataatttaaccgggaaaagcaagctgga

SEQ ID NO: 871687 - DNA, 33 bp, Homo sapien
tgcatcctgggcatccagcagcctgggcactgg

SEQ ID NO: 871688 - DNA, 33 bp, Homo sapien
tgcatcctgggcatcccgcagcctgggcactgg

SEQ ID NO: 871689 - DNA, 33 bp, Homo sapien
ccttgttatgtgccaaaaagaaacataagccat

SEQ ID NO: 871690 - DNA, 33 bp, Homo sapien
ccttgttatgtgccaagaagaaacataagccat

SEQ ID NO: 871691 - DNA, 33 bp, Homo sapien
aacatctgcttctaacactaacctactctgata

SEQ ID NO: 871692 - DNA, 33 bp, Homo sapien
aacatctgcttctaacgctaacctactctgata

SEQ ID NO: 871693 - DNA, 33 bp, Homo sapien
ttacactgatctggcccggaagttataccaaag

SEQ ID NO: 871694 - DNA, 33 bp, Homo sapien
ttacactgatctggcctggaagttataccaaag

SEQ ID NO: 871695 - DNA, 33 bp, Homo sapien
tatactagagcaagaccgaaactagttcatggc

SEQ ID NO: 871696 - DNA, 33 bp, Homo sapien
tatactagagcaagactgaaactagttcatggc

SEQ ID NO: 871697 - DNA, 33 bp, Homo sapien
tcatttttccgatatagaaatggattcccagag

SEQ ID NO: 871698 - DNA, 33 bp, Homo sapien
tcatttttccgatatataaatggattcccagag

SEQ ID NO: 871699 - DNA, 33 bp, Homo sapien
gacgctatgaagattaagtcaggtaacacacga

SEQ ID NO: 871700 - DNA, 33 bp, Homo sapien
gacgctatgaagattaggtcaggtaacacacga

SEQ ID NO: 871701 - DNA, 33 bp, Homo sapien
gtaacacacgaaaccccgatgtgcaaacattca

SEQ ID NO: 871702 - DNA, 33 bp, Homo sapien
gtaacacacgaaaccctgatgtgcaaacattca

SEQ ID NO: 871703 - DNA, 33 bp, Homo sapien
ggggatgggaagcaaaaacatgttagaaaattt

SEQ ID NO: 871704 - DNA, 33 bp, Homo sapien
ggggatgggaagcaaagacatgttagaaaattt

SEQ ID NO: 871705 - DNA, 33 bp, Homo sapien
gtgagagatgtaaataagtaatcagccaattac

SEQ ID NO: 871706 - DNA, 33 bp, Homo sapien
gtgagagatgtaaatacgtaatcagccaattac

SEQ ID NO: 871707 - DNA, 33 bp, Homo sapien
aaaagtatatttaaaactctgctgataggagtc

SEQ ID NO: 871708 - DNA, 33 bp, Homo sapien
aaaagtatatttaaaattctgctgataggagtc

SEQ ID NO: 871709 - DNA, 33 bp, Homo sapien
gacctccccaggatgacggaatgagagttcggg

SEQ ID NO: 871710 - DNA, 33 bp, Homo sapien
gacctccccaggatgatggaatgagagttcggg

SEQ ID NO: 871711 - DNA, 33 bp, Homo sapien
agtctattaattaatcaattcgagcatttttaa

SEQ ID NO: 871712 - DNA, 33 bp, Homo sapien
agtctattaattaatccattcgagcatttttaa

SEQ ID NO: 871713 - DNA, 33 bp, Homo sapien
atatctgaatttcagcaagtgatctgattaagg

SEQ ID NO: 871714 - DNA, 33 bp, Homo sapien
atatctgaatttcagcgagtgatctgattaagg

SEQ ID NO: 871715 - DNA, 33 bp, Homo sapien
taaggatttaacacaacgtcttttattgccatt

SEQ ID NO: 871716 - DNA, 33 bp, Homo sapien
taaggatttaacacaatgtcttttattgccatt

SEQ ID NO: 871717 - DNA, 33 bp, Homo sapien
gtcagaaatgtcctgacagagaccaaaggaaga

SEQ ID NO: 871718 - DNA, 33 bp, Homo sapien
gtcagaaatgtcctgatagagaccaaaggaaga

SEQ ID NO: 871719 - DNA, 33 bp, Homo sapien
ggcttcttttgcttatgaatatgcatttctgtg

SEQ ID NO: 871720 - DNA, 33 bp, Homo sapien
ggcttcttttgcttattaatatgcatttctgtg

SEQ ID NO: 871721 - DNA, 33 bp, Homo sapien
gaaactgtggctttagaaaattaaacacagaag

SEQ ID NO: 871722 - DNA, 33 bp, Homo sapien
gaaactgtggctttaggaaattaaacacagaag

SEQ ID NO: 871723 - DNA, 33 bp, Homo sapien
tgcaggatggttaggaagatcagaaaaaaaatt

SEQ ID NO: 871724 - DNA, 33 bp, Homo sapien
tgcaggatggttaggaggatcagaaaaaaaatt

SEQ ID NO: 871725 - DNA, 33 bp, Homo sapien
ttggataatcagcatcaagacaagagactatga

SEQ ID NO: 871726 - DNA, 33 bp, Homo sapien
ttggataatcagcatcgagacaagagactatga

SEQ ID NO: 871727 - DNA, 33 bp, Homo sapien
acatcagtgttggagtcaagttctggaccttaa

SEQ ID NO: 871728 - DNA, 33 bp, Homo sapien
acatcagtgttggagtgaagttctggaccttaa

SEQ ID NO: 871729 - DNA, 33 bp, Homo sapien
taaatgtatgttaaataagcccacataggtaga

SEQ ID NO: 871730 - DNA, 33 bp, Homo sapien
taaatgtatgttaaatgagcccacataggtaga

SEQ ID NO: 871731 - DNA, 33 bp, Homo sapien
gtctctaagtgaagccaactggagcctcgaatt

SEQ ID NO: 871732 - DNA, 33 bp, Homo sapien
gtctctaagtgaagccgactggagcctcgaatt

SEQ ID NO: 871733 - DNA, 33 bp, Homo sapien
ccaacactgtgaaccaaatttcaaagacagcat

SEQ ID NO: 871734 - DNA, 33 bp, Homo sapien
ccaacactgtgaaccagatttcaaagacagcat

SEQ ID NO: 871735 - DNA, 33 bp, Homo sapien
aattaaacctgaggctaaatagacctaattaaa

SEQ ID NO: 871736 - DNA, 33 bp, Homo sapien
aattaaacctgaggctgaatagacctaattaaa

SEQ ID NO: 871737 - DNA, 33 bp, Homo sapien
actcatagtataatgaaaaaattctagaaagca

SEQ ID NO: 871738 - DNA, 33 bp, Homo sapien
actcatagtataatgagaaaattctagaaagca

SEQ ID NO: 871739 - DNA, 33 bp, Homo sapien
cactgaatccttggacagtacccattttatgtt

SEQ ID NO: 871740 - DNA, 33 bp, Homo sapien
cactgaatccttggactgtacccattttatgtt

SEQ ID NO: 871741 - DNA, 33 bp, Homo sapien
agagaaaggagcgggggactccctttgtatctg

SEQ ID NO: 871742 - DNA, 33 bp, Homo sapien
agagaaaggagcggggtactccctttgtatctg

SEQ ID NO: 871743 - DNA, 33 bp, Homo sapien
tcaaaacacaaatcaggagacctttggaatctg

SEQ ID NO: 871744 - DNA, 33 bp, Homo sapien
tcaaaacacaaatcagtagacctttggaatctg

SEQ ID NO: 871745 - DNA, 33 bp, Homo sapien
ttccatcaaaccacagaagtaaaacaactgtgc

SEQ ID NO: 871746 - DNA, 33 bp, Homo sapien
ttccatcaaaccacaggagtaaaacaactgtgc

SEQ ID NO: 871747 - DNA, 33 bp, Homo sapien
gctacttacttgaagacggggacttcttaatga

SEQ ID NO: 871748 - DNA, 33 bp, Homo sapien
gctacttacttgaagatggggacttcttaatga

SEQ ID NO: 871749 - DNA, 33 bp, Homo sapien
gcccatggaattttaacatgaaattgcagataa

SEQ ID NO: 871750 - DNA, 33 bp, Homo sapien
gcccatggaattttaatatgaaattgcagataa

SEQ ID NO: 871751 - DNA, 33 bp, Homo sapien
tttgttagtttattcacgagtattgatccagag

SEQ ID NO: 871752 - DNA, 33 bp, Homo sapien
tttgttagtttattcatgagtattgatccagag

SEQ ID NO: 871753 - DNA, 33 bp, Homo sapien
cttctttcatttgtacaataccaccatgaagtc

SEQ ID NO: 871754 - DNA, 33 bp, Homo sapien
cttctttcatttgtacgataccaccatgaagtc

SEQ ID NO: 871755 - DNA, 33 bp, Homo sapien
tctctaaagacccagtaaataagtcatgttaga

SEQ ID NO: 871756 - DNA, 33 bp, Homo sapien
tctctaaagacccagtcaataagtcatgttaga

SEQ ID NO: 871757 - DNA, 33 bp, Homo sapien
ttggagggaagtaaaaaatgtcaggctgaggga

SEQ ID NO: 871758 - DNA, 33 bp, Homo sapien
ttggagggaagtaaaagatgtcaggctgaggga

SEQ ID NO: 871759 - DNA, 33 bp, Homo sapien
tttattttttgccataaattttagcctagcaga

SEQ ID NO: 871760 - DNA, 33 bp, Homo sapien
tttattttttgccatatattttagcctagcaga

SEQ ID NO: 871761 - DNA, 33 bp, Homo sapien
tgatctggctcacaaccagtgcttcatcacctc

SEQ ID NO: 871762 - DNA, 33 bp, Homo sapien
tgatctggctcacaacgagtgcttcatcacctc

SEQ ID NO: 871763 - DNA, 33 bp, Homo sapien
gataggagtttactgaagcatcattcctttatt

SEQ ID NO: 871764 - DNA, 33 bp, Homo sapien
gataggagtttactgaggcatcattcctttatt

SEQ ID NO: 871765 - DNA, 33 bp, Homo sapien
cttaaaggcaacgaacccgctttttagtatttt

SEQ ID NO: 871766 - DNA, 33 bp, Homo sapien
cttaaaggcaacgaactcgctttttagtatttt

SEQ ID NO: 871767 - DNA, 33 bp, Homo sapien
tttccacaagtcaggacgttgttctagggatca

SEQ ID NO: 871768 - DNA, 33 bp, Homo sapien
tttccacaagtcaggatgttgttctagggatca

SEQ ID NO: 871769 - DNA, 33 bp, Homo sapien
tactggtcatttcttcaaatgtgtggctactac

SEQ ID NO: 871770 - DNA, 33 bp, Homo sapien
tactggtcatttcttctaatgtgtggctactac

SEQ ID NO: 871771 - DNA, 33 bp, Homo sapien
agaacatcagctggcaatatccagtcaacaact

SEQ ID NO: 871772 - DNA, 33 bp, Homo sapien
agaacatcagctggcagtatccagtcaacaact

SEQ ID NO: 871773 - DNA, 33 bp, Homo sapien
atatatgaaagttaaacaagtagcccaaactca

SEQ ID NO: 871774 - DNA, 33 bp, Homo sapien
atatatgaaagttaaataagtagcccaaactca

SEQ ID NO: 871775 - DNA, 33 bp, Homo sapien
ggatcttcatgactgccgcaaaaaggcctcagt

SEQ ID NO: 871776 - DNA, 33 bp, Homo sapien
ggatcttcatgactgctgcaaaaaggcctcagt

SEQ ID NO: 871777 - DNA, 33 bp, Homo sapien
attgtaagctttatcaatatttcactgtaatta

SEQ ID NO: 871778 - DNA, 33 bp, Homo sapien
attgtaagctttatcagtatttcactgtaatta

SEQ ID NO: 871779 - DNA, 33 bp, Homo sapien
tttttatctgctcattaaaatcgtagagtggat

SEQ ID NO: 871780 - DNA, 33 bp, Homo sapien
tttttatctgctcatttaaatcgtagagtggat

SEQ ID NO: 871781 - DNA, 33 bp, Homo sapien
gctgtttctcaaatagccagaattcaattgtgg

SEQ ID NO: 871782 - DNA, 33 bp, Homo sapien
gctgtttctcaaataggcagaattcaattgtgg

SEQ ID NO: 871783 - DNA, 33 bp, Homo sapien
gaggtgttctcatttacgtggcatagttgtgtt

SEQ ID NO: 871784 - DNA, 33 bp, Homo sapien
gaggtgttctcatttatgtggcatagttgtgtt

SEQ ID NO: 871785 - DNA, 33 bp, Homo sapien
ttcccaactgcaccctcaggacttaacacagtg

SEQ ID NO: 871786 - DNA, 33 bp, Homo sapien
ttcccaactgcaccctgaggacttaacacagtg

SEQ ID NO: 871787 - DNA, 33 bp, Homo sapien
actacaggtcatcttaggcaaccacccatccag

SEQ ID NO: 871788 - DNA, 33 bp, Homo sapien
actacaggtcatcttatgcaaccacccatccag

SEQ ID NO: 871789 - DNA, 33 bp, Homo sapien
acagcaggtccaagacagtagagtctggaacat

SEQ ID NO: 871790 - DNA, 33 bp, Homo sapien
acagcaggtccaagacggtagagtctggaacat

SEQ ID NO: 871791 - DNA, 33 bp, Homo sapien
ctggatcccatttttcacatgactggaatgaac

SEQ ID NO: 871792 - DNA, 33 bp, Homo sapien
ctggatcccatttttcgcatgactggaatgaac

SEQ ID NO: 871793 - DNA, 33 bp, Homo sapien
gactccacgaagcaagacgtgcggggcgactca

SEQ ID NO: 871794 - DNA, 33 bp, Homo sapien
gactccacgaagcaaggcgtgcggggcgactca

SEQ ID NO: 871795 - DNA, 33 bp, Homo sapien
gcacaacagtattccacaggcctttctagtagg

SEQ ID NO: 871796 - DNA, 33 bp, Homo sapien
gcacaacagtattccataggcctttctagtagg

SEQ ID NO: 871797 - DNA, 33 bp, Homo sapien
acttccagtttattagaagtaaatgtgtgtctt

SEQ ID NO: 871798 - DNA, 33 bp, Homo sapien
acttccagtttattaggagtaaatgtgtgtctt

SEQ ID NO: 871799 - DNA, 33 bp, Homo sapien
gtttaaggcttggcacaaataagcactctgaat

SEQ ID NO: 871800 - DNA, 33 bp, Homo sapien
gtttaaggcttggcaccaataagcactctgaat

SEQ ID NO: 871801 - DNA, 33 bp, Homo sapien
tgggatgctggtagtgacaacagtaaataatgg

SEQ ID NO: 871802 - DNA, 33 bp, Homo sapien
tgggatgctggtagtggcaacagtaaataatgg

SEQ ID NO: 871803 - DNA, 33 bp, Homo sapien
catgaggacaagttcaaaagcagagttacgttc

SEQ ID NO: 871804 - DNA, 33 bp, Homo sapien
catgaggacaagttcacaagcagagttacgttc

SEQ ID NO: 871805 - DNA, 33 bp, Homo sapien
agccacaaattgggaacttattttgcttcaagg

SEQ ID NO: 871806 - DNA, 33 bp, Homo sapien
agccacaaattgggaagttattttgcttcaagg

SEQ ID NO: 871807 - DNA, 33 bp, Homo sapien
tcagaatgtaggctaacctcggcttggcaatga

SEQ ID NO: 871808 - DNA, 33 bp, Homo sapien
tcagaatgtaggctaatctcggcttggcaatga

SEQ ID NO: 871809 - DNA, 33 bp, Homo sapien
agtatattctgatggacgtcaaccattttttat

SEQ ID NO: 871810 - DNA, 33 bp, Homo sapien
agtatattctgatggatgtcaaccattttttat

SEQ ID NO: 871811 - DNA, 33 bp, Homo sapien
ataggttaacaagagaaaagtacaacaaattta

SEQ ID NO: 871812 - DNA, 33 bp, Homo sapien
ataggttaacaagagagaagtacaacaaattta

SEQ ID NO: 871813 - DNA, 33 bp, Homo sapien
gaagaatgaacagccacgtagaaatgtcactgg

SEQ ID NO: 871814 - DNA, 33 bp, Homo sapien
gaagaatgaacagccatgtagaaatgtcactgg

SEQ ID NO: 871815 - DNA, 33 bp, Homo sapien
cctacccaaatatttcaatgaatgctaatataa

SEQ ID NO: 871816 - DNA, 33 bp, Homo sapien
cctacccaaatatttcgatgaatgctaatataa

SEQ ID NO: 871817 - DNA, 33 bp, Homo sapien
tagatagtaaacccagcatgcattagcaattta

SEQ ID NO: 871818 - DNA, 33 bp, Homo sapien
tagatagtaaacccagtatgcattagcaattta

SEQ ID NO: 871819 - DNA, 33 bp, Homo sapien
atccttgacttcaactcaaaacctgttccttgt

SEQ ID NO: 871820 - DNA, 33 bp, Homo sapien
atccttgacttcaactgaaaacctgttccttgt

SEQ ID NO: 871821 - DNA, 33 bp, Homo sapien
ggagataaaatggatacgtgaatttagtcatca

SEQ ID NO: 871822 - DNA, 33 bp, Homo sapien
ggagataaaatggatatgtgaatttagtcatca

SEQ ID NO: 871823 - DNA, 33 bp, Homo sapien
ggtgtccttctcacctaacaacaggaaaagcta

SEQ ID NO: 871824 - DNA, 33 bp, Homo sapien
ggtgtccttctcacctgacaacaggaaaagcta

SEQ ID NO: 871825 - DNA, 33 bp, Homo sapien
ataatttctcaattgcaatttcaggccttttaa

SEQ ID NO: 871826 - DNA, 33 bp, Homo sapien
ataatttctcaattgctatttcaggccttttaa

SEQ ID NO: 871827 - DNA, 33 bp, Homo sapien
tgagatcagtaacacaagagagataataaatat

SEQ ID NO: 871828 - DNA, 33 bp, Homo sapien
tgagatcagtaacacacgagagataataaatat

SEQ ID NO: 871829 - DNA, 33 bp, Homo sapien
ctttgagcctcctttccaaatgactgtgacatc

SEQ ID NO: 871830 - DNA, 33 bp, Homo sapien
ctttgagcctcctttctaaatgactgtgacatc

SEQ ID NO: 871831 - DNA, 33 bp, Homo sapien
ggctcaaagtcaggcacgtaatgttccggtcac

SEQ ID NO: 871832 - DNA, 33 bp, Homo sapien
ggctcaaagtcaggcaggtaatgttccggtcac

SEQ ID NO: 871833 - DNA, 33 bp, Homo sapien
tcacactgagcttatcaccttcaacaaatattt

SEQ ID NO: 871834 - DNA, 33 bp, Homo sapien
tcacactgagcttatcgccttcaacaaatattt

SEQ ID NO: 871835 - DNA, 33 bp, Homo sapien
tagggaactggttacaaagacactgtctattca

SEQ ID NO: 871836 - DNA, 33 bp, Homo sapien
tagggaactggttacacagacactgtctattca

SEQ ID NO: 871837 - DNA, 33 bp, Homo sapien
ctgtgcccagtctgcacggaactatccacattg

SEQ ID NO: 871838 - DNA, 33 bp, Homo sapien
ctgtgcccagtctgcatggaactatccacattg

SEQ ID NO: 871839 - DNA, 33 bp, Homo sapien
aaaatgggtgaaatacaatcagtggatgggaat

SEQ ID NO: 871840 - DNA, 33 bp, Homo sapien
aaaatgggtgaaatacgatcagtggatgggaat

SEQ ID NO: 871841 - DNA, 33 bp, Homo sapien
aagtgagtccaaagtgcagaaatgtatcccaga

SEQ ID NO: 871842 - DNA, 33 bp, Homo sapien
aagtgagtccaaagtggagaaatgtatcccaga

SEQ ID NO: 871843 - DNA, 33 bp, Homo sapien
tcagaaccttcctaaaaactgatccttttgcct

SEQ ID NO: 871844 - DNA, 33 bp, Homo sapien
tcagaaccttcctaaagactgatccttttgcct

SEQ ID NO: 871845 - DNA, 33 bp, Homo sapien
ttacataaatacattcaacacaaattcagcaat

SEQ ID NO: 871846 - DNA, 33 bp, Homo sapien
ttacataaatacattcgacacaaattcagcaat

SEQ ID NO: 871847 - DNA, 33 bp, Homo sapien
attttcgtatgctaacgctttcctgccagaccg

SEQ ID NO: 871848 - DNA, 33 bp, Homo sapien
attttcgtatgctaactctttcctgccagaccg

SEQ ID NO: 871849 - DNA, 33 bp, Homo sapien
ttttcctttttgcaccaattgtagctaccctga

SEQ ID NO: 871850 - DNA, 33 bp, Homo sapien
ttttcctttttgcaccgattgtagctaccctga

SEQ ID NO: 871851 - DNA, 33 bp, Homo sapien
taggtggggagaaatcagatagaatcaggtggg

SEQ ID NO: 871852 - DNA, 33 bp, Homo sapien
taggtggggagaaatcggatagaatcaggtggg

SEQ ID NO: 871853 - DNA, 33 bp, Homo sapien
gaccctgtaatttccaagaatgtctgcatctct

SEQ ID NO: 871854 - DNA, 33 bp, Homo sapien
gaccctgtaatttccaggaatgtctgcatctct

SEQ ID NO: 871855 - DNA, 33 bp, Homo sapien
tgagccagtaaatttaactaaacccatctctcc

SEQ ID NO: 871856 - DNA, 33 bp, Homo sapien
tgagccagtaaatttatctaaacccatctctcc

SEQ ID NO: 871857 - DNA, 33 bp, Homo sapien
accaagggaagcaacaactgcgttgaatctgca

SEQ ID NO: 871858 - DNA, 33 bp, Homo sapien
accaagggaagcaacagctgcgttgaatctgca

SEQ ID NO: 871859 - DNA, 33 bp, Homo sapien
gcacatacccacactacgacattgctcaggaca

SEQ ID NO: 871860 - DNA, 33 bp, Homo sapien
gcacatacccacactatgacattgctcaggaca

SEQ ID NO: 871861 - DNA, 33 bp, Homo sapien
caaaagaccatctggaaaaagggttagccatta

SEQ ID NO: 871862 - DNA, 33 bp, Homo sapien
caaaagaccatctggagaaagggttagccatta

SEQ ID NO: 871863 - DNA, 33 bp, Homo sapien
ctctagaccaaaagaaactaatagacatttaca

SEQ ID NO: 871864 - DNA, 33 bp, Homo sapien
ctctagaccaaaagaacctaatagacatttaca

SEQ ID NO: 871865 - DNA, 33 bp, Homo sapien
attccattgatctacaagtctatttttttacta

SEQ ID NO: 871866 - DNA, 33 bp, Homo sapien
attccattgatctacatgtctatttttttacta

SEQ ID NO: 871867 - DNA, 33 bp, Homo sapien
gagggcttgatctatgacagtgacagtgacaga

SEQ ID NO: 871868 - DNA, 33 bp, Homo sapien
gagggcttgatctatggcagtgacagtgacaga

SEQ ID NO: 871869 - DNA, 33 bp, Homo sapien
tagcagatgtcacttagatgtacttgggatgta

SEQ ID NO: 871870 - DNA, 33 bp, Homo sapien
tagcagatgtcacttatatgtacttgggatgta

SEQ ID NO: 871871 - DNA, 33 bp, Homo sapien
cagtgctagtcttatcccctcacatcagtgttc

SEQ ID NO: 871872 - DNA, 33 bp, Homo sapien
cagtgctagtcttatctcctcacatcagtgttc

SEQ ID NO: 871873 - DNA, 33 bp, Homo sapien
ttctttcactctcccacgtctattcgctctgcc

SEQ ID NO: 871874 - DNA, 33 bp, Homo sapien
ttctttcactctcccatgtctattcgctctgcc

SEQ ID NO: 871875 - DNA, 33 bp, Homo sapien
gttaggaactcaaaataatggcagtaaaacgca

SEQ ID NO: 871876 - DNA, 33 bp, Homo sapien
gttaggaactcaaaatgatggcagtaaaacgca

SEQ ID NO: 871877 - DNA, 33 bp, Homo sapien
cacatttcagaaatgggattaagacctgcactg

SEQ ID NO: 871878 - DNA, 33 bp, Homo sapien
cacatttcagaaatggtattaagacctgcactg

SEQ ID NO: 871879 - DNA, 33 bp, Homo sapien
agaattggatgaaacaagctgaccaaacacgta

SEQ ID NO: 871880 - DNA, 33 bp, Homo sapien
agaattggatgaaacacgctgaccaaacacgta

SEQ ID NO: 871881 - DNA, 33 bp, Homo sapien
agctgagagaatgcccaagccagagtcgcagat

SEQ ID NO: 871882 - DNA, 33 bp, Homo sapien
agctgagagaatgcccgagccagagtcgcagat

SEQ ID NO: 871883 - DNA, 33 bp, Homo sapien
gtgggctctgagacaaacaactcatcatccagg

SEQ ID NO: 871884 - DNA, 33 bp, Homo sapien
gtgggctctgagacaagcaactcatcatccagg

SEQ ID NO: 871885 - DNA, 33 bp, Homo sapien
tctggttagaaaatgaccactgtcctaaatgta

SEQ ID NO: 871886 - DNA, 33 bp, Homo sapien
tctggttagaaaatgatcactgtcctaaatgta

SEQ ID NO: 871887 - DNA, 33 bp, Homo sapien
ccttcattttcagaggaatttctcagccttgaa

SEQ ID NO: 871888 - DNA, 33 bp, Homo sapien
ccttcattttcagagggatttctcagccttgaa

SEQ ID NO: 871889 - DNA, 33 bp, Homo sapien
cagtgacagatacttacaatgatttaaccaagc

SEQ ID NO: 871890 - DNA, 33 bp, Homo sapien
cagtgacagatacttataatgatttaaccaagc

SEQ ID NO: 871891 - DNA, 33 bp, Homo sapien
gaaatagaatgttggaagtatccaaggttacat

SEQ ID NO: 871892 - DNA, 33 bp, Homo sapien
gaaatagaatgttggaggtatccaaggttacat

SEQ ID NO: 871893 - DNA, 33 bp, Homo sapien
tatttcaattcccagacgattttccagctaaaa

SEQ ID NO: 871894 - DNA, 33 bp, Homo sapien
tatttcaattcccagatgattttccagctaaaa

SEQ ID NO: 871895 - DNA, 33 bp, Homo sapien
attaacgcggcattcaaggctctccaggtgcca

SEQ ID NO: 871896 - DNA, 33 bp, Homo sapien
attaacgcggcattcacggctctccaggtgcca

SEQ ID NO: 871897 - DNA, 33 bp, Homo sapien
atgtcaaagggaaagtaaaatctgtagaggagt

SEQ ID NO: 871898 - DNA, 33 bp, Homo sapien
atgtcaaagggaaagtgaaatctgtagaggagt

SEQ ID NO: 871899 - DNA, 33 bp, Homo sapien
aagggtgactgtgagacctgaagtgagtcacag

SEQ ID NO: 871900 - DNA, 33 bp, Homo sapien
aagggtgactgtgagatctgaagtgagtcacag

SEQ ID NO: 871901 - DNA, 33 bp, Homo sapien
gaccacctctgaggagacccctcttccaggatc

SEQ ID NO: 871902 - DNA, 33 bp, Homo sapien
gaccacctctgaggagccccctcttccaggatc

SEQ ID NO: 871903 - DNA, 33 bp, Homo sapien
aatgggacatggaaaacacccaagtacacagtg

SEQ ID NO: 871904 - DNA, 33 bp, Homo sapien
aatgggacatggaaaagacccaagtacacagtg

SEQ ID NO: 871905 - DNA, 33 bp, Homo sapien
ataattccaacatcacaggttacctatgaggat

SEQ ID NO: 871906 - DNA, 33 bp, Homo sapien
ataattccaacatcaccggttacctatgaggat

SEQ ID NO: 871907 - DNA, 33 bp, Homo sapien
attcttaaatgaaaaaaaaaggacacctcaact

SEQ ID NO: 871908 - DNA, 33 bp, Homo sapien
attcttaaatgaaaaagaaaggacacctcaact

SEQ ID NO: 871909 - DNA, 33 bp, Homo sapien
aagttaactgctgatgaagtggagaagaaaaag

SEQ ID NO: 871910 - DNA, 33 bp, Homo sapien
aagttaactgctgatggagtggagaagaaaaag

SEQ ID NO: 871911 - DNA, 33 bp, Homo sapien
caggggacatatgaaaataaccacacccttaat

SEQ ID NO: 871912 - DNA, 33 bp, Homo sapien
caggggacatatgaaactaaccacacccttaat

SEQ ID NO: 871913 - DNA, 33 bp, Homo sapien
ttggagtttgatggaccgaaggggagaagagaa

SEQ ID NO: 871914 - DNA, 33 bp, Homo sapien
ttggagtttgatggactgaaggggagaagagaa

SEQ ID NO: 871915 - DNA, 33 bp, Homo sapien
tttactggagaagtaacagcagtgaatagagat

SEQ ID NO: 871916 - DNA, 33 bp, Homo sapien
tttactggagaagtaagagcagtgaatagagat

SEQ ID NO: 871917 - DNA, 33 bp, Homo sapien
tgagacctagacaacaaattagattgggtccgt

SEQ ID NO: 871918 - DNA, 33 bp, Homo sapien
tgagacctagacaacagattagattgggtccgt

SEQ ID NO: 871919 - DNA, 33 bp, Homo sapien
gtccagagctgggccactaaccttcagggagtc

SEQ ID NO: 871920 - DNA, 33 bp, Homo sapien
gtccagagctgggccattaaccttcagggagtc

SEQ ID NO: 871921 - DNA, 33 bp, Homo sapien
aggtacagtgtgaatggagcatagaggattgtt

SEQ ID NO: 871922 - DNA, 33 bp, Homo sapien
aggtacagtgtgaatgtagcatagaggattgtt

SEQ ID NO: 871923 - DNA, 33 bp, Homo sapien
taaattgtgttttcagacaaatgaaagaagaac

SEQ ID NO: 871924 - DNA, 33 bp, Homo sapien
taaattgtgttttcagtcaaatgaaagaagaac

SEQ ID NO: 871925 - DNA, 33 bp, Homo sapien
gtttcccaatagcgctaaacatctattcattta

SEQ ID NO: 871926 - DNA, 33 bp, Homo sapien
gtttcccaatagcgctgaacatctattcattta

SEQ ID NO: 871927 - DNA, 33 bp, Homo sapien
gagagtctgatagaacaataagaggagacaatt

SEQ ID NO: 871928 - DNA, 33 bp, Homo sapien
gagagtctgatagaacgataagaggagacaatt

SEQ ID NO: 871929 - DNA, 33 bp, Homo sapien
catcaagtaaagtcaaaaacatagtaaaaatgg

SEQ ID NO: 871930 - DNA, 33 bp, Homo sapien
catcaagtaaagtcaagaacatagtaaaaatgg

SEQ ID NO: 871931 - DNA, 33 bp, Homo sapien
aacttctccactaaaaagatatggttctgtaga

SEQ ID NO: 871932 - DNA, 33 bp, Homo sapien
aacttctccactaaaaggatatggttctgtaga

SEQ ID NO: 871933 - DNA, 33 bp, Homo sapien
attagagcaggaaatgcagggaggaactcatct

SEQ ID NO: 871934 - DNA, 33 bp, Homo sapien
attagagcaggaaatggagggaggaactcatct

SEQ ID NO: 871935 - DNA, 33 bp, Homo sapien
tcctatcgtggaagggacaatgttttgacctta

SEQ ID NO: 871936 - DNA, 33 bp, Homo sapien
tcctatcgtggaaggggcaatgttttgacctta

SEQ ID NO: 871937 - DNA, 33 bp, Homo sapien
ctcctgactccaaggcaaagcactgattgctag

SEQ ID NO: 871938 - DNA, 33 bp, Homo sapien
ctcctgactccaaggcgaagcactgattgctag

SEQ ID NO: 871939 - DNA, 33 bp, Homo sapien
actaagagcaagagaaaatttgacgtcggtgtg

SEQ ID NO: 871940 - DNA, 33 bp, Homo sapien
actaagagcaagagaacatttgacgtcggtgtg

SEQ ID NO: 871941 - DNA, 33 bp, Homo sapien
aaccaattatgtaggccataacacccattgtag

SEQ ID NO: 871942 - DNA, 33 bp, Homo sapien
aaccaattatgtaggctataacacccattgtag

SEQ ID NO: 871943 - DNA, 33 bp, Homo sapien
aaaggaacatggatagaactgaacaatcaatag

SEQ ID NO: 871944 - DNA, 33 bp, Homo sapien
aaaggaacatggataggactgaacaatcaatag

SEQ ID NO: 871945 - DNA, 33 bp, Homo sapien
ttattgacaaaggctacggaaggtttattgggc

SEQ ID NO: 871946 - DNA, 33 bp, Homo sapien
ttattgacaaaggctatggaaggtttattgggc

SEQ ID NO: 871947 - DNA, 33 bp, Homo sapien
tataaccttgactgcacatggacggagacaata

SEQ ID NO: 871948 - DNA, 33 bp, Homo sapien
tataaccttgactgcagatggacggagacaata

SEQ ID NO: 871949 - DNA, 33 bp, Homo sapien
ctgaactctaagaaaaaaacaatgacaatgtat

SEQ ID NO: 871950 - DNA, 33 bp, Homo sapien
ctgaactctaagaaaacaacaatgacaatgtat

SEQ ID NO: 871951 - DNA, 33 bp, Homo sapien
ctctgccatttgcagacgataataagaaacaaa

SEQ ID NO: 871952 - DNA, 33 bp, Homo sapien
ctctgccatttgcagatgataataagaaacaaa

SEQ ID NO: 871953 - DNA, 33 bp, Homo sapien
tcaaggtagactatgagatttactgtagtattt

SEQ ID NO: 871954 - DNA, 33 bp, Homo sapien
tcaaggtagactatgatatttactgtagtattt

SEQ ID NO: 871955 - DNA, 33 bp, Homo sapien
attcaactcagcttcccattcactagctatgtc

SEQ ID NO: 871956 - DNA, 33 bp, Homo sapien
attcaactcagcttcctattcactagctatgtc

SEQ ID NO: 871957 - DNA, 33 bp, Homo sapien
agatgactccacttcacaggatttgcataaatt

SEQ ID NO: 871958 - DNA, 33 bp, Homo sapien
agatgactccacttcataggatttgcataaatt

SEQ ID NO: 871959 - DNA, 33 bp, Homo sapien
gtagtttccgcagacaaaagatagccaaaagta

SEQ ID NO: 871960 - DNA, 33 bp, Homo sapien
gtagtttccgcagacacaagatagccaaaagta

SEQ ID NO: 871961 - DNA, 33 bp, Homo sapien
atcttttgcattaaagacaatcattttcaacga

SEQ ID NO: 871962 - DNA, 33 bp, Homo sapien
atcttttgcattaaaggcaatcattttcaacga

SEQ ID NO: 871963 - DNA, 33 bp, Homo sapien
attcataaagattttgcaccattcaaactcaca

SEQ ID NO: 871964 - DNA, 33 bp, Homo sapien
attcataaagattttggaccattcaaactcaca

SEQ ID NO: 871965 - DNA, 33 bp, Homo sapien
taaatgtactgtatgaactctagcatctctgct

SEQ ID NO: 871966 - DNA, 33 bp, Homo sapien
taaatgtactgtatgatctctagcatctctgct

SEQ ID NO: 871967 - DNA, 33 bp, Homo sapien
ggagcatttttttatacgttgatttgctattcg

SEQ ID NO: 871968 - DNA, 33 bp, Homo sapien
ggagcatttttttatatgttgatttgctattcg

SEQ ID NO: 871969 - DNA, 33 bp, Homo sapien
tggaagcttgggagggccaatttagttaaacaa

SEQ ID NO: 871970 - DNA, 33 bp, Homo sapien
tggaagcttgggagggtcaatttagttaaacaa

SEQ ID NO: 871971 - DNA, 33 bp, Homo sapien
acccatctttctaatcagaatctctaagagagc

SEQ ID NO: 871972 - DNA, 33 bp, Homo sapien
acccatctttctaatctgaatctctaagagagc

SEQ ID NO: 871973 - DNA, 33 bp, Homo sapien
aagtggaaaggataacagtgtccaaagacattg

SEQ ID NO: 871974 - DNA, 33 bp, Homo sapien
aagtggaaaggataaccgtgtccaaagacattg

SEQ ID NO: 871975 - DNA, 33 bp, Homo sapien
aggtgagtgacggccacgctacagaggtcctgt

SEQ ID NO: 871976 - DNA, 33 bp, Homo sapien
aggtgagtgacggccaggctacagaggtcctgt

SEQ ID NO: 871977 - DNA, 33 bp, Homo sapien
caggaagggctttcagaatatatctccatcttc

SEQ ID NO: 871978 - DNA, 33 bp, Homo sapien
caggaagggctttcaggatatatctccatcttc

SEQ ID NO: 871979 - DNA, 33 bp, Homo sapien
tgagaagaggaaattgcacttgtgagggccctg

SEQ ID NO: 871980 - DNA, 33 bp, Homo sapien
tgagaagaggaaattgtacttgtgagggccctg

SEQ ID NO: 871981 - DNA, 33 bp, Homo sapien
gagctgtgacattaacactcagttattctgtct

SEQ ID NO: 871982 - DNA, 33 bp, Homo sapien
gagctgtgacattaaccctcagttattctgtct

SEQ ID NO: 871983 - DNA, 33 bp, Homo sapien
atagggctttagagatcatcacttactgccctc

SEQ ID NO: 871984 - DNA, 33 bp, Homo sapien
atagggctttagagattatcacttactgccctc

SEQ ID NO: 871985 - DNA, 33 bp, Homo sapien
cttggttctagcttaactctgctcctaactagt

SEQ ID NO: 871986 - DNA, 33 bp, Homo sapien
cttggttctagcttaagtctgctcctaactagt

SEQ ID NO: 871987 - DNA, 33 bp, Homo sapien
ttttatccttttagcactcttgtgagatgtagg

SEQ ID NO: 871988 - DNA, 33 bp, Homo sapien
ttttatccttttagcattcttgtgagatgtagg

SEQ ID NO: 871989 - DNA, 33 bp, Homo sapien
tagtatagaagtgccacaaaaactcagtgtccc

SEQ ID NO: 871990 - DNA, 33 bp, Homo sapien
tagtatagaagtgccataaaaactcagtgtccc

SEQ ID NO: 871991 - DNA, 33 bp, Homo sapien
atacctcaattagaaggcatgtcaccattgaat

SEQ ID NO: 871992 - DNA, 33 bp, Homo sapien
atacctcaattagaagtcatgtcaccattgaat

SEQ ID NO: 871993 - DNA, 33 bp, Homo sapien
gtcccagttctacagaaaggttagtccccagta

SEQ ID NO: 871994 - DNA, 33 bp, Homo sapien
gtcccagttctacagacaggttagtccccagta

SEQ ID NO: 871995 - DNA, 33 bp, Homo sapien
atagtaagcttgacacagtatcagtatctaaga

SEQ ID NO: 871996 - DNA, 33 bp, Homo sapien
atagtaagcttgacacggtatcagtatctaaga

SEQ ID NO: 871997 - DNA, 33 bp, Homo sapien
aacaaaacaaactcaggaggagctagcactgca

SEQ ID NO: 871998 - DNA, 33 bp, Homo sapien
aacaaaacaaactcagtaggagctagcactgca

SEQ ID NO: 871999 - DNA, 33 bp, Homo sapien
aatccacattaagacacccatccacgatcagag

SEQ ID NO: 872000 - DNA, 33 bp, Homo sapien
aatccacattaagacatccatccacgatcagag

SEQ ID NO: 872001 - DNA, 33 bp, Homo sapien
agtgcaagtggatctcaaaagatcgggtaattc

SEQ ID NO: 872002 - DNA, 33 bp, Homo sapien
agtgcaagtggatctcgaaagatcgggtaattc

SEQ ID NO: 872003 - DNA, 33 bp, Homo sapien
ggcagagtccagtcaacagggcctatgcaagtg

SEQ ID NO: 872004 - DNA, 33 bp, Homo sapien
ggcagagtccagtcaagagggcctatgcaagtg

SEQ ID NO: 872005 - DNA, 33 bp, Homo sapien
tcaaatgtaaagtcataaagtggctgatggatt

SEQ ID NO: 872006 - DNA, 33 bp, Homo sapien
tcaaatgtaaagtcattaagtggctgatggatt

SEQ ID NO: 872007 - DNA, 33 bp, Homo sapien
cagacgctggtgcaggaatttggacaatcacaa

SEQ ID NO: 872008 - DNA, 33 bp, Homo sapien
cagacgctggtgcaggtatttggacaatcacaa

SEQ ID NO: 872009 - DNA, 33 bp, Homo sapien
gcattagactaatctacatggttgagaaggctt

SEQ ID NO: 872010 - DNA, 33 bp, Homo sapien
gcattagactaatctatatggttgagaaggctt

SEQ ID NO: 872011 - DNA, 33 bp, Homo sapien
aaatggtcaacaaagcaactttcagacacaatg

SEQ ID NO: 872012 - DNA, 33 bp, Homo sapien
aaatggtcaacaaagcgactttcagacacaatg

SEQ ID NO: 872013 - DNA, 33 bp, Homo sapien
tgacaagacagtcaccaaacttctggatttttg

SEQ ID NO: 872014 - DNA, 33 bp, Homo sapien
tgacaagacagtcaccgaacttctggatttttg

SEQ ID NO: 872015 - DNA, 33 bp, Homo sapien
tatagacactaaaggacaataaagaaatacata

SEQ ID NO: 872016 - DNA, 33 bp, Homo sapien
tatagacactaaaggataataaagaaatacata

SEQ ID NO: 872017 - DNA, 33 bp, Homo sapien
cattagctcaaagtaaactaccgccaccaccac

SEQ ID NO: 872018 - DNA, 33 bp, Homo sapien
cattagctcaaagtaagctaccgccaccaccac

SEQ ID NO: 872019 - DNA, 33 bp, Homo sapien
actgtggcttcatttgcagctgttattgagttt

SEQ ID NO: 872020 - DNA, 33 bp, Homo sapien
actgtggcttcatttgtagctgttattgagttt

SEQ ID NO: 872021 - DNA, 33 bp, Homo sapien
tgcacaagtttttacacgggcataggttttcat

SEQ ID NO: 872022 - DNA, 33 bp, Homo sapien
tgcacaagtttttacatgggcataggttttcat

SEQ ID NO: 872023 - DNA, 33 bp, Homo sapien
ctttggaatgtaactggatttggaaatagggca

SEQ ID NO: 872024 - DNA, 33 bp, Homo sapien
ctttggaatgtaactgtatttggaaatagggca

SEQ ID NO: 872025 - DNA, 33 bp, Homo sapien
aatgcaagcatgtgaaaagcctgattcctctgt

SEQ ID NO: 872026 - DNA, 33 bp, Homo sapien
aatgcaagcatgtgaagagcctgattcctctgt

SEQ ID NO: 872027 - DNA, 33 bp, Homo sapien
aaataacagatctaaaatgtggattgatttaag

SEQ ID NO: 872028 - DNA, 33 bp, Homo sapien
aaataacagatctaaagtgtggattgatttaag

SEQ ID NO: 872029 - DNA, 33 bp, Homo sapien
cacttgtgagactccactctgtaactcaaggca

SEQ ID NO: 872030 - DNA, 33 bp, Homo sapien
cacttgtgagactccattctgtaactcaaggca

SEQ ID NO: 872031 - DNA, 33 bp, Homo sapien
cagagagctcttggaactacctatttgtgtgat

SEQ ID NO: 872032 - DNA, 33 bp, Homo sapien
cagagagctcttggaattacctatttgtgtgat

SEQ ID NO: 872033 - DNA, 33 bp, Homo sapien
ggggaggcctcacaataatagtgcaagacaagg

SEQ ID NO: 872034 - DNA, 33 bp, Homo sapien
ggggaggcctcacaattatagtgcaagacaagg

SEQ ID NO: 872035 - DNA, 33 bp, Homo sapien
atttttagactcaaccaaaagattgaaaattta

SEQ ID NO: 872036 - DNA, 33 bp, Homo sapien
atttttagactcaaccgaaagattgaaaattta

SEQ ID NO: 872037 - DNA, 33 bp, Homo sapien
ttgccacatcaatggactcatcttttcacaaag

SEQ ID NO: 872038 - DNA, 33 bp, Homo sapien
ttgccacatcaatggattcatcttttcacaaag

SEQ ID NO: 872039 - DNA, 33 bp, Homo sapien
aaaaacagtacatggaaggtcattcttggcaga

SEQ ID NO: 872040 - DNA, 33 bp, Homo sapien
aaaaacagtacatggagggtcattcttggcaga

SEQ ID NO: 872041 - DNA, 33 bp, Homo sapien
gatgttgatgttgcaacgtattatagtcacggg

SEQ ID NO: 872042 - DNA, 33 bp, Homo sapien
gatgttgatgttgcaatgtattatagtcacggg

SEQ ID NO: 872043 - DNA, 33 bp, Homo sapien
acccatcctcacaatgacatacaccatagtgga

SEQ ID NO: 872044 - DNA, 33 bp, Homo sapien
acccatcctcacaatggcatacaccatagtgga

SEQ ID NO: 872045 - DNA, 33 bp, Homo sapien
cctgctttctattgtacgccacagttttgcact

SEQ ID NO: 872046 - DNA, 33 bp, Homo sapien
cctgctttctattgtatgccacagttttgcact

SEQ ID NO: 872047 - DNA, 33 bp, Homo sapien
atcataagatcacaagcctctttcaacaaggga

SEQ ID NO: 872048 - DNA, 33 bp, Homo sapien
atcataagatcacaaggctctttcaacaaggga

SEQ ID NO: 872049 - DNA, 33 bp, Homo sapien
aggctatctgaaaatccagagttcatagatgcc

SEQ ID NO: 872050 - DNA, 33 bp, Homo sapien
aggctatctgaaaatctagagttcatagatgcc

SEQ ID NO: 872051 - DNA, 33 bp, Homo sapien
tagaagctgtgtataacgacactgtaaggcgat

SEQ ID NO: 872052 - DNA, 33 bp, Homo sapien
tagaagctgtgtataatgacactgtaaggcgat

SEQ ID NO: 872053 - DNA, 33 bp, Homo sapien
aatgattgcattgtctaaaataacttagtcact

SEQ ID NO: 872054 - DNA, 33 bp, Homo sapien
aatgattgcattgtctcaaataacttagtcact

SEQ ID NO: 872055 - DNA, 33 bp, Homo sapien
atgctggtttagaagaagaaagggcagtttgaa

SEQ ID NO: 872056 - DNA, 33 bp, Homo sapien
atgctggtttagaagacgaaagggcagtttgaa

SEQ ID NO: 872057 - DNA, 33 bp, Homo sapien
tttgtgatagacccagaagcataataataattt

SEQ ID NO: 872058 - DNA, 33 bp, Homo sapien
tttgtgatagacccaggagcataataataattt

SEQ ID NO: 872059 - DNA, 33 bp, Homo sapien
taaagaaagtgtggaacgtatagaccatggaat

SEQ ID NO: 872060 - DNA, 33 bp, Homo sapien
taaagaaagtgtggaatgtatagaccatggaat

SEQ ID NO: 872061 - DNA, 33 bp, Homo sapien
gtatgaaaatctttgaagctaggaaaaactaga

SEQ ID NO: 872062 - DNA, 33 bp, Homo sapien
gtatgaaaatctttgaggctaggaaaaactaga

SEQ ID NO: 872063 - DNA, 33 bp, Homo sapien
ttctacacatccttaggcagctctctttcttat

SEQ ID NO: 872064 - DNA, 33 bp, Homo sapien
ttctacacatccttagtcagctctctttcttat

SEQ ID NO: 872065 - DNA, 33 bp, Homo sapien
gcatcacagagcaaaccactgtgattgtcctca

SEQ ID NO: 872066 - DNA, 33 bp, Homo sapien
gcatcacagagcaaacgactgtgattgtcctca

SEQ ID NO: 872067 - DNA, 33 bp, Homo sapien
cctcatgcccgcaacccagaatgaatttaggaa

SEQ ID NO: 872068 - DNA, 33 bp, Homo sapien
cctcatgcccgcaacctagaatgaatttaggaa

SEQ ID NO: 872069 - DNA, 33 bp, Homo sapien
gtcttgtcttgctaatgacagaacaatcactgg

SEQ ID NO: 872070 - DNA, 33 bp, Homo sapien
gtcttgtcttgctaattacagaacaatcactgg

SEQ ID NO: 872071 - DNA, 33 bp, Homo sapien
caaggaggctggccacaggcttgccctgcatca

SEQ ID NO: 872072 - DNA, 33 bp, Homo sapien
caaggaggctggccacgggcttgccctgcatca

SEQ ID NO: 872073 - DNA, 33 bp, Homo sapien
tcaactgtaccatttaaggctcagaatcacacg

SEQ ID NO: 872074 - DNA, 33 bp, Homo sapien
tcaactgtaccatttacggctcagaatcacacg

SEQ ID NO: 872075 - DNA, 33 bp, Homo sapien
tctctccaccacagggaacaaagactaaagggg

SEQ ID NO: 872076 - DNA, 33 bp, Homo sapien
tctctccaccacagggtacaaagactaaagggg

SEQ ID NO: 872077 - DNA, 33 bp, Homo sapien
ctctggttaataatgacgacaacaatgaagtta

SEQ ID NO: 872078 - DNA, 33 bp, Homo sapien
ctctggttaataatgatgacaacaatgaagtta

SEQ ID NO: 872079 - DNA, 33 bp, Homo sapien
gacaaatggtaaccataaaggtctcatgtgcta

SEQ ID NO: 872080 - DNA, 33 bp, Homo sapien
gacaaatggtaaccattaaggtctcatgtgcta

SEQ ID NO: 872081 - DNA, 33 bp, Homo sapien
atcactcgaaataagaaagttcacattatttgt

SEQ ID NO: 872082 - DNA, 33 bp, Homo sapien
atcactcgaaataagagagttcacattatttgt

SEQ ID NO: 872083 - DNA, 33 bp, Homo sapien
taaatagcactattgacgtagacattttcttaa

SEQ ID NO: 872084 - DNA, 33 bp, Homo sapien
taaatagcactattgatgtagacattttcttaa

SEQ ID NO: 872085 - DNA, 33 bp, Homo sapien
aggattggtcttcaaacgccctttttatggata

SEQ ID NO: 872086 - DNA, 33 bp, Homo sapien
aggattggtcttcaaatgccctttttatggata

SEQ ID NO: 872087 - DNA, 33 bp, Homo sapien
gagactgcaaaacttaccaatgcctagcatttg

SEQ ID NO: 872088 - DNA, 33 bp, Homo sapien
gagactgcaaaacttatcaatgcctagcatttg

SEQ ID NO: 872089 - DNA, 33 bp, Homo sapien
ttgttttaacatatgcaagcaggcagaataccc

SEQ ID NO: 872090 - DNA, 33 bp, Homo sapien
ttgttttaacatatgcgagcaggcagaataccc

SEQ ID NO: 872091 - DNA, 33 bp, Homo sapien
gggatggagtcacagaataaacaaggaattttc

SEQ ID NO: 872092 - DNA, 33 bp, Homo sapien
gggatggagtcacagagtaaacaaggaattttc

SEQ ID NO: 872093 - DNA, 33 bp, Homo sapien
gctgaccattcatctgcacatcttatagaaggt

SEQ ID NO: 872094 - DNA, 33 bp, Homo sapien
gctgaccattcatctggacatcttatagaaggt

SEQ ID NO: 872095 - DNA, 33 bp, Homo sapien
ttggcacaagtgacaacaatccagaaaatgtgg

SEQ ID NO: 872096 - DNA, 33 bp, Homo sapien
ttggcacaagtgacaagaatccagaaaatgtgg

SEQ ID NO: 872097 - DNA, 33 bp, Homo sapien
aaatgacttattgaaactgttgatgctcccaat

SEQ ID NO: 872098 - DNA, 33 bp, Homo sapien
aaatgacttattgaaattgttgatgctcccaat

SEQ ID NO: 872099 - DNA, 33 bp, Homo sapien
tccaacatcttgtgaacatggtcagcattggct

SEQ ID NO: 872100 - DNA, 33 bp, Homo sapien
tccaacatcttgtgaatatggtcagcattggct

SEQ ID NO: 872101 - DNA, 33 bp, Homo sapien
ctcggtctaatttgcccacaattcattgaaaag

SEQ ID NO: 872102 - DNA, 33 bp, Homo sapien
ctcggtctaatttgcctacaattcattgaaaag

SEQ ID NO: 872103 - DNA, 33 bp, Homo sapien
ttcagagagtagaagaagcatccagtttagcta

SEQ ID NO: 872104 - DNA, 33 bp, Homo sapien
ttcagagagtagaagaggcatccagtttagcta

SEQ ID NO: 872105 - DNA, 33 bp, Homo sapien
tgtccaaagaaagctgcatagtgattaaataat

SEQ ID NO: 872106 - DNA, 33 bp, Homo sapien
tgtccaaagaaagctgtatagtgattaaataat

SEQ ID NO: 872107 - DNA, 33 bp, Homo sapien
cctataataagaagaactgactgcattctatcc

SEQ ID NO: 872108 - DNA, 33 bp, Homo sapien
cctataataagaagaattgactgcattctatcc

SEQ ID NO: 872109 - DNA, 33 bp, Homo sapien
cagcgtgttttgttccagactgctctaggttgg

SEQ ID NO: 872110 - DNA, 33 bp, Homo sapien
cagcgtgttttgttccggactgctctaggttgg

SEQ ID NO: 872111 - DNA, 33 bp, Homo sapien
ttattgatttccttcacgtagatccatggattt

SEQ ID NO: 872112 - DNA, 33 bp, Homo sapien
ttattgatttccttcatgtagatccatggattt

SEQ ID NO: 872113 - DNA, 33 bp, Homo sapien
tcaaaaggtgtcatcactgaaggaaacctcagc

SEQ ID NO: 872114 - DNA, 33 bp, Homo sapien
tcaaaaggtgtcatcagtgaaggaaacctcagc

SEQ ID NO: 872115 - DNA, 33 bp, Homo sapien
gatcatcgaaacagctaaaattaggtaagtagg

SEQ ID NO: 872116 - DNA, 33 bp, Homo sapien
gatcatcgaaacagctcaaattaggtaagtagg

SEQ ID NO: 872117 - DNA, 33 bp, Homo sapien
tctttgaagatgctacagataagttgaacctca

SEQ ID NO: 872118 - DNA, 33 bp, Homo sapien
tctttgaagatgctacggataagttgaacctca

SEQ ID NO: 872119 - DNA, 33 bp, Homo sapien
aatccaaaactttttaagcactggcatgatgcc

SEQ ID NO: 872120 - DNA, 33 bp, Homo sapien
aatccaaaactttttaggcactggcatgatgcc

SEQ ID NO: 872121 - DNA, 33 bp, Homo sapien
ttaaacgtgataatacacataaagtgctcagca

SEQ ID NO: 872122 - DNA, 33 bp, Homo sapien
ttaaacgtgataatacgcataaagtgctcagca

SEQ ID NO: 872123 - DNA, 33 bp, Homo sapien
cattccctcttatcatcaagttttgatcatacc

SEQ ID NO: 872124 - DNA, 33 bp, Homo sapien
cattccctcttatcatgaagttttgatcatacc

SEQ ID NO: 872125 - DNA, 33 bp, Homo sapien
caagaaaacaaggcaacggagagaactgataaa

SEQ ID NO: 872126 - DNA, 33 bp, Homo sapien
caagaaaacaaggcaatggagagaactgataaa

SEQ ID NO: 872127 - DNA, 33 bp, Homo sapien
gactaagttttagcaacgtaggaaggacacaac

SEQ ID NO: 872128 - DNA, 33 bp, Homo sapien
gactaagttttagcaatgtaggaaggacacaac

SEQ ID NO: 872129 - DNA, 33 bp, Homo sapien
tgttgtatgattggacagggttgcagagaccac

SEQ ID NO: 872130 - DNA, 33 bp, Homo sapien
tgttgtatgattggaccgggttgcagagaccac

SEQ ID NO: 872131 - DNA, 33 bp, Homo sapien
cattttggagtttgctaaaccacatttctctcg

SEQ ID NO: 872132 - DNA, 33 bp, Homo sapien
cattttggagtttgctgaaccacatttctctcg

SEQ ID NO: 872133 - DNA, 33 bp, Homo sapien
aaaaagtctccatggtaaaataagatgaagcaa

SEQ ID NO: 872134 - DNA, 33 bp, Homo sapien
aaaaagtctccatggtgaaataagatgaagcaa

SEQ ID NO: 872135 - DNA, 33 bp, Homo sapien
tggtgaactagaaagcagatggtccttccatta

SEQ ID NO: 872136 - DNA, 33 bp, Homo sapien
tggtgaactagaaagcggatggtccttccatta

SEQ ID NO: 872137 - DNA, 33 bp, Homo sapien
tgttgaatctgcaacaaccatttttttttatta

SEQ ID NO: 872138 - DNA, 33 bp, Homo sapien
tgttgaatctgcaacacccatttttttttatta

SEQ ID NO: 872139 - DNA, 33 bp, Homo sapien
aaaaaatcctcttacacgtggaaataagccttg

SEQ ID NO: 872140 - DNA, 33 bp, Homo sapien
aaaaaatcctcttacaggtggaaataagccttg

SEQ ID NO: 872141 - DNA, 33 bp, Homo sapien
caaaagtaaattaggacattgttagctgactta

SEQ ID NO: 872142 - DNA, 33 bp, Homo sapien
caaaagtaaattaggagattgttagctgactta

SEQ ID NO: 872143 - DNA, 33 bp, Homo sapien
tgtgcctataaagacccgagactcaactggtaa

SEQ ID NO: 872144 - DNA, 33 bp, Homo sapien
tgtgcctataaagacctgagactcaactggtaa

SEQ ID NO: 872145 - DNA, 33 bp, Homo sapien
ttctcactttgagcgacgggtttcaggtttttg

SEQ ID NO: 872146 - DNA, 33 bp, Homo sapien
ttctcactttgagcgatgggtttcaggtttttg

SEQ ID NO: 872147 - DNA, 33 bp, Homo sapien
taataatggaaaaaagaacgaaagatgagaggg

SEQ ID NO: 872148 - DNA, 33 bp, Homo sapien
taataatggaaaaaaggacgaaagatgagaggg

SEQ ID NO: 872149 - DNA, 33 bp, Homo sapien
acccggccaaggcctcacatttctaaggccctg

SEQ ID NO: 872150 - DNA, 33 bp, Homo sapien
acccggccaaggcctcgcatttctaaggccctg

SEQ ID NO: 872151 - DNA, 33 bp, Homo sapien
tctacagttgagtgtccacatgtgcacaatgag

SEQ ID NO: 872152 - DNA, 33 bp, Homo sapien
tctacagttgagtgtctacatgtgcacaatgag

SEQ ID NO: 872153 - DNA, 33 bp, Homo sapien
gaaacaaccgcacataacactggccataagcaa

SEQ ID NO: 872154 - DNA, 33 bp, Homo sapien
gaaacaaccgcacatagcactggccataagcaa

SEQ ID NO: 872155 - DNA, 33 bp, Homo sapien
gagtgggagtcataccagatcatggtgatttgc

SEQ ID NO: 872156 - DNA, 33 bp, Homo sapien
gagtgggagtcataccggatcatggtgatttgc

SEQ ID NO: 872157 - DNA, 33 bp, Homo sapien
acactgagaaacaaaaattttcctaatatgcct

SEQ ID NO: 872158 - DNA, 33 bp, Homo sapien
acactgagaaacaaaacttttcctaatatgcct

SEQ ID NO: 872159 - DNA, 33 bp, Homo sapien
gtcagaggatagtggcaagagcaatgtgtgtgg

SEQ ID NO: 872160 - DNA, 33 bp, Homo sapien
gtcagaggatagtggcgagagcaatgtgtgtgg

SEQ ID NO: 872161 - DNA, 33 bp, Homo sapien
tgaataaaggctggccactgtggaaggtaggtc

SEQ ID NO: 872162 - DNA, 33 bp, Homo sapien
tgaataaaggctggccgctgtggaaggtaggtc

SEQ ID NO: 872163 - DNA, 33 bp, Homo sapien
tggacctgattgttgcaccactttccttaataa

SEQ ID NO: 872164 - DNA, 33 bp, Homo sapien
tggacctgattgttgcgccactttccttaataa

SEQ ID NO: 872165 - DNA, 33 bp, Homo sapien
aattgctctgtataaccgtggtttttctgtaaa

SEQ ID NO: 872166 - DNA, 33 bp, Homo sapien
aattgctctgtataactgtggtttttctgtaaa

SEQ ID NO: 872167 - DNA, 33 bp, Homo sapien
ctctcgaagtgtctcaactcctgggatttgggt

SEQ ID NO: 872168 - DNA, 33 bp, Homo sapien
ctctcgaagtgtctcagctcctgggatttgggt

SEQ ID NO: 872169 - DNA, 33 bp, Homo sapien
actctcaaaagttacactctagaaactcagagt

SEQ ID NO: 872170 - DNA, 33 bp, Homo sapien
actctcaaaagttacagtctagaaactcagagt

SEQ ID NO: 872171 - DNA, 33 bp, Homo sapien
caattaaaggcagtgactaattcaacagatatt

SEQ ID NO: 872172 - DNA, 33 bp, Homo sapien
caattaaaggcagtgagtaattcaacagatatt

SEQ ID NO: 872173 - DNA, 33 bp, Homo sapien
tatgacttgattatcaatgaccactattagtca

SEQ ID NO: 872174 - DNA, 33 bp, Homo sapien
tatgacttgattatcagtgaccactattagtca

SEQ ID NO: 872175 - DNA, 33 bp, Homo sapien
ttgtagaataaatacacatttttgcagcaagat

SEQ ID NO: 872176 - DNA, 33 bp, Homo sapien
ttgtagaataaatacagatttttgcagcaagat

SEQ ID NO: 872177 - DNA, 33 bp, Homo sapien
agtttgctgttggcgacagggccctagactaag

SEQ ID NO: 872178 - DNA, 33 bp, Homo sapien
agtttgctgttggcgatagggccctagactaag

SEQ ID NO: 872179 - DNA, 33 bp, Homo sapien
aaattcttcagtgacaataattttaagtgtgtg

SEQ ID NO: 872180 - DNA, 33 bp, Homo sapien
aaattcttcagtgacattaattttaagtgtgtg

SEQ ID NO: 872181 - DNA, 33 bp, Homo sapien
aagctcaaattctgaaataaccttctatgcaat

SEQ ID NO: 872182 - DNA, 33 bp, Homo sapien
aagctcaaattctgaagtaaccttctatgcaat

SEQ ID NO: 872183 - DNA, 33 bp, Homo sapien
ccatctcctaactaacccccttcctcatcattc

SEQ ID NO: 872184 - DNA, 33 bp, Homo sapien
ccatctcctaactaactcccttcctcatcattc

SEQ ID NO: 872185 - DNA, 33 bp, Homo sapien
gttgcaacaggcaaaacggcactgaggactgag

SEQ ID NO: 872186 - DNA, 33 bp, Homo sapien
gttgcaacaggcaaaagggcactgaggactgag

SEQ ID NO: 872187 - DNA, 33 bp, Homo sapien
aagaaagttaagatttcaaagtggctggtgctt

SEQ ID NO: 872188 - DNA, 33 bp, Homo sapien
aagaaagttaagatttgaaagtggctggtgctt

SEQ ID NO: 872189 - DNA, 33 bp, Homo sapien
tgttgcaagaagaataagtgtgaacgattggtc

SEQ ID NO: 872190 - DNA, 33 bp, Homo sapien
tgttgcaagaagaatatgtgtgaacgattggtc

SEQ ID NO: 872191 - DNA, 33 bp, Homo sapien
aacactacccatgaccggaaaaatgacaactgg

SEQ ID NO: 872192 - DNA, 33 bp, Homo sapien
aacactacccatgacctgaaaaatgacaactgg

SEQ ID NO: 872193 - DNA, 33 bp, Homo sapien
agtgtatcataagcagcagaatggtggagtgta

SEQ ID NO: 872194 - DNA, 33 bp, Homo sapien
agtgtatcataagcagtagaatggtggagtgta

SEQ ID NO: 872195 - DNA, 33 bp, Homo sapien
aagatgaagaattcaacgtggttagcacaaggt

SEQ ID NO: 872196 - DNA, 33 bp, Homo sapien
aagatgaagaattcaatgtggttagcacaaggt

SEQ ID NO: 872197 - DNA, 33 bp, Homo sapien
ccttcaagtggagaaccgatggcgaaagacaag

SEQ ID NO: 872198 - DNA, 33 bp, Homo sapien
ccttcaagtggagaacggatggcgaaagacaag

SEQ ID NO: 872199 - DNA, 33 bp, Homo sapien
catagttgtcaaatgaagtctacaggttacaaa

SEQ ID NO: 872200 - DNA, 33 bp, Homo sapien
catagttgtcaaatgaggtctacaggttacaaa

SEQ ID NO: 872201 - DNA, 33 bp, Homo sapien
ttttggctttatggaaagggctacaactaagtg

SEQ ID NO: 872202 - DNA, 33 bp, Homo sapien
ttttggctttatggaacgggctacaactaagtg

SEQ ID NO: 872203 - DNA, 33 bp, Homo sapien
ggaaaatttagttgaactggattgtgttgggaa

SEQ ID NO: 872204 - DNA, 33 bp, Homo sapien
ggaaaatttagttgaattggattgtgttgggaa

SEQ ID NO: 872205 - DNA, 33 bp, Homo sapien
gttttgctcaaatctcaacttttcacgaggacc

SEQ ID NO: 872206 - DNA, 33 bp, Homo sapien
gttttgctcaaatctcgacttttcacgaggacc

SEQ ID NO: 872207 - DNA, 33 bp, Homo sapien
ccgtattcttctggaactgtattttttaattgt

SEQ ID NO: 872208 - DNA, 33 bp, Homo sapien
ccgtattcttctggaattgtattttttaattgt

SEQ ID NO: 872209 - DNA, 33 bp, Homo sapien
tatcttttctgttgcacgtataaattgaacaat

SEQ ID NO: 872210 - DNA, 33 bp, Homo sapien
tatcttttctgttgcatgtataaattgaacaat

SEQ ID NO: 872211 - DNA, 33 bp, Homo sapien
ccacaccatcaatcaaacaggttcttgatatta

SEQ ID NO: 872212 - DNA, 33 bp, Homo sapien
ccacaccatcaatcaagcaggttcttgatatta

SEQ ID NO: 872213 - DNA, 33 bp, Homo sapien
agccttacacaaaggaatccaaaagtgttttca

SEQ ID NO: 872214 - DNA, 33 bp, Homo sapien
agccttacacaaaggagtccaaaagtgttttca

SEQ ID NO: 872215 - DNA, 33 bp, Homo sapien
tttgctagaggaaaacagatatgaaacacattc

SEQ ID NO: 872216 - DNA, 33 bp, Homo sapien
tttgctagaggaaaacggatatgaaacacattc

SEQ ID NO: 872217 - DNA, 33 bp, Homo sapien
tcttgtttgatgctccaagaaggtatggtcttt

SEQ ID NO: 872218 - DNA, 33 bp, Homo sapien
tcttgtttgatgctcctagaaggtatggtcttt

SEQ ID NO: 872219 - DNA, 33 bp, Homo sapien
gaaaaactggagcccccaaaataaatgagattc

SEQ ID NO: 872220 - DNA, 33 bp, Homo sapien
gaaaaactggagcccctaaaataaatgagattc

SEQ ID NO: 872221 - DNA, 33 bp, Homo sapien
cactgtggaaattacactaggtagcatgtacct

SEQ ID NO: 872222 - DNA, 33 bp, Homo sapien
cactgtggaaattacattaggtagcatgtacct

SEQ ID NO: 872223 - DNA, 33 bp, Homo sapien
tatgtcttcaaaaccactccagtgtgatttcac

SEQ ID NO: 872224 - DNA, 33 bp, Homo sapien
tatgtcttcaaaaccattccagtgtgatttcac

SEQ ID NO: 872225 - DNA, 33 bp, Homo sapien
agtctgtttcacctcaactgcaaagtacagtac

SEQ ID NO: 872226 - DNA, 33 bp, Homo sapien
agtctgtttcacctcagctgcaaagtacagtac

SEQ ID NO: 872227 - DNA, 33 bp, Homo sapien
gttagtcatggtcataagtgccaccagagtgga

SEQ ID NO: 872228 - DNA, 33 bp, Homo sapien
gttagtcatggtcataggtgccaccagagtgga

SEQ ID NO: 872229 - DNA, 33 bp, Homo sapien
gccattaccatgaacaaaatggtaagttacttc

SEQ ID NO: 872230 - DNA, 33 bp, Homo sapien
gccattaccatgaacagaatggtaagttacttc

SEQ ID NO: 872231 - DNA, 33 bp, Homo sapien
cctcgaaagcaatagaagcattttaaaacttta

SEQ ID NO: 872232 - DNA, 33 bp, Homo sapien
cctcgaaagcaatagatgcattttaaaacttta

SEQ ID NO: 872233 - DNA, 33 bp, Homo sapien
agcagtacataaccaaaaatgcaacatctgtac

SEQ ID NO: 872234 - DNA, 33 bp, Homo sapien
agcagtacataaccaagaatgcaacatctgtac

SEQ ID NO: 872235 - DNA, 33 bp, Homo sapien
tctggggaagggactgaaattctgaactcctag

SEQ ID NO: 872236 - DNA, 33 bp, Homo sapien
tctggggaagggactgcaattctgaactcctag

SEQ ID NO: 872237 - DNA, 33 bp, Homo sapien
actgtgctaacttaaacacagtctgtgcactag

SEQ ID NO: 872238 - DNA, 33 bp, Homo sapien
actgtgctaacttaaatacagtctgtgcactag

SEQ ID NO: 872239 - DNA, 33 bp, Homo sapien
tattttgatcttaacaagtttcagcgtaaggag

SEQ ID NO: 872240 - DNA, 33 bp, Homo sapien
tattttgatcttaacacgtttcagcgtaaggag

SEQ ID NO: 872241 - DNA, 33 bp, Homo sapien
ccaaattttacagctaaatgacttggacacaca

SEQ ID NO: 872242 - DNA, 33 bp, Homo sapien
ccaaattttacagctagatgacttggacacaca

SEQ ID NO: 872243 - DNA, 33 bp, Homo sapien
tgggaaggaaggaagccgacaagaaaccccact

SEQ ID NO: 872244 - DNA, 33 bp, Homo sapien
tgggaaggaaggaagctgacaagaaaccccact

SEQ ID NO: 872245 - DNA, 33 bp, Homo sapien
cttagaggtcctcctacgagacactgtggcatt

SEQ ID NO: 872246 - DNA, 33 bp, Homo sapien
cttagaggtcctcctatgagacactgtggcatt

SEQ ID NO: 872247 - DNA, 33 bp, Homo sapien
ggaagtcagtttccaacgagatagcctcaagat

SEQ ID NO: 872248 - DNA, 33 bp, Homo sapien
ggaagtcagtttccaatgagatagcctcaagat

SEQ ID NO: 872249 - DNA, 33 bp, Homo sapien
ggacttaaatgtcttaccaaatgtccttattct

SEQ ID NO: 872250 - DNA, 33 bp, Homo sapien
ggacttaaatgtcttatcaaatgtccttattct

SEQ ID NO: 872251 - DNA, 33 bp, Homo sapien
aatcagaatcctgaaaacttcttcctgcaaggt

SEQ ID NO: 872252 - DNA, 33 bp, Homo sapien
aatcagaatcctgaaaccttcttcctgcaaggt

SEQ ID NO: 872253 - DNA, 33 bp, Homo sapien
cctcatttaatcttcacgggatccctgcaaatt

SEQ ID NO: 872254 - DNA, 33 bp, Homo sapien
cctcatttaatcttcatgggatccctgcaaatt

SEQ ID NO: 872255 - DNA, 33 bp, Homo sapien
atatgggaaagtaacacacgcataatacagggc

SEQ ID NO: 872256 - DNA, 33 bp, Homo sapien
atatgggaaagtaacatacgcataatacagggc

SEQ ID NO: 872257 - DNA, 33 bp, Homo sapien
cctcttcactgtgacccgggtagcatgaagaag

SEQ ID NO: 872258 - DNA, 33 bp, Homo sapien
cctcttcactgtgacctgggtagcatgaagaag

SEQ ID NO: 872259 - DNA, 33 bp, Homo sapien
atgctctaacacctaacagttgactctttgggg

SEQ ID NO: 872260 - DNA, 33 bp, Homo sapien
atgctctaacacctaatagttgactctttgggg

SEQ ID NO: 872261 - DNA, 33 bp, Homo sapien
taaaggcttaagaactaacgcttcattatcgtg

SEQ ID NO: 872262 - DNA, 33 bp, Homo sapien
taaaggcttaagaactcacgcttcattatcgtg

SEQ ID NO: 872263 - DNA, 33 bp, Homo sapien
aataaaatgacttgcacctaactaggcccctag

SEQ ID NO: 872264 - DNA, 33 bp, Homo sapien
aataaaatgacttgcatctaactaggcccctag

SEQ ID NO: 872265 - DNA, 33 bp, Homo sapien
aggttatcattttcccaatacccaagagtcaat

SEQ ID NO: 872266 - DNA, 33 bp, Homo sapien
aggttatcattttcccgatacccaagagtcaat

SEQ ID NO: 872267 - DNA, 33 bp, Homo sapien
cagtagaatcacaaaacgccaaaattggaaagg

SEQ ID NO: 872268 - DNA, 33 bp, Homo sapien
cagtagaatcacaaaatgccaaaattggaaagg

SEQ ID NO: 872269 - DNA, 33 bp, Homo sapien
ttagacttggaattgaacgtaaaggccatccat

SEQ ID NO: 872270 - DNA, 33 bp, Homo sapien
ttagacttggaattgaccgtaaaggccatccat

SEQ ID NO: 872271 - DNA, 33 bp, Homo sapien
ggaatgctgcataactcagccttttcagacatg

SEQ ID NO: 872272 - DNA, 33 bp, Homo sapien
ggaatgctgcataactgagccttttcagacatg

SEQ ID NO: 872273 - DNA, 33 bp, Homo sapien
ttcccactttcttgaaacttcgttcccaggtgt

SEQ ID NO: 872274 - DNA, 33 bp, Homo sapien
ttcccactttcttgaagcttcgttcccaggtgt

SEQ ID NO: 872275 - DNA, 33 bp, Homo sapien
ttgaagtatgatcattcaaaaattccagcattt

SEQ ID NO: 872276 - DNA, 33 bp, Homo sapien
ttgaagtatgatcatttaaaaattccagcattt

SEQ ID NO: 872277 - DNA, 33 bp, Homo sapien
tctagagagatatgacacagagccctttccagg

SEQ ID NO: 872278 - DNA, 33 bp, Homo sapien
tctagagagatatgacgcagagccctttccagg

SEQ ID NO: 872279 - DNA, 33 bp, Homo sapien
attggccaaaacaagccgcatgtcgaagaccaa

SEQ ID NO: 872280 - DNA, 33 bp, Homo sapien
attggccaaaacaagctgcatgtcgaagaccaa

SEQ ID NO: 872281 - DNA, 33 bp, Homo sapien
tttctgaaatcgacacagaggttcccaaacccc

SEQ ID NO: 872282 - DNA, 33 bp, Homo sapien
tttctgaaatcgacacggaggttcccaaacccc

SEQ ID NO: 872283 - DNA, 33 bp, Homo sapien
tggtgagataactaatcatattttcaaaagctg

SEQ ID NO: 872284 - DNA, 33 bp, Homo sapien
tggtgagataactaatgatattttcaaaagctg

SEQ ID NO: 872285 - DNA, 33 bp, Homo sapien
caagatgggtggaaaaagaccatttcatctctt

SEQ ID NO: 872286 - DNA, 33 bp, Homo sapien
caagatgggtggaaaacgaccatttcatctctt

SEQ ID NO: 872287 - DNA, 33 bp, Homo sapien
tgaggggccaaggaaaatgaagtcaggaaggag

SEQ ID NO: 872288 - DNA, 33 bp, Homo sapien
tgaggggccaaggaaagtgaagtcaggaaggag

SEQ ID NO: 872289 - DNA, 33 bp, Homo sapien
aaccaagcctaagtcacatcttcccccatcagt

SEQ ID NO: 872290 - DNA, 33 bp, Homo sapien
aaccaagcctaagtcatatcttcccccatcagt

SEQ ID NO: 872291 - DNA, 33 bp, Homo sapien
gtggtgagggagccagccatgcagataacggga

SEQ ID NO: 872292 - DNA, 33 bp, Homo sapien
gtggtgagggagccagtcatgcagataacggga

SEQ ID NO: 872293 - DNA, 33 bp, Homo sapien
ttttgacttctacttacctcaacacaattctac

SEQ ID NO: 872294 - DNA, 33 bp, Homo sapien
ttttgacttctacttatctcaacacaattctac

SEQ ID NO: 872295 - DNA, 33 bp, Homo sapien
atactgccaaagaagaagctttctgggaaaggc

SEQ ID NO: 872296 - DNA, 33 bp, Homo sapien
atactgccaaagaagaggctttctgggaaaggc

SEQ ID NO: 872297 - DNA, 33 bp, Homo sapien
caaccacgtgattgtagacattaaaatagttca

SEQ ID NO: 872298 - DNA, 33 bp, Homo sapien
caaccacgtgattgtatacattaaaatagttca

SEQ ID NO: 872299 - DNA, 33 bp, Homo sapien
gtatagtgaaaagaacaccgaatttgaaaccag

SEQ ID NO: 872300 - DNA, 33 bp, Homo sapien
gtatagtgaaaagaacgccgaatttgaaaccag

SEQ ID NO: 872301 - DNA, 33 bp, Homo sapien
aacaggtggataaatacaggtcagtgagaaaaa

SEQ ID NO: 872302 - DNA, 33 bp, Homo sapien
aacaggtggataaatataggtcagtgagaaaaa

SEQ ID NO: 872303 - DNA, 33 bp, Homo sapien
caaagtgtcctttcgccctgtcagaccctagag

SEQ ID NO: 872304 - DNA, 33 bp, Homo sapien
caaagtgtcctttcgctctgtcagaccctagag

SEQ ID NO: 872305 - DNA, 33 bp, Homo sapien
cttagaaattaaaacactgctcctcggcagagg

SEQ ID NO: 872306 - DNA, 33 bp, Homo sapien
cttagaaattaaaacattgctcctcggcagagg

SEQ ID NO: 872307 - DNA, 33 bp, Homo sapien
gaaccttaatggccaacgtaatgatagtaagag

SEQ ID NO: 872308 - DNA, 33 bp, Homo sapien
gaaccttaatggccaatgtaatgatagtaagag

SEQ ID NO: 872309 - DNA, 33 bp, Homo sapien
gcaagtatttgctgaacgagtaaatggataatt

SEQ ID NO: 872310 - DNA, 33 bp, Homo sapien
gcaagtatttgctgaatgagtaaatggataatt

SEQ ID NO: 872311 - DNA, 33 bp, Homo sapien
tttatttagcaagttcgcaaaattgttattata

SEQ ID NO: 872312 - DNA, 33 bp, Homo sapien
tttatttagcaagttctcaaaattgttattata

SEQ ID NO: 872313 - DNA, 33 bp, Homo sapien
ggcagcccgaacttgacgtgaataatgaaggaa

SEQ ID NO: 872314 - DNA, 33 bp, Homo sapien
ggcagcccgaacttgatgtgaataatgaaggaa

SEQ ID NO: 872315 - DNA, 33 bp, Homo sapien
ccagttcgcctgttcagctatccccgtcttgat

SEQ ID NO: 872316 - DNA, 33 bp, Homo sapien
ccagttcgcctgttcatctatccccgtcttgat

SEQ ID NO: 872317 - DNA, 33 bp, Homo sapien
aaaatccagagcaagaaagctgagagaattgga

SEQ ID NO: 872318 - DNA, 33 bp, Homo sapien
aaaatccagagcaagagagctgagagaattgga

SEQ ID NO: 872319 - DNA, 33 bp, Homo sapien
ttttaaatttccccccaacatacataccagcca

SEQ ID NO: 872320 - DNA, 33 bp, Homo sapien
ttttaaatttcccccctacatacataccagcca

SEQ ID NO: 872321 - DNA, 33 bp, Homo sapien
cccagttgcctttaacccacttagctcccgcag

SEQ ID NO: 872322 - DNA, 33 bp, Homo sapien
cccagttgcctttaactcacttagctcccgcag

SEQ ID NO: 872323 - DNA, 33 bp, Homo sapien
catctccagaactgaaagtaatgaaagaatcca

SEQ ID NO: 872324 - DNA, 33 bp, Homo sapien
catctccagaactgaaggtaatgaaagaatcca

SEQ ID NO: 872325 - DNA, 33 bp, Homo sapien
acccatatctcatctccaattttaatctccata

SEQ ID NO: 872326 - DNA, 33 bp, Homo sapien
acccatatctcatctcgaattttaatctccata

SEQ ID NO: 872327 - DNA, 33 bp, Homo sapien
ggaaggtagtagacatgaaaatctaaagatact

SEQ ID NO: 872328 - DNA, 33 bp, Homo sapien
ggaaggtagtagacattaaaatctaaagatact

SEQ ID NO: 872329 - DNA, 33 bp, Homo sapien
cctctggtcttgtcaacttaaaaagtggtgagg

SEQ ID NO: 872330 - DNA, 33 bp, Homo sapien
cctctggtcttgtcaatttaaaaagtggtgagg

SEQ ID NO: 872331 - DNA, 33 bp, Homo sapien
tgaccaacaacagaaccaaattgctttgttaca

SEQ ID NO: 872332 - DNA, 33 bp, Homo sapien
tgaccaacaacagaacgaaattgctttgttaca

SEQ ID NO: 872333 - DNA, 33 bp, Homo sapien
tgcagaaactatataaatcattgcttctctact

SEQ ID NO: 872334 - DNA, 33 bp, Homo sapien
tgcagaaactatataactcattgcttctctact

SEQ ID NO: 872335 - DNA, 33 bp, Homo sapien
agtcaaccctgtcatcaccaaatccttatcttt

SEQ ID NO: 872336 - DNA, 33 bp, Homo sapien
agtcaaccctgtcatcgccaaatccttatcttt

SEQ ID NO: 872337 - DNA, 33 bp, Homo sapien
cattttatgtccatagaaaagtcacctgtcttt

SEQ ID NO: 872338 - DNA, 33 bp, Homo sapien
cattttatgtccataggaaagtcacctgtcttt

SEQ ID NO: 872339 - DNA, 33 bp, Homo sapien
gtgcagcatgattagcacctgttaacagaacgc

SEQ ID NO: 872340 - DNA, 33 bp, Homo sapien
gtgcagcatgattagcgcctgttaacagaacgc

SEQ ID NO: 872341 - DNA, 33 bp, Homo sapien
gtggctggcataatgaaatgaaagcagcagcct

SEQ ID NO: 872342 - DNA, 33 bp, Homo sapien
gtggctggcataatgagatgaaagcagcagcct

SEQ ID NO: 872343 - DNA, 33 bp, Homo sapien
ccactgcaattgaccaaatcaaaaaatataaag

SEQ ID NO: 872344 - DNA, 33 bp, Homo sapien
ccactgcaattgaccagatcaaaaaatataaag

SEQ ID NO: 872345 - DNA, 33 bp, Homo sapien
taaaatattttatggcacttgatacagggcttg

SEQ ID NO: 872346 - DNA, 33 bp, Homo sapien
taaaatattttatggcgcttgatacagggcttg

SEQ ID NO: 872347 - DNA, 33 bp, Homo sapien
tcattttatgctctaactgtgaggtacatttat

SEQ ID NO: 872348 - DNA, 33 bp, Homo sapien
tcattttatgctctaattgtgaggtacatttat

SEQ ID NO: 872349 - DNA, 33 bp, Homo sapien
atacagtaccaactcacataaggctttactctt

SEQ ID NO: 872350 - DNA, 33 bp, Homo sapien
atacagtaccaactcatataaggctttactctt

SEQ ID NO: 872351 - DNA, 33 bp, Homo sapien
taaaactgctgtatccaaattatcaggaaatat

SEQ ID NO: 872352 - DNA, 33 bp, Homo sapien
taaaactgctgtatccgaattatcaggaaatat

SEQ ID NO: 872353 - DNA, 33 bp, Homo sapien
gggattgtcctagataaacttatgaccgtcttg

SEQ ID NO: 872354 - DNA, 33 bp, Homo sapien
gggattgtcctagatacacttatgaccgtcttg

SEQ ID NO: 872355 - DNA, 33 bp, Homo sapien
tgcaatctctttcttacaggtcatagccatgga

SEQ ID NO: 872356 - DNA, 33 bp, Homo sapien
tgcaatctctttcttataggtcatagccatgga

SEQ ID NO: 872357 - DNA, 33 bp, Homo sapien
tatatactaagttttcaaagaagaagaagatga

SEQ ID NO: 872358 - DNA, 33 bp, Homo sapien
tatatactaagttttcgaagaagaagaagatga

SEQ ID NO: 872359 - DNA, 33 bp, Homo sapien
aggtgtattatagtaacatttagctctaaagaa

SEQ ID NO: 872360 - DNA, 33 bp, Homo sapien
aggtgtattatagtaagatttagctctaaagaa

SEQ ID NO: 872361 - DNA, 33 bp, Homo sapien
ttgcaaagaaagtacaatgaaggagagggtagg

SEQ ID NO: 872362 - DNA, 33 bp, Homo sapien
ttgcaaagaaagtacactgaaggagagggtagg

SEQ ID NO: 872363 - DNA, 33 bp, Homo sapien
tcaaaatttttgaggccgagcacttctgtaatc

SEQ ID NO: 872364 - DNA, 33 bp, Homo sapien
tcaaaatttttgaggctgagcacttctgtaatc

SEQ ID NO: 872365 - DNA, 33 bp, Homo sapien
cctaacagctttcagagaacaaaatcatttgtg

SEQ ID NO: 872366 - DNA, 33 bp, Homo sapien
cctaacagctttcagataacaaaatcatttgtg

SEQ ID NO: 872367 - DNA, 33 bp, Homo sapien
ggaaatagtataaaaccaccagttagttctgtt

SEQ ID NO: 872368 - DNA, 33 bp, Homo sapien
ggaaatagtataaaacgaccagttagttctgtt

SEQ ID NO: 872369 - DNA, 33 bp, Homo sapien
cttattaaaaaaaagccaaccgatgattttcat

SEQ ID NO: 872370 - DNA, 33 bp, Homo sapien
cttattaaaaaaaagctaaccgatgattttcat

SEQ ID NO: 872371 - DNA, 33 bp, Homo sapien
aaattcagatttgagactaccttggtgcaagta

SEQ ID NO: 872372 - DNA, 33 bp, Homo sapien
aaattcagatttgagattaccttggtgcaagta

SEQ ID NO: 872373 - DNA, 33 bp, Homo sapien
atgtggaggttctaaacagagacgaaagtaatc

SEQ ID NO: 872374 - DNA, 33 bp, Homo sapien
atgtggaggttctaaagagagacgaaagtaatc

SEQ ID NO: 872375 - DNA, 33 bp, Homo sapien
aaaaaggacctattaacgattaagcaattgtat

SEQ ID NO: 872376 - DNA, 33 bp, Homo sapien
aaaaaggacctattaatgattaagcaattgtat

SEQ ID NO: 872377 - DNA, 33 bp, Homo sapien
gactagcatacaaaacggtaacataaggagccc

SEQ ID NO: 872378 - DNA, 33 bp, Homo sapien
gactagcatacaaaactgtaacataaggagccc

SEQ ID NO: 872379 - DNA, 33 bp, Homo sapien
tcaataaagcacttcaaaaagtatctggcccag

SEQ ID NO: 872380 - DNA, 33 bp, Homo sapien
tcaataaagcacttcagaaagtatctggcccag

SEQ ID NO: 872381 - DNA, 33 bp, Homo sapien
tttccatttactacccggatcatagtggacttt

SEQ ID NO: 872382 - DNA, 33 bp, Homo sapien
tttccatttactaccctgatcatagtggacttt

SEQ ID NO: 872383 - DNA, 33 bp, Homo sapien
atcgttttttgctctaccagcagtctctagttg

SEQ ID NO: 872384 - DNA, 33 bp, Homo sapien
atcgttttttgctctatcagcagtctctagttg

SEQ ID NO: 872385 - DNA, 33 bp, Homo sapien
aatgggttcagtcaaacaaccaatgtaagggga

SEQ ID NO: 872386 - DNA, 33 bp, Homo sapien
aatgggttcagtcaaataaccaatgtaagggga

SEQ ID NO: 872387 - DNA, 33 bp, Homo sapien
ccactggaataatcaccgtcactatcatgaatc

SEQ ID NO: 872388 - DNA, 33 bp, Homo sapien
ccactggaataatcactgtcactatcatgaatc

SEQ ID NO: 872389 - DNA, 33 bp, Homo sapien
gctgtgtttcaagacaacatcatacattaaact

SEQ ID NO: 872390 - DNA, 33 bp, Homo sapien
gctgtgtttcaagacatcatcatacattaaact

SEQ ID NO: 872391 - DNA, 33 bp, Homo sapien
ttacacaattaaggcaagaaagaataagttaaa

SEQ ID NO: 872392 - DNA, 33 bp, Homo sapien
ttacacaattaaggcaggaaagaataagttaaa

SEQ ID NO: 872393 - DNA, 33 bp, Homo sapien
gcactgtttaagggcccatgaataagaggctaa

SEQ ID NO: 872394 - DNA, 33 bp, Homo sapien
gcactgtttaagggcctatgaataagaggctaa

SEQ ID NO: 872395 - DNA, 33 bp, Homo sapien
caaatctgctatgcccactactagggctgctcc

SEQ ID NO: 872396 - DNA, 33 bp, Homo sapien
caaatctgctatgcccgctactagggctgctcc

SEQ ID NO: 872397 - DNA, 33 bp, Homo sapien
gtttttagtgtattcacgagattgtgcaatctt

SEQ ID NO: 872398 - DNA, 33 bp, Homo sapien
gtttttagtgtattcatgagattgtgcaatctt

SEQ ID NO: 872399 - DNA, 33 bp, Homo sapien
atttatgaggatagcaataataatgatggttac

SEQ ID NO: 872400 - DNA, 33 bp, Homo sapien
atttatgaggatagcagtaataatgatggttac

SEQ ID NO: 872401 - DNA, 33 bp, Homo sapien
gacgatttagtattggcactttgtggctggcac

SEQ ID NO: 872402 - DNA, 33 bp, Homo sapien
gacgatttagtattggtactttgtggctggcac

SEQ ID NO: 872403 - DNA, 33 bp, Homo sapien
tagtttatatctttcacagtcgacataaggcaa

SEQ ID NO: 872404 - DNA, 33 bp, Homo sapien
tagtttatatctttcatagtcgacataaggcaa

SEQ ID NO: 872405 - DNA, 33 bp, Homo sapien
tgcaataaatagctcacggtgaagttcattcat

SEQ ID NO: 872406 - DNA, 33 bp, Homo sapien
tgcaataaatagctcatggtgaagttcattcat

SEQ ID NO: 872407 - DNA, 33 bp, Homo sapien
cacatgcatcacacaaatatttttaggaaaagg

SEQ ID NO: 872408 - DNA, 33 bp, Homo sapien
cacatgcatcacacaagtatttttaggaaaagg

SEQ ID NO: 872409 - DNA, 33 bp, Homo sapien
ccagaactgttcgatgcattttacagtcattaa

SEQ ID NO: 872410 - DNA, 33 bp, Homo sapien
ccagaactgttcgatgtattttacagtcattaa

SEQ ID NO: 872411 - DNA, 33 bp, Homo sapien
aggtgagtaaacttcacgctggtcactgttccc

SEQ ID NO: 872412 - DNA, 33 bp, Homo sapien
aggtgagtaaacttcatgctggtcactgttccc

SEQ ID NO: 872413 - DNA, 33 bp, Homo sapien
aaggcagaaggatacaaattggcaaggcatgat

SEQ ID NO: 872414 - DNA, 33 bp, Homo sapien
aaggcagaaggatacacattggcaaggcatgat

SEQ ID NO: 872415 - DNA, 33 bp, Homo sapien
agtgggacctgggaaaccaggaagaggaatatg

SEQ ID NO: 872416 - DNA, 33 bp, Homo sapien
agtgggacctgggaaatcaggaagaggaatatg

SEQ ID NO: 872417 - DNA, 33 bp, Homo sapien
aaattaaaggtacacgcatttctcttgactttt

SEQ ID NO: 872418 - DNA, 33 bp, Homo sapien
aaattaaaggtacacgtatttctcttgactttt

SEQ ID NO: 872419 - DNA, 33 bp, Homo sapien
gtcccatcatggtaaaaggtcctctgttggctt

SEQ ID NO: 872420 - DNA, 33 bp, Homo sapien
gtcccatcatggtaaagggtcctctgttggctt

SEQ ID NO: 872421 - DNA, 33 bp, Homo sapien
taaatatctattctccactataactaagctact

SEQ ID NO: 872422 - DNA, 33 bp, Homo sapien
taaatatctattctccgctataactaagctact

SEQ ID NO: 872423 - DNA, 33 bp, Homo sapien
gaaatctgggtaaagaagttgcctatttgtcac

SEQ ID NO: 872424 - DNA, 33 bp, Homo sapien
gaaatctgggtaaagaggttgcctatttgtcac

SEQ ID NO: 872425 - DNA, 33 bp, Homo sapien
tagccaacaggtgcaaaggttgaatccatagtc

SEQ ID NO: 872426 - DNA, 33 bp, Homo sapien
tagccaacaggtgcaagggttgaatccatagtc

SEQ ID NO: 872427 - DNA, 33 bp, Homo sapien
acattggactatcactcaaaatataaaataaat

SEQ ID NO: 872428 - DNA, 33 bp, Homo sapien
acattggactatcactgaaaatataaaataaat

SEQ ID NO: 872429 - DNA, 33 bp, Homo sapien
ttgttgtcgttgcacaaattgttccagcttggc

SEQ ID NO: 872430 - DNA, 33 bp, Homo sapien
ttgttgtcgttgcacagattgttccagcttggc

SEQ ID NO: 872431 - DNA, 33 bp, Homo sapien
cccagacacacacgaaaaatgagggtagtcaaa

SEQ ID NO: 872432 - DNA, 33 bp, Homo sapien
cccagacacacacgaacaatgagggtagtcaaa

SEQ ID NO: 872433 - DNA, 33 bp, Homo sapien
gagcttatcacagtaaaatgcgacagtacacga

SEQ ID NO: 872434 - DNA, 33 bp, Homo sapien
gagcttatcacagtaagatgcgacagtacacga

SEQ ID NO: 872435 - DNA, 33 bp, Homo sapien
tggtttcactacatcactgacttttacagcagg

SEQ ID NO: 872436 - DNA, 33 bp, Homo sapien
tggtttcactacatcattgacttttacagcagg

SEQ ID NO: 872437 - DNA, 33 bp, Homo sapien
ggaactaaggttatgaatactgtaatagtttca

SEQ ID NO: 872438 - DNA, 33 bp, Homo sapien
ggaactaaggttatgagtactgtaatagtttca

SEQ ID NO: 872439 - DNA, 33 bp, Homo sapien
ttccacactgtcagtacgtttgggctttctggc

SEQ ID NO: 872440 - DNA, 33 bp, Homo sapien
ttccacactgtcagtatgtttgggctttctggc

SEQ ID NO: 872441 - DNA, 33 bp, Homo sapien
atgtccaagggtaagacagaaatagaagtccta

SEQ ID NO: 872442 - DNA, 33 bp, Homo sapien
atgtccaagggtaagagagaaatagaagtccta

SEQ ID NO: 872443 - DNA, 33 bp, Homo sapien
acaatcctgagttcaacggtttcctgagatgtt

SEQ ID NO: 872444 - DNA, 33 bp, Homo sapien
acaatcctgagttcaatggtttcctgagatgtt

SEQ ID NO: 872445 - DNA, 33 bp, Homo sapien
gcaatagataattagcaccatattaaaagaggc

SEQ ID NO: 872446 - DNA, 33 bp, Homo sapien
gcaatagataattagcgccatattaaaagaggc

SEQ ID NO: 872447 - DNA, 33 bp, Homo sapien
aacttgctgcttactcaaacctctgtgccttcc

SEQ ID NO: 872448 - DNA, 33 bp, Homo sapien
aacttgctgcttactcgaacctctgtgccttcc

SEQ ID NO: 872449 - DNA, 33 bp, Homo sapien
taacacagtaatgcacacaagaatatgtccaca

SEQ ID NO: 872450 - DNA, 33 bp, Homo sapien
taacacagtaatgcacgcaagaatatgtccaca

SEQ ID NO: 872451 - DNA, 33 bp, Homo sapien
atccataatgctagggaaataagaatggctctc

SEQ ID NO: 872452 - DNA, 33 bp, Homo sapien
atccataatgctaggggaataagaatggctctc

SEQ ID NO: 872453 - DNA, 33 bp, Homo sapien
tacttgtcaacagatacatggaattcagaatgc

SEQ ID NO: 872454 - DNA, 33 bp, Homo sapien
tacttgtcaacagatatatggaattcagaatgc

SEQ ID NO: 872455 - DNA, 33 bp, Homo sapien
gctaaattgtacagataaggataatacttgaaa

SEQ ID NO: 872456 - DNA, 33 bp, Homo sapien
gctaaattgtacagatgaggataatacttgaaa

SEQ ID NO: 872457 - DNA, 33 bp, Homo sapien
catttccttcagagcacattatgtagtgcattt

SEQ ID NO: 872458 - DNA, 33 bp, Homo sapien
catttccttcagagcatattatgtagtgcattt

SEQ ID NO: 872459 - DNA, 33 bp, Homo sapien
catccttgtaaacccaatactgcataaataagt

SEQ ID NO: 872460 - DNA, 33 bp, Homo sapien
catccttgtaaacccactactgcataaataagt

SEQ ID NO: 872461 - DNA, 33 bp, Homo sapien
tttatcccccttaaaacagctgcaccataagca

SEQ ID NO: 872462 - DNA, 33 bp, Homo sapien
tttatcccccttaaaatagctgcaccataagca

SEQ ID NO: 872463 - DNA, 33 bp, Homo sapien
atccaaaaatctgaaacctgttctctctttatt

SEQ ID NO: 872464 - DNA, 33 bp, Homo sapien
atccaaaaatctgaaatctgttctctctttatt

SEQ ID NO: 872465 - DNA, 33 bp, Homo sapien
ttctgtaatttgaagaaaggattgccggtgtat

SEQ ID NO: 872466 - DNA, 33 bp, Homo sapien
ttctgtaatttgaagagaggattgccggtgtat

SEQ ID NO: 872467 - DNA, 33 bp, Homo sapien
aatgaaatgattcacacggagctggtagcatag

SEQ ID NO: 872468 - DNA, 33 bp, Homo sapien
aatgaaatgattcacatggagctggtagcatag

SEQ ID NO: 872469 - DNA, 33 bp, Homo sapien
tagaattccctaaaaccggaacgataattttgg

SEQ ID NO: 872470 - DNA, 33 bp, Homo sapien
tagaattccctaaaactggaacgataattttgg

SEQ ID NO: 872471 - DNA, 33 bp, Homo sapien
cacctacatagaataccaggttaaagaaatctg

SEQ ID NO: 872472 - DNA, 33 bp, Homo sapien
cacctacatagaatacgaggttaaagaaatctg

SEQ ID NO: 872473 - DNA, 33 bp, Homo sapien
ttatcaactgcactaacgatatttcaagttctc

SEQ ID NO: 872474 - DNA, 33 bp, Homo sapien
ttatcaactgcactaatgatatttcaagttctc

SEQ ID NO: 872475 - DNA, 33 bp, Homo sapien
ttttctggttcttttgaaatttttcaccatagt

SEQ ID NO: 872476 - DNA, 33 bp, Homo sapien
ttttctggttcttttgtaatttttcaccatagt

SEQ ID NO: 872477 - DNA, 33 bp, Homo sapien
tgcttactaggtgccacgtactactccagatac

SEQ ID NO: 872478 - DNA, 33 bp, Homo sapien
tgcttactaggtgccatgtactactccagatac

SEQ ID NO: 872479 - DNA, 33 bp, Homo sapien
acatggatatgatctacgccagttagattcctg

SEQ ID NO: 872480 - DNA, 33 bp, Homo sapien
acatggatatgatctatgccagttagattcctg

SEQ ID NO: 872481 - DNA, 33 bp, Homo sapien
tgcctatccttagaacagtgcaggtattttggc

SEQ ID NO: 872482 - DNA, 33 bp, Homo sapien
tgcctatccttagaaccgtgcaggtattttggc

SEQ ID NO: 872483 - DNA, 33 bp, Homo sapien
aaaaggtaaaccacagaatagcagaactgattt

SEQ ID NO: 872484 - DNA, 33 bp, Homo sapien
aaaaggtaaaccacagcatagcagaactgattt

SEQ ID NO: 872485 - DNA, 33 bp, Homo sapien
tggcatgggatgtgaacgggcagtttgtagaag

SEQ ID NO: 872486 - DNA, 33 bp, Homo sapien
tggcatgggatgtgaatgggcagtttgtagaag

SEQ ID NO: 872487 - DNA, 33 bp, Homo sapien
cacactcagagcccaaaattataaagaagagaa

SEQ ID NO: 872488 - DNA, 33 bp, Homo sapien
cacactcagagcccaacattataaagaagagaa

SEQ ID NO: 872489 - DNA, 33 bp, Homo sapien
taaatcttaccatacactaaaaattcatactaa

SEQ ID NO: 872490 - DNA, 33 bp, Homo sapien
taaatcttaccatacattaaaaattcatactaa

SEQ ID NO: 872491 - DNA, 33 bp, Homo sapien
ctagtcttcctttgaacggtccggtcactctcc

SEQ ID NO: 872492 - DNA, 33 bp, Homo sapien
ctagtcttcctttgaatggtccggtcactctcc

SEQ ID NO: 872493 - DNA, 33 bp, Homo sapien; identical to SEQ ID NO: 872491
